United States Patent Application Publication US 2021/0199660 A1 - sequence listing, part 39

SEQ ID NO: 554272 - DNA, 79 bp, Artificial Sequence
  ENSG00000168781_48 (sequence is synthesized)
ttaagctcacaagttcaagaccagcctgatcagcatggagaaaccctgtctctacaaaaaattaaaagaaaaaaaaaaa

SEQ ID NO: 554273 - DNA, 120 bp, Artificial Sequence
  ENSG00000168781_49 (sequence is synthesized)
ttcctctgactgtacagggggccggccagtctccttggatgccacgctggcgcatcacctgcaccagtgctcctaccacctgcgcctcttccggaactggctgcgctcaggccaggatga

SEQ ID NO: 554274 - DNA, 120 bp, Artificial Sequence
  ENSG00000168781_50 (sequence is synthesized)
gtgtcttccgttatggaggacttcttgatgtaaggatcctccttcttctttagcctgtgaacagctttttcccagcattcttttactcttctcaaatgaaagctttctccattctcattg

SEQ ID NO: 554275 - DNA, 120 bp, Artificial Sequence
  ENSG00000168781_51 (sequence is synthesized)
cggagggaggcgggactcaagagtagccttcctcgaggacctgcctttcccatttgctgcctgaagttaatgtttcttgctggccaaatcagggacatgccggcattccccacccacagc

SEQ ID NO: 554276 - DNA, 120 bp, Artificial Sequence
  ENSG00000168781_52 (sequence is synthesized)
ggcggtgggggagtggctggggctgggggcggtatcggaccgggtgggcgcggtagagtgggcttggtgggttcccagggctggggttcgttccgggtgggctccgctttgggaagaggc

SEQ ID NO: 554277 - DNA, 120 bp, Artificial Sequence
  ENSG00000168781_53 (sequence is synthesized)
ccagcggaggggccttagtgtcagcgtagggagagtgaggcggcgaaggcgggggcgggcaaaggctagtggagtcgggatgcgagggcggtattcgtgacccggagctgtgcgaggaga

SEQ ID NO: 554278 - DNA, 120 bp, Artificial Sequence
  ENSG00000168781_54 (sequence is synthesized)
caagataggtataacttcctgttgaccagtgagatgggtggctttgggatcatgcgtgttcggggaacccactgtgagaggggcagagtcaaaccaacatgcctaatttttgtaccataa

SEQ ID NO: 554279 - DNA, 120 bp, Artificial Sequence
  ENSG00000168781_55 (sequence is synthesized)
atgtgtattctagagccctcaagaaaagaacttaggtctgttttattttctctggactcttaaaatcaatccctcttagacgactatatgctagagcagtgcccttacctgaaggcctag

SEQ ID NO: 554280 - DNA, 120 bp, Artificial Sequence
  ENSG00000168781_56 (sequence is synthesized)
aactgctagtatgcccagtaacctaagaatgctcactggagtgaaccaacatacagagctgtattgtgagtagtctctgtgtaataaactcacaggaatctgggcaattagtgccgagcc

SEQ ID NO: 554281 - DNA, 120 bp, Artificial Sequence
  ENSG00000168781_57 (sequence is synthesized)
tggacctcatccccttgcggggacggcgctgcaggaggtcgggagacctcccccagccttccctagccattggcctacagccccgggctgtgtccaccactcacctggcatcctgcacac

SEQ ID NO: 554282 - DNA, 120 bp, Artificial Sequence
  ENSG00000168781_58 (sequence is synthesized)
aggtgtccctccctacctcaccttcctgtcttgccttctgtctttgccttttgggatctaggggctcagacactatctgggtgggatgtgtgtgttttgggggttgtgtgattgggccct

SEQ ID NO: 554283 - DNA, 120 bp, Artificial Sequence
  ENSG00000168781_59 (sequence is synthesized)
gggatggggtacttgggaagcaggtggaagtatatggggaggaggtcctagaaaataacatgatgtgaatgtgattggctttcatattcaggtgaagataatgagtggaggatacagaca

SEQ ID NO: 554284 - DNA, 120 bp, Artificial Sequence
  ENSG00000168781_60 (sequence is synthesized)
gcaggatgcgccctttggccctgaggactacgatcaggtcaggctcaaaaatagcctggatccccaattcctagaattctaaatagtagggatcaataataacagtatttactgcatgcc

SEQ ID NO: 554285 - DNA, 120 bp, Artificial Sequence
  ENSG00000168781_61 (sequence is synthesized)
aggcactgttttagttattttacacatatattatttaatccttacagcaaccctttgagataagtacaggtccacaatctcttatgcataattttgaaaattaaaaagatttttttcttg

SEQ ID NO: 554286 - DNA, 120 bp, Artificial Sequence
  ENSG00000168781_62 (sequence is synthesized)
gggagggctgggaggggtgttggatggagggaggggcatgtcagggagccttgggggaatcaaagctgggacagcctggggaaccaagaatagacaagattttgggatggaaaggagaga

SEQ ID NO: 554287 - DNA, 120 bp, Artificial Sequence
  ENSG00000168781_63 (sequence is synthesized)
agtctttgaggtgggaggagggagtttgcagaagggtgggaacagggttaactgactgtgtgagtgatttagctgttatctcaggtactcccgaggcgtgctctccccaggtcgccacgt

SEQ ID NO: 554288 - DNA, 120 bp, Artificial Sequence
  ENSG00000168785_0 (sequence is synthesized)
aagcgagcggcgtctccaccagcatctgccgcggccgcctttgcccgaagcccggggacgaaccgacggaccgaccgcctggcgcacggacgcgggcgctcgctttgtgttcggggctag

SEQ ID NO: 554289 - DNA, 120 bp, Artificial Sequence
  ENSG00000168785_1 (sequence is synthesized)
cgtcggcgaggcttgagcttgcagcgcgcggcttccctgctttctcgcggccaccccggctccggcggcctcggcgcgcgaggggctggaggtgcgggagccgctctccgccggtcggtc

SEQ ID NO: 554290 - DNA, 120 bp, Artificial Sequence
  ENSG00000168785_2 (sequence is synthesized)
cccgcgcggctgagcccaggccgccagcgccgcggccccgtgcggtgtccctgagctcctgctccccgccgggctgctccgagcaacggtgcttcggagctccaaactcgggctgccggg

SEQ ID NO: 554291 - DNA, 120 bp, Artificial Sequence
  ENSG00000168785_3 (sequence is synthesized)
gcaagtgtcttcatgaacccagaggatgtccgggaagcactacaagggtcctgaagtcagttgttgcatcaaatacttcatatttggcttcaatgtcatattttggtttttgggaataac

SEQ ID NO: 554292 - DNA, 120 bp, Artificial Sequence
  ENSG00000168785_4 (sequence is synthesized)
atttcttggaattggactgtgggcatggaatgaaaaaggagttctgtccaacatctcttccatcaccgatctcggcggctttgacccagtttggctcttccttgtggtgggaggagtgat

SEQ ID NO: 554293 - DNA, 120 bp, Artificial Sequence
  ENSG00000168785_5 (sequence is synthesized)
gttcattttgggatttgcagggtgcattggagcgctacgggaaaacactttccttctcaagtttttttctgtgttcctgggaattattttcttcctggagctcactgccggagttctagc

SEQ ID NO: 554294 - DNA, 120 bp, Artificial Sequence
  ENSG00000168785_6 (sequence is synthesized)
atttgttttcaaagactggatcaaagaccagctgtatttctttataaacaacaacatcagagcatatcgggatgacattgatttgcaaaacctcatagacttcacccaggaatattggca

SEQ ID NO: 554295 - DNA, 120 bp, Artificial Sequence
  ENSG00000168785_7 (sequence is synthesized)
gtgctgtggggcttttggagctgatgattggaacctaaatatttacttcaattgcacagattccaatgcaagtcgagagcgatgtggcgttccattctcctgctgcactaaagatcccgc

SEQ ID NO: 554296 - DNA, 120 bp, Artificial Sequence
  ENSG00000168785_8 (sequence is synthesized)
agaagatgtcatcaacactcagtgtggctatgatgccaggcaaaaaccagaagttgaccagcagattgtaatctacacgaaaggctgtgtgccccagtttgagaagtggttgcaggacaa

SEQ ID NO: 554297 - DNA, 120 bp, Artificial Sequence
  ENSG00000168785_9 (sequence is synthesized)
tttaaccatcgttgctggtattttcataggcattgcattgctgcagatatttgggatatgcctggcccagaatttggttagcgatatcgaagctgtcagggcgagctggtagaccccctg

SEQ ID NO: 554298 - DNA, 120 bp, Artificial Sequence
  ENSG00000168785_10 (sequence is synthesized)
caaccgctgctgcaagacactggacagacccagctttcgggaccctcccgcgtgccgaactgatcttcgagctgcatggacctaatcacagatgcagcctgcagtctcgcctaatggagc

SEQ ID NO: 554299 - DNA, 120 bp, Artificial Sequence
  ENSG00000168785_11 (sequence is synthesized)
tgccattaggggagtgtaaaactgggaaatgctgctcactgacagaattaaaaaaaaaaataaccagtatgaaagtcgttgcgccgtgaatctctactgtagccatgaatttatggacag

SEQ ID NO: 554300 - DNA, 120 bp, Artificial Sequence
  ENSG00000168785_12 (sequence is synthesized)
ttagatgcttaccaaaaaagaaaaaaagggagggtaggggacccagatgtacttgaatgtgcagaaaatacattcttgtcctcatcttccgtaattggagggctgggagaggcagctttg

SEQ ID NO: 554301 - DNA, 120 bp, Artificial Sequence
  ENSG00000168785_13 (sequence is synthesized)
catccctccatgtacattttaggaaacacttgcaactctcatctgaagaagaaaacaactcatctttgggttcagattttgtgatggtattcagcaagtcacttgggcgagcacacttgg

SEQ ID NO: 554302 - DNA, 120 bp, Artificial Sequence
  ENSG00000168785_14 (sequence is synthesized)
tctatcctggaaagtctccttataagagaagttgtgtatttcatgtgcaccgagcaagggcattggaagacgtcatgaggctgtattttagcaggactgatcgtttttctaagtagacct

SEQ ID NO: 554303 - DNA, 120 bp, Artificial Sequence
  ENSG00000168785_15 (sequence is synthesized)
gagctttgtttatcagtgaaattcaaggagaaaatgaggttaatgaagaggtatcagttaaatatccccttcttctcaccctgccaaaattagcagttggatttttggaaactctggaat

SEQ ID NO: 554304 - DNA, 120 bp, Artificial Sequence
  ENSG00000168785_16 (sequence is synthesized)
attctgggtcattttgttttgtatgtttgttgtttttcgtcttccaaaggtgaaagctatgatacagttccacttaaattttagtgttttcttactcagctcaagcattaatttttgatt

SEQ ID NO: 554305 - DNA, 120 bp, Artificial Sequence
  ENSG00000168785_17 (sequence is synthesized)
aagtcttaatctgcatgacctgtgaatctgaatccatcatctccctttcctgccagcttttctacaaacattgaaatatgttatttggtcagcacttatttcctaggttcacagccttgg

SEQ ID NO: 554306 - DNA, 120 bp, Artificial Sequence
  ENSG00000168785_18 (sequence is synthesized)
gaggttgtggcatgtcctcccagtctggctgggaagagaccagctgtaccatccaaatgcttccctggtcttgatgatctcttccagagtcgatctgagtggccttttctgcaccctccc

SEQ ID NO: 554307 - DNA, 120 bp, Artificial Sequence
  ENSG00000168785_19 (sequence is synthesized)
cttctttctctttgaatggaattaaacccaatttggaaacaacattgacccagtcaaaagcttctaatggtttctttttcttcctccagttttagtttgcttttattaaaaaaagaaaat

SEQ ID NO: 554308 - DNA, 120 bp, Artificial Sequence
  ENSG00000168785_20 (sequence is synthesized)
agtgcatggccatagctccttcagttctcttattgcagactaaccatcaggatggtatcaaagcacaaatactttggaggggaatgcgttgaactggggcaagtactctgtaacacaaag

SEQ ID NO: 554309 - DNA, 120 bp, Artificial Sequence
  ENSG00000168785_21 (sequence is synthesized)
tgggaaaccacttcctggtgctgccgctcctgcccccactttaggtgggagggacgagttttgccctctagattttaatccagctggtgtccaccggatgttgccctcctggggagcaga

SEQ ID NO: 554310 - DNA, 120 bp, Artificial Sequence
  ENSG00000168785_22 (sequence is synthesized)
tatcagtctgtggaactctgggaaaaccacaggcacatttttcggtgcggacagatttgccagcacataactgggcagccagctagaatactttgtggaaattaagcgaggttttccatt

SEQ ID NO: 554311 - DNA, 120 bp, Artificial Sequence
  ENSG00000168785_23 (sequence is synthesized)
tcagccccatggtgcatggtggtggccgatgaatgtgtcagtctgctcagagaaaggacaaaaaggaaattattttcaaaactgtgttcactgtttgggtgtgtgtatggctctgcatgt

SEQ ID NO: 554312 - DNA, 120 bp, Artificial Sequence
  ENSG00000168785_24 (sequence is synthesized)
gtgtgtttttgtctctgtataggtagaggtattcacatcttactccgactgtaaggttgtcttacttcatctctgcccccaccacagttgccattttgtaatgtccttccaacatggaga

SEQ ID NO: 554313 - DNA, 120 bp, Artificial Sequence
  ENSG00000168785_25 (sequence is synthesized)
agacacgagctctctccagttggcatcatttgtcttttttgttgattgcctcattctccagtgaactccatctggccaattgattcagaatcaggcaagatccctgccctttggcacatc

SEQ ID NO: 554314 - DNA, 120 bp, Artificial Sequence
  ENSG00000168785_26 (sequence is synthesized)
cactgaaaggccaaacagcaagtccgagtgagttttaaatattaattaatcaccctttattttttacacttgagagtgattgtaataaaggctgtcattaataaacttggttctacctta

SEQ ID NO: 554315 - DNA, 120 bp, Artificial Sequence
  ENSG00000168785_27 (sequence is synthesized)
tttgtgtaggatgcagatgccgtggtatatggtcctgtaattgcacgtaaataacgtttcctgcacgctctcctcttcagctggaaagcgctccctgtgcgtaatggactgtttttggga

SEQ ID NO: 554316 - DNA, 120 bp, Artificial Sequence
  ENSG00000168785_28 (sequence is synthesized)
ctggtcttacagataagttcacaagcagctggttctctcttgtggatacatgggaccacagtggctgtagctagtttcctaagactccatctgccttatctgccagatccttcctttgcc

SEQ ID NO: 554317 - DNA, 120 bp, Artificial Sequence
  ENSG00000168785_29 (sequence is synthesized)
acacacacacacacagtgtctctctctctctccctccctctctcatacacacacaaccaaatgcttcattcttcacctagtcagaaacctggggagcccccaggagagctctgtccctga

SEQ ID NO: 554318 - DNA, 120 bp, Artificial Sequence
  ENSG00000168785_30 (sequence is synthesized)
ttgccacctgccaacctgccagtcttcttggcttgaggcatctcagtgctccagtgctcagctcaccttgccagctttcctgtagcctgattgggtcctggtcatactcatctgttgcca

SEQ ID NO: 554319 - DNA, 83 bp, Artificial Sequence
  ENSG00000168785_31 (sequence is synthesized)
tgtagcctgattgggtcctggtcatactcatctgttgccactatttcatcagtttcggcctccatgccccaaaatgtgggatc

SEQ ID NO: 554320 - DNA, 120 bp, Artificial Sequence
  ENSG00000168785_32 (sequence is synthesized)
actgcacctgctcagtccccttaattgtgatttactttaatatagtttcatttatagtggtggcccctttaatatagtttatcatttcttacagttgaagagtccagtgttaactgaaca

SEQ ID NO: 554321 - DNA, 120 bp, Artificial Sequence
  ENSG00000168785_33 (sequence is synthesized)
ggcagaaaactacacatttctctaaatcagcaccttaatttataaagtctcatgttggaaatgaagagaattgtgttgtttcttggcttttaagacttggaaaatatcttaaatggcctc

SEQ ID NO: 554322 - DNA, 120 bp, Artificial Sequence
  ENSG00000168785_34 (sequence is synthesized)
tctccatttaggacaaacaataaaaacttgcctggaataatcttcgaacagaaggtatgagataagtagtaagtaaacgtccacaggactccaaatagctctaaagatctgattccccta

SEQ ID NO: 554323 - DNA, 120 bp, Artificial Sequence
  ENSG00000168785_35 (sequence is synthesized)
ggagacttgctgagggaaaatctaggaactaagatactgcaaaatggaaatagaccttcttggttgaccgaggctctagggtgaagcctgtgagtcagtgtctgcacctttggaaataga

SEQ ID NO: 554324 - DNA, 120 bp, Artificial Sequence
  ENSG00000168785_36 (sequence is synthesized)
ggaaattagctcaacagggcttggggcatgtaggtatctgccaaatattttatatgaattgaatttggactcaatttttggtatgtataatatgtaacatgaagagaaaatttaccaggg

SEQ ID NO: 554325 - DNA, 120 bp, Artificial Sequence
  ENSG00000168785_37 (sequence is synthesized)
gaactggaaaatgcacttaacttttatggaggtgagaacaaaaactgaattaaaatctttccctgacttggtgtttcctgtgtatgctcatgcatgctagctataattttgtcatttctg

SEQ ID NO: 554326 - DNA, 120 bp, Artificial Sequence
  ENSG00000168785_38 (sequence is synthesized)
tactgtgataattcataattcatatttacatgcttaaggtggggcctaatacagggcagggcgttatttacactgtagggtaggcattgagcagaagtggtgtgatattttttctgttca

SEQ ID NO: 554327 - DNA, 120 bp, Artificial Sequence
  ENSG00000168785_39 (sequence is synthesized)
tttttctagattggggaaagtttaaattgaaattattggcatcactgatgataattaagaactgtttaaattccatttctggcgaattcctgaaggatatataatcaggaactctaggga

SEQ ID NO: 554328 - DNA, 120 bp, Artificial Sequence
  ENSG00000168785_40 (sequence is synthesized)
aacctgaagggctgagctggagggtctagaattggggccttaacctgggagtccaaaaactttgccaaacacttatttccaccttccactcctcctcccgtgcccaccctcacagagcag

SEQ ID NO: 554329 - DNA, 120 bp, Artificial Sequence
  ENSG00000168785_41 (sequence is synthesized)
ttcgaaggcaaggataccccttgttcttactcatccttgtttctgcaaagcccacctacctcagggcctgactcattgtgggtcattcagtagatgtttgctgaatgaataaacattgtt

SEQ ID NO: 554330 - DNA, 120 bp, Artificial Sequence
  ENSG00000168785_42 (sequence is synthesized)
tgtcttttgttcttttaatgagtaactgctgtttcctttgcacccctccccaatacatttttctcttggctggcagctccttgtctgcttgctgaagatagaaccgcagaccacctgagc

SEQ ID NO: 554331 - DNA, 120 bp, Artificial Sequence
  ENSG00000168785_43 (sequence is synthesized)
accccctgcctcctcagctgctcactgttcttctgcatgtggccttcaggacctctgcccagcagttgtggcccatgtcaccctctctgctgttgtcaccagaaatttacccgcactgta

SEQ ID NO: 554332 - DNA, 120 bp, Artificial Sequence
  ENSG00000168785_44 (sequence is synthesized)
ccctctggtccttcacagctcatttctcataatctattttaacaacaaagtttgagaaggttaagaatacaggatggtaggaggtggaaaaaacagtgggcgtgagcagtaagtcgatat

SEQ ID NO: 554333 - DNA, 120 bp, Artificial Sequence
  ENSG00000168785_45 (sequence is synthesized)
gactaagctgagactcttctgagtcttctagatggaaggggaatttctccagagttacgggcagttaccacgttgcctcatggtcttgagcccctcttttaaaacccctgttgtctacat

SEQ ID NO: 554334 - DNA, 120 bp, Artificial Sequence
  ENSG00000168785_46 (sequence is synthesized)
taagcggaagtctccccttggctgcattttgatgtcacttaaaatgttgctggggcccatgcttcctagaggaaggcaagcacagctagcattcccaggaaagccctcaactcaggggtt

SEQ ID NO: 554335 - DNA, 120 bp, Artificial Sequence
  ENSG00000168785_47 (sequence is synthesized)
tcattttgtttttatgatgggaaataactttcatttcgcggtcactgcccaccccactacttcctctttgaccccttcatctaagatgaacacatctgttattttaccctgtatagcagg

SEQ ID NO: 554336 - DNA, 120 bp, Artificial Sequence
  ENSG00000168785_48 (sequence is synthesized)
tgcaaaagagaattaaaatggtgtctgaatccataaaaggaatatattgcatagagaatcaaggccacagtaacaagtgacaggcgatcttaaaatattggaataatctatctttcaagt

SEQ ID NO: 554337 - DNA, 120 bp, Artificial Sequence
  ENSG00000168785_49 (sequence is synthesized)
tacagaagcttactagagataggggcaggtcattgttacaagcatctggcagtacattaatcatgagaaattaattaggccttaatgtgggtctaatgagaaatccttattatccatgtt

SEQ ID NO: 554338 - DNA, 120 bp, Artificial Sequence
  ENSG00000168785_50 (sequence is synthesized)
tgcttatgggctttgttggttaattatcaaatggaacactagagaccctaaaatgtgattataaaatgatttttaaaagtcctttcttggagtgtaatattctattaatgaatcagcaga

SEQ ID NO: 554339 - DNA, 120 bp, Artificial Sequence
  ENSG00000168785_51 (sequence is synthesized)
aactgaagattatctgctttggagatgtgtaacaatccaatgtaattacaaacctgtttagagaggaaccatttagctatatatgatcaaaatagcccttataactgttctctgtgtatg

SEQ ID NO: 554340 - DNA, 120 bp, Artificial Sequence
  ENSG00000168785_52 (sequence is synthesized)
gcaccatctcgggctttgtgtaggatgcagatgccgtggtatatggtcctgtaattgcacgtaaataacgtttcctgcacgctctcctcttcagctggaaagcgctccctgaggacttaa

SEQ ID NO: 554341 - DNA, 120 bp, Artificial Sequence
  ENSG00000168785_53 (sequence is synthesized)
atgcattggacagtggacaaagaccatttaaatggattacaaaaagcagacttcaccaggcagagcggcctctaacttcttcagtaatgttgccatttaccatgtgtctgttggggatca

SEQ ID NO: 554342 - DNA, 120 bp, Artificial Sequence
  ENSG00000168785_54 (sequence is synthesized)
cagggtgcattggagcgctacgggaaaacactttccttctcaagtttgtaagtattccactctctactctcagattgagagccaaaactttaccttccatcaggaggtcaccctatctac

SEQ ID NO: 554343 - DNA, 120 bp, Artificial Sequence
  ENSG00000168785_55 (sequence is synthesized)
aggcaagacagtgagctgtaccaaaggcactggccaaagtagggcccaggtcattattttcttttgagagagctctctagccctgattcccagttgtgcctccttaataagtacaacacc

SEQ ID NO: 554344 - DNA, 120 bp, Artificial Sequence
  ENSG00000168785_56 (sequence is synthesized)
gttgccgcggctggtctgtgccatgctcagcgtgtatcttcttgcaccatctcgggctttgtgtaggatgcagatgccgtggtatatggtcctgtaattgcacgtaaataacgtttcctg

SEQ ID NO: 554345 - DNA, 120 bp, Artificial Sequence
  ENSG00000168785_57 (sequence is synthesized)
aggacaaacaataaaaacttgcctggaataatcttcgaacagaagttttctgtgttcctgggaattattttcttcctggagctcactgccggagttctagcatttgttttcaaagactgg

SEQ ID NO: 554346 - DNA, 120 bp, Artificial Sequence
  ENSG00000168792_0 (sequence is synthesized)
aaagcgcggagctcgccgagtagacggccccgccgcccgctgcccgccggggctctccagcttcgccatgccgccgtggggcgccgccctcgcgctcatcttggccgtgctcgcccttct

SEQ ID NO: 554347 - DNA, 120 bp, Artificial Sequence
  ENSG00000168792_1 (sequence is synthesized)
gctcgcccttctcggcctgctcggcccgcggctccggggaccctgggggcgcgccgtcggagagaggaccctgccgggggcccaagaccgagacgacggggaggaggcggacggcggagg

SEQ ID NO: 554348 - DNA, 120 bp, Artificial Sequence
  ENSG00000168792_2 (sequence is synthesized)
accagttcagcgacgggcgcgagccactgccgggagggtgcagccttgtttgcaagccgtcggccctggcccagtgcctgctgcgcgccctgcggcgctcagaggcgctggaggccggcc

SEQ ID NO: 554349 - DNA, 120 bp, Artificial Sequence
  ENSG00000168792_3 (sequence is synthesized)
cgcgctcctggttctccgggccccacctgcagaccctctgccacttcgtcctgcccgtagcgcctgggcctgagctggcccgggagtacctgcagttggcggacgatgggctagtggccc

SEQ ID NO: 554350 - DNA, 120 bp, Artificial Sequence
  ENSG00000168792_4 (sequence is synthesized)
tggactgggtggtaggaccttgtgttcggggccgccggatcaccagcgccgggggccttcctgcggtgcttctggtgatccccaatgcgtggggtcgcctcacccgcaacgtgctcggcc

SEQ ID NO: 554351 - DNA, 120 bp, Artificial Sequence
  ENSG00000168792_5 (sequence is synthesized)
tttgcttgctcgccctggagcgcggctactacccggtcatcttccatcgccgcggccaccacggttgcccactggtcagcccccggctgcagcctttcggggacccgtccgacctcaagg

SEQ ID NO: 554352 - DNA, 120 bp, Artificial Sequence
  ENSG00000168792_6 (sequence is synthesized)
aggcggtcacatacatccgcttccgacacccggcggcgccgctgttcgcggtgagcgaaggctcgggctcggcgctgctcctgtcctacctgggcgagtgcggctcctccagctacgtga

SEQ ID NO: 554353 - DNA, 120 bp, Artificial Sequence
  ENSG00000168792_7 (sequence is synthesized)
caggcgccgcctgcatctcgcccgtgctgcgctgccgagagtggttcgaggccggcctgccctggccctacgagcggggctttctgctccaccagaagatcgccctcagcaggtatgcca

SEQ ID NO: 554354 - DNA, 120 bp, Artificial Sequence
  ENSG00000168792_8 (sequence is synthesized)
cagccctggaggacactgtggacaccagcagactgttcaggagccgttcccttcgagagtttgaggaggctctcttctgccacaccaaaagcttccccatcagctgggatacctactggg

SEQ ID NO: 554355 - DNA, 120 bp, Artificial Sequence
  ENSG00000168792_9 (sequence is synthesized)
accgcaacgacccgctccgggatgtcgatgaggcagccgtgcctgtgctgtgtatctgcagtgctgacgaccccgtgtgtggacccccagaccacactctgacaactgaactcttccaca

SEQ ID NO: 554356 - DNA, 120 bp, Artificial Sequence
  ENSG00000168792_10 (sequence is synthesized)
gcaacccctacttcttcctcctgctcagtcgccacggaggccactgtggcttcctgcgccaggagcccttgccagcctggagccatgaggtcatcttggagtccttccgggccttgactg

SEQ ID NO: 554357 - DNA, 120 bp, Artificial Sequence
  ENSG00000168792_11 (sequence is synthesized)
agttcttccgaacggaggagaggattaaagggctgagcaggcacagagcttccttccttgggggccgtcgtcgtgggggagccttgcagaggcgggaagtctcttcctcttccaacctgg

SEQ ID NO: 554358 - DNA, 120 bp, Artificial Sequence
  ENSG00000168792_12 (sequence is synthesized)
aggagatctttaactggaagcgatcatacacaaggtgaaagacctggcctgagaacccccaagtcctgcaaagaaaaacagagctgggcaagggggagtcctggaaagatggggcggact

SEQ ID NO: 554359 - DNA, 120 bp, Artificial Sequence
  ENSG00000168792_13 (sequence is synthesized)
gaacagagggagctccagctctgtgctcctcattcagtccctctctcttaaattggtgccttgaaagagaaggaacgtcctgcgagcctgcactcacttcatcctcagcagaactcctgc

SEQ ID NO: 554360 - DNA, 120 bp, Artificial Sequence
  ENSG00000168792_14 (sequence is synthesized)
caacatatccctactcatccggtcagcagcggcgcgttccagtcactgtcacctgtcactgacatcacaagccaaaggatagcactttttcaatccatggactcaggagaaaatgccctc

SEQ ID NO: 554361 - DNA, 120 bp, Artificial Sequence
  ENSG00000168792_15 (sequence is synthesized)
ttactggcagtggctagagggatgagacgtttgtgtatgtcactgggcagtgaccccgattctcaagctggagccatttgatgtcatgaggacaggatgtttgtgtctcggccccacttc

SEQ ID NO: 554362 - DNA, 120 bp, Artificial Sequence
  ENSG00000168792_16 (sequence is synthesized)
cctcatttgctctgtggttgtggcgccctgctttgaccgaatgctctggcaactgcggcagcaggcttgtgtgtgtgagaagggcggcagaggcagtggggctggctcgctgagggctga

SEQ ID NO: 554363 - DNA, 120 bp, Artificial Sequence
  ENSG00000168792_17 (sequence is synthesized)
gcaggtagagaatgtgaatgtccatctcaaggaatgcgaagttccaatctctcagaggagctctgcaagtctcagctaggaatggggctgatctggcccccaagcctcactggagagatc

SEQ ID NO: 554364 - DNA, 120 bp, Artificial Sequence
  ENSG00000168792_18 (sequence is synthesized)
ccaagggtattttacaaataggaagcgctctcatgcaggatctgagggctttgctagaccatggttcaaggagtcagaatcttggctaccctacatgctccctctggcaccatttcaggg

SEQ ID NO: 554365 - DNA, 120 bp, Artificial Sequence
  ENSG00000168792_19 (sequence is synthesized)
gattactccagagagctgcagccagaactgtttatctcctgagatatggactttctctaagtcaggaaaagcacaaacctcataacttaggtgttttctggttggttgctcccttttctg

SEQ ID NO: 554366 - DNA, 120 bp, Artificial Sequence
  ENSG00000168792_20 (sequence is synthesized)
atcctactactggcctctccctttccagagccaggagacacatctgggaccagaggaaacaaaagcaccaagaggttgactagagctgaccagtgatttacaaatatttcatattccaat

SEQ ID NO: 554367 - DNA, 120 bp, Artificial Sequence
  ENSG00000168792_21 (sequence is synthesized)
gcttcgtctgctcaattattcaaaaggccatccctgtaaaggcagaaaagcttcctcttagatctggccactcagcaaataagtgggtatttggttttatgaagaataatgctgaggact

SEQ ID NO: 554368 - DNA, 120 bp, Artificial Sequence
  ENSG00000168792_22 (sequence is synthesized)
agagatatagtatatcagagataatatatagtatacaggttgatctaaatattctggtttggattaggcaattaaaatttttttggcaacaggacatatgtttccatgtgttgctaagat

SEQ ID NO: 554369 - DNA, 120 bp, Artificial Sequence
  ENSG00000168792_23 (sequence is synthesized)
tcaaaaactttgccctgaagttttattttaatcgtcattgagaaagagggctcctgttctgacctcaaaaacagcaaagctgttgtaaagaagagagctgcttatacgaaaacccacatt

SEQ ID NO: 554370 - DNA, 120 bp, Artificial Sequence
  ENSG00000168792_24 (sequence is synthesized)
ccaagacttggtataaggtattcctgaggccttgatttcaggtttggataatcttgccccagattctagatcttgttcttctagatcaaatcagaagaaactttgaaataactccaagaa

SEQ ID NO: 554371 - DNA, 120 bp, Artificial Sequence
  ENSG00000168792_25 (sequence is synthesized)
agaatctgcactgaaatgtagacagcactcgataatctaagggacattatcttgttgtgaaaaattatctccctcctggctgggagcggtggcacacacctataatctcagcactttggg

SEQ ID NO: 554372 - DNA, 120 bp, Artificial Sequence
  ENSG00000168792_26 (sequence is synthesized)
aaaaaagaaaagaaaaattatctcccttctccccacttcttgtttctcctcctccatattcctcatctgacgttcttttgccgtttctaagcaggataaataaaaaggaactgaaattaa

SEQ ID NO: 554373 - DNA, 120 bp, Artificial Sequence
  ENSG00000168795_0 (sequence is synthesized)
gtcacttccgcttatcctcgggcgccgccgccgtgttctcagagtgctgcggcgaactggctggaggagctaggggactagaggcggggtgggaggggggcgggtggaagggggaggaag

SEQ ID NO: 554374 - DNA, 120 bp, Artificial Sequence
  ENSG00000168795_1 (sequence is synthesized)
tcccgtaacggagacgctggtcaggacgttcccacctcctctgacactgccgagtccgatcggagaggggtcaccgcctccttcagcgaggaggaggggggcggagcccgactcaggatc

SEQ ID NO: 554375 - DNA, 120 bp, Artificial Sequence
  ENSG00000168795_2 (sequence is synthesized)
atggattttcctggtcactttgaacaaatcttccagcagctgaactaccagagacttcatggccagctctgtgattgtgtcattgtagtggggaatagacactttaaagcccaccgctcc

SEQ ID NO: 554376 - DNA, 120 bp, Artificial Sequence
  ENSG00000168795_3 (sequence is synthesized)
gtgctggcagcatgcagcacgcatttccgagccctgttctcagtggcagaaggagatcagaccatgaacatgatccagctggatagcgaggtggtgacagcagaggcctttgctgcactg

SEQ ID NO: 554377 - DNA, 120 bp, Artificial Sequence
  ENSG00000168795_4 (sequence is synthesized)
attgacatgatgtatacctccaccctcatgctgggggagagcaatgtaatggatgtcttattggcagcctctcacctgcatttgaactctgttgttaaggcatgtaaacattacttaacg

SEQ ID NO: 554378 - DNA, 120 bp, Artificial Sequence
  ENSG00000168795_5 (sequence is synthesized)
acaaggacgctgcccatgtctccccccagtgagcgcgttcaggagcagagcgcccgcatgcagcgctcctttatgctacagcagctgggactaagcatcgtgagctcagccctcaattcc

SEQ ID NO: 554379 - DNA, 120 bp, Artificial Sequence
  ENSG00000168795_6 (sequence is synthesized)
agccagaatggcgaggagcagccagcccccatgagctcttccatgcgcagtaacctggatcagcgcacgcccttccccatgagacgccttcataagcgcaagcagtctgcagaggagcgg

SEQ ID NO: 554380 - DNA, 120 bp, Artificial Sequence
  ENSG00000168795_7 (sequence is synthesized)
gccaggcagcgcctccgaccctccatagatgagtctgccatttcagatgttacaccggagaatgggccttcaggggttcattctcgggaggagttcttttcaccagattctctgaaaatt

SEQ ID NO: 554381 - DNA, 120 bp, Artificial Sequence
  ENSG00000168795_8 (sequence is synthesized)
gtggataatcctaaagctgatggaatgactgataaccaggaagatagtgcgatcatgtttgatcagtcttttggcactcaagaagatgcccaggtgcccagccagtctgataacagtgct

SEQ ID NO: 554382 - DNA, 120 bp, Artificial Sequence
  ENSG00000168795_9 (sequence is synthesized)
ggcaacatggcacagttgtccatggcctctcgtgcaactcaggttgagactagttttgatcaggaagctgcacctgagaaaagtagttttcagtgtgaaaaccctgaggttggccttggt

SEQ ID NO: 554383 - DNA, 120 bp, Artificial Sequence
  ENSG00000168795_10 (sequence is synthesized)
gagaaggagcacatgagagtggtggttaaatctgagcccctgagctcacctgagcctcaggatgaagtgagcgatgtgacctcacaagcagaaggcagcgagtctgtggaagtggaagga

SEQ ID NO: 554384 - DNA, 120 bp, Artificial Sequence
  ENSG00000168795_11 (sequence is synthesized)
gttgtggtcagtgccgagaagatagacctcagccctgaaagcagtgatcggagtttttcagatccccagtctagcacagacagggtaggtgatatccatattttggaagtcacaaataac

SEQ ID NO: 554385 - DNA, 120 bp, Artificial Sequence
  ENSG00000168795_12 (sequence is synthesized)
ctagagcataagtccacttttagtatttcgaattttcttaacaagagcagaggaaataactttactgcaaatcagaacaatgatgataatattccaaacaccactagtgactgcaggctg

SEQ ID NO: 554386 - DNA, 120 bp, Artificial Sequence
  ENSG00000168795_13 (sequence is synthesized)
gagagtgaggccccctatttgttgagtccagaggctgggcctgcaggtgggccctcctctgcccctggctcccatgtagagaacccatttagtgaacctgcagactcccacttcgtcagg

SEQ ID NO: 554387 - DNA, 120 bp, Artificial Sequence
  ENSG00000168795_14 (sequence is synthesized)
cctatgcaggaggtgatgggcctgccgtgtgtgcagacttcaggctaccaaggaggagaacagtttgggatggacttttccaggtctggtttgggcctccactcctccttctccagggta

SEQ ID NO: 554388 - DNA, 120 bp, Artificial Sequence
  ENSG00000168795_15 (sequence is synthesized)
atgataggttccccaaggggaggagccagtaactttccttactaccgccgcatagctcccaaaatgccagttgtaacttccgtcaggagctcacagatcccagaaaactctaccagttct

SEQ ID NO: 554389 - DNA, 120 bp, Artificial Sequence
  ENSG00000168795_16 (sequence is synthesized)
cagctaatgatgaatggagctacgtcctcatttgaaaatggccatccttcccagcctggccctccacagttgaccagggcatctgcagatgttctgtcaaagtgcaagaaggccttatca

SEQ ID NO: 554390 - DNA, 120 bp, Artificial Sequence
  ENSG00000168795_17 (sequence is synthesized)
gagcacaatgttttggttgtagagggagctcgcaagtatgcctgcaaaatctgctgcaaaacttttctgactttgacagattgcaagaagcacatccgtgttcacacaggtgaaaagcct

SEQ ID NO: 554391 - DNA, 120 bp, Artificial Sequence
  ENSG00000168795_18 (sequence is synthesized)
tacgcctgcctgaagtgtggcaagaggtttagtcagtccagccacctgtataagcactcaaagactacctgcctgcgctggcagagcagcaatcttcccagcactttgctctagctgttt

SEQ ID NO: 554392 - DNA, 120 bp, Artificial Sequence
  ENSG00000168795_19 (sequence is synthesized)
gacaacgctgaggccagttgtcagactgaatttcttttggtaagcagttaatgcctttgggttcgaggcttccagctgcccagtggctcttaaacagtttagcaactaataaccggagaa

SEQ ID NO: 554393 - DNA, 120 bp, Artificial Sequence
  ENSG00000168795_20 (sequence is synthesized)
ctaacatgtagtatttgtgctgctgcatttctgagtgaagtgcacgtcttgggaaagggatgcaatccctgaaaccaggtgcttccttggggttgagtaatgcagtcagaaagtagtttg

SEQ ID NO: 554394 - DNA, 120 bp, Artificial Sequence
  ENSG00000168795_21 (sequence is synthesized)
taattgatattaaaagtggcacatttaaaaatttaaaaattgaagtgcaaaaaaaattttttagcaatttttgtaaaactgtgtagcatttaaatttcctataccttctgatgggagtat

SEQ ID NO: 554395 - DNA, 120 bp, Artificial Sequence
  ENSG00000168795_22 (sequence is synthesized)
tatatccctgtatagtgatgcaaaatgcacttatgtgtaaccagtggtgatttggtgcctgtcttaaaggaaggcctttgaggacacacctgtctgccacaaatgctttaaagtgtatca

SEQ ID NO: 554396 - DNA, 120 bp, Artificial Sequence
  ENSG00000168795_23 (sequence is synthesized)
tgagctagtcctaggcctcaaagtactgtattttttatttttacctgatttgcagtcataaacactgcactttggtgctgacactgggtccagagtgagcattctcttggactattagat

SEQ ID NO: 554397 - DNA, 120 bp, Artificial Sequence
  ENSG00000168795_24 (sequence is synthesized)
gtatatacttttgaatacatcactgttggatagatgttttaacagttttttctggtttaaaaaccaaattgtaaatggagtgtgtacttgtagagagtgacaaggtattgtttccctatg

SEQ ID NO: 554398 - DNA, 120 bp, Artificial Sequence
  ENSG00000168795_25 (sequence is synthesized)
tgctgtttgagcagtattttaaccaacttgtattacagatgttacagttccatgttaggaagtcagaaaagacttgtgtttgtctttgttctgctgatgtggagtcatgttttgtggggt

SEQ ID NO: 554399 - DNA, 120 bp, Artificial Sequence
  ENSG00000168795_26 (sequence is synthesized)
cttccatggcacatttacctgttgctccgtccagatgttgagggccagtctaggctgacacatcctacccgaggacaagcctgttctccatttcttcactctcccctccccatatagcaa

SEQ ID NO: 554400 - DNA, 120 bp, Artificial Sequence
  ENSG00000168795_27 (sequence is synthesized)
ctctcccaggtttagattaccgttttcgacgacagattaaccaaaaatgccccacacaggttttattactgttatatactatacttttaacagtacagaccctaaattttattatttgtt

SEQ ID NO: 554401 - DNA, 120 bp, Artificial Sequence
  ENSG00000168795_28 (sequence is synthesized)
gctcccccaatctgataccaaatgtttaaagttgtttgaaatccaaacatggtagtgttcatgggtaaatattttctaggctatgtaagagttagcagcccatagcatagaagtaatcaa

SEQ ID NO: 554402 - DNA, 120 bp, Artificial Sequence
  ENSG00000168795_29 (sequence is synthesized)
gtagcatctgagactgttggaggcactagggcctctctgggccctacagcctcacttccccagcctcaccttgctgtcctctgacactgccatcagggctgttagtggcacctgtatgag

SEQ ID NO: 554403 - DNA, 120 bp, Artificial Sequence
  ENSG00000168795_30 (sequence is synthesized)
gccaagtgtgcgtccaggggaacagcacaggttaatgcgtctccctagaactcatgaagtcagtttaattcatgcatgaacatgagttcattttatgttttatatagctttcttagacat

SEQ ID NO: 554404 - DNA, 120 bp, Artificial Sequence
  ENSG00000168795_31 (sequence is synthesized)
accaaaccatcattcataaatcagataaattattcagtttttgtgtttagaaagctaagtatgtgtagctggaaacaaaaatgagcgtgttttctctcctgttaatctagagtgtgcagt

SEQ ID NO: 554405 - DNA, 120 bp, Artificial Sequence
  ENSG00000168795_32 (sequence is synthesized)
tacacatgtgtggataatttcatgttccaggggcgcttggcatctcccatggactgattcccaggaagaaaagcccaaagggaaacccacgattcctttcgagtagatgtgggaaagagc

SEQ ID NO: 554406 - DNA, 120 bp, Artificial Sequence
  ENSG00000168795_33 (sequence is synthesized)
ccattggaggatatgaggtcctgtgaaattcagttgtgtgtgtggctccttgttagcagtcatgttgacatggtgttaggaggctccccatccaccctttacatgatgtagggaccagtg

SEQ ID NO: 554407 - DNA, 120 bp, Artificial Sequence
  ENSG00000168795_34 (sequence is synthesized)
tcttgtgagattaaccttgggacacagtgggttagcctggagaaaatgagaggccctgcctggacccagggagaggagccagtgacacaggcagagcggtgcagccctccttcccttcca

SEQ ID NO: 554408 - DNA, 120 bp, Artificial Sequence
  ENSG00000168795_35 (sequence is synthesized)
tttggaggaggtggtgccaggagcctgcccgcttacctctgctgaagcataagtggactttgcttttggggcttatctctgatacatgctggagccctgcctctccactgctagatggaa

SEQ ID NO: 554409 - DNA, 120 bp, Artificial Sequence
  ENSG00000168795_36 (sequence is synthesized)
cctggaatctctcatctacctcttagtctgtcagtttctacgtgtgagaagcaagcttgtgggccagtgtccttgtacatgctgtagcacttaaaaaataattccagggttccctggaaa

SEQ ID NO: 554410 - DNA, 120 bp, Artificial Sequence
  ENSG00000168795_37 (sequence is synthesized)
accagtcccagggttcctatgatctgtagtttctacctggattataactggttttgggtacctgaattttgattggttagccttaattatagtctggcgtgatcatgtagaatcttttct

SEQ ID NO: 554411 - DNA, 120 bp, Artificial Sequence
  ENSG00000168795_38 (sequence is synthesized)
ggtgaacagatcataaagttctatcaaggagttctatcaaggcatccatgtcagtggtgctatgctggttacaacttgagatttttgaaataaaaaatttgtcatattcatgcctctaaa

SEQ ID NO: 554412 - DNA, 120 bp, Artificial Sequence
  ENSG00000168802_0 (sequence is synthesized)
gggtggccgagcgcgggcggaggacggagaagggggcggcgagggccggaatctcgagcttgttttcacttgctttttaaagacagaaagctcatggtgcaaattgttatttccagtgcg

SEQ ID NO: 554413 - DNA, 120 bp, Artificial Sequence
  ENSG00000168802_1 (sequence is synthesized)
agggctggaggcctggcagaatgggtgctgatggagctacagggggagatcgaggctcgctacagcactggattagctggaaacctcctgggagacctacattacaccactgagggaatc

SEQ ID NO: 554414 - DNA, 120 bp, Artificial Sequence
  ENSG00000168802_2 (sequence is synthesized)
cctgtgctgatcgtggggcatcatatcctgtatgggaaaatcatccacctggagaaaccttttgcagtccttgtcaaacacactcctggggatcaggactgtgatgagcttggccgcgag

SEQ ID NO: 554415 - DNA, 120 bp, Artificial Sequence
  ENSG00000168802_3 (sequence is synthesized)
actggcacccggtacctggtgacagcactcatcaaagacaagatccttttcaaaacccgccccaagcccattatcaccagcgtccccaagaaagtatgaaagaacctcggattttcccta

SEQ ID NO: 554416 - DNA, 120 bp, Artificial Sequence
  ENSG00000168802_4 (sequence is synthesized)
aactcggatcccttccttatggcggccggttctcttggtggaaatctgaccccatttccaaggaacccatctccttttccagcttcatcaggctcattggcttcaaatccagcacctttc

SEQ ID NO: 554417 - DNA, 120 bp, Artificial Sequence
  ENSG00000168802_5 (sequence is synthesized)
ccggctggtgctcgtgacccaagtatggcttcttttccaagagggatgaatcccactggcacaggtgcagtttctttcccaaggcctggtggcctcttggggccaggcccaggcccaggc

SEQ ID NO: 554418 - DNA, 120 bp, Artificial Sequence
  ENSG00000168802_6 (sequence is synthesized)
cccaccctaaaccctaggacaggggctctgccaggcccagggcctctgtctaaccccaggttagggggtctcccaggaccaggtcctatgtccaacccaagggcaggtggtctcctggga

SEQ ID NO: 554419 - DNA, 120 bp, Artificial Sequence
  ENSG00000168802_7 (sequence is synthesized)
gcaggtcctgaccccagaggtggtggtcccatgggccctggatctggacctaacctgagagccggtgttctgttaacctctgggaatggtcctcccaatcctaggccagttggcctgggc

SEQ ID NO: 554420 - DNA, 120 bp, Artificial Sequence
  ENSG00000168802_8 (sequence is synthesized)
agtgctcgcggcggcggcgacggcggcgggaggttcggttgtcgcccgttggccgcgcggcgccgcgctcggcggccgccattgcagcttgttttcacttgctttttaaagacagaaagc

SEQ ID NO: 554421 - DNA, 120 bp, Artificial Sequence
  ENSG00000168802_9 (sequence is synthesized)
accaagtggcctgggcccaggccctaatctagatgccagagcaggtggcctcttgggcacaggatctggtcttaacttaagaatggctggacctcaaggcctcgatcttgcccccattct

SEQ ID NO: 554422 - DNA, 120 bp, Artificial Sequence
  ENSG00000168802_10 (sequence is synthesized)
aagagcagcaggtcttttaggagcaaattcagcttctttctcacaggcttctggaaacatgggcacaagcccatcctccatggcaagagtacctggccccatgggcccaaactcgggtcc

SEQ ID NO: 554423 - DNA, 120 bp, Artificial Sequence
  ENSG00000168802_11 (sequence is synthesized)
cagggccaaatccatctcccatgtcaagggctcctggccccataggccctaattcagctcatttctcaaggccagttggccccatgggggtaaatgccaatccctttcccaggggagcag

SEQ ID NO: 554424 - DNA, 120 bp, Artificial Sequence
  ENSG00000168802_12 (sequence is synthesized)
gttcatctgccttttctcagtcttctggcacattggcatcaaacccagctaccttccaaaggtccgctggcctccagggctcaaatccaaccattttcccaagagcctctgggccacttg

SEQ ID NO: 554425 - DNA, 120 bp, Artificial Sequence
  ENSG00000168802_13 (sequence is synthesized)
gccccaacccagctaacttcccaagggccactggcctgcagggtccaagtccaactaccttcccaaggtctactggcccattaggccctggtcaagttactttccccaggccagctgccg

SEQ ID NO: 554426 - DNA, 120 bp, Artificial Sequence
  ENSG00000168802_14 (sequence is synthesized)
ggcatctgggcccttctccagctggccctgtgggtatcaacccagctcctttcacaaggccaactgggaccctgggtctcaacccagcttcctttccaaggatgaatggccctgcaggca

SEQ ID NO: 554427 - DNA, 120 bp, Artificial Sequence
  ENSG00000168802_15 (sequence is synthesized)
agagtttcgtcccatttcctagagtggggagcctccctggcacaaacccagctgctttccccagaccagggggtccaatggctgcaatgtacccaaatggaatgttgcccccttaaacac

SEQ ID NO: 554428 - DNA, 120 bp, Artificial Sequence
  ENSG00000168802_16 (sequence is synthesized)
cattttccctccaggaccaccttggtttctaggcactgtggttcttggcaggggctgtcttaggtaaaagggtagttgtggagctacagtctgaagaacatagcttgggctcaagttcaa

SEQ ID NO: 554429 - DNA, 120 bp, Artificial Sequence
  ENSG00000168802_17 (sequence is synthesized)
atgagccatctttttcctttgcgtttttcttgactgaaggtgagatgttatttgtggcatgtgaactgtggcaggtgggaataatcctgcccttgagagaaaggatctccagcctcccag

SEQ ID NO: 554430 - DNA, 120 bp, Artificial Sequence
  ENSG00000168802_18 (sequence is synthesized)
aagcctgctgtgctttcgtcccacagctttctgcccattgtttcttactagtttcttgaattgttcttgtggacttttcctcagggatacattggcctgcaggtcccagttcacatgtag

SEQ ID NO: 554431 - DNA, 120 bp, Artificial Sequence
  ENSG00000168802_19 (sequence is synthesized)
tcccctgctcaccattggagaatcagctcactgctctctagaaacgtggcgttggtgaacggaccatgcttccgtagctctgacctgggcagcttggacctggtcatcctctactgccat

SEQ ID NO: 554432 - DNA, 120 bp, Artificial Sequence
  ENSG00000168802_20 (sequence is synthesized)
acctttccctgggggcttgaacacagaacagggagatggacaaccacttcaaagaaagacccaccgaatgcagtttctgcttgactgactgggcctgcagctcccttctcctgggactta

SEQ ID NO: 554433 - DNA, 120 bp, Artificial Sequence
  ENSG00000168802_21 (sequence is synthesized)
gaggtggccagatttaaggcccctctactcatccaactccctcttcactggtactcccaatcaatcaaagaacctcaaaatttaaactgatgtggatgggaatatgggaattagggtggg

SEQ ID NO: 554434 - DNA, 120 bp, Artificial Sequence
  ENSG00000168802_22 (sequence is synthesized)
ggtgggggatgaagggaagaaatcactgtgctttgttcggcctggtgtgcaaggatggttggtggttttcctgcattgtatcttttcttactgtttctttaataaatgggatgagagggc

SEQ ID NO: 554435 - DNA, 120 bp, Artificial Sequence
  ENSG00000168802_23 (sequence is synthesized)
ctaatctgcgatgctctctgcttgttctccccctacctctgcagtagcagggaaatttaattttggggaatctggaaagctcacatttctgaaagtggaaattctcctatgtggggctag

SEQ ID NO: 554436 - DNA, 120 bp, Artificial Sequence
  ENSG00000168802_24 (sequence is synthesized)
aaagtaaaaagggcacatgggtgggtggtccagtgtggctgctcaacaatggcagagccagaccagggattggaggtgccagcatagcctgccaagagcagctttaggaggcgcctgagt

SEQ ID NO: 554437 - DNA, 120 bp, Artificial Sequence
  ENSG00000168803_0 (sequence is synthesized)
aaaataggtgaagctgaacccagatctacacatacagctaatcttaccaaaatgtgtggaagtaaagcaatctgaaggaaattcagtaccatacaatttactgactgaaatacatcatat

SEQ ID NO: 554438 - DNA, 120 bp, Artificial Sequence
  ENSG00000168803_1 (sequence is synthesized)
tgctcatactaagaataagagtggagaagaatcatttttttcctgctaaaatgatagaggcagaagagcaacagccttgcaagacagacttctattctgaattgccaaaagtggaacttc

SEQ ID NO: 554439 - DNA, 120 bp, Artificial Sequence
  ENSG00000168803_2 (sequence is synthesized)
atgcccacttgaatggatccattagttctcataccatgaagaaattaatagcccagaagccagatcttaaaatccacgatcagatgactgtgattgacaagggaaagaaaagaactttgg

SEQ ID NO: 554440 - DNA, 120 bp, Artificial Sequence
  ENSG00000168803_3 (sequence is synthesized)
aagaatgtttccagatgtttcaaactattcatcagcttactagtagccctgaagatattctaatggtcacaaaagatgtcataaaagaatttgcagatgacggcgtcaagtacctggaac

SEQ ID NO: 554441 - DNA, 120 bp, Artificial Sequence
  ENSG00000168803_4 (sequence is synthesized)
taaggagcacacccagaagagaaaatgctactggaatgactaaaaagacttatgtggaatctatacttgaaggtataaaacagtccaaacaagaaaacttggacattgatgttaggtatt

SEQ ID NO: 554442 - DNA, 120 bp, Artificial Sequence
  ENSG00000168803_5 (sequence is synthesized)
tgatagcagttgacagaagaggtggccctttagtagccaaggagactgtaaaacttgccgaggagttcttcctttctactgagggtacagttcttggccttgacctcagtggagacccta

SEQ ID NO: 554443 - DNA, 120 bp, Artificial Sequence
  ENSG00000168803_6 (sequence is synthesized)
ctattccaaaccaaaaaaaagaaacacaaatactcctggatctgcttcctgacagaatcgggcatggaacatttctcaactccggtgagggaggatccctggatctggtggactttgtga

SEQ ID NO: 554444 - DNA, 120 bp, Artificial Sequence
  ENSG00000168803_7 (sequence is synthesized)
ggcaacatcggataccactggaactctgtttgacctcaaacgtcaaaagtcagacagttccatcttatgaccagcaccatttcggattctggtacagcattgcccatccttctgtgatct

SEQ ID NO: 554445 - DNA, 120 bp, Artificial Sequence
  ENSG00000168803_8 (sequence is synthesized)
gtactgatgataagggtgtttttgcaacacacctttctcaagagtaccagctggcagctgaaacatttaatttgacccagtctcaggtgtgggatctgtcttatgaatccatcaactaca

SEQ ID NO: 554446 - DNA, 120 bp, Artificial Sequence
  ENSG00000168803_9 (sequence is synthesized)
tctttgcttctgacagcaccagatctgaactgaggaagaaatggaatcacctgaagcccagagtgttacatatttaagctataatgaggtgaactacttctgagtatgtgtttcaatcaa

SEQ ID NO: 554447 - DNA, 120 bp, Artificial Sequence
  ENSG00000168803_10 (sequence is synthesized)
gttcctgccatatcccacttagtaaaacagtccaccactcctttgaagcatagcaaccaagttccttgggctctatcaccagcaccttacacatggcaggtactcagtaaatacgtgtct

SEQ ID NO: 554448 - DNA, 120 bp, Artificial Sequence
  ENSG00000168803_11 (sequence is synthesized)
tcaactgactcacaagctctcaggtgcttactgggtgggacttgactgttgttgctaattaaatccccattccaccagtgattattgtgactcagcagtccttccctattagtgatcata

SEQ ID NO: 554449 - DNA, 120 bp, Artificial Sequence
  ENSG00000168803_12 (sequence is synthesized)
aaatttcagggaaatcgaagtttctcatcaggaaatgttttggaattactagtataaagttaggaaagtggggaaattaggttactgccgagacctttaagccttctaaacagctttata

SEQ ID NO: 554450 - DNA, 120 bp, Artificial Sequence
  ENSG00000168803_13 (sequence is synthesized)
ttaagccttctaaacagctttatattttattgtgcatactttaatcagactcccttcactcgctttaagtttttaaaagtattccccagccggatgtgatggctcatgcctgtaatccca

SEQ ID NO: 554451 - DNA, 120 bp, Artificial Sequence
  ENSG00000168803_14 (sequence is synthesized)
catggagaaaccctgtctctacaaaaacaaaaaaacaaaaaaccggaaattagtcaggcacggtggtacacacctgtagtcccagccaccagggaggctaaggtgggaggagacctgatc

SEQ ID NO: 554452 - DNA, 120 bp, Artificial Sequence
  ENSG00000168803_15 (sequence is synthesized)
gcctgggcaacagagtgaaaccctgtttcaagaaaaagaaaagtattctccaagatcccaagaccattgacaccaggccacattgtataccagggatttatgtgaatgcctagggatgac

SEQ ID NO: 554453 - DNA, 120 bp, Artificial Sequence
  ENSG00000168803_16 (sequence is synthesized)
cattgtataccagggatttatgtgaatgcctagggatgaccgtagtgacagataaagctaggtgctgagatctggttttgccctctttatgattgtcccatcggtactagaaagtgaagt

SEQ ID NO: 554454 - DNA, 120 bp, Artificial Sequence
  ENSG00000168803_17 (sequence is synthesized)
cattgctccaattttggaagaggagagaataactggctgaggggtgagaaagacagaaatagctgcagctctcttttttttttttttcaacaaaggctctcactctgttccccaggctgg

SEQ ID NO: 554455 - DNA, 120 bp, Artificial Sequence
  ENSG00000168803_18 (sequence is synthesized)
agtgcagtgacatgatcacagatcactgcagctttcagttttaaaacagcttttattacattttctttgtggaagctgtatttctaccttagtactcactttctgcttggtctgaaagat

SEQ ID NO: 554456 - DNA, 120 bp, Artificial Sequence
  ENSG00000168803_19 (sequence is synthesized)
acctctagtagtggcaacattgtgttaagtagagttcattgggtctcttgtaaccctacccctacataatggaccactggtgcaggcttacataaacacacatactgtggccacttcagc

SEQ ID NO: 554457 - DNA, 120 bp, Artificial Sequence
  ENSG00000168803_20 (sequence is synthesized)
aaaacaaacaaacaaacaaaaaacaaaaacaaaattattagataccaagttatgcttgaattgctttgctctttagaatgtgtgtttttccctggtatcagaagaagttaaggctgatga

SEQ ID NO: 554458 - DNA, 120 bp, Artificial Sequence
  ENSG00000168803_21 (sequence is synthesized)
tgtgtttttccctggtatcagaagaagttaaggctgatgacacccctaatttaaattactaaggatttctgataggttttctgtctttctgtgatatcgtaaagtatttatttggtcttt

SEQ ID NO: 554459 - DNA, 120 bp, Artificial Sequence
  ENSG00000168803_22 (sequence is synthesized)
gaccctgtttcctggcatactgctcctaaaatccttagagtctccagagtgatggctttttgtatctaatgagttgactgctggctggcagcccctaggggctggtcactggaaagacaa

SEQ ID NO: 554460 - DNA, 120 bp, Artificial Sequence
  ENSG00000168803_23 (sequence is synthesized)
atgcatgattagagttgggactttcagtcctcccccaaactcttgggagaagggctgaaggttaagttgatcaccagtgaccagtggtaatcataccttcataatgaagcctccataaaa

SEQ ID NO: 554461 - DNA, 120 bp, Artificial Sequence
  ENSG00000168803_24 (sequence is synthesized)
ctccagaagaacagattttggagcatttccaggtaactgaacatatggaggtccctagagggtgctgtacctgaagagggtagagggtataggagctccctgtcccttcccacatgcctt

SEQ ID NO: 554462 - DNA, 120 bp, Artificial Sequence
  ENSG00000168803_25 (sequence is synthesized)
gctctatccatttcttcatctctatcctttgtactgtcctttataataaaccagtgaacctaagtgtttccctgagttctgtgagctttactagcaaattaaactcaaggaggggtcatg

SEQ ID NO: 554463 - DNA, 120 bp, Artificial Sequence
  ENSG00000168803_26 (sequence is synthesized)
ggaaccctgatttataggtttggtcagaagcacaggtaaaaccacctggggtttgaacttggcactggaagtgggcagcagtcttgtgggactgggccctcaatctgtgggatcaaatgc

SEQ ID NO: 554464 - DNA, 120 bp, Artificial Sequence
  ENSG00000168803_27 (sequence is synthesized)
catctctaggggatagcatgggaaactggaggacacctagctggtatctgctgcaaaattgattgcttgcttgatggtggggaaaaaactccacacatttggtcagagaagttttctgtc

SEQ ID NO: 554465 - DNA, 120 bp, Artificial Sequence
  ENSG00000168803_28 (sequence is synthesized)
tttattgtggtgtgagagcagaggaaaaaagtttgttttttccgctcagactttgttttaaggaacaggggagagggaagttctgtggtttttgaagttcttagatacgtgtgtgtagct

SEQ ID NO: 554466 - DNA, 120 bp, Artificial Sequence
  ENSG00000168803_29 (sequence is synthesized)
ttgtgtggcattatatatagcattatattattttctacccttatctactcatacagaaattgcacagtaaaaacatcaaagtttattcataaaatgtggatctattgcagtcactaaaaa

SEQ ID NO: 554467 - DNA, 120 bp, Artificial Sequence
  ENSG00000168803_30 (sequence is synthesized)
tgttgcagaacagattttaatgactgaaagtgttcatgataatatattcaatgaaaatatggttataaagttttatagtcctttttttgtttaatatctatacaaaagctattgaagtgt

SEQ ID NO: 554468 - DNA, 120 bp, Artificial Sequence
  ENSG00000168803_31 (sequence is synthesized)
agccagtgctaagttcgcttgcggctgacctttctttggaatgtcgtgagttccatttgtcccagaatacggtccgctaccgctgtgacatgagtgttagggaaggcgggttgtcacgtt

SEQ ID NO: 554469 - DNA, 120 bp, Artificial Sequence
  ENSG00000168803_32 (sequence is synthesized)
tctacaagccttccagtcaaaagggaaaccttgcctaagtccttgtagttgagaaatctctaagaggtggaagcaaatactgcacatgcgtgttggtcctgtgagggaaaccagctagtg

SEQ ID NO: 554470 - DNA, 120 bp, Artificial Sequence
  ENSG00000168803_33 (sequence is synthesized)
gagagggagaggttgaaggaacagaaaaatgagaagacaactcactggaggctgaagtgggaggatcgcttgagtctggaagcttgagactgcagcaagctgtgatcgtgacactgcact

SEQ ID NO: 554471 - DNA, 120 bp, Artificial Sequence
  ENSG00000168803_34 (sequence is synthesized)
agaagacaactcactggtagagtaacttggaatagatagaaatgggatcctgggcacgtattagttgtggggataggagaatgaatcctttatctgtgactcctgatggggtaaaaaaaa

SEQ ID NO: 554472 - DNA, 120 bp, Artificial Sequence
  ENSG00000168803_35 (sequence is synthesized)
gagagaaaaagaaggaatttgcacctgatggcttctgttttctctgtaaagttggtgacagagttgtcagtttagtgtaaggcattcagatctgatggaacatttgagcagtttgagaat

SEQ ID NO: 554473 - DNA, 120 bp, Artificial Sequence
  ENSG00000168803_36 (sequence is synthesized)
tgcttctgaagggattagaagaagggctcacctatgcctgctgggtcagtggatcctcacctctaaaatgagattaagtactgcttcgtgaggtatctcagggttgattgaggggcaaat

SEQ ID NO: 554474 - DNA, 120 bp, Artificial Sequence
  ENSG00000168803_37 (sequence is synthesized)
ttggagtttcaggtcttccagatgactctctgtctctcccccaatccccaggttgcctggggattacagagaagtactgttctaaaagtacgaatgtcatctagctattaaaagatggag

SEQ ID NO: 554475 - DNA, 120 bp, Artificial Sequence
  ENSG00000168803_38 (sequence is synthesized)
tgtgtgctttctgagccttatttaaaacagaaagctttagcttccattagaatataagctctatgagagcagggcccctgcttgtcttattcgttgttacattctccaatgcttggaact

SEQ ID NO: 554476 - DNA, 120 bp, Artificial Sequence
  ENSG00000168803_39 (sequence is synthesized)
caataagaattttttaaaggaataaagggtcatctagaattttaaaatgactttaacaaaattgacatgtgttatgaaaatatgtaacattatttaaaaattaaacatggaaaatcccaa

SEQ ID NO: 554477 - DNA, 120 bp, Artificial Sequence
  ENSG00000168803_40 (sequence is synthesized)
ttgcattaattcagatgttcactatctagctgactgccttgcatgcctgaggataatgcccaagtagaggagttagaagggaccggggtgtggctgagtatggtggcgcacacctgtaat

SEQ ID NO: 554478 - DNA, 120 bp, Artificial Sequence
  ENSG00000168803_41 (sequence is synthesized)
caaagcaaaaaaaaaaagggactgggacatgagaggctacagagggccagggtgactctggtttggctctctagcaaaaggtacttgagaggacttaaaaacaaacaaaaaaactgatgc

SEQ ID NO: 554479 - DNA, 120 bp, Artificial Sequence
  ENSG00000168803_42 (sequence is synthesized)
tctgcacccatcccatgagattctgttttatttgatctggggtgagtcctgggcagagataggctttaaaagctccttaggtaattttaatatccagccagagttgaaacactgctctgg

SEQ ID NO: 554480 - DNA, 120 bp, Artificial Sequence
  ENSG00000168803_43 (sequence is synthesized)
tatcttttcttaagtataaataaatctgtttagttacagctatgcatagataaatttgtaggcccttgtttagactcttgaaagaagcatagtaaataggaaaatagactctaaacaaaa

SEQ ID NO: 554481 - DNA, 120 bp, Artificial Sequence
  ENSG00000168806_0 (sequence is synthesized)
ccctaccgaggtccgtgaggtgtgtgctaaccaaggggcggctcacaaccgtgacagactgccattcctgagtctcttctggccatgggcccccggagccgtgagcgtcgggcaggcgcg

SEQ ID NO: 554482 - DNA, 120 bp, Artificial Sequence
  ENSG00000168806_1 (sequence is synthesized)
gtacagaacaccaacgacagcagcgccctcagcaagcgttccctggccgcgcgcgggtacgtgcaggacccctttgccgcgttgctggttccgggcgcggcgcgccgcgcaccgctcatt

SEQ ID NO: 554483 - DNA, 120 bp, Artificial Sequence
  ENSG00000168806_2 (sequence is synthesized)
caccgaggctactacgtccgcgcacgcgccgtgaggcactgcgtgcgcgcttttttggagcagattggcgcgccccaggccgcgcttcgcgcgcagatcttgtctctcggcgctggcttc

SEQ ID NO: 554484 - DNA, 120 bp, Artificial Sequence
  ENSG00000168806_3 (sequence is synthesized)
gactcgctctattttcgcttaaaaaccgcgggccgcctggcccgggctgcagtctgggaggtggattttccggacgtggcgcggcgcaaagcagaaaggattggagagacgccagagctg

SEQ ID NO: 554485 - DNA, 120 bp, Artificial Sequence
  ENSG00000168806_4 (sequence is synthesized)
tgcgcgttaaccgggcctttcgagaggggggagcccgcgtccgcgctgtgctttgagagcgcagactactgcatcctgggtctggacttgcggcagctccagcgagtggaggaggccctg

SEQ ID NO: 554486 - DNA, 120 bp, Artificial Sequence
  ENSG00000168806_5 (sequence is synthesized)
ggcgccgcggggctcgacgcagcctcacccactctgctcctggccgaggcggtgctgacctacctcgagccggagagtgccgcggccctcatcgcctgggcagcccagcgttttcctaat

SEQ ID NO: 554487 - DNA, 120 bp, Artificial Sequence
  ENSG00000168806_6 (sequence is synthesized)
gcccttttcgtggtctatgagcagatgaggcctcaagacgcctttggccagttcatgctgcaacattttcggcagctaaactcccccctgcatggcctggagcgttttcctgacgtggag

SEQ ID NO: 554488 - DNA, 120 bp, Artificial Sequence
  ENSG00000168806_7 (sequence is synthesized)
gcgcagcggcgccgcttccttcaagctggctggaccgcctgcggtgccgtggacatgaatgaattctatcactgctttcttcccgcagaagaacgccggcgggtggaaaatattgaaccc

SEQ ID NO: 554489 - DNA, 120 bp, Artificial Sequence
  ENSG00000168806_8 (sequence is synthesized)
tttgacgaatttgaggagtggcatctgaagtgcgcccattatttcattctggcagcttctaggggagacaccctctcccacaccctagtgtttccatcctcagaggcatttcctcgcgta

SEQ ID NO: 554490 - DNA, 120 bp, Artificial Sequence
  ENSG00000168806_9 (sequence is synthesized)
aatcctgcttcgccttcaggggtattccctgccagcgtagtcagtagcgagggccaggtcccaaacctgaagagatatggccacgcctctgtcttcttgagcccagacgttattctcagt

SEQ ID NO: 554491 - DNA, 120 bp, Artificial Sequence
  ENSG00000168806_10 (sequence is synthesized)
gcaggaggatttggagagcaggaggggcggcactgccgagtgagccagtttcacttgctctcaagagattgtgactctgaatggaaaggcagccaaataggcagttgtgggactggagtt

SEQ ID NO: 554492 - DNA, 120 bp, Artificial Sequence
  ENSG00000168806_11 (sequence is synthesized)
cagtgggatggacgcctttatcacaccatgacaagactctcagagagtcgggttctggttctgggagggagactgtccccagtaagtccagccttgggggttctccagcttcattttttt

SEQ ID NO: 554493 - DNA, 120 bp, Artificial Sequence
  ENSG00000168806_12 (sequence is synthesized)
aagagtgaggataataacactgaggacctgaaagtgacaataacaaaggctggccgaaaggatgattccactttgtgttgttggcggcattcaacaacagaagtgtcctgtcagaatcag

SEQ ID NO: 554494 - DNA, 120 bp, Artificial Sequence
  ENSG00000168806_13 (sequence is synthesized)
gaatatttgtttgtgtatgggggtcgaagcgtggtggaacctgtactaagtgactggcatttcctccatgtagggacaatggcttgggtcaggatcccagtggagggagaagtacctgaa

SEQ ID NO: 554495 - DNA, 120 bp, Artificial Sequence
  ENSG00000168806_14 (sequence is synthesized)
gcccggcattctcacagtgcctgcacttggcaagggggagcccttattgctggaggtctcggggcttctgaggagccattgaactctgtgctctttctgagaccaatctcttgtggattc

SEQ ID NO: 554496 - DNA, 120 bp, Artificial Sequence
  ENSG00000168806_15 (sequence is synthesized)
ctctgggagtcagtagacatccagcctcccattaccccaaggtactcccacacagctcatgtgctcaatggaaagctgttactggttggagggatctggattcattcctcctcatttcct

SEQ ID NO: 554497 - DNA, 120 bp, Artificial Sequence
  ENSG00000168806_16 (sequence is synthesized)
ggagtgactgtgatcaatttgactacaggattgagctctgagtatcagattgacacaacatatgtgccatggccattaatgttacacaaccatactagtatccttcttcctgaagagcaa

SEQ ID NO: 554498 - DNA, 120 bp, Artificial Sequence
  ENSG00000168806_17 (sequence is synthesized)
cagctcctgctccttggaggtggtgggaactgcttttcctttggtacctacttcaacccccatacagtcacattagacctttcttccttaagtgctgggcagtaaggactggactaatat

SEQ ID NO: 554499 - DNA, 120 bp, Artificial Sequence
  ENSG00000168806_18 (sequence is synthesized)
tcaggacccactaaagtagacaataaagttttccacaaataggatgaccctctagctatagatactgccactcctcctttccccatcctttttttcccttagcactattcagtgcaaaaa

SEQ ID NO: 554500 - DNA, 120 bp, Artificial Sequence
  ENSG00000168806_19 (sequence is synthesized)
gtgaaaaaggttggtaaaataggtaaaatacctagaaacaatcactacagaaaacagctgaagacagtggccatgcagtccgagaggagtagtggtctgcctctaattttctaatctaag

SEQ ID NO: 554501 - DNA, 120 bp, Artificial Sequence
  ENSG00000168806_20 (sequence is synthesized)
ttcgtttattgagttacagtggtctttagtaaagtaaaacaatttcccaatcccaggccttgtgatttgagatggtaccttagaaaaagttacacgcagttccgtggttgaatatatttg

SEQ ID NO: 554502 - DNA, 120 bp, Artificial Sequence
  ENSG00000168806_21 (sequence is synthesized)
agatggtaccttagaaaaagtttcacgcagatccttggttgaatatagttgagggagcgtagtattgacaattcttcatgtaggaaacctgaaatgaacacagtcacagtttgattaaaa

SEQ ID NO: 554503 - DNA, 120 bp, Artificial Sequence
  ENSG00000168806_22 (sequence is synthesized)
cattgtcctgtttgttgcaacagaaaactcggatagttttaacaacaggaaacacttgtaggacttcctttaccaacatactttttaaatgttttgctattggttccatatttatttaga

SEQ ID NO: 554504 - DNA, 120 bp, Artificial Sequence
  ENSG00000168806_23 (sequence is synthesized)
tttataagtgtcaataaagcaaacttttgatgcctcaattcattttgcacggggtataataatgttttgttccagatatactctccacctttcactgttctgtgctccaagaggctgacc

SEQ ID NO: 554505 - DNA, 120 bp, Artificial Sequence
  ENSG00000168806_24 (sequence is synthesized)
tttatgggctgcatcaaggagctctctttactttttggttgagttccaccagtcagaggcaccagaggggaatgggggcaaaaagaagagtgagagtgagttggtatttattcccaattc

SEQ ID NO: 554506 - DNA, 120 bp, Artificial Sequence
  ENSG00000168806_25 (sequence is synthesized)
ttcccctgttggtttgcaagttggcagtggcagcattcttctgtcaaaggctacagctcctgccgtgtaatcctttcctgaagacagagttctaattctgcatcatcccaggtttcagta

SEQ ID NO: 554507 - DNA, 120 bp, Artificial Sequence
  ENSG00000168806_26 (sequence is synthesized)
attgttcctttacttcaccttttcaggcctaggagttgtgatggctctttgctagacctgaactgtactgtccaatgtggtagctattgacaacatgtgactatttaaacgaattaataa

SEQ ID NO: 554508 - DNA, 120 bp, Artificial Sequence
  ENSG00000168806_27 (sequence is synthesized)
attcagtggcttagtcacattgaccacattttaagtgcttaataactatgtgtggctttggctactgtattagacaatgtagatgtagaacatttcatcgttacagaaatttctactgga

SEQ ID NO: 554509 - DNA, 120 bp, Artificial Sequence
  ENSG00000168806_28 (sequence is synthesized)
ttttaaatgggaatctgttgcctagtgagccatgtgagatcaatgaaatagctattcatccttaaaatttgagccttaatttgtcatctaaattatgcataccttgtgaaatatacacct

SEQ ID NO: 554510 - DNA, 120 bp, Artificial Sequence
  ENSG00000168806_29 (sequence is synthesized)
caaaaaatgtagtggctttggtggtaataagtgtattactttagtatttcttcttagtcctagaaaccttagtagttttcattctacaagtgcctaaatgattattatgaaccatcattg

SEQ ID NO: 554511 - DNA, 120 bp, Artificial Sequence
  ENSG00000168806_30 (sequence is synthesized)
atgacaaattgcatcctttatttctattaattttgcatataaatggatgtgaaaggtgattaatataaaaaccaagtagcaaacacaaacctaagtgtatggagaggacagtcttggctc

SEQ ID NO: 554512 - DNA, 120 bp, Artificial Sequence
  ENSG00000168806_31 (sequence is synthesized)
aaacacaaacctaagtgtatggagaggacagtcttggctctgttagatgaagcctccccgggggagaccagctgaatgagggttgtggtataggctgggcatggtggctcacgcctataa

SEQ ID NO: 554513 - DNA, 120 bp, Artificial Sequence
  ENSG00000168806_32 (sequence is synthesized)
agccaggagtttaagaccagcccaggcaacaaagtcagatccccatctctacaaaaaaataagtaggcacggtggtgtgtgcttgtagtcttggatactctggaggctgaggtgatagtg

SEQ ID NO: 554514 - DNA, 120 bp, Artificial Sequence
  ENSG00000168806_33 (sequence is synthesized)
agctgtgattgtgccactgcactcctgcctggttgacagagtgagaccccgtctcttaaaaagaaaaaaaaaaaaggttgttgtccaacttcagctttcctgagactttgtaagagccat

SEQ ID NO: 554515 - DNA, 120 bp, Artificial Sequence
  ENSG00000168806_34 (sequence is synthesized)
ttctagggaaagcattggttatggctatgactgagtcctgggaaacagggcttattacagctgggaagacatctggcaaggcgatcagtgggccaggtagtagaaaactggcagggaata

SEQ ID NO: 554516 - DNA, 120 bp, Artificial Sequence
  ENSG00000168806_35 (sequence is synthesized)
tgatcagcaggagaaaatggctgttctgtatttcctgtttctaagtttactacagcacaccccagctttcaggagcagataaaagcagaacactgtgatgaggccaggcgcagtggcaca

SEQ ID NO: 554517 - DNA, 85 bp, Artificial Sequence
  ENSG00000168806_36 (sequence is synthesized)
attagccagggtactgaggtgggaggattacttgagcctggcaggtcgagccaagatcatgcaactgctctccagcttgggtgac

SEQ ID NO: 554518 - DNA, 120 bp, Artificial Sequence
  ENSG00000168806_37 (sequence is synthesized)
tgggtgacagagtgagaccctgtctctagtaataacaacactgtaatgaaatgagtgttctcagctatgtagtagagtgtaccagaattcaaacctagatctaactccaaagcccaggtt

SEQ ID NO: 554519 - DNA, 120 bp, Artificial Sequence
  ENSG00000168806_38 (sequence is synthesized)
tcaaacctagatctaactccaaagcccaggttacaccttccactatgatgctgcttacatcatgccatcagccattatttcattacttttggggggaaaagaagggaggagggaggtcat

SEQ ID NO: 554520 - DNA, 120 bp, Artificial Sequence
  ENSG00000168806_39 (sequence is synthesized)
ctagagaatgtggacgtgtgccagacctaaattaggagtgcaatagtgcctattctcttgagcactgtccattagggcgccttatgagtaacagggcttgttctcccgagagaaattacc

SEQ ID NO: 554521 - DNA, 120 bp, Artificial Sequence
  ENSG00000168806_40 (sequence is synthesized)
cacatttcctataagtgattaccagattaagcatgccctccacctctaactgagcatcatgctcagttaaggaattattcatctctcgagctctactcattagagcacttagaagtattg

SEQ ID NO: 554522 - DNA, 120 bp, Artificial Sequence
  ENSG00000168806_41 (sequence is synthesized)
tcagcaatatttaccctgtgcctttggagcagcattcaatatagactagcgttgaaccacagtttcattaacagtaatctgcacagttggaggtgtgagccagattgagaaccaaagctg

SEQ ID NO: 554523 - DNA, 120 bp, Artificial Sequence
  ENSG00000168806_42 (sequence is synthesized)
gataataattcttgcttctccatttcacttttgaagtttttgttctaaaattctgatacggagctctggagtagttatgagagttaatgaacaggtctcttcctcttttagggattactt

SEQ ID NO: 554524 - DNA, 120 bp, Artificial Sequence
  ENSG00000168806_43 (sequence is synthesized)
ctagaccagataaactacttaaggaaggaaagtaatttcttattttgaatctccactctgggtcagggtttcaaaaatagtgtatcataatagtgaagatgaaaacaggttaagaacaac

SEQ ID NO: 554525 - DNA, 120 bp, Artificial Sequence
  ENSG00000168806_44 (sequence is synthesized)
tgttggaggatatgctcttcaaggccagtgctgttgcttctttttgtactttctgagttttaaaactgagtgcccgtttttcatctttctggagctttaagtcttcttaatgatctttgg

SEQ ID NO: 554526 - DNA, 120 bp, Artificial Sequence
  ENSG00000168806_45 (sequence is synthesized)
gagatggtatgtatccaatatgttccaggacccaggtgtttccttggtctttttcagtgatctcagaccttgaagtcctagcttattccatatgtattttgtgatcacaaacccaacctc

SEQ ID NO: 554527 - DNA, 120 bp, Artificial Sequence
  ENSG00000168806_46 (sequence is synthesized)
aagcagcccatgcttaccctgggacttatcccacatgtcatctcctggaaaacagccctatatgactgccccaaatggaaccaaccgctttctccctgtgcaagagaagcctttgaagag

SEQ ID NO: 554528 - DNA, 120 bp, Artificial Sequence
  ENSG00000168806_47 (sequence is synthesized)
ccgctttctccctgtgcaagagaagcctttgaagagaagctctttgaagagtttggtgaataaaagaactagttaataaggtgaggttttttgggtttgtttgtttgtttgtttgtttgt

SEQ ID NO: 554529 - DNA, 120 bp, Artificial Sequence
  ENSG00000168806_48 (sequence is synthesized)
acaggcgtgagccaccatgcctggcctaggtgggtttttaaccatagggacagtccaataatgtctagtttgactttaagattaagccttttaacttcagtaatgaaggaaggggtgtaa

SEQ ID NO: 554530 - DNA, 120 bp, Artificial Sequence
  ENSG00000168806_49 (sequence is synthesized)
gggtgtaaaatagcattaagccggcaagttaggtcatgtaacttggctaatcacattagacttgatgtttaaagagagaaggagagtgtgtagagcaggaattatgaaatttataatcag

SEQ ID NO: 554531 - DNA, 120 bp, Artificial Sequence
  ENSG00000168806_50 (sequence is synthesized)
ctttagagtaggctgagatttccttggatgtcaataattatgagtaaacaagaattctgtcatcccacatgtaagtaagcagttacaagactgcttacttatctgtcttggacattgata

SEQ ID NO: 554532 - DNA, 120 bp, Artificial Sequence
  ENSG00000168806_51 (sequence is synthesized)
gaaagcacatgattgggaaggggcagttccttgactgagggaaggaattgtgtctggttcacttttctatcaccaacatagtagatgctcaacaaatacttgttggatagaggtccactc

SEQ ID NO: 554533 - DNA, 120 bp, Artificial Sequence
  ENSG00000168806_52 (sequence is synthesized)
ttgtactcaaataaattatatttgaatattactatagttcttatgcacaaactgatgtcaataactcctgtaattgttgtgtatgtgtgtgtgtcagggggaggtaagcattaaaatttt

SEQ ID NO: 554534 - DNA, 120 bp, Artificial Sequence
  ENSG00000168806_53 (sequence is synthesized)
aaagaacccacagtttaagagtctttggaaatacattcaacttttctgacccaggtaaaggtggtagactttctggtgtcatttctatctttatggaataaacctgaaccttctccctga

SEQ ID NO: 554535 - DNA, 120 bp, Artificial Sequence
  ENSG00000168807_0 (sequence is synthesized)
gggcgggaagagggaagcgccgaggctgcctgactggaatgagggtagctgcggcgactgcggcggctggagcggggccggccatggcggtgtggacgcgggccaccaaagcggggctgg

SEQ ID NO: 554536 - DNA, 120 bp, Artificial Sequence
  ENSG00000168807_1 (sequence is synthesized)
tggagctgctcctgagggagcgctgggtccgagtggtggccgagctgagcggggagagcctgagcctgacgggcgacgccgccgcggccgagctggagcccgctctgggacccgcggccg

SEQ ID NO: 554537 - DNA, 80 bp, Artificial Sequence
  ENSG00000168807_2 (sequence is synthesized)
cttcaacggcctcccaaacggcggcggcgcgggcgactcgctgcccgggagcccaagccgcggcctggggcccccgagcc

SEQ ID NO: 554538 - DNA, 120 bp, Artificial Sequence
  ENSG00000168807_3 (sequence is synthesized)
gcgcgtcgccgcccgtgcgccgggtgcgggtggtgaagcaagaggcgggcggcctgggcatcagcatcaagggcggccgcgagaaccggatgccgatcctcatctccaagatcttccccg

SEQ ID NO: 554539 - DNA, 120 bp, Artificial Sequence
  ENSG00000168807_4 (sequence is synthesized)
ggctggctgccgaccagagccgggcgctgcggctgggcgacgccatcctgtcggtgaacggcaccgacctgcgccaggccacccacgaccaggccgtgcaggcgctgaagcgcgcgggca

SEQ ID NO: 554540 - DNA, 120 bp, Artificial Sequence
  ENSG00000168807_5 (sequence is synthesized)
aggaggtgctgctggaggtcaagttcatccgagaagtaacaccatatatcaagaagccatcattagtatcagatctgccgtgggaaggtgcagccccccagtcaccaagctttagtggca

SEQ ID NO: 554541 - DNA, 120 bp, Artificial Sequence
  ENSG00000168807_6 (sequence is synthesized)
gtgaggactctggttcgccaaaacaccagaacagcaccaaggacaggaagatcatccctctcaaaatgtgctttgctgctagaaacctaagcatgccggatctggaaaacagattgatag

SEQ ID NO: 554542 - DNA, 120 bp, Artificial Sequence
  ENSG00000168807_7 (sequence is synthesized)
agctacattctcctgatagcaggaacacgttgatcctacgctgcaaagatacagccacagcacactcctggttcgtagctatccacaccaacataatggctctcctcccacaggtgttgg

SEQ ID NO: 554543 - DNA, 120 bp, Artificial Sequence
  ENSG00000168807_8 (sequence is synthesized)
ctgaactcaacgccatgcttggggcaaccagtacagcaggaggcagtaaagaggtgaagcatattgcctggctggcagaacaggcaaaactagatggtggaagacagcaatggagacctg

SEQ ID NO: 554544 - DNA, 120 bp, Artificial Sequence
  ENSG00000168807_9 (sequence is synthesized)
tcctcatggctgtgactgagaaggatttgctgctctatgactgtatgccgtggacaagagatgcctgggcgtcaccatgccacagctacccacttgttgccaccaggttggttcattctg

SEQ ID NO: 554545 - DNA, 120 bp, Artificial Sequence
  ENSG00000168807_10 (sequence is synthesized)
gctccggatgtcgatccccctcccttggatctgaccttacatttgctaccaggacaggctctcgacagggcattgagatgcatctcttcagggtggagacacatcgggatctgtcatcct

SEQ ID NO: 554546 - DNA, 120 bp, Artificial Sequence
  ENSG00000168807_11 (sequence is synthesized)
ggaccaggatacttgttcagggttgccatgctgctgctgagctgatcaaggaagtctctctaggctgcatgttaaatggccaagaggtgaggcttactattcactatgaaaatgggttca

SEQ ID NO: 554547 - DNA, 120 bp, Artificial Sequence
  ENSG00000168807_12 (sequence is synthesized)
ccatctcaagggaaaatggaggctccagcagcatattgtaccgctacccctttgaaaggctgaagatgtctgctgatgatggcatccgaaatctatacttggattttggtggtcccgagg

SEQ ID NO: 554548 - DNA, 120 bp, Artificial Sequence
  ENSG00000168807_13 (sequence is synthesized)
gagaactgaccatggacctgcactcttgtccgaagccgattgtatttgtgttgcacacgtttttatcggccaaagtcactcgtatgggactgcttgtatgagcaacaaaaaatcagaaaa

SEQ ID NO: 554549 - DNA, 120 bp, Artificial Sequence
  ENSG00000168807_14 (sequence is synthesized)
gagccttgactgtcacaagaaatatttccacctcaaaaaaaaaaaagcacaaaaagaaactctttgctctccttcagcacagtgccttcccaaggacctgcaaataactgctgaaccata

SEQ ID NO: 554550 - DNA, 120 bp, Artificial Sequence
  ENSG00000168807_15 (sequence is synthesized)
accgtgtttaaagaagagcctacctttcacagtctaccttggccagatattctagcactctaaaaggctccaaaatgaagctgttgatttattctcatttcaaaatatggtttatgagta

SEQ ID NO: 554551 - DNA, 120 bp, Artificial Sequence
  ENSG00000168807_16 (sequence is synthesized)
attaggtttatttctactgctaaaaagaatggctcattgttttctttttttttcattgttttcatttttagacataatcaaatacccaagcattgttttctttttcttctccctgtagga

SEQ ID NO: 554552 - DNA, 120 bp, Artificial Sequence
  ENSG00000168807_17 (sequence is synthesized)
tttgtgttgtgcttagccttgatctcttgttcagaacaattgtcccttcccaggtgctagcttgcagcagcctgttgcttcctgagcattccagataggtcgtatgtcttggaatttact

SEQ ID NO: 554553 - DNA, 120 bp, Artificial Sequence
  ENSG00000168807_18 (sequence is synthesized)
gtcctcactagctccttccaccataggaagtccttgaattgtatcaccaaagggttgttccatttgccctggatctccctctatctcagcctggccatcacttcccaccttatcccaagc

SEQ ID NO: 554554 - DNA, 120 bp, Artificial Sequence
  ENSG00000168807_19 (sequence is synthesized)
tttgccactgtctctaggacttagaacttgtaaatttgatttgccttgccttctacttcctttctagtggtgactgagttgaaaagcaagttggaagccactgcttttaaagaaaagttt

SEQ ID NO: 554555 - DNA, 120 bp, Artificial Sequence
  ENSG00000168807_20 (sequence is synthesized)
tgcttggtttaggtttttccaattttatttttgttaggagccaggggataagatttattttaaatgaaaatcctcttcctaggttaagccattttttttattgcttaccaaatgtgcctt

SEQ ID NO: 554556 - DNA, 120 bp, Artificial Sequence
  ENSG00000168807_21 (sequence is synthesized)
tggttagggttagtggagctttattagtcactatttgaataactggaaatcactgccatttccaggagatcacctatcctagttttgaggaatagtcattgaggtgggtttccttaatgg

SEQ ID NO: 554557 - DNA, 120 bp, Artificial Sequence
  ENSG00000168807_22 (sequence is synthesized)
catctcttctagtaggcagatctgtttgaacaagataaatcctaaagagccagcctgcttgaggagtagacttggtgggtgaagccagcaattccgcacaaacgtcatgttgaattgttt

SEQ ID NO: 554558 - DNA, 120 bp, Artificial Sequence
  ENSG00000168807_23 (sequence is synthesized)
tgggctgcccaaaaacaacaggatgcagcatcctggctgtggcctggccctttgtggcagcagtggcatggacaagcaactgctaattcgagacttactattggcttcacagcacaccct

SEQ ID NO: 554559 - DNA, 120 bp, Artificial Sequence
  ENSG00000168807_24 (sequence is synthesized)
acagtgagcagggtgatgagaccgtggaacagctacctgcttttggttaagattgccagatatcattaggacacagtagcagcaagaatgctgattttgtagtgttagaaaatgaactca

SEQ ID NO: 554560 - DNA, 120 bp, Artificial Sequence
  ENSG00000168807_25 (sequence is synthesized)
gcttgtttttcctaattttgaaggtggtatatatctgcaaacatttaaaatggtataatatcatataaaatgtcaaaattagcacagtccctggatctcaaagaataggtaatattgact

SEQ ID NO: 554561 - DNA, 120 bp, Artificial Sequence
  ENSG00000168807_26 (sequence is synthesized)
tggatgttctttatgctctctgaagaaaggtctagggaaagttcttgtttgcttgattgatcaagagtgccacggaagaatgtgagcgctgtggagggtggaggagggtgtcacttcaga

SEQ ID NO: 554562 - DNA, 120 bp, Artificial Sequence
  ENSG00000168807_27 (sequence is synthesized)
tggggcaggcacagggggagaaaagaagagaaaaacacacctgtgtgcaaaatgagctatttggtttcagtgcggcctgaccgatggggaggacccatgagcagagagagttctaggtca

SEQ ID NO: 554563 - DNA, 120 bp, Artificial Sequence
  ENSG00000168807_28 (sequence is synthesized)
acattgtaactccattgtcctccttcacccataagtcagtcctccttcctcattacagtgaaaccaacaatatgcagaggttggggagagatgcctgttcttcccccagcttcatataat

SEQ ID NO: 554564 - DNA, 120 bp, Artificial Sequence
  ENSG00000168807_29 (sequence is synthesized)
tgtcaaagttccaaaaatgaattatctgaactgcttaaaactggaaattaaaatctagacaagaatatgtctttcaagagctttttatgttttgaaagttcataaacctaagattggctc

SEQ ID NO: 554565 - DNA, 72 bp, Artificial Sequence
  ENSG00000168807_30 (sequence is synthesized)
ccacctcctaggttcaagtgattctcctgagtagctggggttatagcttttcaccatgttggctaggctggt

SEQ ID NO: 554566 - DNA, 120 bp, Artificial Sequence
  ENSG00000168807_31 (sequence is synthesized)
aagtgctgggattataggtgtgagcccccgtgcctggcccacaataaattttcatttcagagaaggaaaaaaatctcttgaacgtccagaaatgatttctggaatcagaatttcaatatg

SEQ ID NO: 554567 - DNA, 120 bp, Artificial Sequence
  ENSG00000168807_32 (sequence is synthesized)
ttctggaatcagaatttcaatatgtaataccctcaggtaggcaatcttgaaccctctatgcagtgagagcattattaatatgagatgttgaatgatgcctttacagacttcagcagcaaa

SEQ ID NO: 554568 - DNA, 120 bp, Artificial Sequence
  ENSG00000168807_33 (sequence is synthesized)
gccatttggttgaggttttctgtgttaatgtgaaaagctaagccactgagatttgcaggggagcttctgagccaccctgcttgttggttatatgaggatgtaaaataggtggaattaaaa

SEQ ID NO: 554569 - DNA, 120 bp, Artificial Sequence
  ENSG00000168807_34 (sequence is synthesized)
tgtgagcaggaaaggcaaggcatgtgtgcattttcactcattttggtcaaggttaaactgacatgtatagcactgaggtctgtagggttcttaatatcttttgagtcttgctgtgaaatg

SEQ ID NO: 554570 - DNA, 120 bp, Artificial Sequence
  ENSG00000168807_35 (sequence is synthesized)
aaagtgtgggaggtttcctttgtccattagcagccccaagaaccagaacccttttgctgcttttcttacatacctaacagctctccagtcatgatgaccaaggttgttcttcaatcaaat

SEQ ID NO: 554571 - DNA, 120 bp, Artificial Sequence
  ENSG00000168807_36 (sequence is synthesized)
gtgtttgtgggattttcagtccgcaaatgaagtgctctctaatgaatgggacaccatgataaatatgtatttatatttagatgccaaagtatggcaaattatttccaaatgataactaca

SEQ ID NO: 554572 - DNA, 120 bp, Artificial Sequence
  ENSG00000168807_37 (sequence is synthesized)
aatgggaattttcgatattctaccttttttatagaaccagctcacttttcatttctttttcattttgaattaagaaaattgttgaggatgtggtgggttccagtgtgtggaatggaaagg

SEQ ID NO: 554573 - DNA, 120 bp, Artificial Sequence
  ENSG00000168807_38 (sequence is synthesized)
aaactgcagaatagtgtctgctccccattcagagggactgcttcctgtgccccccagacccggggcttcgacagcttctccacattccacacagatgcctaggagcagcgagttggtata

SEQ ID NO: 554574 - DNA, 120 bp, Artificial Sequence
  ENSG00000168807_39 (sequence is synthesized)
aaaagaaaaacattcagtttttctttttctgaaaaaggtaagtcctttcctgaagtcatcaaatgaaacattatctggaaattagtttctaatgttgtatatgaagaaatacttaaatat

SEQ ID NO: 554575 - DNA, 120 bp, Artificial Sequence
  ENSG00000168807_40 (sequence is synthesized)
aagttcctgcagtatttattagatagttgtaactgtaaactcacctccctagtagataagagtttcaggttaaatactggaacatatataggcagtcaaaaatactactttaaatgtcat

SEQ ID NO: 554576 - DNA, 120 bp, Artificial Sequence
  ENSG00000168807_41 (sequence is synthesized)
tcacctattttaaagccatgttttagcactttttaggccaaagaaggtctgatagtgcctgtttttatgttctgtactctcacaaactttgttactcaaaattattgcatggcaggagag

SEQ ID NO: 554577 - DNA, 120 bp, Artificial Sequence
  ENSG00000168807_42 (sequence is synthesized)
attggattatttatttcttatatttttataagtaaaaaaatctttctaaacaacaaatacctaacattattactgattgttttcctaatttatcctcctaagttgaatggtaacaaagct

SEQ ID NO: 554578 - DNA, 90 bp, Artificial Sequence
  ENSG00000168807_43 (sequence is synthesized)
tttcctaatttatcctcctaagttgaatggtaacaaagcttttccagctgaatgaatgcacttagctgataaaccagaagagacaggttc

SEQ ID NO: 554579 - DNA, 81 bp, Artificial Sequence
  ENSG00000168807_44 (sequence is synthesized)
tcactctgtcaccgaggttggagtgcagtggtatgatcatagctgactgcagcctcaaccttctgggctcaaatgatcctt

SEQ ID NO: 554580 - DNA, 120 bp, Artificial Sequence
  ENSG00000168807_45 (sequence is synthesized)
aattatgcttaaaaaaaaaattaagctgtgtggaatctggacaaggctatgtttctcctagaaacaggttttgctgtaaatggttttgatgggcgaaagtgtgagaaaaggttataatag

SEQ ID NO: 554581 - DNA, 120 bp, Artificial Sequence
  ENSG00000168807_46 (sequence is synthesized)
attcttttttttaattttgtgagaaattccaggtcttcttgcttaacttatatgcatgtggatatatttgttttcaaagccatggaagaatctctgttcatatattttaatgcaaattac

SEQ ID NO: 554582 - DNA, 120 bp, Artificial Sequence
  ENSG00000168807_47 (sequence is synthesized)
cttgtatgctgctatgcaaattctattaaaaggcctacctgcttaagaattaaacatttttgaaactttcagggaagacctgtagactcaagcactttctctgcttttttgtatcttatc

SEQ ID NO: 554583 - DNA, 120 bp, Artificial Sequence
  ENSG00000168807_48 (sequence is synthesized)
ttggacacttatgctgaattatgttcttattattttcactggttataagctattccttgtacataatatttaaactatccaaatatccagcatacatttccatgtggctgccatcggctg

SEQ ID NO: 554584 - DNA, 120 bp, Artificial Sequence
  ENSG00000168807_49 (sequence is synthesized)
ttgatgccatgaatgaaatggctggttagaaagccaaaggtcttcttttttcaattcctaatgaataagtaaaatgccagatctctttggtctcaaagcaaattgctctgatcagatcaa

SEQ ID NO: 554585 - DNA, 120 bp, Artificial Sequence
  ENSG00000168807_50 (sequence is synthesized)
atatctatgtaatgaaaagagacttacttaaatttgggattctgcttaaactttaagttgaatttgactgtagtcattcattctttttatatatctctgtcaggtatgacattaattacc

SEQ ID NO: 554586 - DNA, 120 bp, Artificial Sequence
  ENSG00000168807_51 (sequence is synthesized)
aggtggtattatactctactttgagtttggacatcactttcagttaaatttctgttgttattgtggcttttttttttttttaaccccactgaagatggaagtagagcagtctgccatctc

SEQ ID NO: 554587 - DNA, 120 bp, Artificial Sequence
  ENSG00000168807_52 (sequence is synthesized)
ctgctgttctttctctgtgccccctaattgcttggtaatctaaaattattctgactttccacatactgtctttaaaaaccaattgtagcaatctgcccgcctccaccctttaagctaaat

SEQ ID NO: 554588 - DNA, 120 bp, Artificial Sequence
  ENSG00000168807_53 (sequence is synthesized)
ctttcactgtgctggatacatagacactcgataaatgtgtgatgatagttctaaaataattatgctatatatcagggttctgtatttttgagcaatatcattattcctatgctgtgatgt

SEQ ID NO: 554589 - DNA, 120 bp, Artificial Sequence
  ENSG00000168807_54 (sequence is synthesized)
taaatggaatttattttacactagtaatagactgcttaagtggctgatttgaaacctttctctaaaaaaacaaaaacatctggcagatgagtgacacaaattcattctcttaaaggatag

SEQ ID NO: 554590 - DNA, 120 bp, Artificial Sequence
  ENSG00000168807_55 (sequence is synthesized)
aatttcaagttaaggataaggcacaataaataggcacatagaggacatctgtttttgtttttggttttggttttgtttttttttgtctctctgactagctaaactgccaactagaagaat

SEQ ID NO: 554591 - DNA, 120 bp, Artificial Sequence
  ENSG00000168807_56 (sequence is synthesized)
ggttgttatgtagtaactcagaagaatcttttaataagtttcttcttttgtttcaaaacaaacttgagcttcatttcttgccacctctattctttcttcccacgttgggtgactgaactg

SEQ ID NO: 554592 - DNA, 120 bp, Artificial Sequence
  ENSG00000168807_57 (sequence is synthesized)
atgcttattctagttttagaagaggatccacatttaatgtaaggcataaatatgccttttgcaaattattgcttgttctccagtgaacatttgatcatattcaacagaaatccaccatat

SEQ ID NO: 554593 - DNA, 120 bp, Artificial Sequence
  ENSG00000168807_58 (sequence is synthesized)
aaaccataatccttgaattgccccttttaaaatagattggttaaaaccaaaaacctataagagagaaatgatatttcattgtattgtaggtttgggaatcctggttagatttataatttc

SEQ ID NO: 554594 - DNA, 120 bp, Artificial Sequence
  ENSG00000168807_59 (sequence is synthesized)
cctgggcaacagagcgagacttcatctccaaaaaaagaaaaagaagaaaaagatttataatttctgagtcccctaagtccctttctcagtttgcaataatcttacgtccatgctattgac

SEQ ID NO: 554595 - DNA, 120 bp, Artificial Sequence
  ENSG00000168807_60 (sequence is synthesized)
cgtccatgctattgacactaattttgaaactggaaagctaattaatgacatattcatgtgttctttcatctaataaacatttattaatgtatagttctacaccaggcattctgaagggtc

SEQ ID NO: 554596 - DNA, 120 bp, Artificial Sequence
  ENSG00000168807_61 (sequence is synthesized)
caaaagaaagttcctgccctctagtagcacataatccgttatttctcagcacaccatgccatctgtttatcattcagcagttaagtaattcatcacttcatatttttaccaaagtatatt

SEQ ID NO: 554597 - DNA, 120 bp, Artificial Sequence
  ENSG00000168807_62 (sequence is synthesized)
tacaagtctgtttatctggatctggcaaactggaaaatgtttgaagggatactcaggctttgatccatgccaacatgaaaggactccaagcacatttaagtaggctggtcttttcatcat

SEQ ID NO: 554598 - DNA, 120 bp, Artificial Sequence
  ENSG00000168807_63 (sequence is synthesized)
gcatgattttttttttagtgcaaatttagactttagtttgggaaagagaacagtatacagtatcctttgtaagataaatcacaacaacaaaaattaagttttattgcacaaagtagataa

SEQ ID NO: 554599 - DNA, 120 bp, Artificial Sequence
  ENSG00000168807_64 (sequence is synthesized)
atgagaaagtctttcttaaaaaatgcttctttaactgtaacagcaaaactaaatgcatattttatcaaccccttatttctaattgctgtattcatttccacccttaaactatttaagcat

SEQ ID NO: 554600 - DNA, 120 bp, Artificial Sequence
  ENSG00000168807_65 (sequence is synthesized)
ttcatctgctgaaagtccttatatacatggtagacggaatatttctccattaatgatagatcaaaatgaagatatttaaaaattaacaaaatcaggccaaggcaggaggatcactttagc

SEQ ID NO: 554601 - DNA, 120 bp, Artificial Sequence
  ENSG00000168807_66 (sequence is synthesized)
ccaggaggtccagaccagcctgggcaacacagcgggaccccgactccatttaaaaaattaaaaaaaaaaaaaaaacttttaacatttaaaaaataaaaattaacaaaatttcacttattc

SEQ ID NO: 554602 - DNA, 120 bp, Artificial Sequence
  ENSG00000168807_67 (sequence is synthesized)
caggacacgctggcatttggactcaatgaaaagggcacctaaagaaaataaggctgactgaatgttttccataattttcacacaataacagtccctttctatccagcttgccttccattt

SEQ ID NO: 554603 - DNA, 120 bp, Artificial Sequence
  ENSG00000168807_68 (sequence is synthesized)
atctctagggttagcttttcaggcaacatccttggtcattgcccagaaagtacctgagctatcagtgattggaatggcacaggaaaccgaatcacatgggtgccctccccttggttttca

SEQ ID NO: 554604 - DNA, 120 bp, Artificial Sequence
  ENSG00000168807_69 (sequence is synthesized)
agtatcttggagttgtgcacaaaaattaggtcatgccttcagtgtcttgttctttaaacctaccctttgacaatcaggtgctaatgattgtatactattaaaaccagcacataagtattg

SEQ ID NO: 554605 - DNA, 120 bp, Artificial Sequence
  ENSG00000168807_70 (sequence is synthesized)
taaatgtgtgttcctcctaggttggaagaaatgtctttccttctatctgggtcctgttaaagcgggtgtcagttgtgtcttttcacctcgatttgtgaattaatagaattggggggagag

SEQ ID NO: 554606 - DNA, 120 bp, Artificial Sequence
  ENSG00000168807_71 (sequence is synthesized)
gaaatgatgatgtcaattaagtttcaggtttggcatgatcatcattctcgatgatattctcactttgtcgcaaatctgcccttatcgtaagaacaagtttcagaattttccctccactat

SEQ ID NO: 554607 - DNA, 120 bp, Artificial Sequence
  ENSG00000168807_72 (sequence is synthesized)
acgactccagtattatgtttacaatccattggatgagtgcagcattataagaccttggtgcccagaaaaatctgtcctttttggtaccaaacctgaggtcttttggaagataatgtagaa

SEQ ID NO: 554608 - DNA, 120 bp, Artificial Sequence
  ENSG00000168807_73 (sequence is synthesized)
aaccactacctattgaaggcctgttttggctaatctgtgcaaactctgatgatacctgcttatgtggattcttttccacactgctttcatttttaagtataaagacttagaaaactagaa

SEQ ID NO: 554609 - DNA, 120 bp, Artificial Sequence
  ENSG00000168807_74 (sequence is synthesized)
taatgcttttacaaataattaaaagtatgtgatgttctgggttttttccttctttttagaaccctgtatttaaacaagccttctttttaagtcttgtttgaaatttaagtctcagatctt

SEQ ID NO: 554610 - DNA, 120 bp, Artificial Sequence
  ENSG00000168807_75 (sequence is synthesized)
ctggataccaaatcaaaaacccaacgcgtaaaacagggcagtatttgtgttcctaattttaaaaagctttatgtatactctataaatatagatgcataaacaacacttccccttgagtag

SEQ ID NO: 554611 - DNA, 120 bp, Artificial Sequence
  ENSG00000168807_76 (sequence is synthesized)
cacatcaacatacagcattgtacattacaatgaaaatgtgtaacttaagggtattatatatataaatacatatatacctttgtaacctttatactgtaaataaaaaagttgctttagtca

SEQ ID NO: 554612 - DNA, 120 bp, Artificial Sequence
  ENSG00000168811_0 (sequence is synthesized)
atttcgctttcattttgggccgagctggaggcggcggggccgtcccggaacggctgcggccgggcaccccgggagttaatccgaaagcgccgcaagccccgcgggccggccgcaccgcac

SEQ ID NO: 554613 - DNA, 120 bp, Artificial Sequence
  ENSG00000168811_1 (sequence is synthesized)
gtgtcaccgagaagctgatgtagagagagacacagaaggagacagaaagcaagagaccagagtcccgggaaagtcctgccgcgcctcgggacaattataaaaatgtggccccctgggtca

SEQ ID NO: 554614 - DNA, 120 bp, Artificial Sequence
  ENSG00000168811_2 (sequence is synthesized)
gcctcccagccaccgccctcacctgccgcggccacaggtctgcatccagcggctcgccctgtgtccctgcagtgccggctcagcatgtgtccagcgcgcagcctcctccttgtggctacc

SEQ ID NO: 554615 - DNA, 120 bp, Artificial Sequence
  ENSG00000168811_3 (sequence is synthesized)
ctggtcctcctggaccacctcagtttggccagaaacctccccgtggccactccagacccaggaatgttcccatgccttcaccactcccaaaacctgctgagggccgtcagcaacatgctc

SEQ ID NO: 554616 - DNA, 120 bp, Artificial Sequence
  ENSG00000168811_4 (sequence is synthesized)
cagaaggccagacaaactctagaattttacccttgcacttctgaagagattgatcatgaagatatcacaaaagataaaaccagcacagtggaggcctgtttaccattggaattaaccaag

SEQ ID NO: 554617 - DNA, 120 bp, Artificial Sequence
  ENSG00000168811_5 (sequence is synthesized)
aatgagagttgcctaaattccagagagacctctttcataactaatgggagttgcctggcctccagaaagacctcttttatgatggccctgtgccttagtagtatttatgaagacttgaag

SEQ ID NO: 554618 - DNA, 120 bp, Artificial Sequence
  ENSG00000168811_6 (sequence is synthesized)
accaggtggagttcaagaccatgaatgcaaagcttctgatggatcctaagaggcagatctttctagatcaaaacatgctggcagttattgatgagctgatgcaggccctgaatttcaaca

SEQ ID NO: 554619 - DNA, 120 bp, Artificial Sequence
  ENSG00000168811_7 (sequence is synthesized)
gtgagactgtgccacaaaaatcctcccttgaagaaccggatttttataaaactaaaatcaagctctgcatacttcttcatgctttcagaattcgggcagtgactattgatagagtgatga

SEQ ID NO: 554620 - DNA, 120 bp, Artificial Sequence
  ENSG00000168811_8 (sequence is synthesized)
gctatctgaatgcttcctaaaaagcgaggtccctccaaaccgttgtcatttttataaaactttgaaatgaggaaactttgataggatgtggattaagaactagggagggggaaagaagga

SEQ ID NO: 554621 - DNA, 120 bp, Artificial Sequence
  ENSG00000168811_9 (sequence is synthesized)
tgggactattacatccacatgatacctctgatcaagtatttttgacatttactgtggataaattgtttttaagttttcatgaatgaattgctaagaagggaaaatatccatcctgaaggt

SEQ ID NO: 554622 - DNA, 120 bp, Artificial Sequence
  ENSG00000168811_10 (sequence is synthesized)
gtttttcattcactttaatagaagggcaaatatttataagctatttctgtaccaaagtgtttgtggaaacaaacatgtaagcataacttattttaaaatatttatttatataacttggta

SEQ ID NO: 554623 - DNA, 120 bp, Artificial Sequence
  ENSG00000168811_11 (sequence is synthesized)
tgcagtgtggttaaaaactgtgcatcaaatctcacctgcttctaaaaattcacgtttctggtatccatcattatgggattttaactggtcctacttcagaagttagatttgggagaaaaa

SEQ ID NO: 554624 - DNA, 120 bp, Artificial Sequence
  ENSG00000168811_12 (sequence is synthesized)
ttatttttaaaaaatggttttttttgcaacaatgtgaatacacttaacacttaaaaatagttcagatgctaaatattatgatatgtgtttttaccataataaaaaaaatttgagacctga

SEQ ID NO: 554625 - DNA, 120 bp, Artificial Sequence
  ENSG00000168811_13 (sequence is synthesized)
aaaaatgaaaagtttcagcctgtatgatgaattcatatcactgatgtctgattattttttcctctagaatgggagttgcctggcctccagaaagacctcttttatgatggtaagacacac

SEQ ID NO: 554626 - DNA, 120 bp, Artificial Sequence
  ENSG00000168811_14 (sequence is synthesized)
agctctttcctcaaatgcaatgggggaaatgtttttagcccatctcaatggatacttccccatcttgtcatgtcacccaggccctgtgccttagtagtatttatgaagacttgaagatgt

SEQ ID NO: 554627 - DNA, 120 bp, Artificial Sequence
  ENSG00000168813_0 (sequence is synthesized)
gacccacccgcggctcacgtgatccgtccccagcgccgccattttggagctccggatgaggagggggaaaccgggggaaaagagggaaaagagccgggagagaggtgggcaaggacgagg

SEQ ID NO: 554628 - DNA, 120 bp, Artificial Sequence
  ENSG00000168813_1 (sequence is synthesized)
gcgagggcacggccgggtcctggctggccaaacgaggctcgcggaagcagcagccgccgcctgaccgcagatatggaagaaagtagcagtgttgccatgttggtgccagatattggggaa

SEQ ID NO: 554629 - DNA, 120 bp, Artificial Sequence
  ENSG00000168813_2 (sequence is synthesized)
caggaagctatactgactgctgaaagtatcatcagtccttcattggaaattgatgaacaaagaaaaactaaaccagatccattaatccatgttatccagaagttaagcaagatagtggaa

SEQ ID NO: 554630 - DNA, 120 bp, Artificial Sequence
  ENSG00000168813_3 (sequence is synthesized)
aatgaaaagtcacaaaaatgtcttttaattgggaagaaacgcccacgttcaagtgctgcaacacactctcttgaaacccaagaactttgtgagattccggctaaagtaatccagtcacct

SEQ ID NO: 554631 - DNA, 120 bp, Artificial Sequence
  ENSG00000168813_4 (sequence is synthesized)
gctgctgatactagaagggctgagatgtcacaaacaaattttacccctgacactcttgcccagaatgaagggaaggctatgtcttatcagtgtagcctttgtaagtttctatcatcatcc

SEQ ID NO: 554632 - DNA, 120 bp, Artificial Sequence
  ENSG00000168813_5 (sequence is synthesized)
ttttccgtgttaaaagatcatattaagcaacatggtcagcaaaatgaagtgatactgatgtgctcagagtgccatattacatctagaagccaggaggaacttgaagcccacgtggtgaat

SEQ ID NO: 554633 - DNA, 120 bp, Artificial Sequence
  ENSG00000168813_6 (sequence is synthesized)
gaccatgacaatgatgccaatatccacacccaatccaaagcccaacagtgcgtaagcccctccagctctttgtgtcggaaaaccacagaaagaaatgaaaccattccagatatcccagta

SEQ ID NO: 554634 - DNA, 120 bp, Artificial Sequence
  ENSG00000168813_7 (sequence is synthesized)
agtgtggacaatctacagactcatactgtccaaactgcatctgtggcagaaatgggtaggaggaaatggtatgcatacgaacagtacggcatgtatcgatgcttgttttgtagttatact

SEQ ID NO: 554635 - DNA, 120 bp, Artificial Sequence
  ENSG00000168813_8 (sequence is synthesized)
tgtggccagcagagaatgttgaaaacacacgcttggaaacatgctggggaggttgattgctcctatccaatctttgaaaatgaaaatgaacccctaggcctgctggattcttcagcagct

SEQ ID NO: 554636 - DNA, 120 bp, Artificial Sequence
  ENSG00000168813_9 (sequence is synthesized)
gctgcgcctggtggggtcgatgcagtcgtcattgctattggagagagtgaactgagtatccacaatgggccatcagtgcaagtgcagatttgcagctcagaacagttatcatcttcatct

SEQ ID NO: 554637 - DNA, 120 bp, Artificial Sequence
  ENSG00000168813_10 (sequence is synthesized)
cctttagaacagagtgcagaaagaggagtacacctaagtcagtcagttaccctggaccccaatgaggaagaaatgctagaagtgatttctgatgcagaggagaatctgattcctgatagc

SEQ ID NO: 554638 - DNA, 120 bp, Artificial Sequence
  ENSG00000168813_11 (sequence is synthesized)
ctgcttacatcagcacagaaaatcatcagcagcagccccaataaaaaagggcatgttaacgtgatagtggagcgattgccaagtgctgaagaaaccctttcacagaagcgcttcctcatg

SEQ ID NO: 554639 - DNA, 120 bp, Artificial Sequence
  ENSG00000168813_12 (sequence is synthesized)
aacactgaaatggaagaagggaaggacctgagcctgacagaagctcagattgggcgcgaaggaatggatgatgtttatcgtgctgataaatgtactgttgatattgggggattgatcata

SEQ ID NO: 554640 - DNA, 120 bp, Artificial Sequence
  ENSG00000168813_13 (sequence is synthesized)
ggctggagcagttcagagaaaaaagacgagttaatgaataaaggcctggctactgatgagaatgccccaccaggccggagaaggacaaattctgagtctcttcgattacactcattagct

SEQ ID NO: 554641 - DNA, 120 bp, Artificial Sequence
  ENSG00000168813_14 (sequence is synthesized)
gcagaagcccttgtcacaatgcctataagagctgcagagttgacaagagccaacctggggcactatggagatataaaccttttagatccagatactagtcaaaggcaagtagatagtaca

SEQ ID NO: 554642 - DNA, 120 bp, Artificial Sequence
  ENSG00000168813_15 (sequence is synthesized)
ttggcagcgtactcaaaaatgatgtcgccacttaaaaactcttcagatggattaactagtcttaaccaaagcaactccaccttggtagcactcccagagggtaggcaggaattgtcagat

SEQ ID NO: 554643 - DNA, 120 bp, Artificial Sequence
  ENSG00000168813_16 (sequence is synthesized)
gggcaggttaagacaggcatcagcatgtccttactcaccgtcattgaaaaattgagagaaaggacagaccaaaacgcttcagacgatgacattttgaaagagttgcaggacaacgcccag

SEQ ID NO: 554644 - DNA, 120 bp, Artificial Sequence
  ENSG00000168813_17 (sequence is synthesized)
tgccaacccaacagcgatacaagtttgtccggaaacaatgtggtggaatacatcccgaatgctgaacgaccctaccgttgccgcctgtgtcactacacaagtggcaacaagggctacatc

SEQ ID NO: 554645 - DNA, 120 bp, Artificial Sequence
  ENSG00000168813_18 (sequence is synthesized)
aagcagcacttacgagtccatcgacagagacagccttatcagtgtcctatctgcgagcacatagcggacaacagcaaagatttggagagtcacatgatccaccactgtaagacaagaata

SEQ ID NO: 554646 - DNA, 120 bp, Artificial Sequence
  ENSG00000168813_19 (sequence is synthesized)
taccagtgcaagcagtgtgaagaatccttccattataagagtcaattgaggaaccatgagagagaacagcacagtcttccagataccttgtcaatagcaacttctaatgagccaagaatt

SEQ ID NO: 554647 - DNA, 120 bp, Artificial Sequence
  ENSG00000168813_20 (sequence is synthesized)
tccagtgatacagctgatggaaaatgtgtccaggaagggaataagtcttcagtccagaaacaatatagatgtgatgtgtgtgattatacaagtacaacatatgttggtgtcagaaaccac

SEQ ID NO: 554648 - DNA, 120 bp, Artificial Sequence
  ENSG00000168813_21 (sequence is synthesized)
aggcgaatccataactctgataagccgtacagatgctctctgtgtgggtatgtgtgtagccatcctccttctttgaagtctcatatgtggaaacatgcaagtgaccaaaattacaactac

SEQ ID NO: 554649 - DNA, 120 bp, Artificial Sequence
  ENSG00000168813_22 (sequence is synthesized)
gaacaagtaaacaaggctattaacgacgcgatttcacaaagtggcagagttctggggaaatcccctggaaagactcaattaaagagcagtgaagagagtgcagatcccgtcactggaagt

SEQ ID NO: 554650 - DNA, 120 bp, Artificial Sequence
  ENSG00000168813_23 (sequence is synthesized)
tcagaaaatgcagtgtcatcttcagaactgatgtcccagactcccagtgaagttctgggtaccaacgagaatgagaaactgagccctacaagtaatacctcatatagtttagaaaaaatc

SEQ ID NO: 554651 - DNA, 120 bp, Artificial Sequence
  ENSG00000168813_24 (sequence is synthesized)
tccagtctggcccctcctagcatggagtactgcgttttactcttctgctgttgtatttgtggttttgaatcaaccagcaaagaaaacctcttggatcatatgaaagagcacgagggtgaa

SEQ ID NO: 554652 - DNA, 120 bp, Artificial Sequence
  ENSG00000168813_25 (sequence is synthesized)
attgtaaacatcatcctgaataaggaccacaatacagctctaaacacaaattaggtggaataatgactcgagcaggaaagcagtagaagaggattccttcaccacagtttcacctttacg

SEQ ID NO: 554653 - DNA, 120 bp, Artificial Sequence
  ENSG00000168813_26 (sequence is synthesized)
ctgtcagacaacttcctgccacagaagaagtcgttgatgtgatttttgaggaaatgacagatgtgactttggaaccaaacttgtaataaaaggaattccaaatggacaagcagtaatgat

SEQ ID NO: 554654 - DNA, 120 bp, Artificial Sequence
  ENSG00000168813_27 (sequence is synthesized)
atttaaatattttgagtgagggggagtgggtcaaagaggaagtagaggtgtaatcctgtattaaccctctgtcaccccttcttagtgtcgagtgtatttattaataaaagcttattagag

SEQ ID NO: 554655 - DNA, 120 bp, Artificial Sequence
  ENSG00000168813_28 (sequence is synthesized)
tgtagaaatgccagcaagagttaagaaagggcttttcaggaactattctaaaagtcataaaagggtcacagtcttaagcagagcttagttttcttctcacttgtcaaatgcagactgtga

SEQ ID NO: 554656 - DNA, 120 bp, Artificial Sequence
  ENSG00000168813_29 (sequence is synthesized)
ggcctccagtgagaaatgggaggcagttctgggagggggttttttcagtgtcaccaacagagtcaacaaggaaacataattagagggctttgaaatgatctactgaaatacctaaattga

SEQ ID NO: 554657 - DNA, 120 bp, Artificial Sequence
  ENSG00000168813_30 (sequence is synthesized)
tagaaattaatcatactcaatctaggacatgttcctttactccttaaaaaagaaaggaaagatctctaaattcaaagctagattgtaaataggcattcaagaagtattgtcttaaattta

SEQ ID NO: 554658 - DNA, 120 bp, Artificial Sequence
  ENSG00000168813_31 (sequence is synthesized)
ctaaatcgtcttccgtgttctcagaggttcttttcagtgtctgtcagaacttggcatactttctccatagtacgtagaccttctaatactctgctaaatgaaaccacacttgttatctga

SEQ ID NO: 554659 - DNA, 120 bp, Artificial Sequence
  ENSG00000168813_32 (sequence is synthesized)
aagtgtgtgaaagaaacaatgtatgaaaatttacatttgatcatccggcattggaaatagtttgaactatttccaaaaatcccttaggggatgaggggtgaaatttaaaagctcctgaaa

SEQ ID NO: 554660 - DNA, 120 bp, Artificial Sequence
  ENSG00000168813_33 (sequence is synthesized)
atgagtactgctgtgttgagcttttctttcctggggtatattaatttagttatatttagcagaagaggaatataaccaaatgtgactaaaatatagcagaaattcaggttgtttgtaaaa

SEQ ID NO: 554661 - DNA, 120 bp, Artificial Sequence
  ENSG00000168813_34 (sequence is synthesized)
attttaataacaaatagcatttggcaagtctataggattcttcctatctggaaattctattttgttagagtgcgataggacatatggaaaaccaacacaaagtgctttagcattaaaact

SEQ ID NO: 554662 - DNA, 120 bp, Artificial Sequence
  ENSG00000168813_35 (sequence is synthesized)
caccatcaaatagatgtaatcttattaattacacattttgtattttaattatttcaaggagtgaagaaaacagggtgtttttgtttttgtagttctgattactcatttatgcattgtttt

SEQ ID NO: 554663 - DNA, 120 bp, Artificial Sequence
  ENSG00000168813_36 (sequence is synthesized)
gtttaagtaaattctgcctacaagtgaaaaggtcggtgcgctcttctgtgcaccatcctcacggtgctatttccgaatatctgaatattgatttctaacacctggatgaggctgtgaccg

SEQ ID NO: 554664 - DNA, 120 bp, Artificial Sequence
  ENSG00000168813_37 (sequence is synthesized)
atcaacttggaacactgtaaaggttttcgaatgggatacgctgtaggcacgttttaagaagtattctgttcctaaagtccaggtatgattggattaatatttataaaattattattagga

SEQ ID NO: 554665 - DNA, 120 bp, Artificial Sequence
  ENSG00000168813_38 (sequence is synthesized)
attatttaagtggggccaggcatcttgcaacattttctgatttttttttctttctttctaatctcattttggtgatatttaaacaaacataaatgattgtaactttgcagcttttttatt

SEQ ID NO: 554666 - DNA, 120 bp, Artificial Sequence
  ENSG00000168813_39 (sequence is synthesized)
taggtagctttaatttatttatgaaagttaatccatttctgatacgtggtttttaaaaatatgaaatggatttatatatactatattcctcaaatccactgtatgtggacttatattcat

SEQ ID NO: 554667 - DNA, 120 bp, Artificial Sequence
  ENSG00000168813_40 (sequence is synthesized)
tttctccttttttcggaattgaaacattttaatttcaaattcaaatagaacatttaaaatgatttcattattattacccatactgttgccactcatattgtaagtcagttttttcattgc

SEQ ID NO: 554668 - DNA, 120 bp, Artificial Sequence
  ENSG00000168813_41 (sequence is synthesized)
tggtacaatgactcagtatttctttataaaaatctgttgttctgaaaatcaacaaccttagaaggattttgtcttagaaaatttccttggctttagttttatatcatatttagaaaataa

SEQ ID NO: 554669 - DNA, 120 bp, Artificial Sequence
  ENSG00000168813_42 (sequence is synthesized)
taatgaaaagcatccccaaaatttcaatgatgtgaatttttaaattacctttatttctttaaactaattccattgattgttacttaaattttccacctggaatcatggatttaaaatttc

SEQ ID NO: 554670 - DNA, 120 bp, Artificial Sequence
  ENSG00000168813_43 (sequence is synthesized)
cccacctcatggggaaaaaactaacccagaagttcaaagcctttaaagtttcatctgattctggccttagaattgtccttaaaagctttctcctggccgataggaggaagcatatatcaa

SEQ ID NO: 554671 - DNA, 120 bp, Artificial Sequence
  ENSG00000168813_44 (sequence is synthesized)
ggaggttctttcccttcccattatcattttgtggcaagccttaagttaacaatgtgtctaccaagaacaattgagttttctaaaagtaataatgaagattatgcaattctaactgtagaa

SEQ ID NO: 554672 - DNA, 120 bp, Artificial Sequence
  ENSG00000168813_45 (sequence is synthesized)
gtggctcacacctgtaatcccaatactttagaaggccaaggctggaggactgcttgagtccagaagtttaagaccagcctgggcaacacggggagaccctgtctctacaagaaattaaaa

SEQ ID NO: 554673 - DNA, 120 bp, Artificial Sequence
  ENSG00000168813_46 (sequence is synthesized)
gggcaacacggggagaccctgtctctacaagaaattaaaaattagccaggcatagttggcacgtgcctgtagcaccagctacttgggaggttaaggtgggaggatcacttgagcctggga

SEQ ID NO: 554674 - DNA, 120 bp, Artificial Sequence
  ENSG00000168813_47 (sequence is synthesized)
gaggcttgcagtgagccgtgatggcaccattgcactccaaccggggtgacagatgaggtcctctgtttacctccccccccaaaaaaaaaattcagtaggaattccttcatagaataacat

SEQ ID NO: 554675 - DNA, 120 bp, Artificial Sequence
  ENSG00000168813_48 (sequence is synthesized)
gttatttattggtattgacttcttattagacagagctcatagtatttgttttctgctccgaacacttaaaaaatactaagacgtgatagtgaaaatagctttgaaaagaaactacatatg

SEQ ID NO: 554676 - DNA, 120 bp, Artificial Sequence
  ENSG00000168813_49 (sequence is synthesized)
gcaaaggtggggaggggggaagatgatgcattctgatcattataaagaatacttttcagggctctatcattttctccctttctctaatcatccagaatatggcgggtgtcccagtgttca

SEQ ID NO: 554677 - DNA, 120 bp, Artificial Sequence
  ENSG00000168813_50 (sequence is synthesized)
acagtatcatgctaatattccatttgatcggtagtccaagttctttggccagatagtgcaatgttgtgacaccgaccgaagcctttgttctggatctttcttcctattgaaggtggctgc

SEQ ID NO: 554678 - DNA, 120 bp, Artificial Sequence
  ENSG00000168813_51 (sequence is synthesized)
tggtggcttcataattttctgttttttttctcacaaagtaaatggtgggcatccatgtttacattgcaccttcccgtgctgtaattggcttgacaaagacaagcaggcttctctgttgag

SEQ ID NO: 554679 - DNA, 120 bp, Artificial Sequence
  ENSG00000168813_52 (sequence is synthesized)
acttattgtgtttttagttttcatagacacttatttaatctttttaaattgtacagcaaggtgctctaagtaatattcgataaaatatatttaatagaaatttgcgtttgatattcatga

SEQ ID NO: 554680 - DNA, 120 bp, Artificial Sequence
  ENSG00000168813_53 (sequence is synthesized)
acatgaatacatgtatttttttaagaaataagtattgtgtaacactatggcattgcttctatagccaaagtataaaaatttctggaatactgacatgtaaagactacagttaattctgac

SEQ ID NO: 554681 - DNA, 120 bp, Artificial Sequence
  ENSG00000168813_54 (sequence is synthesized)
actgtatcttattaaaataggatgatttgcattttgtaaaattatcctgcacatcaagctgcatgccttaaagcggaaactctaggactgtgttcatgggagagcagttcatctgttcag

SEQ ID NO: 554682 - DNA, 120 bp, Artificial Sequence
  ENSG00000168813_55 (sequence is synthesized)
aacagtgaggcaaggtctgtagtgcttctttaactacctttggaaatactgtacaatgttagaataatttattttgctttacaggagtttgtcatgtattgactttaatattgtattttg

SEQ ID NO: 554683 - DNA, 120 bp, Artificial Sequence
  ENSG00000168813_56 (sequence is synthesized)
gtaataaattttttgttaaaaaaaacttggctccaagttctattaaccacaggttgtgttcattcttttcctggaaatgatgactttattgcttagaaagttgtaaataattaaaagctt

SEQ ID NO: 554684 - DNA, 120 bp, Artificial Sequence
  ENSG00000168813_57 (sequence is synthesized)
cccaagagttaaatgaaggttatgatgactcttgataacttgttaatctgttgctgactagcattagactgttacacgaagataaactgaataagcatttagctttttaaatcattttaa

SEQ ID NO: 554685 - DNA, 120 bp, Artificial Sequence
  ENSG00000168813_58 (sequence is synthesized)
aaattaagtctaattttgaagcttttttccttgctacccagttcagtttctcttccaaatgtgacacgcttatatgctttcaattctgatatagtcaaagtgctaaagactagttctgct

SEQ ID NO: 554686 - DNA, 120 bp, Artificial Sequence
  ENSG00000168813_59 (sequence is synthesized)
attgacgaaggaattagcattccttagtgaaggccaaaaactacagtgatatgttcacaccttgatcactctgtcgtctatacagacagctattgacatatttgttgcattgacgaagct

SEQ ID NO: 554687 - DNA, 120 bp, Artificial Sequence
  ENSG00000168813_60 (sequence is synthesized)
aacatcatctgactgtatcgtgggtctggttatccatttgtgccctagaatcctgggtcacctcagttgaaagtgaccaaggccaaatatttcgtcccatgcttcccagggacaacataa

SEQ ID NO: 554688 - DNA, 120 bp, Artificial Sequence
  ENSG00000168813_61 (sequence is synthesized)
tcatatcccctgtctttgaaaaacccaatctgaaactgtgtcactaacctccaaattaaagaatccgagcatggaagctctagaacgtatggtccagtgtggcagccactataatatcta

SEQ ID NO: 554689 - DNA, 120 bp, Artificial Sequence
  ENSG00000168813_62 (sequence is synthesized)
agtgtaaaatacatagcagttgcaaagacttagtacaaaaagaatggaaatgtattaacagttttttatattgattacatgttgaaatgatattttggtttaaataaaatattaaaatta

SEQ ID NO: 554690 - DNA, 120 bp, Artificial Sequence
  ENSG00000168813_63 (sequence is synthesized)
tgaagattgatccaagggactgtattaatttcaggaattgatttgaaagacactggctctgccacttaacagccatgtaaccttggatatggaagaaagtagcagtgttgccatgttggt

SEQ ID NO: 554691 - DNA, 120 bp, Artificial Sequence
  ENSG00000168813_64 (sequence is synthesized)
gcaggctgcagtgacttgcacatgacataaaagtgcccttagttgtcatggttggttattttcagggcaaaagcctatattctcctccatttttgtaccatggatgtgagtgaatctgat

SEQ ID NO: 554692 - DNA, 120 bp, Artificial Sequence
  ENSG00000168813_65 (sequence is synthesized)
ctctgtttctgaggaaatgccaagtactgaatgaagcagatgattactaggtcctaggtgagaagccctagatagtaaggattcatcttcagttgaaacttaagagccccttagaaggtg

SEQ ID NO: 554693 - DNA, 120 bp, Artificial Sequence
  ENSG00000168813_66 (sequence is synthesized)
acatggaaaacaggcctcccctccctctctcggcaccagttgacctactgagaacagagcttttgcagatggtaggcccccaccccaaactttaactggggctccccgctgtgatcttat

SEQ ID NO: 554694 - DNA, 120 bp, Artificial Sequence
  ENSG00000168813_67 (sequence is synthesized)
tcttacccaagtatgactgccagatttcatctgcattattaaaaaaaaaaaagcacacacacagacacacaagatctttttatgtactagttaagtagcagtcaaccgagtttctggtaa

SEQ ID NO: 554695 - DNA, 120 bp, Artificial Sequence
  ENSG00000168813_68 (sequence is synthesized)
taagaatattagaatcaaaagatttaattagagctccatgaaaaggcggatgccacatccggagaattaaggataaagtgtactaagctgtgccgctttggttcagctcacttaaattga

SEQ ID NO: 554696 - DNA, 120 bp, Artificial Sequence
  ENSG00000168813_69 (sequence is synthesized)
tatactttaaatgtctccagtgtggcacataatgtttatgggagataagacatattggggtgactttcccttttagatttgctaagaattaaagttagaaacgactacagagtgaaatgt

SEQ ID NO: 554697 - DNA, 120 bp, Artificial Sequence
  ENSG00000168813_70 (sequence is synthesized)
tttaccataatgtttcattaaattataccccagaaagcataactgattctagaatgcttctgaaagaactgattttgacaccactgtagcaccaaaattctcatgtcaaacagatgtcat

SEQ ID NO: 554698 - DNA, 120 bp, Artificial Sequence
  ENSG00000168813_71 (sequence is synthesized)
ccctgtaaaactctctgaaacaaaaggagtttatgatatagcatctgtttttgcagtagatggctgagctaaaacagttttgtttcctttttacaaaatagccctaaatgcctcctttta

SEQ ID NO: 554699 - DNA, 120 bp, Artificial Sequence
  ENSG00000168813_72 (sequence is synthesized)
ttttaattcattatgtttccatatcccctttaaaggagacattaaaacgtctgatatgattggaccataaatccctaatgaaaggatgaagtaaatactactcagtagcaccacctgcag

SEQ ID NO: 554700 - DNA, 120 bp, Artificial Sequence
  ENSG00000168813_73 (sequence is synthesized)
ttaatatcagtgttggaagatgtcttttttagcaccgtcctaaaaagcaaacatttcaaactgtccaaatgagttaacattaaaattcacaattttaataaaaagattaaagtgtcagct

SEQ ID NO: 554701 - DNA, 120 bp, Artificial Sequence
  ENSG00000168813_74 (sequence is synthesized)
caaaattaaaataaccacttcagactttacagtattaatgaatgtttactagattttatgttgcagcatcttttctttgtggctcatgctttttttttagggttacatgcatggattttt

SEQ ID NO: 554702 - DNA, 120 bp, Artificial Sequence
  ENSG00000168813_75 (sequence is synthesized)
aaattgcctgccatgcctcttttcctccacctggctccatttgcttttttctctcagtactgtagcagttcaaatggctgcatacttatacctggatgggtactttattaactcaatatt

SEQ ID NO: 554703 - DNA, 120 bp, Artificial Sequence
  ENSG00000168813_76 (sequence is synthesized)
agatattttgaaatctggttgtcaggccaaagaaaaaatttttagctcacaaataaggtaataataattcatgctttgttaaaacttctttacctatttagtaaacttgttaaacaagaa

SEQ ID NO: 554704 - DNA, 120 bp, Artificial Sequence
  ENSG00000168813_77 (sequence is synthesized)
gagagatttgtgcctctgtgatcctcagtctctgccattcagatagcacagataccttagggcatgtttcagcttaacatttgcttggccaaaaggcatggcctgcctgtcttgagctag

SEQ ID NO: 554705 - DNA, 120 bp, Artificial Sequence
  ENSG00000168813_78 (sequence is synthesized)
atactgtgttaggtgctgggagtacagtgaaaggcatcactgcccttcaggaatccaactcagtgaagaagacagaacgaggctgatgggtatgtcagcagataccgcaggagctcaaat

SEQ ID NO: 554706 - DNA, 120 bp, Artificial Sequence
  ENSG00000168813_79 (sequence is synthesized)
agagccgcaagcaaagccctttcgtatggtgttactccatgaaacctaattaaattgttttttattggaaacctataatttgccaagcgctggggattcagtctaaacaaaacaagcaga

SEQ ID NO: 554707 - DNA, 120 bp, Artificial Sequence
  ENSG00000168813_80 (sequence is synthesized)
tccttatcctcagggaatagacagcttagtggcagggcagagattttacccagacatgcaggtaaagtacagactttgctaaaggaaaaatataggacttactaaactatgctgtgaggt

SEQ ID NO: 554708 - DNA, 120 bp, Artificial Sequence
  ENSG00000168813_81 (sequence is synthesized)
tctagcatttccaatttgtagatgagaaaactgagacttcaagaggcaaaataatttacccatgatcatactggtagaaagtggcagagcgaggactaagcccaagtttttgaactttaa

SEQ ID NO: 554709 - DNA, 120 bp, Artificial Sequence
  ENSG00000168813_82 (sequence is synthesized)
atccaatattctttccattggaaacagttgcttgaagtagcacaggctctcattctgtgctatattaagtttttccatctgtcagttttattagttgtcattgatctgtaatatttctca

SEQ ID NO: 554710 - DNA, 120 bp, Artificial Sequence
  ENSG00000168813_83 (sequence is synthesized)
cacaaaaccattatccaatatttcacacttcattttttagggtttttttaaaactgtatttggaacagtgccatttataatcaagtccaagtttttaacctaccaattaagagcaatact

SEQ ID NO: 554711 - DNA, 120 bp, Artificial Sequence
  ENSG00000168813_84 (sequence is synthesized)
tagattataattatgattagtgtgtatattaacgttatagatttataccaggaaattaggacattttgttctgcttggcagtagttattagcaaaagaaaatttcaattttagaaaccgt

SEQ ID NO: 554712 - DNA, 120 bp, Artificial Sequence
  ENSG00000168813_85 (sequence is synthesized)
aaatttaacttaaggattttctttgttgaaatttcagtgtgggttttcctttgtataataccacggattttacttttatgcggtgtatacaggtgttctacctaagctttcttcctgcca

SEQ ID NO: 554713 - DNA, 120 bp, Artificial Sequence
  ENSG00000168813_86 (sequence is synthesized)
agagacacacagttcttcctgctctgcctttttcatgagcttccatgcttgctttgtttctgaatataaagcagagtgtgaatagcctgtggactgtatgctgacagacaagtacatgaa

SEQ ID NO: 554714 - DNA, 120 bp, Artificial Sequence
  ENSG00000168813_87 (sequence is synthesized)
gcgttgaatatcttcaagaaatcgttttatatgatcaagtcactcaactcgtgttgacataagcttaccccaacttgaattactcagccctgttgttgcagagtgagtttagtaacatgg

SEQ ID NO: 554715 - DNA, 120 bp, Artificial Sequence
  ENSG00000168813_88 (sequence is synthesized)
ctacttttcgttggatccatgtctcctgcgtttcggagagctgcatattcatgtcagtcataacctttgtccctgtaacctgtcagttaactagaaagaattatacattgcatagcactt

SEQ ID NO: 554716 - DNA, 120 bp, Artificial Sequence
  ENSG00000168813_89 (sequence is synthesized)
taaagaatgcacagttcatgttgaaaatcatttcgttcctttttgctttctcaagtagtagagtggtacaaagtattaattgtgtaagtttttctttgtatgattaaataatttagagca

SEQ ID NO: 554717 - DNA, 120 bp, Artificial Sequence
  ENSG00000168813_90 (sequence is synthesized)
aatattttgcatattactacatcaaaaatctttccaaatattgtaataactaaagtaatctggaatgtttgtcttgattcttactaattctttataatataaaagaccttctttcattga

SEQ ID NO: 554718 - DNA, 120 bp, Artificial Sequence
  ENSG00000168813_91 (sequence is synthesized)
ttctaggacttccattctaggacctctctgaaatcagtgtacctcttagaatcagtaacatcttagattcagtgaaatacgatatgtctaataagggttcggaggaagggctataataat

SEQ ID NO: 554719 - DNA, 120 bp, Artificial Sequence
  ENSG00000168818_0 (sequence is synthesized)
agtccttcagcggccgggttcgcgccgcggtcgccggctgcttacgtgggcgggcctagtgtggggctgagggtgcgggtcgctatggcggtggacatcacgctgctattccgggccagc

SEQ ID NO: 554720 - DNA, 120 bp, Artificial Sequence
  ENSG00000168818_1 (sequence is synthesized)
gtcaagaccgtgaagacgcggaacaaggcgctgggagtggcggtgggcggcggggtcgatggcagccgggacgagctgttccgccggagcccccggcccaagggcgacttctccagccgg

SEQ ID NO: 554721 - DNA, 120 bp, Artificial Sequence
  ENSG00000168818_2 (sequence is synthesized)
gcccgcgaagtgatttctcacattggcaaactgagagattttcttctggaacacaggaaagattatattaatgcttatagccataccatgtctgaatatgggaggatgacagacacagaa

SEQ ID NO: 554722 - DNA, 120 bp, Artificial Sequence
  ENSG00000168818_3 (sequence is synthesized)
cgagaccagatagaccaggatgcccagatattcatgaggacctgttcagaagcaattcagcaactacgaacagaagctcacaaggagatacattcccagcaagtgaaggagcacaggacc

SEQ ID NO: 554723 - DNA, 120 bp, Artificial Sequence
  ENSG00000168818_4 (sequence is synthesized)
gctgttttggatttcattgaagattacttgaaaagagtatgtaaactttactcagaacagagagccatccgagttaaaagagtggtggataagaaaagattatctaagctggaaccagaa

SEQ ID NO: 554724 - DNA, 120 bp, Artificial Sequence
  ENSG00000168818_5 (sequence is synthesized)
ccaaatacaaagacaagagaatccacatcttctgagaaagtttcacagagtccttcaaaagactctgaagaaaaccctgccactgaagaacgtccagaaaaaattttggctgaaacacaa

SEQ ID NO: 554725 - DNA, 120 bp, Artificial Sequence
  ENSG00000168818_6 (sequence is synthesized)
cctgaattgggaacgtggggagatggcaaaggcgaagatgagttatccccagaagaaatacaaatgtttgaacaggaaaatcagcgactaattggtgaaatgaacagcttgtttgatgaa

SEQ ID NO: 554726 - DNA, 120 bp, Artificial Sequence
  ENSG00000168818_7 (sequence is synthesized)
gtgaggcaaatcgaagggagagtggttgagatttccagactccaagagatattcacggaaaaggttttgcaacaggaagctgagattgacagcattcaccagttagttgtgggggcaact

SEQ ID NO: 554727 - DNA, 120 bp, Artificial Sequence
  ENSG00000168818_8 (sequence is synthesized)
ggtacgacagctagccagggccacgggggcccagcacgagagtcctcatgggcactcacagactgcgtgctttcatgtacttccagtgctggagcatggtatgaccagattttatcacag

SEQ ID NO: 554728 - DNA, 120 bp, Artificial Sequence
  ENSG00000168818_9 (sequence is synthesized)
tgccatttgaagggaaaggagttcagacagacagacgtattccccaaaaagggataccccaggccgatggtgttcagccatttagcagctgaaaaaggaaacagtgcacaccaatgggag

SEQ ID NO: 554729 - DNA, 120 bp, Artificial Sequence
  ENSG00000168818_10 (sequence is synthesized)
gcagcctgcgtagccctcatcaggcaagacagactgaatgcaggagtgggtgattagctgctccttgaacttgaggctgccttggcagcaggggcacagcaggcctcaagagcccctaat

SEQ ID NO: 554730 - DNA, 120 bp, Artificial Sequence
  ENSG00000168818_11 (sequence is synthesized)
tgtctcagggttcaaaggaagacactgacctttcccatcccggtagcttcagggaagatcatagttaataacgtctctcaacaaatgattacttctttgtttccttgtggcttcttgtct

SEQ ID NO: 554731 - DNA, 120 bp, Artificial Sequence
  ENSG00000168818_12 (sequence is synthesized)
gtctgagtcaacgaatacacagacttactggattatagaagagaaaattcacatctgccttgttaatctaataaatataattacagccccttaatgtgttgtcaatgagtctaagttgac

SEQ ID NO: 554732 - DNA, 120 bp, Artificial Sequence
  ENSG00000168818_13 (sequence is synthesized)
aaattcagtggcagcccagccacctcctatcaatcaatcagggaagaaatgcaggggagactggggccctcagtgaggggctgcctggcattactcctccaaagactgctgcccccagaa

SEQ ID NO: 554733 - DNA, 120 bp, Artificial Sequence
  ENSG00000168818_14 (sequence is synthesized)
caggcagggggtgtgggagggccagtttcccgccactgggtccaaggagcctttgttcaaaggaagaagtgggccacggaagaacgggcctgcttctctcgtgcctgtgcttctgacctc

SEQ ID NO: 554734 - DNA, 120 bp, Artificial Sequence
  ENSG00000168818_15 (sequence is synthesized)
caggaactgtaaacaggaacacctatgtgtaactgaaggcatgagacatctgtacaggaagcatcccagcgcccacatgggcatgagacagtctgcactgcgcctggtgaaatgcgtgtg

SEQ ID NO: 554735 - DNA, 120 bp, Artificial Sequence
  ENSG00000168818_16 (sequence is synthesized)
tgtacagacagtccactgggcagcacaggtatcctcatgttctttatttgcacagagtgaaatgtcagaagttacatgtaaatgaattcacagtcaataaagtccacgtctacctggaaa

SEQ ID NO: 554736 - DNA, 120 bp, Artificial Sequence
  ENSG00000168818_17 (sequence is synthesized)
ctttgctagctgaagactgtagtatctcattatatttaatgatggctttgcctgagaagctgttttaagcagtctctcttctggtattttcttctgcaacaggagtatgtaaactttact

SEQ ID NO: 554737 - DNA, 120 bp, Artificial Sequence
  ENSG00000168818_18 (sequence is synthesized)
atgcacagtggctcaagtaaagaagccaggatgtgccccaggtcacagtgtggacagaaaagaaagccaaaagacaccactgaagtacagcccttttatcaacagcgtcttgatctcagt

SEQ ID NO: 554738 - DNA, 120 bp, Artificial Sequence
  ENSG00000168818_19 (sequence is synthesized)
cccaccaggacgtcgggaagcacctgacacgctacagaacaaacagcccattcagaccagcagcgcgtgcatcaggaaggaggctctgcaggccagacaaactcccctccagcctcaccg

SEQ ID NO: 554739 - DNA, 120 bp, Artificial Sequence
  ENSG00000168818_20 (sequence is synthesized)
ccacgccccttcacgctgtcctctccatctgctgctcgtcatccctcagggaaacggaccaagggttcccctcttccctcccacctcggcacccagcagagtcctgcaagacctgatgcg

SEQ ID NO: 554740 - DNA, 120 bp, Artificial Sequence
  ENSG00000168818_21 (sequence is synthesized)
ggtctcagtgagggagccgccagaagggaaggagcctcctagcttcccggtcctcacgctcccggagcccacacgccccaaacagacacagaagagctcgctgagctctccgcgcagcta

SEQ ID NO: 554741 - DNA, 120 bp, Artificial Sequence
  ENSG00000168818_22 (sequence is synthesized)
gacataagagaggtaggcactgtttaggttccccaggtgcgacgtggcgcagcactgagtcccagcagcgggtgttagtctcgccggcacagctgcccaggagccttgctgggcagagct

SEQ ID NO: 554742 - DNA, 120 bp, Artificial Sequence
  ENSG00000168818_23 (sequence is synthesized)
caccacctgtcgcccacctccagctgctttcgagaggcagtggctcaccagcctccaaaggagcaatccagggtgggtgggggtactcctggcagggtcaggccagctcttcatgtccag

SEQ ID NO: 554743 - DNA, 120 bp, Artificial Sequence
  ENSG00000168818_24 (sequence is synthesized)
ggatgtacatgggtagctcgttggcccccaccgaggggtcagagcctggcccctgcttacagaggacactacagccatcctgttgaggggactgtttcccaagctcagtcctcagggttg

SEQ ID NO: 554744 - DNA, 120 bp, Artificial Sequence
  ENSG00000168818_25 (sequence is synthesized)
ggtcaccacggacatcatgttactgggaaacacaaagcttgcggtcacactctgctcggggcccttaaccctgggacagaagggagtgattccgagagttgtgttgagggagaattgtgc

SEQ ID NO: 554745 - DNA, 120 bp, Artificial Sequence
  ENSG00000168818_26 (sequence is synthesized)
aggacccaaatgatggccaaacagagggaaatataacccatttgtcttctggtggatctcaaaagccatctattcaaggtaagcacagatggaacgacacccatagttacagccaggatc

SEQ ID NO: 554746 - DNA, 120 bp, Artificial Sequence
  ENSG00000168818_27 (sequence is synthesized)
ccacaccagatccttctccatattaaaaaatatgtatagtccttcagtatagttcatgagagaaaacaacaacaaaagaattttcttaataatggtactagagtcaggaagcaggccgtg

SEQ ID NO: 554747 - DNA, 120 bp, Artificial Sequence
  ENSG00000168818_28 (sequence is synthesized)
ggatcccaggggagagcgggtaggtagatacagctacagccatagcagtcagcttgtacccctggagtgcagtggttgagatggagaagtcaattaccaggcagcacagctgttttttaa

SEQ ID NO: 554748 - DNA, 120 bp, Artificial Sequence
  ENSG00000168818_29 (sequence is synthesized)
cgcagctggaaatgggggcttcggcagtgattcctggagcgtaggtccgctttcttgctagactcttgcctaagttcagtatgatgtcatcctgagtgtgtctgtttcctcacagtttga

SEQ ID NO: 554749 - DNA, 120 bp, Artificial Sequence
  ENSG00000168818_30 (sequence is synthesized)
tggtagagtggacttccaaaaagaccagtgtgctaggctatgccagaagacagggaaggtgacccagtaaggagagttcgccttcctctcccatctcctcttcccccagccgacacagtg

SEQ ID NO: 554750 - DNA, 120 bp, Artificial Sequence
  ENSG00000168818_31 (sequence is synthesized)
gctggggtacttggaggggaggggtcctgggtgggaaggaggctgctggggagaccctgcaactcatttccgccctaggacaatggcaacaaggtcaggctgttgaatgaagtgccagca

SEQ ID NO: 554751 - DNA, 120 bp, Artificial Sequence
  ENSG00000168818_32 (sequence is synthesized)
tagcccgtggtggtcagctgcctcccataaccattgtttcccttgtatttttggtttactaagcaagtgataagccagatcttccatcgattcggagcctccagaggcttgcttgtatgt

SEQ ID NO: 554752 - DNA, 120 bp, Artificial Sequence
  ENSG00000168818_33 (sequence is synthesized)
atccctcccactcctgcttacagaatgcctcagaaaatatttgtggatttgatggcagctttaatctataagaaagaaagaacaactggaatgcctttgcaaagttatgttccacccagt

SEQ ID NO: 554753 - DNA, 120 bp, Artificial Sequence
  ENSG00000168818_34 (sequence is synthesized)
tcccgccctcaggaagctcagggtgacacgggaagtttgggatgggcacagtttattacaaggcagaaagggaccgttgggcgctactatcctaagatattttcagaaaatggtaggcca

SEQ ID NO: 554754 - DNA, 120 bp, Artificial Sequence
  ENSG00000168818_35 (sequence is synthesized)
aggataggaatatgagaaataagtttgagcttaggggccagggtaggtgtcctggagaagtggggcctgcgggatgcatcggggaggaaatgcaggacgcccctgactccctgcacattg

SEQ ID NO: 554755 - DNA, 120 bp, Artificial Sequence
  ENSG00000168818_36 (sequence is synthesized)
cgggagttgagtggacacacgaggacagggctgtgggggcctgcagtgagggcaaggagctgttcctgtccattctctgtgctgagtttcaggagcttccatccttttctttggcccata

SEQ ID NO: 554756 - DNA, 120 bp, Artificial Sequence
  ENSG00000168818_37 (sequence is synthesized)
tcaaactggcaagaatggctgggagagcaactgtctgtgccaagctcactcagctccaagaagctcccatgtatccctggtgtcagggcacccgtcctcacccagcctgagcactgggaa

SEQ ID NO: 554757 - DNA, 120 bp, Artificial Sequence
  ENSG00000168818_38 (sequence is synthesized)
acacgctcctctggctctgggcctctgtccctgttgagcagtggagtggccaggctctgaagtcagaggggcccagaggcagctcggccaagctgcccacctccccttcctctccagacc

SEQ ID NO: 554758 - DNA, 120 bp, Artificial Sequence
  ENSG00000168818_39 (sequence is synthesized)
tgtgtgataaaaacacctgtgctcccgtccctgcccaggccattaaaaacaacgctggcttccgcgtgtggatcctcttcttcctcgtgatgtgctccttctccttgctcttcctcgact

SEQ ID NO: 554759 - DNA, 120 bp, Artificial Sequence
  ENSG00000168824_0 (sequence is synthesized)
aggatgctcgggcggcggctgcagtgggacctccaccttctctgccaaccagagcggaggaacctttccgcctccctccaagcggcgcactgagcgctctttgcctagaacgacttccct

SEQ ID NO: 554760 - DNA, 120 bp, Artificial Sequence
  ENSG00000168824_1 (sequence is synthesized)
cccgctgcctggggcagcctcaccctgggcgcccacaccccagccctgggagagcgctactccgcctcccgcaccaccgaaaacctcctcctcctttacgggccgcgcctcctttacggg

SEQ ID NO: 554761 - DNA, 120 bp, Artificial Sequence
  ENSG00000168824_2 (sequence is synthesized)
ccgcgccccctttatacgcggacgcgccctcttttggtcgccccctccccaacccagcactaaggagcaccctgctctggtctccgccaccacccagcgcctcctggacccatcccccca

SEQ ID NO: 554762 - DNA, 120 bp, Artificial Sequence
  ENSG00000168824_3 (sequence is synthesized)
aacccttgaacgtcctcaggacccccaggagcaggagacgcggagctcggagcgctcagctgacctgccggagccgggcgtgggctgcagcctcggagctcccggaacgatggtgaagtt

SEQ ID NO: 554763 - DNA, 120 bp, Artificial Sequence
  ENSG00000168824_4 (sequence is synthesized)
ggggaacaatttcgcagagaagggcaccaagcagccgctgctggaggatggcttcgacaccattcccctgatgacgcccctcgatgtcaatcagctgcagttcccgcccccggataaggt

SEQ ID NO: 554764 - DNA, 120 bp, Artificial Sequence
  ENSG00000168824_5 (sequence is synthesized)
ggtcgtgaaaactaagaccgagtatgaacctgaccgcaagaaagggaaagcacgtcctccccaaattgctgagttcaccgtcagcatcacggagggtgtcaccgagaggtttaaggtctc

SEQ ID NO: 554765 - DNA, 120 bp, Artificial Sequence
  ENSG00000168824_6 (sequence is synthesized)
cgtgttggtcctcttcgccctggccttcctcacctgcgtcgtcttcctggttgtctacaaggtgtacaagtatgaccgcgcctgccccgatgggttcgtcctcaagaacacccagtgcat

SEQ ID NO: 554766 - DNA, 120 bp, Artificial Sequence
  ENSG00000168824_7 (sequence is synthesized)
cccagaaggcttggagagctactacgcggagcaagactccagtgcccgggagaaattttacacagtcataaaccactacaacctggccaagcagagcatcacgcgctccgtatcgccctg

SEQ ID NO: 554767 - DNA, 120 bp, Artificial Sequence
  ENSG00000168824_8 (sequence is synthesized)
gatgtcagttctgtcagaagagaagctgtccgagcaggagactgaagcggctgagaagtcagcttagcgggatgggcaagttccttacaatgtgtcacttgcaaataacaaagggacttt

SEQ ID NO: 554768 - DNA, 120 bp, Artificial Sequence
  ENSG00000168824_9 (sequence is synthesized)
gagggacatttcattaaatataattactgatactttagaggttactcatttacggtgcaattgcttctgtttgctaatgctgctttgcaaataaaacttgctgccgaccacccacgggca

SEQ ID NO: 554769 - DNA, 120 bp, Artificial Sequence
  ENSG00000168824_10 (sequence is synthesized)
taaaatcaagtgcatttcagcattgcctaaagagctctgacaccacttttcatgttaagatcttcatttagctcctttactgggatttattggatgctgtaaaaaaataaatttacactg

SEQ ID NO: 554770 - DNA, 120 bp, Artificial Sequence
  ENSG00000168824_11 (sequence is synthesized)
gggtttggatctcagataaatgcattttgtggaattgattttctgaaccgaccctgctgtctgcaaaccttcctccatagccatatctagagtgatctctcgctgtgctaagagcaagcc

SEQ ID NO: 554771 - DNA, 120 bp, Artificial Sequence
  ENSG00000168824_12 (sequence is synthesized)
tacttcgcatttcttcctcggccatcagcgggtaacagtgctgactgctgccaaggtgcactgtagtaagtaagtggcatagagaacgaggaaaaagacccccccacccctccctgtgct

SEQ ID NO: 554772 - DNA, 120 bp, Artificial Sequence
  ENSG00000168824_13 (sequence is synthesized)
gactcctgagtcggggtgggacggccctgcaatgtggcaggctcggtgtggattgactactccctcccctctgactctggcatcttggtaaggagggaggggcaccacccatctgggtgg

SEQ ID NO: 554773 - DNA, 120 bp, Artificial Sequence
  ENSG00000168824_14 (sequence is synthesized)
agacagctggggtttgctccagtgtgtgtagactggcagagcatgtgagggagagggctgggaagagacggccctgggcccgtgaggtgcagaactctccctgcaggtagtctgtctgct

SEQ ID NO: 554774 - DNA, 120 bp, Artificial Sequence
  ENSG00000168824_15 (sequence is synthesized)
ctgtgatgtgctgataggaaagagcccccactggccctctggttcacttctattatgaataaatttgcaccaatagccccattagtttttaaagaaatgagctgggtgggaaaagtggaa

SEQ ID NO: 554775 - DNA, 120 bp, Artificial Sequence
  ENSG00000168824_16 (sequence is synthesized)
atgtaatttctggtaagcttgagctactttaatttttattctatgaaactgatatcccttgatgtgggaaacaggcaggaaaggctgtggggtgggggtgggggactggtgtggcaccgt

SEQ ID NO: 554776 - DNA, 120 bp, Artificial Sequence
  ENSG00000168824_17 (sequence is synthesized)
gcaaacaaaatgacaaatttcaactcacaatctttgtaagaaaattgttccagtttgaatcttgatattaaagtttatgtttacaaaactgccagttagatgaactaagtgtgtaaaaca

SEQ ID NO: 554777 - DNA, 120 bp, Artificial Sequence
  ENSG00000168824_18 (sequence is synthesized)
aatagaaaagacattcgcagacatttcttctatgttattgaatgtgttgtttctggtgtacgtgtcaaaagtttcagttttttagatcagaaataaacgacaaatagtgtgagatgtgtt

SEQ ID NO: 554778 - DNA, 120 bp, Artificial Sequence
  ENSG00000168824_19 (sequence is synthesized)
gtgaacaggcatggtgaccgtggtcagcgccactcttgtttcctgaaatgtgcttctaagacagaaaatgtattttctcatcaagggtgtctggagacacagaccgtgaccttggcgcag

SEQ ID NO: 554779 - DNA, 120 bp, Artificial Sequence
  ENSG00000168824_20 (sequence is synthesized)
cggtgtgcatcagaggcgtgtgctgagaagggtggtgttaagctgtggaaaatgactcaagagcaataaatcagtgccaaagcttccctgcgcatctgaatagacacaagtgaagcccgt

SEQ ID NO: 554780 - DNA, 120 bp, Artificial Sequence
  ENSG00000168824_21 (sequence is synthesized)
gtgcgcacagtgcagaggccgagcctgtatttccaggtagacgtggactttattgactgtgaattcatttacatgtaacttctgacatttcactctgtgcaaataaagaacatgaggata

SEQ ID NO: 554781 - DNA, 89 bp, Artificial Sequence
  ENSG00000168824_22 (sequence is synthesized)
ggttttgaactcctgaccttgtgatctgctggtcttggcctcccaaagtgctggtgtgtctggaattggttacttctggtgcgttcttc

SEQ ID NO: 554782 - DNA, 120 bp, Artificial Sequence
  ENSG00000168824_23 (sequence is synthesized)
agcctgggttgtgagaggaaaatgagcaggccagaggaatttggagctgccagcatcttggagggcccagatacaatcagcagaggaagaaaaccacaggatgaaacagtcccaatgacc

SEQ ID NO: 554783 - DNA, 120 bp, Artificial Sequence
  ENSG00000168824_24 (sequence is synthesized)
agcaccagtgaagacccaagacagcacaaaaggccagctagcagagaaacatgattgttcaccgtccatctctgggacaacctagatgcctgggcagatttctgaagtggagcaagagaa

SEQ ID NO: 554784 - DNA, 120 bp, Artificial Sequence
  ENSG00000168824_25 (sequence is synthesized)
atcttctcttcttcacctgcttcagggaggcatcaaagtgccaaaaaggattctcagacggctgatggaaaacgccccggaccctccgtagtgccgcggggaagtccccggaaagggtgt

SEQ ID NO: 554785 - DNA, 120 bp, Artificial Sequence
  ENSG00000168824_26 (sequence is synthesized)
gaaaaagtatcgaatttgggtgatgcctcctcctcgtccagcgcctgacagggcccagctcctggcccaggtgcccaggaggcaccgatccccgcagccggcctcctcccgcgcgggctc

SEQ ID NO: 554786 - DNA, 120 bp, Artificial Sequence
  ENSG00000168824_27 (sequence is synthesized)
cactcccatttcggcctcgcccccacaccccatagtctttcatccgtgagtcctgcaggcaggacgggttggaggtctgcaaacaggaccctctctgggaagccgcgacagcggctgagc

SEQ ID NO: 554787 - DNA, 120 bp, Artificial Sequence
  ENSG00000168824_28 (sequence is synthesized)
cgcggcgcgctgcgggcggggaccctctctgcacctccccgcacccctgggggtcgctctgtccctacggtccccgcctcccctttctcctttctaagcgcctcgcgcccaggccgccgc

SEQ ID NO: 554788 - DNA, 120 bp, Artificial Sequence
  ENSG00000168824_29 (sequence is synthesized)
ctccgccgctccgagaccccctgggggcgcgtcctctcccgctcccctgttccctcccccggctcagggcgggcgcgtggtcccaggggaggctcccgcccagccccgcactcctttgtg

SEQ ID NO: 554789 - DNA, 80 bp, Artificial Sequence
  ENSG00000168824_30 (sequence is synthesized)
tcccaggggaggctcccgcccagccccgcactcctttgtgcggccgggcgggcgctgcgtcaaggtggaggcgcggccac

SEQ ID NO: 554790 - DNA, 120 bp, Artificial Sequence
  ENSG00000168824_31 (sequence is synthesized)
gcaggaagggaggcggcggcgcgaggaggagggagcggccgtggagcccaatcgttcgctccccttcccgggtccgcgcgcggcgccgcctccgccattgctgcgagcaggagcaggaga

SEQ ID NO: 554791 - DNA, 120 bp, Artificial Sequence
  ENSG00000168824_32 (sequence is synthesized)
ccctccccaacccagcactaaggagcaccctgctctggtctccgccaccacccagcgcctcctggacccatccccccaaacccttgaacgtcctcaggacccccaggctgcagcctcgga

SEQ ID NO: 554792 - DNA, 120 bp, Artificial Sequence
  ENSG00000168824_33 (sequence is synthesized)
cctgaccagtgggtcactctcatggcagatgcctgggcagatttctgaagtggagcaagagaaatcttctcttcttcacctgcttcagggaggcatcaaagtgccaaaaaggagcaggag

SEQ ID NO: 554793 - DNA, 120 bp, Artificial Sequence
  ENSG00000168824_34 (sequence is synthesized)
tgtgagaggaaaatgagcaggccagaggaatttggagctgccagcatcttggaggctggagagcagggtgcaatcacagctcactgcagccttaaactcctgggctcaagcgatcctccc

SEQ ID NO: 554794 - DNA, 120 bp, Artificial Sequence
  ENSG00000168826_0 (sequence is synthesized)
gttgtcgtgatgattccgcggccagcggatcgctgcgagtggccttgaaggcagctgctgcaggtgaagagtaggcggcggggcagagagcggcctccgagggtcacctgaatggttgag

SEQ ID NO: 554795 - DNA, 120 bp, Artificial Sequence
  ENSG00000168826_1 (sequence is synthesized)
catggaccctgttgctacccacagctgccatctgctccagcaactgcatgagcagcgaatccaaggcctgctttgtgactgtatgttggtggtaaaaggagtctgctttaaagcgcataa

SEQ ID NO: 554796 - DNA, 120 bp, Artificial Sequence
  ENSG00000168826_2 (sequence is synthesized)
gaatgtcctggcagcattcagccagtattttaggagcctctttcagaattcttcaagccagaagaatgatgtttttcacttggatgttaaaaatgtcagtggcatagggcagatcctgga

SEQ ID NO: 554797 - DNA, 120 bp, Artificial Sequence
  ENSG00000168826_3 (sequence is synthesized)
cttcatgtacacttctcatctagatcttaaccaggacaatatacaagtaatgctggacacagcacagtgtttgcaagttcaaaatgttctgagtctgtgtcacacatttttaaaatcagc

SEQ ID NO: 554798 - DNA, 120 bp, Artificial Sequence
  ENSG00000168826_4 (sequence is synthesized)
cactgtagtacagccacctggcatgccttgtaatagtacattgtctctacaaagcaccctgaccccagatgccacttgtgttatcagtgaaaactacccccctcatttactgcaggaatg

SEQ ID NO: 554799 - DNA, 120 bp, Artificial Sequence
  ENSG00000168826_5 (sequence is synthesized)
ttcagcagatgcacagcagaacaaaacgttggatgaatcgcatccgcatgcttcaccatcagttaatcgtcatcactccgcaggtgaaatctcaaaacaagctcctgatacttcagatgg

SEQ ID NO: 554800 - DNA, 120 bp, Artificial Sequence
  ENSG00000168826_6 (sequence is synthesized)
cagctgcacagaactgcctttcaaacagccaaattactattacaaactcagaaacttttacagtaagcagtaccataaacacgcagctggtcccagtcaggagagagttgttgagcagcc

SEQ ID NO: 554801 - DNA, 120 bp, Artificial Sequence
  ENSG00000168826_7 (sequence is synthesized)
ttttgctttcagcacctctacagaccttaccacggtagagagccagccttgtgccgtcagtcattctgaatgcatcctggagtctcccgagcacttaccttccaacttcctggcccagcc

SEQ ID NO: 554802 - DNA, 120 bp, Artificial Sequence
  ENSG00000168826_8 (sequence is synthesized)
tgtgaatgactctgccccacaccctgagtcagacgccacatgccaacaacctgtcaagcagatgaggctcaaaaaggccattcatctgaagaagctcaatttcctgaagtcacagaaata

SEQ ID NO: 554803 - DNA, 120 bp, Artificial Sequence
  ENSG00000168826_9 (sequence is synthesized)
cgcagagcaagtatctgaacccaagtcagatgatggtttgacaaagaggttggaatctgctagtaaaaataccctagagaaagctagcagccaaagtgctgaagaaaaagaaagtgaaga

SEQ ID NO: 554804 - DNA, 120 bp, Artificial Sequence
  ENSG00000168826_10 (sequence is synthesized)
agtcgtcagttgtgagaattttaattgcattagtgagacggagaggcctgaagacccggctgccctggaagaccagtcccagacacttcagtcccagagacaatacgcgtgtgaattatg

SEQ ID NO: 554805 - DNA, 120 bp, Artificial Sequence
  ENSG00000168826_11 (sequence is synthesized)
cgggaaaccttttaaacacccaagcaacttggagcttcacaaacggtctcatacaggtgagaaaccttttgaatgtaacatttgtgggaaacatttctctcaggcaggtaacttgcagac

SEQ ID NO: 554806 - DNA, 120 bp, Artificial Sequence
  ENSG00000168826_12 (sequence is synthesized)
acgacggcattctggtgaaaaaccatacatctgcgagatctgtggaaagaggtttgcagcctctggcgacgtccagcgtcacattattattcactcaggagaaaaaccacacttgtgtga

SEQ ID NO: 554807 - DNA, 120 bp, Artificial Sequence
  ENSG00000168826_13 (sequence is synthesized)
catctgtggtcgagggtttagtaacttcagtaatttgaaggagcacaaaaagacacacacggctgataaagtcttcacctgtgatgagtgtggaaagtcttttaatatgcaaaggaagtt

SEQ ID NO: 554808 - DNA, 120 bp, Artificial Sequence
  ENSG00000168826_14 (sequence is synthesized)
agtaaagcacagaattcggcacacgggggagcggccttacagctgctctgcctgcgggaaatgttttgggggatcaggtgacctccgcaggcatgtccgcactcacactggggagaagcc

SEQ ID NO: 554809 - DNA, 120 bp, Artificial Sequence
  ENSG00000168826_15 (sequence is synthesized)
gtacacatgtgagatctgtaacaagtgctttacccgctctgcggtgctccggcggcacaagaagatgcactgcaaagctggtgacgagagcccagatgtgctggaggagctcagccaagc

SEQ ID NO: 554810 - DNA, 120 bp, Artificial Sequence
  ENSG00000168826_16 (sequence is synthesized)
catcgagacctccgacctcgagaaatctcagagctcagactctttctcccaagacacgtctgtgacgctgatgccagtgtcggttaaactccctgtccacccagtggaaaattctgtggc

SEQ ID NO: 554811 - DNA, 120 bp, Artificial Sequence
  ENSG00000168826_17 (sequence is synthesized)
agaatttgatagccactctggcggctcctattgtaagttacggtccatgatccaacctcatggagttagtgaccaggagaagctgagtttggatcctggtaaacttgccaagccccagat

SEQ ID NO: 554812 - DNA, 120 bp, Artificial Sequence
  ENSG00000168826_18 (sequence is synthesized)
gcagcagacacagcctcaggcctatgcttactcggatgtggacaccccagccggtggcgaaccactgcaggccgatggcatggccatgatccgttcctctctggctgctttggacaacca

SEQ ID NO: 554813 - DNA, 120 bp, Artificial Sequence
  ENSG00000168826_19 (sequence is synthesized)
cggcggtgaccccctgggcagtcgagcatcttccaccacttataggaactcagagggtcagtttttctccagcatgactctctgggggctagcgatgaagacgctgcagaatgaaaacga

SEQ ID NO: 554814 - DNA, 120 bp, Artificial Sequence
  ENSG00000168826_20 (sequence is synthesized)
gttagaccagtgatgtaccgcgcttctccacggtagaggcgtgttctcagtttagcaggctggtgttaaggctgtaggaggacccagtttccccatgacagtgccttctaactagccaga

SEQ ID NO: 554815 - DNA, 120 bp, Artificial Sequence
  ENSG00000168826_21 (sequence is synthesized)
gaataggtagcttccctcctgatgatggctcataatctgaagcatcttgagctgggggtgtgagggggagggcctgctggctcaccgtgaggcagccgcgggagggagcgctgacgtcac

SEQ ID NO: 554816 - DNA, 120 bp, Artificial Sequence
  ENSG00000168826_22 (sequence is synthesized)
agaagcgaaggcttgatgctgtctcagcagcctcagctgtgggggggaagcgcgtgtgcatcgtgtcaactactgtacatgttggtcatgtgaaaggaattatatatgtatagtattaca

SEQ ID NO: 554817 - DNA, 120 bp, Artificial Sequence
  ENSG00000168826_23 (sequence is synthesized)
tacaagtatttttgcatttttacaagattgaaatttgtagcattttgtattatttacacagaatttatttgtatatgaaactcataccataatttaattcgaataaatgaaacttttcta

SEQ ID NO: 554818 - DNA, 120 bp, Artificial Sequence
  ENSG00000168826_24 (sequence is synthesized)
cagactcacttacgacggcattctggtgaaaaaccatacatctgcgagatctgtggaaagagggaaatgttttgggggatcaggtgacctccgcaggcatgtccgcactcacactgggga

SEQ ID NO: 554819 - DNA, 120 bp, Artificial Sequence
  ENSG00000168827_0 (sequence is synthesized)
ttctgtatcttcatacagaggtaatatttaaaaaagaagacgaagacaaaaggactcccttccctcacccatatacctatgccgtcttactgggagcaaacacttctttagctccgcaaa

SEQ ID NO: 554820 - DNA, 120 bp, Artificial Sequence
  ENSG00000168827_1 (sequence is synthesized)
gcgattgcactttctcttccaagtcggcagacggcgcgcgagcagcgtaggcactgctccgcctccaatccagttgctcttctttcttttcctcactctctttttcctcgcgtcctttgc

SEQ ID NO: 554821 - DNA, 120 bp, Artificial Sequence
  ENSG00000168827_2 (sequence is synthesized)
cccggaagtgctcttacaacattggctgccggcgtgactttgaccgcttcccggtgcgttaccggcagctgaacccacccggcgccacgggactttgacgcgtgctctgcgcttgccatg

SEQ ID NO: 554822 - DNA, 120 bp, Artificial Sequence
  ENSG00000168827_3 (sequence is synthesized)
agactcctgggagctgcagccgtcgcggctctggggcgcggaagggcccccgcctccctaggctggcagaggaagcaggttaattggaaggcctgccgatggtcttcatcaggggtgatt

SEQ ID NO: 554823 - DNA, 120 bp, Artificial Sequence
  ENSG00000168827_4 (sequence is synthesized)
cctaatgaaaaaatacgaaatattggaatctcagctcacattgattctgggaaaactacattaacagaacgagtcctttactacactggcagaattgcaaagatgcatgaggtgaaaggt

SEQ ID NO: 554824 - DNA, 120 bp, Artificial Sequence
  ENSG00000168827_5 (sequence is synthesized)
aaagatggagttggtgctgtcatggattccatggaactagagagacaaagaggaatcactattcagtcagcagccacttacaccatgtggaaagatgtcaatattaacattatagatact

SEQ ID NO: 554825 - DNA, 120 bp, Artificial Sequence
  ENSG00000168827_6 (sequence is synthesized)
cctgggcatgtggacttcacaatagaagtggaaagggccctgagagtgttggatggtgcagtccttgttctctgtgctgttggaggggtacagtgccagaccatgactgtcaatcgtcag

SEQ ID NO: 554826 - DNA, 120 bp, Artificial Sequence
  ENSG00000168827_7 (sequence is synthesized)
atgaagcgctacaacgttccgtttctaacttttattaacaaattggaccgaatgggctccaacccagccagggccctgcagcaaatgaggtctaaactaaatcataatgcagcgtttatg

SEQ ID NO: 554827 - DNA, 120 bp, Artificial Sequence
  ENSG00000168827_8 (sequence is synthesized)
cagatacccatgggtttggagggtaattttaaaggtattgtagatcttattgaggaacgagccatctattttgatggagactttggtcagattgttcgatatggtgagattccagctgaa

SEQ ID NO: 554828 - DNA, 120 bp, Artificial Sequence
  ENSG00000168827_9 (sequence is synthesized)
ttaagggcggcggccactgaccaccggcaggagctaattgaatgtgttgccaattcagatgaacagcttggtgagatgtttctggaagaaaaaatcccctcgatttctgatttaaagcta

SEQ ID NO: 554829 - DNA, 120 bp, Artificial Sequence
  ENSG00000168827_10 (sequence is synthesized)
gcaattcgaagagctactctgaaaagatcatttactcctgtatttttgggaagcgccttgaagaacaaaggagttcagcctcttttagatgctgttttagaatacctcccaaatccatct

SEQ ID NO: 554830 - DNA, 120 bp, Artificial Sequence
  ENSG00000168827_11 (sequence is synthesized)
gaagtccagaactatgctattctcaataaagaggatgactcaaaagagaaaaccaaaatcctaatgaactccagtagagacaattcccacccatttgtaggcctggcttttaaactggag

SEQ ID NO: 554831 - DNA, 120 bp, Artificial Sequence
  ENSG00000168827_12 (sequence is synthesized)
gtaggtcgatttggacaattaacttatgttcgcagttatcagggagagctaaagaagggtgacaccatctataacacaaggacaagaaagaaagtacggttgcaacggctggctcgcatg

SEQ ID NO: 554832 - DNA, 120 bp, Artificial Sequence
  ENSG00000168827_13 (sequence is synthesized)
catgccgacatgatggaggatgttgaggaagtatatgccggagacatctgtgcattgtttggcattgactgtgctagtggagacacattcacagacaaagccaacagcggcctttctatg

SEQ ID NO: 554833 - DNA, 120 bp, Artificial Sequence
  ENSG00000168827_14 (sequence is synthesized)
gagtcaattcatgttcctgatcctgtcatttcaatagcaatgaagccttctaacaagaacgatctggaaaaattttcaaaaggtattggcaggtttacaagagaagatcccacatttaaa

SEQ ID NO: 554834 - DNA, 120 bp, Artificial Sequence
  ENSG00000168827_15 (sequence is synthesized)
tatactttgacactgagaacaaagagacagttatatctggaatgggagaattacacctggaaatctatgctcagaggctggaaagagagtatggctgtccttgtatcacaggaaagccaa

SEQ ID NO: 554835 - DNA, 120 bp, Artificial Sequence
  ENSG00000168827_16 (sequence is synthesized)
aagttgcctttcgagagaccattactgcccctgtcccgtttgactttacacataaaaaacaatcaggtggtgcaggccagtatggaaaagtaataggtgtcctggagcctctggacccag

SEQ ID NO: 554836 - DNA, 120 bp, Artificial Sequence
  ENSG00000168827_17 (sequence is synthesized)
aggactacactaaattggaattttcagatgaaacattcggatcaaatattccaaagcagtttgtgcctgctgtagaaaaggggtttttagatgcctgcgagaagggccctctttctggtc

SEQ ID NO: 554837 - DNA, 120 bp, Artificial Sequence
  ENSG00000168827_18 (sequence is synthesized)
acaagctctctgggctccggtttgtcctgcaagatggagcacaccacatggttgattctaatgaaatctctttcatccgagcaggagaaggtgctcttaaacaagccttggcaaatgcaa

SEQ ID NO: 554838 - DNA, 120 bp, Artificial Sequence
  ENSG00000168827_19 (sequence is synthesized)
cattatgtattcttgaacctattatggctgtggaagttgtagctccaaatgaatttcagggacaagtaattgcaggaattaaccgacgccatggggtaatcactgggcaagatggagttg

SEQ ID NO: 554839 - DNA, 120 bp, Artificial Sequence
  ENSG00000168827_20 (sequence is synthesized)
aggactattttacactgtatgcagatgtccctctaaatgatatgtttggttattccactgaacttaggtcatgcacagagggaaagggagaatacacaatggagtatagcaggtatcagc

SEQ ID NO: 554840 - DNA, 120 bp, Artificial Sequence
  ENSG00000168827_21 (sequence is synthesized)
catgtttaccatccacacaagaagacgtcattaataagtatttggaagctacaggtcaacttcctgttaaaaaaggaaaagccaagaactaactttgcttactgtgagttgactgactct

SEQ ID NO: 554841 - DNA, 120 bp, Artificial Sequence
  ENSG00000168827_22 (sequence is synthesized)
aattgaatctgcgtggttttgatactttgatggattccagtggaataaattcaggctgctgaaacaagaaattctgagcccaggaagcgggctcttctttcttcaaaagaagcccttctt

SEQ ID NO: 554842 - DNA, 120 bp, Artificial Sequence
  ENSG00000168827_23 (sequence is synthesized)
gttcatattcaggagcttctgttatattcaaaggtaattctatgtctatctcaactctattgattggttttatagttcattgaaaatcctcaaataaaatataattattactgaaatatg

SEQ ID NO: 554843 - DNA, 120 bp, Artificial Sequence
  ENSG00000168827_24 (sequence is synthesized)
tttaatatttaaggggaaaagagactaatttcagttatacttttaagcttagaatgtatgttcatttccaaattttgtatcataagagttttcaacatagagaaaagctgaaaaaatgca

SEQ ID NO: 554844 - DNA, 120 bp, Artificial Sequence
  ENSG00000168827_25 (sequence is synthesized)
aagaataaccacatactttccatctaccttcctttgttaacgggttgtttatcatataataatttgttttgtcatatttgctttcactgtctattatctgtttaagtctcataactctat

SEQ ID NO: 554845 - DNA, 120 bp, Artificial Sequence
  ENSG00000168827_26 (sequence is synthesized)
ttttagtttgctgaagacttgaaagtgaatcgcatatatcatgacacttcttggagtgtcattaatgggcaggcttttctgttgaagagtggattccgtatgttcttcatagagagtgtt

SEQ ID NO: 554846 - DNA, 120 bp, Artificial Sequence
  ENSG00000168827_27 (sequence is synthesized)
tttcagattcttcattgggatattaaaatattagccaaatttctctctgttttatatatgtctgtttatttcagtttgtggtttctgcaaatttgtaactgcctctgttttaggagtata

SEQ ID NO: 554847 - DNA, 120 bp, Artificial Sequence
  ENSG00000168827_28 (sequence is synthesized)
agtattacttccttgtggtctattgtgaagtaaaaagtagacccttgcatatactattcttgtttgtgttcatcttaatgtttttgtacagctaaatcaaatgtaatttatagagttagt

SEQ ID NO: 554848 - DNA, 120 bp, Artificial Sequence
  ENSG00000168827_29 (sequence is synthesized)
ttcatcaacctaatgaatgctagttaaatttgaattccttggaatttatcgtatattgtattcactgagattatgaagggacaaatgttaatcttttgtttccagaaaaagttgggcttt

SEQ ID NO: 554849 - DNA, 120 bp, Artificial Sequence
  ENSG00000168827_30 (sequence is synthesized)
cccaagcagttctattacccggttcagaattgcttcatccaaaaatcatctgatggtatagatggatcctagtccttttcattacctgatggtagaaataaaataattgattttaaattc

SEQ ID NO: 554850 - DNA, 120 bp, Artificial Sequence
  ENSG00000168827_31 (sequence is synthesized)
actaaaaacagtttatcaggtattaaatcatactttgtcttccatcatgttgtctatcacagtttgttttagttacagtcctgtttctctgattgttaagctttccatctgatttagaat

SEQ ID NO: 554851 - DNA, 120 bp, Artificial Sequence
  ENSG00000168827_32 (sequence is synthesized)
ctctaattcattaagcagaagagctgtaaatccatgctgtgacaatgatgggaaattattatgtttctgaatcatagttatatttttcttaataaattgaaactactgtattgattgtaa

SEQ ID NO: 554852 - DNA, 120 bp, Artificial Sequence
  ENSG00000168827_33 (sequence is synthesized)
gtcctgcttttattaaccatagaaggaaatccaggttagcttttgtttttgcaaatggacacatttccttgctgaatttgtggctttatacatgtggcattttctgtaatttgctattaa

SEQ ID NO: 554853 - DNA, 120 bp, Artificial Sequence
  ENSG00000168827_34 (sequence is synthesized)
agcaactcttaagtgcagaagttaaaaataagatttattttatcttgaccttttgtgaatgtgtcattttcttagatgtatattatctctctttcttgaataagcacagatggacaaatt

SEQ ID NO: 554854 - DNA, 120 bp, Artificial Sequence
  ENSG00000168827_35 (sequence is synthesized)
gttatatttgattgtcatgtctccttatgatctcctaggctgtaatagtttcttagactttccttgtttctcacgagattgatatttttgagaagtattggtcagctcttttgtagagtg

SEQ ID NO: 554855 - DNA, 120 bp, Artificial Sequence
  ENSG00000168827_36 (sequence is synthesized)
tccctcaatttgggtttattatttgatgcttttcacatgattagattggagtcatgtgtttttaggaggactgccatcgaggtgaagtgttattcttgtcacatcatatccaaggtacag

SEQ ID NO: 554856 - DNA, 79 bp, Artificial Sequence
  ENSG00000168827_37 (sequence is synthesized)
ggtgaagtgttattcttgtcacatcatatccaaggtacagacttgcagcatgatttatcgatgagatttcgctcttgtt

SEQ ID NO: 554857 - DNA, 64 bp, Artificial Sequence
  ENSG00000168827_38 (sequence is synthesized)
tccgagtttatcattgttaatgctaacctcaatcaccacacctggctgagatagtgtttgacag

SEQ ID NO: 554858 - DNA, 120 bp, Artificial Sequence
  ENSG00000168827_39 (sequence is synthesized)
tagtgtactttttagaaggaagtcacttggctcagccaacacttgaggggggaattatgttccacccccttgaagggggcactatctacataagttatttggaattcttctgaaagggag

SEQ ID NO: 554859 - DNA, 120 bp, Artificial Sequence
  ENSG00000168827_40 (sequence is synthesized)
atttgtctttcttccctgcttatttatctatttggacaatcacttatttaatatcagcgtggactcacgtatatgtattttgaactttgagttataactatgactttgagtatgtcattt

SEQ ID NO: 554860 - DNA, 120 bp, Artificial Sequence
  ENSG00000168827_41 (sequence is synthesized)
gttgttcagattggctgggtttggcgattgggaactctcagttggctcctgtgttcctttaacatcttccaatgttttgcctttttgaatacttccttacttgctggcactacaagacgc

SEQ ID NO: 554861 - DNA, 120 bp, Artificial Sequence
  ENSG00000168827_42 (sequence is synthesized)
ctcaggcttatcttgtatattccatgccctaaccctagaatcagccgttctccaaggagcactggttcctttttaagtaaaatggtattagaaaccaagatttggggactggatgggctt

SEQ ID NO: 554862 - DNA, 120 bp, Artificial Sequence
  ENSG00000168827_43 (sequence is synthesized)
tttgttgaaatgctgttgcttctgtacataatattttaagtggggaaaaatggtagataagttggaagtgttaagagtggttatttctgggatgggattatattttgggggctttttctt

SEQ ID NO: 554863 - DNA, 120 bp, Artificial Sequence
  ENSG00000168827_44 (sequence is synthesized)
gggctttttcttactttaaaaatattttacagtatatttattacctccaaaatgaggggaaaatttttttaattaaaaagtggaaataacattacagtaaaagtatttacacataaagct

SEQ ID NO: 554864 - DNA, 120 bp, Artificial Sequence
  ENSG00000168827_45 (sequence is synthesized)
tatataagaatattttcttaggattcccagaatagtgattattgagttaaaggcatagaatgttttcatagttaatggtttatattgccagattgcgttcatactctccaaattaatgta

SEQ ID NO: 554865 - DNA, 120 bp, Artificial Sequence
  ENSG00000168827_46 (sequence is synthesized)
atactctccaaattaatgtattggattatttcaatgaatatcatcattgagtattgtttaaaaatcattactgatttaacaaatgaagaattctattgtaatcttttatcttgatgaaat

SEQ ID NO: 554866 - DNA, 120 bp, Artificial Sequence
  ENSG00000168827_47 (sequence is synthesized)
ataagttcatcaaacgcagagtaactatctttttgaaatgcgactgcaagaatactctgagatggttttgttttaatacctttaatcctagtcgctccccattttatttagtatttattc

SEQ ID NO: 554867 - DNA, 120 bp, Artificial Sequence
  ENSG00000168827_48 (sequence is synthesized)
tgtgagagactatgttactttttgggtaatatacccatatcacattatggcatgcatggtgtggtagaaggaggccttcagtttgggttagtaaatttgggttagtgaatgtattgtatc

SEQ ID NO: 554868 - DNA, 120 bp, Artificial Sequence
  ENSG00000168827_49 (sequence is synthesized)
tttttgcacttgttcatttattcattcattctgtggacttttatagagcagctgccaggtctggggtattgtgataaaaattaggaagaaaatagagatcataaatatttgctcttcctg

SEQ ID NO: 554869 - DNA, 120 bp, Artificial Sequence
  ENSG00000168827_50 (sequence is synthesized)
ctttataattacatggacagaaaagattaataaattaaaacagttaaaattgtacaaatgtggtttgggaaatgcaagaaataagttggtaactttttgatgtggtatttggtccatcag

SEQ ID NO: 554870 - DNA, 120 bp, Artificial Sequence
  ENSG00000168827_51 (sequence is synthesized)
ctcttgagtgacctttacctacaaagtactgtaattgcctggtagttatcaaaccttagcgttgttcataacaatcccctggagactttgttaaaagacatagtcctggctctacctcca

SEQ ID NO: 554871 - DNA, 120 bp, Artificial Sequence
  ENSG00000168827_52 (sequence is synthesized)
gagattctgatcagtagattggggtggggcccgtagtttgcatttctggaaggtttccagttgatgctgctcttacaggtctgcagaccacactttgagtgacactgatctagacaatgt

SEQ ID NO: 554872 - DNA, 120 bp, Artificial Sequence
  ENSG00000168827_53 (sequence is synthesized)
gaggagtcataaatgatcctttgttctgaggagtgacctctgtagcctggtcgtttctccacaggcacttcctgagggatttccttcctctgctatggaattgggatcgcaggtctggca

SEQ ID NO: 554873 - DNA, 120 bp, Artificial Sequence
  ENSG00000168827_54 (sequence is synthesized)
ggtgggcgaatggcattgtgatcagtgaactatagaatttatcttcatcagccatcttgtaagcaggaaaaggatggagtctgtccagtggataaggtgtttctctcactttttatgtaa

SEQ ID NO: 554874 - DNA, 120 bp, Artificial Sequence
  ENSG00000168827_55 (sequence is synthesized)
caactgagtaatgacaacaaagtttacctaccactccttaggatataaggcccagtaaggcagagtttttgtttttcttttttcctactttattcactgctatgtcccagcccctagaac

SEQ ID NO: 554875 - DNA, 120 bp, Artificial Sequence
  ENSG00000168827_56 (sequence is synthesized)
aactagttacaactaggcagttgtaactgcctagtacataatagggactcaaaaatatttgtaaatgaatgaataaatccactttcccagaattaccaaggcacatatttctgttgtcag

SEQ ID NO: 554876 - DNA, 120 bp, Artificial Sequence
  ENSG00000168827_57 (sequence is synthesized)
aagtagagactcttaaactttgttgtacatcagaaccacagatgcagcatcttaatgtacatgtccccttccccagccctagtttactgtatgtgtatttggaaaggaatccacagatga

SEQ ID NO: 554877 - DNA, 120 bp, Artificial Sequence
  ENSG00000168827_58 (sequence is synthesized)
ttctgacatgtgaaaggctaagaagcagggagcttgccaggaaggttgaaattaaaatctgaaagttgtggggagtcttagaatattaagtgttactttttgttggaaatggcttctttt

SEQ ID NO: 554878 - DNA, 120 bp, Artificial Sequence
  ENSG00000168827_59 (sequence is synthesized)
ggaaatggcttcttttgtctttattaaagttaggaatgtgttttctgaaaagcttactttttgatattaatttccatttttaaagaaataacttgaggccaggcgcagtggctcacgcct

SEQ ID NO: 554879 - DNA, 120 bp, Artificial Sequence
  ENSG00000168827_60 (sequence is synthesized)
atcatcatagcctcagaaggcaacactgttttcagtcttcttcacccagagcactaggctccacagggaatattgtaggtagtgggcaaatctttatggacttgagatcaaggtagatta

SEQ ID NO: 554880 - DNA, 120 bp, Artificial Sequence
  ENSG00000168827_61 (sequence is synthesized)
atgttctctttcttgcaaagctaaaagactactgtattctcctacattctctggggctttctttcatgtatttgaattcatagataatttataagttctgtttttaatagggaagactga

SEQ ID NO: 554881 - DNA, 120 bp, Artificial Sequence
  ENSG00000168827_62 (sequence is synthesized)
aatgttcagaattctaggaaatttttaaaaggtatcttaactacagtcttatttctagtgacttattgaaatgtcaagaaatccataaatttgtaagtaatctcttcattatgacattgt

SEQ ID NO: 554882 - DNA, 120 bp, Artificial Sequence
  ENSG00000168827_63 (sequence is synthesized)
atgcttttaggcattttgaggatggcaaagtattttcaaagaatttggtaaaccttattcacaatgcagatttcttgcaaaactgctaaaattgtcaacatttctcacagagtaatattt

SEQ ID NO: 554883 - DNA, 120 bp, Artificial Sequence
  ENSG00000168827_64 (sequence is synthesized)
gtatttaaatgctgatgaactagaaccttatgcagttgcaaacatatctgattcttcgcttttaagagaaaaaaaactagtgacaatgtagcagtttcacatcaggattattcaagaaag

SEQ ID NO: 554884 - DNA, 120 bp, Artificial Sequence
  ENSG00000168827_65 (sequence is synthesized)
agaggaagcaggtaccggagcatagagaggctaaatcgggaccattcccggaaccttgtgatcccttctgggcaatggaaggccgtgacaccccctgggtcctcatgactgacagctccg

SEQ ID NO: 554885 - DNA, 120 bp, Artificial Sequence
  ENSG00000168828_0 (sequence is synthesized)
atgctcatttttcacatggataaactgaggcctagagaggataaagggattgcccgacgtcacagacagtgagtgtggcagtgctggaaaagatcctgacagtccacctcgtcccagaaa

SEQ ID NO: 554886 - DNA, 120 bp, Artificial Sequence
  ENSG00000168828_1 (sequence is synthesized)
gggctctgtgagcttccccgcaccctgtaccctctctccttccatcccagctgtggaccatctcttcagaactctgcagcatggagccgctcaacagaacagaggtgtccgagttctttc

SEQ ID NO: 554887 - DNA, 120 bp, Artificial Sequence
  ENSG00000168828_2 (sequence is synthesized)
tgaaaggattttctggctacccagccctggagcatctgctcttccctctgtgctcagccatgtacctggtgaccctcctggggaacacagccatcatggcggtgagcgtgctagatatcc

SEQ ID NO: 554888 - DNA, 120 bp, Artificial Sequence
  ENSG00000168828_3 (sequence is synthesized)
acctgcacacgcccgtgtacttcttcctgggcaacctctctaccctggacatctgctacacgcccacctttgtgcctctgatgctggtccacctcctgtcatcccggaagaccatctcct

SEQ ID NO: 554889 - DNA, 120 bp, Artificial Sequence
  ENSG00000168828_4 (sequence is synthesized)
ttgctgtctgtgccatccagatgtgtctgagcctgtccacgggctccacggagtgcctgctactggccatcacggcctatgaccgctacctggccatctgccagccactcaggtaccacg

SEQ ID NO: 554890 - DNA, 120 bp, Artificial Sequence
  ENSG00000168828_5 (sequence is synthesized)
ctgcgtgctgctgatgggagctgcctgggtcctctgcctcctcaagtcggtgactgagatggtcatctccatgaggctgcccttctgtggccaccacgtggtcagtcacttcacctgcaa

SEQ ID NO: 554891 - DNA, 120 bp, Artificial Sequence
  ENSG00000168828_6 (sequence is synthesized)
gatcctggcagtgctgaagctggcatgcggcaacacgtcggtcagcgaagacttcctgctggcgggctccatcctgctgctgcctgtacccctggcattcatctgcctgtcctacttgct

SEQ ID NO: 554892 - DNA, 120 bp, Artificial Sequence
  ENSG00000168828_7 (sequence is synthesized)
catcctggccaccatcctgagggtgccctcggccgccaggtgctgcaaagccttctccacctgcttggcacacctggctgtagtgctgcttttctacggcaccatcatcttcatgtactt

SEQ ID NO: 554893 - DNA, 120 bp, Artificial Sequence
  ENSG00000168828_8 (sequence is synthesized)
gaagcccaagagtaaggaagcccacatctctgatgaggtcttcacagtcctctatgccatggtcacgaccatgctgaaccccaccatctacagcctgaggaacaaggaggtgaaggaggc

SEQ ID NO: 554894 - DNA, 120 bp, Artificial Sequence
  ENSG00000168828_9 (sequence is synthesized)
cgccaggaaggtgtggggcaggagtcgggcctccaggtgagggagggcggggctctgtacagacgcaggtctcaggttagtagctgaggccatcgtatgccaatgccagtgaagacatgg

SEQ ID NO: 554895 - DNA, 120 bp, Artificial Sequence
  ENSG00000168828_10 (sequence is synthesized)
cagggctggggctacaggtctggtatcttcatcccagcaaggcagcaccaagtcccgctgatcctgccacagaacagcccccaaatcaccctctgctctcagcatcaccctggccttcac

SEQ ID NO: 554896 - DNA, 120 bp, Artificial Sequence
  ENSG00000168830_0 (sequence is synthesized)
ccagcggtgcctcgggctgcccggcgcgccgcgctcccaggttctgtctcgccgcaccccggcgggcactggcgcgggcaaggacgctggcggggagaacgccctgggctcaacgtactc

SEQ ID NO: 554897 - DNA, 120 bp, Artificial Sequence
  ENSG00000168830_1 (sequence is synthesized)
aggacgctggcggggagaacgccctgggctcaacgtactccagaatcgaatgttgagagaagcagtgctctgatccagctcaggagaaaaaggagcgggttccgagtgagacttctggag

SEQ ID NO: 554898 - DNA, 120 bp, Artificial Sequence
  ENSG00000168830_2 (sequence is synthesized)
ccagctggacgtgccggtttgcccagtgcggcgcggctgcacgcaccgtccacaaggaaccttcactcagaagaaatgctgtggcccttccctttaccaacagaaaatggaacacaagag

SEQ ID NO: 554899 - DNA, 120 bp, Artificial Sequence
  ENSG00000168830_3 (sequence is synthesized)
accacatagctgaacaaattatagcctccttacaagtgagaaaccttcgaggctacatagttttcagccaaaggaaaataaccaacagcttctccacagtgtagactgaaacaagggaaa

SEQ ID NO: 554900 - DNA, 120 bp, Artificial Sequence
  ENSG00000168830_4 (sequence is synthesized)
catgaacatcacaaactgtaccacagaggccagcatggctataagacccaagaccatcactgagaagatgctcatttgcatgactctggtggtcatcaccaccctcaccacgttgctgaa

SEQ ID NO: 554901 - DNA, 120 bp, Artificial Sequence
  ENSG00000168830_5 (sequence is synthesized)
cttggctgtgatcatggctattggcaccaccaagaagctccaccagcctgccaactacctaatctgttctctggccgtgacggacctcctggtggcagtgctcgtcatgcccctgagcat

SEQ ID NO: 554902 - DNA, 120 bp, Artificial Sequence
  ENSG00000168830_6 (sequence is synthesized)
catctacattgtcatggatcgctggaagcttgggtacttcctctgtgaggtgtggctgagtgtggacatgacctgctgcacctgctccatcctccacctctgtgtcattgccctggacag

SEQ ID NO: 554903 - DNA, 120 bp, Artificial Sequence
  ENSG00000168830_7 (sequence is synthesized)
aatacgccaggaagaggacggccaagagggccgcgctgatgatccttaccgtctggaccatctccattttcatctccatgccccctctgttctggagaagccaccgccgcctaagccctc

SEQ ID NO: 554904 - DNA, 120 bp, Artificial Sequence
  ENSG00000168830_8 (sequence is synthesized)
cccctagtcagtgcaccatccagcacgaccatgttatctacaccatttactccacgctgggtgcgttttatatccccttgactttgatactgattctctattaccggatttaccacgcgg

SEQ ID NO: 554905 - DNA, 120 bp, Artificial Sequence
  ENSG00000168830_9 (sequence is synthesized)
ccaagagcctttaccagaaaaggggatcaagtcggcacttaagcaacagaagcacagatagccagaattcttttgcaagttgtaaacttacacagactttctgtgtgtctgacttctcca

SEQ ID NO: 554906 - DNA, 120 bp, Artificial Sequence
  ENSG00000168830_10 (sequence is synthesized)
cctcagaccctaccacagagtttgaaaagttccatgcctccatcaggatcccccccttcgacaatgatctagatcacccaggagaacgtcagcagatctctagcaccagggaacggaagg

SEQ ID NO: 554907 - DNA, 120 bp, Artificial Sequence
  ENSG00000168830_11 (sequence is synthesized)
cagcacgcatcctggggctgattctgggtgcattcattttatcctggctgccatttttcatcaaagagttgattgtgggtctgagcatctacaccgtgtcctcggaagtggccgactttc

SEQ ID NO: 554908 - DNA, 120 bp, Artificial Sequence
  ENSG00000168830_12 (sequence is synthesized)
tgacgtggctcggttatgtgaattctctgatcaaccctctgctctatacgagttttaatgaagactttaagctggcttttaaaaagctcattagatgccgagagcatacttagactgtaa

SEQ ID NO: 554909 - DNA, 120 bp, Artificial Sequence
  ENSG00000168830_13 (sequence is synthesized)
aaagctaaaaggcacgactttttccagagcctcatgagtggatgggggtaaggggtgcaacttattaattcttgaacatacttggttcaggagagtttgtaagtatgtgtggtcttgttt

SEQ ID NO: 554910 - DNA, 120 bp, Artificial Sequence
  ENSG00000168830_14 (sequence is synthesized)
ccttgtttgtttgtttgttttgttctgttttgtttgaggattgttatttggcgtgctgttttctacctctggtcttatctgtgatacataatttcaaataaacattatcatacaaaaaca

SEQ ID NO: 554911 - DNA, 120 bp, Artificial Sequence
  ENSG00000168843_0 (sequence is synthesized)
agtgactgagacaaactggaggtgaaaggagctggtactgtccactgtgctgtcggtgctgaacctgagacgcgagcggaccagttgctccagcacctgaaggcaacgccctcttgcacc

SEQ ID NO: 554912 - DNA, 120 bp, Artificial Sequence
  ENSG00000168843_1 (sequence is synthesized)
ctctgtgccctgtgggacccgcttcaccaacaggacccatatcaacttgacaaaggagtgtggtatcggacgtgggagagagtcctctgtttgccacctgggcgctcattcaggcgtgac

SEQ ID NO: 554913 - DNA, 120 bp, Artificial Sequence
  ENSG00000168843_2 (sequence is synthesized)
tttggagatttctatagttttagaccaaactatttttttttccccagctaagacgatcttttgagagttttttttttttattgtgatttatatttccacagcgtttaggaatctttctgg

SEQ ID NO: 554914 - DNA, 120 bp, Artificial Sequence
  ENSG00000168843_3 (sequence is synthesized)
gggacttttgtgactgttaaaataaggtgaaaagcaataaggatgtttaagtgctggtcagttgtcttggttctcggattcatttttctggagtcggaaggaaggccaaccaaagaagga

SEQ ID NO: 554915 - DNA, 120 bp, Artificial Sequence
  ENSG00000168843_4 (sequence is synthesized)
ggatatggccttaaatcctatcagcctctaatgagattgcgacataagcaggaaaaaaatcaagaaagttcaagagtcaaaggatttatgattcaggatggcccttttggatcttgtgaa

SEQ ID NO: 554916 - DNA, 120 bp, Artificial Sequence
  ENSG00000168843_5 (sequence is synthesized)
aataagtactgtggtttgggaagacactgtgttaccagcagagagacagggcaagcagaatgtgcctgtatggacctttgcaaacgtcactacaaacctgtgtgtggatctgacggagaa

SEQ ID NO: 554917 - DNA, 120 bp, Artificial Sequence
  ENSG00000168843_6 (sequence is synthesized)
ttctatgaaaaccactgtgaagtgcacagagctgcttgcctgaaaaaacaaaagattaccattgttcacaatgaagactgcttctttaaaggagataagtgcaagactactgaatacagc

SEQ ID NO: 554918 - DNA, 120 bp, Artificial Sequence
  ENSG00000168843_7 (sequence is synthesized)
aagatgaaaaatatgctattagatttacaaaatcaaaaatatattatgcaagaaaatgaaaatcctaatggcgacgacatatctcggaagaagctattggtggatcaaatgtttaaatat

SEQ ID NO: 554919 - DNA, 120 bp, Artificial Sequence
  ENSG00000168843_8 (sequence is synthesized)
tttgatgcagacagtaatggacttgtagatattaatgaactaactcaggtgataaaacaggaagaacttggcaaggatctctttgattgtactttgtatgttctattgaaatatgatgat

SEQ ID NO: 554920 - DNA, 120 bp, Artificial Sequence
  ENSG00000168843_9 (sequence is synthesized)
tttaatgctgacaagcacctggctcttgaagaattttatagagcattccaagtgatccagttgagtctgccagaagatcagaaactaagcatcactgcagcaactgtgggacaaagtgct

SEQ ID NO: 554921 - DNA, 120 bp, Artificial Sequence
  ENSG00000168843_10 (sequence is synthesized)
gttctgagctgtgccattcaaggaaccctgagacctcccattatctggaaaaggaacaatattattctaaataatttagatttggaagacatcaatgactttggagatgatgggtccttg

SEQ ID NO: 554922 - DNA, 120 bp, Artificial Sequence
  ENSG00000168843_11 (sequence is synthesized)
tatattactaaggttaccacaactcacgttggcaattacacctgctatgcagatggctatgaacaagtctatcagactcacatcttccaagtgaatgttcctccagtcatccgggtgtat

SEQ ID NO: 554923 - DNA, 120 bp, Artificial Sequence
  ENSG00000168843_12 (sequence is synthesized)
ccagagagtcaggctagagagcctggggtaactgccagtcttaggtgccatgcagagggcataccaaagcctcagcttggctggttgaagaatggaattgatattacaccaaagctttcc

SEQ ID NO: 554924 - DNA, 120 bp, Artificial Sequence
  ENSG00000168843_13 (sequence is synthesized)
aaacaactcacgcttcaagcaaatggcagtgaggttcacataagcaatgtgcgctatgaagatactggagcatacacttgtatcgcaaagaatgaagcaggagtggatgaagacatctct

SEQ ID NO: 554925 - DNA, 120 bp, Artificial Sequence
  ENSG00000168843_14 (sequence is synthesized)
tctctttttgtggaagactctgctagaaagaccctagctaacatattatggagagaagaaggtctgggaattgggaacatgttctatgttttttatgaagatggaatcaaagtgatacaa

SEQ ID NO: 554926 - DNA, 120 bp, Artificial Sequence
  ENSG00000168843_15 (sequence is synthesized)
cccatagaatgtgaatttcagaggcacattaagcctagtgaaaagctccttggatttcaggatgaagtctgtcccaaagctgagggagatgaagttcagaggtgtgtgtgggcatcagct

SEQ ID NO: 554927 - DNA, 120 bp, Artificial Sequence
  ENSG00000168843_16 (sequence is synthesized)
gttaatgtcaaagacaagttcatttatgttgcacagccaactttggacagagtccttattgttgatgtgcagtcccaaaaagttgttcaggcagtgagcacagaccctgtcccagttaaa

SEQ ID NO: 554928 - DNA, 120 bp, Artificial Sequence
  ENSG00000168843_17 (sequence is synthesized)
ttacactatgacaaatcacatgatcaggtctgggtgctaagctggggtaccttggagaagacatcaccaacactacaggtaattaccctggccagtgggaatgtgcctcaccacacgatc

SEQ ID NO: 554929 - DNA, 120 bp, Artificial Sequence
  ENSG00000168843_18 (sequence is synthesized)
cacacccaaccagtgggaaagcaatttgacagagtggatgattttttcattcccaccacaacactcattatcacccatatgaggtttggatttattcttcataaagatgaagctgcacta

SEQ ID NO: 554930 - DNA, 120 bp, Artificial Sequence
  ENSG00000168843_19 (sequence is synthesized)
caaacctgacagcaccggagcagtttccccacaggtcatggtggacggtgtaactgactcagtcattgggttcaatagtgatgtgacgggcactccatatgtctctccagatggccacta

SEQ ID NO: 554931 - DNA, 120 bp, Artificial Sequence
  ENSG00000168843_20 (sequence is synthesized)
ccttgtcagcattaatgatgtgaaaggtcttgtaagggttcagtacattaccatcagaggagaaatacaggaggcttttgatatttacacaaatctgcacatatctgatctggcatttca

SEQ ID NO: 554932 - DNA, 120 bp, Artificial Sequence
  ENSG00000168843_21 (sequence is synthesized)
accatcctttactgaagcccaccaatataacatctacggtagttcaagcacacaaactgatgtgctctttgtggagctctcttctgggaaggtcaagatgataaagagtctcaaggaacc

SEQ ID NO: 554933 - DNA, 120 bp, Artificial Sequence
  ENSG00000168843_22 (sequence is synthesized)
actcaaggcagaagaatggccttggaaccggaaaaacaggcaaatccaggacagtggcttgtttggtcaatacctgatgacaccttccaaggactctctcttcatcctagatggacgact

SEQ ID NO: 554934 - DNA, 120 bp, Artificial Sequence
  ENSG00000168843_23 (sequence is synthesized)
caataaattaaactgtgagatcactgaagttgaaaaaggaaatacagtcatttgggttggagatgcctaaaaaccctacgatacaattattgaatgaagcgttttacaatacattgcact

SEQ ID NO: 554935 - DNA, 120 bp, Artificial Sequence
  ENSG00000168843_24 (sequence is synthesized)
taatccattgtttaaatttacaacttaactttccaagtttatatcctagtcaaacaaaatttacttggttggtccaaataaaataaattgtttttgactaagtgactaagacatacacaa

SEQ ID NO: 554936 - DNA, 120 bp, Artificial Sequence
  ENSG00000168843_25 (sequence is synthesized)
ttaattatattggttaattagaaatactcagcacaatatttaatgagaaatcacatcagtcacaagaatcaaatatgtaaattatgctttaaacaataaagtaggatttaaatcatttaa

SEQ ID NO: 554937 - DNA, 120 bp, Artificial Sequence
  ENSG00000168843_26 (sequence is synthesized)
aaaactaaactgcagggaatttcagatgacataaagcattatttcattttgagggtagtttattttttttctctgtccttttggtatgattaaacaagaaataaaaggtgttgtggaaac

SEQ ID NO: 554938 - DNA, 120 bp, Artificial Sequence
  ENSG00000168843_27 (sequence is synthesized)
ttaaaattcttaattcaaaatattcggtcctgtccactgtttataatattttgtgccttgaagggaatgtcacaggaggaaaaggaagactaaagcctgcatactaaatgctctcataac

SEQ ID NO: 554939 - DNA, 120 bp, Artificial Sequence
  ENSG00000168843_28 (sequence is synthesized)
tataaatctcttgttgttaaaaaacatctcttgcaccaaatcctgtcttcagtcttttgtttaaccctcaatgaactaccaattgaaggcataagttggtcttaggttgtatacaggtgt

SEQ ID NO: 554940 - DNA, 120 bp, Artificial Sequence
  ENSG00000168843_29 (sequence is synthesized)
caaactccacttgacatttactgtataatctgcagcatgctatagaaagtggggaggaagggaggaaaaataattacagtcaaaatatttgcaatctatctactcattttgctttcaatc

SEQ ID NO: 554941 - DNA, 120 bp, Artificial Sequence
  ENSG00000168843_30 (sequence is synthesized)
actagagtgcattatgtttttaatgcaagtttgtctgggatgtcaactgcctacagatgtttattactagcagaatagattatttattaatagattgtttcttttcatatagtccaatgt

SEQ ID NO: 554942 - DNA, 120 bp, Artificial Sequence
  ENSG00000168843_31 (sequence is synthesized)
ttcatcatcaggaactttcggttttaaaaaagaaacattacttttgtctgctaaagtaaaccatatatagggaaattaacacctaggaaaagaaaactggcaagagaattgatgaggtat

SEQ ID NO: 554943 - DNA, 120 bp, Artificial Sequence
  ENSG00000168843_32 (sequence is synthesized)
tagtggcttagaagaattagtaatataagttgggaataaaggggtagcccgacagtggtaagtaaaaatgtagtactccattgtttttgctatttaaatataatgtatcaaaaaccttta

SEQ ID NO: 554944 - DNA, 120 bp, Artificial Sequence
  ENSG00000168843_33 (sequence is synthesized)
ttctaaaatttccacaaatgattccttttatccatcttcttgtaatcctaaaagcatcttctcactatgtgctgtagtttgaaacctaacgaatcctcctacttgagacactgtagaaaa

SEQ ID NO: 554945 - DNA, 120 bp, Artificial Sequence
  ENSG00000168843_34 (sequence is synthesized)
gtaaaaattgttgcttctgttttgttttaagaggaaatgagaaggccagcagaagtagattaaaactagagagctggtttattaaaataagcagataattatccaggcttaaagtaatag

SEQ ID NO: 554946 - DNA, 120 bp, Artificial Sequence
  ENSG00000168843_35 (sequence is synthesized)
cttacatgttttgaaaatccttgtacttatttttgtttttattgttgcaaaaaaatgttaatgggctgttgaaatgacctccatttacttaaggtaatccaataaggtcttttttaaata

SEQ ID NO: 554947 - DNA, 120 bp, Artificial Sequence
  ENSG00000168843_36 (sequence is synthesized)
tacaaattttactcaagtttaaattgtataaaactgcttagaaacctgaaattttatagtgtgtaatatcttatgtgtatatagcatcctgagctgtgtgatacagtagatttcttctta

SEQ ID NO: 554948 - DNA, 120 bp, Artificial Sequence
  ENSG00000168843_37 (sequence is synthesized)
gcagaaacatgcgaggtagatttaataaacaacaaaaatcagcttatgtttctacttattgaatctgctttactttttagcaattttcttccttgtgaacatgaaccatataaagtgtct

SEQ ID NO: 554949 - DNA, 120 bp, Artificial Sequence
  ENSG00000168843_38 (sequence is synthesized)
gtgacttaatgatttcatgtaagtctgtcgcatacatccttcttttgtagcttacaccatgtggatgctctgtctgtagacactgcttgataaaaggagaataaacctcttacattttaa

SEQ ID NO: 554950 - DNA, 120 bp, Artificial Sequence
  ENSG00000168843_39 (sequence is synthesized)
ccatagaatgtgaatttcagaggcacattaagcctagtgaaaagctccttggatttcagttgtacacatgatttcatcttgtcacctggagtatgaacttcaagcaaatagaattctatt

SEQ ID NO: 554951 - DNA, 120 bp, Artificial Sequence
  ENSG00000168843_40 (sequence is synthesized)
aaatgtttaaaattacaggctcaaaaacaagctttcccaagattaccaactttgtcactcttctggttttctactactgttccatccttatctatcactcttttattctttgatactttt

SEQ ID NO: 554952 - DNA, 120 bp, Artificial Sequence
  ENSG00000168843_41 (sequence is synthesized)
acattcagccaccttctttgcttgttatagatctagctgctgcttttcacatatgccatggtattacttattatttaatgggtcctaaaataactttaaagaaaaccacgtgtcttatta

SEQ ID NO: 554953 - DNA, 120 bp, Artificial Sequence
  ENSG00000168843_42 (sequence is synthesized)
cttcttcctcattttctcttgcgctgccatgtaagaactgcctttcacctcccacaatgattctgaggcctccccagacatgtggaattaagtgatccagttgagtctgccagaagatca

SEQ ID NO: 554954 - DNA, 120 bp, Artificial Sequence
  ENSG00000168843_43 (sequence is synthesized)
gttttcctttggggagtatcagtgaccatttcctccagtcatccgggtgtatccagagagtcaggctagagagcctggggtaactgccagtcttaggtgccatgcagagggcataccaaa

SEQ ID NO: 554955 - DNA, 120 bp, Artificial Sequence
  ENSG00000168872_0 (sequence is synthesized)
gcattctcgcgccggtggcgaggttagggcccgcgttgcgacgtggtgcagcgcatattttcacaagtgggtctcccttgtccgggactatggccaccgactcgtgggccctggcggtgg

SEQ ID NO: 554956 - DNA, 120 bp, Artificial Sequence
  ENSG00000168872_1 (sequence is synthesized)
acgagcaggaagcggctgtcaagtcgatgaccaatttgcagatcaaggaagagaaagtcaaagcagataccaatggtattatcaaaaccagtaccactgccgagaaaacagatgaagagg

SEQ ID NO: 554957 - DNA, 120 bp, Artificial Sequence
  ENSG00000168872_2 (sequence is synthesized)
agaaagaggacagagctgcccagtccttactcaacaagctgatcagaagcaaccttgttgataacacaaaccaagtggaagtcctgcaacgggatccaaactcccctctgtactcggtga

SEQ ID NO: 554958 - DNA, 120 bp, Artificial Sequence
  ENSG00000168872_3 (sequence is synthesized)
agtcgtttgaagagcttcggctgaaaccacagcttctccagggagtctatgccatgggcttcaatcgaccctccaagatacaagagaacgcattacccatgatgcttgctgaacccccac

SEQ ID NO: 554959 - DNA, 120 bp, Artificial Sequence
  ENSG00000168872_4 (sequence is synthesized)
agaatctgattgcccagtctcagtctggcactggtaaaacagctgcctttgtcttagccatgctcagccgagtggagccatcagacagatacccccagtgtctgtgcctctccccaacat

SEQ ID NO: 554960 - DNA, 120 bp, Artificial Sequence
  ENSG00000168872_5 (sequence is synthesized)
atgagctggcgcttcaaacaggaaaagtgattgagcagatgggcaaattttacccagaactgaagcttgcctatgccgttcgaggcaataaattggaaagaggccagaagatcagtgagc

SEQ ID NO: 554961 - DNA, 120 bp, Artificial Sequence
  ENSG00000168872_6 (sequence is synthesized)
agattgtcattggcacccctgggaccgtgctggactggtgctccaagctcaagttcattgatcccaagaaaatcaaggtgtttgttctggatgaggctgatgtcatgatagccactcagg

SEQ ID NO: 554962 - DNA, 120 bp, Artificial Sequence
  ENSG00000168872_7 (sequence is synthesized)
gccaccaagatcagagcatccgcatccagaggatgctgcccaggaactgccagatgctgcttttctccgccacctttgaagactctgtgtggaagtttgcccagaaagtggtcccagacc

SEQ ID NO: 554963 - DNA, 120 bp, Artificial Sequence
  ENSG00000168872_8 (sequence is synthesized)
caaatgttatcaaactgaagcgtgaggaagagaccctggataccatcaagcagtactatgtcctgtgcagcagcagagacgagaagttccaggccttgtgtaacctctacggggccatca

SEQ ID NO: 554964 - DNA, 120 bp, Artificial Sequence
  ENSG00000168872_9 (sequence is synthesized)
ccattgctcaagccatgatcttctgccatactcgcaaaacagctagttggctggcagcagagctctcaaaagaaggccaccaggtggctctgctgagtggggagatgatggtggagcaga

SEQ ID NO: 554965 - DNA, 120 bp, Artificial Sequence
  ENSG00000168872_10 (sequence is synthesized)
gggctgcggtgattgagcgcttccgagagggcaaagagaaggttttggtgaccaccaacgtgtgtgcccgcggcattgatgttgaacaagtgtctgtcgtcatcaactttgatcttcccg

SEQ ID NO: 554966 - DNA, 120 bp, Artificial Sequence
  ENSG00000168872_11 (sequence is synthesized)
tggacaaggacgggaatcctgacaatgagacctacctgcaccggatcgggcgcacgggccgctttggcaagaggggcctggcagtgaacatggtggacagcaagcacagcatgaacatcc

SEQ ID NO: 554967 - DNA, 120 bp, Artificial Sequence
  ENSG00000168872_12 (sequence is synthesized)
ggacacagatgatttggacgagattgagaaaatagccaactgagaagctccaccagccactgatgccagccctggcactgcccctgcacaggagacaagtgcatttagggcacaggcccc

SEQ ID NO: 554968 - DNA, 120 bp, Artificial Sequence
  ENSG00000168872_13 (sequence is synthesized)
gacatcaccccaaggacaacggcagaagtagagagaaactacctacctcacttcaaattatgtttggacttgacaaaaataggtgcaaatgatggggggcaatagaagaaaaaatttgca

SEQ ID NO: 554969 - DNA, 120 bp, Artificial Sequence
  ENSG00000168872_14 (sequence is synthesized)
ttttggaaaattgggtcctttccccacttttttaaagccacattcccccatctttataataatctggtcacagtggtagtcgctggccccaggaccccctcctgattttggctaggcatc

SEQ ID NO: 554970 - DNA, 120 bp, Artificial Sequence
  ENSG00000168872_15 (sequence is synthesized)
gtggaaccagctccagcccctgaagaaacgatagatgtgcaggttgtgcggaagaggctgagtggaaaatggtgtgagccccaccgctgtgcatcgaatgagggaagtggcagcagagag

SEQ ID NO: 554971 - DNA, 120 bp, Artificial Sequence
  ENSG00000168872_16 (sequence is synthesized)
gccagagctgccccctctctgtctcttcaatggacccttcacaagtgtttctcctgcccttggggctgtcttccttctcctgaaatccagagactttcttgctcatcccttctccctttc

SEQ ID NO: 554972 - DNA, 120 bp, Artificial Sequence
  ENSG00000168872_17 (sequence is synthesized)
acttctgttctctgctgcagaaagcagacttgcatatccctgatgagcagctcggctacttttgtaaacttcagatttggagagaaacacgaaagtctgaatcctgaccccttgagagag

SEQ ID NO: 554973 - DNA, 120 bp, Artificial Sequence
  ENSG00000168872_18 (sequence is synthesized)
agtgatctggcgagggccgatgaaggggctgggcctggtcttgccttctcttctctcggttgctccctctgcctaggcccctggtactcagtcacggcagccaggagaccccaggtgagt

SEQ ID NO: 554974 - DNA, 120 bp, Artificial Sequence
  ENSG00000168872_19 (sequence is synthesized)
ttctgagcgcatacgtagttggttcttacccccaggtgtcacacggggccgagagctgagcaagaatttggaatggaagttatgaccaagggaattatgctgttcatttataatagtgga

SEQ ID NO: 554975 - DNA, 87 bp, Artificial Sequence
  ENSG00000168872_20 (sequence is synthesized)
tatgaccaagggaattatgctgttcatttataatagtggacattatggagagctctgattcctacataatatgaataaggatggata

SEQ ID NO: 554976 - DNA, 74 bp, Artificial Sequence
  ENSG00000168872_21 (sequence is synthesized)
gcacgttgggaggctgaggcgggcggatcggttgagctcaggcgttcggaaaaaaatatagccgggcctggtgg

SEQ ID NO: 554977 - DNA, 81 bp, Artificial Sequence
  ENSG00000168872_22 (sequence is synthesized)
aatgcgactcaataaataaataaggatggataaattgtagcgtatgcaccattcattatgctaagacattttaaagtaatt

SEQ ID NO: 554978 - DNA, 120 bp, Artificial Sequence
  ENSG00000168872_23 (sequence is synthesized)
gtatgcaccattcattatgctaagacattttaaagtaattatgagaaacgctctactaatgatttgtttttatttgtatttttctgcttattagacaaatatatactcattttaaaaagg

SEQ ID NO: 554979 - DNA, 120 bp, Artificial Sequence
  ENSG00000168872_24 (sequence is synthesized)
tctggaaataacttgttctcctagtcctagaaggatgggcagggctttgatttccagagctggctttgcctttgaaatacctatgaaaatcacctgggtctccacagtggaaagaggcca

SEQ ID NO: 554980 - DNA, 120 bp, Artificial Sequence
  ENSG00000168872_25 (sequence is synthesized)
cagcctcttgagtaactgggactacaggaaaccacagcttctccagggagtctatgccatgggcttcaatcgaccctccaagatacaagagaacgcattacccatgatgcttgctgaacc

SEQ ID NO: 554981 - DNA, 120 bp, Artificial Sequence
  ENSG00000168872_26 (sequence is synthesized)
gccaggggcactccaagctacaagatccaggagatgagaggaatcagagaaggaatagtcagtgagaggaggagaacaaaacaagtccgaaagcggtagctcacacctgtaatcccagca

SEQ ID NO: 554982 - DNA, 78 bp, Artificial Sequence
  ENSG00000168872_27 (sequence is synthesized)
ggccgaggtgggaggattcctttgcatctctacaaaagatttcaaaatgagctgggtgtggtagcacacacctgtact

SEQ ID NO: 554983 - DNA, 120 bp, Artificial Sequence
  ENSG00000168872_28 (sequence is synthesized)
actccagcctgggtgacagcaagaccccatctctaaaataaataaatagagacctatcagtgtgatggtttttctccagccgtgcttgactgcccaggtgctagtgtggagagggagaaa

SEQ ID NO: 554984 - DNA, 120 bp, Artificial Sequence
  ENSG00000168872_29 (sequence is synthesized)
ctcccttcacttcagacgcctcctctggcttctgcctgggtcttggctctcgtactctcagcagcatttgtttgacgggccatttccatgtcagcgctgatcacagtccctcccaacctg

SEQ ID NO: 554985 - DNA, 120 bp, Artificial Sequence
  ENSG00000168872_30 (sequence is synthesized)
ggttgagaaaggagacctagggactcttccccaacccttgtccccatcccaggcctgctgctcctcctccccaagatgctcctcccccatcagccttcctgggcatctagaccctcccag

SEQ ID NO: 554986 - DNA, 120 bp, Artificial Sequence
  ENSG00000168872_31 (sequence is synthesized)
tattggctgacaggtgatttctggatgtcaggaacatttctgattagagtcccactctgtcaccctggttggagtgcagtggctcagtcacagatcactgcagccttgacctcctgagct

SEQ ID NO: 554987 - DNA, 63 bp, Artificial Sequence
  ENSG00000168872_32 (sequence is synthesized)
cctggctaatttttgtatttttttgtctgttcgtttgtttttgcgcaaccttcgcctcccggg

SEQ ID NO: 554988 - DNA, 64 bp, Artificial Sequence
  ENSG00000168872_33 (sequence is synthesized)
gcagtggcgcaactcccagtagctgagactacaggtacccgccaccacgcccggctaatttttt

SEQ ID NO: 554989 - DNA, 120 bp, Artificial Sequence
  ENSG00000168872_34 (sequence is synthesized)
aagccatatttatcttttttaatgacaaccatgccacctattcccatgatgctgggtcccataaaatggaatgtaaaagttccctctaaaacatccacctgacttagcatcttgtccata

SEQ ID NO: 554990 - DNA, 120 bp, Artificial Sequence
  ENSG00000168872_35 (sequence is synthesized)
aaactggggaaaggcacacacagaaggaaccaaattctgggaatgcatcatggctcagccaaaaatattgctggggtcttgtctgggcacagatcttactctgcacacttgatttccctg

SEQ ID NO: 554991 - DNA, 120 bp, Artificial Sequence
  ENSG00000168872_36 (sequence is synthesized)
tgccccttggggtgcaaaactggggtcctttagctgtgctagaggctagaatgagaatttcttggtgtgagcccatttaaaataatcatttattttacaatttaagcagctttttaacag

SEQ ID NO: 554992 - DNA, 120 bp, Artificial Sequence
  ENSG00000168872_37 (sequence is synthesized)
cgtataaaaaaatgtatgaaagtaatttgtgctcaatggagaaaacctgggtaatatagagaagcacgaagggggaaatatgcctttcattcagaaagaacattttgacatgttactgag

SEQ ID NO: 554993 - DNA, 120 bp, Artificial Sequence
  ENSG00000168872_38 (sequence is synthesized)
ccttaggctgtggctcaggcagagcaagttcctacaccaggccctgacctgggagaatgtgcttgaaagcagcagccttagaccatggcttgcaaaggcctctgccaagccagggctacc

SEQ ID NO: 554994 - DNA, 120 bp, Artificial Sequence
  ENSG00000168872_39 (sequence is synthesized)
tgctgcaggcttcagtctatggctgaaaggtgggcctggatgggaggacatgcttccctgtgctattcaagtgctaataacatcagcatactgggtgccttcaggtctgttaccaaatgg

SEQ ID NO: 554995 - DNA, 120 bp, Artificial Sequence
  ENSG00000168872_40 (sequence is synthesized)
ctctcctaaactcatcctttatgatttttctgtcagtgtctgtgcctctccccaacatatgagctggcgcttcaaacaggaaaagtgattgagcagatgggcaaattttacccagaactg

SEQ ID NO: 554996 - DNA, 120 bp, Artificial Sequence
  ENSG00000168872_41 (sequence is synthesized)
aagcttgcctatgccgttcgaggcaataaatgtgagtacggcaggcgacaactgaacagtgagcagggtagggggttgggcgtttgaattttgaagatgcgatgaccgtattcaactttc

SEQ ID NO: 554997 - DNA, 120 bp, Artificial Sequence
  ENSG00000168872_42 (sequence is synthesized)
taattcagtctgaccctggagcctaactgtgttgctctatttgaatctatttgaatacctgctaatttgttaacagtctttttcagtcttaaaataagattttcggttgattaaaaaaaa

SEQ ID NO: 554998 - DNA, 120 bp, Artificial Sequence
  ENSG00000168872_43 (sequence is synthesized)
aaatccacgcatggctcacagagttcttaatatctagagttcttcgctcagaaggtagagttttgaatttagcgtccagagttctgggacctgctaccaaagagggattaacaggactga

SEQ ID NO: 554999 - DNA, 120 bp, Artificial Sequence
  ENSG00000168872_44 (sequence is synthesized)
ggatggaaggttggggtcagctccctttctttaaaagtaagcaaaaccaggtacagtggctcacacctgcaatcccagccctttgggaggccagggtgggaggactgcttgagcacatgg

SEQ ID NO: 555000 - DNA, 120 bp, Artificial Sequence
  ENSG00000168872_45 (sequence is synthesized)
aggactgcttgagcacatggttcgagaccagcctgggcaacatagtaagacaaaaaataaaaaaaaaaaaatagccaagcgtggaagtgccagcttgtagtcccagctacttgggaggct

SEQ ID NO: 555001 - DNA, 120 bp, Artificial Sequence
  ENSG00000168872_46 (sequence is synthesized)
taaataaataaacataaaaagagttggatgatgttggattataggaggaagaagaagggaactgatgcttattgaaggattgctgtgtgggatttgatcctgaccacagtgcactgagat

SEQ ID NO: 555002 - DNA, 120 bp, Artificial Sequence
  ENSG00000168872_47 (sequence is synthesized)
cccaggcccaattagagccagaaatccttgtatacagggaagtcggatggtctcagggagatgggtggggttggtgacactattcctttctaggagagactgtttggatttccctgaggt

SEQ ID NO: 555003 - DNA, 90 bp, Artificial Sequence
  ENSG00000168872_48 (sequence is synthesized)
aggtgcggtggctcatgcctgcaatcccaaggcaggaaaattgcttgaaccctggagacagaggttgcagtgagccgagaatgtgctata

SEQ ID NO: 555004 - DNA, 63 bp, Artificial Sequence
  ENSG00000168872_49 (sequence is synthesized)
aaagaaagaaagaaaaggaactcccgcagaaaccagtagtcctgacttggtggaaggaaatgt

SEQ ID NO: 555005 - DNA, 120 bp, Artificial Sequence
  ENSG00000168872_50 (sequence is synthesized)
ccgcagaaaccagtagtcctgacttggtggaaggaaatgtacaggcatctgactggtagagaacggagcctactcttccaggggcgcccatctccagaacattgtgtctcccagaggatt

SEQ ID NO: 555006 - DNA, 120 bp, Artificial Sequence
  ENSG00000168872_51 (sequence is synthesized)
ccgactgatctcatgattttgttggcacttgccaaagttctcttcttttcctctgggttctgttgcctgcctatatgtgtgccctctcttgtacccagagttggcctgtcccaaattctt

SEQ ID NO: 555007 - DNA, 120 bp, Artificial Sequence
  ENSG00000168872_52 (sequence is synthesized)
tccctctatcccaaagttggtacgcattgacctacctatggatgacagtgatttctgtctcctgtccttagtcctctcagcctccaactctccttcctgcaggcattgatgttgaacaag

SEQ ID NO: 555008 - DNA, 63 bp, Artificial Sequence
  ENSG00000168872_53 (sequence is synthesized)
cgggactatggccaccgactcgtgggccctggcggtggacgagcaggaagcggctgtcaagtc

SEQ ID NO: 555009 - DNA, 120 bp, Artificial Sequence
  ENSG00000168874_0 (sequence is synthesized)
agatgacactctgagcgctccgggaacggacagcccggcggcttcccgaagccggcggcgcagctgcccggggcgagggggagaaagggagagagggagggggagggcgggcgaagcggg

SEQ ID NO: 555010 - DNA, 120 bp, Artificial Sequence
  ENSG00000168874_1 (sequence is synthesized)
agagccagagactcctcggcgctgagcgcggcggcggcccgggcagccccacgcccctgcctcgcgcgccgcccgcgccatgaagcacatcccggtcctcgaggacgggccgtggaagac

SEQ ID NO: 555011 - DNA, 120 bp, Artificial Sequence
  ENSG00000168874_2 (sequence is synthesized)
cgtgtgcgtgaaggagctgaacggccttaagaagctcaagcggaaaggcaaggagccggcgcggcgcgcgaacggctataaaactttccgactggacttggaagcgcccgagccccgcgc

SEQ ID NO: 555012 - DNA, 120 bp, Artificial Sequence
  ENSG00000168874_3 (sequence is synthesized)
cgtagccaccaacgggctgcgggacaggacccatcggctgcagccggtcccggtaccggtgccggtgccagtcccagtggcgccggccgttcccccaagagggggcacggacacagccgg

SEQ ID NO: 555013 - DNA, 120 bp, Artificial Sequence
  ENSG00000168874_4 (sequence is synthesized)
ggggctctcgggcgcccgaggtctccgacgcgcggaaacgctgcttcgccctaggcgcagtggggccaggactccccacgccgccgccgccgccgcctcctgcgccccagagccaggcac

SEQ ID NO: 555014 - DNA, 120 bp, Artificial Sequence
  ENSG00000168874_5 (sequence is synthesized)
ccaggcacctgggggcccagaggcacagcctttccgggagccgggtctgcgtcctcgcatcttgctgtgcgcaccgcccgcgcgccccgcgccgtcagcacccccagcaccgccagcgcc

SEQ ID NO: 555015 - DNA, 120 bp, Artificial Sequence
  ENSG00000168874_6 (sequence is synthesized)
cccggagtccactgtgcgccctgcgcccccgacgcgccccggggaaagttcctactcgtcaatttcacacgtaatttacaataaccaccaggattcctccgcgtcgcctaggaaacgacc

SEQ ID NO: 555016 - DNA, 120 bp, Artificial Sequence
  ENSG00000168874_7 (sequence is synthesized)
gggcgaagcgactgccgcctcctccgagatcaaagccctgcagcagacccggaggctcctggcgaacgccagggagcggacgcgggtgcacaccatcagcgcagccttcgaggcgctcag

SEQ ID NO: 555017 - DNA, 120 bp, Artificial Sequence
  ENSG00000168874_8 (sequence is synthesized)
gaagcaggtgccgtgctactcatatgggcagaagctgtccaaactggccatcctgaggatcgcctgtaactacatcctgtccctggcgcggctggctgaccttgactacagtgccgacca

SEQ ID NO: 555018 - DNA, 120 bp, Artificial Sequence
  ENSG00000168874_9 (sequence is synthesized)
cagcaacctcagcttctccgagtgtgtgcagcgctgcacccgcaccctgcaggccgagggacgtgccaagaagcgcaaggagtgactggctgcaggcaagaccaaggccaccactgtggg

SEQ ID NO: 555019 - DNA, 120 bp, Artificial Sequence
  ENSG00000168874_10 (sequence is synthesized)
ccctccttccagtcaggcctgaggacaaggtgagctcgctgagtccagcctcgtggtcttctccaagatgccgccagatgcccagcctacagcctctcagggtcggatcggagcacgcct

SEQ ID NO: 555020 - DNA, 120 bp, Artificial Sequence
  ENSG00000168874_11 (sequence is synthesized)
gcctccctctcccctccgccctcacccagccaatccgaggctgcttcgcactttgccctctgcctggtggggaggggagagctcagcccccgactcactcagaccccaaggcccactgtc

SEQ ID NO: 555021 - DNA, 120 bp, Artificial Sequence
  ENSG00000168874_12 (sequence is synthesized)
cagctgcagaaattcgttgccaaagattggacagagacaccgaaggaaatggggtggtgaaaccccacagcgaaaagccacaccgttgctctgtgacttttgctcctcctgttgcctgag

SEQ ID NO: 555022 - DNA, 120 bp, Artificial Sequence
  ENSG00000168874_13 (sequence is synthesized)
ccccatctcaagccaaagatgagtcagtggttctgctaggaactcatggaatggatgggcatttgatgacccctgggggtcatcttggccctctgacctggtgctctctctccactgggc

SEQ ID NO: 555023 - DNA, 120 bp, Artificial Sequence
  ENSG00000168874_14 (sequence is synthesized)
cttgtgctggctgagtgcaagacaagccttaggggctgtgagagggaggctggggtgcctgggcggggctgggagtgggacctgagatccctgcccactctctccccttcattggctgcc

SEQ ID NO: 555024 - DNA, 120 bp, Artificial Sequence
  ENSG00000168874_15 (sequence is synthesized)
caggccactggccccagttctcagtgtcccttgggtccaggctccttgggccctaagcatcaccagaagggagtaagcagggagagaagcaatattactccctcccctacaccagggact

SEQ ID NO: 555025 - DNA, 120 bp, Artificial Sequence
  ENSG00000168874_16 (sequence is synthesized)
tgccccagggcagctacctatgggtctttgcttccccagccagcctctcctcactgtgacccacccccatgggcccccgtcccaggcagccagcaccatgggcaggccctgccatggaca

SEQ ID NO: 555026 - DNA, 120 bp, Artificial Sequence
  ENSG00000168874_17 (sequence is synthesized)
gaaaaagagtttttctcttgttcagcctgcacgtggcctgaggaaggagtagaggctgggttggctggagccgtcctactgggcaagatggcgccccacttggagggcggtggtctgtta

SEQ ID NO: 555027 - DNA, 120 bp, Artificial Sequence
  ENSG00000168874_18 (sequence is synthesized)
cagggtgtgcaggggcagagaaggaagggaccaggggactgggccagtatgtggaggatggggcctgcgtgttcaaagccaaggcccgccccttccttgtgctcaaatggccaaagctgt

SEQ ID NO: 555028 - DNA, 120 bp, Artificial Sequence
  ENSG00000168874_19 (sequence is synthesized)
tcacgtctgtgctcaaccatctgcttcaaattgaagtaaaagccccaaaatgtcaagaaaatacttgtgttgagtggactctgtgggtgaccaggactttggccggtcatcagctgggga

SEQ ID NO: 555029 - DNA, 120 bp, Artificial Sequence
  ENSG00000168874_20 (sequence is synthesized)
gtgtgagggagggggttggtttctacctacaggttgagagcccttcaggatcaggcgctgtccgagtgagagtgtgtgtgtctgtgtgtggaagggggtggagggcggttcccacagtag

SEQ ID NO: 555030 - DNA, 120 bp, Artificial Sequence
  ENSG00000168874_21 (sequence is synthesized)
tctcagcctggactagtgaccaggaggcctggtcaggaacacatgaggagccctctctgtccgcactgcactcaatctgtaccatggatttatgagataggggcccctattattaacccc

SEQ ID NO: 555031 - DNA, 120 bp, Artificial Sequence
  ENSG00000168874_22 (sequence is synthesized)
gtttcacagatggggtaactgaggcctcaagtagacagggtcagtcggtgacagagccagtcatcgaatcaggatgggctcacttcaaatcctgtgctctcaaaccttttccagccccat

SEQ ID NO: 555032 - DNA, 120 bp, Artificial Sequence
  ENSG00000168874_23 (sequence is synthesized)
gtctcttgtgtggccttgtcacattgcttcacctcagcgggcctaaggtagggacaataaaggcccattgggactgggggaaggggtgataagataaaaaataggagagcactgtcaagg

SEQ ID NO: 555033 - DNA, 120 bp, Artificial Sequence
  ENSG00000168874_24 (sequence is synthesized)
cagaagggacagggctggccaaggaaagggggataggaggggaccggaggctgcagccatacaggacacagtttgtcccttggtttcaccagtgtcactttctcgtctctgctgctcaga

SEQ ID NO: 555034 - DNA, 120 bp, Artificial Sequence
  ENSG00000168874_25 (sequence is synthesized)
ctcctgggctgggctggggctggctgcagggagccccccttgcagtagcgtttctcaggctggccctttaccaaggaccacagtgtccatgctgtcttggatccctaggctggcacagaa

SEQ ID NO: 555035 - DNA, 120 bp, Artificial Sequence
  ENSG00000168874_26 (sequence is synthesized)
acaggggacccaggtggccctgagcactcctcagagcaaaggtgctctggaagcagactggacagagtgggcatggaatggggccaggagggtctgttaggaaggttcagccaccctgtg

SEQ ID NO: 555036 - DNA, 120 bp, Artificial Sequence
  ENSG00000168874_27 (sequence is synthesized)
aagctggcacagataacagcactgctctgttgtccctcggagcctctgagtaaccctgatggcacttcctaaggcagcaggacatgtggactgaccagcatcaaactgttgacatagaag

SEQ ID NO: 555037 - DNA, 120 bp, Artificial Sequence
  ENSG00000168874_28 (sequence is synthesized)
accatttctattaccaaagggagtgtaccccattctgctgccaagggagcaaacccatggccttaccacccagaaagagcccatcctccacctcccatccccctcctgcatacatacttc

SEQ ID NO: 555038 - DNA, 120 bp, Artificial Sequence
  ENSG00000168874_29 (sequence is synthesized)
attacatgtttccctttcattctgaagcatcattgatgaccagctgcctgtcagacactaagataggcagtgggaatgaagagatggatcttgtgtcatgcatggcatcacggagctctg

SEQ ID NO: 555039 - DNA, 120 bp, Artificial Sequence
  ENSG00000168874_30 (sequence is synthesized)
ggttctgtacggagggtgggacagacaggtagacaagcaaataattatgattatagcagatgactaaggtgttgtcgggagcttcaggaaaggaagaactaactcttggggaggttctca

SEQ ID NO: 555040 - DNA, 120 bp, Artificial Sequence
  ENSG00000168874_31 (sequence is synthesized)
ggaaggatttccctggaaagtagccatgggacttgcgtcttaaatggtgagtaaaagctttctgagcaggggagtaggaaaagggctttctatgcagaggagcactcagcgctggcagga

SEQ ID NO: 555041 - DNA, 120 bp, Artificial Sequence
  ENSG00000168874_32 (sequence is synthesized)
aattggaatcacccaaggagattattaaatattaaatattgatatgaagtattgatgcccaatttcatctccagaaattctgatgtattggtctagggtgttgcctggtcattgggattt

SEQ ID NO: 555042 - DNA, 120 bp, Artificial Sequence
  ENSG00000168874_33 (sequence is synthesized)
ttacaagctcctcaagtgatcttaatgtgcaggcaaggttgaagccgctggtctaagtggggtctggtctacgataagaaagtgactttgagccatcgatttgggagacaggctctgggt

SEQ ID NO: 555043 - DNA, 120 bp, Artificial Sequence
  ENSG00000168874_34 (sequence is synthesized)
ggatgtgtgtgtgtgcacacatatgtatgtatgtggatgactaaaagtgcatgctctcctctcctttcccagcttcctctccagcacagcaacttgtgttcgtatgcacacacatgcata

SEQ ID NO: 555044 - DNA, 120 bp, Artificial Sequence
  ENSG00000168874_35 (sequence is synthesized)
ctctctctcatgggcacatgcatacccacacacacactcgtgtacatttccagaaaatggaattacatttcagatagattcagattccaacggcagtcttctaaacacttttatgcaagc

SEQ ID NO: 555045 - DNA, 120 bp, Artificial Sequence
  ENSG00000168874_36 (sequence is synthesized)
agccattcaaggagaccctcagcaaaatataaatgacgaggagctgccctcatggggccctgtgaaagcactttgcagtccagccttgggtttgtggtcacagagtcacctgtggatgtt

SEQ ID NO: 555046 - DNA, 120 bp, Artificial Sequence
  ENSG00000168874_37 (sequence is synthesized)
tgtagcacactctccttgtcttgtctgctctgggtcaccaggcacaggccataaagggatgagggggccctctccagggacccgcaagatcttcctgggtatgtctgcatgaagccccac

SEQ ID NO: 555047 - DNA, 120 bp, Artificial Sequence
  ENSG00000168874_38 (sequence is synthesized)
gtgtgcacacccatcttcatgtgtgtgtgtgccagcctcctgctctctgcagaacaaaaccagaaggaatggctctgggagttggagatctcagctcacaggccaagctttgcaagactc

SEQ ID NO: 555048 - DNA, 120 bp, Artificial Sequence
  ENSG00000168874_39 (sequence is synthesized)
tccaaagactgcccacagactgtgctgcttcctgggtctggcctgagactatcccagaagagagggttaaattctggaggtgaggttttgagcaagtgttcatccccccacactatgctc

SEQ ID NO: 555049 - DNA, 120 bp, Artificial Sequence
  ENSG00000168874_40 (sequence is synthesized)
cttcctgtctccatggccacatccttcaaggctctgtgctgttctctttttttctggatttctccacctccaccaagttcccctttctcacagctagtggaggcatgagtaggcaggtcc

SEQ ID NO: 555050 - DNA, 120 bp, Artificial Sequence
  ENSG00000168874_41 (sequence is synthesized)
caggggctgggaactgggtagcattgccatgtgcagggactgtgttgggagctgcaggtacagagctcctctgtgctcaagagcttgccggtgagcctggacggaggcataggtgcagct

SEQ ID NO: 555051 - DNA, 120 bp, Artificial Sequence
  ENSG00000168874_42 (sequence is synthesized)
aattaggataagacaggggccgcgctgtggtcagccgtgggaagccggcgaggggactggagttggggctacacttgcctccctcctatgctgcttcctgagccacgaagtggtcattgc

SEQ ID NO: 555052 - DNA, 120 bp, Artificial Sequence
  ENSG00000168874_43 (sequence is synthesized)
cagcatcccaggcaacaaacagcaagactcagacatctccaaggaaaccctttgagtggatctgtaccgttgttctcgtcttgctctcttgctgccctgccaccttcacagctgctttct

SEQ ID NO: 555053 - DNA, 120 bp, Artificial Sequence
  ENSG00000168874_44 (sequence is synthesized)
gtttcctggttccaggaagacagcggggcacagggtccctgctttgtgaggagcagctggcttctccctttgcccccaggttttgccctcccacatgtctcccttctggtgacccggacc

SEQ ID NO: 555054 - DNA, 120 bp, Artificial Sequence
  ENSG00000168874_45 (sequence is synthesized)
ccagacaaactatgcctgcctccctgaagccaggcatcctgaggaacttgatagacaaacaatgacagtgttttccagaactgtgggtacgtgtctaatctcagatggtactatgaattc

SEQ ID NO: 555055 - DNA, 120 bp, Artificial Sequence
  ENSG00000168874_46 (sequence is synthesized)
ctggagatcaaagtttggatctaattcaacccctgatcctcgaaacggctttcttgcaaagtgtatatattggtttctttgctgaatgaatgaataaaacatggaaaatgtggtaattca

SEQ ID NO: 555056 - DNA, 120 bp, Artificial Sequence
  ENSG00000168874_47 (sequence is synthesized)
tgtcccttggagaagatgtgaaagcagatctgtcaaacgcaaggatgtccaggcttgagtgttaaagaaaacaccagtgcagcttatgatgcagcttgtacagcgtaattccacttttcg

SEQ ID NO: 555057 - DNA, 120 bp, Artificial Sequence
  ENSG00000168874_48 (sequence is synthesized)
agggacgtgccaagaagcgcaagagcctcatcatcactcaggatacaacagcgcgagcagctggtttggaggcagcagggaaaaccgtgcaaaaggttctttgtgagagaggaaactcgc

SEQ ID NO: 555058 - DNA, 120 bp, Artificial Sequence
  ENSG00000168874_49 (sequence is synthesized)
ttatgaataacaggactggacgccgtaaaagttggcggctggaattcttgtttctcaggcgccgctgttttctcttgactttttatctctggtttttatttttttcccgttttcttttaa

SEQ ID NO: 555059 - DNA, 120 bp, Artificial Sequence
  ENSG00000168874_50 (sequence is synthesized)
tgttgtttcttcctcttctcacatcagttgtgacttttcttcctcctctgcgagcccgaaggccacctcattagtgctcctgacactgcggaacttttctttctcaaggctgttgtcact

SEQ ID NO: 555060 - DNA, 120 bp, Artificial Sequence
  ENSG00000168874_51 (sequence is synthesized)
ggggatggttgaaagtgactattttcctaagaaaacagctggaggggacatgggagcaagaaggtgcttgggagcgcatctcagtgttgaggctcaaaacaggcagcgccatggcagagt

SEQ ID NO: 555061 - DNA, 120 bp, Artificial Sequence
  ENSG00000168874_52 (sequence is synthesized)
cattccgccgtcaccctgaataaaccccatgcacacagacgagaacaatgtctcctcagagggagggtctgggagaccggacaccatgcagagacccccatcagctcatcagagagcttc

SEQ ID NO: 555062 - DNA, 120 bp, Artificial Sequence
  ENSG00000168874_53 (sequence is synthesized)
acggagatgttctgggaggacaatcacattcataaatacgccggtgcctcggctctgccgctgactgcagcatgacatgaagccttttttaagaactggctgctgccgccaaagccttct

SEQ ID NO: 555063 - DNA, 120 bp, Artificial Sequence
  ENSG00000168874_54 (sequence is synthesized)
gggatatgtctgcctggaacctgggcacctcctgggagcagtcactgggtggcctgtcaggggctgtggggtcctggggcagggccggcaactggaagccagccctggggaggaaaggag

SEQ ID NO: 555064 - DNA, 120 bp, Artificial Sequence
  ENSG00000168874_55 (sequence is synthesized)
agaagggcaaggctgggctgctttcctcacagcccctggacactgagggaggagctgagttgggcctggggctgccatgtgtcagacagtggtgatgtgatggggggacacaggtcagtg

SEQ ID NO: 555065 - DNA, 120 bp, Artificial Sequence
  ENSG00000168874_56 (sequence is synthesized)
cagcagtggaaaaagcccgtcattgacacggctgtgggtggccggctttgcaaaagcctcacatttggggctttggagggctttttgcatttcatctttacacaggctcctgcacctcat

SEQ ID NO: 555066 - DNA, 120 bp, Artificial Sequence
  ENSG00000168874_57 (sequence is synthesized)
tcctcttgccctcctctcagctttcctcccacttccagttagagagatggcagctctggcaggaccaaatattgatgtttatcacagttttagggccatttgtctcaccatctgaagggc

SEQ ID NO: 555067 - DNA, 120 bp, Artificial Sequence
  ENSG00000168874_58 (sequence is synthesized)
tcagcgcaggcccacgggatcctctctccttgagtgacctctgggggcaggtatctggtttggatgctggagctggtccctactcttcccttgggggccgtgcggccgggtgctcaagtg

SEQ ID NO: 555068 - DNA, 120 bp, Artificial Sequence
  ENSG00000168874_59 (sequence is synthesized)
ttttaacctcaggaccctgattagttatcatgaagctaccccaccagctcctgggtctgttcatggattagtggcataaaggacgtaatattgttttgcaaaatctgctctccctcccat

SEQ ID NO: 555069 - DNA, 120 bp, Artificial Sequence
  ENSG00000168874_60 (sequence is synthesized)
gtctcctgcccaagaagttggtcttcgtggggccaaaggcaaggaggacccgaggaaggaagaggaaccactgtccccagcccctggtatggcatggcgtcagcctagtgaccagaaatt

SEQ ID NO: 555070 - DNA, 120 bp, Artificial Sequence
  ENSG00000168874_61 (sequence is synthesized)
gcttttgaactctgaggcttccagaggacaagaggaagaggaggacagggctgccctgcccactgctcagccttgagccctgcacctggcacagtgcgaggcctcagacagggtgtcagc

SEQ ID NO: 555071 - DNA, 120 bp, Artificial Sequence
  ENSG00000168874_62 (sequence is synthesized)
aggccctggctccccacatcccatccttaaacaggccatgccctttctacctgccccagcagaccagaaagcagtttccatgggaaacaacaaaccttccttgtgctcccaggataagtg

SEQ ID NO: 555072 - DNA, 120 bp, Artificial Sequence
  ENSG00000168874_63 (sequence is synthesized)
tttctagagggtgaagtcgggagccattctctcctttaacatcttgccacctctgcccagaattcacagccaccggcgcctgtcttagctgccctggctgtcagccccaccagagcccct

SEQ ID NO: 555073 - DNA, 120 bp, Artificial Sequence
  ENSG00000168874_64 (sequence is synthesized)
cctggctgctctgctgaaagctggtcagactgcctcactccatcccctacttagctcccctaaggcctagggggctccctacaggccaagggatgaggccagactcaatagaacacctga

SEQ ID NO: 555074 - DNA, 120 bp, Artificial Sequence
  ENSG00000168874_65 (sequence is synthesized)
taggccccccaagtgacctggccctggccggtcactccctatgtcccaatttacaccccagcagcacagaactccttgctcaaaggggctatttttggcctctgtgctcatgccatccct

SEQ ID NO: 555075 - DNA, 120 bp, Artificial Sequence
  ENSG00000168874_66 (sequence is synthesized)
tctgcctggaatgcccttctccactgtctgcctggctaactcctgctcattctggaaggctcagctcctcctgaaagccctccctgaccccaaccccagctccttcctcagggtgtcgta

SEQ ID NO: 555076 - DNA, 120 bp, Artificial Sequence
  ENSG00000168874_67 (sequence is synthesized)
gcacagggatgcttttggtctaattcaggagagcatcatgtgatatgcttttaaagtaatgagttaaaatgttagacaatatgaaactctattatgtgatatattagatttcatgtcatt

SEQ ID NO: 555077 - DNA, 120 bp, Artificial Sequence
  ENSG00000168874_68 (sequence is synthesized)
acattgtattatattatatttttaggtggtatgctatgtgacataggatgcgatgtgatattacatcccatgacactatgttacacagtgttggattaaatgcctgtgtctctggctaga

SEQ ID NO: 555078 - DNA, 120 bp, Artificial Sequence
  ENSG00000168874_69 (sequence is synthesized)
acacaacctcaccagccacgggcaccccagtcttcagctacacccaagtctgggatgcaagggggccttagcagctggctgacccaggatgcccaaggtcaccattccctagactctagg

SEQ ID NO: 555079 - DNA, 120 bp, Artificial Sequence
  ENSG00000168874_70 (sequence is synthesized)
catcatgccacatgctgcacatgctgcgtctttgagtccttgcagccgtgtgaggcacggtatcattactcccgttttacagaggaagctactgaagctcagagagtacctgagcagccc

SEQ ID NO: 555080 - DNA, 120 bp, Artificial Sequence
  ENSG00000168874_71 (sequence is synthesized)
tggagaaggagtgtcacttttcctccatctctgccactgactggctggatgcacaggaggactgggtctccagacaggagtgtaaagggcacgagggttgcttgtccttatcagaggttt

SEQ ID NO: 555081 - DNA, 120 bp, Artificial Sequence
  ENSG00000168874_72 (sequence is synthesized)
cctgagcaccagcctttagagacagggaggaaggcaagagtgcgcctttgaggaacgcacaagcccaggagttccaacagggctgcagtggaggctaagttgcagcaggacttttgagca

SEQ ID NO: 555082 - DNA, 120 bp, Artificial Sequence
  ENSG00000168874_73 (sequence is synthesized)
gtcacggagaatctgtgccgctcagactccggtggaagctgcttgatgtagtccttgaagctctgtgagctgcccaggcattgctactccgactttccagatgaggaaacggaggctctg

SEQ ID NO: 555083 - DNA, 120 bp, Artificial Sequence
  ENSG00000168874_74 (sequence is synthesized)
tctgcacggccttgactgactccgaggtttgcaaacatccactggcttcagtgaaggaggggtttgaccactggccctaccttgctcctgacctggggcctgtggggcagctgtctgcac

SEQ ID NO: 555084 - DNA, 120 bp, Artificial Sequence
  ENSG00000168875_0 (sequence is synthesized)
attctcagccaggtgcagcgctaggcgcggcagctccgggaaagccacgggaagggggagccacgactggaaacgcaagaggagagaagggaactagagaaggcaaaggtggagaggggg

SEQ ID NO: 555085 - DNA, 120 bp, Artificial Sequence
  ENSG00000168875_1 (sequence is synthesized)
agaaggaggagcttcttgccctggctaaaaaattacctggccacttaatcccggagactccgatacttgggtcccagcccctggtgcctgaagccccccggccgatcgccctctcctccc

SEQ ID NO: 555086 - DNA, 120 bp, Artificial Sequence
  ENSG00000168875_2 (sequence is synthesized)
ccgccctttctgcccccactcgctcccccggggctgcctgggcgctgggactggcatgatcagctgaactttgtggggtcagcgcttctctctggcttcccctcagcggcgccaaggcga

SEQ ID NO: 555087 - DNA, 120 bp, Artificial Sequence
  ENSG00000168875_3 (sequence is synthesized)
ggggagcgcagaaccccggctcaggacggacagacagacggccagccgcgcccaggctcgtctgcagaacccttgcactccctacccccacccacctagccgccgggaccatgtccaaac

SEQ ID NO: 555088 - DNA, 120 bp, Artificial Sequence
  ENSG00000168875_4 (sequence is synthesized)
cttcagaccacatcaagcggcccatgaacgccttcatggtatggtcccggggccagcggcgcaagatggcccaggaaaaccccaagatgcacaactcggagatcagcaaacgcctaggtg

SEQ ID NO: 555089 - DNA, 120 bp, Artificial Sequence
  ENSG00000168875_5 (sequence is synthesized)
ccgaatggaagcttctgtccgaggcagagaagcggccatacatcgatgaagccaagcggctacgcgcccagcacatgaaggagcaccctgactacaagtaccgacctcggcgcaagccca

SEQ ID NO: 555090 - DNA, 120 bp, Artificial Sequence
  ENSG00000168875_6 (sequence is synthesized)
agaacctgctcaagaaggacaggtatgtcttccccttgccctacctgggcgacacggacccgctcaaggcggctggcctgcccgtgggggcctccgacggcctcctgagcgcgcccgaga

SEQ ID NO: 555091 - DNA, 120 bp, Artificial Sequence
  ENSG00000168875_7 (sequence is synthesized)
aagcccgggccttcttgccgccggcctcggcgccctactccctgctggaccccgcgcagtttagctcgagcgccatccagaagatgggcgaagtgccccacaccttggctaccggcgctc

SEQ ID NO: 555092 - DNA, 120 bp, Artificial Sequence
  ENSG00000168875_8 (sequence is synthesized)
ctacgtggtgccctgtaactgtaccgcctggtctgcctccaccctgcagccccccgtcgcctacatcctcttcccaggcatgaccaagactggcatagacccttattcgtcagcccacgc

SEQ ID NO: 555093 - DNA, 120 bp, Artificial Sequence
  ENSG00000168875_9 (sequence is synthesized)
tacggccatgtaacccccagcccggcccggacctgaggcgtggtctgaaagccgggtctgcaccctgtcctctgagcctagccccggcctgcagacgcctccggggtcagccctgccgct

SEQ ID NO: 555094 - DNA, 120 bp, Artificial Sequence
  ENSG00000168875_10 (sequence is synthesized)
gtcccttacaccacccagacttttcctctctcttccagggggaagggtggggcgtcctcccggacccaaggcgcagacaggtaccggaaacttgcaaacgttatgtcagctacacagctg

SEQ ID NO: 555095 - DNA, 120 bp, Artificial Sequence
  ENSG00000168875_11 (sequence is synthesized)
cccctatcccgactctcccaaaacaaatctccgactgtaccccctttggacaaaaaagtaggcagttttgctttatttatatccccttcactctcctcggataggctttggactctgaac

SEQ ID NO: 555096 - DNA, 120 bp, Artificial Sequence
  ENSG00000168875_12 (sequence is synthesized)
tcccagattctgatattatatctacaatatgcatatattttttccttttgtcccctgaagaaaagagttagctgtgtctctgtgttttgccatcagacacaactaggagccatttgctct

SEQ ID NO: 555097 - DNA, 120 bp, Artificial Sequence
  ENSG00000168875_13 (sequence is synthesized)
tcatgtatgggggggaaaggcttcaaagttttaaattacagaaagggaaacatttctatttaaaaccatgctatgatagtgtttgcttctttaaagggaaaacaaaaaggacctacatgg

SEQ ID NO: 555098 - DNA, 120 bp, Artificial Sequence
  ENSG00000168875_14 (sequence is synthesized)
ttatttactttgtgtaaagcagtgcttctagagatctaagtttacttttagacagaatgtcgggttatgaagtcaggaagtagaaggtgaacaaaaaattaaaagaacaaaaacaaccta

SEQ ID NO: 555099 - DNA, 120 bp, Artificial Sequence
  ENSG00000168875_15 (sequence is synthesized)
aatggtcataaatgttttgacgatgtcttggaaatgtacctagaaggattttacctcgttgctctgttcatttgttgaacaaagacgttttgaataaagacaatctgtcattgtaaaaaa

SEQ ID NO: 555100 - DNA, 120 bp, Artificial Sequence
  ENSG00000168876_0 (sequence is synthesized)
tcagatcttgatgaacaaagcagtcataattcatctctagaaagatttatatcctggcatttgaaatgctttttatttagaatagtagtaaaaaatggaaaaagaaaaaggaaatgatga

SEQ ID NO: 555101 - DNA, 120 bp, Artificial Sequence
  ENSG00000168876_1 (sequence is synthesized)
tggaataccagaccaagagaattccttggatttttctgaacactttaaccaacttgaattgttggaaacacatggacaccttattcctactggtactcaaagtctttgggtaggcaattc

SEQ ID NO: 555102 - DNA, 120 bp, Artificial Sequence
  ENSG00000168876_2 (sequence is synthesized)
tgatgaagatgaggagcaagatgacaaaaatgaagagtggtatcgattgcaagaaaaaaaaatggaaaaagacccaagcagattgcttctttgggctgctgaaaaaaatcggcttaccac

SEQ ID NO: 555103 - DNA, 120 bp, Artificial Sequence
  ENSG00000168876_3 (sequence is synthesized)
agtgcggagactcctttctgaaaaggccactcacgtgaacactagggatgaagatgagtatacccctcttcatcgagcagcctacagtggacacttagatattgttcaggagctcattgc

SEQ ID NO: 555104 - DNA, 120 bp, Artificial Sequence
  ENSG00000168876_4 (sequence is synthesized)
acagggggccgatgttcatgcagtgactgtggatggctggacgcccctgcacagtgcttgtaagtggaataataccagagtggcttctttcttactgcagcatgatgcagatatcaatgc

SEQ ID NO: 555105 - DNA, 120 bp, Artificial Sequence
  ENSG00000168876_5 (sequence is synthesized)
ccaaacaaaaggcctcttgacccccttgcatcttgctgctgggaacagagacagcaaggataccctagaactcctcctgatgaaccgttacgtcaaaccagggctgaaaaacaacttgga

SEQ ID NO: 555106 - DNA, 120 bp, Artificial Sequence
  ENSG00000168876_6 (sequence is synthesized)
agaaactgcatttgatattgccaggaggacaagtatctatcactacctctttgaaattgtggaaggctgtacaaattcttcacctcagtcttaacaattctagtaattttcctaagtttc

SEQ ID NO: 555107 - DNA, 120 bp, Artificial Sequence
  ENSG00000168876_7 (sequence is synthesized)
aagttgacgtcaaacatcttactacaaaaattcagtgacattcattataacattcttccaagtgaattgcctgactttgatgtcaaaatgtatttgaaagtaatttgcatatatctttaa

SEQ ID NO: 555108 - DNA, 120 bp, Artificial Sequence
  ENSG00000168876_8 (sequence is synthesized)
ttatttctgtggagtttgtgatttttttatcagaaataattttaatgtgtgtatacttaaaaacttgacacgggttgtacagaaactggtatttttggtgctgatacaagagaaatgtat

SEQ ID NO: 555109 - DNA, 120 bp, Artificial Sequence
  ENSG00000168876_9 (sequence is synthesized)
ttttaaatatcccacatcctggatctttgttgggtatttagtatattgacatatatttttataaggtgaggtaactcagaacttaatttaaaagtcttaaatattctgatacaattcagc

SEQ ID NO: 555110 - DNA, 120 bp, Artificial Sequence
  ENSG00000168876_10 (sequence is synthesized)
tgtcttctctaccttaccatagccagttgctttcattttaaaccagagcaagtaacatattagtgacttgaatcttcataagttaaagtaaaaaacagcaaaaaacctagatctttgtct

SEQ ID NO: 555111 - DNA, 120 bp, Artificial Sequence
  ENSG00000168876_11 (sequence is synthesized)
tttagaacacagaccattttcaggaaagcagttagctaagtgtttaattcatgaatattgtatactgcatcccctaccacaatttacacaatcctgtggatagtcctacctcaccctggt

SEQ ID NO: 555112 - DNA, 120 bp, Artificial Sequence
  ENSG00000168876_12 (sequence is synthesized)
caacctacatgatccttaagctaatggcgaatcacgatgaccttgtagacatgcacacaactatacctttgtccaacagatcataatatatctgctatccaactggttttacctgcctaa

SEQ ID NO: 555113 - DNA, 120 bp, Artificial Sequence
  ENSG00000168876_13 (sequence is synthesized)
tcctactgatttgggcactgcttgtatagtctctcaagttcacaggaaatgttgattttctaaggtcctcatttttacagagtatacaggcaaagtgacaggggaaaaggaattagtcta

SEQ ID NO: 555114 - DNA, 120 bp, Artificial Sequence
  ENSG00000168876_14 (sequence is synthesized)
agagtaaggggatgattattatattgaggctaaaaccacaaagtggctcaggctttaaaaaaaaaacactgtggataatgacaaaaagcataagtaaaaatatttgagaaaaataaagta

SEQ ID NO: 555115 - DNA, 120 bp, Artificial Sequence
  ENSG00000168876_15 (sequence is synthesized)
ctgtcaggtgggttgttattccctgtcccggacctcgctttttgatggaccggcgccatctaagaactcctgagcccgtgggggtgggtagcctgtggacacaggccgagccctgcaggt

SEQ ID NO: 555116 - DNA, 120 bp, Artificial Sequence
  ENSG00000168876_16 (sequence is synthesized)
ttatagagtaagaaattgagattcaggaatattaatttgcccaggatcatcgaagtggaatgaacatcaaaagcctattccctctgcttggccacttccacctcattttactaagtttcc

SEQ ID NO: 555117 - DNA, 120 bp, Artificial Sequence
  ENSG00000168876_17 (sequence is synthesized)
ccatgtctgtgttagtaaactaataactaaaagggtctcgcattttaaatagctttttaacccaagagcatgccacatttaaccagaggcccatagaacaaactgaaaattacaacctaa

SEQ ID NO: 555118 - DNA, 120 bp, Artificial Sequence
  ENSG00000168876_18 (sequence is synthesized)
aaggttgtttctaaggttgtattgagaaggaattgagctcttgaatccctagaattccttattaatactttattcttctgttaaaagttttatttttaaaagtttcatacagtgtgtata

SEQ ID NO: 555119 - DNA, 120 bp, Artificial Sequence
  ENSG00000168876_19 (sequence is synthesized)
ttggtgtgataatcctacagaaaaatcaagcagttatgttttcttcacagataacacataaaatattaaacagaaagcctatgttattcattggactgaagcttttatgcaataaacctt

SEQ ID NO: 555120 - DNA, 120 bp, Artificial Sequence
  ENSG00000168876_20 (sequence is synthesized)
agttggaccaggagtaaatgtatggtttgatattcagagaatctcattcttagaagcaacaaagtgtagttaacactaacttgttcattcttaaatcagtagtcctctcctccccaaaaa

SEQ ID NO: 555121 - DNA, 120 bp, Artificial Sequence
  ENSG00000168876_21 (sequence is synthesized)
ggttcaagccagaagacctgcctttactgttatggccatcatacctatctcttgattgtgaggaccaaatgagacaatcttaccacagtgcggagactcctttctgaaaaggccactcac

SEQ ID NO: 555122 - DNA, 120 bp, Artificial Sequence
  ENSG00000168876_22 (sequence is synthesized)
gacctgcctttactgttatggccatcatacctatctcttgattcttaccacagtgcggagactcctttctgaaaaggccactcacgtgaacactagggatgaagatgagtatacccctct

SEQ ID NO: 555123 - DNA, 120 bp, Artificial Sequence
  ENSG00000168876_23 (sequence is synthesized)
tgtgaggaccaaatgagacaatgtacatgaaagcacatattaagctgcaaagtgtcatgctaggtattatttgggggtttaaggataattatctataaagatagcaagcaatcatctata

SEQ ID NO: 555124 - DNA, 120 bp, Artificial Sequence
  ENSG00000168876_24 (sequence is synthesized)
ttttaaaatcatttatataaagtcattaggatcatttaggaaagagaggatggaaactaacatttattaaaaactaactataccaggtaccttattacattattttatttaatcatcatg

SEQ ID NO: 555125 - DNA, 120 bp, Artificial Sequence
  ENSG00000168878_0 (sequence is synthesized)
tgtaaatgctcttctgactaatgcaaaccatgtgtccatagaaccagaagatttttccaggggaaaagagcccccacgccccgcccagctataaggggccatgcaccaagcagggtaccc

SEQ ID NO: 555126 - DNA, 120 bp, Artificial Sequence
  ENSG00000168878_1 (sequence is synthesized)
aggctgcagaggtgccatggctgagtcacacctgctgcagtggctgctgctgctgctgcccacgctctgtggcccaggcactgctgcctggaccacctcatccttggcctgtgcccaggg

SEQ ID NO: 555127 - DNA, 120 bp, Artificial Sequence
  ENSG00000168878_2 (sequence is synthesized)
ccctgagttctggtgccaaagcctggagcaagcattgcagtgcagagccctagggcattgcctacaggaagtctggggacatgtgggagccgatgacctatgccaagagtgtgaggacat

SEQ ID NO: 555128 - DNA, 120 bp, Artificial Sequence
  ENSG00000168878_3 (sequence is synthesized)
cgtccacatccttaacaagatggccaaggaggccattttccaggacacgatgaggaagttcctggagcaggagtgcaacgtcctccccttgaagctgctcatgccccagtgcaaccaagt

SEQ ID NO: 555129 - DNA, 120 bp, Artificial Sequence
  ENSG00000168878_4 (sequence is synthesized)
gcttgacgactacttccccctggtcatcgactacttccagaaccagactgactcaaacggcatctgtatgcacctgggcctgtgcaaatcccggcagccagagccagagcaggagccagg

SEQ ID NO: 555130 - DNA, 120 bp, Artificial Sequence
  ENSG00000168878_5 (sequence is synthesized)
gatgtcagaccccctgcccaaacctctgcgggaccctctgccagaccctctgctggacaagctcgtcctccctgtgctgcccggggccctccaggcgaggcctgggcctcacacacagga

SEQ ID NO: 555131 - DNA, 120 bp, Artificial Sequence
  ENSG00000168878_6 (sequence is synthesized)
tctctccgagcagcaattccccattcctctcccctattgctggctctgcagggctctgatcaagcggatccaagccatgattcccaagggtgcgctagctgtggcagtggcccaggtgtg

SEQ ID NO: 555132 - DNA, 120 bp, Artificial Sequence
  ENSG00000168878_7 (sequence is synthesized)
ctcgacacgctgctgggccgcatgctgccccagctggtctgccgcctcgtcctccggtgctccatggatgacagcgctggcccaaggtcgccgacaggagaatggctgccgcgagactct

SEQ ID NO: 555133 - DNA, 120 bp, Artificial Sequence
  ENSG00000168878_8 (sequence is synthesized)
gagtgccacctctgcatgtccgtgaccacccaggccgggaacagcagcgagcaggccataccacaggcaatgctccaggcctgtgttggctcctggctggacagggaaaagtgcaagcaa

SEQ ID NO: 555134 - DNA, 120 bp, Artificial Sequence
  ENSG00000168878_9 (sequence is synthesized)
tttgtggagcagcacacgccccagctgctgaccctggtgcccaggggctgggatgcccacaccacctgccaggccctcggggtgtgtgggaccatgtccagccctctccagtgtatccac

SEQ ID NO: 555135 - DNA, 120 bp, Artificial Sequence
  ENSG00000168878_10 (sequence is synthesized)
gccctctccagtgtatccacagccccgacctttgatgagaactcagctgtccagaaaaagacaccgtcctttaaagtgctgcagtatggccagacgtggtggctcacacctgcaatccca

SEQ ID NO: 555136 - DNA, 61 bp, Artificial Sequence
  ENSG00000168878_11 (sequence is synthesized)
tatgcctgtaatcccaactactcagaaggccgaggcaggagaattacttgaacgcaggaga

SEQ ID NO: 555137 - DNA, 87 bp, Artificial Sequence
  ENSG00000168878_12 (sequence is synthesized)
ttagccaagtgtggtggcatatgcctgtaatcccaactactcagaaggccgaggcaggagaattacttgaacgcaggagaatcactg

SEQ ID NO: 555138 - DNA, 120 bp, Artificial Sequence
  ENSG00000168878_13 (sequence is synthesized)
tccatctcagtaaataaataaataaataaaaagcgctgcagtagctgtggcctcaccctgaagtcagcgggcccaggcctacctcactctctcccttggcagagaagcagacgtccatag

SEQ ID NO: 555139 - DNA, 120 bp, Artificial Sequence
  ENSG00000168878_14 (sequence is synthesized)
ctcctctccctcacaagcgctcccagcctgccctccagctgctgctctcccctcccagtctctactcactgggatgaggttaggtcatgaggacaccaaaaacctaaaaataaacaaaaa

SEQ ID NO: 555140 - DNA, 120 bp, Artificial Sequence
  ENSG00000168878_15 (sequence is synthesized)
tgagacgggctctgggaccatggtgaccaggctcttcccctgctccctggccctcgccagctgccaggctgaaaagaagcctcagctcccacaccgccctcctcaccgcccttcctcggc

SEQ ID NO: 555141 - DNA, 120 bp, Artificial Sequence
  ENSG00000168878_16 (sequence is synthesized)
agtcacttccactggtggaccacgggcccccagccctgtgtcggccttgtctgtctcagctcaaccacagtctgacaccagagcccacttccatcctctctggtgtgaggcacagcgagg

SEQ ID NO: 555142 - DNA, 120 bp, Artificial Sequence
  ENSG00000168878_17 (sequence is synthesized)
gcagcatctggaggagctctgcagcctccacacctaccacgacctcccagggctgggctcaggaaaaaccagccactgctttacaggacagggggttgaagctgagccccgcctcacacc

SEQ ID NO: 555143 - DNA, 120 bp, Artificial Sequence
  ENSG00000168878_18 (sequence is synthesized)
cacccccatgcactcaaagattggattttacagctacttgcaattcaaaattcagaagaataaaaaatgggaacatacagaactctaaaagatagacatcagaaattgttaagttaagct

SEQ ID NO: 555144 - DNA, 120 bp, Artificial Sequence
  ENSG00000168878_19 (sequence is synthesized)
atggcgaccgggcaagctttcttcctcgagatgctctgctgcttgagagctattgctttgttaagatataaaaaggggtttctttttgtctttctgtaaggtggacttccagcttttgat

SEQ ID NO: 555145 - DNA, 120 bp, Artificial Sequence
  ENSG00000168878_20 (sequence is synthesized)
tgaaagtcctagggtgattctatttctgctgtgatttatctgctgaaagctcagctggggttgtgcaagctagggacccattcctgtgtaatacaatgtctgcaccaatgctaataaagt

SEQ ID NO: 555146 - DNA, 120 bp, Artificial Sequence
  ENSG00000168878_21 (sequence is synthesized)
ttagcttttcttaaagactgaaatgcctggaagtgtccctttatttataaaataacttttgtcatatttcttatacatgtttcttgtaagaaattcagaaactacagacaaagagagtgg

SEQ ID NO: 555147 - DNA, 73 bp, Artificial Sequence
  ENSG00000168878_22 (sequence is synthesized)
ttcttgtaagaaattcagaaactacagacaaagagagtggaaattacccctgcacgtatacacccagatggcc

SEQ ID NO: 555148 - DNA, 89 bp, Artificial Sequence
  ENSG00000168878_23 (sequence is synthesized)
ttgtgacaatacaccttccccacccttgagaaggtgctttgtaatattctccccacccaccccacgcccgcacccccgcacccttaaga

SEQ ID NO: 555149 - DNA, 120 bp, Artificial Sequence
  ENSG00000168878_24 (sequence is synthesized)
tccccacccaccccacgcccgcacccccgcacccttaagaaggtattttgtaatattctctccgccattgagaatgtgctttgtaagatccaccccctgcccacaaaaaattgctcctaa

SEQ ID NO: 555150 - DNA, 82 bp, Artificial Sequence
  ENSG00000168878_25 (sequence is synthesized)
ttgtaagatccaccccctgcccacaaaaaattgctcctaactccaccgcctatcccaaacctacttttggactcagcccacc

SEQ ID NO: 555151 - DNA, 120 bp, Artificial Sequence
  ENSG00000168878_26 (sequence is synthesized)
cctgtttggtagtctcttcacagggaagcatgtgacacccacaatcccacctagcccaggagagagctacggcagggtgtgtgttttgacactgagcttggggctttttccatcttctcc

SEQ ID NO: 555152 - DNA, 120 bp, Artificial Sequence
  ENSG00000168878_27 (sequence is synthesized)
ccacagcctctggctccacacctccaccgttcaagcgccagaaagagctgtctatgcagcctgctcttgggcctggggatgagacacacaattcattggctcctggattttaagtagaca

SEQ ID NO: 555153 - DNA, 120 bp, Artificial Sequence
  ENSG00000168878_28 (sequence is synthesized)
tttgtaaatctatagctaactactgtccttaaagccattgtttccattacaaaatccaactctctgagagaaaagggtgttttaaatttaaaaaaataaaaacaaaaaagtttgattgag

SEQ ID NO: 555154 - DNA, 120 bp, Artificial Sequence
  ENSG00000168878_29 (sequence is synthesized)
ccaggtgagtccaggcccccagttgcggggaggtaagggggcaggtcctgaccatcagggcatgggaggcccttctgctccccaagcaggaagaggcggccactcctgccggctgctcca

SEQ ID NO: 555155 - DNA, 120 bp, Artificial Sequence
  ENSG00000168878_30 (sequence is synthesized)
tcctccctctcaccgcacagctggaggctcctgagggcttctggctggccatcaggaaaacaccctttccggaccccgagcactgccccgcccagaaccccagtcactgagtgcccaacc

SEQ ID NO: 555156 - DNA, 120 bp, Artificial Sequence
  ENSG00000168878_31 (sequence is synthesized)
acttccccctggtcatcgactacttccagaaccagactgtgagggctgcaagctcacctcctgcctgcctccccacgcaggcccctgtgcccacccatggggagccacacacacagcacc

SEQ ID NO: 555157 - DNA, 120 bp, Artificial Sequence
  ENSG00000168883_0 (sequence is synthesized)
ggtagtggagatgtccggccggtctaagcgggagtctcgcggttccactcgcgggaagcgagagtctgagtcgcggggcagctccggtcgcgtcaagcgggagcgagatcgggagcggga

SEQ ID NO: 555158 - DNA, 120 bp, Artificial Sequence
  ENSG00000168883_1 (sequence is synthesized)
gcctgaggcggcgagctcccggggcagccctgtgcgcgtgaagcgggagttcgagccggcgagcgcgcgcgaggccccggcttctgttgtcccgtttgtgcgggtgaagcgggagcgcga

SEQ ID NO: 555159 - DNA, 120 bp, Artificial Sequence
  ENSG00000168883_2 (sequence is synthesized)
ggtcgatgaggactcggagcctgagcgggaggtgcgagcaaagaatggccgagtggattctgaggaccggaggagccgccactgcccgtacctggacaccattaacaggagtgtgctgga

SEQ ID NO: 555160 - DNA, 120 bp, Artificial Sequence
  ENSG00000168883_3 (sequence is synthesized)
ctttgactttgagaaactgtgttctatctccctctcacacatcaatgcttatgcctgtctggtgtgtggcaagtactttcaaggccggggtttgaagtctcacgcctacattcacagtgt

SEQ ID NO: 555161 - DNA, 120 bp, Artificial Sequence
  ENSG00000168883_4 (sequence is synthesized)
ccagtttagccaccatgttttcctcaacctccacaccctcaagttttactgccttccagacaactatgagatcatcgattcctcattggaggatatcacgtatgtgttgaagcccacttt

SEQ ID NO: 555162 - DNA, 120 bp, Artificial Sequence
  ENSG00000168883_5 (sequence is synthesized)
cacaaagcagcaaattgcaaacttggacaagcaagccaaattgtcccgggcatatgatggtaccacttacctgccgggtattgtgggactgaataacataaaggccaatgattatgccaa

SEQ ID NO: 555163 - DNA, 120 bp, Artificial Sequence
  ENSG00000168883_6 (sequence is synthesized)
cgctgtccttcaggctctatctaatgttcctcctctccggaactactttctggaagaagacaattataagaacatcaaacgtcctccaggggatatcatgttcttgttggtccagcgttt

SEQ ID NO: 555164 - DNA, 120 bp, Artificial Sequence
  ENSG00000168883_7 (sequence is synthesized)
tggagagctgatgagaaagctctggaaccctcgaaatttcaaggcacatgtgtctccccatgagatgcttcaggcagttgtactttgcagtaagaagacttttcagatcaccaaacaagg

SEQ ID NO: 555165 - DNA, 120 bp, Artificial Sequence
  ENSG00000168883_8 (sequence is synthesized)
agatggcgttgactttctgtcttggtttctgaatgctctgcactcagctctggggggcacaaagaagaaaaagaagactattgtgactgatgttttccaggggtccatgaggatcttcac

SEQ ID NO: 555166 - DNA, 120 bp, Artificial Sequence
  ENSG00000168883_9 (sequence is synthesized)
tgccagcagaagaaaaagagcagttgctccataatgacgagtaccaggagacaatggtggagtccacttttatgtacctgacgctggaccttcctactgcccccctctacaaggacgaga

SEQ ID NO: 555167 - DNA, 120 bp, Artificial Sequence
  ENSG00000168883_10 (sequence is synthesized)
aggagcagctcatcattccccaagtgccactcttcaacatcctggctaagttcaatggcatcactgagaaggaatataagacttacaaggagaactttctgaagcgcttccagcttacca

SEQ ID NO: 555168 - DNA, 120 bp, Artificial Sequence
  ENSG00000168883_11 (sequence is synthesized)
agttgcctccatatctaatcttttgtatcaagagattcactaagaacaacttctttgttgagaagaatccaactattgtcaatttccctattacaaatgtggatctgagagaatacttgt

SEQ ID NO: 555169 - DNA, 120 bp, Artificial Sequence
  ENSG00000168883_12 (sequence is synthesized)
ctgaagaagtacaagcagtacacaagaataccacctatgacctcattgccaacatcgtgcatgacggcaagccctccgagggctcctaccggatccacgtgcttcatcatgggacaggca

SEQ ID NO: 555170 - DNA, 120 bp, Artificial Sequence
  ENSG00000168883_13 (sequence is synthesized)
aatggtatgaattacaagacctccaggtgactgacatccttccccagatgatcacactgtcagaggcttacattcagatttggaagaggcgagataatgatgaaaccaaccagcaggggg

SEQ ID NO: 555171 - DNA, 120 bp, Artificial Sequence
  ENSG00000168883_14 (sequence is synthesized)
cttgaaggaggcgtctagggctttgctcccaagggctgtggctgatgatggtaaataagaacacagaagctgtagctgaacacaggctggctggtgggcttcctaggccagcccagcttg

SEQ ID NO: 555172 - DNA, 120 bp, Artificial Sequence
  ENSG00000168883_15 (sequence is synthesized)
tatgggttctggctacaccagagcaccaagagcccacttgcctgggatggccccacactgtcactcagctgttctttgatcatttttttctagattgatgctcctttctcccatgcattg

SEQ ID NO: 555173 - DNA, 120 bp, Artificial Sequence
  ENSG00000168883_16 (sequence is synthesized)
agctcccatctagcttcagcagggcagaacccttctccagatgtgtgtaacttatgtcttgagtatctgggagtagttgaagaacagataattccttccaaacatcaagccttgggattc

SEQ ID NO: 555174 - DNA, 120 bp, Artificial Sequence
  ENSG00000168883_17 (sequence is synthesized)
ttggagcaagcagaaagccagtaacttcgctctgttagaggtggaggattttcctatggttccccccatttcctgatttgtatttttagatggattaaatagtctcctgtttttaaacca

SEQ ID NO: 555175 - DNA, 120 bp, Artificial Sequence
  ENSG00000168883_18 (sequence is synthesized)
gtcccaacttcggaggacctgggcgcggagggctgtggcgtgaagaccgctctaaaaccgagatgactagaggttccgtttaaccgattcctgccggggaagcgtcagcaggtggggatc

SEQ ID NO: 555176 - DNA, 120 bp, Artificial Sequence
  ENSG00000168883_19 (sequence is synthesized)
tcggggcagcctgcattccagctctacctgggattgtcgccgtgcacatggctggaggagcgtctctccgccactgcgcacattttgcagcctgcaccggccaacgcaaagaatggccga

SEQ ID NO: 555177 - DNA, 120 bp, Artificial Sequence
  ENSG00000168883_20 (sequence is synthesized)
attaacagagaaagtgactgcaatggaaagtcctgaactggttacaaacactaatgagaaagaggctcgtgggtattatgtgtctggtggagacacctcaacagtgctttggagcatggc

SEQ ID NO: 555178 - DNA, 120 bp, Artificial Sequence
  ENSG00000168883_21 (sequence is synthesized)
gaggccccggcctggccaagcgatgcagcgcacggagttttcgggtctggtcgggtcgggtggagtagggtatgcttgacttccaccccccggacggagggcttttgtttttgttttttt

SEQ ID NO: 555179 - DNA, 120 bp, Artificial Sequence
  ENSG00000168883_22 (sequence is synthesized)
ttgtttgttttttcgtaacatatcaataggaaacaaggacttcggcttacagctgataccagaaccttcagaaaaatgcaaatcatctataacacaactcgatgcttacggcggtgcctt

SEQ ID NO: 555180 - DNA, 120 bp, Artificial Sequence
  ENSG00000168883_23 (sequence is synthesized)
aggtagcggagcaccttactaaaatacagcacggtggggcaaaccggcagataaacttcttgctggctccccgatactctgacagcgatgcttaactgggggcttatgagtcgtcccagt

SEQ ID NO: 555181 - DNA, 120 bp, Artificial Sequence
  ENSG00000168883_24 (sequence is synthesized)
gaaagagacgagatgagctgaaccttaggacaaagaatggccgagtggattctgaggaccggaggagccgccactgcccgtacctggacaccattaacaggagtgtgctggactttgact

SEQ ID NO: 555182 - DNA, 120 bp, Artificial Sequence
  ENSG00000168883_25 (sequence is synthesized)
gctcccttcagtgtgtccttgcttggccttggctttgggactctgcaagtaatagtgctgtcagtagttagtttaaggcagtggttctcaattttggctacacattggactcaccttggg

SEQ ID NO: 555183 - DNA, 120 bp, Artificial Sequence
  ENSG00000168883_26 (sequence is synthesized)
cctactgcccccctctacaaggacgagaaggagcagctcatcattccccaagtgccactcttcaacatcctggctaagttcaatggcatcactgagaagacagagttttgctcttgtcgc

SEQ ID NO: 555184 - DNA, 87 bp, Artificial Sequence
  ENSG00000168883_27 (sequence is synthesized)
catccgccaccatgacatgttggccaggttggtctcgaactcttgacctcaagtgatcagcctgcctcgcctcccaaagtgctggga

SEQ ID NO: 555185 - DNA, 81 bp, Artificial Sequence
  ENSG00000168883_28 (sequence is synthesized)
tggcccattttcattttatatgtaagaatcaccacatgtatgtgacgtatttattataaattatattgactttattgagcc

SEQ ID NO: 555186 - DNA, 120 bp, Artificial Sequence
  ENSG00000168883_29 (sequence is synthesized)
tgatgttttgaagttccctgagagaccctgatatgcagccaaggttgagaacctctgccctagactagagccttaccatccaaagtgggatgcatccttggaccaataacatcagcatca

SEQ ID NO: 555187 - DNA, 120 bp, Artificial Sequence
  ENSG00000168883_30 (sequence is synthesized)
gtcttgttagaaatcagcttgttagaaatgcagactctcagtcccctcaaacctaccacatcagaacctggattttaacgtgaccctctgatttgtaagaaattaaagtttgcgaagcac

SEQ ID NO: 555188 - DNA, 120 bp, Artificial Sequence
  ENSG00000168884_0 (sequence is synthesized)
ggcctacagccatgtcccgggacccggggtcgggcggctgggaggaggccccgcgcgcagctgccgcgctctgcaccctgtaccacgaggccggacagcggctgcgccgcctgcaggacc

SEQ ID NO: 555189 - DNA, 120 bp, Artificial Sequence
  ENSG00000168884_1 (sequence is synthesized)
ctctgcaccctgtaccacgaggccggacagcggctgcgccgcctgcaggaccagctcgctgcccgcgacgccctcatcgctcgcctccgcgcccgcctggccgcgctggagggggacgcc

SEQ ID NO: 555190 - DNA, 120 bp, Artificial Sequence
  ENSG00000168884_2 (sequence is synthesized)
acgcgctgctggagcaggttgcgcgcttccgggagcagctgcgaaggcaggagggcggcgccgccgaggcccagatgcgccaggaaattgagaggctgactgagcgactagaagaaaaag

SEQ ID NO: 555191 - DNA, 120 bp, Artificial Sequence
  ENSG00000168884_3 (sequence is synthesized)
agagggagatgcagcagctgctgagccagccccaacacgagcgagagaaggaagtcgtcctgctacggaggagcatggcagaaggggagcgcgcccgggccgccagtgacgtcctgtgcc

SEQ ID NO: 555192 - DNA, 120 bp, Artificial Sequence
  ENSG00000168884_4 (sequence is synthesized)
gctccttggccaacgagacccatcagctgcggaggacgctgaccgccaccgcccacatgtgtcagcatctggccaagtgtctggatgaacgacagcatgcacaaaggaatgtgggggaga

SEQ ID NO: 555193 - DNA, 120 bp, Artificial Sequence
  ENSG00000168884_5 (sequence is synthesized)
gaagtcctgaccagtcggaacacacagatgggcacacctctgtccagagtgttattgagaagttgcaggaagaaaatcgactgttaaaacagaaggtgactcacgttgaagacctcaatg

SEQ ID NO: 555194 - DNA, 120 bp, Artificial Sequence
  ENSG00000168884_6 (sequence is synthesized)
ccaagtggcagcgctacaacgccagcagggacgaatacgtgagggggctccatgcgcagctcagggggctgcagatcccccacgagcccgagctgatgaggaaggagatctcccggctca

SEQ ID NO: 555195 - DNA, 120 bp, Artificial Sequence
  ENSG00000168884_7 (sequence is synthesized)
acagacagttggaagagaaaataaatgactgtgccgaagtgaagcaggagctggcggcctccaggacggcccgggatgctgcgttggagcgggtgcagatgctggaacagcagattctcg

SEQ ID NO: 555196 - DNA, 120 bp, Artificial Sequence
  ENSG00000168884_8 (sequence is synthesized)
agggccgatcgggaacgggctcaaagtaggattcaagaactggaggaaaaggtcgcctctttgctgcaccaggtgtcctggagacaggattctcgagagccagacgccggccggattcac

SEQ ID NO: 555197 - DNA, 120 bp, Artificial Sequence
  ENSG00000168884_9 (sequence is synthesized)
gctgggagcaaaactgccaagtatttggccgccgacgcattagagcttatggtgcctggtggctggaggcctgggactgggtcccagcagccagaaccccctgcagagggcgggcatcct

SEQ ID NO: 555198 - DNA, 120 bp, Artificial Sequence
  ENSG00000168884_10 (sequence is synthesized)
ggcgcggcccagagaggccagggggaccttcagtgccctcactgcctgcagtgcttcagtgacgagcaaggggaagagctcctcaggcatgtggctgagtgctgccagtgaccgagactc

SEQ ID NO: 555199 - DNA, 120 bp, Artificial Sequence
  ENSG00000168884_11 (sequence is synthesized)
acccgtgcccttgcggcctcctggcccggtgcagctgccctcagggacagggtgggtgctctcagatgccatgggttgagctctactgagagccaaggcccctagaatagttgcggggca

SEQ ID NO: 555200 - DNA, 120 bp, Artificial Sequence
  ENSG00000168884_12 (sequence is synthesized)
ctctgatcgttcactttggtccctttggctatggaacaggctgggtcacagggaactgccagtgaggctggaggctggaggtggagatggggtcaggaacatctggcagagggaggtccc

SEQ ID NO: 555201 - DNA, 120 bp, Artificial Sequence
  ENSG00000168884_13 (sequence is synthesized)
agtctgtgtctccatcaggcttaagccagagctatctggtgctggtgtgccagcccctcccccagcctgcctagaaaggggtggctgcctgagggagtcacttgtatggtccccagggtg

SEQ ID NO: 555202 - DNA, 120 bp, Artificial Sequence
  ENSG00000168884_14 (sequence is synthesized)
ggagccccatcctgttctatggaataaagcgtcgcctctctgcctcgaaccagtcaaatggagtattgcggctgcacgtcacactagggtggccacccccgccattgcgagccacatgtc

SEQ ID NO: 555203 - DNA, 120 bp, Artificial Sequence
  ENSG00000168884_15 (sequence is synthesized)
tgcactgagaaactgcatttcagtagcatttgtcatccagccggaagttaaagcacacttactttattcacctatttttataataaacgttcttgctgctgtgactgctctgagaatttg

SEQ ID NO: 555204 - DNA, 120 bp, Artificial Sequence
  ENSG00000168884_16 (sequence is synthesized)
ggcgccccagaacccacttctgttctcagtaacgagagtcagctgacggggcaaagctcactcatccaagggtttcttttaaaatgatggaacatgcaaaatgtaataggaaagcaggca

SEQ ID NO: 555205 - DNA, 120 bp, Artificial Sequence
  ENSG00000168884_17 (sequence is synthesized)
gggttggtttgggttgtggcttcggtgactcctgaccctgcgtggggcagaggttagattcctgtgtccagaatcacctggttgaacccgattgtctgcagacaggacagtgtcatgggc

SEQ ID NO: 555206 - DNA, 120 bp, Artificial Sequence
  ENSG00000168884_18 (sequence is synthesized)
ggctgggctgaaggcttggtggcactgagtgggcagtggtcactgtgggggtgggagaagcctggtggggcgcttcctccttccttgagcagaaatgtgtgtctcgcctctcttcagatt

SEQ ID NO: 555207 - DNA, 120 bp, Artificial Sequence
  ENSG00000168884_19 (sequence is synthesized)
ggtgactcacgtgagtgtctttcacatttcgtttgagaagaacacatggcttacaaactgtaagtgagggttctttccttggctgatgcccagagtcgccccccgccctctggccactag

SEQ ID NO: 555208 - DNA, 120 bp, Artificial Sequence
  ENSG00000168887_0 (sequence is synthesized)
aaggggcggcgcggagctctgtgggcgggtggctgttgttggggccgtcgaggcggcggcgactctgcgtccccggctcctgatggaggcggggccgcatccccggccggggcactgctg

SEQ ID NO: 555209 - DNA, 120 bp, Artificial Sequence
  ENSG00000168887_1 (sequence is synthesized)
caagcctggggggcggctggacatgaaccacggcttcgtgcaccatatccgacggaaccagatcgctcgggacgactatgacaagaaggtgaagcaggcggccaaggagaaggtgaggag

SEQ ID NO: 555210 - DNA, 120 bp, Artificial Sequence
  ENSG00000168887_2 (sequence is synthesized)
gcggcacacgcccgcgccgacgcggccccgcaagccagacctgcaggtgtacctgccgcgacaccgagatgtctctgcccacccacgcaacccagactatgaagagtccggtgaaagcag

SEQ ID NO: 555211 - DNA, 120 bp, Artificial Sequence
  ENSG00000168887_3 (sequence is synthesized)
cagtagtggaggctctgagctggagccttctggccatcagctcttctgcttagaatacgaggcagacagtggagaggtcacatcagttatcgtctatcagggtgatgacccaggaaaggt

SEQ ID NO: 555212 - DNA, 120 bp, Artificial Sequence
  ENSG00000168887_4 (sequence is synthesized)
gagtgagaaggtgtcggcacacacgcctctggatccacccatgcgagaagccctcaagttgcgtatccaggaggagattgcaaagcgccagagccaacactgaccatgttgaaggcgttc

SEQ ID NO: 555213 - DNA, 120 bp, Artificial Sequence
  ENSG00000168887_5 (sequence is synthesized)
tctccaggctggattcactgcactcggaagaattctgcccagggaatttagtgtgggggtaccaggaccagtttgtctgatcttgagacccccagagctgctgcatccatagggtgttgc

SEQ ID NO: 555214 - DNA, 120 bp, Artificial Sequence
  ENSG00000168887_6 (sequence is synthesized)
gctgctgcatccatagggtgttgcaggactacacctggcctgccttgcagtcattctttcttatatgttgacccatttgcccagcctgatattctggaattctttttttttttttttttt

SEQ ID NO: 555215 - DNA, 120 bp, Artificial Sequence
  ENSG00000168887_7 (sequence is synthesized)
gctaatgtgttctagaagcagagactccagggagaaccagaatttatgaagcctcgtgcaacatggtgctttctcaccgaggtcatatgcctggctgctgctgttccactcagctccatg

SEQ ID NO: 555216 - DNA, 120 bp, Artificial Sequence
  ENSG00000168887_8 (sequence is synthesized)
agccacgtttgttattttatgtttcttctgtgcttttgctcatttccacccatgtgtttatagaccttttttcagccctttttctttgttcctttccctcatctttttgcctcaggtaga

SEQ ID NO: 555217 - DNA, 120 bp, Artificial Sequence
  ENSG00000168887_9 (sequence is synthesized)
atccatcagttttcctccccctccaaatgactgtgtacctccagctgctcaggactttggaggtgggggcggggcctggggatctacccttctaaaaaactctccaagtaattctgatac

SEQ ID NO: 555218 - DNA, 120 bp, Artificial Sequence
  ENSG00000168887_10 (sequence is synthesized)
caataaagtgggagacctccatttttgaggcctatttgcaagcatgtctccctccctttccatggctttttcgtttctcgcatgttccactgctttgcactgtctagacaggaaacctag

SEQ ID NO: 555219 - DNA, 120 bp, Artificial Sequence
  ENSG00000168887_11 (sequence is synthesized)
gaagatgttggtgctaaactgaaaagatttcttacagcaaaacctgcctcggccagggctacagaattccaactttcaacttgattcctagccgtgaacagactgtcctctgctcagact

SEQ ID NO: 555220 - DNA, 120 bp, Artificial Sequence
  ENSG00000168887_12 (sequence is synthesized)
aaaagggaattataaacaagtgggaacttactctccagttgtgacttaacagttctgaacatacctacaaagggaaagtcaatattagcaataattgcctgattgacagcacgccagagg

SEQ ID NO: 555221 - DNA, 120 bp, Artificial Sequence
  ENSG00000168887_13 (sequence is synthesized)
gaatgaaatgaggccttctctcctacctcccaggagtatgtaactcagatccttagcataaagatccccaggaataccactgctctaacccggtgaacattttttctaatgcagggttag

SEQ ID NO: 555222 - DNA, 120 bp, Artificial Sequence
  ENSG00000168887_14 (sequence is synthesized)
gcttacgtctgaattccacaagacatcctccccctccagtacggaagttccaaggcacttgttttccagcatatcagcctaacctcagtgccttgaaatatggctttaagcctttgagaa

SEQ ID NO: 555223 - DNA, 120 bp, Artificial Sequence
  ENSG00000168887_15 (sequence is synthesized)
ctgagatttcctgaaaccataggcccttgccccaggggtttctccacatccgggtgttaagacacctgatggcactgttggtttgtcccctataccccagaaaatctatcctgcaaggta

SEQ ID NO: 555224 - DNA, 120 bp, Artificial Sequence
  ENSG00000168887_16 (sequence is synthesized)
gctacttcaatcttgtcattaaaatgtgtcaagtcacagctcgcaatgccaaaggaatgctggggcagtaagtgaggtggataagtgagaagggcctggtggtgaaagcggccagggacc

SEQ ID NO: 555225 - DNA, 120 bp, Artificial Sequence
  ENSG00000168887_17 (sequence is synthesized)
tgaaaggagaaagtctttgtcctctacttaggcagctgggctagaagtgccttttgacttctaatgttaactaccctccaaagcctcctgggtcaagaaggctctcccaaactccacccc

SEQ ID NO: 555226 - DNA, 120 bp, Artificial Sequence
  ENSG00000168887_18 (sequence is synthesized)
tgttcttcctggtcagagaaccagtcagtcattctagtcttctagtccttaaactgatctgatgacttggaacataggatttcactgcaagtctggctttttagtctggaaatacatttg

SEQ ID NO: 555227 - DNA, 120 bp, Artificial Sequence
  ENSG00000168887_19 (sequence is synthesized)
aggtctgttttcgcacagctggatcacctgtttcctggttttattacacaattcagaaggctagaagaggagtttgggggcttggcacctgaaaatttagaccgcattcttattaagtaa

SEQ ID NO: 555228 - DNA, 120 bp, Artificial Sequence
  ENSG00000168887_20 (sequence is synthesized)
ttagaccgcattcttattaagtaaaggaagaggtagggaggccgaggcgggcggatcatgaaatcaggagatccagaccgtcctggctaacacagaaaccccgtctctactaaaaataca

SEQ ID NO: 555229 - DNA, 82 bp, Artificial Sequence
  ENSG00000168887_21 (sequence is synthesized)
tacaaaaaattagctgggcatggtgacatgtgcctgtagtccatcccagctactcgggaggccgaggcaagagaatcaccta

SEQ ID NO: 555230 - DNA, 120 bp, Artificial Sequence
  ENSG00000168887_22 (sequence is synthesized)
catctcaaaaaaaaaaaaaaaaggaagaggtaaaaggcaaggcagcatttaataagtacctgttgtatccttttaagtgtttgttgtggtaatcctcacaaagaccgggactgatggaaa

SEQ ID NO: 555231 - DNA, 120 bp, Artificial Sequence
  ENSG00000168887_23 (sequence is synthesized)
gatggaaactccttgctattaaactttttttcttgaggaattttgcttttcaagtgcatatacactattaatattttttacccaagagagcattctaagctaatttatgcagtgtgactg

SEQ ID NO: 555232 - DNA, 120 bp, Artificial Sequence
  ENSG00000168887_24 (sequence is synthesized)
tattaagcattaagcttccttcagagctggcctatcggagatgctactgccctctctacagatgtgtctgaaatgcctgcccaaggatggcccttagccagttaacagctttatagccca

SEQ ID NO: 555233 - DNA, 120 bp, Artificial Sequence
  ENSG00000168887_25 (sequence is synthesized)
tcctcattgcttactgccacccctcagctggggtccaaggcagtactattcagtttattcaccagacctgcctccagacatctacttctttcaaaaattagtgttttccatcaaggagca

SEQ ID NO: 555234 - DNA, 120 bp, Artificial Sequence
  ENSG00000168887_26 (sequence is synthesized)
tgttccagagcatttcccagagatgtcccaaagaacactgtccggtgctgtggcgtacagtggcaacagcattagactaagtggaacatcccagcaggctgctttagaatccgctcattt

SEQ ID NO: 555235 - DNA, 120 bp, Artificial Sequence
  ENSG00000168887_27 (sequence is synthesized)
gactagatacgatgtaattggctgtctttaaaaaacgcgcacacacacacaatctgataggcatatctcatgcccattcaatatggaatgttcttcgcttgctgaatttaagcctgtatt

SEQ ID NO: 555236 - DNA, 120 bp, Artificial Sequence
  ENSG00000168887_28 (sequence is synthesized)
ttaaggttttgtggttcctcggccacaatgggtgatgtcactgatagaacgaagctgagtttccaagggtttggggctgtgcaagagtaaacactagagcttgagttgttatccagctgg

SEQ ID NO: 555237 - DNA, 120 bp, Artificial Sequence
  ENSG00000168887_29 (sequence is synthesized)
caagcacggaagtctttgaagaatgtaatgtaaaaagggaaaagaatgtaaagctttttgtaccaaatgagagttggagcccagccaacaaatgcttttccctgtgtaaaagtctctctg

SEQ ID NO: 555238 - DNA, 120 bp, Artificial Sequence
  ENSG00000168887_30 (sequence is synthesized)
gaagggacattccatctccatggtgcactctgaggggcactgtcaactagagattggccccatccaggtgggaggaacccctttgggatggtgagtatccaatctgctgtgcatttgaca

SEQ ID NO: 555239 - DNA, 120 bp, Artificial Sequence
  ENSG00000168887_31 (sequence is synthesized)
ggatctctgaatggctaggtaatggatcccaagcaggctcacaaatttaaatgagggctttgtgtgcagaaagaggaataagtacagattattttcctaccactagatttttggggagag

SEQ ID NO: 555240 - DNA, 120 bp, Artificial Sequence
  ENSG00000168887_32 (sequence is synthesized)
tcaccatggaatgttgacaattacttaaaatattttaagctcccttgctgaattcctgtcctgtccctgaggaatcagatggtcatacagccataggcacccacccgaaatttccctagg

SEQ ID NO: 555241 - DNA, 120 bp, Artificial Sequence
  ENSG00000168887_33 (sequence is synthesized)
agttggagtaatgctagaattgaagaccttctgagtaaagggcttctctgccttctcagaggcaggagaatttgcactggttgtgttaaatgtataaaaagctatatgttcaccagttta

SEQ ID NO: 555242 - DNA, 120 bp, Artificial Sequence
  ENSG00000168887_34 (sequence is synthesized)
ctcatttccaatgtgtagatgaataaaatgtagtgtacaaattatttgaaaatcccagaaggaaggtacttttcaaatacagtattttttttaacaaataaacttacgatttttacagca

SEQ ID NO: 555243 - DNA, 120 bp, Artificial Sequence
  ENSG00000168887_35 (sequence is synthesized)
ccggcccgacagtccctgactcccgctcggctccccgcagggacgactatgacaagaaggtgaagcaggcggccaaggagaagatgtctctgcccacccacgcaacccagactatgaaga

SEQ ID NO: 555244 - DNA, 120 bp, Artificial Sequence
  ENSG00000168887_36 (sequence is synthesized)
gaggaggcggcacacgcccgcgccgacgcggccccgcaagccagacctgcaggtgtacctgccgcgacaccgaggttcagctcatctcgtctctttccggaacctccacctcagcgctcc

SEQ ID NO: 555245 - DNA, 120 bp, Artificial Sequence
  ENSG00000168887_37 (sequence is synthesized)
aagcccccagttaagcatcgctgtcagagtatcggggagccagcaagaagtttatctgccggtttgccccaccgtgctgtattttagtaaggtgctccgctacctagcaaagagaaagtc

SEQ ID NO: 555246 - DNA, 120 bp, Artificial Sequence
  ENSG00000168887_38 (sequence is synthesized)
tggcacagcgatgagcgaccagcacataattgcggaatgaacccagtaaatggcctttccccagcttctctgctacctagagatcacactggttaatatatgacggtcaatttttgttaa

SEQ ID NO: 555247 - DNA, 120 bp, Artificial Sequence
  ENSG00000168887_39 (sequence is synthesized)
ccagacctgcaggtgtacctgccgcgacaccgaggtgaggccgcccgccccgcctgcctccagcccgcgcgctcttcctgcaacgcactccccttctctatagggaaaaaccacttctta

SEQ ID NO: 555248 - DNA, 120 bp, Artificial Sequence
  ENSG00000168887_40 (sequence is synthesized)
cccaggctggagtgcaatggtgcgatctgggcttactgcagccttagcctcccgagtacctgggaccacaggcgtgtgccaccacaccggttaattttggtatttcttgtagagaagggg

SEQ ID NO: 555249 - DNA, 76 bp, Artificial Sequence
  ENSG00000168887_41 (sequence is synthesized)
actccagcctgggcaacacaggggtttctccacgttgtccaggctgatctcgaactcctgagctcaggtgatctgc

SEQ ID NO: 555250 - DNA, 120 bp, Artificial Sequence
  ENSG00000168887_42 (sequence is synthesized)
cccaaagtgctgggattataggtgtgtgccactacctttgttaggcattagtgaaagtgcttttagatcttacgtatattaattcattgagtctttatacaacctcataagaaagcttct

SEQ ID NO: 555251 - DNA, 120 bp, Artificial Sequence
  ENSG00000168887_43 (sequence is synthesized)
aacctcataagaaagcttctgtctgtttcacagtcaggaaacaggcacagagaggttaaacaacttgcccaagatctcagctagtaaatggcagagcctggatttgaacccaggcagagc

SEQ ID NO: 555252 - DNA, 120 bp, Artificial Sequence
  ENSG00000168887_44 (sequence is synthesized)
tctatccacccttctgctttccagtactttttgctagacaaatgtgcattgtgtacctactgtgtgacaggattgtgctggcctcagagcagggatgcaaaggtaaataagtccttgatt

SEQ ID NO: 555253 - DNA, 120 bp, Artificial Sequence
  ENSG00000168887_45 (sequence is synthesized)
cagagcagggatgcaaaggtaaataagtccttgattggcagcacaccaaatgcttacactggtccgggcgcggtgattcatgcctgtgatcctagcagtttgggaggccgaggtgggcgg

SEQ ID NO: 555254 - DNA, 120 bp, Artificial Sequence
  ENSG00000168890_0 (sequence is synthesized)
aaacctttcagggctgctccgagggccgcagctagagtcggcgccacgagggggccgagcagggtgcggcggcggcggggcgctccggggaggccaggacagctgatggttgtggcagaa

SEQ ID NO: 555255 - DNA, 120 bp, Artificial Sequence
  ENSG00000168890_1 (sequence is synthesized)
acatctcaaggtagctggtccgcccccacttccccatctacctcttgtcctccccccaacaccaccaccaccctggctcccctccctcatgaccgcctggatcctcctgcctgtcagcct

SEQ ID NO: 555256 - DNA, 120 bp, Artificial Sequence
  ENSG00000168890_2 (sequence is synthesized)
gtcagcgttctccatcactggcatatggactgtgtatgccatggctgtgatgaaccaccatgtatgccctgtggagaactggtcctacaacgagtcctgccctcctgaccctgctgagca

SEQ ID NO: 555257 - DNA, 120 bp, Artificial Sequence
  ENSG00000168890_3 (sequence is synthesized)
agggggtcccaagacctgctgcaccctggacgatgtccccctcatcagcaagtgtggctcctatcccccagaaagctgcctcttcagcctcattggcaacatgggtgctttcatggtggc

SEQ ID NO: 555258 - DNA, 120 bp, Artificial Sequence
  ENSG00000168890_4 (sequence is synthesized)
cctgatctgcctcctgcgctacgggcagctcctggagcagagtcggcactcttgggttaacaccacggcactcatcacaggctgcaccaacgctgcgggcctcttggtggttggcaactt

SEQ ID NO: 555259 - DNA, 120 bp, Artificial Sequence
  ENSG00000168890_5 (sequence is synthesized)
tcaggtggatcatgccaggtctctgcactacgttggagctggcgtggccttccctgcggggctgctctttgtttgcctgcactgtgctctctcctaccaaggggccaccgccccgctgga

SEQ ID NO: 555260 - DNA, 120 bp, Artificial Sequence
  ENSG00000168890_6 (sequence is synthesized)
tgtgtgagtgggtgtgtgtcatcgatatcctcattttctatggcaccttcagctacgagtttggggcagtctcctcagacacactggtggctgcactgcagcctacccctggccgggcct

SEQ ID NO: 555261 - DNA, 120 bp, Artificial Sequence
  ENSG00000168890_7 (sequence is synthesized)
gcaagtcctccgggagcagcagcacctccacccacctcaactgtgcccccgagagcatcgctatgatctaaggtctggggagggtggctggcccggcctccacagcaccccaccccatat

SEQ ID NO: 555262 - DNA, 120 bp, Artificial Sequence
  ENSG00000168890_8 (sequence is synthesized)
cttctttccatttatttcgtaccaaaaacaattttgagaaagtattctgttgggatctgggcttcctcacttctggagaagtggccatcccatgcccacctgtgccatggaggagtgggc

SEQ ID NO: 555263 - DNA, 120 bp, Artificial Sequence
  ENSG00000168890_9 (sequence is synthesized)
cctgccagctgccacagctgcatgacctgcttccccaccccacggtgtcgttttgtttttaaaggtcacctgtcctcactcacccagccagcccttcaggtgccttctactcccagtgcc

SEQ ID NO: 555264 - DNA, 120 bp, Artificial Sequence
  ENSG00000168890_10 (sequence is synthesized)
aaagccagaccactggggtttcctgctgcaggaattgggggctgggaacagcagaggggatagaagtctggtggaggtggagtgggcacgccttagcctacggaaaggcccatttctggg

SEQ ID NO: 555265 - DNA, 120 bp, Artificial Sequence
  ENSG00000168890_11 (sequence is synthesized)
cccactgagctgcactgggattcttcactctgcccctcacttcctttagggcaaataacacagcagaaccacgtgggtattttagtacttttttttatattaaaagaattctaatttgca

SEQ ID NO: 555266 - DNA, 120 bp, Artificial Sequence
  ENSG00000168890_12 (sequence is synthesized)
aggtggttgcctgcgcgccgccgactcgccaccgctccactgggccggcacccagcctctccttggcgtggcctcttcggttgtccagcccttctcccagccctggtccctcagaaggag

SEQ ID NO: 555267 - DNA, 120 bp, Artificial Sequence
  ENSG00000168890_13 (sequence is synthesized)
ggtaactcccttccagatgttacggtccgcctgcgtctctcagcacgccggtggcatttgggttgaccgcggaggcccccagtgccagagggtgttcacgttctgccgtgggctcagccc

SEQ ID NO: 555268 - DNA, 120 bp, Artificial Sequence
  ENSG00000168890_14 (sequence is synthesized)
aaactttggacgctcagagacccaacgggagcgctggataaggtgttgacccccttcccctcccccttcccggccagttacccactcctggactttgatctctctccaccaggccaggac

SEQ ID NO: 555269 - DNA, 120 bp, Artificial Sequence
  ENSG00000168890_15 (sequence is synthesized)
tacccacttcccactatccctttgcccctttggttactgcttcaggcgggcactggggagtgggatcttctgtccctgtaggggaggtctgggagagagtcctctttgaggcctgaggct

SEQ ID NO: 555270 - DNA, 120 bp, Artificial Sequence
  ENSG00000168890_16 (sequence is synthesized)
ataggccaagggcctgggggcagtcccttcccccagtctactccctgtcctgcctgccaggtcctacaacgagtcctgccctcctgaccctgctgagcaagggggtcccaagacctgctg

SEQ ID NO: 555271 - DNA, 120 bp, Artificial Sequence
  ENSG00000168890_17 (sequence is synthesized)
agctagagtcggcgccacgagggggccgagcagggtgcggcggcggcggggcgctccggggaggtgcgtactgggctccttcccttcctccgggcttccaggaatcacctggggactctc

SEQ ID NO: 555272 - DNA, 80 bp, Artificial Sequence
  ENSG00000168890_18 (sequence is synthesized)
cgcgcccaggcgagcgggggccgggccgggctgggctttccgcgtgaacccgcccctcgcccagggcgccgatggtcagg

SEQ ID NO: 555273 - DNA, 120 bp, Artificial Sequence
  ENSG00000168890_19 (sequence is synthesized)
aggactctgcagacaaccttgctctaaagcttccttcatctctgtcccctcttgggcctgaggctgccacgagccagactgcaaccctgagcctcactgctcttctctgaaattggtccc

SEQ ID NO: 555274 - DNA, 120 bp, Artificial Sequence
  ENSG00000168890_20 (sequence is synthesized)
cttggatttcttaagaaacagccaagtctttgtgtctgcttctctggacccaccgcagccctggccagaggcaggcatggggcgccacgttgagagagcttcctagaggactcaccgttg

SEQ ID NO: 555275 - DNA, 120 bp, Artificial Sequence
  ENSG00000168890_21 (sequence is synthesized)
tggtgcctgggcacacagccccttgggacaagctggcaccactgctgtccagcagggtggccctgacaaatatacttctagccagggcaatttccagagggcctgtagctgggggcatgc

SEQ ID NO: 555276 - DNA, 120 bp, Artificial Sequence
  ENSG00000168890_22 (sequence is synthesized)
tgcaggtgctggtgtggcatcaagccttagggacctcaacttgagtccccagcaacaataatgaggctgaatggggccagaaatcaaggtatgccatggctgtgatgaaccaccatgtat

SEQ ID NO: 555277 - DNA, 120 bp, Artificial Sequence
  ENSG00000168890_23 (sequence is synthesized)
tgctgcaccctggacgatgtccccctcatcaggtcacacagctaataagcggaggcacctggatttaagctggagccctcagattgcccagcccgtgttctggctcaaggatagccaaac

SEQ ID NO: 555278 - DNA, 120 bp, Artificial Sequence
  ENSG00000168890_24 (sequence is synthesized)
cagccgcagggctcagcaaagagtgtcagggttgcccgaacactcctgggcactcccttctctctcacacacatgagctctgctttgggggcccagcctggaaccagttgttcatgaggg

SEQ ID NO: 555279 - DNA, 120 bp, Artificial Sequence
  ENSG00000168890_25 (sequence is synthesized)
accctggatcttcacataaatcagtggcctgcctgctaaggagcaggtgcagcaagtgtggctcctatcccccagaaagctgcctcttcagcctcattggcaacatgggtgctttcatgg

SEQ ID NO: 555280 - DNA, 120 bp, Artificial Sequence
  ENSG00000168890_26 (sequence is synthesized)
gcagctcctggagcagagtcggcactcttgggttaacaccacggcactcatcacaggctgcaccaacgctgcgggcctcttggtggttggcaactttcagcctcgttttaggtggagtct

SEQ ID NO: 555281 - DNA, 120 bp, Artificial Sequence
  ENSG00000168894_0 (sequence is synthesized)
gtcagaaggctgggcagccatggcgtcctatttcgatgaacacgactgcgagccgtcggaccctgagcaggagacgcgaaccaacatgctgctggagctcgcaaggtcacttttcaatag

SEQ ID NO: 555282 - DNA, 120 bp, Artificial Sequence
  ENSG00000168894_1 (sequence is synthesized)
gatggactttgaagacttggggttggtagtagattgggaccaccacctgcctccaccagctgccaagactgtggttgagaacctccccaggacagtcatcagaggctctcaggctgagct

SEQ ID NO: 555283 - DNA, 120 bp, Artificial Sequence
  ENSG00000168894_2 (sequence is synthesized)
attctgccctggctaagcaagacaaattcctgtcccttgtgccgctatgagctgcccactgatgacgacacttatgaggagcacagacgagataaggctcgaaaacagcagcagcaacac

SEQ ID NO: 555284 - DNA, 120 bp, Artificial Sequence
  ENSG00000168894_3 (sequence is synthesized)
cgactggagaacctccatggagccatgtacacgtgaggaggttggggctgagtgctggccctctgcgtcttccttattaaccttgaatcctcattaaaggtttctttacccaccctgagg

SEQ ID NO: 555285 - DNA, 120 bp, Artificial Sequence
  ENSG00000168894_4 (sequence is synthesized)
ctgtattgatcacagacctggccaggggctctgcatcctccatcaggtctctacttctgttggggaaggtgatcctaaatcgcagaaggcaccaggctgcggttttcctccctgctggcc

SEQ ID NO: 555286 - DNA, 120 bp, Artificial Sequence
  ENSG00000168894_5 (sequence is synthesized)
gagtcctgtccccgctgccatcacttcccacctcagcaggactgggtaggcctcagaatccctggctctggctgtcttcttagtgactttgatttgtggtgagagcctcagcaatgcaga

SEQ ID NO: 555287 - DNA, 120 bp, Artificial Sequence
  ENSG00000168894_6 (sequence is synthesized)
cgccagaggcctgaaaacagagccagccccataatagctgcccatcccctcacccataggccttcagttttggcccctgcccagcatgccttctttccttcaggctcgaaaacagcagca

SEQ ID NO: 555288 - DNA, 120 bp, Artificial Sequence
  ENSG00000168894_7 (sequence is synthesized)
cactgattctttctgctatttgggccagacccaccccttccccaagccagactgtggtctggtccttcagttttccaggtcaggtgggggcaagtgtccttcaggagtgggagcttggga

SEQ ID NO: 555289 - DNA, 120 bp, Artificial Sequence
  ENSG00000168894_8 (sequence is synthesized)
ggcagagcctgtagcagctctcctgatcagcactccttcctaaagagctcaagtgccccgtgtgtcttttggaatttgaggaggaggagactgccattgagatgccttgccatcaccttt

SEQ ID NO: 555290 - DNA, 120 bp, Artificial Sequence
  ENSG00000168894_9 (sequence is synthesized)
tccattccagctgcattctgccctggctaagcaaggtactgcttctcttcttctagctctcaccgtgccctgggcccagtactcaagcttctttctgttcatggactgctgggggatgga

SEQ ID NO: 555291 - DNA, 120 bp, Artificial Sequence
  ENSG00000168899_0 (sequence is synthesized)
actgcggccgctccgcaggcagagaagccgggagcgggcgaggcggcggcggcagcagcgatggcaggaatagagttggagcggtgccagcagcaggcgaacgaggtgacggaaattatg

SEQ ID NO: 555292 - DNA, 120 bp, Artificial Sequence
  ENSG00000168899_1 (sequence is synthesized)
cgtaacaacttcggcaaggtcctggagcgtggtgtgaagctggccgaactgcagcagcgttcagaccaactcctggatatgagctcaaccttcaacaagactacacagaacctggcccag

SEQ ID NO: 555293 - DNA, 120 bp, Artificial Sequence
  ENSG00000168899_2 (sequence is synthesized)
ctgctcatcatcctgattgtgctgctggtcgtctttctccctcagagcagtgacagcagtagtgccccacggacccaggatgcaggcattgcctcagggcctgggaactgacccagctgg

SEQ ID NO: 555294 - DNA, 120 bp, Artificial Sequence
  ENSG00000168899_3 (sequence is synthesized)
tcctgaaggagaagccaaatggctgcactggccgattctggtctccagaggaccttggtgtttgctctcccttgacccaccccagtgagtgccaaagggcagccccaacatgtgcacccc

SEQ ID NO: 555295 - DNA, 120 bp, Artificial Sequence
  ENSG00000168899_4 (sequence is synthesized)
tgcatttcctgtcatgccacagactggcccttgagggcagcctgctgtactggccatgctgggccagccccacctggagctcagtaaaaactgctgtttgattaaaagctggtatctgtg

SEQ ID NO: 555296 - DNA, 120 bp, Artificial Sequence
  ENSG00000168899_5 (sequence is synthesized)
acacgaaggatgctgttactctcatgctgtacccacctacagggggagaaggaggcttctagatctcaggggcagatgagggccaggtgggggcctcatgcagccctgacctcgggcttg

SEQ ID NO: 555297 - DNA, 120 bp, Artificial Sequence
  ENSG00000168903_0 (sequence is synthesized)
atactcctcattcatacagccatgtttagggaggctctagggagaaatgcacagtttgacatcgttcatgaagagcctctccacggctcctgcgcctgagacagctggcctgacctccaa

SEQ ID NO: 555298 - DNA, 120 bp, Artificial Sequence
  ENSG00000168903_1 (sequence is synthesized)
atcatccatccacccctgctgtcatctgttttcatagtgtgagatcaacccacaggaatatccatggcttttgtgctcattttggttctcagtttctacgagctggtgtcaggacagtgg

SEQ ID NO: 555299 - DNA, 120 bp, Artificial Sequence
  ENSG00000168903_2 (sequence is synthesized)
caagtcactggaccgggcaagtttgtccaggccttggtgggggaggacgccgtgttctcctgctccctctttcctgagaccagtgcagaggctatggaagtgcggttcttcaggaatcag

SEQ ID NO: 555300 - DNA, 120 bp, Artificial Sequence
  ENSG00000168903_3 (sequence is synthesized)
ttccatgctgtggtccacctctacagagatggggaagactgggaatctaagcagatgccacagtatcgagggagaactgagtttgtgaaggactccattgcaggggggcgtgtctctcta

SEQ ID NO: 555301 - DNA, 120 bp, Artificial Sequence
  ENSG00000168903_4 (sequence is synthesized)
aggctaaaaaacatcactccctcggacatcggcctgtatgggtgctggttcagttcccagatttacgatgaggaggccacctgggagctgcgggtggcagcactgggctcacttcctctc

SEQ ID NO: 555302 - DNA, 120 bp, Artificial Sequence
  ENSG00000168903_5 (sequence is synthesized)
atttccatcgtgggatatgttgacggaggtatccagttactctgcctgtcctcaggctggttcccccagcccacagccaagtggaaaggtccacaaggacaggatttgtcttcagactcc

SEQ ID NO: 555303 - DNA, 120 bp, Artificial Sequence
  ENSG00000168903_6 (sequence is synthesized)
agagcaaatgcagatgggtacagcctgtatgatgtggagatctccattatagtccaggaaaatgctgggagcatattgtgttccatccaccttgctgagcagagtcatgaggtggaatcc

SEQ ID NO: 555304 - DNA, 120 bp, Artificial Sequence
  ENSG00000168903_7 (sequence is synthesized)
aaggtattgataggagagacgtttttccagccctcaccttggcgcctggcttctattttactcgggttactctgtggtgccctgtgtggtgttgtcatggggatgataattgttttcttc

SEQ ID NO: 555305 - DNA, 120 bp, Artificial Sequence
  ENSG00000168903_8 (sequence is synthesized)
aaatccaaagggaaaatccaggcggaactggactggagaagaaagcacggacaggcagaattgagagacgcccggaaacacgcagtggaggtgactctggatccagagacggctcacccg

SEQ ID NO: 555306 - DNA, 120 bp, Artificial Sequence
  ENSG00000168903_9 (sequence is synthesized)
aagctctgcgtttctgatctgaaaactgtaacccatagaaaagctccccaggaggtgcctcactctgagaagagatttacaaggaagagtgtggtggcttctcagggtttccaagcaggg

SEQ ID NO: 555307 - DNA, 120 bp, Artificial Sequence
  ENSG00000168903_10 (sequence is synthesized)
tggtatgtgggagtgtgtcgggatgacgtagacagggggaagaacaatgtgactttgtctcccaacaatgggtattgggtcctcagactgacaacagaacatttgtatttcacattcaat

SEQ ID NO: 555308 - DNA, 120 bp, Artificial Sequence
  ENSG00000168903_11 (sequence is synthesized)
ccccattttatcagcctcccccccagcacccctcctacacgagtaggggtcttcctggactatgagggtgggaccatctccttcttcaatacaaatgaccagtcccttatttataccctg

SEQ ID NO: 555309 - DNA, 120 bp, Artificial Sequence
  ENSG00000168903_12 (sequence is synthesized)
ctgacatgtcagtttgaaggcttgttgagaccctatatccagcatgcgatgtatgacgaggaaaaggggactcccatattcatatgtccagtgtcctggggatgagacagagaagaccct

SEQ ID NO: 555310 - DNA, 120 bp, Artificial Sequence
  ENSG00000168903_13 (sequence is synthesized)
gcttaaagggccccacaccacagacccagacacagccaagggagagtgctcccgacaggtggccccagcttcctctccggagcctgcgcacagagagtcacgccccccactctcctttag

SEQ ID NO: 555311 - DNA, 120 bp, Artificial Sequence
  ENSG00000168903_14 (sequence is synthesized)
ggagctgaggttcttctgccctgagccctgcagcagcggcagtcacagcttccagatgaggggggattggcctgaccctgtgggagtcagaagccatggctgccctgaagtggggacgga

SEQ ID NO: 555312 - DNA, 120 bp, Artificial Sequence
  ENSG00000168903_15 (sequence is synthesized)
atagactcacattaggtttagtttgtgaaaactccatccagctaagcgatcttgaacaagtcacaacctcccaggctcctcatttgctagtcacggacagtgattcctgcctcacaggtg

SEQ ID NO: 555313 - DNA, 120 bp, Artificial Sequence
  ENSG00000168903_16 (sequence is synthesized)
aagattaaagagacaacgaatgtgaatcatgcttgcaggtttgagggcacagtgtttgctaatgatgtgtttttatattatacattttcccaccataaactctgtttgcttattccacat

SEQ ID NO: 555314 - DNA, 120 bp, Artificial Sequence
  ENSG00000168903_17 (sequence is synthesized)
taatttacttttctctataccaaatcacccatggaatagttattgaacacctgctttgtgaggctcaaagaataaagaggaggtaggatttttcactgattctataagcccagcattacc

SEQ ID NO: 555315 - DNA, 120 bp, Artificial Sequence
  ENSG00000168903_18 (sequence is synthesized)
tgataccaaaaccaggcaaagaaaacagaagaagaggaaggaaaactacaggtccatatccctcattaacacagacacaaaaattctaaataaaattttaacaaattaaactaaacaata

SEQ ID NO: 555316 - DNA, 120 bp, Artificial Sequence
  ENSG00000168903_19 (sequence is synthesized)
tatttaaagatgatatataactactcagtgtggtttgtcccacaaatgcagagttggtttaatatttaaatatcaaccagtgtaattcagcacattaataaagtaaaaaagaaaaccata

SEQ ID NO: 555317 - DNA, 120 bp, Artificial Sequence
  ENSG00000168904_0 (sequence is synthesized)
gtcccccgcttggcttccagcgccgcttgcgctccggagcgctggctctgctggcgctgagaaatggaccaattttgacaagatatagtgctgcagcgtgcctgatgggatatattcagt

SEQ ID NO: 555318 - DNA, 120 bp, Artificial Sequence
  ENSG00000168904_1 (sequence is synthesized)
catggcgtccgaactttgtaagacgatctctgtggcaaggctagaaaagcacaagaatttgttcttaaattataggaatctgcaccattttccattggagttactgaaagatgagggact

SEQ ID NO: 555319 - DNA, 120 bp, Artificial Sequence
  ENSG00000168904_2 (sequence is synthesized)
gcagtacttggagagactctatatgaaaaggaactccctgacatccttgccagaaaaccttgctcagaagcttccaaaccttgtggaactatacctgcactcaaataacatagttgtggt

SEQ ID NO: 555320 - DNA, 120 bp, Artificial Sequence
  ENSG00000168904_3 (sequence is synthesized)
tccggaagccattgggtctcttgtaaaactccaatgtctggatcttagtgacaatgccttagaaattgtttgcccagaaattggtcgtctgagagctttacgtcatcttcgattagctaa

SEQ ID NO: 555321 - DNA, 120 bp, Artificial Sequence
  ENSG00000168904_4 (sequence is synthesized)
taaccaactgcaattcctacctccagaggttggcgatttgaaggagctgcagacactagacatttctaccaatcgtttgctaactttacccgagaggcttcacatgtgcctttctctgca

SEQ ID NO: 555322 - DNA, 120 bp, Artificial Sequence
  ENSG00000168904_5 (sequence is synthesized)
gtacctcactgtggaccgaaatcgtctatggtatgtgccgcgccatctctgccagctgcccagcctcaatgagctctccatggctggaaaccgtcttgcatttttgccacttgatttagg

SEQ ID NO: 555323 - DNA, 120 bp, Artificial Sequence
  ENSG00000168904_6 (sequence is synthesized)
tcgatctcgagaactacagtatgtatacgtggataacaacattcacctgaaaggcttgccatcttatctgtacaataaagtcatcgggtgcagtggctgtggtgctcccattcaagtttc

SEQ ID NO: 555324 - DNA, 120 bp, Artificial Sequence
  ENSG00000168904_7 (sequence is synthesized)
cgaggtgaagctgctttccttttcatcagggcagcgaaccgttttcctcccagctgaggtgaaggccatagggacggagcatgatcacgtcctccctctgcaggaattggctatgagagg

SEQ ID NO: 555325 - DNA, 120 bp, Artificial Sequence
  ENSG00000168904_8 (sequence is synthesized)
gctgtatcatacctaccacagcttgctgaaagatttgaactttctgtctccaatctcattacccagaagtctcctagagctgctgcactgccctctggggcactgtcatcggtgtagtga

SEQ ID NO: 555326 - DNA, 120 bp, Artificial Sequence
  ENSG00000168904_9 (sequence is synthesized)
gcctatgtttaccatcgtctaccccaagctctttcccttgagagagacgccaatggcagggctgcaccagtggaagacaactgttagttttgtggcttactgctgctccacccagtgtct

SEQ ID NO: 555327 - DNA, 120 bp, Artificial Sequence
  ENSG00000168904_10 (sequence is synthesized)
gcagacttttgacctgctgagttgataaacactcaagaacctcaggagcgctgccagcttgacactggggaatccagccagtccagcacactcttccatcctgtcctgtccaatgcgggg

SEQ ID NO: 555328 - DNA, 120 bp, Artificial Sequence
  ENSG00000168904_11 (sequence is synthesized)
gcactgcagaactctctagaaatgtcatgattgagcttcagagctaaaatgccttcacccttcccccaagttggaatatatcctcccccaaattaaggacccatttgtcttctgtgtttt

SEQ ID NO: 555329 - DNA, 120 bp, Artificial Sequence
  ENSG00000168904_12 (sequence is synthesized)
tcctttttatgtgagtgtgtcttttacagaaaccatttagattgatgggcctccccaaatctaatttaaagcaagtttccggtccttggagaacagtgacttgatcatctagccagattc

SEQ ID NO: 555330 - DNA, 120 bp, Artificial Sequence
  ENSG00000168904_13 (sequence is synthesized)
ccttttgaacacacataccttcagtgatgcttcctctcctctcccctcccttgctttccccagagagttatttccctgagaccatgttctccacagtgtctccagtggaaacttgtcagt

SEQ ID NO: 555331 - DNA, 120 bp, Artificial Sequence
  ENSG00000168904_14 (sequence is synthesized)
ttttgaggagtttcagcaaaccccgtggcctcaatggtcttgagtagcagggtggggcgcctgagttggcagcaaagtgaggctcccatggaggctcagtgagggtcccagagcacacac

SEQ ID NO: 555332 - DNA, 120 bp, Artificial Sequence
  ENSG00000168904_15 (sequence is synthesized)
cctctggaaagttccagccttgtttatacgttctacagtgtagcaacagacttttgtgagggattttaaaaacaaaaatgtagattgtaatgaaatacacttcctgttttttaaaagtgt

SEQ ID NO: 555333 - DNA, 120 bp, Artificial Sequence
  ENSG00000168904_16 (sequence is synthesized)
ttgcagaaaaatgatttttgaagtttttaaatttcctgataagattttttttatatgagaagaatttgaggaatatttgaagctttacaagatctgatttttttctttctcaatataaag

SEQ ID NO: 555334 - DNA, 120 bp, Artificial Sequence
  ENSG00000168904_17 (sequence is synthesized)
tttccatacaatgagaaagggggagaaaacacacattgaaataagacctccgtgttcttttttgatgggtttatgattcagtttatactgactttgaaatatttttgtcacatgtgaaag

SEQ ID NO: 555335 - DNA, 69 bp, Artificial Sequence
  ENSG00000168904_18 (sequence is synthesized)
gtttatactgactttgaaatatttttgtcacatgtgaaaggcttcagctacttccactactggtttttt

SEQ ID NO: 555336 - DNA, 73 bp, Artificial Sequence
  ENSG00000168904_19 (sequence is synthesized)
ctggtttttaacaggatgattcaaagtacagcccgtgcacatttacttcgtcacctggtgcaccacactgtct

SEQ ID NO: 555337 - DNA, 120 bp, Artificial Sequence
  ENSG00000168904_20 (sequence is synthesized)
cgtgcacatttacttcgtcacctggtgcaccacactgtcttcatgttggccctcgtttcttgtatacttagcttactgcccagatgcaactgagaaaatacaggaaaagcaggtccaaat

SEQ ID NO: 555338 - DNA, 120 bp, Artificial Sequence
  ENSG00000168904_21 (sequence is synthesized)
tcagccttcgacttctgcaaaagtccataaacagaaagtctgtgagcctccaccctgccagaaagaactcttcatgaagaagtcacgtatttgctcttcctttcaaaggatggcatttta

SEQ ID NO: 555339 - DNA, 120 bp, Artificial Sequence
  ENSG00000168904_22 (sequence is synthesized)
atgttgctttgctgccagatgttcatctgcttgctgtgaagtgattctttttttaaaatgttttttaatgatgtaagttttctaaaaggcagggctgaatggagaaccaagaatttgctt

SEQ ID NO: 555340 - DNA, 120 bp, Artificial Sequence
  ENSG00000168904_23 (sequence is synthesized)
cttaacagtgccaaaaatcctacatagttactgacaaatgtgtgatctttttacagtcacaacacctgctgcccggaaagcacaccgtccacgtagaatggagaaggcagaaagttaccg

SEQ ID NO: 555341 - DNA, 120 bp, Artificial Sequence
  ENSG00000168904_24 (sequence is synthesized)
tgtgttcccactgtatctgcactgttcttacttcctcttgtcccttttcatatcttggtctattcagccttaacatttcaaaggcttatagtaaaataggaactgaagatctgtatcaaa

SEQ ID NO: 555342 - DNA, 120 bp, Artificial Sequence
  ENSG00000168904_25 (sequence is synthesized)
atgtaacactttcatcctttggaataattgaagtttaacataacctctacatgtatataagttagctggtgaaaatgtggcatgaaacttcacaattgtgcttcaggcctaagtgactgc

SEQ ID NO: 555343 - DNA, 120 bp, Artificial Sequence
  ENSG00000168904_26 (sequence is synthesized)
tacctatgatttaagtgacagtaaatgtcttgctacatttttctatttcatcctctacaatcatatgtcatggaatggagctatgaaatgtgctaacttggtattcaggattctcattgt

SEQ ID NO: 555344 - DNA, 120 bp, Artificial Sequence
  ENSG00000168904_27 (sequence is synthesized)
gataaggtgatacattagttttaccttgtttgaaattttacaaaaatgcttacaatccaggcattctttctctacctattatgaactacggtgtgttaaacaacagcagtgggctgggca

SEQ ID NO: 555345 - DNA, 120 bp, Artificial Sequence
  ENSG00000168904_28 (sequence is synthesized)
gacaacctttgggcagtctcaaccttaatccttgggtacagcacctgaacttaattgatgagaagtggaacttaagtggtttccctggtgctgttcattatggaaattttatgctggatt

SEQ ID NO: 555346 - DNA, 120 bp, Artificial Sequence
  ENSG00000168904_29 (sequence is synthesized)
tatcgatgtcattcttaatcttttgatactataaaggagtcttaccaactggagaaaatttgcctacatgctatatatttgaattgtgtccaaagctttgcagaaaagcaaatctgaagt

SEQ ID NO: 555347 - DNA, 120 bp, Artificial Sequence
  ENSG00000168904_30 (sequence is synthesized)
tattatatatgttgttttcttgagcaacagttacactaggtagaaaagtattcacacaataatagtaatgcaaaaaaagtgagctacttggaaagtatcatctctgttcaggtaagttta

SEQ ID NO: 555348 - DNA, 120 bp, Artificial Sequence
  ENSG00000168904_31 (sequence is synthesized)
cttcagtgaactcttgtgtggttagcgataagttttaaagtccaggatagcctcatgagcataggccttcctatgaagtagtgcaaagggggccgattttagtggattaccctatcagtg

SEQ ID NO: 555349 - DNA, 120 bp, Artificial Sequence
  ENSG00000168904_32 (sequence is synthesized)
ttcttcagtatgtccaattgttatcataccaaaaaccttaattacataacattgtgtggatgaaatgctgcatcttcagttaatacatgttttgagcacattcttaaaatacataataat

SEQ ID NO: 555350 - DNA, 120 bp, Artificial Sequence
  ENSG00000168904_33 (sequence is synthesized)
taaatgatccctattcaaaagaaccctggcttgggtggaggatccactctggctaacggataagagtgatgaacttctttgttacctgacccttctcttctggaaaagtgaggtgtacat

SEQ ID NO: 555351 - DNA, 120 bp, Artificial Sequence
  ENSG00000168904_34 (sequence is synthesized)
taaacatcttttggtcaccgtgcctcactaagacctttcacattccagcttgtccgactagtgtaatgtacctctcacttctgttttacgttgagcattacgaattaaaatctttacagt

SEQ ID NO: 555352 - DNA, 120 bp, Artificial Sequence
  ENSG00000168904_35 (sequence is synthesized)
ctagggggaaaaaaaggcttcaataccagttggcttatgaggctctgcatataattttctctaaaatatgtaactattttgtagtctgtggggactttcaaagccaatttttaaaattag

SEQ ID NO: 555353 - DNA, 120 bp, Artificial Sequence
  ENSG00000168904_36 (sequence is synthesized)
tagtagtaaaggtttttccctttcctgaatgaaaaatcagaaattctaatctttgctataaagtacttaaacacaatacattgcctcagcataaataaaaacatttttattaagatgatt

SEQ ID NO: 555354 - DNA, 120 bp, Artificial Sequence
  ENSG00000168904_37 (sequence is synthesized)
tatgaacatggatttctaactggaccaacactaatgttgcaacctgataaaatttgagatgtaaattcatttcacagactcataaacacactctctttaagactcttctttaaatggatc

SEQ ID NO: 555355 - DNA, 120 bp, Artificial Sequence
  ENSG00000168904_38 (sequence is synthesized)
cttacattaccctgcctgttttattatgccttcatttttgtggttttcattcactcctgcttgcttctattgaggttctcctacatttcccagaaactcagtgaatatcttgccttttct

SEQ ID NO: 555356 - DNA, 120 bp, Artificial Sequence
  ENSG00000168904_39 (sequence is synthesized)
gtgaatatcttgccttttcttcaaacaaagggggtttttataaagtttgtatttttgaaactagctctatgtctatctaaaaatcaagtctcggcagtggctcatgcctataatcccagc

SEQ ID NO: 555357 - DNA, 120 bp, Artificial Sequence
  ENSG00000168904_40 (sequence is synthesized)
ttcaagtttcactgtgcctacagtgaggagctacctccttgtgtcatcagctaatagatctgaaagtgatgccggtgtctctaggaaaggaattgatcatagccaagtgactgacattct

SEQ ID NO: 555358 - DNA, 120 bp, Artificial Sequence
  ENSG00000168904_41 (sequence is synthesized)
ctcggtcaggaaaagagcttgcttcacagcctttgaagtatgactgtatgtgtggtccccttgtactttggagacagaaggtactggcagcgagtgtggtggatgggcagaaggtgtagc

SEQ ID NO: 555359 - DNA, 120 bp, Artificial Sequence
  ENSG00000168904_42 (sequence is synthesized)
attcggagattatttctgtatgtaattaagagactttcaagggttagccagacttttttccactcaagtgtggattatctttgctacctgtgttaaagaatatcaggttttgtttcttat

SEQ ID NO: 555360 - DNA, 120 bp, Artificial Sequence
  ENSG00000168904_43 (sequence is synthesized)
tgtgatttttgagtctaaatgatccaagatttttaaaatagatacataatgaaatccaggcctctgaaaaattatggcaacattcatttggagtgtggctaaaaactcatactttatcca

SEQ ID NO: 555361 - DNA, 120 bp, Artificial Sequence
  ENSG00000168904_44 (sequence is synthesized)
atttggttgcctctctcagttactgcagtttatagaataattgagcttgaaccatgtgaatgctcagaatgtcaatggtggagtatttattcaagagaaatggctgaatctcgatacgaa

SEQ ID NO: 555362 - DNA, 120 bp, Artificial Sequence
  ENSG00000168904_45 (sequence is synthesized)
ttagagatgctagggagtcaaggctcttagatttgtgcctgtctagaggctcccatatcaagtctcaagttcccactctttctcaacagcaccttttaccttagcataagagacttagca

SEQ ID NO: 555363 - DNA, 120 bp, Artificial Sequence
  ENSG00000168904_46 (sequence is synthesized)
taaatatatctttatctggcatgtgatcctgaaacctctacatttagcctcagccatgtcccttgcagcttcataaaataaggattcacttaaggccaccataaaaactttctgattctc

SEQ ID NO: 555364 - DNA, 120 bp, Artificial Sequence
  ENSG00000168904_47 (sequence is synthesized)
tgtccatgccttgagttgagatctcaaggcactaagcttattgttttcgtttcagaatctcttcagcacagtcaaaagaagccatctcaccccacaaacttggaatcaccgtgatgccat

SEQ ID NO: 555365 - DNA, 120 bp, Artificial Sequence
  ENSG00000168904_48 (sequence is synthesized)
tgcctttccctcctgttaccttctgttccagtgatatttgagtaaccatgatgccaccacatgctacagattagcagggtcccacttctctctagaagacaactgttagttttgtggctt

SEQ ID NO: 555366 - DNA, 120 bp, Artificial Sequence
  ENSG00000168904_49 (sequence is synthesized)
tgactcatcaagatgcagaagccatagtgacagacttctggttcagactcaccactttgtgtctctttttttctccatgctacccagcccttttctccatttaagaaatgttggcagggt

SEQ ID NO: 555367 - DNA, 120 bp, Artificial Sequence
  ENSG00000168904_50 (sequence is synthesized)
aatttaaaaacactcacctagcttggattatttgcattttcaccaaaaatcctgcacttcagcattcatgtttatgggaatagtcgcagctactgatttcatttggttaaactgttataa

SEQ ID NO: 555368 - DNA, 87 bp, Artificial Sequence
  ENSG00000168904_51 (sequence is synthesized)
catgtgaaaggcttcagctacttccactactggtttttttttgttgttaagaggttgcattgagctgagatcacgccattacactcc

SEQ ID NO: 555369 - DNA, 120 bp, Artificial Sequence
  ENSG00000168904_52 (sequence is synthesized)
tggagactggctgtcacagcttcatggcatctatactatttgctagcctcatggaaaagaatgatctttattttttctgggtttttcttgttattacaggagtaaatgtcctcaatcttc

SEQ ID NO: 555370 - DNA, 120 bp, Artificial Sequence
  ENSG00000168904_53 (sequence is synthesized)
tacattgtagccagaaagagaggttcatcccatgttagaattttagagaatggtaattggcacatatacttactgaggagaacttaatggtaaaagtaatcctctacaggatgttttttc

SEQ ID NO: 555371 - DNA, 120 bp, Artificial Sequence
  ENSG00000168904_54 (sequence is synthesized)
tggctggctaactcgggcgaaacggcgtgtgttttgcctaagactctgccagtgtttgttaccacagctgagaaaatagccttttacaaatgcttttaatatgtagcttatagttctcta

SEQ ID NO: 555372 - DNA, 120 bp, Artificial Sequence
  ENSG00000168904_55 (sequence is synthesized)
acatccttggtacagtattatattacactactgaaaaattatttatacatgtggtcctgatcaagatacatttacataccctaaggtattcagaccaagacttatatcccctgttgttat

SEQ ID NO: 555373 - DNA, 120 bp, Artificial Sequence
  ENSG00000168904_56 (sequence is synthesized)
atatacagttaatataaatacacacacaggggtttctcattggctatgaatttgttatccaagttcgtgcagttatgaggttgccggagaagttgtgtaggaaagcaaaatactcactga

SEQ ID NO: 555374 - DNA, 120 bp, Artificial Sequence
  ENSG00000168904_57 (sequence is synthesized)
cgctggctctgctggcgctgagaaatggaccaattttgacaagatatagtgctgcagcgtgcctgatgggatatattcagtcatggcgtccgaactttccagaaaaccttgctcagaagc

SEQ ID NO: 555375 - DNA, 120 bp, Artificial Sequence
  ENSG00000168904_58 (sequence is synthesized)
gatttcttgttacaaaatttcttttgccatgaaataaattctgtacctcgacagttgagtatttctacagacactgtaaatgatatttaatctgttgttggttctccgtatgcatgctag

SEQ ID NO: 555376 - DNA, 120 bp, Artificial Sequence
  ENSG00000168904_59 (sequence is synthesized)
aggctgctgagttagcttgggtggatggtggctagcgaggctttaacactttattgatgctgctgactcttttgtgattttggaagagtttctccaagccttcacataaccttctctgag

SEQ ID NO: 555377 - DNA, 120 bp, Artificial Sequence
  ENSG00000168904_60 (sequence is synthesized)
gcctaagtgggcaccagggtttacacccaggcaaggggtggcaggtggggaggggagaggctgtgcatgaaagcattaagtcagcagttttaaaggggcataacatgcttcctgagaaac

SEQ ID NO: 555378 - DNA, 120 bp, Artificial Sequence
  ENSG00000168904_61 (sequence is synthesized)
ataatggagtgtaataagagcatggagaaatatgctggtgctgtttgagccctacaagcagtcaccccttcagacttactggatcatgatgtgaaccaaaatcaaactatttctggccca

SEQ ID NO: 555379 - DNA, 120 bp, Artificial Sequence
  ENSG00000168904_62 (sequence is synthesized)
ggtgagtagagctgtccgcctcgtcgggtgattcaagtggcgaggctctctgacccggccccccggcggggacgccccagacgtggtcctgccaaagcgtccgggtcgcggcgagtggga

SEQ ID NO: 555380 - DNA, 120 bp, Artificial Sequence
  ENSG00000168904_63 (sequence is synthesized)
cagcggagccgtccgggcctcgggtggccacagctgccgggtcctcctcccactctgcggcccgcggcccctgggacccgagaaccctgataccggaaatggaccaattttgacaagata

SEQ ID NO: 555381 - DNA, 120 bp, Artificial Sequence
  ENSG00000168904_64 (sequence is synthesized)
acactgaaatgcgatctgcatctctgccacaattaaggagtagcttttaagaaaaagtgccttatactttgtcgtttagatatagatgttattgactactagaaagttctgtttgtgcta

SEQ ID NO: 555382 - DNA, 120 bp, Artificial Sequence
  ENSG00000168904_65 (sequence is synthesized)
agtagagagatatttttaaatctttgacttggtgtctggtagcagtggtagtgaatttcatgagaactccaaatctttttaaaaaaacaaaacactaggggaaaatacacaaattattag

SEQ ID NO: 555383 - DNA, 120 bp, Artificial Sequence
  ENSG00000168904_66 (sequence is synthesized)
cagaaaaacacgtacttggagagggtaataaaattgggaaaagtaaaatttacaaagcaaattgtgtacggcctaagaaggaaagttcctttaaagttcatccttgctggaagtgactgg

SEQ ID NO: 555384 - DNA, 120 bp, Artificial Sequence
  ENSG00000168904_67 (sequence is synthesized)
gcctcagcaatgatttagctgagttccaactgatgagtttagattgctgggccaggttttatgaaggaacccgggatagcatctgttcactttgaaaagaattctggcaattcagcagtg

SEQ ID NO: 555385 - DNA, 120 bp, Artificial Sequence
  ENSG00000168906_0 (sequence is synthesized)
gttcgctccgcgccgcccgcctgctacgagtagaacgctgtccgcagcttgcgcatttcgcagccgctgccgcctcgccgctgctccttcgtaaggccacttccgcacaccgacaccaac

SEQ ID NO: 555386 - DNA, 120 bp, Artificial Sequence
  ENSG00000168906_1 (sequence is synthesized)
atgaacggacagctcaacggcttccacgaggcgttcatcgaggagggcacattccttttcacctcagagtcggtcggggaaggccacccagataagatttgtgaccaaatcagtgatgct

SEQ ID NO: 555387 - DNA, 120 bp, Artificial Sequence
  ENSG00000168906_2 (sequence is synthesized)
gtccttgatgcccaccttcagcaggatcctgatgccaaagtagcttgtgaaactgttgctaaaactggaatgatccttcttgctggggaaattacatccagagctgctgttgactaccag

SEQ ID NO: 555388 - DNA, 120 bp, Artificial Sequence
  ENSG00000168906_3 (sequence is synthesized)
aaagtggttcgtgaagctgttaaacacattggatatgatgattcttccaaaggttttgactacaagacttgtaacgtgctggtagccttggagcaacagtcaccagatattgctcaaggt

SEQ ID NO: 555389 - DNA, 120 bp, Artificial Sequence
  ENSG00000168906_4 (sequence is synthesized)
gttcatcttgacagaaatgaagaagacattggtgctggagaccagggcttaatgtttggctatgccactgatgaaactgaggagtgtatgcctttaaccattgtcttggcacacaagcta

SEQ ID NO: 555390 - DNA, 120 bp, Artificial Sequence
  ENSG00000168906_5 (sequence is synthesized)
aatgccaaactggcagaactacgccgtaatggcactttgccttggttacgccctgattctaaaactcaagttactgtgcagtatatgcaggatcgaggtgctgtgcttcccatcagagtc

SEQ ID NO: 555391 - DNA, 120 bp, Artificial Sequence
  ENSG00000168906_6 (sequence is synthesized)
cacacaattgttatatctgttcagcatgatgaagaggtttgtcttgatgaaatgagggatgccctaaaggagaaagtcatcaaagcagttgtgcctgcgaaataccttgatgaggataca

SEQ ID NO: 555392 - DNA, 120 bp, Artificial Sequence
  ENSG00000168906_7 (sequence is synthesized)
atctaccacctacagccaagtggcagatttgttattggtgggcctcagggtgatgctggtttgactggacgcaaaatcattgtggacacttatggcggttggggtgctcatggaggaggt

SEQ ID NO: 555393 - DNA, 120 bp, Artificial Sequence
  ENSG00000168906_8 (sequence is synthesized)
gccttttcaggaaaggattataccaaggtcgaccgttcagctgcttatgctgctcgttgggtggcaaaatcccttgttaaaggaggtctgtgccggagggttcttgttcaggtctcttat

SEQ ID NO: 555394 - DNA, 120 bp, Artificial Sequence
  ENSG00000168906_9 (sequence is synthesized)
gctattggagtttctcatccattatctatctccattttccattatggtacctctcagaagagtgagagagagctattagagattgtgaagaagaatttcgatctccgccctggggtcatt

SEQ ID NO: 555395 - DNA, 120 bp, Artificial Sequence
  ENSG00000168906_10 (sequence is synthesized)
gtcagggatctggatctgaagaagccaatttatcagaggactgcagcctatggccactttggtagggacagcttcccatgggaagtgcccaaaaagcttaaatattgaaagtgttagcct

SEQ ID NO: 555396 - DNA, 120 bp, Artificial Sequence
  ENSG00000168906_11 (sequence is synthesized)
gggccctccttcctaaattttcctgtcctctttcagctcctgaccagttgcagtcactctagtcaatgacatgaattttagcttttgtgggggactgtaagttgggcttgctattctgtc

SEQ ID NO: 555397 - DNA, 120 bp, Artificial Sequence
  ENSG00000168906_12 (sequence is synthesized)
cctaggtgttttgttcaccattataatgaatttagtgagcataggtgatccatgtaactgcctagaaacaacactgtagtaaataatgctttgaaattgaacctttgtgccctatcaccc

SEQ ID NO: 555398 - DNA, 120 bp, Artificial Sequence
  ENSG00000168906_13 (sequence is synthesized)
aacgctccaaagtcataattgcattgactttccccaccagatgctgaaaatgtccttgtgatgtgcacgtaaagtacttgtagttccacttatagcctctgtctggcaatgccacagccc

SEQ ID NO: 555399 - DNA, 120 bp, Artificial Sequence
  ENSG00000168906_14 (sequence is synthesized)
tgtcagcatgaatttgtaatgtcttgagctctattatgaatgtgaagccttccccttatcctccctgtaacttgatccatttctaattatgtagctctttgtcagggagtgttccctatc

SEQ ID NO: 555400 - DNA, 120 bp, Artificial Sequence
  ENSG00000168906_15 (sequence is synthesized)
caatcaatcttgcatgtaacgcaagttcccagttggagctccagcctgacatcaaaaaaggcagttaccattaaaccatctccctggtgcttatgctcttaattgccacctctaacagca

SEQ ID NO: 555401 - DNA, 120 bp, Artificial Sequence
  ENSG00000168906_16 (sequence is synthesized)
ccaaatcaaaatctctccactttcagctgtcttttggaggacgtacgtaataaggttttaatttagtaaaccaatcctatgcatggtttcagcactagccaaacctcaccaactcctagt

SEQ ID NO: 555402 - DNA, 120 bp, Artificial Sequence
  ENSG00000168906_17 (sequence is synthesized)
tctagaaaaacaggcacttggcagccttgtgatgtcatacagagaagtcacagggcagtacctgagggtctgtaggttgcacactttggtaccagataacttttttttttctttataaga

SEQ ID NO: 555403 - DNA, 120 bp, Artificial Sequence
  ENSG00000168906_18 (sequence is synthesized)
aagcctgagtactccacactgcacaataactcctcccagggttttaactttgttttattttcaaaaccaggtccaatgagctttctgaacagctggtgtagctacagagaaaccagcttc

SEQ ID NO: 555404 - DNA, 120 bp, Artificial Sequence
  ENSG00000168906_19 (sequence is synthesized)
cttcagagagcagtgcttttggcggggaggaggaaatcccttcatacttgaacgttttctaattgcttatttattgtattctggggtatggcgtaagtacagagaagccatcacctcaga

SEQ ID NO: 555405 - DNA, 120 bp, Artificial Sequence
  ENSG00000168906_20 (sequence is synthesized)
tggcagcttttaaaagattttttttttttctctcaacaccatgattcctttaacaacatgtttccagcattcccaggtaggccaaggtgtcctacagaaaaaccttgggttagacctaca

SEQ ID NO: 555406 - DNA, 120 bp, Artificial Sequence
  ENSG00000168906_21 (sequence is synthesized)
gggggtctggctggtgttaacagaagggagggcagagctggtgcggctggccatggagaaagctgacttggctggtgtggtacagagaagccagcttgtttacatgcttattccatgact

SEQ ID NO: 555407 - DNA, 120 bp, Artificial Sequence
  ENSG00000168906_22 (sequence is synthesized)
gcttgccctaagcagaaagtgcctttcaggatctatttttggaggtttattacgtatgtctggttctcaattccaacagtttaatgaagatctaaataaaatgctaggttctaccttaac

SEQ ID NO: 555408 - DNA, 120 bp, Artificial Sequence
  ENSG00000168906_23 (sequence is synthesized)
cgtgaagctgttaaacacattggatatgatgattcttccaaaggtgtgttttaatgattttgctcatttttttctaggtaacagctgtgaggtttgaagaaactcctagaatgttcctgc

SEQ ID NO: 555409 - DNA, 120 bp, Artificial Sequence
  ENSG00000168906_24 (sequence is synthesized)
aaaacgtgaagggcgggggctgtggtcgctagtgagttctggccgggaagggagggcactgttaacccctcccggccctgccgtctgacaaacctggagtgggcgacccgccccgcgtgc

SEQ ID NO: 555410 - DNA, 120 bp, Artificial Sequence
  ENSG00000168906_25 (sequence is synthesized)
tcgcgtccggccctcgggagcgcgcgccccgcattgcagcggcgaccacgtgtttgccgcatgtggtatctgggcgagggggagccgtgagcctccccggctgtcctggccctcagtttg

SEQ ID NO: 555411 - DNA, 120 bp, Artificial Sequence
  ENSG00000168906_26 (sequence is synthesized)
aggggtggggggcctatgccttgggacgtcgtctggctccactgcctcagtggttaggtcttgactacacactggagaatacgcacatgcccttcggcggatatggccttgcctccaaga

SEQ ID NO: 555412 - DNA, 120 bp, Artificial Sequence
  ENSG00000168906_27 (sequence is synthesized)
actcctcaaatgggaatatattttaattcctggaacagttttgaactgctgccttagtgaagacttagttatttgagaaatttaaaattacggtgctccatggcttaggctaaccactct

SEQ ID NO: 555413 - DNA, 120 bp, Artificial Sequence
  ENSG00000168906_28 (sequence is synthesized)
agagaatgttccagatttgatatttgagctttgtgctcttctacttaagggtgttaagaaaatagagataaagtgggttgctcaaggtttgttgcaatgtaaaaaccatggtagggtgtg

SEQ ID NO: 555414 - DNA, 120 bp, Artificial Sequence
  ENSG00000168906_29 (sequence is synthesized)
ggcggcgggaccttggtaagtattgtgtgatctcaggtgagctttttgacaattgaaatttctcagaataatgacaagttttcgtatttgttgagccagggacggaaaaacaactatagt

SEQ ID NO: 555415 - DNA, 120 bp, Artificial Sequence
  ENSG00000168906_30 (sequence is synthesized)
tactaataaggactgtgcaaggagtttggacaccagggaagtaacacttttgccacaaatttttttcctagcatatcccagagaactcatttgccagagctcttgaaaatgagtcttgct

SEQ ID NO: 555416 - DNA, 120 bp, Artificial Sequence
  ENSG00000168906_31 (sequence is synthesized)
tttgatttcttcagcagtgtttagaattccagataattgctgtaaacagcaggtatttctaggacgtaaacaagatgttgtgttttttgcttataggttttgactacaagacttgtaacg

SEQ ID NO: 555417 - DNA, 120 bp, Artificial Sequence
  ENSG00000168906_32 (sequence is synthesized)
tacatcagcacagaagatccataattttgataatagctaactggaaaaaatagcatttgttttcctatattgtaacttcaggtagagaaacaaatacaaagttattgtttggtgtgatgt

SEQ ID NO: 555418 - DNA, 120 bp, Artificial Sequence
  ENSG00000168906_33 (sequence is synthesized)
tggcagatttgttattggtgggcctcaggtaatgtcattttgttgcatttttctggatttttgatggttacttaaaattttggctactacatttttttcaggctttctgaaacctacatg

SEQ ID NO: 555419 - DNA, 120 bp, Artificial Sequence
  ENSG00000168906_34 (sequence is synthesized)
tgaatcatcggaggatatttgctgaatgaattcagaataggcaacctaatccacttggaaagcactaggcgtaaagtaacttaaatcctgtaatttcagggtgatgctggtttgactgga

SEQ ID NO: 555420 - DNA, 120 bp, Artificial Sequence
  ENSG00000168907_0 (sequence is synthesized)
agtgctgcctgtcacacctgagccagcagtttgtgcaaccagaggagcgcaggcagggttccctgctggggcccgggctgcccagccatgctttgggcactctggccaaggtggctggca

SEQ ID NO: 555421 - DNA, 120 bp, Artificial Sequence
  ENSG00000168907_1 (sequence is synthesized)
gacaagatgctgcccctcctgggggcagtgctgcttcagaagagagagaagaggggccctctgtggaggcactggcggcgggaaacctacccatactatgacctccaggtgaaggtgctg

SEQ ID NO: 555422 - DNA, 120 bp, Artificial Sequence
  ENSG00000168907_2 (sequence is synthesized)
agggccacaaacatccggggcacagacctgctgtccaaagccgactgctatgtgcaactgtggctgcccacggcgtccccaagccctgcccagactaggatagtggccaactgcagtgac

SEQ ID NO: 555423 - DNA, 120 bp, Artificial Sequence
  ENSG00000168907_3 (sequence is synthesized)
cccgagtggaatgagaccttccactaccagatccatggtgctgtgaagaacgtcctggagctcaccctctatgacaaggacatcctgggcagcgaccagctctctctgctcctgtttgac

SEQ ID NO: 555424 - DNA, 120 bp, Artificial Sequence
  ENSG00000168907_4 (sequence is synthesized)
ctgagaagcctcaagtgtggccaacctcacaaacacaccttcccactcaaccaccaggattcacaagagctgcaggtggaatttgttctggagaagagccaggtgcctgcatctgaagtc

SEQ ID NO: 555425 - DNA, 120 bp, Artificial Sequence
  ENSG00000168907_5 (sequence is synthesized)
atcaccaacggggttctggtggctcacccctgtctgagaatccagggcacgctccggggagatgggacagccccacgggaagagtacggctctaggcagctccagctggcagtgcctgga

SEQ ID NO: 555426 - DNA, 120 bp, Artificial Sequence
  ENSG00000168907_6 (sequence is synthesized)
gcctacgagaagccacagctcttgcccctgcagcctcccacagagccaggcctcccacccacctttaccttccacgtgaacccagtgctgagctccaggctacacgtggagctgatggag

SEQ ID NO: 555427 - DNA, 120 bp, Artificial Sequence
  ENSG00000168907_7 (sequence is synthesized)
ctgctggcagctgtgcagagtggccccagcgcagagttggaggctcagaccagcaagctgggcgaggggggcatcctgctctcctctctgcccctaggccaggaggaacagtgttctgtg

SEQ ID NO: 555428 - DNA, 120 bp, Artificial Sequence
  ENSG00000168907_8 (sequence is synthesized)
gccctgggggagggccaggaggtggctctgagcatgaaggtggaaatgagctccggggacctagacctacgccttggctttgacctctctgacggggagcaggagtttctggacaggagg

SEQ ID NO: 555429 - DNA, 120 bp, Artificial Sequence
  ENSG00000168907_9 (sequence is synthesized)
aagcaggtcgtgtccaaggccctgcagcaagtgctgggattgagtgaggctctggacagtggccaggtgcctgtagtggctgtgttgggttccgggggtggaacccgagccatgtcttct

SEQ ID NO: 555430 - DNA, 120 bp, Artificial Sequence
  ENSG00000168907_10 (sequence is synthesized)
ctgtacggcagcctggcagggttgcaggagctcggccttctagacactgtgacctacctgagtggggtctctgggtctacctggtgcatctccacactctacagggacccagcctggtcc

SEQ ID NO: 555431 - DNA, 120 bp, Artificial Sequence
  ENSG00000168907_11 (sequence is synthesized)
caggtggccttgcagggccccattgagcgtgcccaggttcacgtctgcagcagtaagatgggagctttgtccacggagcggctacagtactacactcaggaactgggggtccgggagcgc

SEQ ID NO: 555432 - DNA, 120 bp, Artificial Sequence
  ENSG00000168907_12 (sequence is synthesized)
agtggccacagcgtgtccctcatcgacctctggggcctccttgttgagtatctcctgtaccaggaggagaaccctgccaagctgtctgaccaacaggaggcggtccgccagggtcagaac

SEQ ID NO: 555433 - DNA, 120 bp, Artificial Sequence
  ENSG00000168907_13 (sequence is synthesized)
ccttaccccatttacaccagtgtcaacgtccgcaccaacttgagtggggaagattttgcagagtggtgcgagttcacgccctatgaggttggcttccccaagtacggggcttatgttccc

SEQ ID NO: 555434 - DNA, 120 bp, Artificial Sequence
  ENSG00000168907_14 (sequence is synthesized)
accgagctcttcggctcagaactcttcatgggacgattgctgcagctccagcctgaaccccggatctgttacctgcaaggtatgtggggcagcgcctttgccaccagcctggatgagatc

SEQ ID NO: 555435 - DNA, 120 bp, Artificial Sequence
  ENSG00000168907_15 (sequence is synthesized)
ttcctaaagaccgccggctcgggcctcagcttcctggagtggtacagaggcagtgtgaatatcacagacgactgccagaagcctcagctgcacaacccctcgaggctgcgaacgaggctc

SEQ ID NO: 555436 - DNA, 120 bp, Artificial Sequence
  ENSG00000168907_16 (sequence is synthesized)
ctcaccccacaggggcccttctcccaggctgtgctggacatattcacctcccgcttcacttccgcccagagctttaacttcacccggggtctctgcttgcacaaggactatgtggctggc

SEQ ID NO: 555437 - DNA, 120 bp, Artificial Sequence
  ENSG00000168907_17 (sequence is synthesized)
agggagttcgtggcctggaaagacacacacccggacgccttccccaaccagctcacccccatgcgggactgcctgtacctggtggacggaggctttgccatcaactctccgttcccactg

SEQ ID NO: 555438 - DNA, 120 bp, Artificial Sequence
  ENSG00000168907_18 (sequence is synthesized)
gctctgctgcctcagagagcagtggacctcattctgtcctttgactattccttggaagccccttttgaggtcttgaagatgacagagaagtactgcctggaccgaggaatccccttccct

SEQ ID NO: 555439 - DNA, 120 bp, Artificial Sequence
  ENSG00000168907_19 (sequence is synthesized)
agcatcgaggtgggccctgaggacatggaggaggcccgtgagtgctatctgtttgccaaggctgaggacccccgctcccccattgtgctgcacttccccctggttaaccgtaccttccgc

SEQ ID NO: 555440 - DNA, 120 bp, Artificial Sequence
  ENSG00000168907_20 (sequence is synthesized)
acacacctggccccaggtgtggagcgacaaacagctgaggagaaggcctttggggactttgtcatcaacaggccagacaccccctatggcatgatgaacttcacctatgagccccaggac

SEQ ID NO: 555441 - DNA, 120 bp, Artificial Sequence
  ENSG00000168907_21 (sequence is synthesized)
ttttatcggctggtggccctcagtcgatacaacgtcctgaacaacgtggagaccttgaagtgcgccctccagctggctctggaccggcaccaggctcgggagagggcaggggcctgacca

SEQ ID NO: 555442 - DNA, 120 bp, Artificial Sequence
  ENSG00000168907_22 (sequence is synthesized)
aggcaggaagcggaggactgtgacagagaggagacacactgctcatggtcagggcttgtagagggaggagcgatggggactctgtgcaggatctgcttcccttctctccaggacctgcct

SEQ ID NO: 555443 - DNA, 120 bp, Artificial Sequence
  ENSG00000168907_23 (sequence is synthesized)
tgtgtttttggagaagatgggcagtagatcgctccagggactcttggggatgtagggcagaagagaacagcactcatttcacagcggggtgtggagagaatcaggtgagccacagagccc

SEQ ID NO: 555444 - DNA, 120 bp, Artificial Sequence
  ENSG00000168907_24 (sequence is synthesized)
accccagacacagaaggacctcagagggcccaagtcctcagacccacacagaacaggggctgagggcactgagaagccagctgtcctccttacactgagatggaaagcagagatgcatcc

SEQ ID NO: 555445 - DNA, 120 bp, Artificial Sequence
  ENSG00000168907_25 (sequence is synthesized)
atccacacttcctgcagagcggcccaagccccaaccccacctcgagctcctggatgcactgctatcaagaacaatgaggggctgaggggatggccagcctatgttgctgactccatcatc

SEQ ID NO: 555446 - DNA, 120 bp, Artificial Sequence
  ENSG00000168907_26 (sequence is synthesized)
ctaaccctccttctgccttctggtctcctcgtgcctcctcccagatcacccttctcttcccagcgccctaaagcctgtggggtgatgtcccattctggctgctccaggtgggagatgtgc

SEQ ID NO: 555447 - DNA, 120 bp, Artificial Sequence
  ENSG00000168907_27 (sequence is synthesized)
gcgtgtctccctgccagttacccaggcttcactcttcgaacctggaccacagtctctggtgatgtgtgtagtggccacatcatgcaaatatagtctcaccattcctaggagctaaatggg

SEQ ID NO: 555448 - DNA, 120 bp, Artificial Sequence
  ENSG00000168907_28 (sequence is synthesized)
tgtgtctagtaggggcatcagttcatcgggggagaggtgtgcacctgtatgtggggcaggagggtgtgcaagttcctggaggtgggttactccaaggcatgggcagtgcagagggagcct

SEQ ID NO: 555449 - DNA, 120 bp, Artificial Sequence
  ENSG00000168907_29 (sequence is synthesized)
cgcctgggctcttgcctctttcccagatgcatccaatgggtcttggcaagttttgtttctcactctccctcttctccatttcccctgacccgccagggactctccaaatacctagaacct

SEQ ID NO: 555450 - DNA, 120 bp, Artificial Sequence
  ENSG00000168907_30 (sequence is synthesized)
ctctagtgtgggcagccctcagattcgtgaagaggagatcccgttctggccaggccctctccatctggccacggcctctgcagcatatgcctccagtgctgagctgcctaggagcctgca

SEQ ID NO: 555451 - DNA, 120 bp, Artificial Sequence
  ENSG00000168907_31 (sequence is synthesized)
gcagcacttgagaccttgttccttctgccccctgtcccaggggctccctcttggctgcaccccctgctccatgctctctcacacagacacgctgtcaggaacacctgtgctgggaagcct

SEQ ID NO: 555452 - DNA, 120 bp, Artificial Sequence
  ENSG00000168907_32 (sequence is synthesized)
tacctgtcctgagtctggaaagaagactagttctggtttccaggttggggaagggtgactggagcccagcctgtgtcttggcctggcctgggatctgcagccctccagctggcatgagtt

SEQ ID NO: 555453 - DNA, 120 bp, Artificial Sequence
  ENSG00000168907_33 (sequence is synthesized)
gcgagggctgggggagccagttatttgggctggcatggggtggggacacctcagttctcctctgcctcctcaccatggctgcctgtcacaggccacggcccctccccttggttcagcagt

SEQ ID NO: 555454 - DNA, 120 bp, Artificial Sequence
  ENSG00000168907_34 (sequence is synthesized)
gagaggtttatctgggagtttatctggctcctgctgtggccattgtcatcaacactgctgtgcctgccgtcatcaataacttgttagtaaaaccttcatagggttcacagctcagaactg

SEQ ID NO: 555455 - DNA, 120 bp, Artificial Sequence
  ENSG00000168907_35 (sequence is synthesized)
cacagcgttcacaacttagaatctgtggtgtttcttcagtgcccattagagcctcaggctgtctctggctcctagaaagtcattctaccatctgttttgttcactgctgtatcctcagtg

SEQ ID NO: 555456 - DNA, 120 bp, Artificial Sequence
  ENSG00000168907_36 (sequence is synthesized)
cctagagcagcagttgatacatggtaggtgctcagtaaatatttgataaatgaatgggaacctacattctaagaaatggatcgtcacccaccaaccacaaaaaagcatgcaatgctttca

SEQ ID NO: 555457 - DNA, 120 bp, Artificial Sequence
  ENSG00000168907_37 (sequence is synthesized)
tgattcctaacccatgtggactttttgaagagctgatataaaccacagaccctctcccaagaaaaaggcatacacacacacatgaaaagttgcttacaataaggtctctgcttcagctat

SEQ ID NO: 555458 - DNA, 120 bp, Artificial Sequence
  ENSG00000168907_38 (sequence is synthesized)
gtgatcagcagccccagggttgcagaggccagcgtctgtccccgcaggccagcaaggcttgtgaaggaggcaaacgtgggcttgtgcagagtgggcggggaccttctcacacagaagtgt

SEQ ID NO: 555459 - DNA, 120 bp, Artificial Sequence
  ENSG00000168907_39 (sequence is synthesized)
aggcaatgccacttgtgctcagataaggtttgggaggagactgggacaagatcaagggcagggggcagggggcaggaggctgggctagtgctgtggcccagatattggccagaagtacag

SEQ ID NO: 555460 - DNA, 120 bp, Artificial Sequence
  ENSG00000168907_40 (sequence is synthesized)
ggaggatctcagccagggatggggaggctccaacaagactgaatctgggagccacgcagagcaagaagccaggggaggggccgaaggtaacccagccagtttaatgtctgctcctcagga

SEQ ID NO: 555461 - DNA, 120 bp, Artificial Sequence
  ENSG00000168907_41 (sequence is synthesized)
gagatctgagtctttacctcattcccaacccttatctgagatggctggaaataagcttcagggtcctgaaggtgacagagttggagggatttgtctagaagagcaagcatggtttccctt

SEQ ID NO: 555462 - DNA, 120 bp, Artificial Sequence
  ENSG00000168907_42 (sequence is synthesized)
gaagctgggtagaaacacaggagcagggacatcattcatcaacttgtcagagctcctcatgaggcaagggaagaaaaagggggccacaagtgtaggagattggtcagagtggtgggagaa

SEQ ID NO: 555463 - DNA, 120 bp, Artificial Sequence
  ENSG00000168907_43 (sequence is synthesized)
gctatagggaaaggagcaggccttctgaaaggttggaaggctctgcatagctttggaggagaatagctaaagacagctgttctataaccctgaggcagagggcaaggagtaggtacgagg

SEQ ID NO: 555464 - DNA, 120 bp, Artificial Sequence
  ENSG00000168907_44 (sequence is synthesized)
atttatcttaaacaggcttgtttacttctgttgaccaggaactgacctttgatcatctacgcccatgaccttccctgaaaggggaacaataaatgttaattacctccagtgtttgctcca

SEQ ID NO: 555465 - DNA, 74 bp, Artificial Sequence
  ENSG00000168907_45 (sequence is synthesized)
ccttccctgaaaggggaacaataaatgttaattacctccagtgtttgctccaggcttttgggctgcactttggc

SEQ ID NO: 555466 - DNA, 120 bp, Artificial Sequence
  ENSG00000168907_46 (sequence is synthesized)
tgatttacaaagctgttcctgagctctcggctcccctggggccaggagtgtgactccagggtgggctggtaccattttgcctccctagctcctaacccctggggaggaggagcctggtcc

SEQ ID NO: 555467 - DNA, 120 bp, Artificial Sequence
  ENSG00000168907_47 (sequence is synthesized)
gcagcgctcagctctgggtgcatattagaatcaccggcgcagcttttcaaacacacccatgcctcggccccccttccagagagagtgattttagttgttctcaggatgttttgaaagtga

SEQ ID NO: 555468 - DNA, 120 bp, Artificial Sequence
  ENSG00000168907_48 (sequence is synthesized)
tttcagcccacacctggaagtgaggcccagcgccacacccacttctcagccaattccgccataactcactccgcctggctgctcctggaacttcagacccagctgcagttccaggcgata

SEQ ID NO: 555469 - DNA, 80 bp, Artificial Sequence
  ENSG00000168913_0 (sequence is synthesized)
gggagcggccggtggaggctgcgcggccgagggggagggccgggggagcggacgtcgcctctgctggtctcccacctccc

SEQ ID NO: 555470 - DNA, 120 bp, Artificial Sequence
  ENSG00000168913_1 (sequence is synthesized)
gccgccccccgcccgcaggctcccaagccttagtcggcgccgagcatcccgctgccccggaccctcccgcgggcgcgcaccaggctcaactcaggctcaggactgcaggtagacatctcc

SEQ ID NO: 555471 - DNA, 120 bp, Artificial Sequence
  ENSG00000168913_2 (sequence is synthesized)
actgcccaggaatcactgagcgtgcagacagcacagcctcctctgaaggccggccataccagagtcctgcctcggcatgggcctcaccattgaggcagctccactgtctgtgctggtctg

SEQ ID NO: 555472 - DNA, 120 bp, Artificial Sequence
  ENSG00000168913_3 (sequence is synthesized)
agggtgctgcctgtcatgggggcagccatctcccagggggccctcatcgccatcgtctgcaacggtctcgtgggcttcttgctgctgctgctctgggtcatcctctgctgggcctgccat

SEQ ID NO: 555473 - DNA, 120 bp, Artificial Sequence
  ENSG00000168913_4 (sequence is synthesized)
gaaggccccaccaccccagaagcccagccatgaaggcagctacctgctgcagccctgaaggcccctggcctagcctggagcccaggacctaagtccacctcacctagagcctggaattag

SEQ ID NO: 555474 - DNA, 120 bp, Artificial Sequence
  ENSG00000168913_5 (sequence is synthesized)
gatcccagagttcagccagcctggggtccagaactcaagagtccgcctgcttggagctggacccagcggcccagagtctagccagcttggctccaataggagctcagtggccctaaggag

SEQ ID NO: 555475 - DNA, 120 bp, Artificial Sequence
  ENSG00000168913_6 (sequence is synthesized)
atgggcctggggtgggggcttatgagttggtgctagagccagggccatctggactatgctccatcccaagggccaagggtcaggggccgggtccactctttccctaggctgagcacctct

SEQ ID NO: 555476 - DNA, 120 bp, Artificial Sequence
  ENSG00000168913_7 (sequence is synthesized)
aggccctctaggctggggaagcaaactggaacccatggcaataataggagggtgtccaggctgggcccctcccctggtcctcccagtgtttgctggataataaatggaactatggctcta

SEQ ID NO: 555477 - DNA, 120 bp, Artificial Sequence
  ENSG00000168916_0 (sequence is synthesized)
aaaaggtgattatccttgtgttgttgataaagggattttctttttagctaccgtaagatgcttactgtcataggtttatttttcgggtttggttattttcctttaaacctgatattggac

SEQ ID NO: 555478 - DNA, 120 bp, Artificial Sequence
  ENSG00000168916_1 (sequence is synthesized)
tgtgaggacaatacatgagccaccttactctccatccttccctgtcccctttactgattccccaatactaatcgttttttattctggtaacacccagacaagaaatattcgacttttccc

SEQ ID NO: 555479 - DNA, 120 bp, Artificial Sequence
  ENSG00000168916_2 (sequence is synthesized)
ccccccttcacaggaaaaggtggacctggactgagggtgtaaaatccctggacacattcgtggggcaggaaaaagaagaggaagattagaagattttttttttctttgagagaaagccca

SEQ ID NO: 555480 - DNA, 120 bp, Artificial Sequence
  ENSG00000168916_3 (sequence is synthesized)
gcggagataaacgaatgtcccctcatctccaaagaaaagttcatcggatttttattctagagagctcatcttcaggatgtcagtgaacatttctactgcaggaaaaggtgtggatccaaa

SEQ ID NO: 555481 - DNA, 120 bp, Artificial Sequence
  ENSG00000168916_4 (sequence is synthesized)
tacagttgatacttatgacagtggcgatgattgggaaatcggggttggaaatttaataattgatttggacgctgatttggagaaggacagacagaaatttgagatgaataattccaccac

SEQ ID NO: 555482 - DNA, 120 bp, Artificial Sequence
  ENSG00000168916_5 (sequence is synthesized)
caccactagtagcagcaactccaaggattgtggaggtccggcctccagtggggctggtgctaccgcagccttagctgatggcctaaaatttgcttctgttcaggcctctgctccccaggg

SEQ ID NO: 555483 - DNA, 120 bp, Artificial Sequence
  ENSG00000168916_6 (sequence is synthesized)
gaattcacacaaagagaccagcaaatcaaaagtgaaaaggagtaaaacttctaaggatgctaataaatctctgccttctgctgccttgtatgggattcccgagatcagcagcactggcaa

SEQ ID NO: 555484 - DNA, 120 bp, Artificial Sequence
  ENSG00000168916_7 (sequence is synthesized)
gaggcaggaagtccaagggcgccctggagaggcaactggcatgaattcagcgctgggtcaaagtgtgagcagcggcggcagcggcaacccaaacagcaatagtaccagcaccagcacctc

SEQ ID NO: 555485 - DNA, 120 bp, Artificial Sequence
  ENSG00000168916_8 (sequence is synthesized)
tgccgccaccgcgggggcaggctcctgtgggaaaagcaaagaggagaagccaggtaaaagccagagcagccgaggcgccaagcgggataaggatgcggggaaatccaggaaggacaagca

SEQ ID NO: 555486 - DNA, 120 bp, Artificial Sequence
  ENSG00000168916_9 (sequence is synthesized)
cgacctgcttcagggccaccagaatggcagtggcagccaggccccttccggggggcacctctatggctttggggccaagagcaatggaggtggcgcgagccccttccactgcgggggcac

SEQ ID NO: 555487 - DNA, 120 bp, Artificial Sequence
  ENSG00000168916_10 (sequence is synthesized)
tgggagtggcagcgtcgccgctgcaggggaagttagcaaaagtgccccggattcagggctcatgggaaactctatgttggtaaagaaggaagaggaggaggaggagagccacaggcgaat

SEQ ID NO: 555488 - DNA, 120 bp, Artificial Sequence
  ENSG00000168916_11 (sequence is synthesized)
caagaaactgaaaactgagaaggttgaccccctgtttacagtgccagcgccaccaccgccgatttccagcagtctcacgcctcagattctaccctcctacttttccccatcttcatccaa

SEQ ID NO: 555489 - DNA, 120 bp, Artificial Sequence
  ENSG00000168916_12 (sequence is synthesized)
tattgcagcaccggttgaacagcttttggttcggactcgttctgtgggtgtcaatacatgtgaagttggagtagtgacagagccagagtgtcttgggccctgtgaacctgggaccagtgt

SEQ ID NO: 555490 - DNA, 120 bp, Artificial Sequence
  ENSG00000168916_13 (sequence is synthesized)
gaatttggaagggatcgtgtggcatgaaacagaagaaggtgtcctagtggtcaatgtcacgtggaggaacaaaacgtacgtgggaaccctactggactgcaccaagcacgactgggcccc

SEQ ID NO: 555491 - DNA, 120 bp, Artificial Sequence
  ENSG00000168916_14 (sequence is synthesized)
tcccaggttttgtgagtcaccgacaagtgacctggagatgagagggggccggggcagagggaagagagcgaggtctgctgctgctgccccgggctccgaggccagcttcacagagtccag

SEQ ID NO: 555492 - DNA, 120 bp, Artificial Sequence
  ENSG00000168916_15 (sequence is synthesized)
agggctgcagaataagaacagagggggggccaatgggaaagggaggcggggcagcctcaatgccagcggacgaaggacacccccaaattgtgctgctgaggatatcaaagccagcccttc

SEQ ID NO: 555493 - DNA, 120 bp, Artificial Sequence
  ENSG00000168916_16 (sequence is synthesized)
ctccaccaacaaaaggaaaaacaagcctccaatggagctggacctgaactccagctctgaggacaataagcctggaaagcgtgtccgcacaaattccagaagcactcccactacccctca

SEQ ID NO: 555494 - DNA, 120 bp, Artificial Sequence
  ENSG00000168916_17 (sequence is synthesized)
agggaaaccagagactacttttttggaccaaggctgctcttctccagtgttaatcgactgtccccacccaaactgcaacaaaaagtacaagcacattaacggcctgaggtaccaccaggc

SEQ ID NO: 555495 - DNA, 120 bp, Artificial Sequence
  ENSG00000168916_18 (sequence is synthesized)
tcatgcacacttagacccagaaaacaagctggagttcgagcctgacagtgaggacaagatctcggactgtgaggaaggattgagtaatgtggcacttgaatgcagtgagccaagcacaag

SEQ ID NO: 555496 - DNA, 120 bp, Artificial Sequence
  ENSG00000168916_19 (sequence is synthesized)
tgtatctgcttatgaccagttgaaggcaccggcatcccctggtgctggaaacccacctgggaccccaaagggaaagagagagctgatgagcaatggcccaggttccattattggtgctaa

SEQ ID NO: 555497 - DNA, 120 bp, Artificial Sequence
  ENSG00000168916_20 (sequence is synthesized)
agctgggaagaattctggcaaaaagaagggccttaacaatgaactgaacaaccttccagtaatctccaacatgacggctgcgttagacagttgctcggcagcagacggcagtttggctgc

SEQ ID NO: 555498 - DNA, 120 bp, Artificial Sequence
  ENSG00000168916_21 (sequence is synthesized)
tgagatgcctaaactggaagcagaaggattaattgacaagaaaaatttaggagataaagaaaagggcaaaaaagctaccaactgcaaaacggacaaaaacctctctaaactgaaaagtgc

SEQ ID NO: 555499 - DNA, 120 bp, Artificial Sequence
  ENSG00000168916_22 (sequence is synthesized)
ccggcccattgcccctgccccagcccccactcccccgcagctaatcgctatacccactgcaacctttacaacgaccaccactgggacaatacccggactgccctccctcacaacaactgt

SEQ ID NO: 555500 - DNA, 120 bp, Artificial Sequence
  ENSG00000168916_23 (sequence is synthesized)
tgttcaggctacaccaaagagtcctccgttaaaacccattcaaccaaagcccacaattatgggagagcccatcaccgtgaacccagctctggtgtcactcaaagacaaaaagaaaaagga

SEQ ID NO: 555501 - DNA, 120 bp, Artificial Sequence
  ENSG00000168916_24 (sequence is synthesized)
ctccaagggggccagcaaagatttacctgggcattttttaaaggatcatctcaacaagaatgaagggctggcaaatggactgtcggagtctcaggagagccgcatggccagtatcaaagc

SEQ ID NO: 555502 - DNA, 120 bp, Artificial Sequence
  ENSG00000168916_25 (sequence is synthesized)
tgaggccgataaggtttacactttcacagacaacgctcccagcccttccatagggagcgcctcgaggctggaatgcagcactttggtgaacgggcaggcaccaatggcacctctgcatgt

SEQ ID NO: 555503 - DNA, 120 bp, Artificial Sequence
  ENSG00000168916_26 (sequence is synthesized)
gttgacccagaatggggcagagagttcagctgcaaagacaagcagcccggcctattcagacatatctgatgctgctgacgatggtggttctgacagcaggtcggagggtatgagatcaaa

SEQ ID NO: 555504 - DNA, 120 bp, Artificial Sequence
  ENSG00000168916_27 (sequence is synthesized)
ggccagttccccatcagatattatttctagtaaggacagtgttgtaaaagggcattcttcaactacagcacaatcatctcaactgaaagagtcccattctccctattaccacagctatga

SEQ ID NO: 555505 - DNA, 120 bp, Artificial Sequence
  ENSG00000168916_28 (sequence is synthesized)
tccttattattctccaagttacatgcaccctgggcaggtcggtgcccctgcagctggaaatagtgggagcacgcagggaatgaagatcaagaaggagtctgaggaagatgctgaaaagaa

SEQ ID NO: 555506 - DNA, 120 bp, Artificial Sequence
  ENSG00000168916_29 (sequence is synthesized)
agacaaggcagagcagttagattctaagaaagtggaccacaattctgcatccttacagcctcagcaccagtcggtgatcacacaaagacatcctgccctggctcagtcactttattatgg

SEQ ID NO: 555507 - DNA, 120 bp, Artificial Sequence
  ENSG00000168916_30 (sequence is synthesized)
ccagtatgcatatgggctctatatggaccagaagtctctgatggccaccagccctgcctatagacagcagtatgagaagtactatgaggaccagaggctggcagagcagaaaatggccca

SEQ ID NO: 555508 - DNA, 120 bp, Artificial Sequence
  ENSG00000168916_31 (sequence is synthesized)
gactgggagaggagactgtgaaaggaaaagtgagctccccttgaaagagctgggcaaggaggaaactaaacagaaaaatatgccatcggccacaatctcaaaagctccctctactccgga

SEQ ID NO: 555509 - DNA, 120 bp, Artificial Sequence
  ENSG00000168916_32 (sequence is synthesized)
gcctaacaaaaaccattctaaactagggccatcagtgcctaataaaactgaggagacaggtaaatcgcagcttctctccaatcaccagcagcagcttcaggccgacagcttcaaagctaa

SEQ ID NO: 555510 - DNA, 120 bp, Artificial Sequence
  ENSG00000168916_33 (sequence is synthesized)
gcagatggaaaaccaccagcttattaaggaggctgtagaaatgaagtctgtcatggactctatgaagcagacaggtgtagacccaacctcgagatttaaacaagacccagattcaagaac

SEQ ID NO: 555511 - DNA, 120 bp, Artificial Sequence
  ENSG00000168916_34 (sequence is synthesized)
atggcatcattatgtataccagcccaaatatctggatcagcaaaagtcagaagaacttgatagagagaagaaattaaaagaggatagtccgaggaaaactcctaataaagagagtggtgt

SEQ ID NO: 555512 - DNA, 120 bp, Artificial Sequence
  ENSG00000168916_35 (sequence is synthesized)
gcccagccttcctgtatcgttaacaagcattaaagaggagcccaaagaggccaagcatcctgattctcaatcaatggaggagagcaagctgaaaaatgatgatcgaaagactcctgtgaa

SEQ ID NO: 555513 - DNA, 120 bp, Artificial Sequence
  ENSG00000168916_36 (sequence is synthesized)
ctggaaggactctcggggaacaagagtggctgtctcctcacccatgagtcagcatcagtcatacatacagtacttgcatgcttatccttacccacagatgtacgaccccagccatcctgc

SEQ ID NO: 555514 - DNA, 120 bp, Artificial Sequence
  ENSG00000168916_37 (sequence is synthesized)
ataccgggctgtttctcccgtcctaatgcacagttatcctggggcatatctctctccaggatttcattatcctgtttatgggaagatgtcagggagagaagagacagagaaagtcaatac

SEQ ID NO: 555515 - DNA, 120 bp, Artificial Sequence
  ENSG00000168916_38 (sequence is synthesized)
cagccctagcgtcaacacgaaaacaaccactgaatctaaagcactggatttgctccagcagcatgctaaccaataccgcagcaagtctcctgctcctgtggaaaaggctacagctgagcg

SEQ ID NO: 555516 - DNA, 120 bp, Artificial Sequence
  ENSG00000168916_39 (sequence is synthesized)
ggaacgggaggcagaaagggaaagggatcgccactcccccttcggccagcggcacctgcacacgcaccaccacacccacgttggcatgggttacccgctaatcccgggtcaatatgaccc

SEQ ID NO: 555517 - DNA, 120 bp, Artificial Sequence
  ENSG00000168916_40 (sequence is synthesized)
ttttcaaggcttgacctctgctgcccttgttgcctctcagcaggtggctgcccaggcatctgcatctggaatgtttcctggacaaagaagagaataacaagattggacatgtacattgtc

SEQ ID NO: 555518 - DNA, 120 bp, Artificial Sequence
  ENSG00000168916_41 (sequence is synthesized)
atgtgactggatcacatggggaagcgctttatacagacatcagttccatggtgttaatttgaaatgccttaatggcaggcaaaaaccagtcatttcatttttgtaaattacagattttat

SEQ ID NO: 555519 - DNA, 120 bp, Artificial Sequence
  ENSG00000168916_42 (sequence is synthesized)
tctgttttatatatatatacgtatacatatctgtatatatacatatatatatatataaatataaatatattctttactttttgtatcagtaaccaggctcgcacacacagggtctgctgc

SEQ ID NO: 555520 - DNA, 120 bp, Artificial Sequence
  ENSG00000168916_43 (sequence is synthesized)
gtaaccaggctcgcacacacagggtctgctgccacgtcgcaaaccactcagtaaaggaaattaaaaatgtatttgtcatgttaaaaagtgttagccacaaaaggctacttactttctttt

SEQ ID NO: 555521 - DNA, 120 bp, Artificial Sequence
  ENSG00000168916_44 (sequence is synthesized)
ccttttcctttaaaattgtaaataaataatgttatgtatcagtgtgcctgaaccttgcatatccttcacatatttcccataagcccctcagaaaggctaactgtgatgatgacactttgg

SEQ ID NO: 555522 - DNA, 120 bp, Artificial Sequence
  ENSG00000168916_45 (sequence is synthesized)
tacaatttagatgtctatttggtggctcctgttaaagacgcaccagtgtaaaatgttcctgtagtcactgtttgtacttgtgtattgtggaaaaagtacttttggaaggcatggggttgc

SEQ ID NO: 555523 - DNA, 120 bp, Artificial Sequence
  ENSG00000168916_46 (sequence is synthesized)
cagtaccacaaaaactgtgttgtatataatgtaaagattaaaatggggaaataatgagcatctgtgaataatgaggtgtcattttttgataatcttgaatggcaaataacccaatagcct

SEQ ID NO: 555524 - DNA, 120 bp, Artificial Sequence
  ENSG00000168916_47 (sequence is synthesized)
gcgtaccagagacatctgtgattgttctattacttgaatagttctacagtctttttttttttttaatgtttacaattatccagttttagaagagagagactttaacgccattgcctggtt

SEQ ID NO: 555525 - DNA, 120 bp, Artificial Sequence
  ENSG00000168916_48 (sequence is synthesized)
acttgttttatgctgtaatctagtttattttatgtaaaatgtatattgaatgctttccttttttatacctgccttaaataatttggcaatcagaattaaaaagtttttttttttttaaat

SEQ ID NO: 555526 - DNA, 120 bp, Artificial Sequence
  ENSG00000168916_49 (sequence is synthesized)
gtgagcagcggcggcagcggcaacccaaacagcaatagtaccagcaccagcacctctgccgccaccgcgggggcaggctcctgtgggaaaagcaaagaggagaagccaggttgaccccct

SEQ ID NO: 555527 - DNA, 120 bp, Artificial Sequence
  ENSG00000168916_50 (sequence is synthesized)
cactccccctgtgtgtgtgttgtgtttcagtcctgatttagtgttgcagaacaagcttgttgtgtgtgtgcaccagggggatttttgttttgctttttttaaattttaatttttgctttt

SEQ ID NO: 555528 - DNA, 120 bp, Artificial Sequence
  ENSG00000168916_51 (sequence is synthesized)
ataaaaaatacacaggacggtctgtgacatttgatggtccatcttctttaataataaatttgttgaagagattataatttccaaaataaagcggctgcaaccaaacacattcaatgcagt

SEQ ID NO: 555529 - DNA, 120 bp, Artificial Sequence
  ENSG00000168916_52 (sequence is synthesized)
aatgggccgcttgaggacatggattgcatccagtagtggcgcattcaccaaaaggcagatgaaaataatctgtaccaacaaggatcacaacaggaaacatcatctgaattttccactatt

SEQ ID NO: 555530 - DNA, 120 bp, Artificial Sequence
  ENSG00000168916_53 (sequence is synthesized)
cgcctgtaggtttgctacatgggatcattactgatcacggtgactctgaagtctggaactgaaggcggaatgagaagttgggaaaacttttttctctaaactctctgttttttaaaaaac

SEQ ID NO: 555531 - DNA, 120 bp, Artificial Sequence
  ENSG00000168916_54 (sequence is synthesized)
tattattctcgatgcttgttaagaggaaaaaaaaacctttggtgcttctgttgtgaatgtgaaacattattttccagctgtacagtgacacattttttttaaggagaaaaggactgattc

SEQ ID NO: 555532 - DNA, 120 bp, Artificial Sequence
  ENSG00000168916_55 (sequence is synthesized)
gtttgccaaaaggggggtggggaggtggaataatgttatcgagtgattattctggctgagatgtgttatttggtttcttccttcttgatcatttggtgtttaagtaaaatgaggcacagg

SEQ ID NO: 555533 - DNA, 120 bp, Artificial Sequence
  ENSG00000168917_0 (sequence is synthesized)
aggcgcagagtccgcgcggcggcgcccctctccctccgcagtactccgggcagcgcccgcctcgattttcccaggcgagggcacgcccgcgtcagtcgcctccggggcaccttcctcgcc

SEQ ID NO: 555534 - DNA, 120 bp, Artificial Sequence
  ENSG00000168917_1 (sequence is synthesized)
acgacacgcagaattgattatctgaagaaatggatacttctccctccagaaaatatccagttaaaaaacgggtgaaaatacatcccaacacagtgatggtgaaatatacttctcattatc

SEQ ID NO: 555535 - DNA, 120 bp, Artificial Sequence
  ENSG00000168917_2 (sequence is synthesized)
cccagcctggcgatgatggatatgaagaaatcaatgaaggctatggaaattttatggaggaaaatccaaagaaaggtctgctgagtgaaatgaaaaaaaaagggagagctttctttggaa

SEQ ID NO: 555536 - DNA, 120 bp, Artificial Sequence
  ENSG00000168917_3 (sequence is synthesized)
ccatggataccctacctccaccaacagaagacccaatgatcaatgagattggacaattccagagctttgcagaaaaaaacatttttcaatcccgaaaaatgtggatagtgctgtttggat

SEQ ID NO: 555537 - DNA, 120 bp, Artificial Sequence
  ENSG00000168917_4 (sequence is synthesized)
ctgctttggctcatggatgtgtagctcttatcactaggcttgtttctgatcggtctaaagttccatctctagaactgatttttatccgttctgtttttcaggtcttatctgtgttagttg

SEQ ID NO: 555538 - DNA, 120 bp, Artificial Sequence
  ENSG00000168917_5 (sequence is synthesized)
tgtgttactatcaggaggccccctttggacccagtggatacagattacgactcttcttttatggtgtatgcaatgtcatttctatcacttgtgcttatacatcattttcaatagttcctc

SEQ ID NO: 555539 - DNA, 120 bp, Artificial Sequence
  ENSG00000168917_6 (sequence is synthesized)
atgtggagagccacaactacagtcttcagtgccattttggcttttttactcgtagatgagaaaatggcttatgttgacatggctacagttgtttgcagcatcttaggtgtttgtcttgtc

SEQ ID NO: 555540 - DNA, 120 bp, Artificial Sequence
  ENSG00000168917_7 (sequence is synthesized)
atgatcccaaacattgttgatgaagacaattctttgttaaatgcctggaaagaagcctttgggtacaccatgactgtgatggctggactgaccactgctctctcaatgatagtatacaga

SEQ ID NO: 555541 - DNA, 120 bp, Artificial Sequence
  ENSG00000168917_8 (sequence is synthesized)
tccatcaaggagaagatcagcatgtggactgcactgtttacttttggttggactgggacaatttggggaatatctactatgtttattcttcaagaacccatcatcccattagatggagaa

SEQ ID NO: 555542 - DNA, 120 bp, Artificial Sequence
  ENSG00000168917_9 (sequence is synthesized)
acctggagttatctcattgctatatgtgtctgttctactgcagcattcttaggagtttattatgccttggacaaattccatccagctttggttagcacagtacaacatttggagattgtg

SEQ ID NO: 555543 - DNA, 120 bp, Artificial Sequence
  ENSG00000168917_10 (sequence is synthesized)
gtagctatggtcttgcagcttctcgtgctgcacatatttcctagcatctatgatgtttttggaggggtaatcattatgattagtgtttttgtccttgctggctataaactttactggagg

SEQ ID NO: 555544 - DNA, 120 bp, Artificial Sequence
  ENSG00000168917_11 (sequence is synthesized)
aatttaagaaagcaggactaccaggaaatactagactctcccattaaatgaatacctgattattattgtctcattaatgttcagttattatgtatactgccattttaatgtttacctatg

SEQ ID NO: 555545 - DNA, 120 bp, Artificial Sequence
  ENSG00000168917_12 (sequence is synthesized)
ctgccattttaatgtttacctatgaatgtcttttgtgttatataactgacagagtgctataaaatatataatatatacaaatgcagaaaatttattctagtctaatatattcaaatacaa

SEQ ID NO: 555546 - DNA, 120 bp, Artificial Sequence
  ENSG00000168917_13 (sequence is synthesized)
gcggactgggaccttgatcctgcctgcccggccgcccgacaagggaatgagagcggaccccgaactccacacacccgcgtttagccgccacacctaaggggcacaacagtctttttgggt

SEQ ID NO: 555547 - DNA, 120 bp, Artificial Sequence
  ENSG00000168917_14 (sequence is synthesized)
aagggccgggctgggggcgacgcgccccgcccgctttgcagacttcggggtgctctgcacgacgcctgaaaggccgcggggcccgcatttctctgtgctgccctcctggagaaccgggac

SEQ ID NO: 555548 - DNA, 120 bp, Artificial Sequence
  ENSG00000168917_15 (sequence is synthesized)
acggggacgggagggccagcatcggctacggcccggtttcccgtttctttccgctgtcgcgtgtctgggccctcctgcagcgtccatgatgaaggccaggggctgttgctttcctctcgc

SEQ ID NO: 555549 - DNA, 120 bp, Artificial Sequence
  ENSG00000168917_16 (sequence is synthesized)
atgcacttgggtagaagaaccagctgtgcagtgtcaagacccttccctcagagaccttatcagtaaaatggcgggtggactcggggatgcccgaagacttttccggaccacgattttccg

SEQ ID NO: 555550 - DNA, 120 bp, Artificial Sequence
  ENSG00000168917_17 (sequence is synthesized)
atgctggacacatatttaaacatgaaggaatagacttgcgacttttaagcgcaaacaatgggtggaaatggacagaaactgcctccgtgcccacttgcagcggactacgtagccctggca

SEQ ID NO: 555551 - DNA, 120 bp, Artificial Sequence
  ENSG00000168917_18 (sequence is synthesized)
gacaggcaattgcttcaaacaagcgccctccaagggcgtaagctagaggggcccgggcgggcgctttcccgtggaccctcccacctcgcgggtagaggaagtccttcagttcaggcacaa

SEQ ID NO: 555552 - DNA, 120 bp, Artificial Sequence
  ENSG00000168917_19 (sequence is synthesized)
cagtagccaacccaagcaaggggtgagtcactgtggcgtcatatgggatcaatttcaaatacaagttttaaaaaaggctggatgattttagaaatatggccaagaatttgtattttccat

SEQ ID NO: 555553 - DNA, 120 bp, Artificial Sequence
  ENSG00000168917_20 (sequence is synthesized)
tactctcttgtctcatgtccatgactcttgaacgccagtctgtgggcgctgagattttcgtggtacatcgacggtttgtagacatcttttcccaagggaagacgagggcaagggttagtg

SEQ ID NO: 555554 - DNA, 120 bp, Artificial Sequence
  ENSG00000168917_21 (sequence is synthesized)
gaggaagggcctcgtcacggccgagagtggcggagaaggctcagggcaagtccgcacagcctccagcagccacggggaggaaaaggcgaatctttcctcacagtgctctgggcgctgtag

SEQ ID NO: 555555 - DNA, 120 bp, Artificial Sequence
  ENSG00000168917_22 (sequence is synthesized)
aagagactcgtgttgcggcggatgaaggctcagcgcggacctgcatctcgggccaggttttctttcacccggctccgcgaggagcgaggcggaaagctcgggtccgagtgttgatcgagg

SEQ ID NO: 555556 - DNA, 120 bp, Artificial Sequence
  ENSG00000168917_23 (sequence is synthesized)
acctggagatagtaaccccccacgtccagagtgctgggggtgggtccagagggctgggggtaggtccagagggctgggggtagctccggaggagcgatcttcctccgcgggaaaggactt

SEQ ID NO: 555557 - DNA, 120 bp, Artificial Sequence
  ENSG00000168917_24 (sequence is synthesized)
ggctcaggcttgcctatgtccgtggtgctgaagtgcctcgcgcgccctcgtcgactgacttcctgggccgcggcctgcgttgcccttctactctgcacctttgccaaaaatagcccatct

SEQ ID NO: 555558 - DNA, 120 bp, Artificial Sequence
  ENSG00000168917_25 (sequence is synthesized)
ccatggctggtggccagagtggagcaggcccaacactgaaactcttttcagacaagttgaggctggtttcctgaacataacccgaaagcaaatgtggcttgccttggagatttaaagctc

SEQ ID NO: 555559 - DNA, 120 bp, Artificial Sequence
  ENSG00000168917_26 (sequence is synthesized)
ttcaatgatgtagctcaaaatgaaagttctttcaatccaacaactttgcagagatgctgatccctctcccaggtgaatcctggccaggcctttctgacaatcctgggataccctggggcc

SEQ ID NO: 555560 - DNA, 120 bp, Artificial Sequence
  ENSG00000168917_27 (sequence is synthesized)
agtatagagttcaagggcagaccagactgggggaggggttcctgagggacctggaaccagcatcaccagcacagtcagaattgcaacctagtggcaaagataactgtgagaacaatctca

SEQ ID NO: 555561 - DNA, 120 bp, Artificial Sequence
  ENSG00000168917_28 (sequence is synthesized)
aaggtggggccaggacagaaatggtagaataaatagcagagcttgtgatggttattataggatgggacaaaactcaaggagcagttgtagaatgcagttcaggaccaagtcattattttt

SEQ ID NO: 555562 - DNA, 120 bp, Artificial Sequence
  ENSG00000168917_29 (sequence is synthesized)
gtttaatcaacttttattaaatgtgctctgggtgccaggaacgcaaatatgaatgagagctctcttgccattatggaattcacaaaggagactgtgacttggcatgttccctttagatgg

SEQ ID NO: 555563 - DNA, 120 bp, Artificial Sequence
  ENSG00000168917_30 (sequence is synthesized)
tgcctggatttgttggaggagtggacatggcagcttaaatgagccctcttgggctgtgcacaacccagaaatttcgaggtgtgccagtgtgtctgtctagtatcattgtgggaggatgta

SEQ ID NO: 555564 - DNA, 120 bp, Artificial Sequence
  ENSG00000168917_31 (sequence is synthesized)
tatcattgtgggaggatgtagagtcattctatgattgtttctgacatctctgtagctctgagtcttcttagaaggagcactttaaaaatcagagttctgggccaggcatggtggctcatg

SEQ ID NO: 555565 - DNA, 120 bp, Artificial Sequence
  ENSG00000168918_0 (sequence is synthesized)
agttaagctggtggcagcagccgaggccaccaagaggcaacgggcggcaggttgcagtggaggggcctccgctcccctcggtggtgtgtgggtcctgggggtgcctgccggcccggccga

SEQ ID NO: 555566 - DNA, 120 bp, Artificial Sequence
  ENSG00000168918_1 (sequence is synthesized)
ggaggcccacgcccaccatggtcccctgctggaaccatggcaacatcacccgctccaaggcggaggagctgctttccaggacaggcaaggacgggagcttcctcgtgcgtgccagcgagt

SEQ ID NO: 555567 - DNA, 120 bp, Artificial Sequence
  ENSG00000168918_2 (sequence is synthesized)
ccatctcccgggcatacgcgctctgcgtgctgtatcggaattgcgtttacacttacagaattctgcccaatgaagatgataaattcactgttcaggcatccgaaggcgtctccatgaggt

SEQ ID NO: 555568 - DNA, 120 bp, Artificial Sequence
  ENSG00000168918_3 (sequence is synthesized)
tcttcaccaagctggaccagctcatcgagttttacaagaaggaaaacatggggctggtgacccatctgcaataccctgtgccgctggaggaagaggacacaggcgacgaccctgaggagg

SEQ ID NO: 555569 - DNA, 120 bp, Artificial Sequence
  ENSG00000168918_4 (sequence is synthesized)
acacagtagaaagtgtcgtgtctccacccgagctgcccccaagaaacatcccgctgactgccagctcctgtgaggccaaggaggttcctttttcaaacgagaatccccgagcgaccgaga

SEQ ID NO: 555570 - DNA, 120 bp, Artificial Sequence
  ENSG00000168918_5 (sequence is synthesized)
ccagccggccgagcctctccgagacattgttccagcgactgcaaagcatggacaccagtgggcttccagaagagcatcttaaggccatccaagattatttaagcactcagctcgcccagg

SEQ ID NO: 555571 - DNA, 120 bp, Artificial Sequence
  ENSG00000168918_6 (sequence is synthesized)
actctgaatttgtgaagacagggtccagcagtcttcctcacctgaagaaactgaccacactgctctgcaaggagctctatggagaagtcatccggaccctcccatccctggagtctctgc

SEQ ID NO: 555572 - DNA, 120 bp, Artificial Sequence
  ENSG00000168918_7 (sequence is synthesized)
agaggttatttgaccagcagctctccccgggcctccgtccacgtcctcaggttcctggtgaggccaatcccatcaacatggtgtccaagctcagccaactgacaagcctgttgtcgtcca

SEQ ID NO: 555573 - DNA, 120 bp, Artificial Sequence
  ENSG00000168918_8 (sequence is synthesized)
ttgaagacaaggtcaaggccttgctgcacgagggtcctgagtctccgcaccggccctcccttatccctccagtcacctttgaggtgaaggcagagtctctggggattcctcagaaaatgc

SEQ ID NO: 555574 - DNA, 120 bp, Artificial Sequence
  ENSG00000168918_9 (sequence is synthesized)
agctcaaagtcgacgttgagtctgggaaactgatcattaagaagtccaaggatggttctgaggacaagttctacagccacaagaaaatcctgcagctcattaagtcacagaaatttctga

SEQ ID NO: 555575 - DNA, 120 bp, Artificial Sequence
  ENSG00000168918_10 (sequence is synthesized)
ataagttggtgatcttggtggaaacagagaaggagaagatcctgcggaaggaatatgtttttgctgactccaaaaagagagaaggcttctgccagctcctgcagcagatgaagaacaagc

SEQ ID NO: 555576 - DNA, 120 bp, Artificial Sequence
  ENSG00000168918_11 (sequence is synthesized)
actcagagcagccggagcccgacatgatcaccatcttcatcggcacctggaacatgggtaacgccccccctcccaagaagatcacgtcctggtttctctccaaggggcagggaaagacgc

SEQ ID NO: 555577 - DNA, 120 bp, Artificial Sequence
  ENSG00000168918_12 (sequence is synthesized)
gggacgactctgcggactacatcccccatgacatttacgtgatcggcacccaagaggaccccctgagtgagaaggagtggctggagatcctcaaacactccctgcaagaaatcaccagtg

SEQ ID NO: 555578 - DNA, 120 bp, Artificial Sequence
  ENSG00000168918_13 (sequence is synthesized)
tgacttttaaaacagtcgccatccacacgctctggaacatccgcatcgtggtgctggccaagcctgagcacgagaaccggatcagccacatctgtactgacaacgtgaagacaggcattg

SEQ ID NO: 555579 - DNA, 120 bp, Artificial Sequence
  ENSG00000168918_14 (sequence is synthesized)
caaacacactggggaacaagggagccgtgggggtgtcgttcatgttcaatggaacctccttagggttcgtcaacagccacttgacttcaggaagtgaaaagaaactcaggcgaaaccaaa

SEQ ID NO: 555580 - DNA, 120 bp, Artificial Sequence
  ENSG00000168918_15 (sequence is synthesized)
actatatgaacattctccggttcctggccctgggcgacaagaagctgagtccctttaacatcactcaccgcttcacgcacctcttctggtttggggatcttaactaccgtgtggatctgc

SEQ ID NO: 555581 - DNA, 120 bp, Artificial Sequence
  ENSG00000168918_16 (sequence is synthesized)
ctacctgggaggcagaaaccatcatccagaaaatcaagcagcagcagtacgcagacctcctgtcccacgaccagctgctcacagagaggagggagcagaaggtcttcctacacttcgagg

SEQ ID NO: 555582 - DNA, 120 bp, Artificial Sequence
  ENSG00000168918_17 (sequence is synthesized)
aggaagaaatcacgtttgccccaacctaccgttttgagagactgactcgggacaaatacgcctacaccaagcagaaagcgacagggatgaagtacaacttgccttcctggtgtgaccgag

SEQ ID NO: 555583 - DNA, 120 bp, Artificial Sequence
  ENSG00000168918_18 (sequence is synthesized)
tcctctggaagtcttatcccctggtgcacgtggtgtgtcagtcttatggcagtaccagcgacatcatgacgagtgaccacagccctgtctttgccacatttgaggcaggagtcacttccc

SEQ ID NO: 555584 - DNA, 120 bp, Artificial Sequence
  ENSG00000168918_19 (sequence is synthesized)
agtttgtctccaagaacggtcccgggactgttgacagccaaggacagattgagtttctcaggtgctatgccacattgaagaccaagtcccagaccaaattctacctggagttccactcga

SEQ ID NO: 555585 - DNA, 120 bp, Artificial Sequence
  ENSG00000168918_20 (sequence is synthesized)
ccattatctctgaccctgagtacctgctagaccagcacatcctcatcagcatcaagtcctctgacagcgacgaatcctatggcgagggctgcattgcccttcggttagaggccacagaaa

SEQ ID NO: 555586 - DNA, 120 bp, Artificial Sequence
  ENSG00000168918_21 (sequence is synthesized)
cgcagctgcccatctacacgcctctcacccaccatggggagttgacaggccacttccagggggagatcaagctgcagacctctcagggcaagacgagggagaagctctatgactttgtga

SEQ ID NO: 555587 - DNA, 120 bp, Artificial Sequence
  ENSG00000168918_22 (sequence is synthesized)
agacggagcgtgatgaatccagtgggccaaagaccctgaagagcctcaccagccacgaccccatgaagcagtgggaagtcactagcagggcccctccgtgcagtggctccagcatcactg

SEQ ID NO: 555588 - DNA, 120 bp, Artificial Sequence
  ENSG00000168918_23 (sequence is synthesized)
aaatcatcaaccccaactacatgggagtggggccctttgggccaccaatgcccctgcacgtgaagcagaccttgtcccctgaccagcagcccacagcctggagctacgaccagccgccca

SEQ ID NO: 555589 - DNA, 120 bp, Artificial Sequence
  ENSG00000168918_24 (sequence is synthesized)
aggactccccgctggggccctgcaggggagaaagtcctccgacacctcccggccagccgcccatatcacccaagaagtttttaccctcaacagcaaaccggggtctccctcccaggacac

SEQ ID NO: 555590 - DNA, 120 bp, Artificial Sequence
  ENSG00000168918_25 (sequence is synthesized)
aggagtcaaggcccagtgacctggggaagaacgcaggggacacgctgcctcaggaggacctgccgctgacgaagcccgagatgtttgagaaccccctgtatgggtccctgagttccttcc

SEQ ID NO: 555591 - DNA, 120 bp, Artificial Sequence
  ENSG00000168918_26 (sequence is synthesized)
ctaagcctgctcccaggaaggaccaggaatcccccaaaatgccgcggaaggaacccccgccctgcccggaacccggcatcttgtcgcccagcatcgtgctcaccaaagcccaggaggctg

SEQ ID NO: 555592 - DNA, 120 bp, Artificial Sequence
  ENSG00000168918_27 (sequence is synthesized)
atcgcggcgaggggcccggcaagcaggtgcccgcgccccggctgcgctccttcacgtgctcatcctctgccgagggcagggcggccggcggggacaagagccaagggaagcccaagaccc

SEQ ID NO: 555593 - DNA, 120 bp, Artificial Sequence
  ENSG00000168918_28 (sequence is synthesized)
cggtcagctcccaggccccggtgccggccaagaggcccatcaagccttccagatcggaaatcaaccagcagaccccgcccaccccgacgccgcggccgccgctgccagtcaagagcccgg

SEQ ID NO: 555594 - DNA, 120 bp, Artificial Sequence
  ENSG00000168918_29 (sequence is synthesized)
cggtgctgcacctccagcactccaagggccgcgactaccgcgacaacaccgagctcccgcatcacggcaagcaccggccggaggaggggccaccagggcctctaggcaggactgccatgc

SEQ ID NO: 555595 - DNA, 120 bp, Artificial Sequence
  ENSG00000168918_30 (sequence is synthesized)
agtgaagccctcagtgagctgccactgagtcgggagcccagaggaacggcgtgaagccactggaccctctcccgggacctcctgctggctcctcctgcccagcttcctatgcaaggcttt

SEQ ID NO: 555596 - DNA, 120 bp, Artificial Sequence
  ENSG00000168918_31 (sequence is synthesized)
gtgttttcaggaaagggcctagcttctgtgtggcccacagagttcactgcctgtgagacttagcaccaagtgctgaggctggaagaaaaacgcacaccagacgggcaacaaacagtctgg

SEQ ID NO: 555597 - DNA, 120 bp, Artificial Sequence
  ENSG00000168918_32 (sequence is synthesized)
gtccccagctcgctcttggtacttgggaccccagtgcctcgttgagggcgccattctgaagaaaggaactgcagcgccgatttgagggtggagatatagataataataatattaataata

SEQ ID NO: 555598 - DNA, 120 bp, Artificial Sequence
  ENSG00000168918_33 (sequence is synthesized)
ataatggccacatggatcgaacactcatgatgtgccaagtgctgtgctaagtgctttacgaacattcgtcatatcaggatgacctcgagagctgaggctctagccacctaaaaccacgtg

SEQ ID NO: 555599 - DNA, 120 bp, Artificial Sequence
  ENSG00000168918_34 (sequence is synthesized)
cccaaacccaccagtttaaaacggtgtgtgttcggaggggtgaaagcattaagaagcccagtgccctcctggagtgagacaagggctcggccttaaggagctgaagagtctgggtagctt

SEQ ID NO: 555600 - DNA, 120 bp, Artificial Sequence
  ENSG00000168918_35 (sequence is synthesized)
gtttagggtacaagaagcctgttctgtccagcttcagtgacacaagctgctttagctaaagtcccgcgggttccggcatggctaggctgagagcagggatctacctggcttctcagttct

SEQ ID NO: 555601 - DNA, 120 bp, Artificial Sequence
  ENSG00000168918_36 (sequence is synthesized)
ttggttggaaggagcaggaaatcagctcctattctccagtggagagatctggcctcagcttgggctagagatgccaaggcctgtgccaggttccctgtgccctcctcgaggtgggcagcc

SEQ ID NO: 555602 - DNA, 120 bp, Artificial Sequence
  ENSG00000168918_37 (sequence is synthesized)
atcaccagccacagttaagccaagccccccaacatgtattccatcgtgctggtagaagagtctttgctgttgctcccgaaagccgtgctctccagcctggctgccagggagggtgggcct

SEQ ID NO: 555603 - DNA, 120 bp, Artificial Sequence
  ENSG00000168918_38 (sequence is synthesized)
cttggttccaggctcttgaaatagtgcagccttttcttcctatctctgtggctttcagctctgcttccttggttattaggagaatagatgggtgatgtctttccttatgttgctttttca

SEQ ID NO: 555604 - DNA, 120 bp, Artificial Sequence
  ENSG00000168918_39 (sequence is synthesized)
acatagcagaattaatgtagggagctaaatccagtggtgtgtgtgaatgcagaagggaatgcaccccacattcccatgatggaagtctgcgtaaccaataaattgtgcctttctcactca

SEQ ID NO: 555605 - DNA, 120 bp, Artificial Sequence
  ENSG00000168918_40 (sequence is synthesized)
ctagggcatggcatcccacgtgggtgtcagcacggccgcagaagaaccacttctctggcccacccatgcctgctaggccatgcttcttcagaagtggccacaactctcctgacgtctcca

SEQ ID NO: 555606 - DNA, 120 bp, Artificial Sequence
  ENSG00000168918_41 (sequence is synthesized)
gagccggtcattccacccagggggacttcagctgccactggacacttcaattgtacgctgcgaccagttgccaggaaggagagggctggcaagagagccgcggcagccgtggcagggtgt

SEQ ID NO: 555607 - DNA, 120 bp, Artificial Sequence
  ENSG00000168918_42 (sequence is synthesized)
aggggacggtggacggccagggcccccccctctctctctttctctctctctctcttgcttggtttctgtaatgaggaagttctccgcagctcagtttcctttccctcactgagcgcctga

SEQ ID NO: 555608 - DNA, 120 bp, Artificial Sequence
  ENSG00000168918_43 (sequence is synthesized)
accacactgctctgcaaggagctctatgggtaatggctggcccacgggggcgggcaggtgggggcggccaccaggtgagagaaacagctcatgagagcgacctctgcctctgcctggctg

SEQ ID NO: 555609 - DNA, 120 bp, Artificial Sequence
  ENSG00000168918_44 (sequence is synthesized)
aacaaatgcctctgccgcactcacaataattgagtggtgagcacagcttggaaatctctgtggttgtttggaggtcttgttatcatggaatttgaacagtagcttgtgtgtgctgcagct

SEQ ID NO: 555610 - DNA, 120 bp, Artificial Sequence
  ENSG00000168918_45 (sequence is synthesized)
gctatctccacatttgtctggcaggctctgcaaaggggattgaggccagtggttctctgtgtcccagaggtgtccctgggagatgtagtgtcactggactagagattcatccttgctatc

SEQ ID NO: 555611 - DNA, 120 bp, Artificial Sequence
  ENSG00000168918_46 (sequence is synthesized)
tgcagcaccatagtgacctcacgtgtggaggaattttgtctgaaggtcagaaaagatatttccttgtgtcattagcctgatggaccgctaactagcactgtttctaaagcagaaagcctc

SEQ ID NO: 555612 - DNA, 120 bp, Artificial Sequence
  ENSG00000168918_47 (sequence is synthesized)
ctctggggcctccttacaaatccaagctgatcttgcctagctggggcccaggaatgaagacagccatctagaatcttcactgttctgattctctgctgagcagatgctgctgctcctggt

SEQ ID NO: 555613 - DNA, 120 bp, Artificial Sequence
  ENSG00000168918_48 (sequence is synthesized)
cccctgccctctgtacacccaatgtggcctcaaatgccctttgcatcctggctgtgccatatttgcacactaaggagttctgctgcagcagggctggagggctaagtctcacttcccccc

SEQ ID NO: 555614 - DNA, 120 bp, Artificial Sequence
  ENSG00000168918_49 (sequence is synthesized)
ccccgggcctccgtccacgtcctcaggtaaagggtcttggggttgaaaaggtgagattaataccccagggaggaggattgagttagccagtcctgagggctcaggaggaagaggggagca

SEQ ID NO: 555615 - DNA, 120 bp, Artificial Sequence
  ENSG00000168918_50 (sequence is synthesized)
ctgcccattgtgtgttcactgggcaacagcaagcaggtacgcatgggttgggggtgggagcctcagcccctgccctttccaggaagccatctcccactgccagattttgatttgaggaat

SEQ ID NO: 555616 - DNA, 120 bp, Artificial Sequence
  ENSG00000168918_51 (sequence is synthesized)
aaagatttcaaattatgcactcatcagcaaaacttatttgtgccaaataagggggtaagcagggcctgttcccatcatttcttatcagaaactgaaaggaaagaaaaagaggagatgcct

SEQ ID NO: 555617 - DNA, 120 bp, Artificial Sequence
  ENSG00000168918_52 (sequence is synthesized)
caggaggagcaggatgaaggtgccccccaacccccgcacctgctcatggcctggcaggaggccaaggtcgtgttgcccattaagcaaatgtctgtgtaacaaaaggtgtcatcaataaag

SEQ ID NO: 555618 - DNA, 120 bp, Artificial Sequence
  ENSG00000168918_53 (sequence is synthesized)
ttttaacaagttttttaaaaaagcaaaagctgtatctcagaagaaaatacctgcaacaaagcttagggacaaaggattacagacgaagtattcatgtttatattattatttttatttgag

SEQ ID NO: 555619 - DNA, 120 bp, Artificial Sequence
  ENSG00000168918_54 (sequence is synthesized)
acatggtcttgctttgtcgcccaggctggcgtgcagtggcacaatcacagctcactgcatcctcaaacatcggggctcaagcgatccaccccacctgagcctcccatgtattaaaactgc

SEQ ID NO: 555620 - DNA, 120 bp, Artificial Sequence
  ENSG00000168918_55 (sequence is synthesized)
aatacttttgcaccagctaatagctggggattacaggtgcatgccaccatgccagtctccttttaaaattttttgtagagacagatctcactgtgttgcccaggttggtttcaaacttct

SEQ ID NO: 555621 - DNA, 120 bp, Artificial Sequence
  ENSG00000168918_56 (sequence is synthesized)
tgggattacaggtgggagccaccatgcctggccatttttaaaaaaattcctacaaataattaagtaaaaacaatccagtttttagaatgcggaaaggctataaacaaggcggttcactga

SEQ ID NO: 555622 - DNA, 120 bp, Artificial Sequence
  ENSG00000168918_57 (sequence is synthesized)
gcggaaaggctataaacaaggcggttcactgaagagggacagggaatagccagtatagatatgaaaaggcgttcaacctcaccttgttagtaactgggaaatgacatttgacactaggca

SEQ ID NO: 555623 - DNA, 120 bp, Artificial Sequence
  ENSG00000168918_58 (sequence is synthesized)
gcctcttcttgcctattagatggacaaagagttgatgctcaagttgatggttgagtcaggacttggctaggatgtggggtggaggaggtgctcacaggggctcactcctctgctgttggg

SEQ ID NO: 555624 - DNA, 120 bp, Artificial Sequence
  ENSG00000168918_59 (sequence is synthesized)
aatggaaatgggttttctgaacggcagtttggccatttgtatgcaaatgtgaactgcaggcatccctcaagcccgcagttccatatgttggcagcttcttagggactacaagtacacaaa

SEQ ID NO: 555625 - DNA, 90 bp, Artificial Sequence
  ENSG00000168918_60 (sequence is synthesized)
ccatatgttggcagcttcttagggactacaagtacacaaagagtaacagaaaaaaacattgaaaatcacataaacaggccaggcgtggta

SEQ ID NO: 555626 - DNA, 120 bp, Artificial Sequence
  ENSG00000168918_61 (sequence is synthesized)
gccaccctgccaccatcactctgcagcccgggtcatccagctgcccgcccccagccccgaagcttgtcaggcctggatcagcagggcttctcaccagaggcccgggcatgttcttgttcc

SEQ ID NO: 555627 - DNA, 120 bp, Artificial Sequence
  ENSG00000168918_62 (sequence is synthesized)
caccgagctcccgcatcacggcaagcaccggccggaggaggggccaccagggcctctaggcaggactgccatgcaggtgcgctgcgccacacgtgggttcgtgtgcatttgtgtgtgtgt

SEQ ID NO: 555628 - DNA, 120 bp, Artificial Sequence
  ENSG00000168918_63 (sequence is synthesized)
gcatgcgtgagtgcgtatgtgtgtacctatgcatatgtgtgtgcatgtgtgtgtgcacgcatgcatatgtgcgtgcatgtgtgaacgcatgcatgtgcacacatgcgagtgatggtcctg

SEQ ID NO: 555629 - DNA, 120 bp, Artificial Sequence
  ENSG00000168918_64 (sequence is synthesized)
ctgtcccacacatccctgaccctgcattgcctctgcagcagttgttaaaaggaagaaaggcggggctgtggataaacttagtctagtgtcagtcccagaggaagaagattccataaagaa

SEQ ID NO: 555630 - DNA, 120 bp, Artificial Sequence
  ENSG00000168918_65 (sequence is synthesized)
tcagtcccagaggaagaagattccataaagaaaaggagcctaaatcatttatatctcattgttattataaatttgttttgcaactgagtttcgccaggtgatctgcctgcctgggcctcc

SEQ ID NO: 555631 - DNA, 120 bp, Artificial Sequence
  ENSG00000168918_66 (sequence is synthesized)
cccacccagaaggggtgcctctttggggctcattcctgtacctaccaacagcctgaccccttgctcctgttcagctgcccctgagggcagggcctggcaagaaggcatccgaaggcgtct

SEQ ID NO: 555632 - DNA, 120 bp, Artificial Sequence
  ENSG00000168918_67 (sequence is synthesized)
caccaggtcgccatccacacgctctggaacatccgcatcgtggtgctggccaagcctgagcacgagaaccggatcagccacatctgtactgacaacgtgaagacaggcattgcaaacaca

SEQ ID NO: 555633 - DNA, 120 bp, Artificial Sequence
  ENSG00000168918_68 (sequence is synthesized)
acaccaagcagaaagcgacaggggtgagtcctcttcatagacaccttccctgccctccatctcctccccgctggtgtctgttcccaaaaggtgaacagaaagtgtcttcatccattaggc

SEQ ID NO: 555634 - DNA, 120 bp, Artificial Sequence
  ENSG00000168924_0 (sequence is synthesized)
gccccgcgcctccggacgtctgtgccgggacaaggccgccgctggtgccgggtccttgaggagagcgcctcccgtccgaggccagccgcctctgtcagccgtccgcgcgggccgggtctg

SEQ ID NO: 555635 - DNA, 120 bp, Artificial Sequence
  ENSG00000168924_1 (sequence is synthesized)
aagcgccgccgggacggcgaagagccgcggccgccgcggagaaggaggcagcgcaggaggccggagcggccgccgcgcccgagcacatggcgtccatcttactgaggagctgccgcggcc

SEQ ID NO: 555636 - DNA, 120 bp, Artificial Sequence
  ENSG00000168924_2 (sequence is synthesized)
gggcgcccgcccgcctcccgccgccgcctcggtacaccgtcccgcggggtagtccaggggatcctgctcatctcagctgtgccagcaccctggggttgaggaactgcctgaatgttccat

SEQ ID NO: 555637 - DNA, 120 bp, Artificial Sequence
  ENSG00000168924_3 (sequence is synthesized)
ttggctgctgcactcccatccaccctgtgtacacatcctccagaggcgatcacctcggctgttgggctctgaggcccgagtgccttcgcatagtgtcgagagcgccatggacctctacct

SEQ ID NO: 555638 - DNA, 120 bp, Artificial Sequence
  ENSG00000168924_4 (sequence is synthesized)
ctgtgggttttgtggctgtgggacctcagtgccttcctgtgcgtggctggcactcttcgcgccctgttcgcgatgactcggtagtagagaagtccctcaagtccttgaaggacaagaaca

SEQ ID NO: 555639 - DNA, 120 bp, Artificial Sequence
  ENSG00000168924_5 (sequence is synthesized)
agaagctggaggaaggcggcccggtgtacagcccccccgcagaggtggtggtgaagaagtccctggggcagcgggtgctggacgagctgaagcactactaccatggcttccgcctgctat

SEQ ID NO: 555640 - DNA, 120 bp, Artificial Sequence
  ENSG00000168924_6 (sequence is synthesized)
ggatcgacaccaagatcgcggcacgcatgctctggcgcatcctcaacggccacagcctgacccgccgggagcgcaggcagtttctccggatctgcgctgacctcttccgcctggtgccgt

SEQ ID NO: 555641 - DNA, 120 bp, Artificial Sequence
  ENSG00000168924_7 (sequence is synthesized)
tccttgtgttcgtggtggtgccgttcatggagtttctgctgcctgttgctgtgaagctcttccccaacatgttgccatccacatttgagactcagtcactcaaggaggagaggctgaaga

SEQ ID NO: 555642 - DNA, 120 bp, Artificial Sequence
  ENSG00000168924_8 (sequence is synthesized)
aggagcttcgggtcaagctggagctggccaagttcctccaggacaccatcgaggagatggccttgaagaacaaggcagccaagggcagcgccaccaaagacttctctgtgtttttccaga

SEQ ID NO: 555643 - DNA, 120 bp, Artificial Sequence
  ENSG00000168924_9 (sequence is synthesized)
agatccgggaaacaggggagaggcccagcaatgaggaaatcatgcgtttttccaaattatttgaggatgagctgaccctggacaacctgacacggccgcagctggtggccctgtgcaagc

SEQ ID NO: 555644 - DNA, 120 bp, Artificial Sequence
  ENSG00000168924_10 (sequence is synthesized)
tgctggagctacagtccatcggcaccaacaacttcctgcgcttccagcttaccatgcggctgcgctccataaaggcagacgacaagctgattgctgaggaaggggtggacagcctgaatg

SEQ ID NO: 555645 - DNA, 120 bp, Artificial Sequence
  ENSG00000168924_11 (sequence is synthesized)
tcaaggagctgcaggcagcgtgtcgggcacgaggcatgcgggccctgggcgtcacggaagaccgcctgaggggtcagctgaagcagtggctggacctgcacctgcatcaggagatcccca

SEQ ID NO: 555646 - DNA, 120 bp, Artificial Sequence
  ENSG00000168924_12 (sequence is synthesized)
catcgctgctcatcctgtcccgggccatgtacctcccggacaccctctctccagccgaccagctcaagtccacactgcagaccctcccagagattgtggcaaaggaagcacaggtgaaag

SEQ ID NO: 555647 - DNA, 120 bp, Artificial Sequence
  ENSG00000168924_13 (sequence is synthesized)
tggccgaggtggagggcgagcaggtggacaacaaggccaagctggaggccacgctgcaggaggaggcggccatccagcaggagcaccgtgagaaggagctgcagaagcgctcggaggtgg

SEQ ID NO: 555648 - DNA, 120 bp, Artificial Sequence
  ENSG00000168924_14 (sequence is synthesized)
cgaaggattttgagcccgaacgtgtggtagctgctccccaaaggccggggaccgagccacagccagaaatgcctgacacagtcctgcagtcagagaccttgaaggacactgccccggtgc

SEQ ID NO: 555649 - DNA, 120 bp, Artificial Sequence
  ENSG00000168924_15 (sequence is synthesized)
tggagggcttgaaggaggaagagatcacgaaggaggaaatcgacatcctcagcgatgcctgctctaagctgcaggagcagaagaagtcactcaccaaggagaaggaggagctggagctgc

SEQ ID NO: 555650 - DNA, 120 bp, Artificial Sequence
  ENSG00000168924_16 (sequence is synthesized)
tgaaggaggatgtgcaggactacagcgaggacttgcaggagatcaagaaggaactttcaaagactggtgaagaaaagtacgtggaagaatctaaagccagcaagagattgacaaaaaggg

SEQ ID NO: 555651 - DNA, 120 bp, Artificial Sequence
  ENSG00000168924_17 (sequence is synthesized)
tgcagcaaatgatcgggcagatcgatggcttgatctcgcagctggagatggaccagcaggctggcaagctggccccggccaacggcatgcccacgggggagaacgtcatcagtgtcgctg

SEQ ID NO: 555652 - DNA, 120 bp, Artificial Sequence
  ENSG00000168924_18 (sequence is synthesized)
agctcatcaacgccatgaagcaagtcaagcacattcccgaaagcaagctcaccagcctggccgcagcactggatgaaaacaaggatggcaaggtcaacatcgacgacctcgtcaaggtga

SEQ ID NO: 555653 - DNA, 120 bp, Artificial Sequence
  ENSG00000168924_19 (sequence is synthesized)
ttgagctggtggacaaagaagatgttcacatctccaccagccaggtggctgagattgtagcaacactggaaaaagaggagaaggtggaggagaaggagaaggccaaagagaaggcagaga

SEQ ID NO: 555654 - DNA, 120 bp, Artificial Sequence
  ENSG00000168924_20 (sequence is synthesized)
aggaggtcgcagaggtgaagagctagaaccactggcctgggcacctgtcctcctgctgtgccgtcaccctggcaagggccgtgagggcgattgctttgtggtgattctcagtggctcatc

SEQ ID NO: 555655 - DNA, 120 bp, Artificial Sequence
  ENSG00000168924_21 (sequence is synthesized)
taatattttggctggaataaatcagagacttccataatcaagtaaattttaattttcatcattccacggagattcagtctgtctggaatcccggaacccctccacagaatcgtgtctgga

SEQ ID NO: 555656 - DNA, 120 bp, Artificial Sequence
  ENSG00000168924_22 (sequence is synthesized)
agtctcagcatctgactgtgctgccctgtccccagggaagagaatgaggaccacgtggactccgcccacacagagctggctgctgtgcccaccctcaggggcgtcaggagacacagcctg

SEQ ID NO: 555657 - DNA, 120 bp, Artificial Sequence
  ENSG00000168924_23 (sequence is synthesized)
gcctcctcagggctgaagatgcctccattcgcctgtggaccttgatttctagatttcagtgtcaatagacctgtcttcctgcacactttcagttggatgtgggtcattgtggagacagag

SEQ ID NO: 555658 - DNA, 120 bp, Artificial Sequence
  ENSG00000168924_24 (sequence is synthesized)
gtgtctgccatctctgtggcctctggagagtgacgtctccctgctgggagtgctggttctcacgtgcggtttcccttgtgtatcggagctctttctcggctttctatttcccccagttct

SEQ ID NO: 555659 - DNA, 120 bp, Artificial Sequence
  ENSG00000168924_25 (sequence is synthesized)
ttaagcagtcaattggcacagagtttcccacgggggctgcagtggattcactgtgtcagggatgagcctggcttgggggttggtggggctctgaagcgcatttggggttctttgtagctt

SEQ ID NO: 555660 - DNA, 120 bp, Artificial Sequence
  ENSG00000168924_26 (sequence is synthesized)
ctaatgtgaggtttgagtccagtgcgcccacagcagcatgcccttctcaccccttgcagtgttgcaggctcaggcccctgggctccttcagcaagcaggctagtcaatgaggcatgagga

SEQ ID NO: 555661 - DNA, 120 bp, Artificial Sequence
  ENSG00000168924_27 (sequence is synthesized)
tccggcacagggcatcccctggggcttcaagggcaatacccccgtgcttagggtttgccctgtgccctctgggtggggtggcctccccgcactcggcagcatggccaggctggccagggc

SEQ ID NO: 555662 - DNA, 120 bp, Artificial Sequence
  ENSG00000168924_28 (sequence is synthesized)
gtgggcaggtggtgtcctgtggcacctccatcctcctgcccagccggctgtgtcacactcatctttttaaggtcaggttggttcctggcaaaaatgtacctccaggggcctccaagcata

SEQ ID NO: 555663 - DNA, 120 bp, Artificial Sequence
  ENSG00000168924_29 (sequence is synthesized)
ggatttggaagacaggaacggcacaggcgtccaggaaagcagctgcactcagacaatgccttctccattacttgaagcttctttctgttcagccattaaagaaacttgacaaaataggaa

SEQ ID NO: 555664 - DNA, 120 bp, Artificial Sequence
  ENSG00000168924_30 (sequence is synthesized)
caggagatatttctcaattgtaaacctttgtgcagggacagttggcttccagaggctttcagctttcagttatttgagaagtttgttttagatccttaactaatatttatgaattctctc

SEQ ID NO: 555665 - DNA, 120 bp, Artificial Sequence
  ENSG00000168924_31 (sequence is synthesized)
accctgtgtaagtagcctggtgttcgtttgtccaagtgtacttacccttgagaacaagtcttgcagttgccaggtgtgtgcagacgcctctcctgtgagcggcatcgcgggcccagtcag

SEQ ID NO: 555666 - DNA, 120 bp, Artificial Sequence
  ENSG00000168924_32 (sequence is synthesized)
ctgccccggctctcatcctcgtcctcactgccttggctgagcactgttgacgtgaacagccactgcaacaggcagcccatcccactgtcccctctgccctggactccgcatggcctccaa

SEQ ID NO: 555667 - DNA, 120 bp, Artificial Sequence
  ENSG00000168924_33 (sequence is synthesized)
aagccagcttgccctccgggtgctgcaggggctttgcaggtggggaaggctctggtgggtgcctttggtggcttccgtgacatcagccgtgctctgatgcaggcttgctccctcgtcatt

SEQ ID NO: 555668 - DNA, 120 bp, Artificial Sequence
  ENSG00000168924_34 (sequence is synthesized)
ctccctcgtcattctccctcatcgttctgtgtgcatttttctctatgtcctgacctttcttcttgcacctaaaagtggtgtctgggtgcaaatgtaagcagtggtggatccagaaatatg

SEQ ID NO: 555669 - DNA, 120 bp, Artificial Sequence
  ENSG00000168924_35 (sequence is synthesized)
agctttgtgtaataagcttcttaaaacagtcctttcttacacctgcccagggccagaccctcggtcttggcctttttcaggagctaggatatctgcgcctggtgaaaatgaaacgaattc

SEQ ID NO: 555670 - DNA, 82 bp, Artificial Sequence
  ENSG00000168924_36 (sequence is synthesized)
gagctaggatatctgcgcctggtgaaaatgaaacgaattcctgatttaggaattcagtgtttcctcctcactccagctaagc

SEQ ID NO: 555671 - DNA, 120 bp, Artificial Sequence
  ENSG00000168924_37 (sequence is synthesized)
gcatgagccaccgcgcccggcctgaactctcagttctaacgcagggattcaggaattgggctttcagactccttctgcagtgtcacagtccagactttttttaaatgaaggacaccccgc

SEQ ID NO: 555672 - DNA, 120 bp, Artificial Sequence
  ENSG00000168924_38 (sequence is synthesized)
caccccgcagtggctcacagtgggtcccagggctagcaggagcgtgctggggagccggctctgtctttgttcgcagtgggtcccggtgctggcaggagtgtgctggtgagccggctctgt

SEQ ID NO: 555673 - DNA, 120 bp, Artificial Sequence
  ENSG00000168924_39 (sequence is synthesized)
ctttgtaaatccttcaggggtcctacggctgactccaccggacagcccgtcctgggccgtgttaagcaccttttgtagaaatcgtatttttattaaaacatcaaatctgtgttcctgtaa

SEQ ID NO: 555674 - DNA, 120 bp, Artificial Sequence
  ENSG00000168924_40 (sequence is synthesized)
tcaacgcgggccctgtggtcctcttgggtcacatgcatggtgcccacccacaggctcagcctcctgctctgcaagtgacagggcagcttgggggagtcttggggagaccagagatggata

SEQ ID NO: 555675 - DNA, 120 bp, Artificial Sequence
  ENSG00000168924_41 (sequence is synthesized)
aggtgctctagcctgttctggagagggccccaggtgacctggcagctgcatggagcctccctagggaccttctgtggcaggtgtgctgcccaatgtcacctgcaggcctgctcccagtgt

SEQ ID NO: 555676 - DNA, 120 bp, Artificial Sequence
  ENSG00000168924_42 (sequence is synthesized)
ttgccctgcagctctgtcctgcatgtttatttcctcctggagtggtcagggaggcagggtgcccgggtgtgagggctgcaactctgacatggggactccccgatggccacagtggtgctc

SEQ ID NO: 555677 - DNA, 120 bp, Artificial Sequence
  ENSG00000168924_43 (sequence is synthesized)
tgacctcaccagggagccttccctgattttctgtttccctttcgctgtgctcagcagagtggagctcccccaggtgctggctggcgcttgaaagtttacccaggaggctcagtcgggggc

SEQ ID NO: 555678 - DNA, 120 bp, Artificial Sequence
  ENSG00000168924_44 (sequence is synthesized)
cagtggagtgtcaggagtctgcccccacgagctcccagtgagttaagctgtggtggctgcgcctcgtcagccttcagaattatgggcgtctgtgtctcatcaccctgcagctgtccagga

SEQ ID NO: 555679 - DNA, 120 bp, Artificial Sequence
  ENSG00000168924_45 (sequence is synthesized)
gcagtagaatctgacccatgaggagcctgagaccctgatggtgtgaggtgtgggtggcttggccgggctcctctgctgggcattgccctctggctggagtcagtcaagaagatcccaggt

SEQ ID NO: 555680 - DNA, 120 bp, Artificial Sequence
  ENSG00000168924_46 (sequence is synthesized)
cccaggggctggtcagaggcctggactgtgggagcagtgggggctggagaggaggagcggcccttgaggtttcctgcggtcatgtggtgagtgaggtgaggatggggagacggcagctgc

SEQ ID NO: 555681 - DNA, 120 bp, Artificial Sequence
  ENSG00000168924_47 (sequence is synthesized)
cacggaccgagatccctgaggactagatggggttcacgaggccggtgttgttggcttgagggacttgtgccactttggagtgagaaggatgtgtctgaagtgcaggaagagcttaaacca

SEQ ID NO: 555682 - DNA, 120 bp, Artificial Sequence
  ENSG00000168924_48 (sequence is synthesized)
gggcctagaaactccagccatgcgtgtgcgttgtctgtggggttttcccgctgcagcacagaggcgagtggtttccatggctgcaaagccagaaatacttgctgtctggcccttgacaga

SEQ ID NO: 555683 - DNA, 120 bp, Artificial Sequence
  ENSG00000168924_49 (sequence is synthesized)
caaattcacgaggaatgctcccaaagcacagagaggttaaattactcagtctaaggtcacgcagcagtaagtaatggagctggaatttgagctctaacagtctgctccggagctcgggcc

SEQ ID NO: 555684 - DNA, 120 bp, Artificial Sequence
  ENSG00000168924_50 (sequence is synthesized)
ctgctgagccccccagggagtgggtggtggttccagcaagatgttttagggggagccatgctttgggagcctcacccaggacatcgtgccttgcagagcaggaggggcccgtcccaacct

SEQ ID NO: 555685 - DNA, 120 bp, Artificial Sequence
  ENSG00000168924_51 (sequence is synthesized)
ttcctgggccgcccagctgccaagaaggatgtgcttgcagtcacctgcacgggggtgtgctgcatagggccgcccccaggagcacacctgaaattgtgtctcagagctggcatcctgcat

SEQ ID NO: 555686 - DNA, 120 bp, Artificial Sequence
  ENSG00000168924_52 (sequence is synthesized)
gttacgatttgagttgggcaccaagtcagcctcgtcctccctcatctgtcacctctgctaggtaccctcctagcccagctcttggcagagactgagctggtggcttgtccctcaggtggt

SEQ ID NO: 555687 - DNA, 120 bp, Artificial Sequence
  ENSG00000168924_53 (sequence is synthesized)
aggaactgcagaggatcacccaaagggccctgagtgatccacgctaagggactctagctctccctaaagagctagatggccacccctcccccaaggctcaggcagtcatccgtgggagat

SEQ ID NO: 555688 - DNA, 120 bp, Artificial Sequence
  ENSG00000168924_54 (sequence is synthesized)
gtaggtgcacacaggtgcacctcttcctgccccagagcagcagggtcccggccacttctgtggcagagagaggatcacaggacctgcatgcagcagcctgtgggcccgggcgtctccccc

SEQ ID NO: 555689 - DNA, 120 bp, Artificial Sequence
  ENSG00000168924_55 (sequence is synthesized)
agcagacagcagcctcagctttgctggttcaggcaggagaggtccacaggccagacgccacctttccccaggctagcccagcaccggagtcagaagtcagtggtttgaggccaagctggg

SEQ ID NO: 555690 - DNA, 60 bp, Artificial Sequence
  ENSG00000168924_56 (sequence is synthesized)
gcaccggagtcagaagtcagtggtttgaggccaagctgggcaggtgacttgaggtcgggt

SEQ ID NO: 555691 - DNA, 66 bp, Artificial Sequence
  ENSG00000168924_57 (sequence is synthesized)
gcctgaatggatgttgaatttgtcaagcaactttttagcatttaaatttcatactaaaacataaag

SEQ ID NO: 555692 - DNA, 120 bp, Artificial Sequence
  ENSG00000168925_0 (sequence is synthesized)
acaccttctgaggcagcggcatggcttccctctggctcctctcctgcttctcccttgtgggggccgcctttggctgcggggtccccgccatccaccctgtgctcagcggcctgtccagga

SEQ ID NO: 555693 - DNA, 120 bp, Artificial Sequence
  ENSG00000168925_1 (sequence is synthesized)
tcgtgaatggggaggacgccgtccccggctcctggccctggcaggtgtccctgcaggacaaaaccggcttccacttctgcgggggctccctcatcagcgaggactgggtggtcaccgctg

SEQ ID NO: 555694 - DNA, 120 bp, Artificial Sequence
  ENSG00000168925_2 (sequence is synthesized)
cccactgcggggtcaggacctccgacgtggtcgtggctggggagtttgaccagggctctgacgaggagaacatccaggtcctgaagatcgccaaggtcttcaagaaccccaagttcagca

SEQ ID NO: 555695 - DNA, 120 bp, Artificial Sequence
  ENSG00000168925_3 (sequence is synthesized)
tgaagctggccacacctgcccgcttctcccagacagtgtccgccgtgtgcctgcccagcgccgacgacgacttccccgcggggacactgtgtgccaccacaggctggggcaagaccaagt

SEQ ID NO: 555696 - DNA, 120 bp, Artificial Sequence
  ENSG00000168925_4 (sequence is synthesized)
acaacgccaacaagacccctgacaagctgcagcaggcagccctgcccctcctgtccaatgccgaatgcaagaagtcctggggcaggaggatcaccgacgtgatgatctgtgccggggcca

SEQ ID NO: 555697 - DNA, 120 bp, Artificial Sequence
  ENSG00000168925_5 (sequence is synthesized)
gtggcgtctcctcctgcatgggcgactctggcggccccctggtctgccaaaaggatggagcctggaccctggtgggcattgtgtcctggggcagcgacacctgctccacctccagccctg

SEQ ID NO: 555698 - DNA, 120 bp, Artificial Sequence
  ENSG00000168925_6 (sequence is synthesized)
gcgtgtacgcccgtgtcaccaagctcataccttgggtgcagaagatcctggctgccaactgagcccgcggctccctccgaccctgctccccacagagcctcagtaaacccatggaacaca

SEQ ID NO: 555699 - DNA, 120 bp, Artificial Sequence
  ENSG00000168925_7 (sequence is synthesized)
gtgtcaccaagctcataccttgggtgcagaagatcctggctgccaactgagcccgcggctccctccgaccctgctccccacagagcctcagtaaacccatggaacacacgtcggcgctgt

SEQ ID NO: 555700 - DNA, 120 bp, Artificial Sequence
  ENSG00000168925_8 (sequence is synthesized)
ccgtcttctgttttggggcctccaaggcctcactccactccggaacctgggcccccactgggctggactgggctgggctaggcatgggcggcctctgggaggacccttccttagtcccct

SEQ ID NO: 555701 - DNA, 120 bp, Artificial Sequence
  ENSG00000168925_9 (sequence is synthesized)
ctcccaccactcaggctcctgcttcccagagagtggccaggaacacacgggcagatgaaaaggggtgcagagacagacgggggatctggctggtggggaccgggtggaccttggccccca

SEQ ID NO: 555702 - DNA, 120 bp, Artificial Sequence
  ENSG00000168925_10 (sequence is synthesized)
tcctcagcacctgcccccaggcgacaggttcttgccacccacccttgctctcttgctctgggccctgcaggagggcgtgggcagcgtgggggctgtggggggatgagctcactctggccc

SEQ ID NO: 555703 - DNA, 120 bp, Artificial Sequence
  ENSG00000168925_11 (sequence is synthesized)
cacagacctgtggctccaaggaatcttcccacggccactcctagggctgccagacatacgctggagccaggagcgttatcaacgcaaggactggtgatgagtagagacggggtttcaccg

SEQ ID NO: 555704 - DNA, 120 bp, Artificial Sequence
  ENSG00000168925_12 (sequence is synthesized)
cctgagccaccgcgcccagccctatggcaatgactcttaaaagttcgaggctcaggcaggccgggagccccaggtcaaacatgcccatccccagccccaaatgcccagaagcaaaaagcc

SEQ ID NO: 555705 - DNA, 120 bp, Artificial Sequence
  ENSG00000168925_13 (sequence is synthesized)
cgccgtgccatgtttcatcaaggcaccacatcctccgtggccagatcgtcctccccttcctcctcacaccctgccagctggcccccgcccctctggccgctacccccaccccctcggccg

SEQ ID NO: 555706 - DNA, 120 bp, Artificial Sequence
  ENSG00000168925_14 (sequence is synthesized)
tgcttggggcatctgtttcctcccttccttagcccccgcaccctcagaccctccacaccctacgattctgcctcctgaggggctcctgcatccacgccttttgcccacccctcaccccca

SEQ ID NO: 555707 - DNA, 120 bp, Artificial Sequence
  ENSG00000168925_15 (sequence is synthesized)
gcccctgcaccctctggacttgggcggcctcctgggtttatgtgcccccgggccccacaccccaatccaccccagccactgactcagagtcctcaagagcacagggacccaaggagatac

SEQ ID NO: 555708 - DNA, 120 bp, Artificial Sequence
  ENSG00000168925_16 (sequence is synthesized)
agccaccatgtcccagcaccctgggctcagaaggggacagacactcccttgggtacacaacggtcaggggagggggctgagggcactgcagtggcacctcaggacaccatcaactgccgg

SEQ ID NO: 555709 - DNA, 120 bp, Artificial Sequence
  ENSG00000168925_17 (sequence is synthesized)
ctagagacttggggaccagggaggcggaggcggcatgtgccagggaggtcctgagctggcttcagtggactggggtagaaccgggagagctgcacgcaggcaggtgaggcccaggtgggt

SEQ ID NO: 555710 - DNA, 120 bp, Artificial Sequence
  ENSG00000168928_0 (sequence is synthesized)
acacccctgccagcggcaccatggctttcctctggctcctctcctgctgggccctcctgggtaccaccttcggctgcggggtccccgccatccaccctgtgctcagcggcctgtccagga

SEQ ID NO: 555711 - DNA, 120 bp, Artificial Sequence; identical to SEQ ID NO: 555693
  ENSG00000168928_1 (sequence is synthesized)

SEQ ID NO: 555712 - DNA, 120 bp, Artificial Sequence; identical to SEQ ID NO: 555694
  ENSG00000168928_2 (sequence is synthesized)

SEQ ID NO: 555713 - DNA, 120 bp, Artificial Sequence; identical to SEQ ID NO: 555695
  ENSG00000168928_3 (sequence is synthesized)

SEQ ID NO: 555714 - DNA, 120 bp, Artificial Sequence; identical to SEQ ID NO: 555696
  ENSG00000168928_4 (sequence is synthesized)

SEQ ID NO: 555715 - DNA, 120 bp, Artificial Sequence
  ENSG00000168928_5 (sequence is synthesized)
gtggcgtctcctcctgcatgggtgactctggaggccccctggtctgccagaaggacggagcctggaccctggtgggcattgtgtcctggggcagccgcacctgctctaccaccacgcccg

SEQ ID NO: 555716 - DNA, 120 bp, Artificial Sequence
  ENSG00000168928_6 (sequence is synthesized)
ctgtgtacgcccgtgtcgccaagctcataccctgggtgcagaagatcctggccgccaactgagcccgcagctcctgccacccctgccttaagatttcccattaaatgcatctgtttagaa

SEQ ID NO: 555717 - DNA, 120 bp, Artificial Sequence
  ENSG00000168928_7 (sequence is synthesized)
acccctgccagcggcaccatggctttcctctggctcctctcctgctgggccctcctgggtaccaccttcggtgagtgccaggccctgcggaggccgaagggttttctcctctcactccca

SEQ ID NO: 555718 - DNA, 120 bp, Artificial Sequence
  ENSG00000168928_8 (sequence is synthesized)
gccccgaggccagcaagaggcagcagggtcccagctcccagttcagctgtgcaccgcagtgtgggcctgggcgagtcaccggctccatctctgccgtgggcgctgagaggtcaatgcctc

SEQ ID NO: 555719 - DNA, 120 bp, Artificial Sequence
  ENSG00000168928_9 (sequence is synthesized)
cctcccaggctcagctgccgcctctgagctcaggagatggggagtcccgctccccttcctcacccccagcagacctgaggctctcaggggaggaggcggggggaggaggcaggtgtccgg

SEQ ID NO: 555720 - DNA, 120 bp, Artificial Sequence
  ENSG00000168928_10 (sequence is synthesized)
gggctgccctgaggccttcgggaaacccccaaacagtcagcggccccagcacaggtttgggtggtgaatgtgtgggcagctggggcttggcaccgttcagtccaaacctttcagaacctc

SEQ ID NO: 555721 - DNA, 120 bp, Artificial Sequence
  ENSG00000168928_11 (sequence is synthesized)
gagcctcaccctcttaaactcctgctcacggagcacttcccgggtgccaggcgcagagctggcgctctgcctgctcactctaccaaacctgtgaggtcagaaacagcgtgatccccactt

SEQ ID NO: 555722 - DNA, 120 bp, Artificial Sequence
  ENSG00000168928_12 (sequence is synthesized)
tgctgatggggacactgagtggcttagctgggcagggagggagccaggttcaaacccacagagtctggcctcccagactgagcgccggggctgccgcccaccgcacgctccacctgtgtg

SEQ ID NO: 555723 - DNA, 120 bp, Artificial Sequence
  ENSG00000168928_13 (sequence is synthesized)
acttctccgaactgaggtggggccaacaccccattcctcagcagcccacagcccagttcattggactcagttgtacctggggattccagctctgcggagaggagagccagggccaacttc

SEQ ID NO: 555724 - DNA, 120 bp, Artificial Sequence
  ENSG00000168928_14 (sequence is synthesized)
tcagagaaggggatgtgggagccagtctaggtcccagagactggaaaagagttgggagtgagaggaggctggagcattaggacctgggtgggtggtacccacccctcagcccactcccgc

SEQ ID NO: 555725 - DNA, 120 bp, Artificial Sequence
  ENSG00000168928_15 (sequence is synthesized)
ggtctgggctgcctggccgtggagtccccccgtgaccgtttggctctaaattccaacacgctcctaactgcccgttcgttattgaaaatcttctgaatttaaaatcccccaaatgcaaat

SEQ ID NO: 555726 - DNA, 120 bp, Artificial Sequence
  ENSG00000168928_16 (sequence is synthesized)
aaaatccaggtcggatcatgaggagcctgcacagggagcttctgagcagcgcccggccgggtgagccctgccctggctgacctgcctggagtcgcagcgtggggctcccacccgggcagg

SEQ ID NO: 555727 - DNA, 120 bp, Artificial Sequence
  ENSG00000168928_17 (sequence is synthesized)
gccgaggcccccttgtcccacaggcgcttctgaggctccaggggccgtacccaacatcgtggtgatggtgcagggtagggcaggcgtgtcggccccgggtctctccctccactcttggct

SEQ ID NO: 555728 - DNA, 120 bp, Artificial Sequence
  ENSG00000168930_0 (sequence is synthesized)
ctaatcttccagttgccccctattgactttaaaccaaagctttgattcatgaccactgggatccagccagcgggggatttcttttcctgatggactgtacccaggatctcacatttgctt

SEQ ID NO: 555729 - DNA, 120 bp, Artificial Sequence
  ENSG00000168930_1 (sequence is synthesized)
aagcagctcccacaattgggttcttataaaaggacacggaagagacaagctcagttttctctgaaggagaaggactgcacttagaactgcattttggcgacctctgaaattcagtactgc

SEQ ID NO: 555730 - DNA, 120 bp, Artificial Sequence
  ENSG00000168930_2 (sequence is synthesized)
agtgaatgagcttctgatcttgaggtgaacttaacaaaattatttttggaaaaatcgttgtgggaaccattaaaagaactccaggaaacatgaattctggaatcttacaggtctttcagg

SEQ ID NO: 555731 - DNA, 120 bp, Artificial Sequence
  ENSG00000168930_3 (sequence is synthesized)
gggaactcatctgccccctgtgcatgaactacttcatagacccggtcaccatagactgtgggcacagcttttgcaggccttgtttctacctcaactggcaagacatcccatttcttgtcc

SEQ ID NO: 555732 - DNA, 120 bp, Artificial Sequence
  ENSG00000168930_4 (sequence is synthesized)
agtgctctgaatgcacaaagtcaaccgagcagataaacctcaaaaccaacattcatttgaagaagatggcttctcttgccagaaaagtcagtctctggctattcctgagctctgaggagc

SEQ ID NO: 555733 - DNA, 120 bp, Artificial Sequence
  ENSG00000168930_5 (sequence is synthesized)
aaatgtgtggcactcacagggagacaaagaagatattctgtgaagtggacaggagcctgctctgtttgctgtgctccagctctcaggagcaccggtatcacagacaccgtcccattgagt

SEQ ID NO: 555734 - DNA, 120 bp, Artificial Sequence
  ENSG00000168930_6 (sequence is synthesized)
gggctgctgaggaacaccgggagaagcttttacagaaaatgcagtctttgtgggaaaaagcttgtgaaaatcacagaaacctgaatgtggaaaccaccagaaccagatgctggaaggatt

SEQ ID NO: 555735 - DNA, 120 bp, Artificial Sequence
  ENSG00000168930_7 (sequence is synthesized)
atgtgaatttaaggctagaagcaattagagctgagtatcagaagatgcctgcatttcatcatgaagaagaaaaacataatttggagatgctgaaaaagaaggggaaagaaatttttcatc

SEQ ID NO: 555736 - DNA, 120 bp, Artificial Sequence
  ENSG00000168930_8 (sequence is synthesized)
gacttcatttaagtaaagccaaaatggctcataggatggagattttaagaggaatgtatgaggagctgaacgaaatgtgccataaaccagatgtggagctacttcaggcttttggagaca

SEQ ID NO: 555737 - DNA, 120 bp, Artificial Sequence
  ENSG00000168930_9 (sequence is synthesized)
cgtgctgctgcacatgccccagcctctgaatccagagctcagtgcagggcccatcactggactgagggacaggctcaaccaattccgagtgcatattactctgcatcatgaagaagccaa

SEQ ID NO: 555738 - DNA, 120 bp, Artificial Sequence
  ENSG00000168930_10 (sequence is synthesized)
atcatgaagaagccaacaatgatatctttctgtatgaaattttgagaagcatgtgtattggatgtgaccatcaagatgtaccctatttcactgcaacacctagaagttttcttgcatggg

SEQ ID NO: 555739 - DNA, 120 bp, Artificial Sequence
  ENSG00000168930_11 (sequence is synthesized)
gtgttcagactttcacctcgggcaaatattactgggaggtccatgtaggggactcctggaattgggcttttggtgtctgtaatatgtatcggaaagagaagaatcagaatgagaagatag

SEQ ID NO: 555740 - DNA, 120 bp, Artificial Sequence
  ENSG00000168930_12 (sequence is synthesized)
atggaaaggcgggactctttcttcttgggtgtgttaagaatgacattcaatgcagtctctttaccacctccccacttatgctgcaatatatcccaaaacctaccagccgagtaggattat

SEQ ID NO: 555741 - DNA, 120 bp, Artificial Sequence
  ENSG00000168930_13 (sequence is synthesized)
tcctggattgtgaggctaagactgtgagctttgttgatgttaatcaaagctccctaatatacaccatccctaattgctctttctcacctcctctcaggcctatcttttgctgtattcact

SEQ ID NO: 555742 - DNA, 120 bp, Artificial Sequence
  ENSG00000168930_14 (sequence is synthesized)
tctgaccagagacaaatcagaaatgtgttcacatgctgtgggaacccctttatcccaggaagtcctcttccttgtgccttaacatacaggacaaataggctctattttatgtcttgaatt

SEQ ID NO: 555743 - DNA, 120 bp, Artificial Sequence
  ENSG00000168930_15 (sequence is synthesized)
gccttctaatgttatcaaaactcatttattgtgttactattaaatatgctgaaaacgctaaaagtatacgtattggttctttattaaataatttttgaaaaatcattattcatgatcatg

SEQ ID NO: 555744 - DNA, 120 bp, Artificial Sequence
  ENSG00000168930_16 (sequence is synthesized)
gcatacagtatattctcttttttttctttatttatgactgtcactgagtgaaataatagatgacagacatgtctgaatgaagtaaaaatcaatggaagacagtcgggatcttttgcttca

SEQ ID NO: 555745 - DNA, 120 bp, Artificial Sequence
  ENSG00000168930_17 (sequence is synthesized)
tgcaaaaaacttggagtgaagtctcaatgataactgggaaatgtttttcttcctctttatctaactatattacacttatccatcaggtttcattgtattaatctatcctttgaggtaata

SEQ ID NO: 555746 - DNA, 120 bp, Artificial Sequence
  ENSG00000168936_0 (sequence is synthesized)
gtctgaagctgagaccccgggctcgcagtcgccccatgaatttcgagttccgcaactgacgctactgggcggggcttcatggccagggcctcgctcaggcctaagtttccccacctgtgc

SEQ ID NO: 555747 - DNA, 120 bp, Artificial Sequence
  ENSG00000168936_1 (sequence is synthesized)
tcaatgcacaggtgcggtgccgcctccagggccggccgagaagagaggccgcacccgcacggggactgcatctcccagagcgccccgcgagcggccgagcggcgggactccatgccctag

SEQ ID NO: 555748 - DNA, 120 bp, Artificial Sequence
  ENSG00000168936_2 (sequence is synthesized)
gcgggcggccgggcggcgggactccatgtcctagagtgccccgcgggcggccgggcggcgggactccatgtcctagagtgccccgcgggcggccgggcggcgggactccatgtcctagag

SEQ ID NO: 555749 - DNA, 120 bp, Artificial Sequence
  ENSG00000168936_3 (sequence is synthesized)
gccgccgcaaccgacaggtccgggactgggcgctgcggcctcgtccgcgcgccggggcgggggcctagctcgacagcttcccggcggctgcgcgatggacagccccgaggtgaccttcac

SEQ ID NO: 555750 - DNA, 120 bp, Artificial Sequence
  ENSG00000168936_4 (sequence is synthesized)
tgcgcgatggacagccccgaggtgaccttcactctcgcctatctggtgttcgccgtgtgcttcgtgttcacgcccaacgagttccacgcggcggggctcacggtgcagaacctgctgtcg

SEQ ID NO: 555751 - DNA, 120 bp, Artificial Sequence
  ENSG00000168936_5 (sequence is synthesized)
ggctggctgggcagcgaggacgccgccttcgtgcccttccacttgcgccgcacggccgccacgctgttgtgccactcgctgctgccgctcggctactatgtgggcatgtgccttgcggct

SEQ ID NO: 555752 - DNA, 120 bp, Artificial Sequence
  ENSG00000168936_6 (sequence is synthesized)
tcagaaaagcggctccacgccctcagccaggcccctgaggcctggcggctcttcctgctgctggccgtgaccctcccctccatcgcctgcatcctgatctactactggtcccgtgaccgg

SEQ ID NO: 555753 - DNA, 120 bp, Artificial Sequence
  ENSG00000168936_7 (sequence is synthesized)
tgggcctgccacccactggcgcgcaccctggccctctacgccctcccacagtctggctggcaggctgttgcctcctctgtcaacactgagttccggcggattgacaagtttgccaccggt

SEQ ID NO: 555754 - DNA, 120 bp, Artificial Sequence
  ENSG00000168936_8 (sequence is synthesized)
gcaccaggtgcccgtgtgattgtgacagacacgtgggtgatgaaggtaaccacctaccgagtgcacgtggcccagcagcaggacgtgcacctgactgtgacggagtctcggcagcatgag

SEQ ID NO: 555755 - DNA, 120 bp, Artificial Sequence
  ENSG00000168936_9 (sequence is synthesized)
ctctcgccagactcgaacttgcccgtgcagctcctcaccatccgtgtggccagcaccaaccctgctgtgcaggcctttgacatctggctgaactccactgagtacggggagctctgcgag

SEQ ID NO: 555756 - DNA, 120 bp, Artificial Sequence
  ENSG00000168936_10 (sequence is synthesized)
aagctccgggcacccatccgcagggcagcccatgtggtcatccaccagagcctgggcgacctgttcctggagacatttgcctccctggtagaggtcaacccggcctactcagtgcccagc

SEQ ID NO: 555757 - DNA, 120 bp, Artificial Sequence
  ENSG00000168936_11 (sequence is synthesized)
ccagcgtgaagctggtgaagacctgccaggaggcagccacaggcgagtgccagcagtgttactgccgccccatgtggtgcctcacctgcatgggcaagtggttcgccagccgccaggacc

SEQ ID NO: 555758 - DNA, 120 bp, Artificial Sequence
  ENSG00000168936_12 (sequence is synthesized)
ccctgcgccctgacacctggctggccagccgcgtgccctgccccacctgccgcgcacgcttctgcatcctggatgtgtgcaccgtgcgctgagtgggctggggccttgaggtgactctgt

SEQ ID NO: 555759 - DNA, 120 bp, Artificial Sequence
  ENSG00000168936_13 (sequence is synthesized)
gtctccccccaaagccacagggcagggaagggggtggctgggcctcctggctggcaaagggctctacttaaagcacatgatgtagagcaactcgcctctgccctgggtctgcagaaggct

SEQ ID NO: 555760 - DNA, 120 bp, Artificial Sequence
  ENSG00000168936_14 (sequence is synthesized)
gaggacttttggttaaaagcaatcctcatgaaaacaccccaccctgcttggcagccagggtacaagtcctgggcacctcctctttgcctccctcctgcccctttcctgctggtgggggca

SEQ ID NO: 555761 - DNA, 120 bp, Artificial Sequence
  ENSG00000168936_15 (sequence is synthesized)
gatcctgcacacacagacacagcgtctgcccccgagccattccctggagaccctgggtctaccccaggtggtcgtcatctgggccatttgccttacttctctggagcatacccaccctca

SEQ ID NO: 555762 - DNA, 120 bp, Artificial Sequence
  ENSG00000168936_16 (sequence is synthesized)
gttacgtgccagacctggaccgcattctcctgccctgtcctggagctggcccctggctgcctggaggaccctgggtaggtcctgagggtgggatggagaagagggcactgctgtggtgtg

SEQ ID NO: 555763 - DNA, 120 bp, Artificial Sequence
  ENSG00000168936_17 (sequence is synthesized)
ggagcagtcctggggcttcctggtggctgtgaccagttgaggggctgttcctgggtggggtggcaatgggaggacaggtcagagcgccctcatttgtggggctgcccctccgggtttctc

SEQ ID NO: 555764 - DNA, 120 bp, Artificial Sequence
  ENSG00000168936_18 (sequence is synthesized)
atcctgtccttggtgcctttttctgcccaacaagtccagggaaggccgaggtctcagactcctgggtaggggtgggggtttgagttgaggaccaaagtgccatagcgacatccagaacac

SEQ ID NO: 555765 - DNA, 120 bp, Artificial Sequence
  ENSG00000168936_19 (sequence is synthesized)
aagcccaccaggggtccagcccaggctacccactcccctagggtctcccaggctcagaaggggatgcacgccccctgtggtcaagcctctggtgggcgtcttgcccagttcctgatggtt

SEQ ID NO: 555766 - DNA, 120 bp, Artificial Sequence
  ENSG00000168936_20 (sequence is synthesized)
caaggggaggggggatgttggccaggccccagggcacagccctgacacaggtgtggctactggaggggccttcatacctgcggccccaaagcccctgggcttggctgtttgaggcagagg

SEQ ID NO: 555767 - DNA, 120 bp, Artificial Sequence
  ENSG00000168936_21 (sequence is synthesized)
tgatggactccgggggcctgacacttgggatttgggaggcttcctagagcgctcagcaggtgaaggcagcaggggccatggccgggagccaggcctagctttgaactgagtttcaagggc

SEQ ID NO: 555768 - DNA, 120 bp, Artificial Sequence
  ENSG00000168936_22 (sequence is synthesized)
tgccaaagaggggcagtgggttggggttgtttttactacaaaataagttacttagttttataaagacaaaccgattgtagccaaatgacaccatatttaataaaatttagtctgaagtga

SEQ ID NO: 555769 - DNA, 120 bp, Artificial Sequence
  ENSG00000168936_23 (sequence is synthesized)
ttcttggggagcactcaggacagtgcagccctcaggctggacagctgccttgctcctaggtccgtcccgtgcccaggctgggctgtctggcactgggtccgtgggctctggccttagggc

SEQ ID NO: 555770 - DNA, 120 bp, Artificial Sequence
  ENSG00000168936_24 (sequence is synthesized)
catctctcctggttggtcctggtgcgacagctgccctgtcactccttggggtgtagcctccatcttccgctccctttgccctgcagaggggcccagcagctctcctccctgcaggctgaa

SEQ ID NO: 555771 - DNA, 120 bp, Artificial Sequence
  ENSG00000168936_25 (sequence is synthesized)
gctgttgtgccactcgctgctgccgctcgtgactgggccaactccaaatgtggactattactttttgccaactggaacctgctggtgcaactcctcaccatctccatggcttatttggac

SEQ ID NO: 555772 - DNA, 120 bp, Artificial Sequence
  ENSG00000168936_26 (sequence is synthesized)
cttcaaattgtcctcgatctggccagcagggccctgaagctggctccgtgtcctctggacatgtcccatcattctttgagacttgcttcctttctcgcacataacttttcagctctggga

SEQ ID NO: 555773 - DNA, 120 bp, Artificial Sequence
  ENSG00000168936_27 (sequence is synthesized)
gttttttcaacacttacgtattgtgtgaaactaaagcagcaaattaaaaaccttttccgctaatatatcctgcctttgccacaggcagggagagagtggccggctggggaagtgcagagc

SEQ ID NO: 555774 - DNA, 120 bp, Artificial Sequence
  ENSG00000168936_28 (sequence is synthesized)
ctcgccagactcgaacttgcccgtgcagctcctcaccatccgtgtggccagcaccaaccctgctgtgcaggcctttgacatctgaggggcccagcagctctcctccctgcaggctgaact

SEQ ID NO: 555775 - DNA, 120 bp, Artificial Sequence
  ENSG00000168938_0 (sequence is synthesized)
gcaggcgcagccggccggcagtcccgtcagctgtcccagagcctgtgtcgcgcccgtgccggtagcgcccgtgccggtagcgccgctgccaccgctcaccatgggcccgggtcctcggct

SEQ ID NO: 555776 - DNA, 120 bp, Artificial Sequence
  ENSG00000168938_1 (sequence is synthesized)
gctgctacctctcgtgctttgcgtggggctcggcgcacttgtgttttcttcgggggccgagggcttccgcaagcgaggcccctcggtgacggccaaggtcttctttgatgtgaggattgg

SEQ ID NO: 555777 - DNA, 120 bp, Artificial Sequence
  ENSG00000168938_2 (sequence is synthesized)
agacaaagatgttggcagaattgtgattggcctctttggaaaagttgtgcccaagacagtggaaaattttgttgctctagcaacaggagagaaaggatatggatataaaggaagcaagtt

SEQ ID NO: 555778 - DNA, 120 bp, Artificial Sequence
  ENSG00000168938_3 (sequence is synthesized)
tcatcgtgtcatcaaggatttcatgattcaaggaggtgacatcaccactggagatggcactgggggtgtgagcatctatggtgagacatttccagatgagaacttcaagctgaagcacta

SEQ ID NO: 555779 - DNA, 120 bp, Artificial Sequence
  ENSG00000168938_4 (sequence is synthesized)
tggcattgggtgggtcagcatggccaacgctgggcctgacaccaatggctctcagttctttatcaccttgaccaagcccacctggttggacggcaaacatgtggtgtttggaaaagtcat

SEQ ID NO: 555780 - DNA, 120 bp, Artificial Sequence
  ENSG00000168938_5 (sequence is synthesized)
atgggcatgaccgtccactcaccaactgctcgatcatcaacagtggcaagatagacgtgaaaacgccttttgtggttgagatcgctgattggtgacacaactggcagaaaacaaggatat

SEQ ID NO: 555781 - DNA, 120 bp, Artificial Sequence
  ENSG00000168938_6 (sequence is synthesized)
gtgtgtgtgtgtgtgtgtgtgttgtgttgtctttcaattatttgcttttttttttttactttctttttgtattctatcccagatcacaggaaagttataaaaatcaaaccgtcacccttt

SEQ ID NO: 555782 - DNA, 120 bp, Artificial Sequence
  ENSG00000168938_7 (sequence is synthesized)
aaatcaaaccgtcaccctttagtttgcttgaactttagtaaaccacctgcttagggactttgaacttaaatatatccccttcctcaagtggtgctattttaaaactaaaaaaaactttga

SEQ ID NO: 555783 - DNA, 120 bp, Artificial Sequence
  ENSG00000168938_8 (sequence is synthesized)
attggctatttttttaatgcaatattttttttctgaattcattatgatccccatattgggtaatgctgaacatttatctgaaacagatgaggatattattattttgtatccaaacagaaa

SEQ ID NO: 555784 - DNA, 120 bp, Artificial Sequence
  ENSG00000168938_9 (sequence is synthesized)
ttcagataaagggaaatttgactagtgtaatctgagatatgtcatagggatttctttctgacaaaagggtgctttgctgttctttatattaaatacttttagatcaactctttttgcaag

SEQ ID NO: 555785 - DNA, 120 bp, Artificial Sequence
  ENSG00000168938_10 (sequence is synthesized)
actttttaaaaatgtaaagttctttaagaaatatacaaaaatacacacactctagcattaacagtgaacagattagaaagattttataaatcaaactacaaacataattagataactcag

SEQ ID NO: 555786 - DNA, 120 bp, Artificial Sequence
  ENSG00000168938_11 (sequence is synthesized)
gggtcttctttctttgaagccaaatataaagatgtcatctgagaaaataagtattaaattagtatgtcagatgaaccttaccacatttgactttattttccaattaaatatgtattattt

SEQ ID NO: 555787 - DNA, 120 bp, Artificial Sequence
  ENSG00000168938_12 (sequence is synthesized)
tttgctctcttttaacttattcacattaatactctacttccataacatatttattttttggtcagctaatgataaatttctctcagtaaaccatagctgggatagaatcaagttctgtag

SEQ ID NO: 555788 - DNA, 120 bp, Artificial Sequence
  ENSG00000168938_13 (sequence is synthesized)
gcattttgtttaattttctcagtttgtcctttctagatcaacactgagtttatctttcagtatggcctctgttacttgttattcaactgaagtaatctctttagaaaggatatggatata

SEQ ID NO: 555789 - DNA, 120 bp, Artificial Sequence
  ENSG00000168938_14 (sequence is synthesized)
aaggaagcaagtttcatcgtgtcatcaaggatttcatgattcaaggaggtgacatcaccactggagatggcactgggggtaacgtctttgcatttttcctttcccatttaccaaaccgaa

SEQ ID NO: 555790 - DNA, 120 bp, Artificial Sequence
  ENSG00000168938_15 (sequence is synthesized)
atctaaggttaagccagtatatgaacccagtctgttgaaatccagagctaaggaacacagttgtaaagacgactgtacctctttgagaaggatggagttttggggactcatctagcagca

SEQ ID NO: 555791 - DNA, 120 bp, Artificial Sequence
  ENSG00000168938_16 (sequence is synthesized)
tctcgacaggtatgagggaggcgtccttattttaagcaggattgttttggtgtttattgtctttccgtaattgagatgtattcattttgcagttattaaaataccagactactagtcagt

SEQ ID NO: 555792 - DNA, 88 bp, Artificial Sequence
  ENSG00000168939_0 (sequence is synthesized)
tttgggaaatacgtccatcaagatttagatctgcctgtaaaatctatacaaagtatatgccactacaggtttgactcgccccctcccc

SEQ ID NO: 555793 - DNA, 120 bp, Artificial Sequence
  ENSG00000168939_1 (sequence is synthesized)
ttgttttgtgttttctctgctgtgtcaaagaacaagacagaactatctctgtttctggctccactgcctgccagtgaaggagttttcattcagactttccgaagagaggtggagaaacct

SEQ ID NO: 555794 - DNA, 120 bp, Artificial Sequence
  ENSG00000168939_2 (sequence is synthesized)
aaagactgaggagaagagatcctttgagccagatggggcattagttcttctgcttttctcagcatggataaaccatttcctcaaggattttctcatgtgccctgaaatccatgtaactac

SEQ ID NO: 555795 - DNA, 120 bp, Artificial Sequence
  ENSG00000168939_3 (sequence is synthesized)
aagggctcctctttatcaccataagtgccaccctgacttaaaaccactcagagctaaaaaatcaaggcaaaatggatgctgcggtgacagatgattttcaacaaattctgcctattgaac

SEQ ID NO: 555796 - DNA, 120 bp, Artificial Sequence
  ENSG00000168939_4 (sequence is synthesized)
agctgcgctctactcatgctagcaatgactacgtggaacggcctccagccccctgtaaacaggccctctccagcccttcccttattgtgcaaacccacaagtctgattggtctctggcta

SEQ ID NO: 555797 - DNA, 120 bp, Artificial Sequence
  ENSG00000168939_5 (sequence is synthesized)
ccatgcctacttctctcccccgcagtctcagccagtgccatcaactgcagcccttgcctcagcatctgagccaatctagcattgccagctcaatgtcccatagcaccactgcctctgatc

SEQ ID NO: 555798 - DNA, 120 bp, Artificial Sequence
  ENSG00000168939_6 (sequence is synthesized)
aaaggctcttggccagcattacaccctcaccttcaggccaatccatcatccgaacccaacctggagcaggggtccacccaaaggctgatggtgctctgaagggagaagctgagcaatctg

SEQ ID NO: 555799 - DNA, 120 bp, Artificial Sequence
  ENSG00000168939_7 (sequence is synthesized)
cagggcaccctagtgagcacctcttcatctgtgaggaatgtgggcgctgcaagtgcgtcccctgcacagcagctcgccctctcccctcctgctggctgtgcaaccagcgctgcctttgct

SEQ ID NO: 555800 - DNA, 120 bp, Artificial Sequence
  ENSG00000168939_8 (sequence is synthesized)
ctgctgagagcctcctcgattatggcacttgtctctgctgtgtcaagggcctcttctaccactgctccactgatgatgaagacaactgtgctgatgagccctgctcttgtgggcctagtt

SEQ ID NO: 555801 - DNA, 120 bp, Artificial Sequence
  ENSG00000168939_9 (sequence is synthesized)
cttgctttgtccgctgggcagccatgagcctcatctccctcttcctaccctgcctgtgctgctacctgcctacccgtggatgcctccatctgtgccaacagggctatgatagcctccggc

SEQ ID NO: 555802 - DNA, 120 bp, Artificial Sequence
  ENSG00000168939_10 (sequence is synthesized)
gaccaggctgccgctgcaagaggcacaccaacactgtgtgcagaaagatctcttctggtagtgcacccttccccaaggcccaggaaaagtctgtatgaccttccaacaaggtggatccag

SEQ ID NO: 555803 - DNA, 120 bp, Artificial Sequence
  ENSG00000168939_11 (sequence is synthesized)
agcttttctccttcgagtccccaacagcaaagcataggcctcatctttggagagggggaggagtgataaactagccaaagttagggcctctcttttgttcctgcagtgtcaggggaatga

SEQ ID NO: 555804 - DNA, 120 bp, Artificial Sequence
  ENSG00000168939_12 (sequence is synthesized)
ccaagtacatcctggtgcaggatgccttgttctttctcacagtatctatcccactcctcttcagtctttacaccctgccagctcagcctttatggttgtcatggcaaattcaggtgatat

SEQ ID NO: 555805 - DNA, 120 bp, Artificial Sequence
  ENSG00000168939_13 (sequence is synthesized)
atgggtatgaggtttgaacactgaggactgacagggccagcaacgtggaggtttaggggctccccaatgtaatacctctcgatgcaggctctgatcgtcactctgttttctgctgtgcct

SEQ ID NO: 555806 - DNA, 120 bp, Artificial Sequence
  ENSG00000168939_14 (sequence is synthesized)
ttggaagctttcttctaagatggttttcacaggtacatgtggaacagcgttcaaccttccagggaatacgaccccttctccctgttactgcccttctcttctttattcctctctcctctt

SEQ ID NO: 555807 - DNA, 120 bp, Artificial Sequence
  ENSG00000168939_15 (sequence is synthesized)
tcattattctgttctgtattcctttccccttcattctcaccctgtctgcttttactttttctctttcttcctccctttctccttctcccctccttctttttcagactgatcctttctctg

SEQ ID NO: 555808 - DNA, 120 bp, Artificial Sequence
  ENSG00000168939_16 (sequence is synthesized)
cctgtatttctatctcatttgatctatatttgtctctctctacctgtccctttttctctaacatgtccaaaagtgctgtttttccatagatgtttccttagatgccaaactttgctatgc

SEQ ID NO: 555809 - DNA, 120 bp, Artificial Sequence
  ENSG00000168939_17 (sequence is synthesized)
tatactatttactaatttttattaagggaaatggattactgtaatgaactgatcactagcaatagtgtgtatcccgatgtgtgtgtgtgctcacaaccactctcacctgttcgtgagcgc

SEQ ID NO: 555810 - DNA, 120 bp, Artificial Sequence
  ENSG00000168939_18 (sequence is synthesized)
atgaggcgaagttatcttatatttccaggtttaactagttggagtttttctccctttctcaataatcaacttatagtgctgacagattccactagcatgctgagtaggatagtaaatcag

SEQ ID NO: 555811 - DNA, 120 bp, Artificial Sequence
  ENSG00000168939_19 (sequence is synthesized)
gatgctcataactttgtatgtctgacccaagtgccaaaggcagacgtgctttatagctaaatgaacaaagcaaaggatacagaggtatgttctctcttagaagctaacttccctgagact

SEQ ID NO: 555812 - DNA, 120 bp, Artificial Sequence
  ENSG00000168939_20 (sequence is synthesized)
gcatggctcaggcgttaataatggacataaaaagtcataaaacgttagagctggaaggaatcttaactattaatctagttcaatgcccttattttacagatgggaaaactgaggcctgga

SEQ ID NO: 555813 - DNA, 120 bp, Artificial Sequence
  ENSG00000168939_21 (sequence is synthesized)
ggtaggaagggacttgcccccaaggccgcacactgagttaacagcagaattgagactggaatataggccttctgactcctagttcagtattcttacccctgtaccacattgagtcatggg

SEQ ID NO: 555814 - DNA, 120 bp, Artificial Sequence
  ENSG00000168939_22 (sequence is synthesized)
actttttcctagggctctattaacagtgacagaaagccattcccattcaattacttttcaggaaccatgcctagttagtgtggtggtctttctccagtgcatggtgggtagctaattaac

SEQ ID NO: 555815 - DNA, 120 bp, Artificial Sequence
  ENSG00000168939_23 (sequence is synthesized)
tatcaggtgttgaggctgcccccagtggacatcacctttggctctgtcaccttgtagaagctcaagtgtggaaaagaaaagcttaaagaagccctaaccaagctgtatcttcgccattgc

SEQ ID NO: 555816 - DNA, 120 bp, Artificial Sequence
  ENSG00000168939_24 (sequence is synthesized)
atctactctttgctgcacacactgtgcttgctcctggctttgtctgcaatggcagctgcctgagaacttaaatttcagcaacagtgaaaaactgagatgaaagatgtataatgtagagaa

SEQ ID NO: 555817 - DNA, 120 bp, Artificial Sequence
  ENSG00000168939_25 (sequence is synthesized)
ctgacttctctcttaaaaagtacagagagcctgtgctgtgaacccccttcaatgggaaaaagctgcagtggtgatggcaggctcctaaagactgctgctaaaagacacaagaattataca

SEQ ID NO: 555818 - DNA, 120 bp, Artificial Sequence
  ENSG00000168939_26 (sequence is synthesized)
gtttccctctataagtgaatccaaaattcactgacgaattcagagattgagggcacttgcttgaaatcaaggtgctccaacttagtttaagacctccagactctaactttatagatcatc

SEQ ID NO: 555819 - DNA, 120 bp, Artificial Sequence
  ENSG00000168939_27 (sequence is synthesized)
tcttctagagtgtgcatggatgtgtgttgcagggtggagaagtggggagaagtgtatagtagtacacggggggaagaggggacctccatgtccctttgttggatacatattacagaaata

SEQ ID NO: 555820 - DNA, 120 bp, Artificial Sequence
  ENSG00000168939_28 (sequence is synthesized)
tgtgccactcactttttgttggttctgaatcttcctgaagtgtactgacatttgggctgcacagagccccacaccttcacttacacctcctcttctagaattgctttgctctatttttgt

SEQ ID NO: 555821 - DNA, 120 bp, Artificial Sequence
  ENSG00000168939_29 (sequence is synthesized)
atatataaatatgttatgatgattattaataatgttaatgatattgctgcaaatggtgccatatataaggttaggcttcttggaacatttataaacccaaaccaatacctgtaacctctt

SEQ ID NO: 555822 - DNA, 120 bp, Artificial Sequence
  ENSG00000168939_30 (sequence is synthesized)
atgttgctttcagatccttcaattttaagtaactttttaatcttacaagtctgcttgattgtactttacacttatctaccctgaaaagctctgcccagttctctgggtcaagctggatgg

SEQ ID NO: 555823 - DNA, 120 bp, Artificial Sequence
  ENSG00000168939_31 (sequence is synthesized)
tgatgagtagcaacacacacttctctgcttctgcctgaaatgtgcttagagctcagttatctaaggattctctgacactagtgcattgttcctggagctaaattattctatggatgtttg

SEQ ID NO: 555824 - DNA, 120 bp, Artificial Sequence
  ENSG00000168939_32 (sequence is synthesized)
cttattagtttcaggccccaaaataacacgagcccctcctccttgatagctccttgatatcccaatcttgcagtcctaactcaggcaaattgtgcactgccagaggggccctgggttctg

SEQ ID NO: 555825 - DNA, 120 bp, Artificial Sequence
  ENSG00000168939_33 (sequence is synthesized)
ccatatacccagaggagcctttctcagtgtgtttctaaatggccttacacttggtagaagaaattgaagggttactcaaatacagttgcaatctgcaatctgctgttgagtcagggcttt

SEQ ID NO: 555826 - DNA, 120 bp, Artificial Sequence
  ENSG00000168939_34 (sequence is synthesized)
cacttgtgtccaagttggcctgatatggactgcatctgctttacgtatagatgggtcctgttgggatatgcgcatggacgtgtgagtgagtgtgcgtatgtatcccttctgtgattatat

SEQ ID NO: 555827 - DNA, 120 bp, Artificial Sequence
  ENSG00000168939_35 (sequence is synthesized)
atattcacacatctctatatattttaatgtattgcacatgtatatttaaaatatatacgaaagaactctaaatcctgcagggaggctctgttttcattatttttctactttgtgtcatgt

SEQ ID NO: 555828 - DNA, 120 bp, Artificial Sequence
  ENSG00000168939_36 (sequence is synthesized)
cctgtataaacaggaatatttagagggtgtttcctgcttagcatttttttgcagttaaatcatctgttagcccctaactctactgccttccacatattggttccttgatacatttcatat

SEQ ID NO: 555829 - DNA, 120 bp, Artificial Sequence
  ENSG00000168939_37 (sequence is synthesized)
cctgtggttccagcccatcttccctaatcacaatagcaataataaatatagtgaatacttacatagtgcttactatatgctaagcactatttttagcatgttatttatattagctcattc

SEQ ID NO: 555830 - DNA, 120 bp, Artificial Sequence
  ENSG00000168939_38 (sequence is synthesized)
attcctcacaattctacaacataggtatcattccaacctctattttacagatgagaaaactgaagcacagagaagttaagtgacttgccaaaaggtaacaattgtaaatggtagagctaa

SEQ ID NO: 555831 - DNA, 120 bp, Artificial Sequence
  ENSG00000168939_39 (sequence is synthesized)
gatttgaacccagggtgtctgactcccaggtccatgctccagagtcagatatagaaggctggagcacagtgtaaaccattctggagtaacaagcctcaaatggtgaataattctttccct

SEQ ID NO: 555832 - DNA, 120 bp, Artificial Sequence
  ENSG00000168939_40 (sequence is synthesized)
aactctggtccacctgcaacctaggagttaaaataagtatcttgctatgttaagagtaaagcaatagttacaggcatcatatattagctgtcttgctcccaaaatggtgacattacaaac

SEQ ID NO: 555833 - DNA, 120 bp, Artificial Sequence
  ENSG00000168939_41 (sequence is synthesized)
ttttccactattccctttgaaaacatgcttgcagccagttaccatttcttagcttatgatgtagagctattaagggagtattttcacttgtgccaaagagggtaagcgtttattagcctt

SEQ ID NO: 555834 - DNA, 120 bp, Artificial Sequence
  ENSG00000168939_42 (sequence is synthesized)
atctttattggccagggaaaactaattcaatttttttttgaacaaagtataactgagactatttttggagcttaagatttgttagagctgttaacattcaaccttattgattatattgag

SEQ ID NO: 555835 - DNA, 120 bp, Artificial Sequence
  ENSG00000168939_43 (sequence is synthesized)
agcgctcttctgattcaaatgtaagcaaaccactgatgaccactggtccgtataacacattttaccaacagctccttcacactgaatcctttaacttggccaaaggacccttaaagaaca

SEQ ID NO: 555836 - DNA, 120 bp, Artificial Sequence
  ENSG00000168939_44 (sequence is synthesized)
tctagtccaatgtcaacattttatagctggagaaagggatgcacagagagggaaaataacctgtccaaagtcacacagttctgaaaattgagtggaattatgactttataccagagttcc

SEQ ID NO: 555837 - DNA, 120 bp, Artificial Sequence
  ENSG00000168939_45 (sequence is synthesized)
taatttccaggtatcttagcctcagtttcttaaaaaatagagtttgaagcaaaagctatgtacgatccagggtagtatgagtaaggaaagggttaatgagggagggaagaaagaagaaca

SEQ ID NO: 555838 - DNA, 120 bp, Artificial Sequence
  ENSG00000168939_46 (sequence is synthesized)
aataaaaagcatgtcactgagttggccacagtctgttccttggcaagctaatttcgcaattttttgtgacagaccatataaaactactacatctccatacagcccacgtggtggaggaaa

SEQ ID NO: 555839 - DNA, 120 bp, Artificial Sequence
  ENSG00000168939_47 (sequence is synthesized)
ggaggtgaattcatctgctagctctcatctcattagtcaaattcttccccatgtgatatttacccttctacatttttgggtagtgcgtgatgggcacttaaatatgtaccttggcatttc

SEQ ID NO: 555840 - DNA, 120 bp, Artificial Sequence
  ENSG00000168939_48 (sequence is synthesized)
atgcttcagcaataatgggaaggattgtggctccactataaacagtaaggcaagtatatgaatatagggagattaaatttaaagtgctacactagggtggtgcttttaccttatgtcttt

SEQ ID NO: 555841 - DNA, 120 bp, Artificial Sequence
  ENSG00000168939_49 (sequence is synthesized)
aatcacattccttcgaagtaagttagagataacctaccacctttaaagtaaataaagctttattgtggctcttagaactgtactatgtttgccttcctgaacctatttattctctagctt

SEQ ID NO: 555842 - DNA, 120 bp, Artificial Sequence
  ENSG00000168939_50 (sequence is synthesized)
gctttaaagggcttcttttttatatggaaattaattccctgttcaattaaaggagtaacaaactctcaaaatatctttcttcttaatataaaaaggaatttcatattattgaactcctca

SEQ ID NO: 555843 - DNA, 120 bp, Artificial Sequence
  ENSG00000168939_51 (sequence is synthesized)
aaaagcatgtgtaagtcaaaatatgtatgtgaaggcacatatgttcttttaggttccatgagcataatagcaggaaaactggttaagtcaataaatgctggggaaaaaatggctaaacaa

SEQ ID NO: 555844 - DNA, 120 bp, Artificial Sequence
  ENSG00000168939_52 (sequence is synthesized)
ggtattctgtaacatgaaaataaagcaatgagttggttggctggctttttaaaaaatatttcagccactaattatgacacagacacattataagaattatgctaccttttattcacatat

SEQ ID NO: 555845 - DNA, 120 bp, Artificial Sequence
  ENSG00000168939_53 (sequence is synthesized)
acaatagttccctgtgtcctatagatcattgtcacataaagcaaaagcattagtgccccatttggacctttggccgaaggtttgataagattttgtaggactgaaattcttggtcccttt

SEQ ID NO: 555846 - DNA, 120 bp, Artificial Sequence
  ENSG00000168939_54 (sequence is synthesized)
atcctagtttaggcccatatccttattttcactctcaaagataagatcatgacactaccagtgttgctgctgttaaaggccaggatggacaagataaggaaaggcattttgggaatgaca

SEQ ID NO: 555847 - DNA, 120 bp, Artificial Sequence
  ENSG00000168939_55 (sequence is synthesized)
ctgactaatgttaggaatcttgctgtcattacaatccaagttatatatgtttgctcccatatgtatttgttggccaatctcctgaaaaagaagaaggtaattctaacccacacattgtca

SEQ ID NO: 555848 - DNA, 120 bp, Artificial Sequence
  ENSG00000168939_56 (sequence is synthesized)
ttcccaaactaacctggcaatccttttgaccataccaggtaatagtcatccctctgatggtaaaagacagagatgtcaaggctctggaagctcccaggtccttgaagaactaactaaact

SEQ ID NO: 555849 - DNA, 120 bp, Artificial Sequence
  ENSG00000168939_57 (sequence is synthesized)
gctgaacacagaagtggtaatgtaggcaagccacaggtatgttctcttgtaacaagatggggttgaccatatgtgaaccctgaagagtcattttgaacctgtgtcctaaggcctagagta

SEQ ID NO: 555850 - DNA, 120 bp, Artificial Sequence
  ENSG00000168939_58 (sequence is synthesized)
ctttaatcctcatcttcaaagtcttaccactctgataacaaaaagaaacactacaaagaaactgcaaggaaagggacagtcattttttttaatatctaccaattatttagttattcatat

SEQ ID NO: 555851 - DNA, 120 bp, Artificial Sequence
  ENSG00000168939_59 (sequence is synthesized)
atgcatttctttatatagaaaagtatttatatgaagtttccaaaagactctgatattcagctttatagtcttggatagaaaatcatgtgtccttggatggggattcacacaccaaggctt

SEQ ID NO: 555852 - DNA, 120 bp, Artificial Sequence
  ENSG00000168939_60 (sequence is synthesized)
aacagaattagtttggggaatactcatttttactctagagattagttggcttaaacaactttactcgtgaatttttttcttaatggaggtgaagacctcccaaagaggagaaggccccag

SEQ ID NO: 555853 - DNA, 120 bp, Artificial Sequence
  ENSG00000168939_61 (sequence is synthesized)
gcctttcttaatatataaaccatattgaaagaaagaaagaaaaaagtaatgggaagtaatagtaaatgtggatccagaaagaaaaacaaaggttaagaaaatgatgtatgtgaaagaaaa

SEQ ID NO: 555854 - DNA, 120 bp, Artificial Sequence
  ENSG00000168939_62 (sequence is synthesized)
aaagctctataatcagtgtgtttctctcacctaaaacaccatttactaactacttggttcagttgtaccctttaactctattttgtccttgacttatatcaacactcttcttttccaaac

SEQ ID NO: 555855 - DNA, 120 bp, Artificial Sequence
  ENSG00000168939_63 (sequence is synthesized)
tcctatagctctccatctggaatgattctatggggtggggggtcgggggaggagaaagggagacagcagaagaaagaaagagagagaaagatagagagagagagagagatgggtggagac

SEQ ID NO: 555856 - DNA, 120 bp, Artificial Sequence
  ENSG00000168939_64 (sequence is synthesized)
ttggcctctctcctagaggttcaaagttagaatatgccactaacactatctgcctttcaaactcccttctaggacatgctccatagtacttagatcttatatcaaatgacaaggtttctc

SEQ ID NO: 555857 - DNA, 120 bp, Artificial Sequence
  ENSG00000168939_65 (sequence is synthesized)
tccttcagagagaaataccagactggatttgtggtttccctggattggttttttctgagtcaaagtggtgttgtagaaatcacagtaccctgagaccaattaagtcagaatctttggagg

SEQ ID NO: 555858 - DNA, 120 bp, Artificial Sequence
  ENSG00000168939_66 (sequence is synthesized)
tgttgaggaatggatttttaaagttcccagatgattataatatgcaaacagatttgagaaaattgaatcactttattccataaatgcagatagtgaggctaagagagggaaagtgactta

SEQ ID NO: 555859 - DNA, 120 bp, Artificial Sequence
  ENSG00000168939_67 (sequence is synthesized)
ctcataaccacaccgtgagttagtgaccaagtcaggataagaatccaggtctgctgactcctaggccagaattcttgtctttatactacactgcttctatctctaccctattccccctct

SEQ ID NO: 555860 - DNA, 120 bp, Artificial Sequence
  ENSG00000168939_68 (sequence is synthesized)
gagcctttgcttttctcatctgtaaaatgacgataataaagcctagagagtgtatgagaatcattaaagcagaagcatttttcttaatgtacaaggttctatacaaatgcaagggaatta

SEQ ID NO: 555861 - DNA, 120 bp, Artificial Sequence
  ENSG00000168939_69 (sequence is synthesized)
atgtataacatatatgtggggctaagtctctaaaacaacataataaaagttgtttttattttagtcaatcttttaggtattgtgtctacctgatagcatgtaacaagattgaacacttgt

SEQ ID NO: 555862 - DNA, 120 bp, Artificial Sequence
  ENSG00000168939_70 (sequence is synthesized)
gtaggtcgtatgtgcctttaatctgaggttggcctcagtgacaatcaaaattagcagttgaggaaaaaggtcatacatttttctcttgcccttgctggaatagggatcaagaggaatata

SEQ ID NO: 555863 - DNA, 120 bp, Artificial Sequence
  ENSG00000168939_71 (sequence is synthesized)
aaagcagtgggatatctggatttcttatactcagtcaaccacaacatggccttagtactgaactagcccagggtttcaatggaactcgtagatctcattcccaaggctggtcctggttga

SEQ ID NO: 555864 - DNA, 120 bp, Artificial Sequence
  ENSG00000168939_72 (sequence is synthesized)
agggagaaggtcaaaaaaggacgtgtcttctgaaaggcattacccatggaaagccaagggggagggttgcccactaggaggagcttcttttgtagaagccagaatggaggaaaggggctt

SEQ ID NO: 555865 - DNA, 120 bp, Artificial Sequence
  ENSG00000168939_73 (sequence is synthesized)
tctgacttggagcatctgaggaaatagattatttgaggatctagtactcccagaataatctgtaaccacaagaaacacatttcttgaactccagcgccccagaacaggatatccatatcc

SEQ ID NO: 555866 - DNA, 120 bp, Artificial Sequence
  ENSG00000168939_74 (sequence is synthesized)
aatcccatcgtatccatcctggatgttatgaatttccagagagggccacttctacccccctaggagtcatacatctggctacttatttgttaaaaataaaattctgtaccatttataaaa

SEQ ID NO: 555867 - DNA, 120 bp, Artificial Sequence
  ENSG00000168944_0 (sequence is synthesized)
agcggctacgcaggcggcaaaaggtcctcgggtggcgggcttgtctctgcttgcagactggcagggctgcagcgtggctttttccttgagtcggggcacagttaggatctgggctggcgg

SEQ ID NO: 555868 - DNA, 120 bp, Artificial Sequence
  ENSG00000168944_1 (sequence is synthesized)
cgggcgcgctgcagcagacggcggtgggacctggctgcggagcggggtccgggcatcagggaccgggggcgggcagtgggggtcccgccgggggtcccggattacccgcgactcaactgg

SEQ ID NO: 555869 - DNA, 120 bp, Artificial Sequence
  ENSG00000168944_2 (sequence is synthesized)
cccgcgactcaactggacctcacttccccccagccgccttcgcccccggaccgctcaccgcaaccatggtctccaaatccgaccaattgctcatcgtcgtgtccatcctagaaggtcggc

SEQ ID NO: 555870 - DNA, 120 bp, Artificial Sequence
  ENSG00000168944_3 (sequence is synthesized)
atttccccaaacgtccaaagcatatgcttgtagtggaagcaaagtttgatggagaacagttggctactgatcctgtggaccacactgaccagccagaatttgctactgagttagcttggg

SEQ ID NO: 555871 - DNA, 120 bp, Artificial Sequence
  ENSG00000168944_4 (sequence is synthesized)
aaattgacaggaaagcgcttcatcagcacaggctacagcgtactcctatcaaactccaatgttttgccttggatcctgtaacttcagccaaggaaaccataggttacatcgttctggatt

SEQ ID NO: 555872 - DNA, 120 bp, Artificial Sequence
  ENSG00000168944_5 (sequence is synthesized)
taagaaccgctcaagaaacaaagcaggcaccaaaatggtaccagttgctgagtaataaatacaccaaattcaagtctgagatacagataagtattgctttggaaaccgatacaaagccac

SEQ ID NO: 555873 - DNA, 120 bp, Artificial Sequence
  ENSG00000168944_6 (sequence is synthesized)
cagtggatagctttaaagcaaagggggctccccctcgagatggaaaagtacctgccatcctggctggacttgaccccagggacattgtggctgtgctgaatgaagagggaggctaccatc

SEQ ID NO: 555874 - DNA, 120 bp, Artificial Sequence
  ENSG00000168944_7 (sequence is synthesized)
agattggaccagcagaatactgtactgactcctttattatgtcagtgaccatagcatttgctacccagttggaacagttaattccatgtaccatgaaacttccagaaagacagcctgagt

SEQ ID NO: 555875 - DNA, 120 bp, Artificial Sequence
  ENSG00000168944_8 (sequence is synthesized)
ttttcttttactactctttactgggaaatgatgttacaaatgaacccttcaatgatttaatcaacccaaactttgagccagagagagcatcagttcgcatccgtagcagtgtagaaattc

SEQ ID NO: 555876 - DNA, 120 bp, Artificial Sequence
  ENSG00000168944_9 (sequence is synthesized)
ttcgtgtttacctggctcttcagtctaaactgcagattcacctctgctgtggagaccagtcacttggaagtacagaaatacctttaactggattacttaaaaagggcagtacagaaatca

SEQ ID NO: 555877 - DNA, 120 bp, Artificial Sequence
  ENSG00000168944_10 (sequence is synthesized)
accagcacccagtcacagtcgaaggtgcttttacccttgaccctccaaacagagccaaacagaagcttgcacctattcctgtggagctagccccaactgtgggagtgtctgtggctctgc

SEQ ID NO: 555878 - DNA, 120 bp, Artificial Sequence
  ENSG00000168944_11 (sequence is synthesized)
agagagaaggcatagactcccagtctttaattgaattaaagacccagaatgaacatgagccagagcattcaaagaagaaagttttaacccccataaaggagaagacacttactgggccaa

SEQ ID NO: 555879 - DNA, 120 bp, Artificial Sequence
  ENSG00000168944_12 (sequence is synthesized)
aatcaccaacagtgtcccctgttccatctcacaaccagtcacctccaacaaaagatgatgcaacagaaagtgaagtggaaagtttacagtatgataaggacaccaaaccaaatccaaaag

SEQ ID NO: 555880 - DNA, 120 bp, Artificial Sequence
  ENSG00000168944_13 (sequence is synthesized)
ccagttcttctgtacctgcttcactggcccagctagtgactacatccaatgcttcagaagtagcttcaggacagaagattgctgtaccagcaacatcacatcatttttgcttttcaatag

SEQ ID NO: 555881 - DNA, 120 bp, Artificial Sequence
  ENSG00000168944_14 (sequence is synthesized)
acttaaggagtatacatgccttggagattggttttccaatcaactgtatattaaggtactcatatccattctttggaagtgcagctcctattatgactaatcctcctgtagaagttcgga

SEQ ID NO: 555882 - DNA, 120 bp, Artificial Sequence
  ENSG00000168944_15 (sequence is synthesized)
aaaacatggaagtttttcttccccagtcttactgtgcatttgattttgcaactatgcctcatcagctgcaagacaccttcttaaggattccattactggttgaactatggcacaaggata

SEQ ID NO: 555883 - DNA, 120 bp, Artificial Sequence
  ENSG00000168944_16 (sequence is synthesized)
aaatgagtaaagatttacttctgggaattgcgagaatccagctttctaacatcttgtcttcagaaaaaactcgttttttaggttctaatggtgaacagtgttggcgtcaaacttacagtg

SEQ ID NO: 555884 - DNA, 120 bp, Artificial Sequence
  ENSG00000168944_17 (sequence is synthesized)
aaagtgtgcctgttatagcagcacaaggatcaaataacaggatagcagatctttcttacacagtgactctagaagattatggactagtaaaaatgcgtgagatttttatctctgattcat

SEQ ID NO: 555885 - DNA, 120 bp, Artificial Sequence
  ENSG00000168944_18 (sequence is synthesized)
ctcagggtgtatctgccgtacagcaaaagccgtcttctcttcctccagcaccttgtccttcagagatccagacagagcctcgtgaaacgttagaatacaaagcagcacttgagctagaaa

SEQ ID NO: 555886 - DNA, 120 bp, Artificial Sequence
  ENSG00000168944_19 (sequence is synthesized)
tgtggaaggagatgcaagaagatatatttgaaaatcagctgaagcagaaagaactggctcatatgcaggctcttgcagaggaatggaagaaaagggaccgagaaagagaatcactagtaa

SEQ ID NO: 555887 - DNA, 120 bp, Artificial Sequence
  ENSG00000168944_20 (sequence is synthesized)
gcttcaaagagaaaaaaaggaactgcaatcagaacgtcagcggaacctgcaagaactgcaggactctatccgtagggccaaagaggactgtattcaccaagtagaactagaaaggttaaa

SEQ ID NO: 555888 - DNA, 120 bp, Artificial Sequence
  ENSG00000168944_21 (sequence is synthesized)
aatcaaacagctcgaagaggataaacaccgccttcagcaacagcttaatgatgctgaaaataagtataagattttggaaaaagagttccaacagttcaaggaccagcaaaacaacaaacc

SEQ ID NO: 555889 - DNA, 120 bp, Artificial Sequence
  ENSG00000168944_22 (sequence is synthesized)
agaaatccgtctacagtctgaaataaatcttctcaccttggaaaaggttgaacttgaaagaaagttggaatctgcaactaagtctaaactgcattacaagcagcagtggggacgagcttt

SEQ ID NO: 555890 - DNA, 120 bp, Artificial Sequence
  ENSG00000168944_23 (sequence is synthesized)
gaaagaacttgccagacttaaacagagggagcaagaaagtcaaatggctcgtcttaaaaaacagcaggaagaattggaacagatgagactacgttaccttgccgctgaggaaaaagatac

SEQ ID NO: 555891 - DNA, 120 bp, Artificial Sequence
  ENSG00000168944_24 (sequence is synthesized)
agtaaaaaccgagcgacaagaattgttggatataagaaatgaattgaacaggttaaggcaacaagagcaaaaacaataccaggattccacagagattgcaagtggaaaaaaggatggccc

SEQ ID NO: 555892 - DNA, 120 bp, Artificial Sequence
  ENSG00000168944_25 (sequence is synthesized)
ccatggcagtgtattggaagaaggtttggatgattatttgactcgcctgatagaagaaagggatactttgatgagaacgggtgtgtataatcacgaggatcgaataataagtgaactcga

SEQ ID NO: 555893 - DNA, 120 bp, Artificial Sequence
  ENSG00000168944_26 (sequence is synthesized)
ccgacagatcagagagattttggcaaaaagcaatgccagtaattaataacatttggaaaagctttatagagactctaagtctaaattttaatttctttgtaaaaacctcaaaagtgagga

SEQ ID NO: 555894 - DNA, 120 bp, Artificial Sequence
  ENSG00000168944_27 (sequence is synthesized)
aaatggatgttttaaaatggtattttcaattttttataagcaaaattttgtatgttattgtatagtatttatttgatcttatttactttatgctacctctcccacactggttttatttgt

SEQ ID NO: 555895 - DNA, 120 bp, Artificial Sequence
  ENSG00000168944_28 (sequence is synthesized)
aatttgcatttatatactcattttaaatgacttttcagtgtttttcatagtttataatctgatggctaactaactttcaaaacagcttttaactaagtttgttgtaggagaaatgactgc

SEQ ID NO: 555896 - DNA, 120 bp, Artificial Sequence
  ENSG00000168944_29 (sequence is synthesized)
ggtaatttccagttctataatgtttcatgttgagccaaaagagtatatcttgcactttaaaaacgctgcgtcctattccatttgaatgtaaattcttaaaagttgagaccaattgtaacc

SEQ ID NO: 555897 - DNA, 120 bp, Artificial Sequence
  ENSG00000168944_30 (sequence is synthesized)
agtttaactcattttagatgacctttttttcttataatatttgcaagtgacaagtttgaaaacaaagcaagatcagtgcagagaagccacatgacatgttgggtgacagattggtcattt

SEQ ID NO: 555898 - DNA, 120 bp, Artificial Sequence
  ENSG00000168944_31 (sequence is synthesized)
atttaaataaagttaatacagattaaatttgtttcaagagctattgaattttcaaattttcagtgtatttataacttttaagaacatgaagtattagcttaatatagttttctctgttgg

SEQ ID NO: 555899 - DNA, 120 bp, Artificial Sequence
  ENSG00000168944_32 (sequence is synthesized)
tttcttcctcaagtttgcattgttttcttttgttaaaattagagatttctttttattttccagttatagtaatactagctgtcagcttaaaccctctgtaatagaacatggaaacagaca

SEQ ID NO: 555900 - DNA, 120 bp, Artificial Sequence
  ENSG00000168944_33 (sequence is synthesized)
cataaagacattagctgaaaaaatagagtgaaaatcaactattttttactcccgctaatttcaatcaatcgttttcaaaagcgcacgagattcactcattggatttatgcagtgccctgt

SEQ ID NO: 555901 - DNA, 120 bp, Artificial Sequence
  ENSG00000168944_34 (sequence is synthesized)
ctgtataaaaactcttaagagttcctttatatcatattcttcagagccaacatttgtcctcaaagcaacgtttcccacctccttttactgagtactgaaaaagttttagcaaagtcacag

SEQ ID NO: 555902 - DNA, 120 bp, Artificial Sequence
  ENSG00000168944_35 (sequence is synthesized)
attaggttgaatttcaaaatatatgtactttaaaaagttctgatttccaaatataataaagttaaaattaagtatatactttaggaagttaccaataacttccatcaaagcagagtagga

SEQ ID NO: 555903 - DNA, 120 bp, Artificial Sequence
  ENSG00000168944_36 (sequence is synthesized)
aggatatatggtaacattaattttcggtcatttcaaatgaggtatatttcttattagggaaattaaagtccctatatttattatatattttttccttattaacagagtattaatctagta

SEQ ID NO: 555904 - DNA, 120 bp, Artificial Sequence
  ENSG00000168944_37 (sequence is synthesized)
ataacccagcagtaaataataaagaaattactgaatgagaggataatgaatctgaatcatagcaggaatttgcaatattaattatggttagctatttttctctcattgatttttgtgcca

SEQ ID NO: 555905 - DNA, 120 bp, Artificial Sequence
  ENSG00000168944_38 (sequence is synthesized)
cttgaatggaacagaagcaagccttatgttttggaaggtctgcggtaaaatgctgtgactgtttactttcaattgcattgtgtgttgcctgtgactgctttcaaacgctagagggggcct

SEQ ID NO: 555906 - DNA, 120 bp, Artificial Sequence
  ENSG00000168944_39 (sequence is synthesized)
ctgatttaaagaaataaaaaggacttttctaaaatggatgtgtagtttattttgccttttgtaaagctcttttggctattgtaacttaacaaataaaatcataattgtgtgcatctctga

SEQ ID NO: 555907 - DNA, 120 bp, Artificial Sequence
  ENSG00000168944_40 (sequence is synthesized)
taccttcataaggatatatttattaatcttaattagtgacctttgttatatgatacctcctttctgaaaagtgctgtgacttctgttatggtttataagtgattctacccagagccctct

SEQ ID NO: 555908 - DNA, 120 bp, Artificial Sequence
  ENSG00000168944_41 (sequence is synthesized)
tctggtcctagatgctataaggaaatttgcaaattacgaagaaaaatagactaggaatatccaaactgggaaaggaagcttatatttttaaaaaacaatgccaagttttttgcttaatta

SEQ ID NO: 555909 - DNA, 120 bp, Artificial Sequence
  ENSG00000168944_42 (sequence is synthesized)
ctgtgtttggggaattgcagagagaaatgtcaccaaagaagttataacatttgttaaatcagtggactaaaagggggtactcatatccattctttggaagtgcagctcctattatgacta

SEQ ID NO: 555910 - DNA, 120 bp, Artificial Sequence
  ENSG00000168944_43 (sequence is synthesized)
ctctttccacctgcctcctggtttaagaaacagagcattatgatgaatgctttggaagccctctgtgtccctttctcaactgtgtcttctctttccagagagggagcaagaaagtcaaat

SEQ ID NO: 555911 - DNA, 120 bp, Artificial Sequence
  ENSG00000168944_44 (sequence is synthesized)
catcttgtgcttactctgtctcagctctggattcagccatttctctaaggagccctgcttcctttcggtaaagaatgatttttagaagccaagatctaggtgctagtacctgccatcctg

SEQ ID NO: 555912 - DNA, 120 bp, Artificial Sequence
  ENSG00000168952_0 (sequence is synthesized)
ggtcccggcccccagcccccagcccctagccgctgctctttgccccgggccagggcgctcgggctcgcccacggcggcactgagcatgctcagaggcggccgcgcgggcaggtttgcttc

SEQ ID NO: 555913 - DNA, 120 bp, Artificial Sequence
  ENSG00000168952_1 (sequence is synthesized)
cgcgcgggcaggtttgcttcgcaggcgctcgcactcggcggcgggcgggcgcgcggctgcagctggagctccagcgcccggagttggagttgccgggagtttccccccaacccctccctt

SEQ ID NO: 555914 - DNA, 120 bp, Artificial Sequence
  ENSG00000168952_2 (sequence is synthesized)
gagtttccccccaacccctcccttttcgcgcgcggcagcaggagccggcgcgggagccgcgagcggcggcgagccagcacccgggccggctaagccttgtccggagcccggagccccgcg

SEQ ID NO: 555915 - DNA, 120 bp, Artificial Sequence
  ENSG00000168952_3 (sequence is synthesized)
ctcgtgctctgggacgcgtgccgcgcactggcacggcaggggcgcgagccaggctgcacgattcactgcgtgctgtcctcacttgttctacaatgagtgccaaatctgctatcagcaagg

SEQ ID NO: 555916 - DNA, 120 bp, Artificial Sequence
  ENSG00000168952_4 (sequence is synthesized)
aaatttttgcacctcttgatgaaaggatgctgggagctgtccaagtcaagaggaggacaaagaaaaagattcctttcttggcaactggaggtcaaggcgaatatttaacttatatctgcc

SEQ ID NO: 555917 - DNA, 120 bp, Artificial Sequence
  ENSG00000168952_5 (sequence is synthesized)
tgtcagtgacaaacaagaaacccacacaggcgtccatcacaaaggtcaaacagtttgaaggctccacatcatttgttcggagatcacagtggatgctcgagcagcttcgccaggttaatg

SEQ ID NO: 555918 - DNA, 120 bp, Artificial Sequence
  ENSG00000168952_6 (sequence is synthesized)
gtatcgatcctaatggggattcggcagagtttgatttgttgtttgaaaatgcttttgaccagtgggtagccagcacagcgtcagaaaaatgcaccttcttccagatcctccaccatacct

SEQ ID NO: 555919 - DNA, 120 bp, Artificial Sequence
  ENSG00000168952_7 (sequence is synthesized)
gccagaggtacctcacggacaggaagccagagtttattaactgccaatccaaaattatgggaggaaacagcatcctccattcagctgctgacagcgtgaccagcgcagtgcagaaggcaa

SEQ ID NO: 555920 - DNA, 120 bp, Artificial Sequence
  ENSG00000168952_8 (sequence is synthesized)
gccaggccttgaatgagcgtggagagcgattaggccgagcagaggagaagacagaagacctgaagaacagcgcccagcagtttgcagaaactgcgcacaagcttgccatgaagcacaaat

SEQ ID NO: 555921 - DNA, 120 bp, Artificial Sequence
  ENSG00000168952_9 (sequence is synthesized)
gttgagaaactgcctatcctggtgactcttcttaagagaaactgaagagtttgttcagcagtttttacaagaattcgggacctccgcttgcttctttttttccaatatttggacacttag

SEQ ID NO: 555922 - DNA, 120 bp, Artificial Sequence
  ENSG00000168952_10 (sequence is synthesized)
agtggtttttgttttttcttttcagatgttaatgtgaaagaaagggtgttgcatttttacatttccctaatgatcttgctaataaatgctacaatagcatcagcttcattttgggttttt

SEQ ID NO: 555923 - DNA, 120 bp, Artificial Sequence
  ENSG00000168952_11 (sequence is synthesized)
gcctcctcccactgtgtgtatgtgtgtatatgtatgttttgaatatgttttctttattaaaaaatattttttgtagtttgaatatgaaatttggaccaaatgataaactgcgctgagtct

SEQ ID NO: 555924 - DNA, 120 bp, Artificial Sequence
  ENSG00000168952_12 (sequence is synthesized)
aaactggcaacatgtatttttttctctgatattaagcaggaaggcattttaatgtggtgacatcagatgttatttttcctagatgaaaataaaagtcaagcagtgattagtttcactcac

SEQ ID NO: 555925 - DNA, 120 bp, Artificial Sequence
  ENSG00000168952_13 (sequence is synthesized)
tgtcctagctacacttaatttgaagattaaaattctacattgtggaaaacaattgaatttattgggaaaaacagcagtcttagattttgctccttgcatagtaatcttttgcatgaacca

SEQ ID NO: 555926 - DNA, 120 bp, Artificial Sequence
  ENSG00000168952_14 (sequence is synthesized)
tcaccagcgttcaaaaaaaaaaaaaaatcagaatcgcagatagaaatctctttcctgagttacagtttaaatactcttgctacttgtatccagggtgtttacttggaattatcatatgaa

SEQ ID NO: 555927 - DNA, 120 bp, Artificial Sequence
  ENSG00000168952_15 (sequence is synthesized)
gggtaaaaatttgagagtaaagccctaaagaaaagcctacctaaaaccctctgtgtactcacagatgtttctcttgtcactgtcatagtgatggtcgctggtatggaaaagtgcttatat

SEQ ID NO: 555928 - DNA, 120 bp, Artificial Sequence
  ENSG00000168952_16 (sequence is synthesized)
ttttatcaaaaaattgatttgtccaggtaaaggtctgtgtcaatgataatgtgaacaagtagtacatttaaaatgtttgtcttgtctttttacagtcatgcctattttagagacaccttc

SEQ ID NO: 555929 - DNA, 120 bp, Artificial Sequence
  ENSG00000168952_17 (sequence is synthesized)
ttttgatgttgtttttgctatctatttatttaatgtaatttaatatgtgagtttcttgacaaattgcatttcatggcaattgcaccttgcctggtctgatataaaacaccacaatcacaa

SEQ ID NO: 555930 - DNA, 120 bp, Artificial Sequence
  ENSG00000168952_18 (sequence is synthesized)
acctttacattgcagtcagtttcaatacagttggtcacacacctcgtgattttctattactcaagataataaggggcttagggtctagaagttctgtttcctagagggttaaaatgctaa

SEQ ID NO: 555931 - DNA, 120 bp, Artificial Sequence
  ENSG00000168952_19 (sequence is synthesized)
acataaaaaaagctgtgctttttttgtgaaactaggagacaagctgcacatctcagacacattgtaagcctaccactgcagcgcattgatttttaagctgcctgaatcttcaggacccct

SEQ ID NO: 555932 - DNA, 120 bp, Artificial Sequence
  ENSG00000168952_20 (sequence is synthesized)
atctattccatcctatccattttgctgattgagtcgatatgtattgcagcctcttacataggagcataagatgacttttggattgttaatactgatttaaatagctgaagttctcctaat

SEQ ID NO: 555933 - DNA, 120 bp, Artificial Sequence
  ENSG00000168952_21 (sequence is synthesized)
aaagcattcccaaggagagagaaagtttgtctactgggggtaaaaatatcagatggtgcacattaaaagggagatgagatttgtcggagacagatttcagaatccttttagatgatccaa

SEQ ID NO: 555934 - DNA, 120 bp, Artificial Sequence
  ENSG00000168952_22 (sequence is synthesized)
ttcaagaaaaccctctataaaatttaataaactgtataagttaactataatattttatactttctttttggtgtcttaaaaatttaaagaagcgaggaacatgccatttggtgagtaccg

SEQ ID NO: 555935 - DNA, 120 bp, Artificial Sequence
  ENSG00000168952_23 (sequence is synthesized)
atgccatttggtgagtaccgttggaagctattttaatttctaggaaaagccccaaatatcactccaaatagattttgtttgcagatctcagttcagaatgcacacacacacacacacaca

SEQ ID NO: 555936 - DNA, 120 bp, Artificial Sequence
  ENSG00000168952_24 (sequence is synthesized)
tgtatttatctttccaaattggattctggtttcagagatagagagttggtataaataattgaaaggataaatctaaaaccccctgacagtccgccaaattcaagaacagaagtggttgcc

SEQ ID NO: 555937 - DNA, 120 bp, Artificial Sequence
  ENSG00000168952_25 (sequence is synthesized)
aactctctaacaacaatgtttgggaagctgattccaaagtagctgaggatgaggtcataagcatactgtgaaacccaagattcttcttccctggtagaattacaatagttactcttgata

SEQ ID NO: 555938 - DNA, 120 bp, Artificial Sequence
  ENSG00000168952_26 (sequence is synthesized)
aatataagtattccatgtcttgccctctttcctcactctctgcttatccttttagacctaagtttcattggaaatagcctgaattagaagaaagcccatccgaatctttattagccccct

SEQ ID NO: 555939 - DNA, 120 bp, Artificial Sequence
  ENSG00000168952_27 (sequence is synthesized)
ctaatgattagtttccaggctgcgttcatacctttgacctctcagtgtcaaagtcctacctaggcctccccacaacagagagggccgtaacagcaatccctgcccctcctttacctccca

SEQ ID NO: 555940 - DNA, 120 bp, Artificial Sequence
  ENSG00000168952_28 (sequence is synthesized)
gcctcttgcagaggagcccagtgataacacatgtgaagttctttgctgtcctcttgtagaaggtgctgcagtgcaaagtattaatacggtcttagacaaaataactgtcatgatttggga

SEQ ID NO: 555941 - DNA, 120 bp, Artificial Sequence
  ENSG00000168952_29 (sequence is synthesized)
ccagtttggttgagcttgtcagaagacatttcatttgtttcatttctgcacttctctatgaattttgggatactatatttctgtgaaggacttattgtatagacaactcaaaaaggaaag

SEQ ID NO: 555942 - DNA, 120 bp, Artificial Sequence
  ENSG00000168952_30 (sequence is synthesized)
aaactttccagtattaccacttcttcctggaatatagctgtagtatttctcactagtattattagatacctgtgtacagaaagtatgcagttattcaggttaatgtttcatattaaagaa

SEQ ID NO: 555943 - DNA, 120 bp, Artificial Sequence
  ENSG00000168952_31 (sequence is synthesized)
tgtatttgtaaaatgtaacatgatcagtagttaccttttttcaagctctgaagaagttcagattacgtgttagacttaagttacagtgaaaactgttttaatactacttttgtggctagc

SEQ ID NO: 555944 - DNA, 120 bp, Artificial Sequence
  ENSG00000168952_32 (sequence is synthesized)
aaaggttgtgcatctatttaaaattatttacaggatgctctaaataaggggcattaaagataggtttagctcttaattttagaaattgtgacactactgatgtctgtcatacagttattc

SEQ ID NO: 555945 - DNA, 120 bp, Artificial Sequence
  ENSG00000168952_33 (sequence is synthesized)
ttcagaagttctctgagatgtcaaatataatttttgtttaattcagagataagtaacacctgctctattgattcactattacaacaaaccctaattttgtcattaaatattttaactctg

SEQ ID NO: 555946 - DNA, 120 bp, Artificial Sequence
  ENSG00000168952_34 (sequence is synthesized)
aaaggtgctttgtgtgtggagttttccatgaagtgcagtcccaactaaaaggctgcgttaaagattcactgcgtgctgtcctcacttgttctacaatgagtgccaaatctgctatcagca

SEQ ID NO: 555947 - DNA, 120 bp, Artificial Sequence
  ENSG00000168952_35 (sequence is synthesized)
ccaggctgcacggtaggaccggggcgaggggagccaggcggtcagggcggaggccaagcccgggagatgcggttgcagccgccacggctgttggggcgcctggcgctccgtccgaggcgg

SEQ ID NO: 555948 - DNA, 120 bp, Artificial Sequence
  ENSG00000168952_36 (sequence is synthesized)
gtggctgtgaggccaggggagtaggcaggctcccagagagattcttccaagttggcgggtggcgggagagggggccgcgcgccccggcgcagctgctttgtgcgcgcagagagggactcg

SEQ ID NO: 555949 - DNA, 120 bp, Artificial Sequence
  ENSG00000168952_37 (sequence is synthesized)
tgtccctggttctctccaaccctgggacccgttgtgcgggcagtattgggcaagccgcagaacggagcgatttcctccgagaaagttgaggatggagcctttttttccgcaccgtccccg

SEQ ID NO: 555950 - DNA, 120 bp, Artificial Sequence
  ENSG00000168952_38 (sequence is synthesized)
cgatggcatgggccccgagaatgctgccccgaggctcccagtgtgggggagctcggggtcgctgcgcctctagcttgagcgcagaaatccgcgaatcactccgatcttcgcgaactctgg

SEQ ID NO: 555951 - DNA, 120 bp, Artificial Sequence
  ENSG00000168952_39 (sequence is synthesized)
catcttctaggaaaatcattactgccaaaactgaggcgagcttttctggcgggcacggcaccctgcccccagggcgctggccctgggcgatgccccctttccgatctcaggcttggtcaa

SEQ ID NO: 555952 - DNA, 120 bp, Artificial Sequence
  ENSG00000168952_40 (sequence is synthesized)
gggcgccaggttccgaattcgcgcttgccgtgcacgccggcatcgagcctcaccaacaccgccgggcaacgtggctggagtagattcactgcgtgctgtcctcacttgttctacaatgag

SEQ ID NO: 555953 - DNA, 120 bp, Artificial Sequence
  ENSG00000168952_41 (sequence is synthesized)
tttcctgtttagaaagttctgctccttcataaggaccttgaagtactaggaggaaaggtgctttgtgtgtggagttttccatgaagtgcagtcccaactaaaaggctgcgttaaaggcta

SEQ ID NO: 555954 - DNA, 120 bp, Artificial Sequence
  ENSG00000168952_42 (sequence is synthesized)
atgaagtgcagtcccaactaaaaggctgcgttaaaggctagagtagtgcagtggcgtgatctcagctcactccagcctctgcctcccgggctcaagtgacccacctgcctcagcctccca

SEQ ID NO: 555955 - DNA, 120 bp, Artificial Sequence
  ENSG00000168952_43 (sequence is synthesized)
gcgagccaggctgcacgaatgtaagctccatgagggaaagtactttgttgctcttcttctcctcagtatcctcagcgttaggacaatgcagtgatattgaatgaattcactgcgtgctgt

SEQ ID NO: 555956 - DNA, 120 bp, Artificial Sequence
  ENSG00000168952_44 (sequence is synthesized)
gaggaaacaaggatggataacctaaaaagcaatgagaagaatattcccagctgagttgcggtgacctcttctggaggctcacgctcaggtccagctggggatccagctctaagtggatga

SEQ ID NO: 555957 - DNA, 120 bp, Artificial Sequence
  ENSG00000168952_45 (sequence is synthesized)
ctcctgccttctcttcctgcatcccctttgcacagcgctgtcttgtcatctcattcattctctgtcgtgacagggtcttactgcactgttgcccgtggggcccatttcgagttccttcaa

SEQ ID NO: 555958 - DNA, 120 bp, Artificial Sequence
  ENSG00000168952_46 (sequence is synthesized)
ggagaattggctagatctatctgaaaatgcagacagccctgctggaggccagagcctcagattgctgctgttggtgcagaggcagagagtgaacttggattgaaggtctccctagttcct

SEQ ID NO: 555959 - DNA, 120 bp, Artificial Sequence
  ENSG00000168952_47 (sequence is synthesized)
tcctcctttctccagcctctgtgacacagagataatgatgacatggaaatgctggcattacagcctcagcttctttaacaacaacagcagcttccgtgatttcagtgggagacggatagt

SEQ ID NO: 555960 - DNA, 120 bp, Artificial Sequence
  ENSG00000168952_48 (sequence is synthesized)
ggaaatctggggaaacatttaagttgttgagttgggtagaggaggctaaagggaataactttataacagtcttcagttctgggaagggtgatggtacaggcatttttctttcatgtcttc

SEQ ID NO: 555961 - DNA, 120 bp, Artificial Sequence
  ENSG00000168952_49 (sequence is synthesized)
ctaaggtggcatagacaatacctggatgtcgtccacgtaggcgtccctcccagagggggctgtacaaacactggattggataacctaaccagatggcctgaattcttggccctggtagcc

SEQ ID NO: 555962 - DNA, 120 bp, Artificial Sequence
  ENSG00000168952_50 (sequence is synthesized)
ctgtttccctgatactgtggccaagtttgcgaggcaattgggaaagcaatatggaatagtagttaacatcttgtgtttgaatatagcgctgtcatttaccatcttggtgaccttgggcaa

SEQ ID NO: 555963 - DNA, 120 bp, Artificial Sequence
  ENSG00000168952_51 (sequence is synthesized)
atgcttaatttctctaagcctcagttttctcatcagtagaatagagcactattctttatgagaatagtacctacgtactagagtgttcagagaattgaatgagttcaaagctattagcac

SEQ ID NO: 555964 - DNA, 120 bp, Artificial Sequence
  ENSG00000168952_52 (sequence is synthesized)
agtatgtagcacatataaatctaaattactattatttgtaatcattttcataaattttttttctactgaccctgccctattcagtcacataatgagcactgtagagggattggagaattg

SEQ ID NO: 555965 - DNA, 120 bp, Artificial Sequence
  ENSG00000168952_53 (sequence is synthesized)
atactggtgattgaggatcctcaacacagggacagggaaggaatggaggagaagattttgtgcctcccaaacccaaagggaaaggggtgtgggagggccctcatgctaaatgttgatact

SEQ ID NO: 555966 - DNA, 120 bp, Artificial Sequence
  ENSG00000168952_54 (sequence is synthesized)
atctaaacacagatcagcccttgaaacaggacccatcaggatagaaactaatgcggccaccaaaggcaaaggggtctctggcttgaccagtgggaaaatttatgcctagcagttacctgc

SEQ ID NO: 555967 - DNA, 120 bp, Artificial Sequence
  ENSG00000168952_55 (sequence is synthesized)
tttcactcgggaggggtgaggcgtggacagcttgtgtttattttggtttcccctccctcaggtcatctcggggggaagaggaggggttactagtgtctgttaatgtgtatgagagtgaga

SEQ ID NO: 555968 - DNA, 120 bp, Artificial Sequence
  ENSG00000168952_56 (sequence is synthesized)
gagtgtcatggccagacttgcagttgtgtgaaactgggatgtgtgcctatgaatcactggcactggcagtattcctaacaagcagattgacctctttagataaggtgtggctattttccc

SEQ ID NO: 555969 - DNA, 120 bp, Artificial Sequence
  ENSG00000168952_57 (sequence is synthesized)
agggaccaggactcttgatttggacctgctagcataggctgaccatgaagctgtcattttactggacaagccacagccaggcctgctggtgaggggagagttcagagatggaacccaagc

SEQ ID NO: 555970 - DNA, 120 bp, Artificial Sequence
  ENSG00000168952_58 (sequence is synthesized)
attctaccccctagacaagcatggctctgttgactcagaaggagtaagctgtgcttacaagtgggggccagaacacatggcagagtcctgagctgaaaatggcaatgccaggtggcagct

SEQ ID NO: 555971 - DNA, 120 bp, Artificial Sequence
  ENSG00000168952_59 (sequence is synthesized)
cctagagctcccagttgaataagggtgccgaaccccagctggagagtttggcacacctttgtagagtccagtagaaaataacttggccttctaacttgttccaggactcctgcagtgacc

SEQ ID NO: 555972 - DNA, 120 bp, Artificial Sequence
  ENSG00000168952_60 (sequence is synthesized)
caggtgcaagagtcaatggatcacttttgcacaaccctgacttcaaaatacgcaggtgcttgttgtctacagtgcagatagaaaatgatccttccgccctgccttcctagactgactccc

SEQ ID NO: 555973 - DNA, 120 bp, Artificial Sequence
  ENSG00000168952_61 (sequence is synthesized)
ccacctccactctggtgagcctggtttgaggaaatgtggtcctttcttgagctccgggcttcatgcaaagttaacctcaggaaagtgcaccacaatcgcagaaacagatctgctcacttt

SEQ ID NO: 555974 - DNA, 120 bp, Artificial Sequence
  ENSG00000168952_62 (sequence is synthesized)
cccttgccaaaaagcacaatgttgcagcagacgcaatgctttgacggccccgccatagtcagtgagtcagtagacaagagcattacccacactcagacatcctcagatgacatttcttgc

SEQ ID NO: 555975 - DNA, 120 bp, Artificial Sequence
  ENSG00000168952_63 (sequence is synthesized)
acagatagaatactggcagaatggaaatgactggcatgtcagtgatgagtttatagagaagcatttaggattttcctaggtcctgcagtcagtgggtgttcttgctgcaagtgcgtcagt

SEQ ID NO: 555976 - DNA, 120 bp, Artificial Sequence
  ENSG00000168952_64 (sequence is synthesized)
caaacccaatcaaaagaaatgtcggcttgtttcctagacactagacgagcggcctttctgcagtgtgacctgccttcctcttacaggatactcaccctgccggagtctggtcactgtggg

SEQ ID NO: 555977 - DNA, 120 bp, Artificial Sequence
  ENSG00000168955_0 (sequence is synthesized)
atagccactttgacaacgtttctgagccaggggtgaccatgacctgctgcgaaggatggacatcctgcaatggattcagcctgctggttctactgctgttaggagtagttctcaatgcga

SEQ ID NO: 555978 - DNA, 120 bp, Artificial Sequence
  ENSG00000168955_1 (sequence is synthesized)
tacctctaattgtcagcttagttgaggaagaccaattttctcaaaaccccatctcttgctttgagtggtggttcccaggaattataggagcaggtctgatggccattccagcaacaacaa

SEQ ID NO: 555979 - DNA, 120 bp, Artificial Sequence
  ENSG00000168955_2 (sequence is synthesized)
tgtccttgacagcaagaaaaagagcgtgctgcaacaacagaactggaatgtttctttcatcacttttcagtgtgatcacagtcattggtgctctgtattgcatgctgatatccatccagg

SEQ ID NO: 555980 - DNA, 120 bp, Artificial Sequence
  ENSG00000168955_3 (sequence is synthesized)
ctctcttaaaaggtcctctcatgtgtaattctccaagcaacagtaatgccaattgtgaattttcattgaaaaacatcagtgacattcatccagaatccttcaacttgcagtggtttttca

SEQ ID NO: 555981 - DNA, 120 bp, Artificial Sequence
  ENSG00000168955_4 (sequence is synthesized)
atgactcttgtgcacctcctactggtttcaataaacccaccagtaacgacaccatggcgagtggctggagagcatctagtttccacttcgattctgaagaaaacaaacataggcttatcc

SEQ ID NO: 555982 - DNA, 120 bp, Artificial Sequence
  ENSG00000168955_5 (sequence is synthesized)
acttctcagtatttttaggtctattgcttgttggaattctggaggtcctgtttgggctcagtcagatagtcatcggtttccttggctgtctgtgtggagtctctaagcgaagaagtcaaa

SEQ ID NO: 555983 - DNA, 120 bp, Artificial Sequence
  ENSG00000168955_6 (sequence is synthesized)
ttgtgtagtttaatgggaataaaatgtaagtatcagtagtttgaattaatttgagaagtacacttgttttcaaagtcatctttgagatgatttaaaaaatcaacccttcacgtagaaagc

SEQ ID NO: 555984 - DNA, 120 bp, Artificial Sequence
  ENSG00000168955_7 (sequence is synthesized)
acgttgtaaatgcataacactctcatatcagtggttgatttgggaaaggtggagagaattttcaattagttttgtgttgtactattcaaattttttacctcttcactgtgtgtagagaaa

SEQ ID NO: 555985 - DNA, 120 bp, Artificial Sequence
  ENSG00000168955_8 (sequence is synthesized)
ttcaaattttttacctcttcactgtgtgtagagaaaggagaagggaaggaggatgagaaggaacggaagtcatcctgaaaataaaagtacaggactttttttttttttttttgagacagg

SEQ ID NO: 555986 - DNA, 76 bp, Artificial Sequence
  ENSG00000168955_9 (sequence is synthesized)
cagggtctcaaaaaaggctggagtacagtagtacagtggtgctatctctctcagcctccctagtagctgggactac

SEQ ID NO: 555987 - DNA, 87 bp, Artificial Sequence
  ENSG00000168955_10 (sequence is synthesized)
acgattacaggcatgagccatcgcgcctaaaggacaggacctttttattgtatttctttaaagaataaatacataacctgaatgcaa

SEQ ID NO: 555988 - DNA, 120 bp, Artificial Sequence
  ENSG00000168955_11 (sequence is synthesized)
ttgtatttctttaaagaataaatacataacctgaatgcaatcaagtctttagatctaattctcagcttgcagggaacactaggacaaatccaaaaagtgggtcagcgggcacagaatggc

SEQ ID NO: 555989 - DNA, 120 bp, Artificial Sequence
  ENSG00000168955_12 (sequence is synthesized)
ccaattttcaacaggaaaatgttataaaagaaaaatatttttgagggaactgttatagattaagagaatagaggcatgtttcagctaaacacatgtaaactttgtcagagataattggga

SEQ ID NO: 555990 - DNA, 120 bp, Artificial Sequence
  ENSG00000168955_13 (sequence is synthesized)
ggagtatgtagaagaatcggattattgttaattttggtaggtctgataatggttttatagtataaaggctgagtaccccttatccaaaatgattaagatcagaagtgttttggctttcac

SEQ ID NO: 555991 - DNA, 120 bp, Artificial Sequence
  ENSG00000168955_14 (sequence is synthesized)
atttttttggattttggaattttgcctataataatgagacatcttggggatgggatgcaagtctaaccacaaaattcatttatgtctcatacacactttgaacacctggcctgaaggtaa

SEQ ID NO: 555992 - DNA, 120 bp, Artificial Sequence
  ENSG00000168955_15 (sequence is synthesized)
tttcacacaatattttaaataactttgtgcatgaaacacaattttgactgcattttgactgcaactcatcacatgaggtcaggtatggaattttccacttgtggtgttacgttactggct

SEQ ID NO: 555993 - DNA, 120 bp, Artificial Sequence
  ENSG00000168955_16 (sequence is synthesized)
caaaaagttttggatctcggagcattctggattttgaatttttggattagtgatgctcaacctgtatacagaaatgtcctcatttttaaaaaaagaaatgcatatttatatgttttaaaa

SEQ ID NO: 555994 - DNA, 120 bp, Artificial Sequence
  ENSG00000168955_17 (sequence is synthesized)
ttacttcaaccaaaagcaacggggagatgtttactgttatatttaggtgacaggtacatggcaattcattataccctcctattttcctatgtttacattattcattaattaaaaaacaat

SEQ ID NO: 555995 - DNA, 120 bp, Artificial Sequence
  ENSG00000168955_18 (sequence is synthesized)
acctagaaaaacccaagactttcaaaagctattttctatatgtgccaatctttaaaaaacaggataacaagggtatttatcacattaaaatgttgtaaaacagcaaagctaaaaatctaa

SEQ ID NO: 555996 - DNA, 120 bp, Artificial Sequence
  ENSG00000168955_19 (sequence is synthesized)
aattttctgaatgttatttctatatttcaattgtttatgttcattgggcttaaggttccagaaataatttgcagtacctacattatagctgcctaaataaatttagtaacatcaagagct

SEQ ID NO: 555997 - DNA, 120 bp, Artificial Sequence
  ENSG00000168955_20 (sequence is synthesized)
aaacaggcacgtgtgttgggcagatactaaaaagtggtcatcattctcctcttcagttataagctaattctcttttcagctttatactgaaatatcttccccttcatcacatacagatta

SEQ ID NO: 555998 - DNA, 120 bp, Artificial Sequence
  ENSG00000168955_21 (sequence is synthesized)
aatttctacatttttacagaattcttcagatacttccttttagccacaaatgtaaggagtactaaacccgagtggaactatgttatgcccactagcaaaagcatgcagcttactcagttt

SEQ ID NO: 555999 - DNA, 120 bp, Artificial Sequence
  ENSG00000168955_22 (sequence is synthesized)
ccgatccagttccctacatataaaatgattccctaaacagttcttcaattcaacatcttatgaagacagcaaaaagatttgaaatggcacaacccacattctaagcgttaaattttaacc

SEQ ID NO: 556000 - DNA, 120 bp, Artificial Sequence
  ENSG00000168955_23 (sequence is synthesized)
agaagattgggataaaaggcaacatagtaccatgcaagcatagccactttgacaacgtttctgagccaggggtgaccatgacctgctgcgaaggatggacatcctgcaatggattcagcc

SEQ ID NO: 556001 - DNA, 120 bp, Artificial Sequence
  ENSG00000168958_0 (sequence is synthesized)
gctacggctcccagaaggggccagcccgcgcctttcgcgcttctgccctggccctctgcgggccgctccgccggtgctgtccctgggcgcctccgtgctctcagccaaccacctctgaga

SEQ ID NO: 556002 - DNA, 120 bp, Artificial Sequence
  ENSG00000168958_1 (sequence is synthesized)
gcgcccactcgagcgccccgggagccagagggcgggggtcctcgccgggaccctcctgtgggcccagggggacaaaagtggctctcaatccagcacatgcacattgaagcaagttaaagg

SEQ ID NO: 556003 - DNA, 120 bp, Artificial Sequence
  ENSG00000168958_2 (sequence is synthesized)
atttaatatgaagcacagaagcagatagtgccaaatagcaagcagtagttgttacacatttctggaaaagcagtgtccgtgttgttatgtacacctccaaaaaaagttcaaatgtgtagg

SEQ ID NO: 556004 - DNA, 120 bp, Artificial Sequence
  ENSG00000168958_3 (sequence is synthesized)
ggaattgttgtgtaaagtaaactgaactgcagggtagcagtattttaatagctattatagacctgtatttactgtatttaaatgagtaaaggaacaagcagtgacacatcactaggaagg

SEQ ID NO: 556005 - DNA, 120 bp, Artificial Sequence
  ENSG00000168958_4 (sequence is synthesized)
gtgagcagggcagcatttccttctcccactgctgctgagatggcagaaattagtcgaattcagtacgaaatggaatatactgaaggcattagtcagcgaatgagggtcccagaaaagtta

SEQ ID NO: 556006 - DNA, 120 bp, Artificial Sequence
  ENSG00000168958_5 (sequence is synthesized)
aaagtagcaccgccaaacgctgacctggaacaaggattccaagaaggagttccaaatgctagtgtgataatgcaagttccggagaggattgttgtagcaggaaataatgaagatgtttca

SEQ ID NO: 556007 - DNA, 120 bp, Artificial Sequence
  ENSG00000168958_6 (sequence is synthesized)
ttttcaagaccagcagatcttgaccttattcagtcaactccctttaaacccctggcactgaaaacaccacctcgtgtacttacgctgagtgaaagaccactagattttctggatttagaa

SEQ ID NO: 556008 - DNA, 120 bp, Artificial Sequence
  ENSG00000168958_7 (sequence is synthesized)
agacctcctacaacccctcaaaatgaagaaatccgagcagttggcagactaaaaagagagcggtctatgagtgaaaatgctgttcgccaaaatggacagctggtcagaaatgattctctg

SEQ ID NO: 556009 - DNA, 120 bp, Artificial Sequence
  ENSG00000168958_8 (sequence is synthesized)
tggcacagatcagattctgccccaagaaataaaatttcaaggttccaggcaccgatttctgcaccggagtacactgtgacaccatcgccacaacaggctcgggtctgtcctccccatatg

SEQ ID NO: 556010 - DNA, 120 bp, Artificial Sequence
  ENSG00000168958_9 (sequence is synthesized)
ctctgctcgtggcattttgtcgcttatccagtcttctactcgtagggcataccagcagatcttggatgtgctggatgaaaatcgcagacctgtgttgcgtggtgggtctgctgccgccac

SEQ ID NO: 556011 - DNA, 120 bp, Artificial Sequence
  ENSG00000168958_10 (sequence is synthesized)
ttctaatcctcatcatgacaacgtcaggtatggcatttcaaatatagatacaaccattgaaggaacgtcagatgacctgactgttgtagatgcagcttcactaagacgacagataatcaa

SEQ ID NO: 556012 - DNA, 120 bp, Artificial Sequence
  ENSG00000168958_11 (sequence is synthesized)
actaaatagacgtctacaacttctggaagaggagaacaaagaacgtgctaaaagagaaatggtcatgtattcaattactgtagctttctggctgcttaatagctggctctggtttcgccg

SEQ ID NO: 556013 - DNA, 120 bp, Artificial Sequence
  ENSG00000168958_12 (sequence is synthesized)
ctagaggtaacatcagccctcaaaaatactgtctcaacagctggaaatataaaagatttgcaaacttctttgtttctgtctctgcattgtatgccattttatagtccacaccctgaaaat

SEQ ID NO: 556014 - DNA, 120 bp, Artificial Sequence
  ENSG00000168958_13 (sequence is synthesized)
gtatttcttccagaaagtctggaggaaggacctatatttgtagaagtaaaggtatattctgtcactcagctgtattcacgtctgagcagttctgcagtaacacctgcttaaaattctccc

SEQ ID NO: 556015 - DNA, 120 bp, Artificial Sequence
  ENSG00000168958_14 (sequence is synthesized)
tttgcatgttttgtaaataggctccagttttgttttttaaaaggaatttattttttgcctcatcagtccacccaactgattctgaatgggagagagtctgtagagaattgattcagaaaa

SEQ ID NO: 556016 - DNA, 120 bp, Artificial Sequence
  ENSG00000168958_15 (sequence is synthesized)
gtgtctgtgaaagaaaaacaattattttgtcctgtttctcaaacagtgttaagcagttttgttaatagacatttttgcatcgacacttcaacattaacactttcaaagtcatggtctggt

SEQ ID NO: 556017 - DNA, 120 bp, Artificial Sequence
  ENSG00000168958_16 (sequence is synthesized)
gccagatttaagaaactcgaaccacctaatatttcataaccttcttcattaggtacttgtacagattaatttctaacattgcagcagtttcatatgtgtgcaatatgtgcattctttcat

SEQ ID NO: 556018 - DNA, 120 bp, Artificial Sequence
  ENSG00000168958_17 (sequence is synthesized)
tttagttttgcacttggttttctataaagtacgtttttactcagttcatgcgtgaacaatttaaaaaacgacagaataaggtacaaatgtagtgtatttaataaactgtcaaccaaagaa

SEQ ID NO: 556019 - DNA, 120 bp, Artificial Sequence
  ENSG00000168958_18 (sequence is synthesized)
agccagagggcgggggtcctcgccgggaccctcctgtgggcccaggggtgagtgttgacgtcttcccgacccgcgacctgccgcccgagctggctgccaggcctatcgccgccgccgaga

SEQ ID NO: 556020 - DNA, 120 bp, Artificial Sequence
  ENSG00000168958_19 (sequence is synthesized)
agtgccaaatagcaagcagtagttgttacacatttgtgagtaaaaatggtcccttttggcttactttcttagtctttaaatcgtctgcatgccaaatccttaaagatctatgtccccaga

SEQ ID NO: 556021 - DNA, 120 bp, Artificial Sequence
  ENSG00000168958_20 (sequence is synthesized)
gattttttgataaagaataaaagatgtgagttagcagtcatagtcaaaccagttgctggggctgagcgtcctgagcaacctctaagagctctcctaggcatctcagtgaggcgggggctt

SEQ ID NO: 556022 - DNA, 120 bp, Artificial Sequence
  ENSG00000168958_21 (sequence is synthesized)
agggtggggctatatctccagcatggagtttaggaaataccttagccatggtaaagtcatgtatactgtctttaactttttatgtctttaatttatatatagtgtctttgctgaaaattt

SEQ ID NO: 556023 - DNA, 120 bp, Artificial Sequence
  ENSG00000168958_22 (sequence is synthesized)
agtgtaatttccatttgaagtttaccctaaattttgaagtttatttttatttaaagaaaccattagacgtcaaatatgtaggctgcctcagttacatttactttttaccctttgtattcc

SEQ ID NO: 556024 - DNA, 120 bp, Artificial Sequence
  ENSG00000168958_23 (sequence is synthesized)
cttcatgatttattcatttgggcttagtcttaaaaaaggatttttcccctttggagtataatgattagaggagttttatggcagtattgttttcttcgaatctgacttcacatttgtata

SEQ ID NO: 556025 - DNA, 120 bp, Artificial Sequence
  ENSG00000168958_24 (sequence is synthesized)
tacatttgatacagcttctctgtatcctgtttgcaaaatcataagacagtgactgtgcttacaactgtctttatgatttttgaggtatagaaaaactcttcttaggatagatttaacaat

SEQ ID NO: 556026 - DNA, 120 bp, Artificial Sequence
  ENSG00000168958_25 (sequence is synthesized)
tggtttctcaaatcaagccctaagccatgttcaaatccaaaagtcattttacgtagatatttacttttattcatagttttcttatgaaatgaattgttgaaatactgatttttattcttt

SEQ ID NO: 556027 - DNA, 120 bp, Artificial Sequence
  ENSG00000168958_26 (sequence is synthesized)
ggctttaaagcttactgccgtaggctaaccatgctcttttacatttttatcagcttttgtattggcggcaacattctttctactgcattaaaaaaaaaaacacatgtaaatatgatatta

SEQ ID NO: 556028 - DNA, 120 bp, Artificial Sequence
  ENSG00000168958_27 (sequence is synthesized)
aatacagattaatagtgtaaaactttcagtccctccaaaaatgaatacaaacatgaggatttattattacaaattctaaatttggtattcattgcatctcagtcattaggagaagtttta

SEQ ID NO: 556029 - DNA, 120 bp, Artificial Sequence
  ENSG00000168958_28 (sequence is synthesized)
gtttgtatgatgtgattttcagggagttgcatcttcttttttagtaaattcagagttaatgttatgcatctgtcatttaaaggttttgaataacagatgcatttgtcatttaaaggtttt

SEQ ID NO: 556030 - DNA, 120 bp, Artificial Sequence
  ENSG00000168958_29 (sequence is synthesized)
gtccaagcagctttccctcaaattgatgaggaaattttaagtttaaattttattgcaggcatttttttagttacaagcagcatgcatgtttacgcagagagtatgtgtgtatgtgtgtgt

SEQ ID NO: 556031 - DNA, 120 bp, Artificial Sequence
  ENSG00000168958_30 (sequence is synthesized)
acacatttgtgttgtaattctataataatttaaaaaatttgctcctaagcaatatcctcaaggtacaatttcagctgataattaagaaggcattttgttgaggaagacattttctttcat

SEQ ID NO: 556032 - DNA, 120 bp, Artificial Sequence
  ENSG00000168958_31 (sequence is synthesized)
cttttatttttgctttgtatgtgttcagtacttgcaaatgagaagtttcctttcgctctttctataaggtattgtcttctaacttcactgcgtagaggagactgacattttaacagtcag

SEQ ID NO: 556033 - DNA, 120 bp, Artificial Sequence
  ENSG00000168958_32 (sequence is synthesized)
attttaaaagataaaacgtattggaaaggttactgcttatcaaagtagaaagctaactgtcctctagcgccaaagtatatactgagaatgagtggaaatccccaccaagtttcccattgc

SEQ ID NO: 556034 - DNA, 120 bp, Artificial Sequence
  ENSG00000168958_33 (sequence is synthesized)
accttagtcttcatttccagcagccctgtatgtcactcctggctgtctcaagatcagactcaaattgtggattgcccttcctgtaatgtgctctagcacgtctcctgatctcagcttcag

SEQ ID NO: 556035 - DNA, 120 bp, Artificial Sequence
  ENSG00000168958_34 (sequence is synthesized)
agtggaggcttgcattttcactctggagagctgagagtttgaatgagacacagctgcaacgagacatcaggcactactcaaaattaatgaggtgggagggaaggaagtgtgggaaatgga

SEQ ID NO: 556036 - DNA, 120 bp, Artificial Sequence
  ENSG00000168958_35 (sequence is synthesized)
gtttcttgaaatttatgaatacggtttttgagatagagctgttgatatcagatgagcaactgtggtcataccggtgcagctaaccaggtcctgatatgcttttaaaggtgctagtgattt

SEQ ID NO: 556037 - DNA, 120 bp, Artificial Sequence
  ENSG00000168958_36 (sequence is synthesized)
tttttttccaactggaagaaaggaattacactttttaagcagagttgtcctctgtcttaaatttcataaagtaaagcaccaagaaaattattttatatgttggtgctgttttgtcgtgta

SEQ ID NO: 556038 - DNA, 120 bp, Artificial Sequence
  ENSG00000168958_37 (sequence is synthesized)
aatatagattccctttgtttctttgatcaatagtaatgttgagtttatgaaaatgataaaatggaggacacatgagacaaggattttttaaagtagttgagagatattatattgtattga

SEQ ID NO: 556039 - DNA, 120 bp, Artificial Sequence
  ENSG00000168958_38 (sequence is synthesized)
aatatacaatataatcctatttgacatttatttgtcttgtttttgcttttattttattacttctctgtttcctgattctgtcttgtgccttctcccgcaaaaacctgccttagacctgtg

SEQ ID NO: 556040 - DNA, 120 bp, Artificial Sequence
  ENSG00000168958_39 (sequence is synthesized)
ccgcgacctgccgcccgagctggctgccaggcctatcgccgccgccgagaccctccggccaacagggacccgcggtggccccggcccccccggtagtgtctccctgacccgagtcccgtc

SEQ ID NO: 556041 - DNA, 120 bp, Artificial Sequence
  ENSG00000168958_40 (sequence is synthesized)
cccgggcctcttgccttcaaccctggtctttcctcctccccgggaccttgagtccccgaggagagcgagggagaggagcgtcttctgcagggacaaaagtggctctcaatccagcacatg

SEQ ID NO: 556042 - DNA, 120 bp, Artificial Sequence
  ENSG00000168958_41 (sequence is synthesized)
catgtttttctaaataattacttcatgtagtttttaaaatttgttttacatcaattttatatttttgtaatactttttgtaatcttaaaatctggccattttgttggtcctgagaatttt

SEQ ID NO: 556043 - DNA, 120 bp, Artificial Sequence
  ENSG00000168958_42 (sequence is synthesized)
ttcccgacccgcgacctgccgcccgagctggctgccaggcctatcgccgccgccgagaccctccggccaacagggacccgcggtggccccggcccccccgggacaaaagtggctctcaat

SEQ ID NO: 556044 - DNA, 120 bp, Artificial Sequence
  ENSG00000168958_43 (sequence is synthesized)
cttcaacttcattggctttacgaagtgtttgaaatggtgtttttatggaatcacacttttgattcatgtgtttaaactttgacatctgtatgtgagaattccctgtcctactcttctaat

SEQ ID NO: 556045 - DNA, 120 bp, Artificial Sequence
  ENSG00000168958_44 (sequence is synthesized)
catccataagtcgacagcagtgttgtttcttagaagttggtttattgaattggaatataaacacgaagtaaagaatgctgcttctccatgggaggggttgaacacattcattgctgtagt

SEQ ID NO: 556046 - DNA, 120 bp, Artificial Sequence
  ENSG00000168958_45 (sequence is synthesized)
tctcttccctctctacagttctttcatattcagtttatttattttgatgtttagggttacaaagttataagtgctgccttgtagctagtttttggaaacaattcaaaatatttattcttt

SEQ ID NO: 556047 - DNA, 120 bp, Artificial Sequence
  ENSG00000168958_46 (sequence is synthesized)
gactgttttcttgtggggagagtgaagggtgggaaaggggcaagaacactaagaaaattaagataaagactgctcagctgaagttttataaaaatctgacttgagtgtttttctcttcat

SEQ ID NO: 556048 - DNA, 120 bp, Artificial Sequence
  ENSG00000168958_47 (sequence is synthesized)
atatggacataagtttgtgtaagaattatattttgttctatcctaagtggcagctctcaaaccttttcagccagggaccctttttagcatcgccaatccttctggcttgagaattttcta

SEQ ID NO: 556049 - DNA, 120 bp, Artificial Sequence
  ENSG00000168958_48 (sequence is synthesized)
tgtgtttctttagtcaggatttttttcccattctccagtttttagtgccctttttcaatattgtagacagttgtcattttaagcttttttctttcctttattagtacaaattcaggtagt

SEQ ID NO: 556050 - DNA, 120 bp, Artificial Sequence
  ENSG00000168958_49 (sequence is synthesized)
tacacattggatgacatttagcctgatgttagttttgccttgacgttgagaatgttgagccctcattccactgtcgtagtcttgtgacaccatcgccacaacaggctcgggtctgtcctc

SEQ ID NO: 556051 - DNA, 120 bp, Artificial Sequence
  ENSG00000168959_0 (sequence is synthesized)
acaaaatggtcctttagaaaatacatctgaattgctggctaatttcttgatttgcgactcaacgtaggacatcgcttgttcgtagctatcagaaccctcctgaattttccccaccatgct

SEQ ID NO: 556052 - DNA, 120 bp, Artificial Sequence
  ENSG00000168959_1 (sequence is synthesized)
atctttattggcttgaactcctttcctaaaatggtccttctgttgatcctgtcagtcttacttttgaaagaagatgtccgtgggagtgcacagtccagtgagaggagggtggtggctcac

SEQ ID NO: 556053 - DNA, 120 bp, Artificial Sequence
  ENSG00000168959_2 (sequence is synthesized)
atgccgggtgacatcattattggagctctcttttctgttcatcaccagcctactgtggacaaagttcatgagaggaagtgtggggcggtccgtgaacagtatggcattcagagagtggag

SEQ ID NO: 556054 - DNA, 120 bp, Artificial Sequence
  ENSG00000168959_3 (sequence is synthesized)
gccatgctgcataccctggaaaggatcaattcagaccccacactcttgcccaacatcacactgggctgtgagataagggactcctgctggcattcggctgtggccctagagcagagcatt

SEQ ID NO: 556055 - DNA, 120 bp, Artificial Sequence
  ENSG00000168959_4 (sequence is synthesized)
gagttcataagagattccctcatttcttcagaagaggaagaaggcttggtacgctgtgtggatggctcctcctcttccttccgctccaagaagcccatagtaggggtcattgggcctggc

SEQ ID NO: 556056 - DNA, 120 bp, Artificial Sequence
  ENSG00000168959_5 (sequence is synthesized)
tccagttctgtagccattcaggtccagaatttgctccagcttttcaacatacctcagattgcttactcagcaaccagcatggatctgagtgacaagactctgttcaaatatttcatgagg

SEQ ID NO: 556057 - DNA, 120 bp, Artificial Sequence
  ENSG00000168959_6 (sequence is synthesized)
gttgtgccttcagatgctcagcaggcaagggccatggtggacatagtgaagaggtacaactggacctatgtatcagccgtgcacacagaaggcaactatggagaaagtgggatggaagcc

SEQ ID NO: 556058 - DNA, 120 bp, Artificial Sequence
  ENSG00000168959_7 (sequence is synthesized)
ttcaaagatatgtcagcgaaggaagggatttgcatcgcccactcttacaaaatctacagtaatgcaggggagcagagctttgataagctgctgaagaagctcacaagtcacttgcccaag

SEQ ID NO: 556059 - DNA, 120 bp, Artificial Sequence
  ENSG00000168959_8 (sequence is synthesized)
gcccgggtggtggcctgcttctgtgagggcatgacggtgagaggtctgctgatggccatgaggcgcctgggtctagcgggagaatttctgcttctgggcagtgatggctgggctgacagg

SEQ ID NO: 556060 - DNA, 120 bp, Artificial Sequence
  ENSG00000168959_9 (sequence is synthesized)
tatgatgtgacagatggatatcagcgagaagctgttggtggcatcacaatcaagctccaatctcccgatgtcaagtggtttgatgattattatctgaagctccggccagaaacaaaccac

SEQ ID NO: 556061 - DNA, 120 bp, Artificial Sequence
  ENSG00000168959_10 (sequence is synthesized)
cgaaacccttggtttcaagaattttggcagcatcgttttcagtgccgactggaagggtttccacaggagaacagcaaatacaacaagacttgcaatagttctctgactctgaaaacacat

SEQ ID NO: 556062 - DNA, 120 bp, Artificial Sequence
  ENSG00000168959_11 (sequence is synthesized)
catgttcaggattccaaaatgggatttgtgatcaacgccatctattcgatggcctatgggctccacaacatgcagatgtccctctgcccaggctatgcaggactctgtgatgccatgaag

SEQ ID NO: 556063 - DNA, 120 bp, Artificial Sequence
  ENSG00000168959_12 (sequence is synthesized)
ccaattgatggacggaaacttttggagtccctgatgaaaaccaattttactggggtttctggagatacgatcctattcgatgagaatggagactctccaggaaggtatgaaataatgaat

SEQ ID NO: 556064 - DNA, 120 bp, Artificial Sequence
  ENSG00000168959_13 (sequence is synthesized)
ttcaaggaaatgggaaaagattactttgattatatcaacgttggaagttgggacaatggagaattaaaaatggatgatgatgaagtatggtccaagaaaagcaacatcatcagatctgtg

SEQ ID NO: 556065 - DNA, 120 bp, Artificial Sequence
  ENSG00000168959_14 (sequence is synthesized)
tgcagtgaaccatgtgagaaaggccagatcaaggtgatccgaaagggagaagtcagctgttgttggacctgtacaccttgtaaggagaatgagtatgtctttgatgagtacacatgcaag

SEQ ID NO: 556066 - DNA, 120 bp, Artificial Sequence
  ENSG00000168959_15 (sequence is synthesized)
gcatgccaactggggtcttggcccactgatgatctcacaggttgtgacttgatcccagtacagtatcttcgatggggtgaccctgaacccattgcagctgtggtgtttgcctgccttggc

SEQ ID NO: 556067 - DNA, 120 bp, Artificial Sequence
  ENSG00000168959_16 (sequence is synthesized)
ctcctggccaccctgtttgttactgtagtcttcatcatttaccgtgatacaccagtagtcaagtcctcaagcagggaactctgctacattatccttgctggcatctgcctgggctactta

SEQ ID NO: 556068 - DNA, 120 bp, Artificial Sequence
  ENSG00000168959_17 (sequence is synthesized)
tgtaccttctgcctcattgcgaagcccaaacagatttactgctaccttcagagaattggcattggtctctccccagccatgagctactcagcccttgtaacaaagaccaaccgtattgca

SEQ ID NO: 556069 - DNA, 120 bp, Artificial Sequence
  ENSG00000168959_18 (sequence is synthesized)
caaaaagcccagattcatgagtgcctgtgcccagctagtgattgctttcattctcatatgcatccagttgggcatcatcgttgccctctttataatggagcctcctgacataatgcatga

SEQ ID NO: 556070 - DNA, 120 bp, Artificial Sequence
  ENSG00000168959_19 (sequence is synthesized)
ctacccaagcattcgagaagtctacctgatctgtaacaccaccaacctaggagttgtcactccacttggatacaatggattgttgattttgagctgcaccttctatgcgttcaagaccag

SEQ ID NO: 556071 - DNA, 120 bp, Artificial Sequence
  ENSG00000168959_20 (sequence is synthesized)
aaatgttccagctaacttcaacgaggccaagtatatcgccttcacaatgtacacgacctgcattatatggctagcttttgtgccaatctactttggcagcaactacaaaatcatcaccat

SEQ ID NO: 556072 - DNA, 120 bp, Artificial Sequence
  ENSG00000168959_21 (sequence is synthesized)
gtgtttctcggtcagcctcagtgccacagtggccctaggctgcatgtttgtgccgaaggtgtacatcatcctggccaaaccagagagaaacgtgcgcagcgccttcaccacatctaccgt

SEQ ID NO: 556073 - DNA, 120 bp, Artificial Sequence
  ENSG00000168959_22 (sequence is synthesized)
ggtgcgcatgcatgtaggggatggcaagtcatcctccgcagccagcagatccagcagcctagtcaacctgtggaagagaaggggctcctctggggaaaccttaagttccaatggaaaatc

SEQ ID NO: 556074 - DNA, 120 bp, Artificial Sequence
  ENSG00000168959_23 (sequence is synthesized)
cgtcacgtgggcccagaatgagaagagcagccgggggcagcacctgtggcagcgcctgtccatccacatcaacaagaaagaaaaccccaaccaaacggccgtcatcaagcccttccccaa

SEQ ID NO: 556075 - DNA, 120 bp, Artificial Sequence
  ENSG00000168959_24 (sequence is synthesized)
aaccaaacggccgtcatcaagcccttccccaagagcacggagagccgtggcctgggcgctggcgctggcgcaggcgggagcgctgggggcgtgggggccacgggcggtgcgggctgcgca

SEQ ID NO: 556076 - DNA, 120 bp, Artificial Sequence
  ENSG00000168959_25 (sequence is synthesized)
cgccggccccaaggcgctgtatgatgtggccgaggctgaggagcacttcccggcgcccgcgcggccgcgctcaccgtcgcccatcagcacgctgagccaccgcgcgggctcggccagccg

SEQ ID NO: 556077 - DNA, 120 bp, Artificial Sequence
  ENSG00000168959_26 (sequence is synthesized)
cacggacgacgatgtgccgtcgctgcactcggagcctgtggcgcgcagcagctcctcgcagggctccctcatggagcagatcagcagtgtggtcacccgcttcacggccaacatcagcga

SEQ ID NO: 556078 - DNA, 120 bp, Artificial Sequence
  ENSG00000168959_27 (sequence is synthesized)
gctcaactccatgatgctgtccaccgcggcccccagccccggcgtcggcgccccgctctgctcgtcctacctgatccccaaagagatccagttgcccacgaccatgacgacctttgccga

SEQ ID NO: 556079 - DNA, 120 bp, Artificial Sequence
  ENSG00000168959_28 (sequence is synthesized)
gacctttgccgaaatccagcctctgccggccatcgaagtcacgggaggcgcgcagcccgcggcaggggcgcaggcggctggggacgcggcccgggagagccccgcggccggtcccgaggc

SEQ ID NO: 556080 - DNA, 120 bp, Artificial Sequence
  ENSG00000168959_29 (sequence is synthesized)
gccagacctggaggagctggtggctctcaccccgccgtcccccttcagagactcggtggactcggggagcacaacccccaactcgccagtgtccgagtcggccctctgtatcccgtcgtc

SEQ ID NO: 556081 - DNA, 120 bp, Artificial Sequence
  ENSG00000168959_30 (sequence is synthesized)
tcccaaatatgacactcttatcataagagattacactcagagctcctcgtcgttgtgaatgtccctggaaagcacgccggcctgcgcgtgcggagcggagccccccgtgttcacacacac

SEQ ID NO: 556082 - DNA, 120 bp, Artificial Sequence
  ENSG00000168959_31 (sequence is synthesized)
acaatggcaagcatagtcgcctggttacggcccagggggaagatgccaagggcaccccttaatggaaacacgagatcagtagtgctatctcatgacaaccgacgaagaaaccgacgacaa

SEQ ID NO: 556083 - DNA, 120 bp, Artificial Sequence
  ENSG00000168959_32 (sequence is synthesized)
atcttttggcagattttcttctagtggccttagaaaacatgggcttttaagaaacacggctgatatctttgagggctgacaaggcgtctcttcaaacagttccataccaagtgctttgct

SEQ ID NO: 556084 - DNA, 120 bp, Artificial Sequence
  ENSG00000168959_33 (sequence is synthesized)
ctagggaagcagtgcgtgtgaaacagcgtaacggagggtgaagagcatagttaataagcaactgtaaaaagttttatttgtttactttaattcttttcccagaagagtctttgattcacc

SEQ ID NO: 556085 - DNA, 120 bp, Artificial Sequence
  ENSG00000168959_34 (sequence is synthesized)
tttactttaattcttttcccagaagagtctttgattcaccaaacatgaatgtacattttctaacaaactcaaaatctgggaccaaaacatcaacttttttctttcttttttctttctttt

SEQ ID NO: 556086 - DNA, 120 bp, Artificial Sequence
  ENSG00000168959_35 (sequence is synthesized)
tgggtccagtatttacggaggcgttgtgaatgtgtcccatgcataacacactactggatagtgagtgctgcgctaatgtactacgtagggcttctaccagagattttcctctccaattgg

SEQ ID NO: 556087 - DNA, 120 bp, Artificial Sequence
  ENSG00000168959_36 (sequence is synthesized)
gttgtgaaatactcttccaaaagcctgcatcggggattccacctacttatttcagattcacctccattaaccaagaaaaccagtggaagatttcttgactatttcaccatgttgccaatc

SEQ ID NO: 556088 - DNA, 120 bp, Artificial Sequence
  ENSG00000168959_37 (sequence is synthesized)
agctcggctgttctgcgcacgctgagcggagggaatgagcttgagatcatcttgggggggaagccggggactggagaggccggctctgccctgctgatccccgtggcccaacttttcggg

SEQ ID NO: 556089 - DNA, 120 bp, Artificial Sequence
  ENSG00000168959_38 (sequence is synthesized)
gctatctctttcaagaaacatggccactctttaggaatgctgttgcgtttgcattgccaactaaaatattaaaatatgcattggggcttcttcattcctttattttgagaacctgatgca

SEQ ID NO: 556090 - DNA, 120 bp, Artificial Sequence
  ENSG00000168959_39 (sequence is synthesized)
caaagagctcctttgttcttttcgagtcccaccactggaagagtggtccatagaccccatgaagacattgtcatgatttgagagactgttgttgaaaggattaacacaatcttaatacac

SEQ ID NO: 556091 - DNA, 120 bp, Artificial Sequence
  ENSG00000168959_40 (sequence is synthesized)
tgaaaattttaactgtgtcaagtcagcttagtggagatttagctatgccagtgagcagtgattttaactattcttggctgcttaaacagggcagctatgaactatgacaaatgtagattt

SEQ ID NO: 556092 - DNA, 120 bp, Artificial Sequence
  ENSG00000168959_41 (sequence is synthesized)
ttcaaagcaatacaaaatactaaaaaagaggaaccttaatgaatattaaccacacagtctttcttagccattccaaaaagaggcaaagcaattcttattttcttttttaaaataatgatt

SEQ ID NO: 556093 - DNA, 120 bp, Artificial Sequence
  ENSG00000168959_42 (sequence is synthesized)
aatatgattttgtgcacttcatactgtcactttttaaaactacagaaaagagatttagagtataacagaaacaagtgtgctttgatagtctcaaataggtagaattcatagttcaagacc

SEQ ID NO: 556094 - DNA, 120 bp, Artificial Sequence
  ENSG00000168959_43 (sequence is synthesized)
tgaatccactgtcatctctttcttcctcccattgcagctatcctcaggtaccaaatgttttgatttttaaataaggatagtaataaatggaggaggtgtcctataaatttaaagttcagt

SEQ ID NO: 556095 - DNA, 120 bp, Artificial Sequence
  ENSG00000168959_44 (sequence is synthesized)
tgacccagccttatacttaagatagccttatgaaaaatatgtgctgtgaggcagaagtatattttggcagagagaataataaataaaactttttcttttagctcaatatccttactttgg

SEQ ID NO: 556096 - DNA, 120 bp, Artificial Sequence
  ENSG00000168959_45 (sequence is synthesized)
taagtatttttttttatttcacatctacttaacagaaaataaactgagaaatagaagtcagtccattggcataatttatcattcttcactttaaaaaattctaataaatattctgcttga

SEQ ID NO: 556097 - DNA, 120 bp, Artificial Sequence
  ENSG00000168959_46 (sequence is synthesized)
gttttcttttctgctatttgttcttacttgcaactttaagtcaaacctcccaatacaaaacattaaaagctaacattaatgtactaaagtattaatttaaaagaaatcgaacctcccatg

SEQ ID NO: 556098 - DNA, 120 bp, Artificial Sequence
  ENSG00000168959_47 (sequence is synthesized)
ctagatttgaaaataacatcatcacagcaccctgatcccaaatattacaccgaggcttttaaaatgtaagtgaaatctagctaagtttcatggtttcattaaaagcaaatgtctgcctct

SEQ ID NO: 556099 - DNA, 120 bp, Artificial Sequence
  ENSG00000168959_48 (sequence is synthesized)
atctgaaaaacaaatggaaatcttttgaggtgttaataccctttggatcctcatcaaaaggatggcattcacctgaggattcctatcttgacttcttaggtattaaaaacctttcttgat

SEQ ID NO: 556100 - DNA, 120 bp, Artificial Sequence
  ENSG00000168959_49 (sequence is synthesized)
atgctctacattttaaaatttgttttataaaatccttatgttgattttcattttattctcaagtacaatacgtttcactctagaccagttgaagaacatgtttaaactttgttcatggtc

SEQ ID NO: 556101 - DNA, 120 bp, Artificial Sequence
  ENSG00000168959_50 (sequence is synthesized)
aaattcattttctatttttttagtaacatatctcttaaaaagcacactaccttataaaaaacttcatcagaaattaaatttaatgcaagtaaattgccatctgatacttccacatgctat

SEQ ID NO: 556102 - DNA, 120 bp, Artificial Sequence
  ENSG00000168959_51 (sequence is synthesized)
cataatcaactgtaataataaaaatgatttatccaattagaaaaggacaagatatatttttctctgtatttctataacttttgccactccattgaatacattgtatgttggacataagat

SEQ ID NO: 556103 - DNA, 120 bp, Artificial Sequence
  ENSG00000168959_52 (sequence is synthesized)
tattagtaatgcattcttgagatcttttattttggaatgatgctaactctgtctctttgccaattctaataccaggttccaagtaataactctacagtacaaagagaactgaatattcat

SEQ ID NO: 556104 - DNA, 120 bp, Artificial Sequence
  ENSG00000168959_53 (sequence is synthesized)
tctagggctataggatatgaacttcacaattcatttgggtacattctcattgaatttccttcaaaacaatctgttcctggtgcccagtgataattcagtcgggaccagcatgactaaaag

SEQ ID NO: 556105 - DNA, 120 bp, Artificial Sequence
  ENSG00000168959_54 (sequence is synthesized)
gaaggggatatgctaaggctcagcaaagtgaccctaaatgagagatatgtcccaggatggaaagaagaagacgtggtttaaccaagttatactgactaatctaagcagtccactcatcct

SEQ ID NO: 556106 - DNA, 120 bp, Artificial Sequence
  ENSG00000168959_55 (sequence is synthesized)
tccattttgggaaaggagtgggggcagcctaagaagaacatatctggattgggaagaaccgtctttctgggctagggatggggaacagaaagggagtatggaaagaaaaattataagaga

SEQ ID NO: 556107 - DNA, 120 bp, Artificial Sequence
  ENSG00000168959_56 (sequence is synthesized)
tttgactgaagcaaggaaaaaaagcaaatccccaaacgtgctaatccttgaaagtaactatctttcccaaactactgctgttaccagcaagtgatcaggaagactaggagctatttctga

SEQ ID NO: 556108 - DNA, 120 bp, Artificial Sequence
  ENSG00000168959_57 (sequence is synthesized)
ctgtaaatgaattgtataatagctctgctgcagttctgtgacttccaagccaggaattaaatgctctttttaagaataacaaaaaacaaaagcatttcctatgctagtctcccagtaaaa

SEQ ID NO: 556109 - DNA, 120 bp, Artificial Sequence
  ENSG00000168959_58 (sequence is synthesized)
tgtacatgttttggagacttcaaaggtattatgtgagttcacatttagcaacagcttattaataaccctcaagctgtcagaatctctatagttaccatttacaattttatactgtgaaaa

SEQ ID NO: 556110 - DNA, 120 bp, Artificial Sequence
  ENSG00000168959_59 (sequence is synthesized)
aatacagatcagtgaaagcataaagacaagtcagaattcactttgaagagggtctgaggcctgggagagtctctactgtctattgaagaatgaggcatgtataaaatagttggttgaatt

SEQ ID NO: 556111 - DNA, 120 bp, Artificial Sequence
  ENSG00000168959_60 (sequence is synthesized)
tcactgatcttcccaatgtgaacaaatatactatgtatattgtgtgtatttctagaaatcaatggcagctgctgatggtgttgtaattagaaatctatatagattatagatgttttagaa

SEQ ID NO: 556112 - DNA, 120 bp, Artificial Sequence
  ENSG00000168959_61 (sequence is synthesized)
agatggtgccaatcctaaaagatttgtgtgggctaaaagtgcttgtacttacttttttctgcacttataactgatttggttttaaaattgtgtgcgtgtatctgttctttctctgttgtg

SEQ ID NO: 556113 - DNA, 120 bp, Artificial Sequence
  ENSG00000168959_62 (sequence is synthesized)
gcagcttgtactattaaaataatagagaatgttaaattattttgatgtgaactgcaaatgattttttttcataaagtttaacatttttatcagcattgttttgctttgtacttgtataaa

SEQ ID NO: 556114 - DNA, 120 bp, Artificial Sequence
  ENSG00000168959_63 (sequence is synthesized)
tatgttttattttagcacttcaaaatatacttgcctgtttctcagttgtctaaatcatgttgtacttggtgtttgtgaagccagttacttttcaaaaaaattaaaaaacctataatatga

SEQ ID NO: 556115 - DNA, 120 bp, Artificial Sequence
  ENSG00000168959_64 (sequence is synthesized)
aaccttaaggtacaaagacaggagactggcccagcacaagtcggaaatagagtgtttcacccccaaagggagtatggggaatggtgggagagcaacaatgagcagttccaatggaaaatc

SEQ ID NO: 556116 - DNA, 120 bp, Artificial Sequence
  ENSG00000168959_65 (sequence is synthesized)
tatcttttatgaggttcaagctattctcatgcctcagcctccagaggagctaggattacaggcatgtaccacacccaggaagttatacagatacacgttcctctgaacttcgccaatact

SEQ ID NO: 556117 - DNA, 120 bp, Artificial Sequence
  ENSG00000168959_66 (sequence is synthesized)
tacagtattgtacaatacttatttgtgacttctcatcaacaccccaactggttagatgctgttatttttactggttgtatattaagacaataaaaaatttcgtacttgggtagcaaagaa

SEQ ID NO: 556118 - DNA, 120 bp, Artificial Sequence
  ENSG00000168959_67 (sequence is synthesized)
cgcgagagagcgagcgccaccgccgcgggccccgcagccgttctgcctgctgtcaccgctgcctccatcgccgacactagcgctccagctgcagccaaggccgctacgagagcgcaggaa

SEQ ID NO: 556119 - DNA, 120 bp, Artificial Sequence
  ENSG00000168959_68 (sequence is synthesized)
aaggtagagggacaaagaaggaagagatgcgtaagagggatcagacattgatgttatcttttatgaggtgtgtgttcttgagatttgaagaaattagatggaatgattctttagtatatg

SEQ ID NO: 556120 - DNA, 120 bp, Artificial Sequence
  ENSG00000168959_69 (sequence is synthesized)
atgccctggaaaatgaaaacatccaagtgctgtctctctgtttccccagcagtgctgtaattcaaataaatacctttctttctcctatagctttaataaaccgtttgaatgttacataaa

SEQ ID NO: 556121 - DNA, 120 bp, Artificial Sequence
  ENSG00000168961_0 (sequence is synthesized)
ctttgttaagtcgttccctctacaaaggacttcctagtgggtgtgaaaggcagcggtggccacagaggcggcggagagatggccttcagcggttcccaggctccctacctgagtccagct

SEQ ID NO: 556122 - DNA, 120 bp, Artificial Sequence
  ENSG00000168961_1 (sequence is synthesized)
gtccccttttctgggactattcaaggaggtctccaggacggacttcagatcactgtcaatgggaccgttctcagctccagtggaaccaggtttgctgtgaactttcagactggcttcagt

SEQ ID NO: 556123 - DNA, 120 bp, Artificial Sequence
  ENSG00000168961_2 (sequence is synthesized)
ggaaatgacattgccttccacttcaaccctcggtttgaagatggagggtacgtggtgtgcaacacgaggcagaacggaagctgggggcccgaggagaggaagacacacatgcctttccag

SEQ ID NO: 556124 - DNA, 120 bp, Artificial Sequence
  ENSG00000168961_3 (sequence is synthesized)
aaggggatgccctttgacctctgcttcctggtgcagagctcagatttcaaggtgatggtgaacgggatcctcttcgtgcagtacttccaccgcgtgcccttccaccgtgtggacaccatc

SEQ ID NO: 556125 - DNA, 120 bp, Artificial Sequence
  ENSG00000168961_4 (sequence is synthesized)
tccgtcaatggctctgtgcagctgtcctacatcagcttccagaacccccgcacagtccctgttcagcctgccttctccacggtgccgttctcccagcctgtctgtttcccacccaggccc

SEQ ID NO: 556126 - DNA, 120 bp, Artificial Sequence
  ENSG00000168961_5 (sequence is synthesized)
agggggcgcagacaaaaacctcccggcgtgtggcctgccaacccggctcccattacccagacagtcatccacacagtgcagagcgcccctggacagatgttctctactcccgccatccca

SEQ ID NO: 556127 - DNA, 120 bp, Artificial Sequence
  ENSG00000168961_6 (sequence is synthesized)
cctatgatgtacccccaccccgcctatccgatgcctttcatcaccaccattctgggagggctgtacccatccaagtccatcctcctgtcaggcactgtcctgcccagtgctcagaggttc

SEQ ID NO: 556128 - DNA, 120 bp, Artificial Sequence
  ENSG00000168961_7 (sequence is synthesized)
cccccgttttgatgagaatgctgtggtccgcaacacccagatcgacaactcctgggggtctgaggagcgaagtctgccccgaaaaatgcccttcgtccgtggccagagcttctcagtgtg

SEQ ID NO: 556129 - DNA, 120 bp, Artificial Sequence
  ENSG00000168961_8 (sequence is synthesized)
gatcttgtgtgaagctcactgcctcaaggtggccgtggatggtcagcacctgtttgaatactaccatcgcctgaggaacctgcccaccatcaacagactggaagtggggggcgacatcca

SEQ ID NO: 556130 - DNA, 120 bp, Artificial Sequence
  ENSG00000168961_9 (sequence is synthesized)
gctgacccatgtgcagacataggcggcttcctggccctggggccgggggctggggtgtggggcagtctgggtcctctcatcatccccacttcccaggcccagcctttccaaccctgcctg

SEQ ID NO: 556131 - DNA, 120 bp, Artificial Sequence
  ENSG00000168961_10 (sequence is synthesized)
ggatctgggctttaatgcagaggccatgtccttgtctggtcctgcttctggctacagccaccctggaacggagaaggcagctgacggggattgccttcctcagccgcagcagcacctggg

SEQ ID NO: 556132 - DNA, 120 bp, Artificial Sequence
  ENSG00000168961_11 (sequence is synthesized)
gctccagctgctggaatcctaccatcccaggaggcaggcacagccagggagaggggaggagtgggcagtgaagatgaagccccatgctcagtcccctcccatcccccacgcagctccacc

SEQ ID NO: 556133 - DNA, 120 bp, Artificial Sequence
  ENSG00000168961_12 (sequence is synthesized)
ccagtcccaagccaccagctgtctgctcctggtgggaggtggcctcctcagcccctcctctctgacctttaacctcactctcaccttgcaccgtgcaccaacccttcacccctcctggaa

SEQ ID NO: 556134 - DNA, 120 bp, Artificial Sequence
  ENSG00000168961_13 (sequence is synthesized)
agcaggcctgatggcttcccactggcctccaccacctgaccagagtgttctcttcagaggactggctcctttcccagtgtccttaaaataaagaaatgaaaatgcttgttggcacattca

SEQ ID NO: 556135 - DNA, 73 bp, Artificial Sequence
  ENSG00000168961_14 (sequence is synthesized)
tgtttgttaaattatatgtagggacagggtcttccaacctttcccgagctggtctcaagtattataggcataa

SEQ ID NO: 556136 - DNA, 120 bp, Artificial Sequence
  ENSG00000168961_15 (sequence is synthesized)
gccaccacgccctgcccatttttctaagttggattattttacactccagtctgctgtgaatgagagttccagttgttgcgtatcgcaatcaatttgtgattgcctacaaatgatgtgccg

SEQ ID NO: 556137 - DNA, 120 bp, Artificial Sequence
  ENSG00000168961_16 (sequence is synthesized)
tgatgaaattgtccctggtgtccgagaggatcgcaaagaatttcccttcctttctctcctttctgctccccttgtactgtctactccttaaactggtacttgatccaggaacataatggg

SEQ ID NO: 556138 - DNA, 120 bp, Artificial Sequence
  ENSG00000168961_17 (sequence is synthesized)
gatggacagtgcagatggcacacatggcctcagtctattggagcatctcaaaggaattagtctgcaaattctagtgcatctaggtggagcacaggaaggaagagaggtgcagactcacgt

SEQ ID NO: 556139 - DNA, 120 bp, Artificial Sequence
  ENSG00000168961_18 (sequence is synthesized)
atggccctggggcacctgccatcctctcgcacccgtacagcccttacctgccagcacttaccctacccagcttgagttctgggccttctcaccagcacatcgctgggacctggtcgactt

SEQ ID NO: 556140 - DNA, 120 bp, Artificial Sequence
  ENSG00000168961_19 (sequence is synthesized)
caggtaagtttatttcatggctccctcccccacgacctgcacatgccatatgttccttcccagccccatgtcacttgaaatgttctatcatgtccaagacttctctcctcatcctaaagt

SEQ ID NO: 556141 - DNA, 120 bp, Artificial Sequence
  ENSG00000168961_20 (sequence is synthesized)
gcagaaaataaggatggagaagagaaggagaagagaatcaagagagattcattgagagggaggatcagaagctcctgggcaccccatactgtagaataaaaatattcattatggtgtttt

SEQ ID NO: 556142 - DNA, 120 bp, Artificial Sequence
  ENSG00000168961_21 (sequence is synthesized)
tcttgcaaaatattcccctctacataattatgtttttacatgaataatataaatttaaacaggagaaatactttttgaagagtctgagaatcttcataaagttcaggcggccacgaatta

SEQ ID NO: 556143 - DNA, 120 bp, Artificial Sequence
  ENSG00000168961_22 (sequence is synthesized)
gctgtgtgacctggggcatgccccttagactctgagcctcagcttctctgtatgtaaaatgggttgaagccgcccttccccacaagcaccctgtgcacaggcaatgcccagccccattat

SEQ ID NO: 556144 - DNA, 120 bp, Artificial Sequence
  ENSG00000168961_23 (sequence is synthesized)
tttctggactccgtggccaagcatgcttaggacacacagccacatacttctgggcagtgtcatctggcaacttgctgtcatgtcagtgtggtcaagcattgtagacctctatgaaccaaa

SEQ ID NO: 556145 - DNA, 120 bp, Artificial Sequence
  ENSG00000168961_24 (sequence is synthesized)
tatgcttcaggcttgggttgagcacaggagagggaggagggaaaggtcactggggctgggagtgcctacttccctctgtgagtgtcaccccagtccacccagtaccatacctttctctct

SEQ ID NO: 556146 - DNA, 120 bp, Artificial Sequence
  ENSG00000168961_25 (sequence is synthesized)
aattaaaacaaaaacacattagatcccaattagaaaaacaaaaacgatgccaacaaagcagtctctgccatacaggttgtgtgcaagatccagacaaatgcaaagcacaggcgccgaggc

SEQ ID NO: 556147 - DNA, 120 bp, Artificial Sequence
  ENSG00000168961_26 (sequence is synthesized)
cctgttcagcctgccttctccacggtgccgttctcccagcctgtctgtttcccacccaggcccagggggcgcagacaaaaaacccagacagtcatccacacagtgcagagcgcccctgga

SEQ ID NO: 556148 - DNA, 120 bp, Artificial Sequence
  ENSG00000168961_27 (sequence is synthesized)
aagtcgttccctctacaaaggacttcctagtgggtgtgaaaggcagcggtggccacagaggcggcggagagatggccttcagcggttcccaggctccctacctgagtccagtttgctgtg

SEQ ID NO: 556149 - DNA, 120 bp, Artificial Sequence
  ENSG00000168961_28 (sequence is synthesized)
ctcaaggccctcttgggccaccatgcttttgcatatgctgtccctggtcccggaagcaccctctgccagcctgcctcgagcacatgcctaattgcccttccatgctctgcctaagtgccg

SEQ ID NO: 556150 - DNA, 120 bp, Artificial Sequence
  ENSG00000168961_29 (sequence is synthesized)
ctcctctgggagtcctccccgcctggaatattgttggacgctcccctggtgtccccacagagtctgtatgtatctgtgccatgccagttcacagcaccccattgtaactgtatttgcgtg

SEQ ID NO: 556151 - DNA, 120 bp, Artificial Sequence
  ENSG00000168961_30 (sequence is synthesized)
tctgtccccgttactccacccccatgtccctatgcccatgaggccccagagggccaggactgtggcttgttcatttgcactgtgcctggcactcagtagggactcagtgaatgaatgtgg

SEQ ID NO: 556152 - DNA, 120 bp, Artificial Sequence
  ENSG00000168961_31 (sequence is synthesized)
aatgtggttcacacagccagggagaatgggataccagccagggcaagaacagtctactgggtggggcaggatccaggacaaggaggtgagcagcccttcctccggccactcaagtagtgg

SEQ ID NO: 556153 - DNA, 120 bp, Artificial Sequence
  ENSG00000168961_32 (sequence is synthesized)
ggactgggaggaggggcgctttgtctacgcagtcttcttatggctcatcaccgtacagacagggcacctgcctcctgccacgctgacttcaggactggtcgagccccagggaacatttgc

SEQ ID NO: 556154 - DNA, 120 bp, Artificial Sequence
  ENSG00000168961_33 (sequence is synthesized)
agggcagcccaactttggccctggccctggcgctggccctggctctggggaggatagaaagtgtgctggatacagtcagacagaactggctgccactttggatttgatcccttccacctt

SEQ ID NO: 556155 - DNA, 120 bp, Artificial Sequence
  ENSG00000168961_34 (sequence is synthesized)
ggcaagcttgggcaagttgcttaatctttctgagcctcgttgcctcactagggacacaggagctgaggctgcttcccttgttggaaagcactgaagcccaggaatcgacccacaataggc

SEQ ID NO: 556156 - DNA, 120 bp, Artificial Sequence
  ENSG00000168961_35 (sequence is synthesized)
cttcaacaaataccacttctcaccttatgggtgaaatatggcactggaagtaatgctcttcgctgtgggagctacagaaagcaatgaggtctctatcaaacccagtctcctctctctcga

SEQ ID NO: 556157 - DNA, 120 bp, Artificial Sequence
  ENSG00000168961_36 (sequence is synthesized)
gaggaaccagtggggataccctaccccccaaccccaaagccctgtacacctgggggtaaaaatctgggtgccacgggctcaggaaggcttgcttgggagcaagagggaggtgggtgtgtc

SEQ ID NO: 556158 - DNA, 120 bp, Artificial Sequence
  ENSG00000168961_37 (sequence is synthesized)
cggggaggcatttctgagcacaagagcctccctggagttttgccaccatctcctcccattctgtggtgcccgcgataaccaccattctgactctcctcacccctccagcctcccggcgtg

SEQ ID NO: 556159 - DNA, 120 bp, Artificial Sequence
  ENSG00000168961_38 (sequence is synthesized)
tggcctgccaacccggctcccattgtaagtctcttgctttctttttggatcgtcctcattttggcttttctgggctcatggaggaggcagggccaggcattgggcctctcccattgggag

SEQ ID NO: 556160 - DNA, 120 bp, Artificial Sequence
  ENSG00000168961_39 (sequence is synthesized)
tggggagggcacagaccagacccttgaccatctgcccggcctggtgaggttgggggttggatgtgggggttggatgaaacaacctgagttgccaccccgtgggcagccacggaagaccat

SEQ ID NO: 556161 - DNA, 120 bp, Artificial Sequence
  ENSG00000168961_40 (sequence is synthesized)
gccagagccaccagcgtccccatctgtcttctccagggttctaacctttgcccctcgctcatccccttgagagaagagacacctgggcccaccctctgtggggtctgtggggccattggg

SEQ ID NO: 556162 - DNA, 120 bp, Artificial Sequence
  ENSG00000168961_41 (sequence is synthesized)
cttgttacgccccctggagggtgcctgccgtgtggcgccctctggtgggagctggtggttttcacacgtgagagcctgggtgagacctggtttctttcttccagacccagacagtcatcc

SEQ ID NO: 556163 - DNA, 120 bp, Artificial Sequence
  ENSG00000168961_42 (sequence is synthesized)
ggaaggctactgatgatggggaggaaatgggactcagaattcggtggataaaggttcaggtgggctgcccaccccaggttccacatcaacctgtgctctgggaaccacatcgccttccac

SEQ ID NO: 556164 - DNA, 120 bp, Artificial Sequence
  ENSG00000168961_43 (sequence is synthesized)
gtcaatggctctgtgcagctgtcctacatcagcttccagccgatgcctttcatcaccaccattctgggagggctgtacccatccaagtccatcctcctgtcaggcactgtcctgcccagt

SEQ ID NO: 556165 - DNA, 120 bp, Artificial Sequence
  ENSG00000168961_44 (sequence is synthesized)
cgtccctaacccatgccacagggcagcactccacaggcacaacctgcacccaggggtgccattaacctggactccaggatgaatggggccctgggagctgacggtctaaggagggcgtgg

SEQ ID NO: 556166 - DNA, 120 bp, Artificial Sequence
  ENSG00000168961_45 (sequence is synthesized)
gatggtcagagttggatgattatgttctgggttgaaccttgcacactgtgactaagagttgcaaaaatcaaacttcctccatttcccgtaactgctctcatccactctgaagctctcctt

SEQ ID NO: 556167 - DNA, 120 bp, Artificial Sequence
  ENSG00000168993_0 (sequence is synthesized)
agccgccgccgcagctcaccgggcgccacatggacccagccggcccgagcgcgccccgccgctgaccgcccgcgccccgggaaggaagaacactcgctcccggccatacttgcgtgtgag

SEQ ID NO: 556168 - DNA, 120 bp, Artificial Sequence
  ENSG00000168993_1 (sequence is synthesized)
ttctgacccctggaggagccactgtggaagcagagcaatcgccatggagtttgtgatgaagcaggctctaggaggggccaccaaggacatggggaagatgctggggggtgacgaggagaa

SEQ ID NO: 556169 - DNA, 120 bp, Artificial Sequence
  ENSG00000168993_2 (sequence is synthesized)
ggacccagacgccgccaagaaggaggaggagcggcaggaggcgctgcgccaggcggaggaggagcgcaaggccaagtacgccaagatggaggcggagcgcgaggccgtgcgccagggcat

SEQ ID NO: 556170 - DNA, 120 bp, Artificial Sequence
  ENSG00000168993_3 (sequence is synthesized)
ccgagacaagtacggcatcaagaagaaggaggagcgcgaggccgaggcccaggccgccatggaggccaactccgaggggagcttgacgcggcccaagaaggccatcccgccgggctgcgg

SEQ ID NO: 556171 - DNA, 120 bp, Artificial Sequence
  ENSG00000168993_4 (sequence is synthesized)
ggacgaggtggaggaggaggacgagagcatcctggacaccgtcatcaagtacctgcccgggccgctgcaggacatgctcaagaagtagccgcgcgcgggacagcggccccgcggagcccc

SEQ ID NO: 556172 - DNA, 120 bp, Artificial Sequence
  ENSG00000168993_5 (sequence is synthesized)
cgcccctccccctacagatcctccgcggaggcccctgagggacgagcagagcgcagcccccacgccgatataagccatagccccaggcccgccctgcccgcgcccgccgcctccctcacc

SEQ ID NO: 556173 - DNA, 120 bp, Artificial Sequence
  ENSG00000168993_6 (sequence is synthesized)
cggcaaggggcgcgcgcccccaggacccccccagtccgccccgtgctcctctgcccgcgggtggctggagccccatcgcctgggacgcccctttctcttgctgtttaccgcccacccagc

SEQ ID NO: 556174 - DNA, 120 bp, Artificial Sequence
  ENSG00000168993_7 (sequence is synthesized)
cagcagcgcccgaggccagggccgccgaagggcagccccgcgaccacccctgtgcgcgcgttcgcggcggtgggcgcctgtcgggcccgcactcaggagcacagccatagcagacggggg

SEQ ID NO: 556175 - DNA, 120 bp, Artificial Sequence
  ENSG00000168993_8 (sequence is synthesized)
gtgagtatttgcgtccgcacgcggccgctctccgccccccggcctggccccctcgcgcccctgtccatccgtctctgtccgcgtcctttcctctcctctctggaaggttttgcttcttac

SEQ ID NO: 556176 - DNA, 120 bp, Artificial Sequence
  ENSG00000168993_9 (sequence is synthesized)
gaacgccacggccgtgttcacttctaaactaaaggaaacaaagcaataggtttgggggacgcccagcccccacccccgtcaccccgctcttcccaagtcctcgccccccgcccggcctcc

SEQ ID NO: 556177 - DNA, 120 bp, Artificial Sequence
  ENSG00000168993_10 (sequence is synthesized)
tagcctctccgcccacgcggctgctgcttctccctggggaggacccctgccctcggccattgaacactgcaccctccacaggagccgcagaggcccgaggcaccggacgctggagaccct

SEQ ID NO: 556178 - DNA, 120 bp, Artificial Sequence
  ENSG00000168993_11 (sequence is synthesized)
gcgcccctgcccagcacctcctccgtgggcagctcctcgggtggggcctgcggggttccctgcgcgcagctggcgcgtgtgtggcctaatccacctggtggccctgcggggcggcatccg

SEQ ID NO: 556179 - DNA, 120 bp, Artificial Sequence
  ENSG00000168993_12 (sequence is synthesized)
agcccctgtttctcctccattcatgtttaatttgcatcacaatttgttgaatctcaggtaaatgaggtctttgcatttaatgagttttatcttgacaggcgccgcctcgcccccgggccc

SEQ ID NO: 556180 - DNA, 120 bp, Artificial Sequence
  ENSG00000168993_13 (sequence is synthesized)
tttcgtccacatcaaaaatgcatcaagtctccacgtgtttcgggccagggcgtggcttggcattgaccttcatgaccttacatagctttagagaagccataacgttagactgcaatacta

SEQ ID NO: 556181 - DNA, 120 bp, Artificial Sequence
  ENSG00000168993_14 (sequence is synthesized)
acgaccgacgcccctccgggcagagaccaccgcgcccctctgcgccccagcgacgcggcccgcggggacgtcgctgtccgtcctgctcgccctgtgccctctcactgacttctcccgggt

SEQ ID NO: 556182 - DNA, 120 bp, Artificial Sequence
  ENSG00000168993_15 (sequence is synthesized)
cgtgtcttttaaaaactcctgttttcacaccttacaaagccagctctgagcagacagggcgtcctctcgtagaacctgcgcaccccgttcccagcgcatggcgccccgggccgcgagctt

SEQ ID NO: 556183 - DNA, 120 bp, Artificial Sequence
  ENSG00000168993_16 (sequence is synthesized)
agcttagaccgtggtgtcctctgtccgtctgtcctgcgcctgcgcctcctcctgcatgtcggggcccctgcgtgtgttctctccggatggaatcacagccaataaacaccagtgatttca

SEQ ID NO: 556184 - DNA, 120 bp, Artificial Sequence
  ENSG00000168993_17 (sequence is synthesized)
agaaggtgggggagtgtggctgagacactagcccggccctggacatctgaatggggcggtctgaatcaccaacttctgtaccaggggccaccaaggacatggggaagatgctggggggtg

SEQ ID NO: 556185 - DNA, 120 bp, Artificial Sequence
  ENSG00000168993_18 (sequence is synthesized)
aaaatggctgccgcctgcgttccaaaatggctgccgccgcccacctttcccgtggaggctgagcacgtcgctccccacgcttgccggcctccaggctgacgaccgccagagccgtctctg

SEQ ID NO: 556186 - DNA, 80 bp, Artificial Sequence
  ENSG00000168994_0 (sequence is synthesized)
ttcccggctggtccagtcaccgacctgcggctccggggccgcgagggaggaggcgcggggggcgcgaggcgggggcgagc

SEQ ID NO: 556187 - DNA, 120 bp, Artificial Sequence
  ENSG00000168994_1 (sequence is synthesized)
gtctctgcggaggcggcgggggcgcggccagccggacctcttcctttccagagcggcccgcggcgcccgttccgcgggaggcgggcgggaggcggacgcggcctaacctcgacgtcgact

SEQ ID NO: 556188 - DNA, 120 bp, Artificial Sequence
  ENSG00000168994_2 (sequence is synthesized)
aacctcgacgtcgactaccgcgccgcccgcgatgggaagcgccttataaagccgcgcccggccggcccgagccactcgccgccgcgccgccccgctgccccgaacgcgggccatacgcag

SEQ ID NO: 556189 - DNA, 80 bp, Artificial Sequence
  ENSG00000168994_3 (sequence is synthesized)
cctccttggagtgacgggccgaccccggacgaccccggccacggacagacccgggacgaccccggccggggcgcgcctcc

SEQ ID NO: 556190 - DNA, 120 bp, Artificial Sequence
  ENSG00000168994_4 (sequence is synthesized)
gggcatgcgtgcgacatggcctcggcggtgtttgagggcacgtcgctcgtgaacatgttcgtgcgcggctgctgggtgaacggcatccgcaggctcatcgtcagccggcgcggcgacgaa

SEQ ID NO: 556191 - DNA, 120 bp, Artificial Sequence
  ENSG00000168994_5 (sequence is synthesized)
gaggagttcttcgagatccgcacggagtggtcggaccgcagcgtgctctacctgcaccgcagcctggcggacctgggccgcctgtggcagcgcctgcgcgacgcctttcccgaggaccgg

SEQ ID NO: 556192 - DNA, 120 bp, Artificial Sequence
  ENSG00000168994_6 (sequence is synthesized)
tccgaactggcgcaggggccgctgcggcaaggactggttgccataaaggaagcccacgacatagagaccaggcttaatgaggtggagaagctgctgaagacgatcataagcatgccctgt

SEQ ID NO: 556193 - DNA, 120 bp, Artificial Sequence
  ENSG00000168994_7 (sequence is synthesized)
aaatattctagatcggaagttgtgctcaccttcttcgaaagatctcctctggatcaggtgttaaaaaatgataatgtgcataaaattcaacccagctttcaaagtccagtcaaaatatca

SEQ ID NO: 556194 - DNA, 120 bp, Artificial Sequence
  ENSG00000168994_8 (sequence is synthesized)
gaaatcatgaggtccaatggattttgtttagcaaataccgaaacaatagttattgaccacagtataccaaatggaagagaccagcagctgggcgtggacccaacagagcatttatttgag

SEQ ID NO: 556195 - DNA, 120 bp, Artificial Sequence
  ENSG00000168994_9 (sequence is synthesized)
gacggggacgacccagcagcctacgtcaccaacctgtcatattaccacctggtccccttcgagacagacatttgggactgaacctctctatcaggcctcccccgcctcagctgttcactg

SEQ ID NO: 556196 - DNA, 120 bp, Artificial Sequence
  ENSG00000168994_10 (sequence is synthesized)
ccagctctgatgctgtccactgtgctggcccccatggtcacagctgctgccccagctctggaactcccagacgtcccaggccccactgacgccaggaggcctgggtgtcctgcaagtgga

SEQ ID NO: 556197 - DNA, 120 bp, Artificial Sequence
  ENSG00000168994_11 (sequence is synthesized)
gcagcaggggctcctagtgggccaggctgaccgcagagtctccagcaagctgaggtcacagccggaggccacagggcctgtgttctgagggtcttcactccctgcttggtgcccacaggg

SEQ ID NO: 556198 - DNA, 120 bp, Artificial Sequence
  ENSG00000168994_12 (sequence is synthesized)
ctgcgcactgccagggcagggacagttcctgtggggctcgctctcactgctactgcttcctgggaggtgcatccctcttggtgaagtggcctagtgccccccagccaccctgactcccca

SEQ ID NO: 556199 - DNA, 120 bp, Artificial Sequence
  ENSG00000168994_13 (sequence is synthesized)
ccattccctcccacggcaaacgcacaaaacgtcttgagggagattttgacaagtcacccattccaggtgccacaggcaggggatgtttagtaatccaggatttctctgagaactgggata

SEQ ID NO: 556200 - DNA, 120 bp, Artificial Sequence
  ENSG00000168994_14 (sequence is synthesized)
tgtggcctttttttttttctttttatcttttatctggaaactgggtttgggtcaaccccaggagtatttgcagaaggcccagcacagtggggggtattggctgcagggcagggaaggcat

SEQ ID NO: 556201 - DNA, 120 bp, Artificial Sequence
  ENSG00000168994_15 (sequence is synthesized)
tgccgactagataaccgtgtgagcttggactgagcgttggtggttcttcccaaaggaaaggaatttcttcccggcctgccaggtctctgggccttcagcgcgggtcctggtgctgcggcc

SEQ ID NO: 556202 - DNA, 120 bp, Artificial Sequence
  ENSG00000168994_16 (sequence is synthesized)
acaccaccctggggtgctcattgacagagctgccataatgaacttgaaaggacgggaatcacgagggaagctggggctcccctgcccacaggagaggatccccgttcttcaagcttctct

SEQ ID NO: 556203 - DNA, 120 bp, Artificial Sequence
  ENSG00000168994_17 (sequence is synthesized)
gctcagtgtctactaacgaccgacatttgctaatgtaaataatagtaaattattgagaattctaattcttttacacagtctgtttttaatctattttaattaaataaaatctatgactct

SEQ ID NO: 556204 - DNA, 120 bp, Artificial Sequence
  ENSG00000168994_18 (sequence is synthesized)
tgcaaagccgacggatagaacctgtgatgggaagacttctgctctgcgcttctcatggggagatagaaaagcacccgagccttcatgcctcgagctatggactggttgccataaaggaag

SEQ ID NO: 556205 - DNA, 120 bp, Artificial Sequence
  ENSG00000168994_19 (sequence is synthesized)
tcccctgcaaaacaaaatcagaccagaacttctgaaaaagttagtctccgtgaccaataatactaggcacgtttgcatcagcctcggtcacacaagtgtgggggagacgccagtgtcctt

SEQ ID NO: 556206 - DNA, 120 bp, Artificial Sequence
  ENSG00000168994_20 (sequence is synthesized)
gggcacctacttccccatccctgcaaagccgacggatagaacctgtgatgggaagacttctgctctgcgcttctcatggggagatagaaaagcacccgagccttcatgcctcgagctatg

SEQ ID NO: 556207 - DNA, 120 bp, Artificial Sequence
  ENSG00000168995_0 (sequence is synthesized)
gcagttcctgagagaagaaccctgaggaacagacgttccctcgcggccctggcacctccaaccccagatatgctgctgctgctgctgctgcccctgctctgggggagggagagggtggaa

SEQ ID NO: 556208 - DNA, 120 bp, Artificial Sequence
  ENSG00000168995_1 (sequence is synthesized)
ggacagaagagtaaccggaaggattactcgctgacgatgcagagttccgtgaccgtgcaagagggcatgtgtgtccatgtgcgctgctccttctcctacccagtggacagccagactgac

SEQ ID NO: 556209 - DNA, 120 bp, Artificial Sequence
  ENSG00000168995_2 (sequence is synthesized)
tctgacccagttcatggctactggttccgggcagggaatgatataagctggaaggctccagtggccacaaacaacccagcttgggcagtgcaggaggaaactcgggaccgattccacctc

SEQ ID NO: 556210 - DNA, 120 bp, Artificial Sequence
  ENSG00000168995_3 (sequence is synthesized)
cttggggacccacagaccaaaaattgcaccctgagcatcagagatgccagaatgagtgatgcggggagatacttctttcgtatggagaaaggaaatataaaatggaattataaatatgac

SEQ ID NO: 556211 - DNA, 120 bp, Artificial Sequence
  ENSG00000168995_4 (sequence is synthesized)
cagctctctgtgaacgtgacagccttgacccacaggcccaacatccttatccccggtaccctggagtctggctgcttccagaatctgacctgctctgtgccctgggcctgtgagcagggg

SEQ ID NO: 556212 - DNA, 120 bp, Artificial Sequence
  ENSG00000168995_5 (sequence is synthesized)
acgccccctatgatctcctggatggggacctctgtgtcccccctgcacccctccaccacccgctcctcagtgctcaccctcatcccacagccccagcaccacggcaccagcctcacctgt

SEQ ID NO: 556213 - DNA, 120 bp, Artificial Sequence
  ENSG00000168995_6 (sequence is synthesized)
caggtgaccttgcctggggccggcgtgaccacgaacaggaccatccaactcaatgtgtcctaccctcctcagaacttgactgtgactgtcttccaaggagaaggcacagcatccacagct

SEQ ID NO: 556214 - DNA, 120 bp, Artificial Sequence
  ENSG00000168995_7 (sequence is synthesized)
ccctgccaggctgagctggacctggaggagtctgaccctgtacccctcacagccctcaaaccctctggtactggagctgcaagtgcacctgggggatgaaggggaattcacctgtcgagc

SEQ ID NO: 556215 - DNA, 120 bp, Artificial Sequence
  ENSG00000168995_8 (sequence is synthesized)
tcagaactctctgggttcccagcacgtttccctgaacctctccctgcaacaggagtacacaggcaaaatgaggcctgtatcaggagtgttgctgggggcggtcgggggagctggagccac

SEQ ID NO: 556216 - DNA, 120 bp, Artificial Sequence
  ENSG00000168995_9 (sequence is synthesized)
agccctggtcttcctctccttctgtgtcatcttcattgtagtgaggtcctgcaggaagaaatcggcaaggccagcagcggacgtgggagacataggcatgaaggatgcaaacaccatcag

SEQ ID NO: 556217 - DNA, 120 bp, Artificial Sequence
  ENSG00000168995_10 (sequence is synthesized)
gggctcagcctctcagggtaacctgactgagtcctgggcagatgataacccccgacaccatggcctggctgcccactcctcaggggaggaaagagagatccagtatgcacccctcagctt

SEQ ID NO: 556218 - DNA, 120 bp, Artificial Sequence
  ENSG00000168995_11 (sequence is synthesized)
tcataagggggagcctcaggacctatcaggacaagaagccaccaacaatgagtactcagagatcaagatccccaagtaagaaaatgcagaggctcgggcttgtttgagggttcacgaccc

SEQ ID NO: 556219 - DNA, 120 bp, Artificial Sequence
  ENSG00000168995_12 (sequence is synthesized)
ctccagcaaaggagtctgaggctgattccagtagaattagcagccctcaatgctgtgcaacaagacatcagaacttattcctcttgtctaactgaaaatgcatgcctgatgaccaaactc

SEQ ID NO: 556220 - DNA, 120 bp, Artificial Sequence
  ENSG00000168995_13 (sequence is synthesized)
tccctttccccatccaatcggtccacactccccgccctggcctctggtacccaccattctcctctgtacttctctaaggatgactactttagattccgaatatagtgagattgtaacgtg

SEQ ID NO: 556221 - DNA, 120 bp, Artificial Sequence
  ENSG00000168995_14 (sequence is synthesized)
cagcaccacggcaccagcctcacctgtcaggtgaccttgcctggggccggcgtgaccacgaacaggaccatccaactcaatgtgtcctgtctccatgtctttctgtcccagaccctcctc

SEQ ID NO: 556222 - DNA, 120 bp, Artificial Sequence
  ENSG00000168995_15 (sequence is synthesized)
ggcaagaatgagctcacgggtgcgtggcaagaatttcaagagcgcccttgtctgtggggctccacatctgtggtgaaccttgggccccaccacccaggaggcaggagcctctgttttcaa

SEQ ID NO: 556223 - DNA, 120 bp, Artificial Sequence
  ENSG00000168995_16 (sequence is synthesized)
cactggggtctctgggactggaccaccctcctcccacctcagttacccctccagcgccccaacaggaaatacagggcaggggttggtctgcccactgcaccccgatctgaccacactgaa

SEQ ID NO: 556224 - DNA, 120 bp, Artificial Sequence
  ENSG00000169006_0 (sequence is synthesized)
actaaccaggcagctcgcccagactccgggcagtgagagggagggagcgccggccgcgggagcgggatggaaaccagcagcccgcggcccccgcggcccagctccaacccggggctgagc

SEQ ID NO: 556225 - DNA, 120 bp, Artificial Sequence
  ENSG00000169006_1 (sequence is synthesized)
ctggacgcccggctgggcgtggacactcgcctctgggccaaggtgctgttcaccgcgctctacgcactcatctgggcgctgggcgcggcgggcaatgcgctgtccgcgcacgtggtgctg

SEQ ID NO: 556226 - DNA, 120 bp, Artificial Sequence
  ENSG00000169006_2 (sequence is synthesized)
aaggcgcgggccgggcgcgcggggcgcctgcgccaccacgtgctcagcctggcgctcgcgggcctgctgctgctgctggtcggcgtgccggtggagctctacagcttcgtgtggttccac

SEQ ID NO: 556227 - DNA, 120 bp, Artificial Sequence
  ENSG00000169006_3 (sequence is synthesized)
tacccctgggtcttcggcgacctgggctgccgcggctactacttcgtgcacgagctgtgcgcctacgccacggtgctgagcgtggcaggcctgagcgccgagcgctgcctagccgtgtgc

SEQ ID NO: 556228 - DNA, 120 bp, Artificial Sequence
  ENSG00000169006_4 (sequence is synthesized)
cagcccctgcgtgcccgcagcctgctgacgccacgccggacccggtggctggtggcgctctcgtgggccgcctcgctcggcctcgccctgcccatggccgtcatcatggggcagaagcac

SEQ ID NO: 556229 - DNA, 120 bp, Artificial Sequence
  ENSG00000169006_5 (sequence is synthesized)
gaactcgagacggcggacggggagccggagcccgcctcgcgagtgtgcacggtgctggtgagccgcaccgcgctccaagtctttatccaggtgaatgtgctggtgtccttcgtgctcccc

SEQ ID NO: 556230 - DNA, 120 bp, Artificial Sequence
  ENSG00000169006_6 (sequence is synthesized)
acctgctggccctctgctcccaagtgccgtccacttctaccccgggcagctccacccccagccgcctggagctgctgagtgaggagggtctcctcagcttcatcgtatggaagaagacct

SEQ ID NO: 556231 - DNA, 120 bp, Artificial Sequence
  ENSG00000169006_7 (sequence is synthesized)
ttatccagggaggccaggtcagcctggtgagacataaagacgtgcgccggatccgcagcctccagcgcagcgtccaggttctcagagccatcgtggtcatgtatgtcatctgctggctgc

SEQ ID NO: 556232 - DNA, 120 bp, Artificial Sequence
  ENSG00000169006_8 (sequence is synthesized)
cgtaccatgcccgcaggctcatgtactgctacgtacctgatgacgcgtggactgacccactgtacaatttctaccactacttctacatggtgaccaacacacttttctacgtcagctcag

SEQ ID NO: 556233 - DNA, 120 bp, Artificial Sequence
  ENSG00000169006_9 (sequence is synthesized)
ctgtgactcctcttctctacaacgccgtgtcctcctccttcagaaaactcttcctggaagccgtcagctccctgtgtggagagcaccaccccatgaagcggttacccccgaagccccaga

SEQ ID NO: 556234 - DNA, 120 bp, Artificial Sequence
  ENSG00000169006_10 (sequence is synthesized)
gtcccaccctaatggatacagcttcaggctttggggatcccccagaaacccggacctgaatgtaatgcaagaatgaacagaacaagcaaaatgaccagctgcttagtcacctggcaaagc

SEQ ID NO: 556235 - DNA, 120 bp, Artificial Sequence
  ENSG00000169006_11 (sequence is synthesized)
aggtgagcaacctcatcactaatcattcaagcttcgcagccagggcgacttctatcaacccctgctctgctgagaaccatcaagcgcagggaagccacgtgacccctcctagcctcaggc

SEQ ID NO: 556236 - DNA, 120 bp, Artificial Sequence
  ENSG00000169006_12 (sequence is synthesized)
tccctcgtctgtgtagtggagataaagaacagcacccatctcttagtgttgcctgagactaaagtgcttagcacagaacctggtgcgtagtagatgctcaataaatttttgctggcacga

SEQ ID NO: 556237 - DNA, 120 bp, Artificial Sequence
  ENSG00000169016_0 (sequence is synthesized)
ggtgtactgcgcatgcgggaagatggcgggccgggcgacttgagatccgcgggtctccctcctctttttccgtctgcgtcgggagctcccgggcacgtgaggccgtgccgcgtttactgg

SEQ ID NO: 556238 - DNA, 120 bp, Artificial Sequence
  ENSG00000169016_1 (sequence is synthesized)
cgggcgggacggcctagccgggcggcgcctcggaggaagccgcggaccccttaggtgctgggcccttggaaatcggcgcgtggggggcggtgctcgagctgagcgcgagagggcgggaga

SEQ ID NO: 556239 - DNA, 120 bp, Artificial Sequence
  ENSG00000169016_2 (sequence is synthesized)
gctcgtggggtgcgaggggagcaggacgcccggccgggcagcatgagtcagcagcggccggcgaggaagttacccagtctcctcctggacccgacggaggagacggttcgccgtcggtgc

SEQ ID NO: 556240 - DNA, 120 bp, Artificial Sequence
  ENSG00000169016_3 (sequence is synthesized)
cgagaccccatcaacgtggagggcctgctgccatcaaaaataaggattaatttagaagataatgtacaatatgtgtccatgagaaaagctctaaaagtgaagagacctcgttttgatgta

SEQ ID NO: 556241 - DNA, 120 bp, Artificial Sequence
  ENSG00000169016_4 (sequence is synthesized)
tcgctggtttatttaactcgaaaatttatggatcttgtcagatctgctcccgggggtattcttgacttaaacaaggttgcaacgaaactgggagtccgaaagcggagagtgtatgacatc

SEQ ID NO: 556242 - DNA, 120 bp, Artificial Sequence
  ENSG00000169016_5 (sequence is synthesized)
accaatgtcttagatggaatcgacctcgttgaaaagaaatccaagaaccatattagatggataggatctgatcttagcaattttggagcagttccccaacaaaagaagctacaggaggaa

SEQ ID NO: 556243 - DNA, 120 bp, Artificial Sequence
  ENSG00000169016_6 (sequence is synthesized)
ctttctgacttatcagcaatggaagatgctttggatgagttaattaaggattgtgctcagcagctgtttgagttaacagatgacaaagaaaatgaaagactagcatatgtgacctatcaa

SEQ ID NO: 556244 - DNA, 120 bp, Artificial Sequence
  ENSG00000169016_7 (sequence is synthesized)
gacattcatagcattcaggccttccatgaacagatcgtcattgcagttaaagctccagcagaaaccagattggatgttccagctcccagagaagactctatcacagtgcacataaggagc

SEQ ID NO: 556245 - DNA, 120 bp, Artificial Sequence
  ENSG00000169016_8 (sequence is synthesized)
accaacggacctatcgatgtctatttgtgtgaagtggagcagggtcagaccagtaacaaaaggtctgaaggtgtcgggacctcttcatctgagagcactcatccagaaggccctgaggaa

SEQ ID NO: 556246 - DNA, 120 bp, Artificial Sequence
  ENSG00000169016_9 (sequence is synthesized)
gaagaaaatcctcagcaaagtgaagaattgcttgaagtaagcaactgatggcatttgagaatttatgtatcactgagttttttgggaatatcttcgtggagaattacgcatcaaatttga

SEQ ID NO: 556247 - DNA, 120 bp, Artificial Sequence
  ENSG00000169016_10 (sequence is synthesized)
ttctcagagcaataaattatccatgaagtgctctcgttctcagtagcggcatcatggccagtagtgtctttgaggagttcaccacttagattactgagtaattgtggtttccacatttga

SEQ ID NO: 556248 - DNA, 120 bp, Artificial Sequence
  ENSG00000169016_11 (sequence is synthesized)
aaacaactccttttataattattcactgctttttgtcagtgaaatagacatcttgcctcctgaagtagcttcatcacagagtgtcatgaagacagacagtcaggctgaaatggacagttc

SEQ ID NO: 556249 - DNA, 120 bp, Artificial Sequence
  ENSG00000169016_12 (sequence is synthesized)
tttgtggactctacccttcccttcaaggagtatgtcatatatcacaaaagaaattgccttacactggttcatgtttgcagttactgttgtacattgcatagatgtacacacgaatttaaa

SEQ ID NO: 556250 - DNA, 120 bp, Artificial Sequence
  ENSG00000169016_13 (sequence is synthesized)
gacaaattctctaatctctttggtacctataacttattagaatcctctggatgagggttagaagagactttttccaaacttctacatgtagaagtatcataaatgtgctacacatttatg

SEQ ID NO: 556251 - DNA, 120 bp, Artificial Sequence
  ENSG00000169016_14 (sequence is synthesized)
tttgtggatttaattaaagtattttaatatggttttcagtgctaaaattggagtcagatacttcttggttttaagctgtctacctaattgctgtctcccagcagactggtggcatgccca

SEQ ID NO: 556252 - DNA, 120 bp, Artificial Sequence
  ENSG00000169016_15 (sequence is synthesized)
gtggctttgggggcaaggatagaaatgccatcaggaaatagctgaattcattgtgaaacatgaattcagtcatggtgataattggaaactcctttcaggtttttgcaagtagattttgta

SEQ ID NO: 556253 - DNA, 120 bp, Artificial Sequence
  ENSG00000169016_16 (sequence is synthesized)
atgtttgtgtatgcagccttgctgttgagtcagtccaaggggttttacttaggacaagttgtaccttgccctctctccagctctgctcccacattttcacatacctagctgtttctacct

SEQ ID NO: 556254 - DNA, 120 bp, Artificial Sequence
  ENSG00000169016_17 (sequence is synthesized)
cattgggtaagtcatttaccactctgtgcctcagtttactctgtagtttaccattagactgtgagctccttgagggactttgtcataatcactgttacatcccagtgcctcacaccatgc

SEQ ID NO: 556255 - DNA, 120 bp, Artificial Sequence
  ENSG00000169016_18 (sequence is synthesized)
ctggcccttaagaagtgctcaataaatgtctgaacaaataagtgagtggagtgagtgaattgtaagatcagaataataatatttggtttgtctatcgtacaagattcctgtatcgtttga

SEQ ID NO: 556256 - DNA, 120 bp, Artificial Sequence
  ENSG00000169016_19 (sequence is synthesized)
atattgcttttaaagaaatatttgaagcgacttcaaattcagactgtgtttaaaaagatttaaaatcggaatccaaaatcaaagtattaaaaaataatgctgagtgtttaggattcacat

SEQ ID NO: 556257 - DNA, 120 bp, Artificial Sequence
  ENSG00000169016_20 (sequence is synthesized)
acctctgagctctggtggcttttgccagtcctgtccctctgctgagcaccagcccttcctgcagcagtcctgccggtgtgtttctgtgcacctggggatgaagtgtgctcctcccccagc

SEQ ID NO: 556258 - DNA, 120 bp, Artificial Sequence
  ENSG00000169016_21 (sequence is synthesized)
ggttagcctcaatgcttttcctccctctgttttattatttgaaattagccaaagaaaagctgcagggggcactgctgatcatcactggactggtgggtcgtactgtttgacagaataggg

SEQ ID NO: 556259 - DNA, 120 bp, Artificial Sequence
  ENSG00000169016_22 (sequence is synthesized)
aatacaggaggaggagcaagcctagggtaaaacttaggtttgggacatgcttgatgaaagcaagagttgagcaggttgttgtgtgtatgtaggtcaggtgctcagcggaaaagtctgagc

SEQ ID NO: 556260 - DNA, 120 bp, Artificial Sequence
  ENSG00000169016_23 (sequence is synthesized)
tgtgtagtacgtcaggcagatgtcagtttagatgcgatagtttaagccacaagagtaggagaggtcatctaaagagtacagcaggcctaagggcatctatatttaaggagaaatacagaa

SEQ ID NO: 556261 - DNA, 120 bp, Artificial Sequence
  ENSG00000169016_24 (sequence is synthesized)
gaagtctcctgagaaggaataatggggcgggtggggagggagaaggcagtgtcccaaaaaccaacaaaggttttaccaaaggtaataccatcatttctgagcagcagttccttaacttgt

SEQ ID NO: 556262 - DNA, 120 bp, Artificial Sequence
  ENSG00000169016_25 (sequence is synthesized)
gaatgtggcaaatgttctcctttacaaattgttctgaaggtaaaatgagatcatgtaaacgaaaatcctttgtaaattacagatgtgtgttataaatgaagtatctctcgagtcactcca

SEQ ID NO: 556263 - DNA, 120 bp, Artificial Sequence
  ENSG00000169016_26 (sequence is synthesized)
atgtacctttgttcctgaagtaaccgccagtggtctttaaactaaatgtgacattgtggaggttctgagtaaggacatttctgactgaagaagctctaaaagtgaagagacctcgttttg

SEQ ID NO: 556264 - DNA, 120 bp, Artificial Sequence
  ENSG00000169016_27 (sequence is synthesized)
ccccatcaacgtggagggcctgctgttgtttattcaggcaaatctggcttgctgggctaggctcagctgagggctgccttcgccatgaatccttctccatcaaaaataaggattaattta

SEQ ID NO: 556265 - DNA, 120 bp, Artificial Sequence
  ENSG00000169016_28 (sequence is synthesized)
tatgattaaaatgatttgtttaagtgtatgagttgatgagaaactgaaatacaatttgttatgtgtacactgaaatgtaaagttgcaagttttagtaacaactcctgaggttatgggttg

SEQ ID NO: 556266 - DNA, 120 bp, Artificial Sequence
  ENSG00000169016_29 (sequence is synthesized)
tttctgcttccaaaacagattacttaagtagtagagtcagcttggggacttaatttatatatttaagatataaaattagaccattgaaagttaaatacaaaattagccaggcgtggtggc

SEQ ID NO: 556267 - DNA, 67 bp, Artificial Sequence
  ENSG00000169016_30 (sequence is synthesized)
cgaggttgctgtgagcggagatggcgccattgcactccagtctgggcaacaggagcgaaactccgtc

SEQ ID NO: 556268 - DNA, 120 bp, Artificial Sequence
  ENSG00000169016_31 (sequence is synthesized)
ttggtagtagtataacctcaaacatacacaaacagtaggttttttaacttctgtgtggcatttcttagattaaattctggatgatgacctcaggggtacagtaccaaaccaaggttgatg

SEQ ID NO: 556269 - DNA, 120 bp, Artificial Sequence
  ENSG00000169018_0 (sequence is synthesized)
ctctcctcccggccctgtctgcgaaagctcgtcttcctccccgcccaagttccggcgccgctcttgcgggagcgttccgcatcgccccgggggcccctacgcgaggatctccggggccgt

SEQ ID NO: 556270 - DNA, 120 bp, Artificial Sequence
  ENSG00000169018_1 (sequence is synthesized)
tggcagcgcctggcacttctgagctcggcggacgagagcctgcaggtttcctccagtcagggacggcgaagggcggaaagcgcaggaggaggcagtgttaggccttaggccgggtgggcc

SEQ ID NO: 556271 - DNA, 120 bp, Artificial Sequence
  ENSG00000169018_2 (sequence is synthesized)
gggtcaggagagacgcgcccatctttcgccatccggggtgcgcgaggtcctctcgggacccggccggcgacccgtagctcgggcacgcgcctgtcgcatcccgcaggaaggaggggtccg

SEQ ID NO: 556272 - DNA, 120 bp, Artificial Sequence
  ENSG00000169018_3 (sequence is synthesized)
tccgccatggagatcccctcggtccagggccggcgcctgggacctggcgggcggccctgaccgccttcctccctgcgcgggctgggtcgcggacgtgcccttcgcggcactcggcctcct

SEQ ID NO: 556273 - DNA, 120 bp, Artificial Sequence
  ENSG00000169018_4 (sequence is synthesized)
ttcgcggcactcggcctcctctgcgtctccgccttccctgggccgcactgctgcctgggcgcggcggcggcgacggcgccctgttgaatgggctgtgagggcccaggtttaaagcgctgg

SEQ ID NO: 556274 - DNA, 120 bp, Artificial Sequence
  ENSG00000169018_5 (sequence is synthesized)
cgaacgcggcctccgggggcgcacggcagctgcagcggtggcgaccaaacgggtgttggagttggcggcggccatggagggcctggctggctatgtatacaaggcggccagcgagggcaa

SEQ ID NO: 556275 - DNA, 120 bp, Artificial Sequence
  ENSG00000169018_6 (sequence is synthesized)
ggtgctgactctggccgccttgcttctcaaccggtctgaaagcgacatccgctatctgcttggctatgtcagccagcagggagggcagcgctccacgcccctcatcatcgcagcccgcaa

SEQ ID NO: 556276 - DNA, 120 bp, Artificial Sequence
  ENSG00000169018_7 (sequence is synthesized)
tggacacgcaaaggtggtacgcttgctcttagaacattaccgggtgcagactcagcagactggcaccgtccgcttcgacgggtatgtcattgatggtgccactgctctttggtgtgcagc

SEQ ID NO: 556277 - DNA, 120 bp, Artificial Sequence
  ENSG00000169018_8 (sequence is synthesized)
tggagcaggacattttgaagttgttaaacttctagtcagccatggagccaacgtgaaccataccacagtaactaattcaacccccctgcgggcagcatgctttgatggcagactggacat

SEQ ID NO: 556278 - DNA, 120 bp, Artificial Sequence
  ENSG00000169018_9 (sequence is synthesized)
tgtgaaatacttggttgaaaataatgccaacatcagcattgccaacaaatatgacaacacctgcctaatgattgcggcatataagggacacactgatgtggtcagataccttttagaaca

SEQ ID NO: 556279 - DNA, 120 bp, Artificial Sequence
  ENSG00000169018_10 (sequence is synthesized)
acgtgctgatcccaatgccaaagcacattgtggagccacagcattgcactttgcagctgaagctgggcacatagatattgtgaaagagctgataaaatggcgtgctgctatagtagtgaa

SEQ ID NO: 556280 - DNA, 120 bp, Artificial Sequence
  ENSG00000169018_11 (sequence is synthesized)
tggccatgggatgacgccattgaaagtagctgccgaaagctgtaaagctgatgtcgtagaactgttactctctcatgctgattgcgaccgaagaagtcggattgaagctttggaactctt

SEQ ID NO: 556281 - DNA, 120 bp, Artificial Sequence
  ENSG00000169018_12 (sequence is synthesized)
gggtgcctcctttgcaaatgaccgtgagaactatgacatcataaagacataccactatctatatttagccatgttagagaggttccaagatggtgataacattctcgaaaaagaggttct

SEQ ID NO: 556282 - DNA, 120 bp, Artificial Sequence
  ENSG00000169018_13 (sequence is synthesized)
tccaccaatccatgcttatgggaatagaactgaatgtagaaatcctcaggaactggagtccattcggcaagacagagatgctcttcatatggaaggccttatagttcgggaacggatttt

SEQ ID NO: 556283 - DNA, 120 bp, Artificial Sequence
  ENSG00000169018_14 (sequence is synthesized)
aggtgctgacaatattgatgtttctcatcccatcatttacagaggagctgtttatgcggataatatggaatttgagcagtgtatcaagttgtggcttcatgccctgcacctcagacaaaa

SEQ ID NO: 556284 - DNA, 120 bp, Artificial Sequence
  ENSG00000169018_15 (sequence is synthesized)
aggtaacaggaacacccacaaggatcttcttcgatttgctcaagttttctcacaaatgatacatttgaatgaaactgtgaaggccccagacatagaatgtgttttgagatgcagtgtttt

SEQ ID NO: 556285 - DNA, 120 bp, Artificial Sequence
  ENSG00000169018_16 (sequence is synthesized)
ggaaatagaacaaagtatgaacagagtgaaaaatatttcagatgctgatgtccacaatgctatggacaattatgaatgtaatctctatacctttctgtatttagtgtgcatctctaccaa

SEQ ID NO: 556286 - DNA, 120 bp, Artificial Sequence
  ENSG00000169018_17 (sequence is synthesized)
aacacagtgcagcgaagaagatcagtgcaaaattaacaagcagatctacaacctgattcaccttgatcccagaactcgtgaaggtttcaccttgctgcatctggctgtcaattccaatac

SEQ ID NO: 556287 - DNA, 120 bp, Artificial Sequence
  ENSG00000169018_18 (sequence is synthesized)
tccagttgatgatttccacaccaatgacgtctgcagctttccaaatgcacttgtcacaaagctcctgctggactgtggtgctgaggtgaatgccgtggacaatgagggaaacagtgccct

SEQ ID NO: 556288 - DNA, 120 bp, Artificial Sequence
  ENSG00000169018_19 (sequence is synthesized)
tcatattatcgttcagtacaacaggcccatcagtgattttttgaccttgcactccatcatcattagcctagttgaagccggagctcacactgacatgacgaataaacagaataagactcc

SEQ ID NO: 556289 - DNA, 120 bp, Artificial Sequence
  ENSG00000169018_20 (sequence is synthesized)
gctagacaaaagtacaactggggtatctgaaatactgcttaaaactcaaatgaagatgagtctcaagtgcctggctgcccgagcagttcgggctaatgacattaactaccaagaccagat

SEQ ID NO: 556290 - DNA, 120 bp, Artificial Sequence
  ENSG00000169018_21 (sequence is synthesized)
ccccagaactcttgaagagtttgttggatttcattaagtgactggatatgtaaagtcgtttaatgtggtgctaaaaagtaaaggacttttaatcacagacagtagaattatgtgttcata

SEQ ID NO: 556291 - DNA, 120 bp, Artificial Sequence
  ENSG00000169018_22 (sequence is synthesized)
aattctgcttttctttccactacccttcctcccatcccatccttccttagttctgtatttgtttttcttgcctcatggtaattgatttcagacagactttaacaaaaccacattgttttg

SEQ ID NO: 556292 - DNA, 120 bp, Artificial Sequence
  ENSG00000169018_23 (sequence is synthesized)
gtgtaactataaggtatttgcatattggttacctatttgtctttcttttttttaaaggaacagatataaaatgttttgtttatgtaacaagggacatttataatttcaagttgataatgt

SEQ ID NO: 556293 - DNA, 120 bp, Artificial Sequence
  ENSG00000169018_24 (sequence is synthesized)
tttaaacagctgcttacaaaagtatttctgttaagcctatgtcagcatgttatccatgcagcagttttgaggattttatgaagaaaaagagctaaaaaggaacattaagaggaatgggat

SEQ ID NO: 556294 - DNA, 120 bp, Artificial Sequence
  ENSG00000169018_25 (sequence is synthesized)
atccaggtgttctgcacatgccaaactgctgtagatagtttacactcttccattatttatacggagtgatgcagcacattttagcattcaggaggatttttaaaaaatagctgcagatta

SEQ ID NO: 556295 - DNA, 120 bp, Artificial Sequence
  ENSG00000169018_26 (sequence is synthesized)
atctggaaaatgtgctaatttaataatagttacaaatttataaatttaaatccatttgaaattgttgcattatgctgggtagtatatacaaaatggttatcatcttaaaccaacttttca

SEQ ID NO: 556296 - DNA, 120 bp, Artificial Sequence
  ENSG00000169018_27 (sequence is synthesized)
gagaatcttgatggactctgcctttaggcttgaattcttcaaagtctattttaatgaaatttatctaaattgcagcagtctatttgattcagctcatagacatgtaaaaattatgaatgc

SEQ ID NO: 556297 - DNA, 120 bp, Artificial Sequence
  ENSG00000169018_28 (sequence is synthesized)
tgttttcttatgaaacaaattgtcacagtgtagttatacattctatttttgtccccttttccctttttctcctgtatcttttaaaatttggaaactacttttccagaaggcattatttat

SEQ ID NO: 556298 - DNA, 120 bp, Artificial Sequence
  ENSG00000169018_29 (sequence is synthesized)
atcactagtgtggtataggaacttacatgttttttatgatgaaaataattctcaatgccacttgaaaggtaattgtgtctgagagctgcaaatttttcaaccacaaaatgtcacttattc

SEQ ID NO: 556299 - DNA, 120 bp, Artificial Sequence
  ENSG00000169018_30 (sequence is synthesized)
ctacaggctatacagaggtctttatggtttttttgttttgttttaatggcaacattgtaactgtcaaactaaaagggtattctgtgattatcttttaagcattacagaaattcaagtgaa

SEQ ID NO: 556300 - DNA, 120 bp, Artificial Sequence
  ENSG00000169018_31 (sequence is synthesized)
agttatatgcttatttctattgatgttaaaaatgataatgaaagcaaaattagctgtatctgtaattttctctctagtgccaaatgaatgccttagctactcatagtgcatggtactgta

SEQ ID NO: 556301 - DNA, 120 bp, Artificial Sequence
  ENSG00000169018_32 (sequence is synthesized)
agtgaagacctgtagctttttttttttctttaatgaaaagcattataatgatgtagcagcatcagatataaacttaaaaaaaaaggtttcaattaacattttatatatggataatgcttt

SEQ ID NO: 556302 - DNA, 120 bp, Artificial Sequence
  ENSG00000169018_33 (sequence is synthesized)
gtaaagtgtaagagaaaggttgcagttggatcagtataaaacaatgaccaagccaaaatcagcaccctagggccttaaataaaatagagataccccacaaaatgaaatattttgaaggat

SEQ ID NO: 556303 - DNA, 120 bp, Artificial Sequence
  ENSG00000169018_34 (sequence is synthesized)
gggaggggacagaaggggggactatcccccaaggatgcaagatactttttacagttgctatcattatactttgtcttcttgcttcagttaggaaggttttgatggtaaattctgtcatgg

SEQ ID NO: 556304 - DNA, 120 bp, Artificial Sequence
  ENSG00000169018_35 (sequence is synthesized)
taatagatacctattttcctaacctgagattttacaaggaaggtttttaggttggcttaaatggaggtatttatttgagtgagccctaatttgaaaattaccagacttgatcctcctggt

SEQ ID NO: 556305 - DNA, 120 bp, Artificial Sequence
  ENSG00000169018_36 (sequence is synthesized)
atgaatcaaggaaatactgtaccttgctcttagcaactctcagtggcctgaaagagaaaatgcacttcttcaaggtgagtgaatcatgctttttccacagttcagatcagaccctttatt

SEQ ID NO: 556306 - DNA, 120 bp, Artificial Sequence
  ENSG00000169018_37 (sequence is synthesized)
tttcaaactacaaggcctgcttattggacagtctaaggaatagctttgatacttggtattcagttggttccattattaatgtatattatttttatttaaacatcaaaacttaaaatatca

SEQ ID NO: 556307 - DNA, 120 bp, Artificial Sequence
  ENSG00000169018_38 (sequence is synthesized)
gataatgttgcatgttttaaaaacacatttcatccctttggctacccaggaccagcactatttaagacactgcttatttataaaatgagaataatgattatatgtacatattcagacatc

SEQ ID NO: 556308 - DNA, 120 bp, Artificial Sequence
  ENSG00000169018_39 (sequence is synthesized)
aaaatttaatgacattctattttgagaagggaagacaatgctgaagaaagtaaaactgttgattgaaatgctgacagggtggagaacgaatttgaagacagtggaataaactatgaacta

SEQ ID NO: 556309 - DNA, 120 bp, Artificial Sequence
  ENSG00000169018_40 (sequence is synthesized)
tgctaatggtaattagattttttgtttgtttagtatagtggtaaattgtgtagtatcttgctgagaatctaattctatcttgtaaaatcaatccaaatgtgtattgtgaaacacctgtat

SEQ ID NO: 556310 - DNA, 120 bp, Artificial Sequence
  ENSG00000169018_41 (sequence is synthesized)
aaaatcatttttgaaataagtgatctacatgcctgtttttttaaaatgtttttggtagaattgtttgaaaatatgtttagccagacccttccccaacttaatttttttttaaaaaaggaa

SEQ ID NO: 556311 - DNA, 120 bp, Artificial Sequence
  ENSG00000169018_42 (sequence is synthesized)
aataggtaagaaaatgatagttctatatctcagccctctgtgaactctaggctgtctccattttgcagccactttggtcatttgatgtttactattggtatacttatgctttgaattgta

SEQ ID NO: 556312 - DNA, 120 bp, Artificial Sequence
  ENSG00000169018_43 (sequence is synthesized)
aatcttcattgatggtattacagattcaaccaaaacttctctgtcctgttcagtaattgttatataaatctggatgagctagggaggcccaggtggatgttttcattcgcaaatcatgag

SEQ ID NO: 556313 - DNA, 120 bp, Artificial Sequence
  ENSG00000169018_44 (sequence is synthesized)
aaacttaagtgggttttatgcacttgatagagttggcaaaattgaactatgaagttaactatttaactcaaggaatgggcggcaaacccatcccctcgattgataaagaaggggaacatt

SEQ ID NO: 556314 - DNA, 120 bp, Artificial Sequence
  ENSG00000169018_45 (sequence is synthesized)
tttacattagaactgacactgaaaacatagctttttcagtccaccctggttgctctagtagcccacagcccaatcacgttaaggttctttgctgtgggaattttaaataaaccaaacccc

SEQ ID NO: 556315 - DNA, 120 bp, Artificial Sequence
  ENSG00000169018_46 (sequence is synthesized)
aaagcagaccatctgtaagctttggtctgcttgtttctgagaagggttttatttcattatactaatagtggactaataattggtaattgtgagaacttaggtatgataacattgtttgaa

SEQ ID NO: 556316 - DNA, 120 bp, Artificial Sequence
  ENSG00000169018_47 (sequence is synthesized)
gtaaaatatgatttgggggcagcagctttctaaataccaactctgtttgacaaatgttttgaaaattaaaatttcaagtgagcaacaccctgttaagagttttcactatagttgaggcag

SEQ ID NO: 556317 - DNA, 120 bp, Artificial Sequence
  ENSG00000169018_48 (sequence is synthesized)
ctactttatgaataagaccactttgggttatttaagcagaagcgtttcttttttttttttggaatggggtgggatgaggagtgagttgccagacctttgattagtttgctggtttagaaa

SEQ ID NO: 556318 - DNA, 120 bp, Artificial Sequence
  ENSG00000169018_49 (sequence is synthesized)
cagccagtggctgaattagtgagtaaatgaatgaaagtataaaggacttgttttttatgatagattttctgtaagaatcttaaatgttccttttcaaattagatgtgttgatgcacacat

SEQ ID NO: 556319 - DNA, 120 bp, Artificial Sequence
  ENSG00000169018_50 (sequence is synthesized)
gactattctgtttttctcactgactatataacattaaaaaggggttaaagaaaacaaaactctgccttttgtgctatgaaatatttttagtccagaggttttaagctgtgtgtccattcc

SEQ ID NO: 556320 - DNA, 120 bp, Artificial Sequence
  ENSG00000169018_51 (sequence is synthesized)
tactctgaaaatgcatagctttgttctggatgtcatctcttgaaagtagaaaactcctatgtgtttatcacattgcagggctttcttatgtatttctggcagacttgcccaaatctttag

SEQ ID NO: 556321 - DNA, 120 bp, Artificial Sequence
  ENSG00000169018_52 (sequence is synthesized)
atgggctgggttatacagcatgccctcccccaaataagggatctgaaataaatactacactattgatagtggagatatattaatttttaaaactgtaaagtaaatgtggtctctaggttt

SEQ ID NO: 556322 - DNA, 120 bp, Artificial Sequence
  ENSG00000169018_53 (sequence is synthesized)
gtggtgtgtacctttgtgttaatgtgtagggaagagacagtgacttgatggttatggggagtgtatcttgatgtgtgtataggggtaagtattgctaaattatttacagcttttattcag

SEQ ID NO: 556323 - DNA, 120 bp, Artificial Sequence
  ENSG00000169018_54 (sequence is synthesized)
ggtgagtcatgtgatgaatggcctaatcagaaaagtgaaggagcgaagatgcaagcttgccaaatgatgaaatgaacaagattttgtatctattttttatcaggtgttgtaaaatttgtg

SEQ ID NO: 556324 - DNA, 120 bp, Artificial Sequence
  ENSG00000169018_55 (sequence is synthesized)
catggctttttgttgttgttgcttagtaactggtagaggagaaaagatgaggaaagaaactcagctttcctcacagtcttttcaaaggtacacagttggggagtaaaatctgactggcct

SEQ ID NO: 556325 - DNA, 120 bp, Artificial Sequence
  ENSG00000169018_56 (sequence is synthesized)
aatcgatggaaaagaccctgtccttttcaccccatcctgcaatcctccgtgcagaggaactacactgttgtattctagtaattcactgtgatttataacaaaccggtgatgtcattctat

SEQ ID NO: 556326 - DNA, 120 bp, Artificial Sequence
  ENSG00000169018_57 (sequence is synthesized)
tgtgcacttttgtcaaaccatttatgtgactttaataaacatagtaaacttgctgactgcaccagaggtccattagtgatttatatattgcatgacattttctatttgagtttgacatgt

SEQ ID NO: 556327 - DNA, 120 bp, Artificial Sequence
  ENSG00000169018_58 (sequence is synthesized)
agagtcatttttagtttcatggcaattgacagtcctaataactcagctaatttgaaactaacaatcttgctgtgtaaaaggaaaaaatggtgtttgtgttcagtaaatgtttgaaaaaaa

SEQ ID NO: 556328 - DNA, 120 bp, Artificial Sequence
  ENSG00000169018_59 (sequence is synthesized)
agtaaccagtgaatcaacttggtgatgaagaagctacctccacgcatttcctctgtgccttctgaagtgtctttacttttgctagtagaaagttcgtgatttttcaggtatgtcattgat

SEQ ID NO: 556329 - DNA, 120 bp, Artificial Sequence
  ENSG00000169018_60 (sequence is synthesized)
attcccgcacctagagaaggagtgaagcacagtgacctctgaacctccagtaccgttccacctgtataggcatatgaagtcattgagatatgaatttctgtaataacagctgcttgggaa

SEQ ID NO: 556330 - DNA, 120 bp, Artificial Sequence
  ENSG00000169018_61 (sequence is synthesized)
tactgctgctgaggcaatgtgcataagggagaatagtggggagaaaaaagagttaagaatttcgaaaggttttgcttattgccatctttttcagtcgtcaaagagatgttttgaggtggc

SEQ ID NO: 556331 - DNA, 120 bp, Artificial Sequence
  ENSG00000169019_0 (sequence is synthesized)
agacaagcggccagccttgacacgtgacccaagccccagcttcgcgcagggatggagccggaagaggggacgcccttgtggcggctgcagaagctgccggccgagctgggcccgcagctt

SEQ ID NO: 556332 - DNA, 120 bp, Artificial Sequence
  ENSG00000169019_1 (sequence is synthesized)
cttcacaaaataattgatggcatttgtggtcgagcttatcctgtgtaccaagattatcacactgtttgggaatcagaagaatggatgcacgttttagaagatattgccaaatttttcaaa

SEQ ID NO: 556333 - DNA, 120 bp, Artificial Sequence
  ENSG00000169019_2 (sequence is synthesized)
gccatagttggtaaaaacttacctgatgaagagatatttcagcagttgaatcagttgaattcacttcatcaagaaactatcatgaaatgcgtgaaaagtaggaaagatgaaatcaaacag

SEQ ID NO: 556334 - DNA, 120 bp, Artificial Sequence
  ENSG00000169019_3 (sequence is synthesized)
gctctgtcaagagaaatagttgctatttcctctgcacagctacaggattttgattggcaggtaaagcttgcactttccagtgacaagattgctgcattacgaatgccacttttaagcctg

SEQ ID NO: 556335 - DNA, 120 bp, Artificial Sequence
  ENSG00000169019_4 (sequence is synthesized)
catctagatgtaaaagaaaatggtgaagtaaaaccttattctattgaaatgagtagagaggagctgcagaatctaatacagtccttggaagcagcgaataaggtggtcctgcagttgaaa

SEQ ID NO: 556336 - DNA, 120 bp, Artificial Sequence
  ENSG00000169019_5 (sequence is synthesized)
taactggaaatgatgaataccagtcctatcagattttattgctccaacttatatggcagagtgaatactgcgtgttcagaaaccttgtgatgtcttgactgttgcaccaggctgagaaag

SEQ ID NO: 556337 - DNA, 120 bp, Artificial Sequence
  ENSG00000169019_6 (sequence is synthesized)
gataaaaatttatcaacattccttaacaggaaattacatggttgagaggaaatgcataaaatgaaagatgaaaaatctatagtagcagtttatattttcatgattgttttgcctcattta

SEQ ID NO: 556338 - DNA, 120 bp, Artificial Sequence
  ENSG00000169019_7 (sequence is synthesized)
ttaaatatttgagaaatctttggagatacatagttttattgaaagctaaaaataggttctaaagtaatgtaaaaatataaagcacaaatatacttgaatattgcttaaagaattgtgtga

SEQ ID NO: 556339 - DNA, 120 bp, Artificial Sequence
  ENSG00000169019_8 (sequence is synthesized)
atagcaacatatattatggatatatactttgtgatatttttaaaaaataattttttcaaagaatgtataagctgcatatataactcaggagattccatgtctttctcatatttcagagga

SEQ ID NO: 556340 - DNA, 120 bp, Artificial Sequence
  ENSG00000169019_9 (sequence is synthesized)
aagattataaaatataaaatttcttagagaacacctctttgtcagagataaacaagaacaaatactctaaacttatgtgaacagttttgagtttatgaattctagaaactaaaatcaaga

SEQ ID NO: 556341 - DNA, 120 bp, Artificial Sequence
  ENSG00000169019_10 (sequence is synthesized)
atacagaaaaatgaaaataacattttacttctgcgcttctatgtttgggaaacattgctctgataaaaaatagctgtcattatgcagtgtgtatattcaaatatgagataagactatgta

SEQ ID NO: 556342 - DNA, 120 bp, Artificial Sequence
  ENSG00000169019_11 (sequence is synthesized)
cacatccacttttgttaataaactcaatattgaatactttgggatgttaaattcattggaaaaacaaaccatttgtaacctcagttaactttaacaacaagcattctgagcaaatgaaaa

SEQ ID NO: 556343 - DNA, 120 bp, Artificial Sequence
  ENSG00000169019_12 (sequence is synthesized)
agttttttagagcaatgtataatacaagggctatcatcagtaacaacaaataccttataattgtgaatggaaaaatctgtggaagtcctaggtttttgcagttttgtttttggttgtttt

SEQ ID NO: 556344 - DNA, 120 bp, Artificial Sequence
  ENSG00000169019_13 (sequence is synthesized)
tactcttttgtgaaacatttaaaacatacagaagaaaacaagaaattatataactgacacctacattcacattaccagttaaacaggtgttaacattttgcaatgtgtgtgtttgtttca

SEQ ID NO: 556345 - DNA, 120 bp, Artificial Sequence
  ENSG00000169020_0 (sequence is synthesized)
gtgcttccggtgcggaggtcagggacaagatggtgccaccggtgcaggtctctccgctcatcaagctcggccgctactccgccctgttcctcggtgtggcctacggagccacgcgctaca

SEQ ID NO: 556346 - DNA, 120 bp, Artificial Sequence
  ENSG00000169020_1 (sequence is synthesized)
atgaactgaaacggattgccagagaattggcagaagatgacagcatattaaagtgagtgaccctgcgacccactctttggaccagcagcggatgaataaagcttcctgtgttgtgtgata

SEQ ID NO: 556347 - DNA, 120 bp, Artificial Sequence
  ENSG00000169020_2 (sequence is synthesized)
aagagcgggaacagcaggtgcgtctggtttacagcgtcgctgaagataccttgacctgtggactcagttccttttgtacagcatttccagtgaattttattctcctgcattccgccaaac

SEQ ID NO: 556348 - DNA, 120 bp, Artificial Sequence
  ENSG00000169020_3 (sequence is synthesized)
ggcttgggacgcatgcgaggctgcaggaccgtgtcctccaccgagcgtgaccccgatagtggaatcagctcacccaaagctcaggcttctgaggcccgggcgggggactcgaaaacggct

SEQ ID NO: 556349 - DNA, 120 bp, Artificial Sequence
  ENSG00000169020_4 (sequence is synthesized)
gcttcttggtgaaaacgggtgctaaatggctgttcgagtgctgaggtcttgatgggaggcagtccctgttcgcagaggacgagtgagccagtgcgtgagcgggtgggcagcaggggccct

SEQ ID NO: 556350 - DNA, 120 bp, Artificial Sequence
  ENSG00000169020_5 (sequence is synthesized)
actcgtcagggtgaaggtcaggcgttgactcgcattaacataaagagcgggaacagcagattacctaaaacctcgggcagaagaggagaggaggatagcagcagaagagaagaagaagca

SEQ ID NO: 556351 - DNA, 120 bp, Artificial Sequence
  ENSG00000169020_6 (sequence is synthesized)
ctttgcctccaaggctttgctggcttgtgcggcatcctgctccgtctgcaggttgtgcttccggtgcggaggtcagggacaagatggtgccaccggtgcaggtctctccgctcatcaaga

SEQ ID NO: 556352 - DNA, 120 bp, Artificial Sequence
  ENSG00000169020_7 (sequence is synthesized)
ccatgatcctcgccccgtgaccctcgcccggcgaccggacccccacccctcctgcgacctctgcccagcgaccccgccccccctcctcccgcgacccccgtcccgcgagccccgtttcgc

SEQ ID NO: 556353 - DNA, 120 bp, Artificial Sequence
  ENSG00000169021_0 (sequence is synthesized)
gtgaccggcttggcggttggagcggctgtcgccatgttgtcggtagcatcccgctcaggcccgttcgcgcccgtcctgtcggccacgtcccgcggggtggcgggcgcgctgcggcccttg

SEQ ID NO: 556354 - DNA, 120 bp, Artificial Sequence
  ENSG00000169021_1 (sequence is synthesized)
gtgcaggccacggtgcccgccaccccggagcagcctgtgttggacctgaagcggcccttcctcagccgggagtcgctgagcggccaggccgtgcgccggcctttggtcgcctccgtgggc

SEQ ID NO: 556355 - DNA, 120 bp, Artificial Sequence
  ENSG00000169021_2 (sequence is synthesized)
ctcaatgtccctgcttctgtttgttattcccacacagacatcaaggtgcctgacttctctgaataccgccgccttgaagttttagatagtacgaagtcttcaagagaaagcagcgaggct

SEQ ID NO: 556356 - DNA, 120 bp, Artificial Sequence
  ENSG00000169021_3 (sequence is synthesized)
aggaaaggtttctcctatttggtaactggagtaactactgtgggtgtcgcatatgctgccaagaatgccgtcacccagttcgtttccagcatgagtgcttctgctgatgtgttggccctg

SEQ ID NO: 556357 - DNA, 120 bp, Artificial Sequence
  ENSG00000169021_4 (sequence is synthesized)
gcgaaaatcgaaatcaagttatccgatattccagaaggcaagaacatggctttcaaatggagaggcaaacccctgtttgtgcgtcatagaacccagaaggaaattgagcaggaagctgca

SEQ ID NO: 556358 - DNA, 120 bp, Artificial Sequence
  ENSG00000169021_5 (sequence is synthesized)
gttgaattatcacagttgagggacccacagcatgatctagatcgagtaaagaaacctgaatgggttatcctgataggtgtttgcactcatcttggctgtgtacccattgcaaatgcagga

SEQ ID NO: 556359 - DNA, 120 bp, Artificial Sequence
  ENSG00000169021_6 (sequence is synthesized)
gattttggtggttattactgcccttgccatgggtcacactatgatgcatctggcaggatcagattgggtcctgctcctctcaaccttgaagtccccacgtatgagttcaccagtgacgat

SEQ ID NO: 556360 - DNA, 120 bp, Artificial Sequence
  ENSG00000169021_7 (sequence is synthesized)
atggtgattgttggttaagagacttggactcaagtcataggcttctttcagtctttatgtcacctcaggagacttatttgagaggaagccttctgtacttgaagttgatttgaaatatgt

SEQ ID NO: 556361 - DNA, 120 bp, Artificial Sequence
  ENSG00000169021_8 (sequence is synthesized)
aagaattgatgatgtatttgcaaacattaatgtgaaataaattgaatttaatgttgaatactttcaggcattcacttaataaagacactgttaagcactgttatgctcagtcatacacgc

SEQ ID NO: 556362 - DNA, 120 bp, Artificial Sequence
  ENSG00000169021_9 (sequence is synthesized)
gaaaggtacaatgtcttttagctaattctaattaaaaattacagactggtgtacaagatacttgtgaaatctgtaactgactttattttcttgcccaaatatttgcttcctgctttgcgt

SEQ ID NO: 556363 - DNA, 120 bp, Artificial Sequence
  ENSG00000169021_10 (sequence is synthesized)
cagggacgcagattctgcacggtcattgttgggatgaagtaaaattaacgggtcatctaagtgtctatggcattgacagaaacagtagtatctaggtattccttatttaccggacttggt

SEQ ID NO: 556364 - DNA, 120 bp, Artificial Sequence
  ENSG00000169021_11 (sequence is synthesized)
aagagtcctggctatgcatttcctccctactgtgtaagccgtgtgataatctcaacactaatctgtgggaaagagtcctgaatgaggcattagtagctctgagggtttatcttcacgtct

SEQ ID NO: 556365 - DNA, 120 bp, Artificial Sequence
  ENSG00000169021_12 (sequence is synthesized)
ttaataggcagtgatgggatattacctgagagaaactttccaaaatgagagtgctctgccatttcgttcattttgtgtgtggttcatcatgtccccaaagttcctgcatccactctatca

SEQ ID NO: 556366 - DNA, 120 bp, Artificial Sequence
  ENSG00000169021_13 (sequence is synthesized)
ggaggcagaaagggagcatctgagacctaatactgcctgcatgcagaagtggtcctgctgggtttgtttctgtagtgatgacactttgaatgttttttcctgttgggtttacagtcactc

SEQ ID NO: 556367 - DNA, 120 bp, Artificial Sequence
  ENSG00000169021_14 (sequence is synthesized)
agcacttttcactgtaagatggtgtggaaccagacgcagagcacatcggaattcacatcctattctgcctccaattacacaggtgaaacaagactaaggtccattttcccctgggagttg

SEQ ID NO: 556368 - DNA, 120 bp, Artificial Sequence
  ENSG00000169021_15 (sequence is synthesized)
ggagtgggctttgtcctttgagaatcacagtcactttttgatgtgtttgtctttgctgtttagaggtggaccagtcgtgctttactgagtctacctgataatctcatgtacactttttta

SEQ ID NO: 556369 - DNA, 120 bp, Artificial Sequence
  ENSG00000169021_16 (sequence is synthesized)
aaatggcaaaaatggttaggttgggtctgcccaaagggaactgaccatccaggattccagcctttgatgttaatagctaggtgttgacagaaaaaagaaaatgtcaaactttctatgctt

SEQ ID NO: 556370 - DNA, 120 bp, Artificial Sequence
  ENSG00000169021_17 (sequence is synthesized)
atgagtagatactagtctttgcttcatttttaccattctagaaatgaaattagcatgtgtgataattggtgggacacagaagtattttatattctgtgtctctagatagtggaggcactc

SEQ ID NO: 556371 - DNA, 120 bp, Artificial Sequence
  ENSG00000169021_18 (sequence is synthesized)
ttcggattgggggttggaggaagggttggtggcagagttggaatgtgaaacattgagttgtgaggggaacacaggtccacacactaaaaaacctgtgctgccaaaaatgtcaacagcacc

SEQ ID NO: 556372 - DNA, 120 bp, Artificial Sequence
  ENSG00000169021_19 (sequence is synthesized)
ccctccctatagagaaatactgataacctatatcacctcccaccctgaagtgataccttgaaattctacatggcagtggaggacagaagtaggaagtttgcaggtctctaggtactcact

SEQ ID NO: 556373 - DNA, 120 bp, Artificial Sequence
  ENSG00000169021_20 (sequence is synthesized)
tagtgccggaattgctatatttggtggctgcttacttcatctttcatatttagagtttgatggtgggatgctgttaaattgtagtagaccatttagtttttaaagaaggctttgttccac

SEQ ID NO: 556374 - DNA, 120 bp, Artificial Sequence
  ENSG00000169021_21 (sequence is synthesized)
aagtgacaggacaagtcaagtcacttcatgctgttttgctgaatggatacggcagacctgtgttaacatttttaccattctgtgaaaacaaaatcctagatagtaggagaaaattactta

SEQ ID NO: 556375 - DNA, 120 bp, Artificial Sequence
  ENSG00000169021_22 (sequence is synthesized)
cagaataaacctgaccagctagcaccctgacatcagatcattaacctactgcattttattggggataattcttgggacaatcttgagagccaagtgttttcattatgctttaaaaagtgt

SEQ ID NO: 556376 - DNA, 120 bp, Artificial Sequence
  ENSG00000169021_23 (sequence is synthesized)
tataaaaatggcctttttgaaaatgttgcattatttgttaaagataacatcaaattttctttggtctttctgagcatacctttgtaaaaactttgactcaatctgagtgtatagagggca

SEQ ID NO: 556377 - DNA, 120 bp, Artificial Sequence
  ENSG00000169021_24 (sequence is synthesized)
tttgtcctgactggatcaaaatgtgctttagtaccctcatttttctaaactgtaggaacatactatttaaatatcagaagtaattcttcattctcacagtactaaatttcattttctgta

SEQ ID NO: 556378 - DNA, 120 bp, Artificial Sequence
  ENSG00000169026_0 (sequence is synthesized)
ctgagaagcacacaggctgtgaccggggcccttcccggaagggacattcggtttttgtggcagggacttccagcctgaggccgaaggaggagggtccaacttcacctttgcccgcccttc

SEQ ID NO: 556379 - DNA, 120 bp, Artificial Sequence
  ENSG00000169026_1 (sequence is synthesized)
ccccgcttttttgggtctcctttaactgggacggggcgggaccctcctccgtagtccttggggcggaactggccccccgtggcccggcccggcccggccccacctccgcccgcaggcggt

SEQ ID NO: 556380 - DNA, 80 bp, Artificial Sequence
  ENSG00000169026_2 (sequence is synthesized)
cccggcccacgcgggaaggtccttaagcccgggcggccggcgggaccggcggagacccgtggaggccgccgacgatggcg

SEQ ID NO: 556381 - DNA, 120 bp, Artificial Sequence
  ENSG00000169026_3 (sequence is synthesized)
ccctgtgcgcgcagcggggccaccgcacctacgcgcgccgctgggtgttcctgctcgcgatcagcctgctcaactgctccaacgccacgctgtggctcagctttgcacctgtggctgacg

SEQ ID NO: 556382 - DNA, 120 bp, Artificial Sequence
  ENSG00000169026_4 (sequence is synthesized)
tcattgctgaggacttggtcctgtccatggagcagatcaactggctgtcactggtctacctcgtggtatccaccccatttggcgtggcggccatctggatcctggactccgtcgggctcc

SEQ ID NO: 556383 - DNA, 120 bp, Artificial Sequence
  ENSG00000169026_5 (sequence is synthesized)
gtgcggcgaccatcctgggtgcgtggctgaactttgccgggagtgtgctacgcatggtgccctgcatggttgttgggacccaaaacccatttgccttcctcatgggtggccagagcctct

SEQ ID NO: 556384 - DNA, 120 bp, Artificial Sequence
  ENSG00000169026_6 (sequence is synthesized)
gtgcccttgcccagagcctggtcatcttctctccagccaagctggctgccttgtggttcccagagcaccagcgagccacggccaacatgctcgccaccatgtcgaaccctctgggcgtcc

SEQ ID NO: 556385 - DNA, 120 bp, Artificial Sequence
  ENSG00000169026_7 (sequence is synthesized)
ttgtggccaatgtgctgtcccctgtgctggtcaagaagggtgaggacattccgttaatgctcggtgtctataccatccctgctggcgtcgtctgcctgctgtccaccatctgcctgtggg

SEQ ID NO: 556386 - DNA, 120 bp, Artificial Sequence
  ENSG00000169026_8 (sequence is synthesized)
tggaacaaggcctatgtcatcctggctgtgtgcttggggggaatgatcgggatctctgccagcttctcagccctcctggagcagatcctctgtgcaagcggccactccagtgggttttcc

SEQ ID NO: 556387 - DNA, 120 bp, Artificial Sequence
  ENSG00000169026_9 (sequence is synthesized)
ggcctctgtggcgctctcttcatcacgtttgggatcctgggggcactggctctcggcccctatgtggaccggaccaagcacttcactgaggccaccaagattggcctgtgcctgttctct

SEQ ID NO: 556388 - DNA, 120 bp, Artificial Sequence
  ENSG00000169026_10 (sequence is synthesized)
ctggcctgcgtgccctttgccctggtgtcccagctgcagggacagacccttgccctggctgccacctgctcgctgctcgggctgtttggcttctcggtgggccccgtggccatggagttg

SEQ ID NO: 556389 - DNA, 120 bp, Artificial Sequence
  ENSG00000169026_11 (sequence is synthesized)
gcggtcgagtgttccttccccgtgggggagggggctgccacaggcatgatctttgtgctggggcaggccgagggaatactcatcatgctggcaatgacggcactgactgtgcgacgctcg

SEQ ID NO: 556390 - DNA, 120 bp, Artificial Sequence
  ENSG00000169026_12 (sequence is synthesized)
gagccgtccttgtccacctgccagcagggggaggatccacttgactggacagtgtctctgctgctgatggccggcctgtgcaccttcttcagctgcatcctggcggtcttcttccacacc

SEQ ID NO: 556391 - DNA, 120 bp, Artificial Sequence
  ENSG00000169026_13 (sequence is synthesized)
ccataccggcgcctgcaggccgagtctggggagcccccctccacccgtaacgccgtgggcggcgcagactcagggccgggtgtggaccgagggggagcaggaagggctggggtcctgggg

SEQ ID NO: 556392 - DNA, 120 bp, Artificial Sequence
  ENSG00000169026_14 (sequence is synthesized)
cccagcacggcgactccggagtgcacggcgaggggggcctcgctagaggaccccagagggcccgggagcccccacccagcctgccaccgagcgactccccgtgcgcaaggcccagcagcc

SEQ ID NO: 556393 - DNA, 120 bp, Artificial Sequence
  ENSG00000169026_15 (sequence is synthesized)
accgacgcgccctcccgccccggcagactcgcaggcagggtccaagcgtccaggtttattgacccggctgggtctcactcctccttctcctccccgtgggtgatcacgtagctgagcgcc

SEQ ID NO: 556394 - DNA, 120 bp, Artificial Sequence
  ENSG00000169026_16 (sequence is synthesized)
ttgtagtccaggttgcccgccacatcgatggaggcgaactggaacatctggtccacctgcgggcgggggcgaaagggctccttgcgggctccgggagcgaattacaagcgcgcacctgca

SEQ ID NO: 556395 - DNA, 120 bp, Artificial Sequence
  ENSG00000169026_17 (sequence is synthesized)
gatcagcctgctcaactgctccaacgccacggtaggggcaggggcggggacaggtggctccgggaccctcagtccctcggaccagccgggttttgttttcctgtggccacagcccgaggt

SEQ ID NO: 556396 - DNA, 120 bp, Artificial Sequence
  ENSG00000169026_18 (sequence is synthesized)
gccaggtgtggggcgttccttggacagtcaagggcctcctgctgcagttcttcactgttttattaatatccacgagtcatcatggagcacacagaaatctcaccctgacaccaagagtcg

SEQ ID NO: 556397 - DNA, 120 bp, Artificial Sequence
  ENSG00000169026_19 (sequence is synthesized)
gggctaacatcagccaggagggtgtcactggtgagggatgcgttgacagccaggggtccccatgagcccctggagcaggcccctcccagcctgggcctcgcaaagggcagctgcagacca

SEQ ID NO: 556398 - DNA, 120 bp, Artificial Sequence
  ENSG00000169026_20 (sequence is synthesized)
gaggttgggaggcagccggtggtggggcaggaggagctgggaggtggcgcctgggacaggcagggctgcggcgtgtgtgggtgccagtctgcgtggtctccttgtgcacacacacccctc

SEQ ID NO: 556399 - DNA, 120 bp, Artificial Sequence
  ENSG00000169031_0 (sequence is synthesized)
gggagggacgaaccgcgcgaccgagccctacaaaacccgccccggccgagtggcgaggcgagctttccagccgggctcccagagccgcgctgcgcaggagacgcggtggcctgagagcct

SEQ ID NO: 556400 - DNA, 120 bp, Artificial Sequence
  ENSG00000169031_1 (sequence is synthesized)
gagagcctgagggtccccggactcgcccaggctctgagcgcgcgcccaccatgagcgcccggaccgcccccaggccgcaggtgctcctgctgccgctcctgctggtgctcctggcggcgg

SEQ ID NO: 556401 - DNA, 120 bp, Artificial Sequence
  ENSG00000169031_2 (sequence is synthesized)
gccagcaagggttgtgtctgtaaagacaaaggccagtgcttctgtgacggggccaaaggggagaagggggagaagggctttcctggaccccccggttctcctggccagaaaggattcaca

SEQ ID NO: 556402 - DNA, 120 bp, Artificial Sequence
  ENSG00000169031_3 (sequence is synthesized)
ggtcctgaaggcttgcctggaccgcagggacccaagggctttccaggacttccaggactcacgggttccaaaggtgtaaggggaataagtggattgccaggattttctggttctcctgga

SEQ ID NO: 556403 - DNA, 120 bp, Artificial Sequence
  ENSG00000169031_4 (sequence is synthesized)
cttccaggcaccccaggcaataccgggccttacggacttgtcggtgtaccaggatgcagtggttctaagggtgagcaggggtttccaggactcccagggacactgggctacccagggatc

SEQ ID NO: 556404 - DNA, 120 bp, Artificial Sequence
  ENSG00000169031_5 (sequence is synthesized)
ccgggtgctgctggtttgaaaggacaaaagggtgctcctgctaaagaagaagatatagaacttgatgcaaaaggcgaccccgggttgccaggggctccaggaccccagggtttgccaggc

SEQ ID NO: 556405 - DNA, 120 bp, Artificial Sequence
  ENSG00000169031_6 (sequence is synthesized)
cctccaggttttcctgggcctgttggcccacctggtcctccgggattctttggctttccaggagccatgggacctagaggacctaagggtcacatgggtgaaagagtgataggacataaa

SEQ ID NO: 556406 - DNA, 120 bp, Artificial Sequence
  ENSG00000169031_7 (sequence is synthesized)
ggagagcggggtgtgaaagggttaacaggacccccgggaccaccaggaacagttattgtgaccctaactggcccagataacagaacggacctcaagggggaaaagggagacaagggagca

SEQ ID NO: 556407 - DNA, 120 bp, Artificial Sequence
  ENSG00000169031_8 (sequence is synthesized)
atgggcgagcctggacctcctggaccctcaggactgcctggagaatcatatggatctgaaaagggtgctcctggagaccctggcctgcagggaaaacccggaaaagatggtgttcctggc

SEQ ID NO: 556408 - DNA, 120 bp, Artificial Sequence
  ENSG00000169031_9 (sequence is synthesized)
ttccctggaagtgagggagtcaagggcaacaggggtttccctgggttaatgggtgaagatggcattaagggacagaaaggggacattggccctccaggatttcgtggtccaacagaatat

SEQ ID NO: 556409 - DNA, 120 bp, Artificial Sequence
  ENSG00000169031_10 (sequence is synthesized)
tatgacacataccaggaaaagggagatgaaggcactccaggcccaccagggcccagaggagctcgtggcccacaaggtcccagtggtccccccggagttcctggaagtcctggatcatca

SEQ ID NO: 556410 - DNA, 120 bp, Artificial Sequence
  ENSG00000169031_11 (sequence is synthesized)
aggcctggcctcagaggagcccctggatggccaggcctgaaaggaagtaaaggggaacgaggccgcccaggaaaggatgccatggggactcctgggtccccaggttgtgctggttcacca

SEQ ID NO: 556411 - DNA, 120 bp, Artificial Sequence
  ENSG00000169031_12 (sequence is synthesized)
ggtcttccaggatcaccgggacctccaggaccgccaggtgacatcgtttttcgcaagggtccacctggagatcacggactgccaggctatctagggtctccaggaatcccaggagttgat

SEQ ID NO: 556412 - DNA, 120 bp, Artificial Sequence
  ENSG00000169031_13 (sequence is synthesized)
gggcccaaaggagaaccaggcctcctgtgtacacagtgcccttatatcccagggcctcccggtctcccaggattgccagggttacatggtgtaaaaggaatcccaggaagacaaggcgca

SEQ ID NO: 556413 - DNA, 120 bp, Artificial Sequence
  ENSG00000169031_14 (sequence is synthesized)
gctggcttgaaaggaagcccagggtccccaggaaatacaggtcttccaggatttccaggtttcccaggtgcccagggtgacccaggacttaaaggagaaaaaggtgaaacacttcagcct

SEQ ID NO: 556414 - DNA, 120 bp, Artificial Sequence
  ENSG00000169031_15 (sequence is synthesized)
gaggggcaagtgggtgtcccaggtgacccggggctcagaggccaacctgggagaaagggcttggatggaattcctggaactccgggagtgaaaggattaccaggacctaaaggcgaactg

SEQ ID NO: 556415 - DNA, 120 bp, Artificial Sequence
  ENSG00000169031_16 (sequence is synthesized)
gctctgagtggtgagaaaggggaccaaggtcctccaggggatcctggctcccctgggtccccaggacctgcaggaccagctggaccacctggctacggaccccaaggagaacctggtctc

SEQ ID NO: 556416 - DNA, 120 bp, Artificial Sequence
  ENSG00000169031_17 (sequence is synthesized)
cagggcacgcaaggagttcctggagcccccggaccacccggagaagccggccctaggggagagctcagtgtttcaacaccagttccaggcccaccaggacctccagggccccctggccat

SEQ ID NO: 556417 - DNA, 120 bp, Artificial Sequence
  ENSG00000169031_18 (sequence is synthesized)
cctggcccccaaggtccacctggtatccctggatccctggggaaatgtggagatcctggtcttccagggcctgatggtgaaccaggaattccaggaattggatttcctgggcctcctgga

SEQ ID NO: 556418 - DNA, 120 bp, Artificial Sequence
  ENSG00000169031_19 (sequence is synthesized)
cctaagggagaccaaggttttccaggtacaaaaggatcactgggttgtcctggaaaaatgggagagcctgggttacctggaaagccaggcctcccaggagccaagggagaaccagcagta

SEQ ID NO: 556419 - DNA, 120 bp, Artificial Sequence
  ENSG00000169031_20 (sequence is synthesized)
gccatgcctggaggaccaggaacaccaggttttccaggagaaagaggcaattctggggaacatggagaaattggactccctggacttccaggtctccctggaactccaggaaatgaaggg

SEQ ID NO: 556420 - DNA, 120 bp, Artificial Sequence
  ENSG00000169031_21 (sequence is synthesized)
cttgatggaccacgaggagatccagggcagcctggaccacctggagaacaaggacccccaggaaggtgcatagagggtcccaggggagcccaaggacttccaggcttaaatggattgaaa

SEQ ID NO: 556421 - DNA, 120 bp, Artificial Sequence
  ENSG00000169031_22 (sequence is synthesized)
gggcaacaaggcagaagaggtaaaacggggccaaagggagacccaggaattccaggcttggatagatcaggatttcctggagaaactggatcaccaggaattccaggtcatcaaggtgaa

SEQ ID NO: 556422 - DNA, 120 bp, Artificial Sequence
  ENSG00000169031_23 (sequence is synthesized)
atgggaccactgggtcaaagaggatatccaggaaatccgggaattttagggccaccaggtgaagatggagtgattgggatgatgggctttcctggagccattggccctccagggccccct

SEQ ID NO: 556423 - DNA, 120 bp, Artificial Sequence
  ENSG00000169031_24 (sequence is synthesized)
gggaacccaggcacaccagggcagagggggagccctggaattccaggagtaaagggccagagaggaaccccaggagccaagggggaacaaggagataaaggaaatcccgggccttcagag

SEQ ID NO: 556424 - DNA, 120 bp, Artificial Sequence
  ENSG00000169031_25 (sequence is synthesized)
atatcccacgtaataggggacaaaggagaaccaggtctcaaaggattcgcaggaaatccaggtgagaaaggaaacagaggcgttccagggatgccaggtttaaagggcctcaaaggacta

SEQ ID NO: 556425 - DNA, 120 bp, Artificial Sequence
  ENSG00000169031_26 (sequence is synthesized)
cccggaccagcaggaccaccaggccccagaggagatttgggcagcactgggaatcctggagaaccaggactgcgtggtataccaggaagcatggggaacatgggcatgccaggttctaaa

SEQ ID NO: 556426 - DNA, 120 bp, Artificial Sequence
  ENSG00000169031_27 (sequence is synthesized)
ggaaaaaggggaactttgggattcccaggtcgagcaggaagaccaggcctcccaggtattcatggtctccagggagataagggagagccaggttattcagaaggtacaaggccaggacca

SEQ ID NO: 556427 - DNA, 120 bp, Artificial Sequence
  ENSG00000169031_28 (sequence is synthesized)
ccgggaccaacgggggatccaggactgccgggtgatatgggaaagaaaggagaaatggggcaacctggcccacctggacatttggggcctgctggacctgagggagcccctggaagtcct

SEQ ID NO: 556428 - DNA, 120 bp, Artificial Sequence
  ENSG00000169031_29 (sequence is synthesized)
ggaagtcctggcctcccaggaaagccaggtcctcatggtgatttgggttttaaaggaatcaaaggcctcctgggccctccaggaatcagaggccctccaggtcttccaggatttccagga

SEQ ID NO: 556429 - DNA, 120 bp, Artificial Sequence
  ENSG00000169031_30 (sequence is synthesized)
tctcctggaccaatgggtataagaggtgaccaaggacgtgatggaattcctggtccagccggagaaaagggagaaacgggtttattgagggcccctccaggcccaagagggaaccctggt

SEQ ID NO: 556430 - DNA, 120 bp, Artificial Sequence
  ENSG00000169031_31 (sequence is synthesized)
gctcaaggagccaaaggagacaggggagccccaggttttcctggcctcccgggcagaaaaggggccatgggagatgctggacctcgaggacccacaggcatagaaggattcccagggcca

SEQ ID NO: 556431 - DNA, 120 bp, Artificial Sequence
  ENSG00000169031_32 (sequence is synthesized)
ccaggtctgcccggtgcaattatccctggccagacaggaaatcgtggtccaccaggctcaagaggaagcccaggtgcgcctggtccccctggacctccagggagtcatgtaataggcata

SEQ ID NO: 556432 - DNA, 120 bp, Artificial Sequence
  ENSG00000169031_33 (sequence is synthesized)
ggagacatgggaccaccaggtcgtctgggagcaccaggtactccaggtcttccaggacccagaggtgatcctggattccaggggtttccaggcgtgaaaggagaaaagggtaatcctgga

SEQ ID NO: 556433 - DNA, 120 bp, Artificial Sequence
  ENSG00000169031_34 (sequence is synthesized)
tttctaggatccattggacctccaggaccaattgggccaaaaggaccacctggtgtacgtggagaccctggcacacttaagattatctcccttccaggaagcccagggccacctggcaca

SEQ ID NO: 556434 - DNA, 120 bp, Artificial Sequence
  ENSG00000169031_35 (sequence is synthesized)
cctggagaaccagggatgcagggagaacctgggccaccagggccacctggaaacctaggaccctgtgggccaagaggtaagccaggcaaggatggaaaaccaggaactcctggaccagct

SEQ ID NO: 556435 - DNA, 120 bp, Artificial Sequence
  ENSG00000169031_36 (sequence is synthesized)
ggagaaaaaggcaacaaaggttctaaaggagagccaggaccagctggatcagatggattgccaggtttgaaaggaaaacgtggagacagtggatcacctgcaacctggacaacgagaggc

SEQ ID NO: 556436 - DNA, 120 bp, Artificial Sequence
  ENSG00000169031_37 (sequence is synthesized)
tttgtcttcacccgacacagtcaaaccacagcaattccttcatgtccagaggggacagtgccactctacagtgggttttcttttctttttgtacaaggaaatcaacgagcccacggacaa

SEQ ID NO: 556437 - DNA, 120 bp, Artificial Sequence
  ENSG00000169031_38 (sequence is synthesized)
gaccttggaactcttggcagctgcctgcagcgatttaccacaatgccattcttattctgcaatgtcaatgatgtatgtaattttgcatctcgaaatgattattcatactggctgtcaaca

SEQ ID NO: 556438 - DNA, 120 bp, Artificial Sequence
  ENSG00000169031_39 (sequence is synthesized)
ccagctctgatgccaatgaacatggctcccattactggcagagcccttgagccttatataagcagatgcactgtttgtgaaggtcctgcgatcgccatagccgttcacagccaaaccact

SEQ ID NO: 556439 - DNA, 120 bp, Artificial Sequence
  ENSG00000169031_40 (sequence is synthesized)
gacattcctccatgtcctcacggctggatttctctctggaaaggattttcattcatcatgttcacaagtgcaggttctgagggcaccgggcaagcactggcctcccctggctcctgcctg

SEQ ID NO: 556440 - DNA, 120 bp, Artificial Sequence
  ENSG00000169031_41 (sequence is synthesized)
gaagaattccgagccagcccatttctagaatgtcatggaagaggaacgtgcaactactattcaaattcctacagtttctggctggcttcattaaacccagaaagaatgttcagaaagcct

SEQ ID NO: 556441 - DNA, 120 bp, Artificial Sequence
  ENSG00000169031_42 (sequence is synthesized)
attccatcaactgtgaaagctggggaattagaaaaaataataagtcgctgtcaggtgtgcatgaagaaaagacactgaagctaaaaaagacagcagaactgctatttttcatcctaaaga

SEQ ID NO: 556442 - DNA, 120 bp, Artificial Sequence
  ENSG00000169031_43 (sequence is synthesized)
acaaagtaatgacagaacatgctgttatttaggtatttttctttaaccaaacaatattgctccatgatgacttagtacaaagtttcaatttgtttccccacaaaacaaagcaattctttc

SEQ ID NO: 556443 - DNA, 120 bp, Artificial Sequence
  ENSG00000169031_44 (sequence is synthesized)
aagtcagttctgtgatctgggtctctaatctgtgctgtttcaaagttctctgtggcaaagcagcaactattcacaaaatatcaccaaaaacctattccacttacatccaaggcactgtca

SEQ ID NO: 556444 - DNA, 120 bp, Artificial Sequence
  ENSG00000169031_45 (sequence is synthesized)
ctacggtgattgtatgaagtttgaatgctgcaagttatgaaatatttggcccgctggattcccacatttgtcttctttctgtctttaagactcagggaggctaaatcagtgtttgattgc

SEQ ID NO: 556445 - DNA, 120 bp, Artificial Sequence
  ENSG00000169031_46 (sequence is synthesized)
cccgccaacccttcctgaaacttcagaccctgggtaggggaagagaagggggcatgtggtatcctggagcattgtgtatagaactggattttcagacctgctgaggaccgtaaggcctga

SEQ ID NO: 556446 - DNA, 120 bp, Artificial Sequence
  ENSG00000169031_47 (sequence is synthesized)
tggaacacagaactgaactgaggttcatggattttccaggactgtttcaaacatgcccattactaacggcaaaagggggattccctgatggaaccataatacccttggaaatactgtatg

SEQ ID NO: 556447 - DNA, 120 bp, Artificial Sequence
  ENSG00000169031_48 (sequence is synthesized)
gttttgttttgttttgttggtttttaaagatttttgtttgtttattgaattcatttcactgtagctctaaaatctgcttgtattccaagcatataaaattttcccccttagtgaattagt

SEQ ID NO: 556448 - DNA, 120 bp, Artificial Sequence
  ENSG00000169031_49 (sequence is synthesized)
tttaaaatgatattgttatatacatactatgaaatatgtataactttaacttctgttttaccagcatacccacacaaataacaagaatactacttatgaaatgtgcactttatcctcatt

SEQ ID NO: 556449 - DNA, 120 bp, Artificial Sequence
  ENSG00000169031_50 (sequence is synthesized)
ccataaatgtcggtgcataccttatgtaagggagcagttcaataatccatgaaagaacttaaggcatttgttggtttatcagactcggaatctattttctcattgctctgaatatgtcat

SEQ ID NO: 556450 - DNA, 120 bp, Artificial Sequence
  ENSG00000169031_51 (sequence is synthesized)
cactctaggttttacagatttattcctttgttacttctctaattcttcctttgtaaaaaaaaaaaaaagcaacactttttatgttatatgttgttcttacaaaccatactgaaagagtcc

SEQ ID NO: 556451 - DNA, 120 bp, Artificial Sequence
  ENSG00000169031_52 (sequence is synthesized)
attgtttaaaaatcttaatgtatcaaactgtataacttggccgctgtatgtcttaaaacctgcttttcaatgtgttgatacattcccaaggttacttaattcaacttaactatcatctta

SEQ ID NO: 556452 - DNA, 120 bp, Artificial Sequence
  ENSG00000169031_53 (sequence is synthesized)
ttcagcaccaagcatgtcccaggcactgtactaacctacagagatgctaagagaaaaaaaagacttgtttctgatctaatatcccagaaaaagtaactcattgctctgttaataatctca

SEQ ID NO: 556453 - DNA, 120 bp, Artificial Sequence
  ENSG00000169031_54 (sequence is synthesized)
catatacaagtagcttccctcccctctagttttttcttccttttcactgctgttatatttcatcatgataattcagcaggcccaagtaaaggttaaaaataaggtctatgcctagggaaa

SEQ ID NO: 556454 - DNA, 120 bp, Artificial Sequence
  ENSG00000169031_55 (sequence is synthesized)
ctcagggcttctagtttctcttagaaaagctaagagaagataaggtctgaataatagcagaaaaaccaacatctacaaaacattaaactagtgttatacttgatgataacactatttgat

SEQ ID NO: 556455 - DNA, 120 bp, Artificial Sequence
  ENSG00000169031_56 (sequence is synthesized)
gagtcttagagtccagacacaaagagacaaagctttgaagatgctttttgatctacctaggtggagttggtggtgctgatatttaaattcaggctactgcttcaatctcaattgctttgt

SEQ ID NO: 556456 - DNA, 120 bp, Artificial Sequence
  ENSG00000169031_57 (sequence is synthesized)
aagtgaaaaacatgacccagaggacagcacagactatggccatggctcacatggtttacatccttcactgctcacgtgtttgctgtcaagccatttttacatctaaactaagatgtgcag

SEQ ID NO: 556457 - DNA, 120 bp, Artificial Sequence
  ENSG00000169031_58 (sequence is synthesized)
catttcacttatttagattcacttaacaaacaaatttttctgctttaaaaatgtcttattgtcccaagtgtactatagcggcatatagagctagctaatctctacaaaccctctgtaggc

SEQ ID NO: 556458 - DNA, 120 bp, Artificial Sequence
  ENSG00000169031_59 (sequence is synthesized)
cagtagttctcaaagtgtggtctctggaagagcagtatcagcatcatctgggaacttgtcacagatgcagattctagggaccactccagacctacacaatcagaaactcttgggggaggg

SEQ ID NO: 556459 - DNA, 120 bp, Artificial Sequence
  ENSG00000169031_60 (sequence is synthesized)
cccgaaatatctatgttttaccaagcccaccacatgattctgatgtactctaaatactgagaaaacctgttctagacaaatacccaagcaacaactccgcaggcagttaccaagtacggc

SEQ ID NO: 556460 - DNA, 120 bp, Artificial Sequence
  ENSG00000169031_61 (sequence is synthesized)
tggctacaactgctccatccgtgcctctttttaaagttcaaactcacaggtgactctaaggttatctacttttactcataagtaaaagccctagactggtgctaatgtcaaaccactggc

SEQ ID NO: 556461 - DNA, 120 bp, Artificial Sequence
  ENSG00000169031_62 (sequence is synthesized)
ctccactcaggcctccatcttctcatgccctcttaccagtatttaacttctgaggaagacaagtgatgctaaaacctgaaattccaatgaagccatatgaacagctgttcagttgcactt

SEQ ID NO: 556462 - DNA, 120 bp, Artificial Sequence
  ENSG00000169031_63 (sequence is synthesized)
ctaagactttacttagcagtaaattatagctcatgtgcattattttccagataacttagcttatgagtagcttatacaattatgaagatttaatattacagataaaatgtaaactgtttc

SEQ ID NO: 556463 - DNA, 120 bp, Artificial Sequence
  ENSG00000169031_64 (sequence is synthesized)
tttaaaattggggcttcaactttggaatttcacagcgtgctaaaataacagatttctcagaagtctttcagcaagataaacattattaagtaacttatttatgaaagtattaaaatgctt

SEQ ID NO: 556464 - DNA, 120 bp, Artificial Sequence
  ENSG00000169031_65 (sequence is synthesized)
acatttgaacttgatggctaacttacaaagattctctatgtatcaaatgtaacttactgcgactaaacttaatttaatatttactctataaccaaatgaaatatatttaaaatatattga

SEQ ID NO: 556465 - DNA, 120 bp, Artificial Sequence
  ENSG00000169031_66 (sequence is synthesized)
ggtcaaaaggagagttgctcttcatgttcccagggtaactcacagtttaaccatttggaatgagaacactagcttttaactggaaataaaatttggtataaaacggtcataccttaggtt

SEQ ID NO: 556466 - DNA, 120 bp, Artificial Sequence
  ENSG00000169031_67 (sequence is synthesized)
ggtggagtgagtgccttgaaaaatatcaacaagtacccagattcggtgtgggcagagaaaattgaaactgttactatactttcagacagttatttggatttttaaaatcctatctccaca

SEQ ID NO: 556467 - DNA, 120 bp, Artificial Sequence
  ENSG00000169031_68 (sequence is synthesized)
tggagaaccagggatgcagggagaacctgggccaccagggccacctggaaacctaggtgtgggactggcagcattgacttggatcactaggaagtggttgaaccaaaatacctgtaaact

SEQ ID NO: 556468 - DNA, 120 bp, Artificial Sequence
  ENSG00000169031_69 (sequence is synthesized)
gctttggaaacagctgatacaacttcacagaaaatgttgaacatgatagtggttttcacaatcagtcttaggattgagctcattttacccttgaccagcaaataaaagaccttggaatct

SEQ ID NO: 556469 - DNA, 120 bp, Artificial Sequence
  ENSG00000169031_70 (sequence is synthesized)
gaagtcctggcctcccagttccagcagctccgagtctgtgatcaagctgtcggcagcgttggtttcttgtggggcccctgttcttggcttgtggatggctatcttcttccagtgttttcc

SEQ ID NO: 556470 - DNA, 120 bp, Artificial Sequence
  ENSG00000169031_71 (sequence is synthesized)
aagtgtctgaatcttcttttcttataaagacaccactcacattggattagggcccaccctactgacctcattttaatttaattacctgtttaccagccctatccccaaatacagagtcat

SEQ ID NO: 556471 - DNA, 120 bp, Artificial Sequence
  ENSG00000169031_72 (sequence is synthesized)
gttccgaagtactgaaggttaggacttcagcatatgaatttggggacaacacaattcaaactacaacactgtgctgtgactctttttcgaacccatttctggattgaattttggctttct

SEQ ID NO: 556472 - DNA, 120 bp, Artificial Sequence
  ENSG00000169031_73 (sequence is synthesized)
ggcttattagcttacaattcaggtttagggttttgttttattaaaaacaactgtgaaactatcgggttgcagattcaggtcttacttaaatacaataaactacctgttcaaatacagaaa

SEQ ID NO: 556473 - DNA, 120 bp, Artificial Sequence
  ENSG00000169032_0 (sequence is synthesized)
gaggcaataggggcggagccgagtgggagtgtggaaagcgccgcatcccgggtgggaggcgaggcttccccttccccgcccctcccccggcctccagtccctcccagggccgcttcgcag

SEQ ID NO: 556474 - DNA, 120 bp, Artificial Sequence
  ENSG00000169032_1 (sequence is synthesized)
agcggctaggagcacggcggcggcggcactttccccggcaggagctggagctgggctctggtgcgcgcgcggctgtgccgcccgagccggagggactggttggttgagagagagagagga

SEQ ID NO: 556475 - DNA, 120 bp, Artificial Sequence
  ENSG00000169032_2 (sequence is synthesized)
agggaatcccgggctgccgaaccgcacgttcagcccgctccgctcctgcagggcagcctttcggctctctgcgcgcgaagccgagtcccgggcgggtggggcgggggtccactgagaccg

SEQ ID NO: 556476 - DNA, 120 bp, Artificial Sequence
  ENSG00000169032_3 (sequence is synthesized)
cccgctgaaggcagccccggggcccgcggcccggacttggtcctgcgcagcgggcgcggggcagcgcagcgggaggaagcgagaggtgctgccctccccccggagttggaagcgcgttac

SEQ ID NO: 556477 - DNA, 120 bp, Artificial Sequence
  ENSG00000169032_4 (sequence is synthesized)
gagaggtgctgccctccccccggagttggaagcgcgttacccgggtccaaaatgcccaagaagaagccgacgcccatccagctgaacccggcccccgacggctctgcagttaacgggacc

SEQ ID NO: 556478 - DNA, 120 bp, Artificial Sequence
  ENSG00000169032_5 (sequence is synthesized)
agctctgcggagaccaacttggaggccttgcagaagaagctggaggagctagagcttgatgagcagcagcgaaagcgccttgaggcctttcttacccagaagcagaaggtgggagaactg

SEQ ID NO: 556479 - DNA, 120 bp, Artificial Sequence
  ENSG00000169032_6 (sequence is synthesized)
aaggatgacgactttgagaagatcagtgagctgggggctggcaatggcggtgtggtgttcaaggtctcccacaagccttctggcctggtcatggccagaaagctaattcatctggagatc

SEQ ID NO: 556480 - DNA, 120 bp, Artificial Sequence
  ENSG00000169032_7 (sequence is synthesized)
aaacccgcaatccggaaccagatcataagggagctgcaggttctgcatgagtgcaactctccgtacatcgtgggcttctatggtgcgttctacagcgatggcgagatcagtatctgcatg

SEQ ID NO: 556481 - DNA, 120 bp, Artificial Sequence
  ENSG00000169032_8 (sequence is synthesized)
gagcacatggatggaggttctctggatcaagtcctgaagaaagctggaagaattcctgaacaaattttaggaaaagttagcattgctgtaataaaaggcctgacatatctgagggagaag

SEQ ID NO: 556482 - DNA, 120 bp, Artificial Sequence
  ENSG00000169032_9 (sequence is synthesized)
cacaagatcatgcacagagatgtcaagccctccaacatcctagtcaactcccgtggggagatcaagctctgtgactttggggtcagcgggcagctcatcgactccatggccaactccttc

SEQ ID NO: 556483 - DNA, 120 bp, Artificial Sequence
  ENSG00000169032_10 (sequence is synthesized)
gtgggcacaaggtcctacatgtcgccagaaagactccaggggactcattactctgtgcagtcagacatctggagcatgggactgtctctggtagagatggcggttgggaggtatcccatc

SEQ ID NO: 556484 - DNA, 120 bp, Artificial Sequence
  ENSG00000169032_11 (sequence is synthesized)
cctcctccagatgccaaggagctggagctgatgtttgggtgccaggtggaaggagatgcggctgagaccccacccaggccaaggacccccgggaggccccttagctcatacggaatggac

SEQ ID NO: 556485 - DNA, 120 bp, Artificial Sequence
  ENSG00000169032_12 (sequence is synthesized)
agccgacctcccatggcaatttttgagttgttggattacatagtcaacgagcctcctccaaaactgcccagtggagtgttcagtctggaatttcaagattttgtgaataaatgcttaata

SEQ ID NO: 556486 - DNA, 120 bp, Artificial Sequence
  ENSG00000169032_13 (sequence is synthesized)
aaaaaccccgcagagagagcagatttgaagcaactcatggttcatgcttttatcaagagatctgatgctgaggaagtggattttgcaggttggctctgctccaccatcggccttaaccag

SEQ ID NO: 556487 - DNA, 120 bp, Artificial Sequence
  ENSG00000169032_14 (sequence is synthesized)
aagagcgagtcccctgcccggtggtttgccatgtcgcttttgggcctccttcccatgcctgtctctgttcagatgtgcatttcacctgtgacaaaggatgaagaacacagcatgtgccaa

SEQ ID NO: 556488 - DNA, 120 bp, Artificial Sequence
  ENSG00000169032_15 (sequence is synthesized)
gattctactcttgtcatttttaatattactgtctttattcttattactattattgttcccctaagtggattggctttgtgcttggggctatttgtgtgtatgctgatgatcaaaacctgt

SEQ ID NO: 556489 - DNA, 120 bp, Artificial Sequence
  ENSG00000169032_16 (sequence is synthesized)
gccaggctgaattacagtgaaattttggtgaatgtgggtagtcattcttacaattgcactgctgttcctgctccatgactggctgtctgcctgtattttcgggattctttgacatttggt

SEQ ID NO: 556490 - DNA, 120 bp, Artificial Sequence
  ENSG00000169032_17 (sequence is synthesized)
ggtactttattcttgctgggcatactttctctctaggagggagccttgtgagatccttcacaggcagtgcatgtgaagcatgctttgctgctatgaaaatgagcatcagagagtgtacat

SEQ ID NO: 556491 - DNA, 120 bp, Artificial Sequence
  ENSG00000169032_18 (sequence is synthesized)
catgttattttattattattatttgcttttcatgtagaactcagcagttgacatccaaatctagccagagcccttcactgccatgatagctggggcttcaccagtctgtctactgtggtg

SEQ ID NO: 556492 - DNA, 120 bp, Artificial Sequence
  ENSG00000169032_19 (sequence is synthesized)
atctgtagacttctggttgtatttctatatttattttcagtatactgtgtgggatacttagtggtatgtctctttaagttttgattaatgtttcttaaatggaattattttgaatgtcac

SEQ ID NO: 556493 - DNA, 120 bp, Artificial Sequence
  ENSG00000169032_20 (sequence is synthesized)
aaattgatcaagatattaaaatgtcggatttatctttccccatatccaagtaccaatgctgttgtaaacaacgtgtatagtgcctaaaattgtatgaaaatccttttaaccattttaacc

SEQ ID NO: 556494 - DNA, 120 bp, Artificial Sequence
  ENSG00000169032_21 (sequence is synthesized)
tagatgtttaacaaatctaatctcttattctaataaatatactatgaaataaaaaaaaaaggatgaaagctacttttgcttttgtggtaagcttttcagtttctttagtacacaagaaat

SEQ ID NO: 556495 - DNA, 120 bp, Artificial Sequence
  ENSG00000169032_22 (sequence is synthesized)
actggtttagccaagcaacactggtgagggggaaaggtgaagatgaggaggaggctggaaggcagaaacaggacaccgagttcagtgctttggactaatggggcttcctgtaatttcaat

SEQ ID NO: 556496 - DNA, 120 bp, Artificial Sequence
  ENSG00000169032_23 (sequence is synthesized)
ctctggactcagtccagctcttctcacccaacacccttatctgtgactcttccaaccaccttccttgtgggacctgtgaatagatcctgtatattcctttgatctcttttatacaaggga

SEQ ID NO: 556497 - DNA, 120 bp, Artificial Sequence
  ENSG00000169032_24 (sequence is synthesized)
aaagcagctgatgggggactgggagcaaatctgagaaaaatgacaaaacatttcttatctcacagaacatttctcattttccatataccaatagttgagctgagggcctgcctgcacttt

SEQ ID NO: 556498 - DNA, 120 bp, Artificial Sequence
  ENSG00000169032_25 (sequence is synthesized)
taggctgtcatgctcataggagggccttgctggtggccagcttgcctacctggtgtgggagctttctgcacaacataggacagtctgtctcctttgcgacattaagcaatggtttccctt

SEQ ID NO: 556499 - DNA, 120 bp, Artificial Sequence
  ENSG00000169032_26 (sequence is synthesized)
ctttcaccacttacacttaaccacaccttcctggaaaggaggaatgtgcctggcgctggctttgtcatgcctgtgaggtggcagtgatgtcacaaagccattgggaacttcttttaggta

SEQ ID NO: 556500 - DNA, 120 bp, Artificial Sequence
  ENSG00000169032_27 (sequence is synthesized)
catttgaggctgctggtcaatacctctccgctcattattttctttgaaagggcaggttacagaaactaaagccaacatatatatttataaataaaaggcccattcctttttagattaaaa

SEQ ID NO: 556501 - DNA, 120 bp, Artificial Sequence
  ENSG00000169032_28 (sequence is synthesized)
ttattttgctttgaattttagatataatccaaaggctgttgcttcctcttttttctatgttttgttttcgtgtaaaagccttttaataacatgttaaatcttttattaaaagtctttgtt

SEQ ID NO: 556502 - DNA, 120 bp, Artificial Sequence
  ENSG00000169032_29 (sequence is synthesized)
tagtttggtggctgaggcagcaactcctaccctctttttggtcttgctacacctattgcctatagctgtgatggacaatagtcatagtcaccctggaagcccagctaagagcctcaacca

SEQ ID NO: 556503 - DNA, 120 bp, Artificial Sequence
  ENSG00000169035_0 (sequence is synthesized)
ggagagggtgatgctggctccaagcctgactctgctctcgagagctccagcaggagaggcccttcctcgcctggcagcccctgagcggctcagcagggcaccatggcaagatcccttctc

SEQ ID NO: 556504 - DNA, 120 bp, Artificial Sequence
  ENSG00000169035_1 (sequence is synthesized)
ctgcccctgcagatcttactgctatccttagccttggaaactgcaggagaagaagcccagggtgacaagattattgatggcgccccatgtgcaagaggctcccacccatggcaggtggcc

SEQ ID NO: 556505 - DNA, 120 bp, Artificial Sequence
  ENSG00000169035_2 (sequence is synthesized)
ctgctcagtggcaatcagctccactgcggaggcgtcctggtcaatgagcgctgggtgctcactgccgcccactgcaagatgaatgagtacaccgtgcacctgggcagtgatacgctgggc

SEQ ID NO: 556506 - DNA, 120 bp, Artificial Sequence
  ENSG00000169035_3 (sequence is synthesized)
gacaggagagctcagaggatcaaggcctcgaagtcattccgccaccccggctactccacacagacccatgttaatgacctcatgctcgtgaagctcaatagccaggccaggctgtcatcc

SEQ ID NO: 556507 - DNA, 120 bp, Artificial Sequence
  ENSG00000169035_4 (sequence is synthesized)
atggtgaagaaagtcaggctgccctcccgctgcgaaccccctggaaccacctgtactgtctccggctggggcactaccacgagcccagatgtgacctttccctctgacctcatgtgcgtg

SEQ ID NO: 556508 - DNA, 120 bp, Artificial Sequence
  ENSG00000169035_5 (sequence is synthesized)
gatgtcaagctcatctccccccaggactgcacgaaggtttacaaggacttactggaaaattccatgctgtgcgctggcatccccgactccaagaaaaacgcctgcaatggtgactcaggg

SEQ ID NO: 556509 - DNA, 120 bp, Artificial Sequence
  ENSG00000169035_6 (sequence is synthesized)
ggaccgttggtgtgcagaggtaccctgcaaggtctggtgtcctggggaactttcccttgcggccaacccaatgacccaggagtctacactcaagtgtgcaagttcaccaagtggataaat

SEQ ID NO: 556510 - DNA, 120 bp, Artificial Sequence
  ENSG00000169035_7 (sequence is synthesized)
tacctttcctcaaagatatatttaaaccaacctcatgccctgttgataaaccaatcaaattggtaaagacctaaaaccaaaacaaataaagaaacacaaaaccctcagtgctggagaaga

SEQ ID NO: 556511 - DNA, 120 bp, Artificial Sequence
  ENSG00000169035_8 (sequence is synthesized)
gtcagtgagaccagcactctcaaacactggaactggacgttcgtacagtctttacggaagacacttggtcaacgtacaccgagacccttattcaccacctttgacccagtaactctaatc

SEQ ID NO: 556512 - DNA, 120 bp, Artificial Sequence
  ENSG00000169035_9 (sequence is synthesized)
ttaggaagaacctactgaaacaaaaaaaatccaaaatgtagaacaagacttgaatttaccatgatattatttatcacagaaatgaagtgaaaccatcaaacatgttccaaaagtaccaga

SEQ ID NO: 556513 - DNA, 120 bp, Artificial Sequence
  ENSG00000169035_10 (sequence is synthesized)
ttccaaaagtaccagatggcttaaataatagtctggcttggcacaacgatgttttttttctttgagacagagtctctgttgcttgggctgcaatgcagtgatgcaatcttggctcactgc

SEQ ID NO: 556514 - DNA, 120 bp, Artificial Sequence
  ENSG00000169035_11 (sequence is synthesized)
acttagacagaattgtcagtattattcaagaacatttaggctataggatgttaaatgacaaaaggaaggacaaaaatatatatgtatgtgaccctacccataaaaaatgaaatattcaca

SEQ ID NO: 556515 - DNA, 120 bp, Artificial Sequence
  ENSG00000169035_12 (sequence is synthesized)
gaatcagatctgaaaacacatgtcccagactgcatactggggtcgtcatgaggtgtctccttccttctgtgtacttttccttgaatgtgcacttttataacatgaaaaataaaggtgggg

SEQ ID NO: 556516 - DNA, 120 bp, Artificial Sequence
  ENSG00000169035_13 (sequence is synthesized)
aattgctctcgctgcgtcagggttccagataaccagaaccgcaaatgcaggcgggggtgtcccagagtcggctccgcctgcaccccagggcgctggggccgggcatggggcggggggtga

SEQ ID NO: 556517 - DNA, 120 bp, Artificial Sequence
  ENSG00000169035_14 (sequence is synthesized)
tataagaggacggcccagcagagggatgaagattttggagcccagctgtgtgccagcccaagtcggaacttggatcacatcagatcctctcgagctccagcaggagaggcccttcctcgc

SEQ ID NO: 556518 - DNA, 120 bp, Artificial Sequence
  ENSG00000169035_15 (sequence is synthesized)
agaagaaggtgaaagctggactgggaagtctgacctcacctcagggcccccactgaccctctccaaggagtccctgagtcagaacccttccctcctcaaacagcttccatcctgggagga

SEQ ID NO: 556519 - DNA, 120 bp, Artificial Sequence
  ENSG00000169035_16 (sequence is synthesized)
ccagactgtcggctgaagcccccgctcttcctgcttctgctgactcagggggtctctgtcccctccaggccctgcctcctgtgctcagggtctctctgtggttccccagatgagatgcgc

SEQ ID NO: 556520 - DNA, 120 bp, Artificial Sequence
  ENSG00000169045_0 (sequence is synthesized)
gtgctgctagaaaccacgaacattagtcatctcgcagcatgtgtgcacatggggtgacccgggggcctcctcgaatgcagcgtctacgcctggtgaatggacgcactcttaccaattctg

SEQ ID NO: 556521 - DNA, 120 bp, Artificial Sequence
  ENSG00000169045_1 (sequence is synthesized)
ctctgggagatgcagcggtaacctaccgagcgcagaggccggcgcgcacccgtggagcccgcgctcgcgatccctcctcgtgccagggccccagggcagtcaaggcctgccgaccgttag

SEQ ID NO: 556522 - DNA, 120 bp, Artificial Sequence
  ENSG00000169045_2 (sequence is synthesized)
gcgggtcaaggggtacacagggtgcgaattcgttaggcaaaagctgggtacaggcgcgagccacaggcacggaaacctcgcgccgaccggggccctaggcccgacgacggcaggtaaggg

SEQ ID NO: 556523 - DNA, 120 bp, Artificial Sequence
  ENSG00000169045_3 (sequence is synthesized)
gaagtggaggcacacagggctgggacgtgccccaggcaccatacgggtggcttcgggcgcgggacgtccgcagccccgcagctcccaggacgttcgacaatctgcagctgaccagcttcg

SEQ ID NO: 556524 - DNA, 120 bp, Artificial Sequence
  ENSG00000169045_4 (sequence is synthesized)
gccggtttggggataaagggaagacaggcggcgcggggagtgggaacgcctgaaggccgcgcccctcctttcaggtcggccaggagcgcgccggtaagagcctgggggcaaggggtagaa

SEQ ID NO: 556525 - DNA, 120 bp, Artificial Sequence
  ENSG00000169045_5 (sequence is synthesized)
agacgcccacctcatcacaacccagagctcgggactcctatacagtcccatagggaacaggcggccgccattcccctcccccacgctggcgggtaaggctagagaacggtttcaaggaag

SEQ ID NO: 556526 - DNA, 120 bp, Artificial Sequence
  ENSG00000169045_6 (sequence is synthesized)
acgcatgcgcatgaaataattataaaccgctaggactccgaagttcaatattcgcgggaaggcgcaggcgcaacaaaaagcccggcgggtttatgggtgggggtgctgagcccaaaaccc

SEQ ID NO: 556527 - DNA, 120 bp, Artificial Sequence
  ENSG00000169045_7 (sequence is synthesized)
aagcgtgtaataatccgccggcgggaggtgggctggctcttgaaattacgcatgcgccagagctctttgtgacgcaacggggcggtgcgggcagctggctgcgcgtgcgcagaactcgca

SEQ ID NO: 556528 - DNA, 120 bp, Artificial Sequence
  ENSG00000169045_8 (sequence is synthesized)
caagggaccttatttaggttgcgcaggcgcccgctggccatttcgtcttagccacgcagaagtcgcgtgtctaggtgagtcgcggtgggtcctcgcttgcagttcagcgaccacggtggg

SEQ ID NO: 556529 - DNA, 120 bp, Artificial Sequence
  ENSG00000169045_9 (sequence is synthesized)
taccgtttttgcgaggattgtttgtccccatatctctgggagggccacggggaccttggcgagctgcaggctgccgtcgagagccgcgagtggttcgctgaatctcggcaccgccgctga

SEQ ID NO: 556530 - DNA, 120 bp, Artificial Sequence
  ENSG00000169045_10 (sequence is synthesized)
ggcctgcaggccgcgccgactctattgtgtgagaagtcggaggaggcggagcggaagcggccgccgccatttcctttcctctacgctggctctcggcccgggcccccacggttcggggcg

SEQ ID NO: 556531 - DNA, 120 bp, Artificial Sequence
  ENSG00000169045_11 (sequence is synthesized)
ccgacagctgttgctcaggacagctttgggggtccggtcgccggacgaggaggtgttggagtcgccggggtgggtgcatccgcccggtttttgctccgtgggggggcggtgcgggcccgg

SEQ ID NO: 556532 - DNA, 120 bp, Artificial Sequence
  ENSG00000169045_12 (sequence is synthesized)
gcgcgcctcggaggcgaaggacagcttaattggcgctctcagttctggtcctccccgctttgcagtttgtttcgacgccggaccgcgtaagagacgatgatgttgggcacggaaggtgga

SEQ ID NO: 556533 - DNA, 120 bp, Artificial Sequence
  ENSG00000169045_13 (sequence is synthesized)
gagggattcgtggtgaaggtccggggcttgccctggtcttgctcggccgatgaagtgcagaggtttttttctgactgcaaaattcaaaatggggctcaaggtattcgtttcatctacacc

SEQ ID NO: 556534 - DNA, 120 bp, Artificial Sequence
  ENSG00000169045_14 (sequence is synthesized)
agagaaggcagaccaagtggcgaggcttttgttgaacttgaatcagaagatgaagtcaaattggccctgaaaaaagacagagaaactatgggacacagatatgttgaagtattcaagtca

SEQ ID NO: 556535 - DNA, 120 bp, Artificial Sequence
  ENSG00000169045_15 (sequence is synthesized)
gctttgtacggcttagaggacttccctttggatgtagcaaggaagaaattgttcagttcttctcagggttggaaatcgtgccaaatgggataacattgccggtggacttccaggggagga

SEQ ID NO: 556536 - DNA, 120 bp, Artificial Sequence
  ENSG00000169045_16 (sequence is synthesized)
gtacgggggaggccttcgtgcagtttgcttcacaggaaatagctgaaaaggctctaaagaaacacaaggaaagaatagggcacaggtatattgaaatctttaagagcagtagagctgaag

SEQ ID NO: 556537 - DNA, 120 bp, Artificial Sequence
  ENSG00000169045_17 (sequence is synthesized)
ttagaactcattatgatccaccacgaaagcttatggccatgcagcggccaggtccttatgacagacctggggctggtagagggtataacagcattggcagaggagctggctttgagagga

SEQ ID NO: 556538 - DNA, 120 bp, Artificial Sequence
  ENSG00000169045_18 (sequence is synthesized)
tgaggcgtggtgcttatggtggaggctatggaggctatgatgattacaatggctataatgatggctatggatttgggtcagatagatttggaagagacctcaattactgtttttcaggaa

SEQ ID NO: 556539 - DNA, 120 bp, Artificial Sequence
  ENSG00000169045_19 (sequence is synthesized)
tgtctgatcacagatacggggatggtggctctactttccagagcacaacaggacactgtgtacacatgcggggattaccttacagagctactgagaatgacatttataattttttttcac

SEQ ID NO: 556540 - DNA, 120 bp, Artificial Sequence
  ENSG00000169045_20 (sequence is synthesized)
cgctcaaccctgtgagagtacacattgaaattggtcctgatggcagagtaactggtgaagcagatgtcgagttcgcaactcatgaagatgctgtggcagctatgtcaaaagacaaagcaa

SEQ ID NO: 556541 - DNA, 120 bp, Artificial Sequence
  ENSG00000169045_21 (sequence is synthesized)
atatgcaacacagatatgtagaactcttcttgaattctacagcaggagcaagcggtggtgcttacgaacacagatatgtagaactcttcttgaattctacagcaggagcaagcggtggtg

SEQ ID NO: 556542 - DNA, 120 bp, Artificial Sequence
  ENSG00000169045_22 (sequence is synthesized)
cttatggtagccaaatgatgggaggcatgggcttgtcaaaccagtccagctacgggggcccagccagccagcagctgagtgggggttacggaggcggctacggtggccagagcagcatga

SEQ ID NO: 556543 - DNA, 120 bp, Artificial Sequence
  ENSG00000169045_23 (sequence is synthesized)
gtggatacgaccaagttttacaggaaaactccagtgattttcaatcaaacattgcataggtaaccaaggagcagtgaacagcagctactacagtagtggaagccgtgcatctatgggcgt

SEQ ID NO: 556544 - DNA, 120 bp, Artificial Sequence
  ENSG00000169045_24 (sequence is synthesized)
gcgtgaacggaatgggagggttgtctagcatgtccagtatgagtggtggatggggaatgtaattgatcgatcctgatcactgactcttggtcaaccttttttttttttttttttttttct

SEQ ID NO: 556545 - DNA, 120 bp, Artificial Sequence
  ENSG00000169045_25 (sequence is synthesized)
gaaaacttcagtttaacagtttctgcaatacaagcttgtgatttatgcttactctaagtggaaatcaggattgttatgaagacttaaggcccagtatttttgaatacaatactcatctag

SEQ ID NO: 556546 - DNA, 120 bp, Artificial Sequence
  ENSG00000169045_26 (sequence is synthesized)
gatgtaacagtgaagctgagtaaactataactgttaaacttaagttccagcttttctcaagttagttataggatgtacttaagcagtaagcgtatttaggtaaaagcagttgaattatgt

SEQ ID NO: 556547 - DNA, 120 bp, Artificial Sequence
  ENSG00000169045_27 (sequence is synthesized)
taaatgttgccctttgccacgttaaattgaacactgttttggatgcatgttgaaagacatgcttttatttttttgtaaaacaatataggagctgtgtctactattaaaagtgaaacattt

SEQ ID NO: 556548 - DNA, 120 bp, Artificial Sequence
  ENSG00000169045_28 (sequence is synthesized)
tggcatgtttgttaattctagtttcatttaataacctgtaaggcacgtaagtttaagctttttttttttttaagttaatgggaaaaatttgagacgcaataccaatacttaggattttgg

SEQ ID NO: 556549 - DNA, 120 bp, Artificial Sequence
  ENSG00000169045_29 (sequence is synthesized)
tcttggtgtttgtatgaaattctgaggccttgatttaaatctttcattgtattgtgatttccttttaggtatattgcgctaagtgaaacttgtcaaataaatcctccttttaaaaactgc

SEQ ID NO: 556550 - DNA, 120 bp, Artificial Sequence
  ENSG00000169045_30 (sequence is synthesized)
acaagggaccttatttaggttgcgcaggcgcccgctggccatttcgtcttagccacgcagaagtcgcgtgtctaggtgagtcgcggtgggtcctcgcttgcagttcagcgaccacgtttg

SEQ ID NO: 556551 - DNA, 120 bp, Artificial Sequence
  ENSG00000169045_31 (sequence is synthesized)
tgcttacggtagccaaatgctaggaggcatgggtttgtcaaaccagtccagctacgggggcccagccagccagcagctgagtgggggttacggaggcggctacggtggccagagcagcat

SEQ ID NO: 556552 - DNA, 120 bp, Artificial Sequence
  ENSG00000169045_32 (sequence is synthesized)
ggtatgtagtcatgtttgttgctgagcagtgagttttggctagcttatggcaaggtgatttaatagacgttaaagttgagtagcttaggtatttcagtaggttgtaaattgccaatgaat

SEQ ID NO: 556553 - DNA, 120 bp, Artificial Sequence
  ENSG00000169045_33 (sequence is synthesized)
agtcccggttccccgccatcagcacgacctgtgtgagagcacagggtatctgggcagaaggaaaactaggggagcctcatccagcgctggagatggagaagctttgggcttctcgacggc

SEQ ID NO: 556554 - DNA, 120 bp, Artificial Sequence
  ENSG00000169045_34 (sequence is synthesized)
gaggcacccggggaacggggagtcacttagaacctcaaagtagcctcgggcgagaacaagcgaagcaattccaagctctaccaggtcacggagggcgcgaaacccgccccgcgctccggc

SEQ ID NO: 556555 - DNA, 120 bp, Artificial Sequence
  ENSG00000169045_35 (sequence is synthesized)
cggccggcagggggcgcgcgctccccgaactcccgcgcaccgcggaggaggcggccctggcgcggggaagcagtgggaaaatcgcaaggaagccggcgctgctctgaagggagagtctgt

SEQ ID NO: 556556 - DNA, 120 bp, Artificial Sequence
  ENSG00000169045_36 (sequence is synthesized)
ctttcattttcagccctgctctttaaatactagacataccgtctggcgcatgtcgaggcgtgtattattttgatccagtgcgcgtgccgtatgtgacttggcttggcttcccctgaaagc

SEQ ID NO: 556557 - DNA, 120 bp, Artificial Sequence
  ENSG00000169045_37 (sequence is synthesized)
agcggctgtggggagttgattcggaagtgaagggccctgggcgacccggcgagtagaggcaacaccaacactcctccttagcgaggggtctccccgccgcggtggctgcccggccccaag

SEQ ID NO: 556558 - DNA, 120 bp, Artificial Sequence
  ENSG00000169045_38 (sequence is synthesized)
ttgtgcactgactcctgaccccgtcctccagcgctgctctgaagggagagtctgtgcagtggcacctgcgcgaagctggccaaagcctgcccagacggctcacctgtgcgggatggaaca

SEQ ID NO: 556559 - DNA, 120 bp, Artificial Sequence
  ENSG00000169045_39 (sequence is synthesized)
agcagatgtcgagttcgcaactcatgaagatgctgtggcagctatgtcaaaagacaaagcaaatatgcaacacagatatgtagaactcttcttgaattctacagcaggagcaagcggtga

SEQ ID NO: 556560 - DNA, 120 bp, Artificial Sequence
  ENSG00000169045_40 (sequence is synthesized)
agtgggaaaatcgcaaggaagccggcgctgctctgaagggagagtctgtgcagtggcacctgcgcgaagctggccaaagcctgcccagacggctcacctgtgcgggatggaacaaaaggt

SEQ ID NO: 556561 - DNA, 120 bp, Artificial Sequence
  ENSG00000169045_41 (sequence is synthesized)
gataaaatgacctcagtagccgcctgtgggaggggaccctgaggaaagcaccatagtgactaccaagcctggatggttttactgcttactttgttattttattttattttattttatttt

SEQ ID NO: 556562 - DNA, 120 bp, Artificial Sequence
  ENSG00000169045_42 (sequence is synthesized)
gaggcatgggcttgtgtaaatatcgttagtttttttaaaaaccaaaacgtttatatctgtataagtcaattataagttaagttaatctatttatttaataagtttagcataagaaactta

SEQ ID NO: 556563 - DNA, 120 bp, Artificial Sequence
  ENSG00000169045_43 (sequence is synthesized)
atctggctttaaatattagtcagtttcatggctatgactagattgttttcttgtataactaaatacctgtataaaatgaactaatgttttctctcccctccctaccccttccttatgaac

SEQ ID NO: 556564 - DNA, 120 bp, Artificial Sequence
  ENSG00000169045_44 (sequence is synthesized)
tgtgttgaaggtttgggttttaaaaattagtataacggatttgtgatatgcacatcttgaagtgtatatccttaattgacaatacagatgaatatgtaaaggctagattttggagttaaa

SEQ ID NO: 556565 - DNA, 120 bp, Artificial Sequence
  ENSG00000169045_45 (sequence is synthesized)
gtagatcacctaagagaagtagctagaatttctttgccaaagtatttgaagttcacagatctgcttgtttaaaaactttataaaagtgcttattctgttttgtttcaccaacaaacattt

SEQ ID NO: 556566 - DNA, 120 bp, Artificial Sequence
  ENSG00000169045_46 (sequence is synthesized)
tcaaactttttttttctcatttcagaacacagatatgtagaactcttcttgaattctacagcaggagcaagcggtggtgcttacggtagccaaatgctaggaggcatgggtttgtgtaaa

SEQ ID NO: 556567 - DNA, 120 bp, Artificial Sequence
  ENSG00000169045_47 (sequence is synthesized)
attaaatccatattctctctgcttaaaagaagaaattaatgttttgtagtcctaggtaattgatgttttgccatgatttccaaacttgtgtcagtcccacgttacacgcaaactaaattt

SEQ ID NO: 556568 - DNA, 120 bp, Artificial Sequence
  ENSG00000169045_48 (sequence is synthesized)
ttgctcggccgatgaagtgcagaggtttttttctggtgagttagaactaggacgcgggagttcgagttcgaggccggggcgggcgggctggcgggcggccgggctggggcggggcggggc

SEQ ID NO: 556569 - DNA, 120 bp, Artificial Sequence
  ENSG00000169045_49 (sequence is synthesized)
cctggtcttgctcggccgatgaagtgcagaggtttttttctgtattcaagtcaaacaacgttgaaatggattgggtgttgaagcatactggtccaaatagtcctgacacggccaatgatg

SEQ ID NO: 556570 - DNA, 120 bp, Artificial Sequence
  ENSG00000169045_50 (sequence is synthesized)
aggcttcacaagttatgtaatttgtagtggggacatggaatagacatttcatctgtgtcacccagaggtggttttaggttttaaattctgtattaacggttgttttctttccagactgca

SEQ ID NO: 556571 - DNA, 120 bp, Artificial Sequence
  ENSG00000169045_51 (sequence is synthesized)
tactgttagagcataagcatgcatgattgtgctgtgtagatcagttttgttgaaagtttagattgttgtgtttgtcaattataatttaatgtttcagtttttatatgaaatgttgtaaat

SEQ ID NO: 556572 - DNA, 120 bp, Artificial Sequence
  ENSG00000169045_52 (sequence is synthesized)
gtatacctttttaaaaacttgaagttccaataacttaaagcattgaaatataaaatgaggtaaaaggtgttttgaatttagtaaaactgttatttaatgcttaaaacttaattgaattgt

SEQ ID NO: 556573 - DNA, 120 bp, Artificial Sequence
  ENSG00000169045_53 (sequence is synthesized)
ataattctcaacattaagttgcatagatatgtgttcttaagttgttgaattcttaatgcatcctgtgttcagcaagttttttttaatatatactgtaccatgggtgtgttaagaatagtt

SEQ ID NO: 556574 - DNA, 120 bp, Artificial Sequence
  ENSG00000169045_54 (sequence is synthesized)
atactttataataatggaacttcatattattgcaatgcatatttaaagagtacttgttgaaagcataccattcacctaaagttaaaaattctggtttatttaaagctataagaagaatca

SEQ ID NO: 556575 - DNA, 120 bp, Artificial Sequence
  ENSG00000169045_55 (sequence is synthesized)
gaagaaattgttcagttcttctcaggaatgtctgatcacagatacggggatggtggctctactttccagagcacaacaggacactgtgtacacatgcggggattaccttacagagctact

SEQ ID NO: 556576 - DNA, 120 bp, Artificial Sequence
  ENSG00000169045_56 (sequence is synthesized)
tgcaacaaactttttcttgctgtatataaatattctgcatagtattaataagcatagctttcaagaaattgtcacaaaaggttttattctctttgcttgtgactatttttcattgaagca

SEQ ID NO: 556577 - DNA, 120 bp, Artificial Sequence
  ENSG00000169045_57 (sequence is synthesized)
tgcgcttacctatgctgattcttactaaaagcataggctggggtatttattggcgaaaggaaatgtgtagtgtgggctggactgttggtggaggctggctttttagcccacttgctatac

SEQ ID NO: 556578 - DNA, 120 bp, Artificial Sequence
  ENSG00000169045_58 (sequence is synthesized)
atgctgccaatggatttaagacttgaaatgttgaaagttgagtggaattatttccctcctaaaacatttatttacagtactcctctctacccctaaggttgggctctgcctcagaggagt

SEQ ID NO: 556579 - DNA, 120 bp, Artificial Sequence
  ENSG00000169045_59 (sequence is synthesized)
tgtatctggcttacttaaatccttgtgagttatgaagttccttaggatagataattcaaattaggtttaagtagtcttgggggaggggactacggagtgaaactacttaaattttctaag

SEQ ID NO: 556580 - DNA, 120 bp, Artificial Sequence
  ENSG00000169045_60 (sequence is synthesized)
tataaagtttaaatcaatagcaaaacaggattaagataaatgtgggcataattaggtgtattgacatgcctttgatgtatcaaactgagggggaacccactaaatccagtcaagcagttt

SEQ ID NO: 556581 - DNA, 120 bp, Artificial Sequence
  ENSG00000169045_61 (sequence is synthesized)
cataagatcttcacaaaatgcctctacttacggaatcatgttgattttagtcctgctgatgtgtgtaccgttagcactttggtttatcaatatttgactggctcaaatgatggatagaag

SEQ ID NO: 556582 - DNA, 120 bp, Artificial Sequence
  ENSG00000169045_62 (sequence is synthesized)
ggtggcctggttatagacagtaggcagaaggaggcagagggttacagtaatgtaagatcaagactggaaaatgatagctatagaattacaagcccggtaccaccaggtaccacatcacat

SEQ ID NO: 556583 - DNA, 120 bp, Artificial Sequence
  ENSG00000169045_63 (sequence is synthesized)
atggtagccaaatgatgggaggcatgggcttgtgtaaatatccaaaccagtccagctacgggggcccagccagccagcagctgagtgggggttacggaggcggctacggtggccagagca

SEQ ID NO: 556584 - DNA, 120 bp, Artificial Sequence
  ENSG00000169045_64 (sequence is synthesized)
gtacgctggaagccgccttgcagggggcaacactgggtttggcttcagctgtgcaacttggagcattttagcttggtaacactgatcccctttcagactgcaaaattcaaaatggggctc

SEQ ID NO: 556585 - DNA, 120 bp, Artificial Sequence
  ENSG00000169045_65 (sequence is synthesized)
gataaaagatgtgtgatgtagacatgagtagcaaggactaaagagataaattcattctgaaactgctttgaatattgtatgttgttgatgggttggaaatatatcaccttaggaatgagt

SEQ ID NO: 556586 - DNA, 120 bp, Artificial Sequence
  ENSG00000169045_66 (sequence is synthesized)
ggtctgcttgacaattttgtgagtcttattaaccccaatcaatagagttgagagactatggctttaaaaaattaatgcaaacctggctttagctgtaataacacccacctagaataaatt

SEQ ID NO: 556587 - DNA, 120 bp, Artificial Sequence
  ENSG00000169045_67 (sequence is synthesized)
gagtaagttatggtaaagcctgttcattactgtacttagagtaagttatggtaaagcctgttactgtacttagagtaagtcgcaggcaggtgcctttagttgggaagatgcaggctcctt

SEQ ID NO: 556588 - DNA, 120 bp, Artificial Sequence
  ENSG00000169045_68 (sequence is synthesized)
tcggtgaaattgggttatgaaatgtatgctttcaatccaaatgtaactgtttttactagctaattttcagaaacaatcattgggagggggaagtgttctttgaattaagaactagtcatt

SEQ ID NO: 556589 - DNA, 120 bp, Artificial Sequence
  ENSG00000169045_69 (sequence is synthesized)
gcagctttggaatactgtcgagccagaaaatatctgcctccatgtattaaaacattaaataaagttgttcacttttttgtcttttggttagcattaagtcagttttagacagagggagaa

SEQ ID NO: 556590 - DNA, 120 bp, Artificial Sequence
  ENSG00000169045_70 (sequence is synthesized)
tttgaaatagtagaatggtggttgggttcaggatcgtatttattagtcagttaacctaggattggttttatttattttttttcaattggtctaaagaatggtgattttggtattatagtc

SEQ ID NO: 556591 - DNA, 120 bp, Artificial Sequence
  ENSG00000169045_71 (sequence is synthesized)
ttaccctacaaaatccttttgcagaccaagttttacaggaaaactccagtgattttcaatcaaacattgcataggtaaatattttctcaaaaaatataaattcccaatagcaaatactga

SEQ ID NO: 556592 - DNA, 120 bp, Artificial Sequence
  ENSG00000169045_72 (sequence is synthesized)
tatgttgtaataatgctttctatagcagtcaatggctctgacttaactccatggaggctgccatttgggcacagtgagttgcctttagtccagcttggttgtctcacttcctgcccacca

SEQ ID NO: 556593 - DNA, 120 bp, Artificial Sequence
  ENSG00000169045_73 (sequence is synthesized)
tgaataggaaaagcaagagacttcccctgtgctcccttttctcaaatgccattcgagggacacattgtgaatgtttatgttaaattttttttaaaaatgccttgtttagctttaaaaata

SEQ ID NO: 556594 - DNA, 120 bp, Artificial Sequence
  ENSG00000169045_74 (sequence is synthesized)
cgaagtaattttgcaatttttgaaaaacactagttttcctttaaacttaatttttcatgttgatcctgaagaatccgttaaaatggtagcacaagagtctggcaagttggtactgcagag

SEQ ID NO: 556595 - DNA, 120 bp, Artificial Sequence
  ENSG00000169045_75 (sequence is synthesized)
aaaaggggttaattgaggcttgtttggagtcgggattcccctttcccaaacatgcgtctcgccacttggacagcagccatttgtactcgtatactttttaaactttttcttggaatacta

SEQ ID NO: 556596 - DNA, 120 bp, Artificial Sequence
  ENSG00000169045_76 (sequence is synthesized)
atgttgaaggtttgatttacattgccctagttacagtaaataaagcattaaacaatagaggtctcaccccttctgaattttaggtatttgactgcatggaaatggtcatctaagggagtt

SEQ ID NO: 556597 - DNA, 120 bp, Artificial Sequence
  ENSG00000169045_77 (sequence is synthesized)
tgtggcagctcttcctagcttatctaaagacccaggaagtctgaactttgttatctaattttccaaaagtgactaattctaagcacctctttcagtattcaagtcaaacaacgttgaaat

SEQ ID NO: 556598 - DNA, 120 bp, Artificial Sequence
  ENSG00000169047_0 (sequence is synthesized)
cggcggcgcggtcggagggggccggcgcgcagagccagacgccgccgcttgttttggttggggctctcggcaactctccgaggaggaggaggaggagggaggaggggagaagtaactgca

SEQ ID NO: 556599 - DNA, 120 bp, Artificial Sequence
  ENSG00000169047_1 (sequence is synthesized)
gcggcagcgcctcccgaggaacaggcgtcttccccgaacccttcccaaacctcccccatcccctctcgcccttgtcccctcccctcctccccagccgcctggagcgaggggcagggatga

SEQ ID NO: 556600 - DNA, 120 bp, Artificial Sequence
  ENSG00000169047_2 (sequence is synthesized)
gtctgtccctccggccggtccccagctgcagtggctgcccggtatcgtttcgcatggaaaagccactttctccacccgccgagatgggcccggatgggggctgcagaggacgcgcccgcg

SEQ ID NO: 556601 - DNA, 120 bp, Artificial Sequence
  ENSG00000169047_3 (sequence is synthesized)
agcagcagcagcagcagcagcaacagcaacagccgcagcgccgcggtctctgcgactgagctggtatttgggcggctggtggcggctgggacggttggggggtgggaggaggcgaaggag

SEQ ID NO: 556602 - DNA, 120 bp, Artificial Sequence
  ENSG00000169047_4 (sequence is synthesized)
gaggcgaaggaggagggagaaccccgtgcaacgttgggacttggcaacccgcctccccctgcccaaggatatttaatttgcctcgggaatcgctgcttccagaggggaactcaggaggga

SEQ ID NO: 556603 - DNA, 120 bp, Artificial Sequence
  ENSG00000169047_5 (sequence is synthesized)
aggcgcgcgcgcgcgcgcgctcctggaggggcaccgcagggacccccgactgtcgcctccctgtgccggactccagccggggcgacgagagatgcatcttcgctccttcctggtggcggc

SEQ ID NO: 556604 - DNA, 120 bp, Artificial Sequence
  ENSG00000169047_6 (sequence is synthesized)
ggcggctgagaggagacttggctctcggaggatcggggctgccctcaccccggacgcactgcctccccgccgggcgtgaagcgcccgaaaactccggtcgggctctctcctgggctcagc

SEQ ID NO: 556605 - DNA, 120 bp, Artificial Sequence
  ENSG00000169047_7 (sequence is synthesized)
agctgcgtcctccttcagctgcccctccccggcgcggggggcggcgtggatttcagagtcggggtttctgctgcctccagccctgtttgcatgtgccgggccgcggcgaggagcctccgc

SEQ ID NO: 556606 - DNA, 120 bp, Artificial Sequence
  ENSG00000169047_8 (sequence is synthesized)
cccccacccggttgtttttcggagcctccctctgctcagcgttggtggtggcggtggcagcatggcgagccctccggagagcgatggcttctcggacgtgcgcaaggtgggctacctgcg

SEQ ID NO: 556607 - DNA, 120 bp, Artificial Sequence
  ENSG00000169047_9 (sequence is synthesized)
caaacccaagagcatgcacaaacgcttcttcgtactgcgcgcggccagcgaggctgggggcccggcgcgcctcgagtactacgagaacgagaagaagtggcggcacaagtcgagcgcccc

SEQ ID NO: 556608 - DNA, 120 bp, Artificial Sequence
  ENSG00000169047_10 (sequence is synthesized)
caaacgctcgatcccccttgagagctgcttcaacatcaacaagcgggctgactccaagaacaagcacctggtggctctctacacccgggacgagcactttgccatcgcggcggacagcga

SEQ ID NO: 556609 - DNA, 120 bp, Artificial Sequence
  ENSG00000169047_11 (sequence is synthesized)
ggccgagcaagacagctggtaccaggctctcctacagctgcacaaccgtgctaagggccaccacgacggagctgcggccctcggggcgggaggtggtgggggcagctgcagcggcagctc

SEQ ID NO: 556610 - DNA, 120 bp, Artificial Sequence
  ENSG00000169047_12 (sequence is synthesized)
cggccttggtgaggctggggaggacttgagctacggtgacgtgcccccaggacccgcattcaaagaggtctggcaagtgatcctgaagcccaagggcctgggtcagacaaagaacctgat

SEQ ID NO: 556611 - DNA, 120 bp, Artificial Sequence
  ENSG00000169047_13 (sequence is synthesized)
tggtatctaccgcctttgcctgaccagcaagaccatcagcttcgtgaagctgaactcggaggcagcggccgtggtgctgcagctgatgaacatcaggcgctgtggccactcggaaaactt

SEQ ID NO: 556612 - DNA, 120 bp, Artificial Sequence
  ENSG00000169047_14 (sequence is synthesized)
cttcttcatcgaggtgggccgttctgccgtgacggggcccggggagttctggatgcaggtggatgactctgtggtggcccagaacatgcacgagaccatcctggaggccatgcgggccat

SEQ ID NO: 556613 - DNA, 120 bp, Artificial Sequence
  ENSG00000169047_15 (sequence is synthesized)
gagtgatgagttccgccctcgcagcaagagccagtcctcgtccaactgctctaaccccatcagcgtccccctgcgccggcaccatctcaacaatcccccgcccagccaggtggggctgac

SEQ ID NO: 556614 - DNA, 120 bp, Artificial Sequence
  ENSG00000169047_16 (sequence is synthesized)
ccgccgatcacgcactgagagcatcaccgccacctccccggccagcatggtgggcgggaagccaggctccttccgtgtccgcgcctccagtgacggcgaaggcaccatgtcccgcccagc

SEQ ID NO: 556615 - DNA, 120 bp, Artificial Sequence
  ENSG00000169047_17 (sequence is synthesized)
ctcggtggacggcagccctgtgagtcccagcaccaacagaacccacgcccaccggcatcggggcagcgcccggctgcaccccccgctcaaccacagccgctccatccccatgccggcttc

SEQ ID NO: 556616 - DNA, 120 bp, Artificial Sequence
  ENSG00000169047_18 (sequence is synthesized)
ccgctgctcgccttcggccaccagcccggtcagtctgtcgtccagtagcaccagtggccatggctccacctcggattgtctcttcccacggcgatctagtgcttcggtgtctggttcccc

SEQ ID NO: 556617 - DNA, 120 bp, Artificial Sequence
  ENSG00000169047_19 (sequence is synthesized)
cagcgatggcggtttcatctcctcggatgagtatggctccagtccctgcgatttccggagttccttccgcagtgtcactccggattccctgggccacaccccaccagcccgcggtgagga

SEQ ID NO: 556618 - DNA, 120 bp, Artificial Sequence
  ENSG00000169047_20 (sequence is synthesized)
ggagctaagcaactatatctgcatgggtggcaaggggccctccaccctgaccgcccccaacggtcactacattttgtctcggggtggcaatggccaccgctgcaccccaggaacaggctt

SEQ ID NO: 556619 - DNA, 120 bp, Artificial Sequence
  ENSG00000169047_21 (sequence is synthesized)
gggcacgagtccagccttggctggggatgaagcagccagtgctgcagatctggataatcggttccgaaagagaactcactcggcaggcacatcccctaccattacccaccagaagacccc

SEQ ID NO: 556620 - DNA, 120 bp, Artificial Sequence
  ENSG00000169047_22 (sequence is synthesized)
gtcccagtcctcagtggcttccattgaggagtacacagagatgatgcctgcctacccaccaggaggtggcagtggaggccgactgccgggacacaggcactccgccttcgtgcccacccg

SEQ ID NO: 556621 - DNA, 120 bp, Artificial Sequence
  ENSG00000169047_23 (sequence is synthesized)
ctcctacccagaggagggtctggaaatgcaccccttggagcgtcggggggggcaccaccgcccagacagctccaccctccacacggatgatggctacatgcccatgtccccaggggtggc

SEQ ID NO: 556622 - DNA, 120 bp, Artificial Sequence
  ENSG00000169047_24 (sequence is synthesized)
cccagtgcccagtggccgaaagggcagtggagactatatgcccatgagccccaagagcgtatctgccccacagcagatcatcaatcccatcagacgccatccccagagagtggaccccaa

SEQ ID NO: 556623 - DNA, 120 bp, Artificial Sequence
  ENSG00000169047_25 (sequence is synthesized)
tggctacatgatgatgtcccccagcggtggctgctctcctgacattggaggtggccccagcagcagcagcagcagcagcaacgccgtcccttccgggaccagctatggaaagctgtggac

SEQ ID NO: 556624 - DNA, 120 bp, Artificial Sequence
  ENSG00000169047_26 (sequence is synthesized)
aaacggggtagggggccaccactctcatgtcttgcctcaccccaaacccccagtggagagcagcggtggtaagctcttaccttgcacaggtgactacatgaacatgtcaccagtggggga

SEQ ID NO: 556625 - DNA, 120 bp, Artificial Sequence
  ENSG00000169047_27 (sequence is synthesized)
ctccaacaccagcagcccctccgactgctactacggccctgaggacccccagcacaagccagtcctctcctactactcattgccaagatcctttaagcacacccagcgccccggggagcc

SEQ ID NO: 556626 - DNA, 120 bp, Artificial Sequence
  ENSG00000169047_28 (sequence is synthesized)
ggaggagggtgcccggcatcagcacctccgcctttccactagctctggtcgccttctctatgctgcaacagcagatgattcttcctcttccaccagcagcgacagcctgggtgggggata

SEQ ID NO: 556627 - DNA, 120 bp, Artificial Sequence
  ENSG00000169047_29 (sequence is synthesized)
ctgcggggctaggctggagcccagccttccacatccccaccatcaggttctgcagccccatctgcctcgaaaggtggacacagctgctcagaccaatagccgcctggcccggcccacgag

SEQ ID NO: 556628 - DNA, 120 bp, Artificial Sequence
  ENSG00000169047_30 (sequence is synthesized)
gctgtccctgggggatcccaaggccagcaccttacctcgggcccgagagcagcagcagcagcagcagcccttgctgcaccctccagagcccaagagcccgggggaatatgtcaatattga

SEQ ID NO: 556629 - DNA, 120 bp, Artificial Sequence
  ENSG00000169047_31 (sequence is synthesized)
atttgggagtgatcagtctggctacttgtctggcccggtggctttccacagctcaccttctgtcaggtgtccatcccagctccagccagctcccagagaggaagagactggcactgagga

SEQ ID NO: 556630 - DNA, 120 bp, Artificial Sequence
  ENSG00000169047_32 (sequence is synthesized)
gtacatgaagatggacctggggccgggccggagggcagcctggcaggagagcactggggtcgagatgggcagactgggccctgcacctcccggggctgctagcatttgcaggcctacccg

SEQ ID NO: 556631 - DNA, 120 bp, Artificial Sequence
  ENSG00000169047_33 (sequence is synthesized)
ggcagtgcccagcagccggggtgactacatgaccatgcagatgagttgtccccgtcagagctacgtggacacctcgccagctgcccctgtaagctatgctgacatgcgaacaggcattgc

SEQ ID NO: 556632 - DNA, 120 bp, Artificial Sequence
  ENSG00000169047_34 (sequence is synthesized)
tgcagaggaggtgagcctgcccagggccaccatggctgctgcctcctcatcctcagcagcctctgcttccccgactgggcctcaaggggcagcagagctggctgcccactcgtccctgct

SEQ ID NO: 556633 - DNA, 120 bp, Artificial Sequence
  ENSG00000169047_35 (sequence is synthesized)
ggggggcccacaaggacctgggggcatgagcgccttcacccgggtgaacctcagtcctaaccgcaaccagagtgccaaagtgatccgtgcagacccacaagggtgccggcggaggcatag

SEQ ID NO: 556634 - DNA, 120 bp, Artificial Sequence
  ENSG00000169047_36 (sequence is synthesized)
ctccgagactttctcctcaacacccagtgccacccgggtgggcaacacagtgccctttggagcgggggcagcagtagggggcggtggcggtagcagcagcagcagcgaggatgtgaaacg

SEQ ID NO: 556635 - DNA, 120 bp, Artificial Sequence
  ENSG00000169047_37 (sequence is synthesized)
ccacagctctgcttcctttgagaatgtgtggctgaggcctggggagcttgggggagcccccaaggagccagccaaactgtgtggggctgctgggggtttggagaatggtcttaactacat

SEQ ID NO: 556636 - DNA, 120 bp, Artificial Sequence
  ENSG00000169047_38 (sequence is synthesized)
agacctggatttggtcaaggacttcaaacagtgccctcaggagtgcacccctgaaccgcagcctcccccacccccaccccctcatcaacccctgggcagcggtgagagcagctccacccg

SEQ ID NO: 556637 - DNA, 120 bp, Artificial Sequence
  ENSG00000169047_39 (sequence is synthesized)
ccgctcaagtgaggatttaagcgcctatgccagcatcagtttccagaagcagccagaggaccgtcagtagctcaactggacatcacagcagaatgaagacctaaatgacctcagcaaatc

SEQ ID NO: 556638 - DNA, 120 bp, Artificial Sequence
  ENSG00000169047_40 (sequence is synthesized)
tttactttatccaatcctcaggatttcattgactgaactgcacgttctatattgtgccaagcgaaaaaaaaaaatgcactgtgacaccagaataatgagtctgcataaacttcatcttca

SEQ ID NO: 556639 - DNA, 120 bp, Artificial Sequence
  ENSG00000169047_41 (sequence is synthesized)
accttaaggacttagctggccacagtgagctgatgtgcccaccaccgtgtcatgagagaatgggtttactctcaatgcattttcaagatacatttcatctgctgctgaaactgtgtacga

SEQ ID NO: 556640 - DNA, 120 bp, Artificial Sequence
  ENSG00000169047_42 (sequence is synthesized)
caaagcatcattgtaaattatttcatacaaaactgttcacgttgggtggagagagtattaaatatttaacataggttttgatttatatgtgtaattttttaaatgaaaatgtaacttttc

SEQ ID NO: 556641 - DNA, 120 bp, Artificial Sequence
  ENSG00000169047_43 (sequence is synthesized)
ttacagcacatcttttttttggatgtgggatggaggtatacaatgttctgttgtaaagagtggagcaaatgcttaaaacaaggcttaaaagagtagaatagggtatgatccttgttttaa

SEQ ID NO: 556642 - DNA, 120 bp, Artificial Sequence
  ENSG00000169047_44 (sequence is synthesized)
gattgtaattcagaaaacataatataagaatcatagtgccatagatggttctcaattgtatagttatatttgctgatactatctcttgtcatataaacctgatgttgagctgagttcctt

SEQ ID NO: 556643 - DNA, 120 bp, Artificial Sequence
  ENSG00000169047_45 (sequence is synthesized)
ataagaattaatcttaattttgtattttttcctgtaagacaataggccatgttaattaaactgaagaaggatatatttggctgggtgttttcaaatgtcagcttaaaattggtaattgaa

SEQ ID NO: 556644 - DNA, 120 bp, Artificial Sequence
  ENSG00000169047_46 (sequence is synthesized)
tggaagcaaaattataagaagaggaaattaaagtcttccattgcatgtattgtaaacagaaggagatgggtgattccttcaattcaaaagctctctttggaatgaacaatgtgggcgttt

SEQ ID NO: 556645 - DNA, 120 bp, Artificial Sequence
  ENSG00000169047_47 (sequence is synthesized)
gtaaattctggaaatgtctttctattcataataaactagatactgttgatcttttcttctgtcccctccccccaccacttctgtaagtttcctgctctattcccaccatttttttctgtg

SEQ ID NO: 556646 - DNA, 120 bp, Artificial Sequence
  ENSG00000169047_48 (sequence is synthesized)
cacacattatgatatatttcatttcctgcattgtcttgagaaagatggtaaggcaagtgagctgttgctaaccagaaattaaaattccagtaagtgtttttcattatgaccagggctatg

SEQ ID NO: 556647 - DNA, 120 bp, Artificial Sequence
  ENSG00000169047_49 (sequence is synthesized)
tgtcaccttccctaagactcttaccttatctcatattttttgagaacttccagtgttacattatttaactgaatgtaattggcccatttgccttggtgggtgctggcctattagtgatta

SEQ ID NO: 556648 - DNA, 120 bp, Artificial Sequence
  ENSG00000169047_50 (sequence is synthesized)
gttaacaaaacacagcgtacagagagcacagaaaagcttaatgacctgctactgaaacacctagccagcagtgaaaatgttaattcttttcttgtttggaaagtatacacgtcttggaat

SEQ ID NO: 556649 - DNA, 120 bp, Artificial Sequence
  ENSG00000169047_51 (sequence is synthesized)
tttttccacgtgaaaaacaaatggcaatgaatgcatttaaagatattgccgacagatttttaaatctttttaccaggaaacttcctaaaggttaaatgaattaatgcaaatatcaggctc

SEQ ID NO: 556650 - DNA, 120 bp, Artificial Sequence
  ENSG00000169047_52 (sequence is synthesized)
cctctgagtctgtgggagcctctatctctctatcaggaattcgcatccctactattgggaggagcaacattttatttctctgaacgcctaagctccctgggtgggagtggggactacaag

SEQ ID NO: 556651 - DNA, 120 bp, Artificial Sequence
  ENSG00000169047_53 (sequence is synthesized)
gtaggggccagggttggagggcattgtagtggctgctgcctcctgatgaactgtttggggaccccagctctactcaaaagggagcggagataaatggaacccctcacactgctgaggccc

SEQ ID NO: 556652 - DNA, 120 bp, Artificial Sequence
  ENSG00000169047_54 (sequence is synthesized)
gtgttactgttcattcagccaggtggcatgtacctcacagactgttgtgcagtgtccgttattgcagattttaatcatttgcatgctcatcaatttctaagataaatagggtctagagtc

SEQ ID NO: 556653 - DNA, 120 bp, Artificial Sequence
  ENSG00000169047_55 (sequence is synthesized)
ataagaatccattgttttcaaggaacttgcagaattacatcatttcctattagtagagagcactacccattttgaaaatctgatatgaaagttgttttttactcttgtaaaaaaagactt

SEQ ID NO: 556654 - DNA, 120 bp, Artificial Sequence
  ENSG00000169047_56 (sequence is synthesized)
tcttagtcaaactaacttttcatattttcaagcattctgattcatactcttgctagtggaagaagagagcaagctgccctgctcttttcctttgaggactgaaatagttaaagagaaatc

SEQ ID NO: 556655 - DNA, 120 bp, Artificial Sequence
  ENSG00000169047_57 (sequence is synthesized)
aatgaacaaagtcactcccaaccattttcctgtaaagctggttattatttctcaaggaacctacactttgaatatgtgttaccgagatacctctacatgtggaattatcaacatgttttg

SEQ ID NO: 556656 - DNA, 120 bp, Artificial Sequence
  ENSG00000169047_58 (sequence is synthesized)
aatgagagcagaaatgaacagactggaaaaatctatctcttggtttctatttctctgactttttgagtcgaaaagcataaaggtagaaattcttatttaagctgcttctagtggtgcctg

SEQ ID NO: 556657 - DNA, 120 bp, Artificial Sequence
  ENSG00000169047_59 (sequence is synthesized)
agctggttttgatggtggcatcaaactaccgatttaaaactggaagttgctggtactcaaaccaaaagttcatactctggcgacacgaagggtttcctttgagcaacgtcagctgctgag

SEQ ID NO: 556658 - DNA, 120 bp, Artificial Sequence
  ENSG00000169047_60 (sequence is synthesized)
tccttgtgttcagttcccattgaggagagttggcttttatccatttcaaagcatttgtaggccagccaagggctttcattattgaggcttctagtggcctctggttaacctagaagttag

SEQ ID NO: 556659 - DNA, 120 bp, Artificial Sequence
  ENSG00000169047_61 (sequence is synthesized)
tgggtttttcttgatgacaccaacctctcacagcgtttttccttagagacttaagcagagttttaaaatcctcttttgcgaaaagaacaaatatgttttatgactttgatgatatcttca

SEQ ID NO: 556660 - DNA, 120 bp, Artificial Sequence
  ENSG00000169047_62 (sequence is synthesized)
ttctgggcaaaagaatggccctagaaccagctagaagtgaagagaatccattaatgatcaaccacctgagtcaataatgagaaatcagtactgatgttacatttgtggctatttcttgct

SEQ ID NO: 556661 - DNA, 120 bp, Artificial Sequence
  ENSG00000169047_63 (sequence is synthesized)
gactttcaaaggtcaaggactcttgactaatccagtgactgcaaaaatggatctactaaaagtcatctagccagaagtagagatttttaacctttctttccctggcttttgtcttctagc

SEQ ID NO: 556662 - DNA, 120 bp, Artificial Sequence
  ENSG00000169047_64 (sequence is synthesized)
tatcatttaaatttgagacatttgaagtattaagaaacaatttttctgtatggtaagaaacagtattttacaatactgaagccctgttttattcaatcttgcatcttgaatacaatatac

SEQ ID NO: 556663 - DNA, 120 bp, Artificial Sequence
  ENSG00000169047_65 (sequence is synthesized)
cacaaagtcggaaactttatatttatttactgcaggtggttaaaaaaaggggggaaagggtttcaccatccactgacaacgagagccatgacaaatagtatccatgtgcagtcttccaac

SEQ ID NO: 556664 - DNA, 120 bp, Artificial Sequence
  ENSG00000169047_66 (sequence is synthesized)
tgctggtgacaatgaccccatatttggtctcatgctgcttttgcagagcactctgtaggttagtccatcacacaaggaggccctgaatccagacactgtgaattaagaccttggcgggga

SEQ ID NO: 556665 - DNA, 120 bp, Artificial Sequence
  ENSG00000169047_67 (sequence is synthesized)
gagatgtgacccttttggtaggaatgggaagaagaatgggtggaagccaatatgaaatttcttctttgcaatgacttgacaggggagttaatgttcctaggatgccatgaatgatgaatg

SEQ ID NO: 556666 - DNA, 79 bp, Artificial Sequence
  ENSG00000169047_68 (sequence is synthesized)
gtgtgtgtacatgtgtgtgtctttgtgtgtgtgtatatatatgtgacgtgtgtgtgggatgtgtgtgtgtatatataga

SEQ ID NO: 556667 - DNA, 120 bp, Artificial Sequence
  ENSG00000169047_69 (sequence is synthesized)
tgtgtgtgtgtatatatatgtgacgtgtgtgtgggatgtgtgtgtgtatatatagatgaatatatacaaatatatagatatatacacacatatatagatatatatacacatatatagata

SEQ ID NO: 556668 - DNA, 120 bp, Artificial Sequence
  ENSG00000169047_70 (sequence is synthesized)
tgtgtatatatatatatatatatatatagatgtataggcttgtgagaaacttgagaggaagaagcatgctcttctaggaatgtgaggaaatatgaccttgccaagactaaaagacctcta

SEQ ID NO: 556669 - DNA, 120 bp, Artificial Sequence
  ENSG00000169047_71 (sequence is synthesized)
ccaagactaaaagacctctagactgtgagctcagttatggagaacaaaaacagcttcatagtgagtagaacaccgaggataaacactggggccatgggtcctttctgaggcagcgccaca

SEQ ID NO: 556670 - DNA, 120 bp, Artificial Sequence
  ENSG00000169047_72 (sequence is synthesized)
gaagatctttgtggtccttccgtagttctgtaagtctgtctcctaagtatgggtagagaatatgtagcctgttgtgtgtctcccactacttgtaaacagagcatcacattaggggcaggg

SEQ ID NO: 556671 - DNA, 120 bp, Artificial Sequence
  ENSG00000169047_73 (sequence is synthesized)
aggaggtggaatgatattggaggtgcttaaccctactcgaggaattaattatgaataaagagcttataattagctaacatgactagaaaacacatgacttaggtggagagttagctttct

SEQ ID NO: 556672 - DNA, 120 bp, Artificial Sequence
  ENSG00000169047_74 (sequence is synthesized)
tttctagtttgtgtatgacttgccatttgtgacgtatacaccaaaagatctggtgttttagacttctgccattcacttggcatttaaatctctctttgcttatgctgttaacgagtatgc

SEQ ID NO: 556673 - DNA, 120 bp, Artificial Sequence
  ENSG00000169047_75 (sequence is synthesized)
cataggataggacaaattcagtaaacaggaaaacttgtccatatttgcatagacatttgtagggttttttttttctttttctttttagaacttcaccattggcttaagaatgtagttccc

SEQ ID NO: 556674 - DNA, 120 bp, Artificial Sequence
  ENSG00000169047_76 (sequence is synthesized)
aaaacaattttttcttgcaaagtactttccttacacctcttggctacagggtgggccaaattaaacatatatgtattttcatttaatgtatgtgcagtttggtttatcatcttaagatgg

SEQ ID NO: 556675 - DNA, 120 bp, Artificial Sequence
  ENSG00000169047_77 (sequence is synthesized)
tggtgctgccccggtgctacttcatctgtgtacacaaagaccaatgcatggtctgtattgctaccaaaacatttactgtatatatgtttataacatgtattatgtatatatgtaatgggt

SEQ ID NO: 556676 - DNA, 120 bp, Artificial Sequence
  ENSG00000169047_78 (sequence is synthesized)
gccaggccaggtatatattttttatttagaagtgtttcacttttccaagttttctttatagtgttatgcttattttcaattttttttttcctgattctgtctggtacttagaattgtagt

SEQ ID NO: 556677 - DNA, 120 bp, Artificial Sequence
  ENSG00000169047_79 (sequence is synthesized)
gtcttcatcatcaattaaagaaaactgtctaaatgaattcatggatgtaaatattagtggtccttaatgtctttgattgctggacatgaaacaaactgccaattaaattttgcggagaca

SEQ ID NO: 556678 - DNA, 120 bp, Artificial Sequence
  ENSG00000169047_80 (sequence is synthesized)
agtacttgtggcccactctctgcagagagtaaattgagagcccaagaagcagggcaaaaagagcctctcagactcggtcatagcagccctgccacctttacctggcatcaaatttatctt

SEQ ID NO: 556679 - DNA, 120 bp, Artificial Sequence
  ENSG00000169047_81 (sequence is synthesized)
ttagttttgaaactgcagctgacaaagacacagaccccagccatgccttttgggttcagtttttttgtttttgtcattctttgttatgccctccccctttaaaagaaaaaagaaaaagaa

SEQ ID NO: 556680 - DNA, 120 bp, Artificial Sequence
  ENSG00000169057_0 (sequence is synthesized)
gcgcgcgctccctcctctcggagagagggctgtggtaaaagccgtccggaaaatggccgccgccgccgccgccgcgccgagcggaggaggaggaggaggcgaggaggagagactgctcca

SEQ ID NO: 556681 - DNA, 120 bp, Artificial Sequence
  ENSG00000169057_1 (sequence is synthesized)
taaaaatacagactcaccagttcctgctttgatgtgacatgtgactccccagaatacaccttgcttctgtagaccagctccaacaggattccatggtagctgggatgttagggctcaggg

SEQ ID NO: 556682 - DNA, 120 bp, Artificial Sequence
  ENSG00000169057_2 (sequence is synthesized)
aagaaaagtcagaagaccaggacctccagggcctcaaggacaaacccctcaagtttaaaaaggtgaagaaagataagaaagaagagaaagagggcaagcatgagcccgtgcagccatcag

SEQ ID NO: 556683 - DNA, 120 bp, Artificial Sequence
  ENSG00000169057_3 (sequence is synthesized)
cccaccactctgctgagcccgcagaggcaggcaaagcagagacatcagaagggtcaggctccgccccggctgtgccggaagcttctgcctcccccaaacagcggcgctccatcatccgtg

SEQ ID NO: 556684 - DNA, 120 bp, Artificial Sequence
  ENSG00000169057_4 (sequence is synthesized)
accggggacccatgtatgatgaccccaccctgcctgaaggctggacacggaagcttaagcaaaggaaatctggccgctctgctgggaagtatgatgtgtatttgatcaatccccagggaa

SEQ ID NO: 556685 - DNA, 120 bp, Artificial Sequence
  ENSG00000169057_5 (sequence is synthesized)
aagcctttcgctctaaagtggagttgattgcgtacttcgaaaaggtaggcgacacatccctggaccctaatgattttgacttcacggtaactgggagagggagcccctcccggcgagagc

SEQ ID NO: 556686 - DNA, 120 bp, Artificial Sequence
  ENSG00000169057_6 (sequence is synthesized)
agaaaccacctaagaagcccaaatctcccaaagctccaggaactggcagaggccggggacgccccaaagggagcggcaccacgagacccaaggcggccacgtcagagggtgtgcaggtga

SEQ ID NO: 556687 - DNA, 120 bp, Artificial Sequence
  ENSG00000169057_7 (sequence is synthesized)
aaagggtcctggagaaaagtcctgggaagctccttgtcaagatgccttttcaaacttcgccagggggcaaggctgaggggggtggggccaccacatccacccaggtcatggtgatcaaac

SEQ ID NO: 556688 - DNA, 120 bp, Artificial Sequence
  ENSG00000169057_8 (sequence is synthesized)
gccccggcaggaagcgaaaagctgaggccgaccctcaggccattcccaagaaacggggccgaaagccggggagtgtggtggcagccgctgccgccgaggccaaaaagaaagccgtgaagg

SEQ ID NO: 556689 - DNA, 120 bp, Artificial Sequence
  ENSG00000169057_9 (sequence is synthesized)
agtcttctatccgatctgtgcaggagaccgtactccccatcaagaagcgcaagacccgggagacggtcagcatcgaggtcaaggaagtggtgaagcccctgctggtgtccaccctcggtg

SEQ ID NO: 556690 - DNA, 120 bp, Artificial Sequence
  ENSG00000169057_10 (sequence is synthesized)
agaagagcgggaaaggactgaagacctgtaagagccctgggcggaaaagcaaggagagcagccccaaggggcgcagcagcagcgcctcctcaccccccaagaaggagcaccaccaccatc

SEQ ID NO: 556691 - DNA, 120 bp, Artificial Sequence
  ENSG00000169057_11 (sequence is synthesized)
accaccactcagagtccccaaaggcccccgtgccactgctcccacccctgcccccacctccacctgagcccgagagctccgaggaccccaccagcccccctgagccccaggacttgagca

SEQ ID NO: 556692 - DNA, 120 bp, Artificial Sequence
  ENSG00000169057_12 (sequence is synthesized)
gcagcgtctgcaaagaggagaagatgcccagaggaggctcactggagagcgacggctgccccaaggagccagctaagactcagcccgcggttgccaccgccgccacggccgcagaaaagt

SEQ ID NO: 556693 - DNA, 120 bp, Artificial Sequence
  ENSG00000169057_13 (sequence is synthesized)
acaaacaccgaggggagggagagcgcaaagacattgtttcatcctccatgccaaggccaaacagagaggagcctgtggacagccggacgcccgtgaccgagagagttagctgactttaca

SEQ ID NO: 556694 - DNA, 120 bp, Artificial Sequence
  ENSG00000169057_14 (sequence is synthesized)
cggagcggattgcaaagcaaaccaacaagaataaaggcagctgttgtctcttctccttatgggtagggctctgacaaagcttcccgattaactgaaataaaaaatatttttttttctttc

SEQ ID NO: 556695 - DNA, 120 bp, Artificial Sequence
  ENSG00000169057_15 (sequence is synthesized)
agtaaacttagagtttcgtggcttcagggtgggagtagttggagcattggggatgtttttcttaccgacaagcacagtcaggttgaagacctaaccagggccagaagtagctttgcactt

SEQ ID NO: 556696 - DNA, 120 bp, Artificial Sequence
  ENSG00000169057_16 (sequence is synthesized)
ttctaaactaggctccttcaacaaggcttgctgcagatactactgaccagacaagctgttgaccaggcacctcccctcccgcccaaacctttcccccatgtggtcgttagagacagagcg

SEQ ID NO: 556697 - DNA, 120 bp, Artificial Sequence
  ENSG00000169057_17 (sequence is synthesized)
acagagcagttgagaggacactcccgttttcggtgccatcagtgccccgtctacagctcccccagctccccccacctcccccactcccaaccacgttgggacagggaggtgtgaggcagg

SEQ ID NO: 556698 - DNA, 120 bp, Artificial Sequence
  ENSG00000169057_18 (sequence is synthesized)
agagacagttggattctttagagaagatggatatgaccagtggctatggcctgtgcgatcccacccgtggtggctcaagtctggccccacaccagccccaatccaaaactggcaaggacg

SEQ ID NO: 556699 - DNA, 120 bp, Artificial Sequence
  ENSG00000169057_19 (sequence is synthesized)
cttcacaggacaggaaagtggcacctgtctgctccagctctggcatggctaggaggggggagtcccttgaactactgggtgtagactggcctgaaccacaggagaggatggcccagggtg

SEQ ID NO: 556700 - DNA, 120 bp, Artificial Sequence
  ENSG00000169057_20 (sequence is synthesized)
aggtggcatggtccattctcaagggacgtcctccaacgggtggcgctagaggccatggaggcagtaggacaaggtgcaggcaggctggcctggggtcaggccgggcagagcacagcgggg

SEQ ID NO: 556701 - DNA, 120 bp, Artificial Sequence
  ENSG00000169057_21 (sequence is synthesized)
tgagagggattcctaatcactcagagcagtctgtgacttagtggacaggggagggggcaaagggggaggagaagaaaatgttcttccagttactttccaattctcctttagggacagctt

SEQ ID NO: 556702 - DNA, 120 bp, Artificial Sequence
  ENSG00000169057_22 (sequence is synthesized)
agaattatttgcactattgagtcttcatgttcccacttcaaaacaaacagatgctctgagagcaaactggcttgaattggtgacatttagtccctcaagccaccagatgtgacagtgttg

SEQ ID NO: 556703 - DNA, 120 bp, Artificial Sequence
  ENSG00000169057_23 (sequence is synthesized)
agaactacctggatttgtatatatacctgcgcttgttttaaagtgggctcagcacatagggttcccacgaagctccgaaactctaagtgtttgctgcaattttataaggacttcctgatt

SEQ ID NO: 556704 - DNA, 120 bp, Artificial Sequence
  ENSG00000169057_24 (sequence is synthesized)
ggtttctcttctccccttccatttctgccttttgttcatttcatcctttcacttctttcccttcctccatcctcctccttcctagttcatcccttctcttccaggcagccgcggtgccca

SEQ ID NO: 556705 - DNA, 120 bp, Artificial Sequence
  ENSG00000169057_25 (sequence is synthesized)
accacacttgtcggctccagtccccagaactctgcctgccctttgtcctcctgctgccagtaccagccccaccctgttttgagccctgaggaggccttgggctctgctgagtccgacctg

SEQ ID NO: 556706 - DNA, 120 bp, Artificial Sequence
  ENSG00000169057_26 (sequence is synthesized)
gcctgtctgtgaagagcaagagagcagcaaggtcttgctctcctaggtagccccctcttccctggtaagaaaaagcaaaaggcatttcccaccctgaacaacgagccttttcacccttct

SEQ ID NO: 556707 - DNA, 120 bp, Artificial Sequence
  ENSG00000169057_27 (sequence is synthesized)
actctagagaagtggactggaggagctgggcccgatttggtagttgaggaaagcacagaggcctcctgtggcctgccagtcatcgagtggcccaacaggggctccatgccagccgacctt

SEQ ID NO: 556708 - DNA, 120 bp, Artificial Sequence
  ENSG00000169057_28 (sequence is synthesized)
gacctcactcagaagtccagagtctagcgtagtgcagcagggcagtagcggtaccaatgcagaactcccaagacccgagctgggaccagtacctgggtccccagcccttcctctgctccc

SEQ ID NO: 556709 - DNA, 120 bp, Artificial Sequence
  ENSG00000169057_29 (sequence is synthesized)
ccttttccctcggagttcttcttgaatggcaatgttttgcttttgctcgatgcagacagggggccagaacaccacacatttcactgtctgtctggtccatagctgtggtgtaggggctta

SEQ ID NO: 556710 - DNA, 120 bp, Artificial Sequence
  ENSG00000169057_30 (sequence is synthesized)
gaggcatgggcttgctgtgggtttttaattgatcagttttcatgtgggatcccatctttttaacctctgttcaggaagtccttatctagctgcatatcttcatcatattggtatatcctt

SEQ ID NO: 556711 - DNA, 120 bp, Artificial Sequence
  ENSG00000169057_31 (sequence is synthesized)
ttctgtgtttacagagatgtctcttatatctaaatctgtccaactgagaagtaccttatcaaagtagcaaatgagacagcagtcttatgcttccagaaacacccacaggcatgtcccatg

SEQ ID NO: 556712 - DNA, 120 bp, Artificial Sequence
  ENSG00000169057_32 (sequence is synthesized)
tgagctgctgccatgaactgtcaagtgtgtgttgtcttgtgtatttcagttattgtccctggcttccttactatggtgtaatcatgaaggagtgaaacatcatagaaactgtctagcact

SEQ ID NO: 556713 - DNA, 120 bp, Artificial Sequence
  ENSG00000169057_33 (sequence is synthesized)
tccttgccagtctttagtgatcaggaaccatagttgacagttccaatcagtagcttaagaaaaaaccgtgtttgtctcttctggaatggttagaagtgagggagtttgccccgttctgtt

SEQ ID NO: 556714 - DNA, 120 bp, Artificial Sequence
  ENSG00000169057_34 (sequence is synthesized)
tgtagagtctcatagttggactttctagcatatatgtgtccatttccttatgctgtaaaagcaagtcctgcaaccaaactcccatcagcccaatccctgatccctgatcccttccacctg

SEQ ID NO: 556715 - DNA, 120 bp, Artificial Sequence
  ENSG00000169057_35 (sequence is synthesized)
ctctgctgatgacccccccagcttcacttctgactcttccccaggaagggaaggggggtcagaagagagggtgagtcctccagaactcttcctccaaggacagaaggctcctgcccccat

SEQ ID NO: 556716 - DNA, 120 bp, Artificial Sequence
  ENSG00000169057_36 (sequence is synthesized)
agtggcctcgaactcctggcactaccaaaggacacttatccacgagagcgcagcatccgaccaggttgtcactgagaagatgtttattttggtcagttgggtttttatgtattatactta

SEQ ID NO: 556717 - DNA, 120 bp, Artificial Sequence
  ENSG00000169057_37 (sequence is synthesized)
gtcaaatgtaatgtggcttctggaatcattgtccagagctgcttccccgtcacctgggcgtcatctggtcctggtaagaggagtgcgtggcccaccaggcccccctgtcacccatgacag

SEQ ID NO: 556718 - DNA, 120 bp, Artificial Sequence
  ENSG00000169057_38 (sequence is synthesized)
ttcattcagggccgatggggcagtcgtggttgggaacacagcatttcaagcgtcactttatttcattcgggccccacctgcagctccctcaaagaggcagttgcccagcctctttccctt

SEQ ID NO: 556719 - DNA, 120 bp, Artificial Sequence
  ENSG00000169057_39 (sequence is synthesized)
ccagtttattccagagctgccagtggggcctgaggctccttagggttttctctctatttccccctttcttcctcattccctcgtctttcccaaaggcatcacgagtcagtcgcctttcag

SEQ ID NO: 556720 - DNA, 120 bp, Artificial Sequence
  ENSG00000169057_40 (sequence is synthesized)
caggcagccttggcggtttatcgccctggcaggcaggggccctgcagctctcatgctgcccctgccttggggtcaggttgacaggaggttggagggaaagccttaagctgcaggattctc

SEQ ID NO: 556721 - DNA, 120 bp, Artificial Sequence
  ENSG00000169057_41 (sequence is synthesized)
accagctgtgtccggcccagttttggggtgtgacctcaatttcaattttgtctgtacttgaacattatgaagatgggggcctctttcagtgaatttgtgaacagcagaattgaccgacag

SEQ ID NO: 556722 - DNA, 120 bp, Artificial Sequence
  ENSG00000169057_42 (sequence is synthesized)
ctttccagtacccatggggctaggtcattaaggccacatccacagtctcccccacccttgttccagttgttagttactacctcctctcctgacaatactgtatgtcgtcgagctcccccc

SEQ ID NO: 556723 - DNA, 120 bp, Artificial Sequence
  ENSG00000169057_43 (sequence is synthesized)
tggtgggcttgtcatagccagtgggattgccggtcttgacagctcagtgagctggagatacttggtcacagccaggcgctagcacagctcccttctgttgatgctgtattcccatatcaa

SEQ ID NO: 556724 - DNA, 120 bp, Artificial Sequence
  ENSG00000169057_44 (sequence is synthesized)
aagacacaggggacacccagaaacgccacatcccccaatccatcagtgccaaactagccaacggccccagcttctcagctcgctggatggcggaagctgctactcgtgagcgccagtgcg

SEQ ID NO: 556725 - DNA, 120 bp, Artificial Sequence
  ENSG00000169057_45 (sequence is synthesized)
ggtgcagacaatcttctgttgggtggcatcattccaggcccgaagcatgaacagtgcacctgggacagggagcagccccaaattgtcacctgcttctctgcccagcttttcattgctgtg

SEQ ID NO: 556726 - DNA, 120 bp, Artificial Sequence
  ENSG00000169057_46 (sequence is synthesized)
acagtgatggcgaaagagggtaataaccagacacaaactgccaagttgggtggagaaaggagtttctttagctgacagaatctctgaattttaaatcacttagtaagcggctcaagccca

SEQ ID NO: 556727 - DNA, 120 bp, Artificial Sequence
  ENSG00000169057_47 (sequence is synthesized)
ggagggagcagagggatacgagcggagtcccctgcgcgggaccatctggaattggtttagcccaagtggagcctgacagccagaactctgtgtcccccgtctaaccacagctccttttcc

SEQ ID NO: 556728 - DNA, 120 bp, Artificial Sequence
  ENSG00000169057_48 (sequence is synthesized)
agagcattccagtcaggctctctgggctgactgggccaggggaggttacaggtaccagttctttaagaagatctttgggcatatacatttttagcctgtgtcattgccccaaatggattc

SEQ ID NO: 556729 - DNA, 120 bp, Artificial Sequence
  ENSG00000169057_49 (sequence is synthesized)
ctgtttcaagttcacacctgcagattctaggacctgtgtcctagacttcagggagtcagctgtttctagagttcctaccatggagtgggtctggaggacctgcccggtgggggggcagag

SEQ ID NO: 556730 - DNA, 120 bp, Artificial Sequence
  ENSG00000169057_50 (sequence is synthesized)
ccctgctccctccgggtcttcctactcttctctctgctctgacgggatttgttgattctctccattttggtgtctttctcttttagatattgtatcaatctttagaaaaggcatagtcta

SEQ ID NO: 556731 - DNA, 120 bp, Artificial Sequence
  ENSG00000169057_51 (sequence is synthesized)
cttgttataaatcgttaggatactgcctcccccagggtctaaaattacatattagaggggaaaagctgaacactgaagtcagttctcaacaatttagaaggaaaacctagaaaacatttg

SEQ ID NO: 556732 - DNA, 120 bp, Artificial Sequence
  ENSG00000169057_52 (sequence is synthesized)
gcagaaaattacatttcgatgtttttgaatgaatacgagcaagcttttacaacagtgctgatctaaaaatacttagcacttggcctgagatgcctggtgagcattacaggcaaggggaat

SEQ ID NO: 556733 - DNA, 120 bp, Artificial Sequence
  ENSG00000169057_53 (sequence is synthesized)
ctggaggtagccgacctgaggacatggcttctgaacctgtcttttgggagtggtatggaaggtggagcgttcaccagtgacctggaaggcccagcaccaccctccttcccactcttctca

SEQ ID NO: 556734 - DNA, 120 bp, Artificial Sequence
  ENSG00000169057_54 (sequence is synthesized)
tcttgacagagcctgccccagcgctgacgtgtcaggaaaacacccagggaactaggaaggcacttctgcctgaggggcagcctgccttgcccactcctgctctgctcgcctcggatcagc

SEQ ID NO: 556735 - DNA, 120 bp, Artificial Sequence
  ENSG00000169057_55 (sequence is synthesized)
tgagccttctgagctggcctctcactgcctccccaaggccccctgcctgccctgtcaggaggcagaaggaagcaggtgtgagggcagtgcaaggagggagcacaacccccagctcccgct

SEQ ID NO: 556736 - DNA, 120 bp, Artificial Sequence
  ENSG00000169057_56 (sequence is synthesized)
ccgggctccgacttgtgcacaggcagagcccagaccctggaggaaatcctacctttgaattcaagaacatttggggaatttggaaatctctttgcccccaaacccccattctgtcctacc

SEQ ID NO: 556737 - DNA, 120 bp, Artificial Sequence
  ENSG00000169057_57 (sequence is synthesized)
tttaatcaggtcctgctcagcagtgagagcagatgaggtgaaaaggccaagaggtttggctcctgcccactgatagcccctctccccgcagtgtttgtgtgtcaagtggcaaagctgttc

SEQ ID NO: 556738 - DNA, 120 bp, Artificial Sequence
  ENSG00000169057_58 (sequence is synthesized)
ttcctggtgaccctgattatatccagtaacacatagactgtgcgcataggcctgctttgtctcctctatcctgggcttttgttttgctttttagttttgcttttagtttttctgtccctt

SEQ ID NO: 556739 - DNA, 120 bp, Artificial Sequence
  ENSG00000169057_59 (sequence is synthesized)
ttatttaacgcaccgactagacacacaaagcagttgaatttttatatatatatctgtatattgcacaattataaactcattttgcttgtggctccacacacacaaaaaaagacctgttaa

SEQ ID NO: 556740 - DNA, 120 bp, Artificial Sequence
  ENSG00000169057_60 (sequence is synthesized)
tttgcttgtggctccacacacacaaaaaaagacctgttaaaattatacctgttgcttaattacaatatttctgataaccatagcataggacaagggaaaataaaaaaagaaaaaaaagaa

SEQ ID NO: 556741 - DNA, 120 bp, Artificial Sequence
  ENSG00000169057_61 (sequence is synthesized)
caagcagattcgtggtcttttcctcgcttctttcaagggctttcctgtgccaggtgaaggaggctccaggcagcacccaggttttgcactcttgtttctcccgtgcttgtgaaagaggtc

SEQ ID NO: 556742 - DNA, 120 bp, Artificial Sequence
  ENSG00000169057_62 (sequence is synthesized)
ccaaggttctgggtgcaggagcgctcccttgacctgctgaagtccggaacgtagtcggcacagcctggtcgccttccacctctgggagctggagtccactggggtggcctgactccccca

SEQ ID NO: 556743 - DNA, 120 bp, Artificial Sequence
  ENSG00000169057_63 (sequence is synthesized)
gtccccttcccgtgacctggtcagggtgagcccatgtggagtcagcctcgcaggcctccctgccagtagggtccgagtgtgtttcatccttcccactctgtcgagcctgggggctggagc

SEQ ID NO: 556744 - DNA, 120 bp, Artificial Sequence
  ENSG00000169057_64 (sequence is synthesized)
ggagacgggaggcctggcctgtctcggaacctgtgagctgcaccaggtagaacgccagggaccccagaatcatgtgcgtcagtccaaggggtcccctccaggagtagtgaagactccaga

SEQ ID NO: 556745 - DNA, 120 bp, Artificial Sequence
  ENSG00000169057_65 (sequence is synthesized)
aatgtccctttcttctcccccatcctacgagtaattgcatttgcttttgtaattcttaatgagcaatatctgctagagagtttagctgtaacagttctttttgatcatctttttttaata

SEQ ID NO: 556746 - DNA, 120 bp, Artificial Sequence
  ENSG00000169057_66 (sequence is synthesized)
attagaaacaccaaaaaaatccagaaacttgttcttccaaagcagagagcattataatcaccagggccaaaagcttccctccctgctgtcattgcttcttctgaggcctgaatccaaaag

SEQ ID NO: 556747 - DNA, 120 bp, Artificial Sequence
  ENSG00000169057_67 (sequence is synthesized)
aaaaacagccataggccctttcagtggccgggctacccgtgagcccttcggaggaccagggctggggcagcctctgggcccacatccggggccagctccggcgtgtgttcagtgttagca

SEQ ID NO: 556748 - DNA, 120 bp, Artificial Sequence
  ENSG00000169057_68 (sequence is synthesized)
gtgggtcatgatgctctttcccacccagcctgggataggggcagaggaggcgaggaggccgttgccgctgatgtttggccgtgaacaggtgggtgtctgcgtgcgtccacgtgcgtgttt

SEQ ID NO: 556749 - DNA, 120 bp, Artificial Sequence
  ENSG00000169057_69 (sequence is synthesized)
tctgactgacatgaaatcgacgcccgagttagcctcacccggtgacctctagccctgcccggatggagcggggcccacccggttcagtgtttctggggagctggacagtggagtgcaaaa

SEQ ID NO: 556750 - DNA, 120 bp, Artificial Sequence
  ENSG00000169057_70 (sequence is synthesized)
ggcttgcagaacttgaagcctgctccttcccttgctaccacggcctcctttccgtttgatttgtcactgcttcaatcaataacagccgctccagagtcagtagtcaatgaatatatgacc

SEQ ID NO: 556751 - DNA, 120 bp, Artificial Sequence
  ENSG00000169057_71 (sequence is synthesized)
aaatatcaccaggactgttactcaatgtgtgccgagcccttgcccatgctgggctcccgtgtatctggacactgtaacgtgtgctgtgtttgctccccttccccttccttctttgccctt

SEQ ID NO: 556752 - DNA, 120 bp, Artificial Sequence
  ENSG00000169057_72 (sequence is synthesized)
tacttgtctttctggggtttttctgtttgggtttggtttggtttttatttctccttttgtgttccaaacatgaggttctctctactggtcctcttaactgtggtgttgaggcttatattt

SEQ ID NO: 556753 - DNA, 120 bp, Artificial Sequence
  ENSG00000169057_73 (sequence is synthesized)
gtgtaatttttggtgggtgaaaggaattttgctaagtaaatctcttctgtgtttgaactgaagtctgtattgtaactatgtttaaagtaattgttccagagacaaatatttctagacact

SEQ ID NO: 556754 - DNA, 120 bp, Artificial Sequence
  ENSG00000169057_74 (sequence is synthesized)
ttttctttacaaacaaaagcattcggagggagggggatggtgactgagatgagaggggagagctgaacagatgacccctgcccagatcagccagaagccacccaaagcagtggagcccag

SEQ ID NO: 556755 - DNA, 120 bp, Artificial Sequence
  ENSG00000169057_75 (sequence is synthesized)
gagtcccactccaagccagcaagccgaatagctgatgtgttgccactttccaagtcactgcaaaaccaggttttgttccgcccagtggattcttgttttgcttcccctccccccgagatt

SEQ ID NO: 556756 - DNA, 120 bp, Artificial Sequence
  ENSG00000169057_76 (sequence is synthesized)
attaccaccatcccgtgcttttaaggaaaggcaagattgatgtttccttgaggggagccaggaggggatgtgtgtgtgcagagctgaagagctggggagaatggggctgggcccacccaa

SEQ ID NO: 556757 - DNA, 120 bp, Artificial Sequence
  ENSG00000169057_77 (sequence is synthesized)
gcaggaggctgggacgctctgctgtgggcacaggtcaggctaatgttggcagatgcagctcttcctggacaggccaggtggtgggcattctctctccaaggtgtgccccgtgggcattac

SEQ ID NO: 556758 - DNA, 120 bp, Artificial Sequence
  ENSG00000169057_78 (sequence is synthesized)
tgtttaagacacttccgtcacatcccaccccatcctccagggctcaacactgtgacatctctattccccaccctccccttcccagggcaataaaatgaccatggagggggcttgcactct

SEQ ID NO: 556759 - DNA, 120 bp, Artificial Sequence
  ENSG00000169057_79 (sequence is synthesized)
cttggctgtcacccgatcgccagcaaaacttagatgtgagaaaaccccttcccattccatggcgaaaacatctccttagaaaagccattaccctcattaggcatggttttgggctcccaa

SEQ ID NO: 556760 - DNA, 120 bp, Artificial Sequence
  ENSG00000169057_80 (sequence is synthesized)
aacacctgacagcccctccctcctctgagaggcggagagtgctgactgtagtgaccattgcatgccgggtgcagcatctggaagagctaggcagggtgtctgccccctcctgagttgaag

SEQ ID NO: 556761 - DNA, 120 bp, Artificial Sequence
  ENSG00000169057_81 (sequence is synthesized)
tcatgctcccctgtgccagcccagaggccgagagctatggacagcattgccagtaacacaggccaccctgtgcagaagggagctggctccagcctggaaacctgtctgaggttgggagag

SEQ ID NO: 556762 - DNA, 120 bp, Artificial Sequence
  ENSG00000169057_82 (sequence is synthesized)
gtgcacttggggcacagggagaggccgggacacacttagctggagatgtctctaaaagccctgtatcgtattcaccttcagtttttgtgttttgggacaattactttagaaaataagtag

SEQ ID NO: 556763 - DNA, 120 bp, Artificial Sequence
  ENSG00000169057_83 (sequence is synthesized)
gtcgttttaaaaacaaaaattattgattgcttttttgtagtgttcagaaaaaaggttctttgtgtatagccaaatgactgaaagcactgatatatttaaaaacaaaaggcaatttattaa

SEQ ID NO: 556764 - DNA, 120 bp, Artificial Sequence
  ENSG00000169057_84 (sequence is synthesized)
ggaaatttgtaccatttcagtaaacctgtctgaatgtacctgtatacgtttcaaaaacaccccccccccactgaatccctgtaacctatttattatataaagagtttgccttataaattt

SEQ ID NO: 556765 - DNA, 120 bp, Artificial Sequence
  ENSG00000169057_85 (sequence is synthesized)
acataaaaatgtccgtttgtgtcttttgttgtaaaaatcaagtgattttttcataaggttcttttactattggaaaagatgggcagcacgcagttttattttatttttgtaagtttttta

SEQ ID NO: 556766 - DNA, 120 bp, Artificial Sequence
  ENSG00000169057_86 (sequence is synthesized)
atacatgtgaaagcaaagaatactcagcatgcctttctaagtgacgcgtttgcaccttttgttgggaagtactgtatcctgtgctgttagcattctcgataaatctctctgtgaaagtga

SEQ ID NO: 556767 - DNA, 120 bp, Artificial Sequence
  ENSG00000169057_87 (sequence is synthesized)
tggagttgattgcgtacttcgaaaaggagaccgtactccccatcaagaagcgcaagacccgggagacggtcagcatcgaggtcaaggaagtggtgaagcccctgctggtgtccaccctcg

SEQ ID NO: 556768 - DNA, 120 bp, Artificial Sequence
  ENSG00000169057_88 (sequence is synthesized)
ggttgtaggatgcctttgtgtatgcagtggctctaggtgactctggcagccacactctgggccctaaacttctggaggaagatacaggatagggaggaactcaggggtgagtcatggtgg

SEQ ID NO: 556769 - DNA, 120 bp, Artificial Sequence
  ENSG00000169057_89 (sequence is synthesized)
ggacaagacattccctcactctaagaccttgtcactagattggaacatctcttgcctccctacacctgacctgatggttctggagagatacgtccttgcagcttctgagtcccagcacta

SEQ ID NO: 556770 - DNA, 120 bp, Artificial Sequence
  ENSG00000169057_90 (sequence is synthesized)
agcagcctttggtaacttccctacatcatttgagttctggtttcctaaggatgcttgccagtgagtgccatggtgccctcattgcacagtctgtgcagtgtagacaagaggggaagtctc

SEQ ID NO: 556771 - DNA, 120 bp, Artificial Sequence
  ENSG00000169057_91 (sequence is synthesized)
aactgctaacgaagggactcgcaggtggctgctgcttctttccaagctgcccctgttgttgcagaggctctggagtcctaggaggtttcacggtggcatactcgacagagtactagagca

SEQ ID NO: 556772 - DNA, 120 bp, Artificial Sequence
  ENSG00000169057_92 (sequence is synthesized)
tcatggccagatagtgatgctggggtgtggggcctcacggtggccatttctgacgagaccccaccgggccaaagtgatgtgtagagaaggagctgcttcggtcaccagaaaagaacgggg

SEQ ID NO: 556773 - DNA, 120 bp, Artificial Sequence
  ENSG00000169057_93 (sequence is synthesized)
aagcctcccacactagaatagggaagaaaagtcagaagaccaggacctccagggcctcaaggacaaacccctcaagtttaaaaaggtgaagaaagataagaaagaagagaaagagggcaa

SEQ ID NO: 556774 - DNA, 120 bp, Artificial Sequence
  ENSG00000169057_94 (sequence is synthesized)
gagggtgtaggtatgtaccctggcctctgccagtcagactcacatgctaggaggagcagggccaggcaggagagccgtgtctcctggcattggggctgcaggaaagacgagctcctaggc

SEQ ID NO: 556775 - DNA, 120 bp, Artificial Sequence
  ENSG00000169057_95 (sequence is synthesized)
cacagtgccagtggccagtgctgctgccttgcagggtcgcacaggcagtgctggctgtttggactggcttggcagaaggatttgaagtattgttcctagccaactggactcaaacctgtt

SEQ ID NO: 556776 - DNA, 120 bp, Artificial Sequence
  ENSG00000169057_96 (sequence is synthesized)
cctccaaccctctagggattctcttatcacccagtagccttttccccctagttttaaaaattgcagtaaaatacacaaaagataaaatgtactgccttaaccatttttaagtgtacaatt

SEQ ID NO: 556777 - DNA, 120 bp, Artificial Sequence
  ENSG00000169057_97 (sequence is synthesized)
ctgtggtattgagcacatttatattgtgcaaccatcaccacatgcatcttcaatagcttttcatcagtccttgtctgcataaatcagctagagttggtttctattgattgccaccaataa

SEQ ID NO: 556778 - DNA, 120 bp, Artificial Sequence
  ENSG00000169057_98 (sequence is synthesized)
tcttgacagatatgtctgatcttccttctctgcactgactcctctttctctgtctcctctgctgattctttctcctcatcacaactccaaatagcagggggagggttgtttacacttata

SEQ ID NO: 556779 - DNA, 120 bp, Artificial Sequence
  ENSG00000169057_99 (sequence is synthesized)
tacctcagtatcaaaaacatgagaaacggaagccagagtcctggatctctcgccctttcgctgtcccggtgcccatgcccttcagggatggcacctagaccagctccctgcatccctgcc

SEQ ID NO: 556780 - DNA, 120 bp, Artificial Sequence
  ENSG00000169057_100 (sequence is synthesized)
tagactctgcagtagtctcacgtggcagacccggaggtcactctcctctctggatgccctgcggacactccggttagcctcagctgcaagagcctcctcacccaaggtcacgccatttcc

SEQ ID NO: 556781 - DNA, 120 bp, Artificial Sequence
  ENSG00000169057_101 (sequence is synthesized)
cagctgcaagagcctcctcacccaaggtcacgccatttccaggacagcaccctggtgactgagcgaggctggaatgcaatggcacagtcacgactcactgcagcctcaacctcctgggct

SEQ ID NO: 556782 - DNA, 120 bp, Artificial Sequence
  ENSG00000169057_102 (sequence is synthesized)
gcaggaacaagtaggtggggattattatccacaaaagggactagacattgtgttctgggtcccacaactcatcataaagaggtggttatagttcccatcaggagccgtgggtaggggact

SEQ ID NO: 556783 - DNA, 120 bp, Artificial Sequence
  ENSG00000169057_103 (sequence is synthesized)
cctcaagtcccaaatttgattctgctcctgatcctgtgactcaaattgtcattctcttttactgctgtggggtgtgctctgggcccagctgacaggacattctttgtactccacgtattt

SEQ ID NO: 556784 - DNA, 120 bp, Artificial Sequence
  ENSG00000169057_104 (sequence is synthesized)
atgctggtgggagttgtatggctagtgctttgtgctttgtctcagaaattgtgtggactaaatgtaatatgggcagtgaatgggtttcttctggaagatgttaggcctggagggtggttt

SEQ ID NO: 556785 - DNA, 120 bp, Artificial Sequence
  ENSG00000169057_105 (sequence is synthesized)
aggtccaccggctcctttccccatctagcaggaacaaggaagaaaagtcagaagaccaggacctccagggcctcaaggacaaacccctcaagtttaaaaaggtgaagaaagataagaaag

SEQ ID NO: 556786 - DNA, 120 bp, Artificial Sequence
  ENSG00000169057_106 (sequence is synthesized)
caccacatggctagaagtcgatccatcctctggcgtaaccatcctccatgctactgtccctggggcactgaggccctcctcagtgacttcctccacctcatcttccgccatctccaagcc

SEQ ID NO: 556787 - DNA, 120 bp, Artificial Sequence
  ENSG00000169057_107 (sequence is synthesized)
tgctgttggctccttagcttctccatggctaacaggaacaatattgtttatgagataatcaaagccatagtcatgagttagaaggtacatataaaggcaaatatgtggagattgagttac

SEQ ID NO: 556788 - DNA, 120 bp, Artificial Sequence
  ENSG00000169057_108 (sequence is synthesized)
tttggcgggggcggaggggtgtgtagttatctgaaaacatggaacaaatcaatgagagtctaaatagcacccacatatttgcccctcttttaaaacatacctcctttatgagtgtagaat

SEQ ID NO: 556789 - DNA, 120 bp, Artificial Sequence
  ENSG00000169057_109 (sequence is synthesized)
ttaacagcacagtttcccagtgcagctttgcgaaacaagagaaatgaattttaaaggctgtcaggtgcctttgcaatctgtggcttagtatttgtgtaacaacatttgtgttttgccaac

SEQ ID NO: 556790 - DNA, 120 bp, Artificial Sequence
  ENSG00000169057_110 (sequence is synthesized)
agatgtactgcttaaagtacccatgagaatggcctctgtggttttctactttctcggatggaaccttaggaactgattattgagaagaggctgatactgcccacctcagctcccaggcag

SEQ ID NO: 556791 - DNA, 120 bp, Artificial Sequence
  ENSG00000169057_111 (sequence is synthesized)
gcttcagggccttggttactactcctttgggccctcactgacccttgcagacgtcttttgcaacctctgtagccagaagagacaactgctttctggcatgttgctctttccctaatggct

SEQ ID NO: 556792 - DNA, 120 bp, Artificial Sequence
  ENSG00000169057_112 (sequence is synthesized)
ttatgagcttcttgaacaccaaagcatgtgtgacttcctcacgccttcccctgtatagtatagcacccctaactgtatgtgtaaggagaaggagtgagcaattgatggcgtccccctgga

SEQ ID NO: 556793 - DNA, 120 bp, Artificial Sequence
  ENSG00000169057_113 (sequence is synthesized)
tctccaagggaatgggaaggggcagggtttctggattcagtcatgtggaatctggtcgttggtgtctaaatgtgcctgttacttgtgcccaatgtccaggttcaccaggaggcttagcct

SEQ ID NO: 556794 - DNA, 120 bp, Artificial Sequence
  ENSG00000169057_114 (sequence is synthesized)
gctcatttccctgctagtagctatattttgggagagcattttttatgctctaattgaactttgtgggtctcagcaatttgaacaatgttttgtttttcttctggtcaggttacaaaggaa

SEQ ID NO: 556795 - DNA, 90 bp, Artificial Sequence
  ENSG00000169057_115 (sequence is synthesized)
aacaatgttttgtttttcttctggtcaggttacaaaggaaagaaaaggaatctggtgttgtaggaggtggtgtgttgtgtaattacttgg

SEQ ID NO: 556796 - DNA, 120 bp, Artificial Sequence
  ENSG00000169057_116 (sequence is synthesized)
ttatcacatagaaggcatatgtgttgtactcagtacattctgaattatctgggtttatttttatctcttgaattcacttataaacaattcaaaggctgcttttttagctaacagaaatag

SEQ ID NO: 556797 - DNA, 120 bp, Artificial Sequence
  ENSG00000169057_117 (sequence is synthesized)
gaagagaatctcagaatctgttttgtcattttttcaatgggttgagttatagtgattatgctaactcggtggaaaagcagtgtagtgagtaaaccccacatacggcatatcatgaacatt

SEQ ID NO: 556798 - DNA, 120 bp, Artificial Sequence
  ENSG00000169057_118 (sequence is synthesized)
ttgttgcttttttggcttctgaccatcttcatacctttttttgtgttaaaagtctccccattgtgtatatcttagtaagaggcaggtggaccctagtttctacctaagaaaacctgaaga

SEQ ID NO: 556799 - DNA, 120 bp, Artificial Sequence
  ENSG00000169057_119 (sequence is synthesized)
cttctcatgctgtccatgaccactgcagtggctttgtaaggatccaggacccagggcccctcagtgggtgtcttccatttctcaagattgcctcttggttgtgagatgacggttgctgct

SEQ ID NO: 556800 - DNA, 120 bp, Artificial Sequence
  ENSG00000169057_120 (sequence is synthesized)
ctagtcattgcatccactcctccaggtaggaagaaagaggtcataggggaaaggcaaaatggcacttgacatcttaacttctaggcccattcaatatttccatttccatcttcacaccca

SEQ ID NO: 556801 - DNA, 120 bp, Artificial Sequence
  ENSG00000169057_121 (sequence is synthesized)
tcatcttgtcctagggaacaaacagcaccagcagctcagtagctataacagcaattattatttctcacacatgggtctgggtcagctgcaagatgggattcagatctgttctcaagcctg

SEQ ID NO: 556802 - DNA, 120 bp, Artificial Sequence
  ENSG00000169057_122 (sequence is synthesized)
tcgttccaggacccaggagggagaagcagctgccaggggaagtctcttcgtaggcggaggtcaggagtccaagaggagtgagcagagtcacagaagcctcttaaagcctcttcttccccc

SEQ ID NO: 556803 - DNA, 120 bp, Artificial Sequence
  ENSG00000169057_123 (sequence is synthesized)
atcccatcaacacatctgctgcccaagaactcctttgtgattgaatttaaccagagttgatttctgttgcttgaaactcaggaccttgatgcagtgtgcagggtctgggcaagtctagac

SEQ ID NO: 556804 - DNA, 120 bp, Artificial Sequence
  ENSG00000169057_124 (sequence is synthesized)
ttgaatgcaaacagttcttattgctaacttaccactagtcaccactaatgaacaaagactatgaacaggaaattcataaaagaagagatacagatggccaatgaagataggaaaagagtt

SEQ ID NO: 556805 - DNA, 120 bp, Artificial Sequence
  ENSG00000169057_125 (sequence is synthesized)
ctgcctgctggtaatcaaagagatgcaaacgagaacaaaaatgatgccttttcacctaccaaatttgtcaagattaaaaagaaagcaaagagccagcgtcagctgatgttcatacctgca

SEQ ID NO: 556806 - DNA, 120 bp, Artificial Sequence
  ENSG00000169057_126 (sequence is synthesized)
cccgcggggtcggacgacacggctggcggatggcgtccctcctctctaccctccccctcccgccgccgccggtggcgactctcccctcggcccgtcacccctgctcgcgggtgaccgtcc

SEQ ID NO: 556807 - DNA, 80 bp, Artificial Sequence
  ENSG00000169057_127 (sequence is synthesized)
tcggcgcggcctccctggagccgccttcgcctgacgcccctcttcctcccgccctcgacgcgcatcccggcccccggccc

SEQ ID NO: 556808 - DNA, 80 bp, Artificial Sequence
  ENSG00000169057_128 (sequence is synthesized)
ccgtcgcgcgcccgcggccccggcctctccctggatcgcgctctccccctccctccctcgcgcgccccctctcccgttac

SEQ ID NO: 556809 - DNA, 120 bp, Artificial Sequence
  ENSG00000169057_129 (sequence is synthesized)
tcggcccccccaccggcgcgcgtgcgcacttcgcctcccgtcgggagagtgcgccacaagggctcctgagctctcacccccatctctgggctttgcctccccctccttctcgcccattcc

SEQ ID NO: 556810 - DNA, 120 bp, Artificial Sequence
  ENSG00000169057_130 (sequence is synthesized)
tgtccccagggtgctcagaggttctttggagtgctgtggcctcggaatgtgagcaccctcccatcctaccctccccttcgccggcgatcttccagttacataagtggagtgggacatagt

SEQ ID NO: 556811 - DNA, 120 bp, Artificial Sequence
  ENSG00000169057_131 (sequence is synthesized)
aggtaacgggctctcatcgccctggagcgctcgggatcaccggtaccagatggggcaagttcatcgcgacgctgtggctcctgttaattgtgcctgaaaggttatcctctgttcagtttg

SEQ ID NO: 556812 - DNA, 120 bp, Artificial Sequence
  ENSG00000169057_132 (sequence is synthesized)
gtcatgaccgaatcacccaaactgaaactcagatgacttttatatggcagtggcaatgtttctgtggttttgcactaaagacttaaggtcattatgaagagtgtaaaaggattgctgtcg

SEQ ID NO: 556813 - DNA, 120 bp, Artificial Sequence
  ENSG00000169057_133 (sequence is synthesized)
caggggagaccgtttatgacattgctaagtatggaccccgagggggaaaaagctcattctggaattgctctgtggcggttgcttctgttgcgagtgtgttcgggtgtgggttggtcacag

SEQ ID NO: 556814 - DNA, 120 bp, Artificial Sequence
  ENSG00000169057_134 (sequence is synthesized)
catggtcaggcagatgtgtgcttctggttatttttccaggaacaggaatgggctctgccgagcctttcacacgttgtgtctctgctgtgcgggatcagtaccccagactgtgagataaca

SEQ ID NO: 556815 - DNA, 120 bp, Artificial Sequence
  ENSG00000169057_135 (sequence is synthesized)
ggatcgaattcaggggttggttggtgatccaggaaccatacctacttggatgtgatactgagtggcctagacgttgtaggactctcataagttttagacattttgttatactgtaaaaat

SEQ ID NO: 556816 - DNA, 120 bp, Artificial Sequence
  ENSG00000169057_136 (sequence is synthesized)
gaagcatatacggcctcagtagtaacattgcactaataggtaattattactctagagaattttgggttccatggctggaatgttcatcagtatctcagcaatttcagttaataaccagat

SEQ ID NO: 556817 - DNA, 120 bp, Artificial Sequence
  ENSG00000169057_137 (sequence is synthesized)
taagctgacctcttgagtcttttgaaatctgctgggtccctataataagacagggtctggattttttaatcttttgggaatttccaccaaggatttagggaaataggcttttatgggctt

SEQ ID NO: 556818 - DNA, 120 bp, Artificial Sequence
  ENSG00000169057_138 (sequence is synthesized)
ttcaggatttctatttcaaatcccaatgaggaagtctaggaaacacttgcttttattttcttgcctgaatatgtcagaaccttaaatcacccaatcaatctagaagtactacagttgatt

SEQ ID NO: 556819 - DNA, 120 bp, Artificial Sequence
  ENSG00000169057_139 (sequence is synthesized)
aaagtaagtcaccacaggtcacccattcgtggcaggtcagctaggtggctgatcactggaatacagtcatatccccaggcatacacacgagcctcacttgacgatcccaaagtttgtaca

SEQ ID NO: 556820 - DNA, 120 bp, Artificial Sequence
  ENSG00000169057_140 (sequence is synthesized)
tctgagcttgagacgtgacaagttgaggtctctgctttgttcttcatagttggcagtttgtctcctcgggtgcccctccggttagctgtttatcatacgtctagccctatcaacagtgca

SEQ ID NO: 556821 - DNA, 120 bp, Artificial Sequence
  ENSG00000169057_141 (sequence is synthesized)
ggcagcttccagagtatagttttctctgcaaagtgcctggtggaggggtacctccttttccattgtcctaatggctccactgggcttccataccagccctttccagtgtcttaacagctc

SEQ ID NO: 556822 - DNA, 120 bp, Artificial Sequence
  ENSG00000169057_142 (sequence is synthesized)
aaagaaacccatctgtggctttcttgttagcactggcctatcacaccttcctattgcctgttaactaaaattttgcctggaatgctttaagcttagagtactgggtctttgtttcacccg

SEQ ID NO: 556823 - DNA, 120 bp, Artificial Sequence
  ENSG00000169057_143 (sequence is synthesized)
attgataggagagtgtcatgcagtcagccgaactccgacttctgtgctgtttaaatccttaggtaggtctggggcaaggcacaaaccactgtgtattcaaagggttatggtgcttgcatt

SEQ ID NO: 556824 - DNA, 120 bp, Artificial Sequence
  ENSG00000169057_144 (sequence is synthesized)
ctgtgtgtatatgtttgtaatttccaaccagagtcgtttcccgtgcctgccctgcctctgtgcaatctagtctagtagggtagggaggcaagctgtggagtttgaaaaaaaaaaaaaaaa

SEQ ID NO: 556825 - DNA, 120 bp, Artificial Sequence
  ENSG00000169059_0 (sequence is synthesized)
atgtggatgctgggagaagtatgtgagatggaaaagttgtttcatggcatccaagaagtgaatgatcctcaaggtgtagcagaggaatctgtaggagagagggatgattgacgtcttcgt

SEQ ID NO: 556826 - DNA, 120 bp, Artificial Sequence
  ENSG00000169059_1 (sequence is synthesized)
atagccctccatccatcccagttagcatggagggattttagggctaccattggctgggtagtggagtgttgaccaatcacagctcaggggcgtgattgtctcgtcctgggatcgcgagag

SEQ ID NO: 556827 - DNA, 120 bp, Artificial Sequence
  ENSG00000169059_2 (sequence is synthesized)
gggtatatacagggaggccaggcagcctggagttagtcgaccgttgcgagacgttgagctgcggaagatgagtccaaagccgagagcctcgggacctccggccaaggccacggaggcagg

SEQ ID NO: 556828 - DNA, 120 bp, Artificial Sequence
  ENSG00000169059_3 (sequence is synthesized)
aaagaggaagtcctcctctcagccgagccccagtgacccgaagaagaagactaccaaggtggccaagaagggaaaagcagttcgtagagggagacgcgggaagaaaggggctgcgacaaa

SEQ ID NO: 556829 - DNA, 120 bp, Artificial Sequence
  ENSG00000169059_4 (sequence is synthesized)
ggccagcggcacccggccccagcgaccagcccagccaggagctccctcagcacgagctgccgccggaggagccagtgagcgaggggacccagcacgaccccctgagtcaggagagcgagc

SEQ ID NO: 556830 - DNA, 60 bp, Artificial Sequence
  ENSG00000169059_5 (sequence is synthesized)
accgagtgtgtagacggccagctactcccctatctccgagagcagcgactaagttcaggc

SEQ ID NO: 556831 - DNA, 120 bp, Artificial Sequence
  ENSG00000169059_6 (sequence is synthesized)
gctactcccctatctccgagagcagcgactaagttcaggcccagccgccagacctcagagatctcaccagcggggtgcttgccattctgaagataataaaatgaatgtgttgcaaattga

SEQ ID NO: 556832 - DNA, 120 bp, Artificial Sequence
  ENSG00000169062_0 (sequence is synthesized)
gtcgggggctggcggctgcggctcggcggagagtgcggcatgcgctcggaaaaggagggggccggaggccttcgggcggccgttgccgcgcggggcccgagcgggagggagaagctgtcg

SEQ ID NO: 556833 - DNA, 120 bp, Artificial Sequence
  ENSG00000169062_1 (sequence is synthesized)
gccctagaagtgcagttccaccgcgactcgcagcagcaggaggctgagacgccgccaacttcgtcctccggttgcgggggcggtgcgggcaaacctcgcgaggagaagaggacggccctg

SEQ ID NO: 556834 - DNA, 120 bp, Artificial Sequence
  ENSG00000169062_2 (sequence is synthesized)
agcaaggtggtcatccgccgcctgcctccgggcctcaccaaggagcagctggaggagcagctgcgcccgctgccagcacacgactacttcgagttcttcgccgccgacctgagtctttat

SEQ ID NO: 556835 - DNA, 120 bp, Artificial Sequence
  ENSG00000169062_3 (sequence is synthesized)
cctcatctctactcaagagcatacattaattttaggaatcctgatgacatccttctttttagagatcgttttgatggatatatcttccttgacagcaaaggcctagaatatcctgcagtg

SEQ ID NO: 556836 - DNA, 120 bp, Artificial Sequence
  ENSG00000169062_4 (sequence is synthesized)
gtagagtttgctccattccagaagatagccaaaaagaagctgagaaaaaaagatgccaagactggaagcatcgaagatgatccagaatataagaagtttttagaaacctactgtgtggag

SEQ ID NO: 556837 - DNA, 120 bp, Artificial Sequence
  ENSG00000169062_5 (sequence is synthesized)
gaagagaagaccagtgccaaccctgagactctgctgggggagatggaggcgaagacaagagagctcattgctagaagaaccacacctcttttggaatatattaaaaatagaaaattagaa

SEQ ID NO: 556838 - DNA, 120 bp, Artificial Sequence
  ENSG00000169062_6 (sequence is synthesized)
aagcagagaattcgagaagagaagcgagaagaacggaggaggagagagttagaaaagaaacgtttgcgggaagaggaaaaaagaagaagaagagaagaagaaagatgcaaaaaaaaagag

SEQ ID NO: 556839 - DNA, 120 bp, Artificial Sequence
  ENSG00000169062_7 (sequence is synthesized)
acagataaacagaagaaaattgcagagaaagaagtaaggattaagcttcttaagaaaccagaaaagggagaggaaccaaccacagagaaaccaaaagaaagaggagaggagattgatact

SEQ ID NO: 556840 - DNA, 120 bp, Artificial Sequence
  ENSG00000169062_8 (sequence is synthesized)
ggaggtggcaagcaggaatcctgtgcccccggtgcagtcgtaaaagccaggcccatggaaggctcgctggaggagccccaggagacgtcacacagcggcagtgataaagagcacagggat

SEQ ID NO: 556841 - DNA, 120 bp, Artificial Sequence
  ENSG00000169062_9 (sequence is synthesized)
ctttccagaaggagtgaggatgagcagagatgggggaaaggacctggccaagacagagggaagaaggggagccaggacagcggggctccgggggaggccatggagagactgggaagagcg

SEQ ID NO: 556842 - DNA, 120 bp, Artificial Sequence
  ENSG00000169062_10 (sequence is synthesized)
cagaggtgtgacgacagtccagcacccagaaaagagcgactggcaaacaaggaccggccagccttgcagctgtatgatccaggagctcgcttccgagcgcgagagtgtggcggaaacagg

SEQ ID NO: 556843 - DNA, 120 bp, Artificial Sequence
  ENSG00000169062_11 (sequence is synthesized)
aggatctgcaaggcagaaggttcggggactggtcctgagaagagggaagaggcagagtgagtcactgcacgcacctggcctccatggacgagcaagggcatcccagaaacgtgtaaatga

SEQ ID NO: 556844 - DNA, 120 bp, Artificial Sequence
  ENSG00000169062_12 (sequence is synthesized)
ccccgagtgtgactgggaaggagaacttattccttaccaggaaactggaagctaaaaatacagagggtgacgtagaaacacgcagaaaccattctaaagaaagtagtgatcttgtattaa

SEQ ID NO: 556845 - DNA, 120 bp, Artificial Sequence
  ENSG00000169062_13 (sequence is synthesized)
attgagcagaattctcacagattttaccattcctgttataaactagtatttgttgtttagccaaaacagaaaatgatttccactggacagtagaaaaatatgtgtaaaatagggaagaaa

SEQ ID NO: 556846 - DNA, 120 bp, Artificial Sequence
  ENSG00000169062_14 (sequence is synthesized)
gttagtattggatcagtgtgagtcctgaagcactttcagtgctgtgagaacgacatccactttgggtttcattcgtttgtaagcagaggagctgtcagtcactcgtgcttctcggtggcc

SEQ ID NO: 556847 - DNA, 120 bp, Artificial Sequence
  ENSG00000169062_15 (sequence is synthesized)
tctgagccatggtgtcgagtgaagagtagttcttgtttgttacaacctttgtgagtcagccatgcccgcaaagcgtgctgtgttttagtcctggtaggaatatttatcagagttcacact

SEQ ID NO: 556848 - DNA, 120 bp, Artificial Sequence
  ENSG00000169062_16 (sequence is synthesized)
atataaaacccaacagcttcaactattgccctttcaacagttttgccactgaccggatagaaacggtttcagtctctggatggatgtgtttgtggtttgtaaccattacggtttaaacca

SEQ ID NO: 556849 - DNA, 120 bp, Artificial Sequence
  ENSG00000169062_17 (sequence is synthesized)
tggtttaagaatttgcccaaataacagaaattttgttcgggaagggataaactagatatagcatacagagcctgtttttgagttttagatactttatttgtaaataacttaaaatagctt

SEQ ID NO: 556850 - DNA, 120 bp, Artificial Sequence
  ENSG00000169062_18 (sequence is synthesized)
tctgaaaccgtgcattctgtagtttcttcctttcagtgaaattgctaaatgtcaatgtatttttggcactgcgattttaaccatttattaaataaaaattttgttaaagaagtactgaaa

SEQ ID NO: 556851 - DNA, 120 bp, Artificial Sequence
  ENSG00000169062_19 (sequence is synthesized)
aagagagggcggaacccagagctcggcggcggtggccgtctcgttgccttacgttccttaccctgatttctcctatatgggagtcgtgtgagctttttgaataaatacatttcagtaaaa

SEQ ID NO: 556852 - DNA, 120 bp, Artificial Sequence
  ENSG00000169062_20 (sequence is synthesized)
atttaggtttgatccatatcgagttactttttgtatatggtgttaggtaagggtccagcttcattcttctggctgtggatatccagttttcccagcaccagttgttgaaaagactttctt

SEQ ID NO: 556853 - DNA, 120 bp, Artificial Sequence
  ENSG00000169062_21 (sequence is synthesized)
ttccccattgaatggtctgggcacccttttcaaaaatcagttgaccaagtattacaaaggtttatttctgtgctctctattttattcccttggtggatgtgtctgtctacatggcagtac

SEQ ID NO: 556854 - DNA, 120 bp, Artificial Sequence
  ENSG00000169062_22 (sequence is synthesized)
cacactgattactttcagctttggaatcagggagtatgtcatctgccattgaatgagtatccactgtgtgctaggccttgtgggtggagcggtgacttggacatcgtccctgctggtcca

SEQ ID NO: 556855 - DNA, 120 bp, Artificial Sequence
  ENSG00000169062_23 (sequence is synthesized)
gtgccctgccgtccccctgagtcttgactttattctggatagtggaggttggcacaaaaatatctcccagttaaaggaattataattcagtcacctgactattactgacaagtcaaaaaa

SEQ ID NO: 556856 - DNA, 120 bp, Artificial Sequence
  ENSG00000169062_24 (sequence is synthesized)
aaatgactcagtgggtttagtaccaaggtagcagtgttccatttgatgattcagcatatagcaggttctcttagtgaacatttctctttgtgtatttgtttttcccccacatagcaacga

SEQ ID NO: 556857 - DNA, 120 bp, Artificial Sequence
  ENSG00000169062_25 (sequence is synthesized)
agttagtttctaatgacttccattctctacttttatcagaagcagatttcacctggaatattctataaaccctttgaaaccctctattttagccatggtgtcttctaagcaaagtaattt

SEQ ID NO: 556858 - DNA, 120 bp, Artificial Sequence
  ENSG00000169062_26 (sequence is synthesized)
tcttgaacttaaataacaaattgatagttgaattaaccttttaaaataaaatgtaaagtgtagctaagaaatcattatttaaaggtattccaacgataaattatttgggatggggctggg

SEQ ID NO: 556859 - DNA, 120 bp, Artificial Sequence
  ENSG00000169062_27 (sequence is synthesized)
gaggtcaggtatattgaggtgtaagttacatatggtaaaagtcacccttttaaagtgaacaatttgatgaattttgaacaacttcagttatgcaaccaccacaacatgatggattgtttt

SEQ ID NO: 556860 - DNA, 120 bp, Artificial Sequence
  ENSG00000169062_28 (sequence is synthesized)
agtaaatgttcttcttaccaggagttcatccttgtttaagtctggagtttgccgtgttaaggttgcaggtgcttgaaagtgtaataaaattgtaggttttttaatcttttttttaatctc

SEQ ID NO: 556861 - DNA, 120 bp, Artificial Sequence
  ENSG00000169062_29 (sequence is synthesized)
ttactggaaggatgaattatagtttaaatagtaataatgcattgtcgttgttacacttactctttaagtaagttaggtcattattttccgaaatgaatgtagtagaatttcagaatggct

SEQ ID NO: 556862 - DNA, 120 bp, Artificial Sequence
  ENSG00000169062_30 (sequence is synthesized)
tttattgagagatttactcgtagaggatatacgttttttctctttttcttgactgtgataacaagttgaaacttgttacaggcttgacagaaatgtagagtgatttccagttttgacaaa

SEQ ID NO: 556863 - DNA, 120 bp, Artificial Sequence
  ENSG00000169062_31 (sequence is synthesized)
agaatggcaagatggcagcatgggaaaatatttctgagcgttggttgatggagagcacgtgatttttttagttaagatcattttaagttatgatgcttccgaatgagcagtgcagaagac

SEQ ID NO: 556864 - DNA, 120 bp, Artificial Sequence
  ENSG00000169062_32 (sequence is synthesized)
acatgaatggtctgttcctgagcgtcagggaaggcatgttgtgtcacatagttgaagtcagtggtcacagacggatgcctcaagagcccataggaatgagatgttttgcttgcggtgagg

SEQ ID NO: 556865 - DNA, 120 bp, Artificial Sequence
  ENSG00000169062_33 (sequence is synthesized)
tcatcttgctgcttcaacacaaatgccaggctccccgagccaggccaacttgtggataagcccagccagagcacagaatcgagtttaaatccagccttccaccccatgcccacaagtggt

SEQ ID NO: 556866 - DNA, 120 bp, Artificial Sequence
  ENSG00000169062_34 (sequence is synthesized)
gtactttagaaatagttacttcccagtagcaccaacatacttcccagtagcaccaacatgaaaatcaggcaaactgttgttgtttagtcccagacacacctggtagtgtttctcttctct

SEQ ID NO: 556867 - DNA, 120 bp, Artificial Sequence
  ENSG00000169062_35 (sequence is synthesized)
gtggatctcctttcctcaaagccctggttcttcacctctcatctctcccgcccaggctgtgccctgcccacccatcaagatggatgtactttgggaggccagggtgggcggatcacaagg

SEQ ID NO: 556868 - DNA, 61 bp, Artificial Sequence
  ENSG00000169062_36 (sequence is synthesized)
tggatgtactttgggaggccagggtgggcggatcacaaggtcaggacttcagggcatggtg

SEQ ID NO: 556869 - DNA, 120 bp, Artificial Sequence
  ENSG00000169062_37 (sequence is synthesized)
tctgaagcacaaagataccatgtggatgacggcaggaggcacagagctcaccacgagcctgaacggctttccagaaggagaccggccagccttgcagctgtatgatccaggagctcgctt

SEQ ID NO: 556870 - DNA, 77 bp, Artificial Sequence
  ENSG00000169062_38 (sequence is synthesized)
ccgcaatcacggctcactgcagcctcacactgcggctcaagcaatcctccagcctcctaggtagcagggaccacagg

SEQ ID NO: 556871 - DNA, 120 bp, Artificial Sequence
  ENSG00000169062_39 (sequence is synthesized)
gcggctcaagcaatcctccagcctcctaggtagcagggaccacaggcgtgtgccaccatgatcggctgatttaaaaaaaaaattgtgtagagacgggggtctcactgtgttgcccaggct

SEQ ID NO: 556872 - DNA, 120 bp, Artificial Sequence
  ENSG00000169062_40 (sequence is synthesized)
ctgggattacaggcgtgagccacagcatccggtctatttgtgcattttaattaaaaagttctcagactaaaataagtttataaattttgattatgttactgtaattatgtgcagatatta

SEQ ID NO: 556873 - DNA, 120 bp, Artificial Sequence
  ENSG00000169062_41 (sequence is synthesized)
atgttactgtaattatgtgcagatattaaaaattgaaattatttaattttattatttaatccaaaaaaattccagaaattctgtgtaatagtgacagcctatttatgtattatcatcaga

SEQ ID NO: 556874 - DNA, 120 bp, Artificial Sequence
  ENSG00000169062_42 (sequence is synthesized)
tcatcagagaatgaaggttttcatgagtgagtttgttgcatgagagaacttgatctttttaggttctaaagctaaactattttacctgataggaattttccaaaatgtacactgacttct

SEQ ID NO: 556875 - DNA, 120 bp, Artificial Sequence
  ENSG00000169062_43 (sequence is synthesized)
atcttcctaaacagcatccttcatgactgtaccatttatgataatgtcaccaggaagtcactgctgttaaacagctttgcctgcggagacagcagtcttcaactctactctcaatagttc

SEQ ID NO: 556876 - DNA, 120 bp, Artificial Sequence
  ENSG00000169062_44 (sequence is synthesized)
atgccaagactggaagcatcgaagatggtgagccctttccaagtgctacgttatgaagctgccaaattaagaacactgagcaaatgtaattctcccgtagttgggaaagattatatttat

SEQ ID NO: 556877 - DNA, 120 bp, Artificial Sequence
  ENSG00000169064_0 (sequence is synthesized)
cggcagctatccgcggccatccggcggtggtgacgcgagaggctggggtctccagcctttagtctgcctgcgcgttcacatgcacccacttacttcttgaagtctactcctcacaagtaa

SEQ ID NO: 556878 - DNA, 120 bp, Artificial Sequence
  ENSG00000169064_1 (sequence is synthesized)
gggctatggtgcggggtgcccgattcctgagaaatctgaagatgtggaagtttattttttcttcccaaaatcagcagtagagggactcaggaccaactcctcttcatcttcgtcttcctc

SEQ ID NO: 556879 - DNA, 120 bp, Artificial Sequence
  ENSG00000169064_2 (sequence is synthesized)
agcctgctcaatgtgaagcccctgatcatgattcacttccacttaataaataaagtgtttacaaatcagaataacttttagacaatattaaggtggtaatcatgaacagaaaagattttg

SEQ ID NO: 556880 - DNA, 120 bp, Artificial Sequence
  ENSG00000169064_3 (sequence is synthesized)
tagttcttccatggggaaaacctggaaattctgtaaagctaaaatatagaaatgctcaagaactgcgaatggagaaagtacagttagagtttgagaaccaagagatggagaagaaactgc

SEQ ID NO: 556881 - DNA, 120 bp, Artificial Sequence
  ENSG00000169064_4 (sequence is synthesized)
aagaattccgatccacaagaaacaaagaaaaggaagatagagagtcaagcgagtattactggaaatctggaaaagtgggcaaattggtcaatcaatcatatatgatgtcacaaaataaag

SEQ ID NO: 556882 - DNA, 120 bp, Artificial Sequence
  ENSG00000169064_5 (sequence is synthesized)
gaaatgttgttaagttttctgctggaaaagtgaaattaaaattgctgaaggaacagattcaagagccagtgaaaccaacagttaattataaaatggcaaattcttcagaatgtgaaaaac

SEQ ID NO: 556883 - DNA, 120 bp, Artificial Sequence
  ENSG00000169064_6 (sequence is synthesized)
ccaagataaatgggaaagtatgtggacagtgtgagaacaaagctgctctactggtatgccttgaatgtggagaagattattgttcaggatgctttgctaaagttcaccagaaaggggcac

SEQ ID NO: 556884 - DNA, 120 bp, Artificial Sequence
  ENSG00000169064_7 (sequence is synthesized)
taaagctccacagaacaactcttttgcaggcaaaatctcaaatattattcaatgtattggatgttgcccatcagtttataaaggatgttaatccagatgaacccaaagaggagaataatt

SEQ ID NO: 556885 - DNA, 120 bp, Artificial Sequence
  ENSG00000169064_8 (sequence is synthesized)
ctacaaaggaaaccagtaaaattcaacataaacccaaatctgtacttctccagaggagcagctctgaggtagaaattacaacgatgaaaagagcacaacgtacaaaaccaagaaagagtc

SEQ ID NO: 556886 - DNA, 120 bp, Artificial Sequence
  ENSG00000169064_9 (sequence is synthesized)
tgttgtgtgaagggtcattcgatgaagaagcttctgcacagtcctttcaggaagtgttaagtcaatggagaaccggaaatcatgatgacaacaagaaacagaatttacatgcagcagtaa

SEQ ID NO: 556887 - DNA, 120 bp, Artificial Sequence
  ENSG00000169064_10 (sequence is synthesized)
aagactcattggaagaatgcgaagtacagactaatctgaaaatttggagagaaccacttaatattgaacttaaagaagacattctatcctatatggaaaaattatggcttaaaaaacaca

SEQ ID NO: 556888 - DNA, 120 bp, Artificial Sequence
  ENSG00000169064_11 (sequence is synthesized)
ggagaactccacaagagcaactttttaaaatgctaccagatacgttcccacatccacatgaaaccactggtgatgcacagtgttctcaaaatgaaaacgatgaagatagtgatggtgagg

SEQ ID NO: 556889 - DNA, 120 bp, Artificial Sequence
  ENSG00000169064_12 (sequence is synthesized)
agaccaaagtacaacacacagctcttttattgccagtagaaacattaaacatagagagacctgaaccatctctaaagatagtcgaactggatgatacttatgaagaggaatttgaagaag

SEQ ID NO: 556890 - DNA, 120 bp, Artificial Sequence
  ENSG00000169064_13 (sequence is synthesized)
tgtgccttacaaagttaaattagctgatgcagacagtcaacgaagttgtgcttttcatgattgtcagaagaatagctttccatatgaaaatggcatccatcaacatcatgttttcgataa

SEQ ID NO: 556891 - DNA, 120 bp, Artificial Sequence
  ENSG00000169064_14 (sequence is synthesized)
gggaaagagagacttcttaaatctttgtctgagaaacagctctacttattataaagataattcaaaagcagaaacttcaaacacagattttgacaacatcgtggatcctgatgtgtattc

SEQ ID NO: 556892 - DNA, 120 bp, Artificial Sequence
  ENSG00000169064_15 (sequence is synthesized)
ttctgacattgaaaaaattgaggaaagcacctcctttgaaagaaatttaaaggagaaaaatataggtttagaaagtaatcaaaagtctgatgattcctgtgtatcacttgaaagcaagga

SEQ ID NO: 556893 - DNA, 120 bp, Artificial Sequence
  ENSG00000169064_16 (sequence is synthesized)
cactttgctaggtagagatttagaaaaagctcccattgaggagaaattatctcaagacatcaaagaatccttggaattgagcaatctgtataagaggccaagctttgaagaatcaaaaac

SEQ ID NO: 556894 - DNA, 120 bp, Artificial Sequence
  ENSG00000169064_17 (sequence is synthesized)
tacaaagtcatcactgttgttacaagaaatagcctgcagaagtaagcctataacaaaacaatatcaaggacttgagagattctttatttttgatacaaatgaaagactcaacttacttcc

SEQ ID NO: 556895 - DNA, 120 bp, Artificial Sequence
  ENSG00000169064_18 (sequence is synthesized)
ttctcatcgtttagaatgcaacaattccagtactaggattacacttgcaggtcagaaatcacagagaccttcaacagcaaattttccactttccaactctgttaaagaaagctccagttg

SEQ ID NO: 556896 - DNA, 120 bp, Artificial Sequence
  ENSG00000169064_19 (sequence is synthesized)
cctttcatcctctcatcctcgatcaagaagtgcagctgctcaatcatcatctagagctgcttctgaaatttcagaaattgaatatattgatattactgaccagaatgagctttccttaga

SEQ ID NO: 556897 - DNA, 120 bp, Artificial Sequence
  ENSG00000169064_20 (sequence is synthesized)
tgacactactgatcaacatactttagacaatttggaaaaagaattacaagtgctgagatctcttgcagatacttcagaaaagctttacagcttaacctcagaagagttcccagatttcag

SEQ ID NO: 556898 - DNA, 120 bp, Artificial Sequence
  ENSG00000169064_21 (sequence is synthesized)
cagccaatcactgaatataagtcagatttccacagatttccttaagacctcacatgtgaggggtccctgtggagttgaggaattgagctgttctggaagagataccaaaattcagtcttt

SEQ ID NO: 556899 - DNA, 120 bp, Artificial Sequence
  ENSG00000169064_22 (sequence is synthesized)
gctgtcactttctgagagcagtacagatgaggaggaggaagattttctcaacaagcaacatgtcatcacactaccgtggtcaaagagtacttaaagattatttgttcattactgtttcca

SEQ ID NO: 556900 - DNA, 120 bp, Artificial Sequence
  ENSG00000169064_23 (sequence is synthesized)
ttttgtacccagagtaaagcaaacaactgagaaaagtaaccaagtgattacctatccaagtgctggagattttgattactaatgtctttgatgtttcaaggctacaaactaataaaagta

SEQ ID NO: 556901 - DNA, 120 bp, Artificial Sequence
  ENSG00000169064_24 (sequence is synthesized)
aaattataagttcaagggcttattcttccaatgatatattatatgtcaaccactaatctatattgcagattatgttagtaaaatatggtgaatttgaagaaataactgttacaactgtgt

SEQ ID NO: 556902 - DNA, 120 bp, Artificial Sequence
  ENSG00000169064_25 (sequence is synthesized)
ctataaaacctactatagggcagaacatgattatacttaaagaaatatttcatcgtccaattatattttaaataattatgtcatcaacaagagtgtgcatttgacagccaagtcacacta

SEQ ID NO: 556903 - DNA, 120 bp, Artificial Sequence
  ENSG00000169064_26 (sequence is synthesized)
gttagtatcatcaattgaacctataattacactgtttattttctggtttttaacatttatagaagttctggtatcttcaaaaatttgcaataaaagaaaaaaagaggaccaaaaataaaa

SEQ ID NO: 556904 - DNA, 120 bp, Artificial Sequence
  ENSG00000169064_27 (sequence is synthesized)
tagcttaagtgaatatgctgataatgcaattgtcttgggtgttctgcagggtgctcagagtccatcatcaagtagaaaacagcaaaagatgggtcagaaatcacagagaccttcaacagc

SEQ ID NO: 556905 - DNA, 120 bp, Artificial Sequence
  ENSG00000169064_28 (sequence is synthesized)
gtaataattaaaacaaaagtctaagatttgaagagataatttgcttcaggattttgatggaaggcaaatgctaactttaaaaaccagatttcggagaagtacaaaagaaatagaaatgct

SEQ ID NO: 556906 - DNA, 120 bp, Artificial Sequence
  ENSG00000169064_29 (sequence is synthesized)
acctggtattttgtatctttaagtactcattcaaatttttaaaagttgatttaaaaactttttacttttaattttaggtcagaaatcacagagaccttcaacagcaaattttccactttc

SEQ ID NO: 556907 - DNA, 120 bp, Artificial Sequence
  ENSG00000169064_30 (sequence is synthesized)
cagcagtagagggactcaggtgaggagaccaaagtacaacacacagctcttttattgccagtagaaacattaaacatagagagacctgaaccatctctaaagatagtcgaactggatgat

SEQ ID NO: 556908 - DNA, 120 bp, Artificial Sequence
  ENSG00000169064_31 (sequence is synthesized)
acaaccatgttaaggagctgggagaataagacagaaaataactacattagggcctcagcctgaagcttggagtccagtttgggactgaaaagatacttcagaaaagctttacagcttaac

SEQ ID NO: 556909 - DNA, 120 bp, Artificial Sequence
  ENSG00000169064_32 (sequence is synthesized)
agatagagagatgacaaagtttattatgtgtcttgctgcttttaatgacccagtggccaattcttttaccttcactgatttggacttagtttggacttctaaatggatcatgatactcat

SEQ ID NO: 556910 - DNA, 120 bp, Artificial Sequence
  ENSG00000169064_33 (sequence is synthesized)
acttgctcatggtcacacagcaggctccttttcgccctctgccggcggacagtggcagaacccagctttctggttgctatgggtaccgaggtaacgcggtaaccaaggagaccaagacgg

SEQ ID NO: 556911 - DNA, 120 bp, Artificial Sequence
  ENSG00000169067_0 (sequence is synthesized)
gtgtctgaaagcatttctggagtgttttaggcctgttcactttctcttactcactgtctattcacttgtcctgttcactcgtctggaagatctcagccagcaccatgactgacaatgagc

SEQ ID NO: 556912 - DNA, 120 bp, Artificial Sequence
  ENSG00000169067_1 (sequence is synthesized)
tgtctgccttggtagtggataatgggtcagggatgtgcaaggcaggctttggtggtgacgatgccccccgggctgtgttcccctccatgatagggcgtcctcgacaccagggcgttatgg

SEQ ID NO: 556913 - DNA, 120 bp, Artificial Sequence
  ENSG00000169067_2 (sequence is synthesized)
taggcatgggccagaaggactgctacgtgggagatgaggctcagagcaagagaggcgtcctgaccctgaagtatcctatcgagcatggagtggtcaccaactgggacgatatggaaaaga

SEQ ID NO: 556914 - DNA, 120 bp, Artificial Sequence
  ENSG00000169067_3 (sequence is synthesized)
tctggtaccacacattctacaatgagctccgtgtggcaccagatgagcatcccatcctcctcaccgaggcacccctgaaccccaagatcaaccgggaaaagatgactcagatcatgttcg

SEQ ID NO: 556915 - DNA, 120 bp, Artificial Sequence
  ENSG00000169067_4 (sequence is synthesized)
aggctttcaacacaccagccatgtatgtcgccatccaggctgtgctgtccctctatgcctcaggacggaccacaggcatcgtgatggattctggggatggggtcactcacatcgtgccca

SEQ ID NO: 556916 - DNA, 120 bp, Artificial Sequence
  ENSG00000169067_5 (sequence is synthesized)
tctatgaaggttatgccctgcctcatgccattctacgcctggatctggcagggagagacctgactgattacctcatgaagatcctgacagagcgaggctataacttcaccaccactgctg

SEQ ID NO: 556917 - DNA, 120 bp, Artificial Sequence
  ENSG00000169067_6 (sequence is synthesized)
agcgggagattgtgcgagatgtcaaagagaagctgtgctacgtagccctggactttgagcaggagatggtcagggcagccgcatcctcctcaccggaacggagctatgaacttcctgatg

SEQ ID NO: 556918 - DNA, 120 bp, Artificial Sequence
  ENSG00000169067_7 (sequence is synthesized)
ggcaggtgatcaccattgggaatgaacgcttccgatgccctgaagccattttccagccttcctttctgggcattgagtccagtgggatccatgagacaaccttcaactctatcatgaagt

SEQ ID NO: 556919 - DNA, 120 bp, Artificial Sequence
  ENSG00000169067_8 (sequence is synthesized)
gcgatgtggatattcgcaaggatctctatgccaacaccgtgttatctggagggagcaccatgtacccaggcattgctgacaggatgcagaaagaaatcataaccctggcacccagcacca

SEQ ID NO: 556920 - DNA, 120 bp, Artificial Sequence
  ENSG00000169067_9 (sequence is synthesized)
tgaaaatcaagatcatagctcccccagagcggaagtattctgtttggattgggggctccatccttgccagcctgtccacattccagcagatgtggatcagtaagcaggaatatgatgagg

SEQ ID NO: 556921 - DNA, 120 bp, Artificial Sequence
  ENSG00000169067_10 (sequence is synthesized)
ctggtcctcctatcgttcacagaaaatgtttctgaatgggcttccatattagtgggcttacattttcccttttcctaggtcacagtgatggtactgcttttatccgctttcagtagaatc

SEQ ID NO: 556922 - DNA, 120 bp, Artificial Sequence
  ENSG00000169067_11 (sequence is synthesized)
gcaaacccatctctccatccaagtaacctgggctcttacccagataaccacatccggttctccatcaagtgaaggtgaattctaataccatattcctttttctttgcctatactgttcaa

SEQ ID NO: 556923 - DNA, 120 bp, Artificial Sequence
  ENSG00000169067_12 (sequence is synthesized)
agataggtaggccagcttaaatacatataagtgacaaggagtaaaatcacgagaaatgtcatttcagaatggataactataattatcaagctttaaaacttagttctcgctaaaatattt

SEQ ID NO: 556924 - DNA, 120 bp, Artificial Sequence
  ENSG00000169067_13 (sequence is synthesized)
aacaagaacaggctgtataaacttgtttaaaaaaaaaaggtgcgtatgcatttagcagccgtgtcttactagttaagtatctttgttttgtttacttctttgtatggagataatgaatta

SEQ ID NO: 556925 - DNA, 120 bp, Artificial Sequence
  ENSG00000169067_14 (sequence is synthesized)
taaagttcaataatatccatatatacataagcaccagggaaataaaatatattgtgaaatatgctgatgtatctagctatctgaacagctaatgtgaatttctttactcccaaaagtcat

SEQ ID NO: 556926 - DNA, 120 bp, Artificial Sequence
  ENSG00000169067_15 (sequence is synthesized)
cgttgtactaggtacatattttaattgtttcccttactaaataagcataatgagacagccaccattccattaatgtttataaatcatctaaattttcagctcatagtggagttctgctgg

SEQ ID NO: 556927 - DNA, 120 bp, Artificial Sequence
  ENSG00000169067_16 (sequence is synthesized)
tcaaattatattttaatatctttcttactgaaccttctcataccaaaactacagacaatgtctaattcttaagagagatagatattataatatcaaattaatgtcattatggtacaattt

SEQ ID NO: 556928 - DNA, 120 bp, Artificial Sequence
  ENSG00000169067_17 (sequence is synthesized)
gacagaggtaattttatttctatttcttagtgtaatagcacatcttaaataatttctgtagaccaggattacagatacttctcttgtgcaaggatttcactgtgggaaaatatagctgca

SEQ ID NO: 556929 - DNA, 120 bp, Artificial Sequence
  ENSG00000169067_18 (sequence is synthesized)
gcatctttattaattatacattttactaccagtatactaacacagttttatccttggaaagcttttagaataattctactttattatgtccagtaactagcaatacttatttatgcaaag

SEQ ID NO: 556930 - DNA, 120 bp, Artificial Sequence
  ENSG00000169067_19 (sequence is synthesized)
tgtctctgagatactaacatctttgaaaatatcaatgtatgttcctataatgtctaaaatattttagttactccagtgatgatttattaaccaattttaagtaccagtatgtttattcca

SEQ ID NO: 556931 - DNA, 120 bp, Artificial Sequence
  ENSG00000169067_20 (sequence is synthesized)
atctatgcagtgatttctgaatatttggatatcagcattatttgtatttttcagggtaatttctgaaaatttaaaatatttatttggattgcttattcaggcattataaggtactctgga

SEQ ID NO: 556932 - DNA, 120 bp, Artificial Sequence
  ENSG00000169067_21 (sequence is synthesized)
ggaaggaatcacttctctttttttcttagttgggaaacttgtacttatgttataaatctttaaaatggaatcagtaagaattttttgtttaaggtaatacttttcaaataatttgattat

SEQ ID NO: 556933 - DNA, 120 bp, Artificial Sequence
  ENSG00000169067_22 (sequence is synthesized)
tccttattggctttatctgacaacataatctttaaaatgcatgtaaccaaaattaatctccaaaaacactttattttatataacttgctttcagtacattaaaattgcttcatacttgta

SEQ ID NO: 556934 - DNA, 120 bp, Artificial Sequence
  ENSG00000169071_0 (sequence is synthesized)
ccccgcgctcgtcctggcggccggcgggacgccccagcccgcgccaaggaacctccccagccagcccttgccgtggccggagccgagcggcgcatccgggccggagaagaggacgacgac

SEQ ID NO: 556935 - DNA, 120 bp, Artificial Sequence
  ENSG00000169071_1 (sequence is synthesized)
acgacgacgaggtcctcgaagtggacccgtttgcgaagcgccagggagaaggaggagcggacgcatcgtagaaaggggtggtggcgcccgaccccgcgccccggcccgaagctctgaggg

SEQ ID NO: 556936 - DNA, 120 bp, Artificial Sequence
  ENSG00000169071_2 (sequence is synthesized)
cttcccggcccccactgcctgcggcatggcccggggctcggcgctcccgcggcggccgctgctgtgcatcccggccgtctgggcggccgccgcgcttctgctctcagtgtcccggacttc

SEQ ID NO: 556937 - DNA, 120 bp, Artificial Sequence
  ENSG00000169071_3 (sequence is synthesized)
aggtgaagtggaggttctggatccgaacgaccctttaggaccccttgatgggcaggacggcccgattccaactctgaaaggttactttctgaattttctggagccagtaaacaatatcac

SEQ ID NO: 556938 - DNA, 120 bp, Artificial Sequence
  ENSG00000169071_4 (sequence is synthesized)
cattgtccaaggccagacggcaattctgcactgcaaggtggcaggaaacccaccccctaacgtgcggtggctaaagaatgatgccccggtggtgcaggagccgcggcggatcatcatccg

SEQ ID NO: 556939 - DNA, 120 bp, Artificial Sequence
  ENSG00000169071_5 (sequence is synthesized)
gaagacagaatatggttcacgactgcgaatccaggacctggacacgacagacactggctactaccagtgcgtggccaccaacgggatgaagaccattaccgccactggcgtcctgtttgt

SEQ ID NO: 556940 - DNA, 120 bp, Artificial Sequence
  ENSG00000169071_6 (sequence is synthesized)
gcggctgggtccaacgcacagcccaaatcataactttcaggatgattaccacgaggatgggttctgccagccttaccggggaattgcctgtgcacgcttcattggcaaccggaccattta

SEQ ID NO: 556941 - DNA, 120 bp, Artificial Sequence
  ENSG00000169071_7 (sequence is synthesized)
tgtggactcgcttcagatgcagggggagattgaaaaccgaatcacagcggccttcaccatgatcggcacgtctacgcacctgtcggaccagtgctcacagttcgccatcccatccttctg

SEQ ID NO: 556942 - DNA, 120 bp, Artificial Sequence
  ENSG00000169071_8 (sequence is synthesized)
ccacttcgtgtttcctctgtgcgacgcgcgctcccggacacccaagccgcgtgagctgtgccgcgacgagtgcgaggtgctggagagcgacctgtgccgccaggagtacaccatcgcccg

SEQ ID NO: 556943 - DNA, 120 bp, Artificial Sequence
  ENSG00000169071_9 (sequence is synthesized)
ctccaacccgctcatcctcatgcggcttcagctgcccaagtgtgaggcgctgcccatgcctgagagccccgacgctgccaactgcatgcgcattggcatcccagccgagaggctgggccg

SEQ ID NO: 556944 - DNA, 120 bp, Artificial Sequence
  ENSG00000169071_10 (sequence is synthesized)
ctaccatcagtgctataacggctcaggcatggattacagaggaacggcaagcaccaccaagtcaggccaccagtgccagccgtgggccctgcagcacccccacagccaccacctgtccag

SEQ ID NO: 556945 - DNA, 120 bp, Artificial Sequence
  ENSG00000169071_11 (sequence is synthesized)
cacagacttccctgagcttggaggggggcacgcctactgccggaaccccggaggccagatggagggcccctggtgctttacgcagaataaaaacgtacgcatggaactgtgtgacgtacc

SEQ ID NO: 556946 - DNA, 120 bp, Artificial Sequence
  ENSG00000169071_12 (sequence is synthesized)
ctcgtgtagtccccgagacagcagcaagatggggattctgtacatcttggtccccagcatcgcaattccactggtcatcgcttgccttttcttcttggtttgcatgtgccggaataagca

SEQ ID NO: 556947 - DNA, 120 bp, Artificial Sequence
  ENSG00000169071_13 (sequence is synthesized)
gaaggcatctgcgtccacaccgcagcggcgacagctgatggcctcgcccagccaagacatggaaatgcccctcattaaccagcacaaacaggccaaactcaaagagatcagcctgtctgc

SEQ ID NO: 556948 - DNA, 120 bp, Artificial Sequence
  ENSG00000169071_14 (sequence is synthesized)
ggtgaggttcatggaggagctgggagaggaccggtttgggaaagtctacaaaggtcacctgttcggccctgccccgggggagcagacccaggctgtggccatcaaaacgctgaaggacaa

SEQ ID NO: 556949 - DNA, 120 bp, Artificial Sequence
  ENSG00000169071_15 (sequence is synthesized)
agcggaggggcccctgcgggaggagttccggcatgaggctatgctgcgagcacggctgcaacaccccaacgtcgtctgcctgctgggcgtggtgaccaaggaccagcccctgagcatgat

SEQ ID NO: 556950 - DNA, 120 bp, Artificial Sequence
  ENSG00000169071_16 (sequence is synthesized)
cttcagctactgttcgcacggcgacctccacgaattcctggtcatgcgctcgccgcactcggacgtgggcagcaccgatgatgaccgcacggtgaagtccgccctggagccccccgactt

SEQ ID NO: 556951 - DNA, 120 bp, Artificial Sequence
  ENSG00000169071_17 (sequence is synthesized)
ccgcaatgtgctagtgtacgacaagctgaacgtgaagatctcagacttgggcctcttccgagaggtgtatgccgccgattactacaagctgctggggaactcgctgctgcctatccgctg

SEQ ID NO: 556952 - DNA, 120 bp, Artificial Sequence
  ENSG00000169071_18 (sequence is synthesized)
gatggccccagaggccatcatgtacggcaagttctccatcgactcagacatctggtcctacggtgtggtcctgtgggaggtcttcagctacggcctgcagccctactgcgggtactccaa

SEQ ID NO: 556953 - DNA, 120 bp, Artificial Sequence
  ENSG00000169071_19 (sequence is synthesized)
ccaggatgtggtggagatgatccggaaccggcaggtgctgccttgccccgatgactgtcccgcctgggtgtatgccctcatgatcgagtgctggaacgagttccccagccggcggccccg

SEQ ID NO: 556954 - DNA, 120 bp, Artificial Sequence
  ENSG00000169071_20 (sequence is synthesized)
cttcaaggacatccacagccggctccgagcctggggcaacctttccaactacaacagctcggcgcagacctcgggggccagcaacaccacgcagaccagctccctgagcaccagcccagt

SEQ ID NO: 556955 - DNA, 120 bp, Artificial Sequence
  ENSG00000169071_21 (sequence is synthesized)
gagcaatgtgagcaacgcccgctacgtggggcccaagcagaaggccccgcccttcccacagccccagttcatccccatgaagggccagatcagacccatggtgcccccgccgcagctcta

SEQ ID NO: 556956 - DNA, 120 bp, Artificial Sequence
  ENSG00000169071_22 (sequence is synthesized)
cgtccccgtcaacggctaccagccggtgccggcctatggggcctacctgcccaacttctacccggtgcagatcccaatgcagatggccccgcagcaggtgcctcctcagatggtccccaa

SEQ ID NO: 556957 - DNA, 120 bp, Artificial Sequence
  ENSG00000169071_23 (sequence is synthesized)
gcccagctcacaccacagtggcagtggctccaccagcacaggctacgtcaccacggccccctccaacacatccatggcagacagggcagccctgctctcagagggcgctgatgacacaca

SEQ ID NO: 556958 - DNA, 120 bp, Artificial Sequence
  ENSG00000169071_24 (sequence is synthesized)
gaacgccccagaagatggggcccagagcaccgtgcaggaagcagaggaggaggaggaaggctctgtcccagagactgagctgctgggggactgtgacactctgcaggtggacgaggccca

SEQ ID NO: 556959 - DNA, 120 bp, Artificial Sequence
  ENSG00000169071_25 (sequence is synthesized)
agtccagctggaagcttgagtggcaccagggcccggggttcggggatagaagccccgccgagaccccacagggacctcagtcacctttgagaagacaccatactcagcaatcacaagagc

SEQ ID NO: 556960 - DNA, 120 bp, Artificial Sequence
  ENSG00000169071_26 (sequence is synthesized)
ccgccggccagtgggcttgtttgcagactgggtgaggtggagccctgctcctctctgtcctctgacacagagagctgccctgcctaggagcacccaagccaggcagggggtctggcagca

SEQ ID NO: 556961 - DNA, 120 bp, Artificial Sequence
  ENSG00000169071_27 (sequence is synthesized)
cggcgtcctggggagcaggacacatggtcatccccagggctgtatacattgattctggtggtagactggtagtgagcagcaaatgcctttcaagaaaataggtggcagcttcactccatg

SEQ ID NO: 556962 - DNA, 120 bp, Artificial Sequence
  ENSG00000169071_28 (sequence is synthesized)
tcatatatggagtgaatatttcaaaacgttgggaataagggcctgcaaaaggcagcgaggaggcacctcgggtcttgaggttcctgacaaccgatctggtctgttggtttgaggatgaag

SEQ ID NO: 556963 - DNA, 120 bp, Artificial Sequence
  ENSG00000169071_29 (sequence is synthesized)
gggctccatttctgctgcctccctgctgagaatattctccctttagcagccaaagattcgctggaacggaggctgccctctgctgcctgttggggtcggaagacaaggggcttctgaaat

SEQ ID NO: 556964 - DNA, 120 bp, Artificial Sequence
  ENSG00000169071_30 (sequence is synthesized)
gggagttcctgagatacaacaaaatgtgtgccttcaaagaaactgacagctttgtatttggtgaaatggttttaattatactccatgtgtattttgcccactttttttgggaattcaagg

SEQ ID NO: 556965 - DNA, 120 bp, Artificial Sequence
  ENSG00000169071_31 (sequence is synthesized)
gaaagtgtttcttgggtttggaatgttcagaggaagcagtattgtacagaacacggtattgttatttttgttaagaatcatgtacagagcttaaatgtaatttatatgtttttaatatgc

SEQ ID NO: 556966 - DNA, 120 bp, Artificial Sequence
  ENSG00000169071_32 (sequence is synthesized)
cattttcattgaagtattttggtcttaagatgactttagtaatttaactgtttatgttacccacgttgggatccagttggtcttggtttgcttctctctgtaccacgtgcacatgaggtc

SEQ ID NO: 556967 - DNA, 120 bp, Artificial Sequence
  ENSG00000169071_33 (sequence is synthesized)
cattcattttacagcccctgttacacacagacccacaggcagccgtctgtgccccgcacacattgttggtcctatttgtaaatcccacacccggtgtatccaataaagtgaaacaaagca

SEQ ID NO: 556968 - DNA, 120 bp, Artificial Sequence
  ENSG00000169071_34 (sequence is synthesized)
cgggccggattctcggcaccctgcgggggtggaggagggcgggcggggccttcaggcccaggagcgccagagacctatggggttcgcctgaagcccccggaatgtgtgagacacttctta

SEQ ID NO: 556969 - DNA, 120 bp, Artificial Sequence
  ENSG00000169071_35 (sequence is synthesized)
ctagtaaatgggcttcagtatcccccatccctgcactcctgcaggaaggtgagaatcgggacagtcgcaggctgggagacgctctgcttttcctgcgtcctgctgggagctgcgcgctcc

SEQ ID NO: 556970 - DNA, 120 bp, Artificial Sequence
  ENSG00000169071_36 (sequence is synthesized)
caatgttgtaaggatgcgaggcagcgggaggcagtgctggatgacggagacgccaaacgctttgttgtggcataatgtgtctggagttggttcctgccggtgggttcgtggtctcgctga

SEQ ID NO: 556971 - DNA, 120 bp, Artificial Sequence
  ENSG00000169071_37 (sequence is synthesized)
cttcaaggatgaagccaccgactttcgcgttatgccacgggaccccagcctgcactgccatgtgacttcaaccgcatgacagaccctgggcccagagcactcagactcatgaacaaaata

SEQ ID NO: 556972 - DNA, 120 bp, Artificial Sequence
  ENSG00000169071_38 (sequence is synthesized)
gattcagcattcccatatttgaaatgggaagaagtttcatgtccattctggcttcatgtggttggaagaggaagccccatgaatatttttatggatgccccagtgctgttgagtgcctat

SEQ ID NO: 556973 - DNA, 120 bp, Artificial Sequence
  ENSG00000169071_39 (sequence is synthesized)
caacaccaccacgagcttggccacttcacatcaacagcagatttaatttgggatctctaaacactatttgtggttgtgtagacagaaagaatttttctaataaaataaaaattaaatgtg

SEQ ID NO: 556974 - DNA, 120 bp, Artificial Sequence
  ENSG00000169071_40 (sequence is synthesized)
ttttccccaagccgtgttctgctgctctgagggtttttgttatgtaggaatccggggtttaaatcctgccagctcatgtctttgccgaatttgctagaagttggctgggcttcacacagg

SEQ ID NO: 556975 - DNA, 120 bp, Artificial Sequence
  ENSG00000169071_41 (sequence is synthesized)
gcggccgccgcgcttctgctctcagtgtcccggacttcaggagccacacaggacagttgacccaacacttctgccacctgaagaacgacacctgcattcctccatctctgggaccaccaa

SEQ ID NO: 556976 - DNA, 120 bp, Artificial Sequence
  ENSG00000169071_42 (sequence is synthesized)
ccttccttgtgtgtacattatttgcaacaagcaacaagtttataagcactttggtaaaattgcatgtgagggttaaaatattaaagtcagtgcgtcaacttgaaataaatgatgagttat

SEQ ID NO: 556977 - DNA, 120 bp, Artificial Sequence
  ENSG00000169071_43 (sequence is synthesized)
accgatggcaactttcaaataattggatgttagaaatggaactctcaaaagatttcctcctccccacgaatgtaccctttgcctaggatgggaggctgtcacctggagtagcaacccaag

SEQ ID NO: 556978 - DNA, 120 bp, Artificial Sequence
  ENSG00000169071_44 (sequence is synthesized)
gccctcgaccgcaggggtcctagcaagccttgcctttgtgcatctgctctgggagccagagaagttgaaagcggcctcactcgggatttttgaagaggttgtatttcccgacagtcctgg

SEQ ID NO: 556979 - DNA, 120 bp, Artificial Sequence
  ENSG00000169071_45 (sequence is synthesized)
ataaaagacacggcaggcagtctgactgtcaggggagtcccttctgggtctgtatttatatatccctaggaatcctctcctgcgggctcttaaatggcaaagcacccctgagtcctgcaa

SEQ ID NO: 556980 - DNA, 120 bp, Artificial Sequence
  ENSG00000169071_46 (sequence is synthesized)
ttacggccttcccacccccaagctgaaaaacctgattttcttcaggagaagagaaacctcatcccgggagcggaatttgtgaagaaaatgtgagtgggaaacatgaagagtgatgaaatg

SEQ ID NO: 556981 - DNA, 120 bp, Artificial Sequence
  ENSG00000169083_0 (sequence is synthesized)
agcgccccctccgagatcccggggagccagcttgctgggagagcgggacggtccggagcaagcccagaggcagaggaggcgacagagggaaaaagggccgagctagccgctccagtgctg

SEQ ID NO: 556982 - DNA, 120 bp, Artificial Sequence
  ENSG00000169083_1 (sequence is synthesized)
tacaggagccgaagggacgcaccacgccagccccagcccggctccagcgacagccaacgcctcttgcagcgcggcggcttcgaagccgccgcccggagctgccctttcctcttcggtgaa

SEQ ID NO: 556983 - DNA, 120 bp, Artificial Sequence
  ENSG00000169083_2 (sequence is synthesized)
gtttttaaaagctgctaaagactcggaggaagcaaggaaagtgcctggtaggactgacggctgcctttgtcctcctcctctccaccccgcctccccccaccctgccttccccccctcccc

SEQ ID NO: 556984 - DNA, 120 bp, Artificial Sequence
  ENSG00000169083_3 (sequence is synthesized)
cgtcttctctcccgcagctgcctcagtcggctactctcagccaacccccctcaccacccttctccccacccgcccccccgcccccgtcggcccagcgctgccagcccgagtttgcagaga

SEQ ID NO: 556985 - DNA, 120 bp, Artificial Sequence
  ENSG00000169083_4 (sequence is synthesized)
ggtaactccctttggctgcgagcgggcgagctagctgcacattgcaaagaaggctcttaggagccaggcgactggggagcggcttcagcactgcagccacgacccgcctggttaggctgc

SEQ ID NO: 556986 - DNA, 120 bp, Artificial Sequence
  ENSG00000169083_5 (sequence is synthesized)
acgcggagagaaccctctgttttcccccactctctctccacctcctcctgccttccccaccccgagtgcggagccagagatcaaaagatgaaaaggcagtcaggtcttcagtagccaaaa

SEQ ID NO: 556987 - DNA, 120 bp, Artificial Sequence
  ENSG00000169083_6 (sequence is synthesized)
aacaaaacaaacaaaaacaaaaaagccgaaataaaagaaaaagataataactcagttcttatttgcacctacttcagtggacactgaatttggaaggtggaggattttgtttttttcttt

SEQ ID NO: 556988 - DNA, 120 bp, Artificial Sequence
  ENSG00000169083_7 (sequence is synthesized)
taagatctgggcatcttttgaatctacccttcaagtattaagagacagactgtgagcctagcagggcagatcttgtccaccgtgtgtcttcttctgcacgagactttgaggctgtcagag

SEQ ID NO: 556989 - DNA, 120 bp, Artificial Sequence
  ENSG00000169083_8 (sequence is synthesized)
cgctttttgcgtggttgctcccgcaagtttccttctctggagcttcccgcaggtgggcagctagctgcagcgactaccgcatcatcacagcctgttgaactcttctgagcaagagaaggg

SEQ ID NO: 556990 - DNA, 120 bp, Artificial Sequence
  ENSG00000169083_9 (sequence is synthesized)
gaggcggggtaagggaagtaggtggaagattcagccaagctcaaggatggaagtgcagttagggctgggaagggtctaccctcggccgccgtccaagacctaccgaggagctttccagaa

SEQ ID NO: 556991 - DNA, 120 bp, Artificial Sequence
  ENSG00000169083_10 (sequence is synthesized)
tctgttccagagcgtgcgcgaagtgatccagaacccgggccccaggcacccagaggccgcgagcgcagcacctcccggcgccagtttgctgctgctgcagcagcagcagcagcagcagca

SEQ ID NO: 556992 - DNA, 120 bp, Artificial Sequence
  ENSG00000169083_11 (sequence is synthesized)
agcagcagcagcagcagcagcagcaagagactagccccaggcagcagcagcagcagcagggtgaggatggttctccccaagcccatcgtagaggccccacaggctacctggtcctggatg

SEQ ID NO: 556993 - DNA, 120 bp, Artificial Sequence
  ENSG00000169083_12 (sequence is synthesized)
aggctacctggtcctggatgaggaacagcaaccttcacagccgcagtcggccctggagtgccaccccgagagaggttgcgtcccagagcctggagccgccgtggccgccagcaaggggct

SEQ ID NO: 556994 - DNA, 120 bp, Artificial Sequence
  ENSG00000169083_13 (sequence is synthesized)
gccgcagcagctgccagcacctccggacgaggatgactcagctgccccatccacgttgtccctgctgggccccactttccccggcttaagcagctgctccgctgaccttaaagacatcct

SEQ ID NO: 556995 - DNA, 120 bp, Artificial Sequence
  ENSG00000169083_14 (sequence is synthesized)
gagcgaggccagcaccatgcaactccttcagcaacagcagcaggaagcagtatccgaaggcagcagcagcgggagagcgagggaggcctcgggggctcccacttcctccaaggacaatta

SEQ ID NO: 556996 - DNA, 120 bp, Artificial Sequence
  ENSG00000169083_15 (sequence is synthesized)
cttagggggcacttcgaccatttctgacaacgccaaggagttgtgtaaggcagtgtcggtgtccatgggcctgggtgtggaggcgttggagcatctgagtccaggggaacagcttcgggg

SEQ ID NO: 556997 - DNA, 120 bp, Artificial Sequence
  ENSG00000169083_16 (sequence is synthesized)
ggattgcatgtacgccccacttttgggagttccacccgctgtgcgtcccactccttgtgccccattggccgaatgcaaaggttctctgctagacgacagcgcaggcaagagcactgaaga

SEQ ID NO: 556998 - DNA, 120 bp, Artificial Sequence
  ENSG00000169083_17 (sequence is synthesized)
tactgctgagtattcccctttcaagggaggttacaccaaagggctagaaggcgagagcctaggctgctctggcagcgctgcagcagggagctccgggacacttgaactgccgtctaccct

SEQ ID NO: 556999 - DNA, 120 bp, Artificial Sequence
  ENSG00000169083_18 (sequence is synthesized)
gtctctctacaagtccggagcactggacgaggcagctgcgtaccagagtcgcgactactacaactttccactggctctggccggaccgccgccccctccgccgcctccccatccccacgc

SEQ ID NO: 557000 - DNA, 120 bp, Artificial Sequence
  ENSG00000169083_19 (sequence is synthesized)
tcgcatcaagctggagaacccgctggactacggcagcgcctgggcggctgcggcggcgcagtgccgctatggggacctggcgagcctgcatggcgcgggtgcagcgggacccggttctgg

SEQ ID NO: 557001 - DNA, 120 bp, Artificial Sequence
  ENSG00000169083_20 (sequence is synthesized)
gtcaccctcagccgccgcttcctcatcctggcacactctcttcacagccgaagaaggccagttgtatggaccgtgtggtggtggtgggggtggtggcggcggcggcggcggcggcggcgg

SEQ ID NO: 557002 - DNA, 120 bp, Artificial Sequence
  ENSG00000169083_21 (sequence is synthesized)
cggcggcggcggcggcggcggcggcgaggcgggagctgtagccccctacggctacactcggccccctcaggggctggcgggccaggaaagcgacttcaccgcacctgatgtgtggtaccc

SEQ ID NO: 557003 - DNA, 120 bp, Artificial Sequence
  ENSG00000169083_22 (sequence is synthesized)
tggcggcatggtgagcagagtgccctatcccagtcccacttgtgtcaaaagcgaaatgggcccctggatggatagctactccggaccttacggggacatgcgtttggagactgccaggga

SEQ ID NO: 557004 - DNA, 120 bp, Artificial Sequence
  ENSG00000169083_23 (sequence is synthesized)
ccatgttttgcccattgactattactttccaccccagaagacctgcctgatctgtggagatgaagcttctgggtgtcactatggagctctcacatgtggaagctgcaaggtcttcttcaa

SEQ ID NO: 557005 - DNA, 120 bp, Artificial Sequence
  ENSG00000169083_24 (sequence is synthesized)
aagagccgctgaagggaaacagaagtacctgtgcgccagcagaaatgattgcactattgataaattccgaaggaaaaattgtccatcttgtcgtcttcggaaatgttatgaagcagggat

SEQ ID NO: 557006 - DNA, 120 bp, Artificial Sequence
  ENSG00000169083_25 (sequence is synthesized)
gactctgggagcccggaagctgaagaaacttggtaatctgaaactacaggaggaaggagaggcttccagcaccaccagccccactgaggagacaacccagaagctgacagtgtcacacat

SEQ ID NO: 557007 - DNA, 120 bp, Artificial Sequence
  ENSG00000169083_26 (sequence is synthesized)
tgaaggctatgaatgtcagcccatctttctgaatgtcctggaagccattgagccaggtgtagtgtgtgctggacacgacaacaaccagcccgactcctttgcagccttgctctctagcct

SEQ ID NO: 557008 - DNA, 120 bp, Artificial Sequence
  ENSG00000169083_27 (sequence is synthesized)
caatgaactgggagagagacagcttgtacacgtggtcaagtgggccaaggccttgcctggcttccgcaacttacacgtggacgaccagatggctgtcattcagtactcctggatggggct

SEQ ID NO: 557009 - DNA, 120 bp, Artificial Sequence
  ENSG00000169083_28 (sequence is synthesized)
catggtgtttgccatgggctggcgatccttcaccaatgtcaactccaggatgctctacttcgcccctgatctggttttcaatgagtaccgcatgcacaagtcccggatgtacagccagtg

SEQ ID NO: 557010 - DNA, 120 bp, Artificial Sequence
  ENSG00000169083_29 (sequence is synthesized)
tgtccgaatgaggcacctctctcaagagtttggatggctccaaatcaccccccaggaattcctgtgcatgaaagcactgctactcttcagcattattccagtggatgggctgaaaaatca

SEQ ID NO: 557011 - DNA, 120 bp, Artificial Sequence
  ENSG00000169083_30 (sequence is synthesized)
aaaattctttgatgaacttcgaatgaactacatcaaggaactcgatcgtatcattgcatgcaaaagaaaaaatcccacatcctgctcaagacgcttctaccagctcaccaagctcctgga

SEQ ID NO: 557012 - DNA, 120 bp, Artificial Sequence
  ENSG00000169083_31 (sequence is synthesized)
ctccgtgcagcctattgcgagagagctgcatcagttcacttttgacctgctaatcaagtcacacatggtgagcgtggactttccggaaatgatggcagagatcatctctgtgcaagtgcc

SEQ ID NO: 557013 - DNA, 120 bp, Artificial Sequence
  ENSG00000169083_32 (sequence is synthesized)
caagatcctttctgggaaagtcaagcccatctatttccacacccagtgaagcattggaaaccctatttccccaccccagctcatgccccctttcagatgtcttctgcctgttataactct

SEQ ID NO: 557014 - DNA, 120 bp, Artificial Sequence
  ENSG00000169083_33 (sequence is synthesized)
gcactactcctctgcagtgccttggggaatttcctctattgatgtacagtctgtcatgaacatgttcctgaattctatttgctgggctttttttttctctttctctcctttctttttctt

SEQ ID NO: 557015 - DNA, 120 bp, Artificial Sequence
  ENSG00000169083_34 (sequence is synthesized)
cttccctccctatctaaccctcccatggcaccttcagactttgcttcccattgtggctcctatctgtgttttgaatggtgttgtatgcctttaaatctgtgatgatcctcatatggccca

SEQ ID NO: 557016 - DNA, 120 bp, Artificial Sequence
  ENSG00000169083_35 (sequence is synthesized)
gtgtcaagttgtgcttgtttacagcactactctgtgccagccacacaaacgtttacttatcttatgccacgggaagtttagagagctaagattatctggggaaatcaaaacaaaaacaag

SEQ ID NO: 557017 - DNA, 89 bp, Artificial Sequence
  ENSG00000169083_36 (sequence is synthesized)
caaaaaaccttgctagtgttttttcgtacatacatacacacatacatacaaacatatagaaatccccaaagaggccaatagtgacgaga

SEQ ID NO: 557018 - DNA, 120 bp, Artificial Sequence
  ENSG00000169083_37 (sequence is synthesized)
aaacatatagaaatccccaaagaggccaatagtgacgagaaggtgaaaattgcaggcccatggggagttactgattttttcatctcctccctccacgggagactttattttctgccaatg

SEQ ID NO: 557019 - DNA, 120 bp, Artificial Sequence
  ENSG00000169083_38 (sequence is synthesized)
gctattgccattagagggcagagtgaccccagagctgagttgggcaggggggtggacagagaggagaggacaaggagggcaatggagcatcagtacctgcccacagccttggtccctggg

SEQ ID NO: 557020 - DNA, 120 bp, Artificial Sequence
  ENSG00000169083_39 (sequence is synthesized)
ggctagactgctcaactgtggagcaattcattatactgaaaatgtgcttgttgttgaaaatttgtctgcatgttaatgcctcacccccaaacccttttctctctcactctctgcctccaa

SEQ ID NO: 557021 - DNA, 120 bp, Artificial Sequence
  ENSG00000169083_40 (sequence is synthesized)
cttcagattgactttcaatagtttttctaagacctttgaactgaatgttctcttcagccaaaacttggcgacttccacagaaaagtctgaccactgagaagaaggagagcagagatttaa

SEQ ID NO: 557022 - DNA, 120 bp, Artificial Sequence
  ENSG00000169083_41 (sequence is synthesized)
ccctttgtaaggccccatttggatccaggtctgctttctcatgtgtgagtcagggaggagctggagccagaggagaagaaaatgatagcttggctgttctcctgcttaggacactgactg

SEQ ID NO: 557023 - DNA, 120 bp, Artificial Sequence
  ENSG00000169083_42 (sequence is synthesized)
aatagttaaactctcactgccactaccttttccccacctttaaaagacctgaatgaagttttctgccaaactccgtgaagccacaagcaccttatgtcctcccttcagtgttttgtgggc

SEQ ID NO: 557024 - DNA, 120 bp, Artificial Sequence
  ENSG00000169083_43 (sequence is synthesized)
ctgaatttcatcacactgcatttcagccatggtcatcaagcctgtttgcttcttttgggcatgttcacagattctctgttaagagcccccaccaccaagaaggttagcaggccaacagct

SEQ ID NO: 557025 - DNA, 120 bp, Artificial Sequence
  ENSG00000169083_44 (sequence is synthesized)
gctgggcgtcttgcccttgtcccccagagatgataccctcccagcaagtggagaagttctcacttccttctttagagcagctaaaggggctacccagatcagggttgaagagaaaactca

SEQ ID NO: 557026 - DNA, 120 bp, Artificial Sequence
  ENSG00000169083_45 (sequence is synthesized)
attaccagggtgggaagaatgaaggcactagaaccagaaaccctgcaaatgctcttcttgtcacccagcatatccacctgcagaagtcatgagaagagagaaggaacaaagaggagactc

SEQ ID NO: 557027 - DNA, 120 bp, Artificial Sequence
  ENSG00000169083_46 (sequence is synthesized)
tgactactgaattaaaatcttcagcggcaaagcctaaagccagatggacaccatctggtgagtttactcatcatcctcctctgctgctgattctgggctctgacattgcccatactcact

SEQ ID NO: 557028 - DNA, 120 bp, Artificial Sequence
  ENSG00000169083_47 (sequence is synthesized)
cagattccccacctttgttgctgcctcttagtcagagggaggccaaaccattgagactttctacagaaccatggcttctttcggaaaggtctggttggtgtggctccaatactttgccac

SEQ ID NO: 557029 - DNA, 120 bp, Artificial Sequence
  ENSG00000169083_48 (sequence is synthesized)
ccatgaactcagggtgtgccctgggacactggttttatatagtcttttggcacacctgtgttctgttgacttcgttcttcaagcccaagtgcaagggaaaatgtccacctactttctcat

SEQ ID NO: 557030 - DNA, 120 bp, Artificial Sequence
  ENSG00000169083_49 (sequence is synthesized)
cttggcctctgcctccttacttagctcttaatctcatctgttgaactcaagaaatcaagggccagtcatcaagctgcccattttaattgattcactctgtttgttgagaggatagtttct

SEQ ID NO: 557031 - DNA, 120 bp, Artificial Sequence
  ENSG00000169083_50 (sequence is synthesized)
gagtgacatgatatgatccacaagggtttccttccctgatttctgcattgatattaatagccaaacgaacttcaaaacagctttaaataacaagggagaggggaacctaagatgagtaat

SEQ ID NO: 557032 - DNA, 120 bp, Artificial Sequence
  ENSG00000169083_51 (sequence is synthesized)
atgccaatccaagactgctggagaaaactaaagctgacaggttccctttttggggtgggatagacatgttctggttttctttattattacacaatctggctcatgtacaggatcactttt

SEQ ID NO: 557033 - DNA, 120 bp, Artificial Sequence
  ENSG00000169083_52 (sequence is synthesized)
agctgttttaaacagaaaaaaatatccaccactcttttcagttacactaggttacattttaataggtcctttacatctgttttggaatgattttcatcttttgtgatacacagattgaat

SEQ ID NO: 557034 - DNA, 120 bp, Artificial Sequence
  ENSG00000169083_53 (sequence is synthesized)
tatatcattttcatatctctccttgtaaatactagaagctctcctttacatttctctatcaaatttttcatctttatgggtttcccaattgtgactcttgtcttcatgaatatatgtttt

SEQ ID NO: 557035 - DNA, 120 bp, Artificial Sequence
  ENSG00000169083_54 (sequence is synthesized)
tcatttgcaaaagccaaaaatcagtgaaacagcagtgtaattaaaagcaacaactggattactccaaatttccaaatgacaaaactagggaaaaatagcctacacaagcctttaggccta

SEQ ID NO: 557036 - DNA, 120 bp, Artificial Sequence
  ENSG00000169083_55 (sequence is synthesized)
ctctttctgtgcttgggtttgagtgaacaaaggagattttagcttggctctgttctcccatggatgaaaggaggaggattttttttttcttttggccattgatgttctagccaatgtaat

SEQ ID NO: 557037 - DNA, 120 bp, Artificial Sequence
  ENSG00000169083_56 (sequence is synthesized)
tgacagaagtctcattttgcatgcgctctgctctacaaacagagttggtatggttggtatactgtactcacctgtgagggactggccactcagacccacttagctggtgagctagaagat

SEQ ID NO: 557038 - DNA, 120 bp, Artificial Sequence
  ENSG00000169083_57 (sequence is synthesized)
gaggatcactcactggaaaagtcacaaggaccatctccaaacaagttggcagtgctcgatgtggacgaagagtgaggaagagaaaaagaaggagcaccagggagaaggctccgtctgtgc

SEQ ID NO: 557039 - DNA, 120 bp, Artificial Sequence
  ENSG00000169083_58 (sequence is synthesized)
tgggcagcagacagctgccaggatcacgaactctgtagtcaaagaaaagagtcgtgtggcagtttcagctctcgttcattgggcagctcgcctaggcccagcctctgagctgacatggga

SEQ ID NO: 557040 - DNA, 120 bp, Artificial Sequence
  ENSG00000169083_59 (sequence is synthesized)
gttgttggattctttgtttcatagctttttctatgccataggcaatattgttgttcttggaaagtttattatttttttaactcccttactctgagaaagggatattttgaaggactgtca

SEQ ID NO: 557041 - DNA, 120 bp, Artificial Sequence
  ENSG00000169083_60 (sequence is synthesized)
tatatctttgaaaaaagaaaatctgtaatacatatatttttatgtatgttcactggcactaaaaaatatagagagcttcattctgtcctttgggtagttgctgaggtaattgtccaggtt

SEQ ID NO: 557042 - DNA, 120 bp, Artificial Sequence
  ENSG00000169083_61 (sequence is synthesized)
gaaaaataatgtgctgatgctagagtccctctctgtccatactctacttctaaatacatataggcatacatagcaagttttatttgacttgtactttaagagaaaatatgtccaccatcc

SEQ ID NO: 557043 - DNA, 120 bp, Artificial Sequence
  ENSG00000169083_62 (sequence is synthesized)
acatgatgcacaaatgagctaacattgagcttcaagtagcttctaagtgtttgtttcattaggcacagcacagatgtggcctttccccccttctctcccttgatatctggcagggcataa

SEQ ID NO: 557044 - DNA, 120 bp, Artificial Sequence
  ENSG00000169083_63 (sequence is synthesized)
aggcccaggccacttcctctgccccttcccagccctgcaccaaagctgcatttcaggagactctctccagacagcccagtaactacccgagcatggcccctgcatagccctggaaaaata

SEQ ID NO: 557045 - DNA, 120 bp, Artificial Sequence
  ENSG00000169083_64 (sequence is synthesized)
agaggctgactgtctacgaattatcttgtgccagttgcccaggtgagagggcactgggccaagggagtggttttcatgtttgacccactacaaggggtcatgggaatcaggaatgccaaa

SEQ ID NO: 557046 - DNA, 120 bp, Artificial Sequence
  ENSG00000169083_65 (sequence is synthesized)
gcaccagatcaaatccaaaacttaaagtcaaaataagccattcagcatgttcagtttcttggaaaaggaagtttctacccctgatgcctttgtaggcagatctgttctcaccattaatct

SEQ ID NO: 557047 - DNA, 120 bp, Artificial Sequence
  ENSG00000169083_66 (sequence is synthesized)
ttttgaaaatcttttaaagcagtttttaaaaagagagatgaaagcatcacattatataaccaaagattacattgtacctgctaagataccaaaattcataagggcagggggggagcaagc

SEQ ID NO: 557048 - DNA, 120 bp, Artificial Sequence
  ENSG00000169083_67 (sequence is synthesized)
attagtgcctctttgataagctgtccaaagacagactaaaggactctgctggtgactgacttataagagctttgtgggtttttttttccctaataatatacatgtttagaagaattgaaa

SEQ ID NO: 557049 - DNA, 120 bp, Artificial Sequence
  ENSG00000169083_68 (sequence is synthesized)
ataatttcgggaaaatgggattatgggtccttcactaagtgattttataagcagaactggctttccttttctctagtagttgctgagcaaattgttgaagctccatcattgcatggttgg

SEQ ID NO: 557050 - DNA, 120 bp, Artificial Sequence
  ENSG00000169083_69 (sequence is synthesized)
aaatggagctgttcttagccactgtgtttgctagtgcccatgttagcttatctgaagatgtgaaacccttgctgataagggagcatttaaagtactagattttgcactagagggacagca

SEQ ID NO: 557051 - DNA, 120 bp, Artificial Sequence
  ENSG00000169083_70 (sequence is synthesized)
ggcagaaatccttatttctgcccactttggatggcacaaaaagttatctgcagttgaaggcagaaagttgaaatacattgtaaatgaatatttgtatccatgtttcaaaattgaaatata

SEQ ID NO: 557052 - DNA, 120 bp, Artificial Sequence
  ENSG00000169083_71 (sequence is synthesized)
tatatatatatagtgtgtgtgtgtgttctgatagctttaactttctctgcatctttatatttggttccagatcacacctgatgccatgtacttgtgagagaggatgcagttttgttttgg

SEQ ID NO: 557053 - DNA, 120 bp, Artificial Sequence
  ENSG00000169083_72 (sequence is synthesized)
agagaggatgcagttttgttttggaagctctctcagaacaaacaagacacctggattgatcagttaactaaaagttttctcccctattgggtttgacccacaggtcctgtgaaggagcag

SEQ ID NO: 557054 - DNA, 120 bp, Artificial Sequence
  ENSG00000169083_73 (sequence is synthesized)
agggataaaaagagtagaggacatgatacattgtactttactagttcaagacagatgaatgtggaaagcataaaaactcaatggaactgactgagatttaccacagggaaggcccaaact

SEQ ID NO: 557055 - DNA, 120 bp, Artificial Sequence
  ENSG00000169083_74 (sequence is synthesized)
tggggccaaaagcctacccaagtgattgaccagtggccccctaatgggacctgagctgttggaagaagagaactgttccttggtcttcaccatccttgtgagagaagggcagtttcctgc

SEQ ID NO: 557056 - DNA, 120 bp, Artificial Sequence
  ENSG00000169083_75 (sequence is synthesized)
attggaacctggagcaagcgctctatctttcacacaaattccctcacctgagattgaggtgctcttgttactgggtgtctgtgtgctgtaattctggttttggatatgttctgtaaagat

SEQ ID NO: 557057 - DNA, 120 bp, Artificial Sequence
  ENSG00000169083_76 (sequence is synthesized)
tttgacaaatgaaaatgtgtttttctctgttaaaacttgtcagagtactagaagttgtatctctgtaggtgcaggtccatttctgcccacaggtagggtgtttttctttgattaagagat

SEQ ID NO: 557058 - DNA, 120 bp, Artificial Sequence
  ENSG00000169083_77 (sequence is synthesized)
tgacacttctgttgcctaggacctcccaactcaaccatttctaggtgaaggcagaaaaatccacattagttactcctcttcagacatttcagctgagataacaaatcttttggaattttt

SEQ ID NO: 557059 - DNA, 120 bp, Artificial Sequence
  ENSG00000169083_78 (sequence is synthesized)
tcacccatagaaagagtggtagatatttgaatttagcaggtggagtttcatagtaaaaacagcttttgactcagctttgatttatcctcatttgatttggccagaaagtaggtaatatgc

SEQ ID NO: 557060 - DNA, 120 bp, Artificial Sequence
  ENSG00000169083_79 (sequence is synthesized)
attgattggcttctgattccaattcagtatagcaaggtgctaggttttttcctttccccacctgtctcttagcctggggaattaaatgagaagccttagaatgggtggcccttgtgacct

SEQ ID NO: 557061 - DNA, 120 bp, Artificial Sequence
  ENSG00000169083_80 (sequence is synthesized)
gaaacacttcccacataagctacttaacaagattgtcatggagctgcagattccattgcccaccaaagactagaacacacacatatccatacaccaaaggaaagacaattctgaaatgct

SEQ ID NO: 557062 - DNA, 120 bp, Artificial Sequence
  ENSG00000169083_81 (sequence is synthesized)
gtttctctggtggttccctctctggctgctgcctcacagtatgggaacctgtactctgcagaggtgacaggccagatttgcattatctcacaaccttagcccttggtgctaactgtccta

SEQ ID NO: 557063 - DNA, 120 bp, Artificial Sequence
  ENSG00000169083_82 (sequence is synthesized)
cagtgaagtgcctggggggttgtcctatcccataagccacttggatgctgacagcagccaccatcagaatgacccacgcaaaaaaaagaaaaaaaaaattaaaaagtcccctcacaaccc

SEQ ID NO: 557064 - DNA, 120 bp, Artificial Sequence
  ENSG00000169083_83 (sequence is synthesized)
agtgacacctttctgctttcctctagactggaacattgattagggagtgcctcagacatgacattcttgtgctgtccttggaattaatctggcagcaggagggagcagactatgtaaaca

SEQ ID NO: 557065 - DNA, 120 bp, Artificial Sequence
  ENSG00000169083_84 (sequence is synthesized)
gagataaaaattaattttcaatattgaaggaaaaaagaaataagaagagagagagaaagaaagcatcacacaaagattttcttaaaagaaacaattttgcttgaaatctctttagatggg

SEQ ID NO: 557066 - DNA, 120 bp, Artificial Sequence
  ENSG00000169083_85 (sequence is synthesized)
gctcatttctcacggtggcacttggcctccactgggcagcaggaccagctccaagcgctagtgttctgttctctttttgtaatcttggaatcttttgttgctctaaatacaattaaaaat

SEQ ID NO: 557067 - DNA, 120 bp, Artificial Sequence
  ENSG00000169083_86 (sequence is synthesized)
ggcagaaacttgtttgttggactacatgtgtgactttgggtctgtctctgcctctgctttcagaaatgtcatccattgtgtaaaatattggcttactggtctgccagctaaaacttggcc

SEQ ID NO: 557068 - DNA, 120 bp, Artificial Sequence
  ENSG00000169083_87 (sequence is synthesized)
acatcccctgttatggctgcaggatcgagttattgttaacaaagagacccaagaaaagctgctaatgtcctcttatcattgttgttaatttgttaaaacataaagaaatctaaaatttca

SEQ ID NO: 557069 - DNA, 120 bp, Artificial Sequence
  ENSG00000169083_88 (sequence is synthesized)
tttcagaatgaacaaattaaaagaatcataatcagacactaaccccaagccatactgcatggcagcaccaatgggactgacagaaaacaacagaaataggaagaaatcctacagagaaac

SEQ ID NO: 557070 - DNA, 120 bp, Artificial Sequence
  ENSG00000169083_89 (sequence is synthesized)
aaacttgaaagctgtctcatggcctttgaatcatacttaagttttatgatggaaggatacgactatgaagaaagacacagagcaacatcagacagtcaagaatttcagagccagctggca

SEQ ID NO: 557071 - DNA, 120 bp, Artificial Sequence
  ENSG00000169083_90 (sequence is synthesized)
ctctagagggctctagtggatagtctggagaaacctggcgtctgaggcttaggagcttaggtttttgctcctcaacacagactttgacgttggggttgggggctactctcttgattgctg

SEQ ID NO: 557072 - DNA, 120 bp, Artificial Sequence
  ENSG00000169083_91 (sequence is synthesized)
actccctccagcgggaccaatagtgttttcctacctcacagggatgttgtgaggacgggctgtagaagtaatagtggttaccattcatgtagttgtgagtatcatgattattgtttcctg

SEQ ID NO: 557073 - DNA, 120 bp, Artificial Sequence
  ENSG00000169083_92 (sequence is synthesized)
taatgtggcttggcattggcaaagtgctttttgattgttcttgatcacatatgatgggggccaggcactgactcaggcggatgcagtgaagctctggctcagtcgcttgcttttcgtggt

SEQ ID NO: 557074 - DNA, 120 bp, Artificial Sequence
  ENSG00000169083_93 (sequence is synthesized)
gtgctgccaggaagaaactttgctgatgggactcaaggtgtcaccttggacaagaagcaactgtgtctgtctgaggttcctgtggccatctttatttgtgtattaggcaattcgtatttc

SEQ ID NO: 557075 - DNA, 120 bp, Artificial Sequence
  ENSG00000169083_94 (sequence is synthesized)
ccccttaggttctagccttctggatcccagccagtgacctagatcttagcctcaggccctgtcactgagctgaaggtagtagctgatccacagaagttcagtaaacaaggaccagatttc

SEQ ID NO: 557076 - DNA, 120 bp, Artificial Sequence
  ENSG00000169083_95 (sequence is synthesized)
tgcttctccaggagaagaagccagccaacccctctcttcaaacacactgagagactacagtccgactttccctcttacatctagccttactgtagccacactccttgattgctctctcac

SEQ ID NO: 557077 - DNA, 120 bp, Artificial Sequence
  ENSG00000169083_96 (sequence is synthesized)
atcacatgcttctcttcatcagttgtaagcctctcattcttctcccaagccagactcaaatattgtattgatgtcaaagaagaatcacttagagtttggaatatcttgttctctctctgc

SEQ ID NO: 557078 - DNA, 120 bp, Artificial Sequence
  ENSG00000169083_97 (sequence is synthesized)
tccatagcttccatattgacaccagtttctttctagtggagaagtggagtctgtgaagccagggaaacacacatgtgagagtcagaaggactctccctgacttgcctggggcctgtcttt

SEQ ID NO: 557079 - DNA, 120 bp, Artificial Sequence
  ENSG00000169083_98 (sequence is synthesized)
cacacacacacacacacacacgctctctctctctctccccccccaacacacacacactctctctctctctcacacacacacacatacacacacacttctttctctttcccctgactcagc

SEQ ID NO: 557080 - DNA, 120 bp, Artificial Sequence
  ENSG00000169083_99 (sequence is synthesized)
tacacacacacttctttctctttcccctgactcagcaacattctggagaaaagccaaggaaggacttcaggaggggagtttcccccttctcagggcagaattttaatctccagaccaaca

SEQ ID NO: 557081 - DNA, 120 bp, Artificial Sequence
  ENSG00000169083_100 (sequence is synthesized)
agaagttccctaatgtggattgaaaggctaatgaggtttatttttaactactttctatttgtttgaatgttgcatatttctactagtgaaattttcccttaataaagccattaatacacc

SEQ ID NO: 557082 - DNA, 120 bp, Artificial Sequence
  ENSG00000169083_101 (sequence is synthesized)
catccacaacagagatcagcctttctttgtagatgattcattcctggctgcatttgaaaaccacatattgttaattgcttgacgaatttaaatcccttgactacttttcatttcagaaaa

SEQ ID NO: 557083 - DNA, 120 bp, Artificial Sequence
  ENSG00000169083_102 (sequence is synthesized)
gcctatgcaaatgcctgcctgaagctgctggaggctggctttgtaccggactttgtacagggaaccagggaaacgaatgcagagtgctcctgacattgcctgtcactttttcccatgata

SEQ ID NO: 557084 - DNA, 120 bp, Artificial Sequence
  ENSG00000169084_0 (sequence is synthesized)
gcggccggggcagccatgtcgccattgtctgcggcgcgggcggccctgcgggtctacgcggtaggcgccgcggtgatcctggcgcagctgctgcggcgctgccgcgggggcttcctggag

SEQ ID NO: 557085 - DNA, 120 bp, Artificial Sequence
  ENSG00000169084_1 (sequence is synthesized)
cagctgctgcggcgctgccgcgggggcttcctggagccagttttccccccacgacctgaccgtgtcgctatagtgacgggagggacagatggcattggctattctacagcgaagcatctg

SEQ ID NO: 557086 - DNA, 120 bp, Artificial Sequence
  ENSG00000169084_2 (sequence is synthesized)
gcgagacttggcatgcatgttatcatagctggaaataatgacagcaaagccaaacaagttgtaagcaaaataaaagaagaaaccttgaacgacaaagtggaatttttatactgtgacttg

SEQ ID NO: 557087 - DNA, 120 bp, Artificial Sequence
  ENSG00000169084_3 (sequence is synthesized)
gcttccatgacttccatccggcagtttgtgcagaagttcaagatgaagaagattcctctccatgtcctgatcaacaatgctggggtgatgatggtccctcagaggaaaaccagagatgga

SEQ ID NO: 557088 - DNA, 120 bp, Artificial Sequence
  ENSG00000169084_4 (sequence is synthesized)
ttcgaagaacatttcggcctgaactacctagggcacttcctgctgaccaaccttctcttggatacgctgaaagagtctgggtcccctggccacagtgcgagggtggtcaccgtctcctct

SEQ ID NO: 557089 - DNA, 120 bp, Artificial Sequence
  ENSG00000169084_5 (sequence is synthesized)
gccacccattacgtcgctgagctgaacatggatgaccttcagagcagtgcctgctactcaccccacgcagcctacgcccagagcaagctggcccttgtcctgttcacctaccacctccag

SEQ ID NO: 557090 - DNA, 120 bp, Artificial Sequence
  ENSG00000169084_6 (sequence is synthesized)
cggctgctggcggctgagggaagccacgtgaccgccaacgtggtggaccccggggtggtcaacacggacgtctacaagcacgtgttctgggccacccgtctggcgaagaagcttctcggc

SEQ ID NO: 557091 - DNA, 120 bp, Artificial Sequence
  ENSG00000169084_7 (sequence is synthesized)
tggttgcttttcaagacccccgatgaaggagcgtggacttccatctacgcagcagtcaccccagagctggaaggagttggtggccattacctatacaacgagaaagagaccaagtccctc

SEQ ID NO: 557092 - DNA, 120 bp, Artificial Sequence
  ENSG00000169084_8 (sequence is synthesized)
cacgtcacctacaaccagaaactgcagcagcagctgtggtctaagagttgtgagatgactggggtccttgatgtgaccctgtgatatcctgtctcaggatagctgctgccccaagaaaca

SEQ ID NO: 557093 - DNA, 120 bp, Artificial Sequence
  ENSG00000169084_9 (sequence is synthesized)
cattgcacctgccaatagcttgtgggtctgtgaagactgcggtgtttgagtttctcacacccacctgcccacagggctctgtcctctagttttgagacagctgcctcaacctctgcagaa

SEQ ID NO: 557094 - DNA, 120 bp, Artificial Sequence
  ENSG00000169084_10 (sequence is synthesized)
aactttgtgattccaaagtgcccagttgtcacaggtgccataaataattacattttccaacataaatgtgccattttccttgccgcgttaatacaactgagtacaaaagttccaagagag

SEQ ID NO: 557095 - DNA, 120 bp, Artificial Sequence
  ENSG00000169084_11 (sequence is synthesized)
atgctctcttttcaggggctgcaatgtcctctctgagacctagtggtggatgaggtctcctgtttgattttgttcctgcactcactcatttttccagagacccagctgtgattcacaggt

SEQ ID NO: 557096 - DNA, 120 bp, Artificial Sequence
  ENSG00000169084_12 (sequence is synthesized)
gtcagacatggggaggtgtgagccttgcttgctacagcctgtaggatgagtttgacgtggccagcagcaccatctggtcaacctcattccagaatggcacagtcacaagtgaagcatgcc

SEQ ID NO: 557097 - DNA, 120 bp, Artificial Sequence
  ENSG00000169084_13 (sequence is synthesized)
actgtcaaatccgagaatgtaaaccgctgaacagctatggatcaaatggtagccctcaaaagatatgttcatgccctaaccctcagaacctataaatattactttatttggaaaagaatc

SEQ ID NO: 557098 - DNA, 120 bp, Artificial Sequence
  ENSG00000169084_14 (sequence is synthesized)
tttgcagatagaattaagaattttgagatgggtcattatggatcatcccagtgaacctaatgccatcacgagggttcttatcagagacaggtagagggagatttgagtacagaagacaag

SEQ ID NO: 557099 - DNA, 120 bp, Artificial Sequence
  ENSG00000169084_15 (sequence is synthesized)
atattcgtgtgatgatgcagacagagactggagtgatgccaccacaagccaagcaatgcctggagccaccaggagctgggacaggcaggaaggattctcccttatacccctcagagcaat

SEQ ID NO: 557100 - DNA, 120 bp, Artificial Sequence
  ENSG00000169084_16 (sequence is synthesized)
cttggcccctctgacgtcttgactttagacttctggtccccagaacggagagagaataaatctttcttgttttaaggctccaacaaattggtagtcacttgttacagcaaccacaggaaa

SEQ ID NO: 557101 - DNA, 120 bp, Artificial Sequence
  ENSG00000169084_17 (sequence is synthesized)
tgtatacagcttctgatacttctgaaaacctcacacagccaaagggtacatccttggtatagaggctcactcttactcaccagccaggcaaggaaggctcaatcctttggtgttagagag

SEQ ID NO: 557102 - DNA, 120 bp, Artificial Sequence
  ENSG00000169084_18 (sequence is synthesized)
atagatgttgggttttcaaatttcaacatagagaaatcagtcatttgcaatgcttttgagaaagtactgtgtataccctacgagcctgcactccttatgtgtgagactgatgaccattgg

SEQ ID NO: 557103 - DNA, 120 bp, Artificial Sequence
  ENSG00000169084_19 (sequence is synthesized)
ttggcttattatccattccactaagtgacaaaatcccactgactattcaaatccaggctcctggcatgcctgtaccttagaatcacaaccagctgcaattccaggatggagttcaaacta

SEQ ID NO: 557104 - DNA, 120 bp, Artificial Sequence
  ENSG00000169084_20 (sequence is synthesized)
attgtgggggcatgtgcttcttacatgactgctagattgttcccagatggggaaggttgccctgataagcaacttaaatgaaaataataaatgtattgtttggcctctttaaaaaaaaaa

SEQ ID NO: 557105 - DNA, 80 bp, Artificial Sequence
  ENSG00000169084_21 (sequence is synthesized)
gcccggcccgacccggcccgacccttccctccccgcgcgtgtggcctccccgcctgtcccgggtcgggctccaaccaagc

SEQ ID NO: 557106 - DNA, 120 bp, Artificial Sequence
  ENSG00000169084_22 (sequence is synthesized)
cccaagacatcaggcggctctgcctgccgcctgcggtcggccagtgaccgcgcgcccccgccaggccccggaggggaggagcgggcgtcccagggacctcgacccctacccaccccaggt

SEQ ID NO: 557107 - DNA, 120 bp, Artificial Sequence
  ENSG00000169084_23 (sequence is synthesized)
aaccttgaacgacaaagagacgtgagtcttgctgtgttgcccgggctggctttgcctctggaactcaagcgatcctcccacctcagcctctcgaggagctgggactacaggcgtgcacca

SEQ ID NO: 557108 - DNA, 120 bp, Artificial Sequence
  ENSG00000169084_24 (sequence is synthesized)
catgaaggacttggaaaaccaacgctgatcctcagagtaacagcatagatcctcacaagacagtctatgaagctggagccccctgggttgtaaaatgcctccgcaccccgtctctgtttc

SEQ ID NO: 557109 - DNA, 65 bp, Artificial Sequence
  ENSG00000169084_25 (sequence is synthesized)
ttttagtagagacaggatgtcggcctcccaaagtgcgtggattacaggcatgagccaccgtgccc

SEQ ID NO: 557110 - DNA, 120 bp, Artificial Sequence
  ENSG00000169084_26 (sequence is synthesized)
aggcatgagccaccgtgcccagccacgatctctgttttgaataatgaagataagcagatcacatccagaacaaccccacccaacagaaatgacagctacttcctagagactttaggtgct

SEQ ID NO: 557111 - DNA, 120 bp, Artificial Sequence
  ENSG00000169085_0 (sequence is synthesized)
agactggattaggatgcctcgcgactaggggtccagagacagaggcctccagttcccaggcacttcgggaagaggaggctgaaatgatgcatcagatttacagctgcagtgacgagaaca

SEQ ID NO: 557112 - DNA, 120 bp, Artificial Sequence
  ENSG00000169085_1 (sequence is synthesized)
tagaagttttcaccaccgtgattccttccaaggtatccagtccagccagaagaagagccaaaagctctcagcacctcttgaccaagaatgtggtgatcgagtcggacctgtacacgcacc

SEQ ID NO: 557113 - DNA, 120 bp, Artificial Sequence
  ENSG00000169085_2 (sequence is synthesized)
agcccctggagctgctgccccaccgcggagaccgcagggaccctggcgaccgccgcaggtttgggcggctccagaccgcgcggccgcccacagcccacccggccaaagcctctgccagac

SEQ ID NO: 557114 - DNA, 120 bp, Artificial Sequence
  ENSG00000169085_3 (sequence is synthesized)
ccgtggggatttctgaacccaaaacatcaaatctgtgtgggaatcgagcatatggaaaatctctgataccgccagtgccccggatctcagtgaaaacttcagcctctgcctcattggagg

SEQ ID NO: 557115 - DNA, 120 bp, Artificial Sequence
  ENSG00000169085_4 (sequence is synthesized)
cgacagccatgggcacagagaagggagctgttctgatgagaggatccagacatctcaagaagatgactgaagagtatccagcccttccccaaggagcagaagcctctctaccactgacag

SEQ ID NO: 557116 - DNA, 120 bp, Artificial Sequence
  ENSG00000169085_5 (sequence is synthesized)
gcagtgcttcctgcggcgtccccggcatcctccggaaaatgtggacaaggcacaagaagaagtctgaatatgtgggagccaccaacagcgcctttgaggccgactaaaggtgaccctctt

SEQ ID NO: 557117 - DNA, 120 bp, Artificial Sequence
  ENSG00000169085_6 (sequence is synthesized)
caagtgccctgtgttggccaaggttccccggacaagaggaaaaaccttcaggattgaaactgagccacacgcacctctgctagtagctggtccaaacccattatcctccctcactcattg

SEQ ID NO: 557118 - DNA, 120 bp, Artificial Sequence
  ENSG00000169085_7 (sequence is synthesized)
attaccctgggatagggcacaggaaagaaatgtccctcgaaggcaatataaaactgccccttcttagaattgctaaagccattggtctgaaagtgactttgggaggtcataaagtttgta

SEQ ID NO: 557119 - DNA, 120 bp, Artificial Sequence
  ENSG00000169085_8 (sequence is synthesized)
tctctatctttaagcaaaaaattaaactttcccagctcattttaaagacctccaaggaaggaaaaaagcaattcctctgtcttccttgtgagttgctctaaagtgtgtgattttctagtg

SEQ ID NO: 557120 - DNA, 120 bp, Artificial Sequence
  ENSG00000169085_9 (sequence is synthesized)
taaatggactttgaggcacttgtaaacacaatggttcttactgtttccattactgcatttacttcaccttgacaaggtacaattttcaaggacaaagcactatatataaagttagtagtt

SEQ ID NO: 557121 - DNA, 120 bp, Artificial Sequence
  ENSG00000169085_10 (sequence is synthesized)
ctaatatccacttgagagtatactcaagattgattttcatggccatttggcatgattgcatgaattctctattcttttatgtgcagtttttctatagaaaaacattaaaagttaaatgtt

SEQ ID NO: 557122 - DNA, 120 bp, Artificial Sequence
  ENSG00000169085_11 (sequence is synthesized)
gactgctaatgttttctgaagtggcatagtctagtggaatcaataatcccttgctttggtataataatttgaacttttgaaagtgctttctcatccgttatctcttatcttcacaaaacc

SEQ ID NO: 557123 - DNA, 120 bp, Artificial Sequence
  ENSG00000169085_12 (sequence is synthesized)
cctgtggaagaaagcacaattattcccaatctgcagagggggaaatggaggccttcagagattacaggaccagataccaggtagtggaaccagacagcaggtccttaacttctctccagt

SEQ ID NO: 557124 - DNA, 120 bp, Artificial Sequence
  ENSG00000169085_13 (sequence is synthesized)
ttggggaagtttttaaatggtgagagtgtgtctctgggggcaaccattgaaaagaagactctgatatgttggaacaagtaagggatttgaatgaaatacactattatatcttatatgtta

SEQ ID NO: 557125 - DNA, 120 bp, Artificial Sequence
  ENSG00000169085_14 (sequence is synthesized)
gcttgaaccagaaaaagttgacatttttgtaggtcaaaaacaattgagcatcaatttcatatggttcaacctcatatatgatactatgcttttcttctatcagtgaaaatgtcatcatca

SEQ ID NO: 557126 - DNA, 120 bp, Artificial Sequence
  ENSG00000169085_15 (sequence is synthesized)
attccattgtcaacattagtagccttaaaacaataacataataataatgatgataatgatacttatagctatcatctattaaatgcctatgtttcaggcatgatactaggcaatttatat

SEQ ID NO: 557127 - DNA, 120 bp, Artificial Sequence
  ENSG00000169085_16 (sequence is synthesized)
atatcatcctaatctttctaaaaactctattaggtggccctatccacttaatagatgccaattcaaagaggttaaatgattagactaaggcacctaacttatgtgagtgtcaggcttcaa

SEQ ID NO: 557128 - DNA, 120 bp, Artificial Sequence
  ENSG00000169085_17 (sequence is synthesized)
tgcctgtgttagagctactccttcacacaaaatagttcagaacatagagaaggaccaaggttaataaatgattttcatcccaaacactaaacatgattgatgggtagaggctgcccgaag

SEQ ID NO: 557129 - DNA, 120 bp, Artificial Sequence
  ENSG00000169085_18 (sequence is synthesized)
tactgtgtaaagatggaatctgagatagaagaatgctgtggtcaattagtaattcttgcccatggagggattagtgacacatgccttgtatatttgtcatctgtggcctaaactctgccc

SEQ ID NO: 557130 - DNA, 120 bp, Artificial Sequence
  ENSG00000169085_19 (sequence is synthesized)
ctgaaggtttgttttctaattcagaggtttaaattaatctagcccacttaataaaaccagagatcctatgggaaatttagcctaagacagtgctggaaattgccatatgttgatacaaag

SEQ ID NO: 557131 - DNA, 120 bp, Artificial Sequence
  ENSG00000169085_20 (sequence is synthesized)
aagtgtttggccacattacaggtctcagactcaactgctatgtgtgactgccgctctgtgcctatgtcttgcttttttgctgagttccctatttccatatctccaggtgaatccatgaga

SEQ ID NO: 557132 - DNA, 120 bp, Artificial Sequence
  ENSG00000169085_21 (sequence is synthesized)
agcgagagggtggctgagaggcctgggcctctgggattccaccttgctatctctgctcttcaaccattgttttagactctgaacaccagatcctcatatctgaaagtgatttggagacct

SEQ ID NO: 557133 - DNA, 120 bp, Artificial Sequence
  ENSG00000169085_22 (sequence is synthesized)
gggcatcaagtgctcttttaagaaggggctatcccagaggactgttcaaaagtctcattcaatagagatgttggagtccagaacaaagttagggagcaaaccagtaacctatgctggtcg

SEQ ID NO: 557134 - DNA, 89 bp, Artificial Sequence
  ENSG00000169085_23 (sequence is synthesized)
gaacaaagttagggagcaaaccagtaacctatgctggtcgtaacagaggatcctacaattacgtttgtttttaagacaggattttgctt

SEQ ID NO: 557135 - DNA, 120 bp, Artificial Sequence
  ENSG00000169085_24 (sequence is synthesized)
ggatgacaggcacatgccaccacacctagctccttacaaccatttattttaacttatttcatttataactggtatctttcatttgtatgtggcagctagagatttatataggatggaagt

SEQ ID NO: 557136 - DNA, 120 bp, Artificial Sequence
  ENSG00000169085_25 (sequence is synthesized)
aatttatttttaatttaaatatttcatgttgaactgtttgccttgtatggaacattttacttggccaattcaaataaaaataaagtcagctttgtttgtgacattcatgcaccaccataa

SEQ ID NO: 557137 - DNA, 120 bp, Artificial Sequence
  ENSG00000169085_26 (sequence is synthesized)
gtcttcaactcgattcagcacatacctgtatgccctggactacatcctccacaccgcaggcagcagaaaaggcgtttcagggtggtgaagggttgggttattttctcagatctgctttct

SEQ ID NO: 557138 - DNA, 120 bp, Artificial Sequence
  ENSG00000169085_27 (sequence is synthesized)
tggaatcacgaaggatccagaaactccctcgatgcgagctccatctgcaaagctcctgccctggggttccatgggtccctaggcccgagcagaggagtgggctaaccgcgtttcccccgc

SEQ ID NO: 557139 - DNA, 120 bp, Artificial Sequence
  ENSG00000169085_28 (sequence is synthesized)
gtcctgatccttccttccccagaagagcaccaggccgcctggttgacagaccctcgagaggccaacacaaacccatgccagctgcaaattatcttttaatgaggccaataatcctgggtc

SEQ ID NO: 557140 - DNA, 120 bp, Artificial Sequence
  ENSG00000169085_29 (sequence is synthesized)
tctgcagcgcctcatcaactgtttccctaggattaagcaggagggtttttcatggtttccacttcattaacgccactctttaggcttggagaagtcatttgggaggttttttggttaatt

SEQ ID NO: 557141 - DNA, 120 bp, Artificial Sequence
  ENSG00000169085_30 (sequence is synthesized)
agatgaatgtaatcacgagccatattcagaacctcccataggcatgcaggcgtcagaaatatctcatgagtaagttcaagatcccctgcccaccggttaagaagtgtgtcaagtacaaag

SEQ ID NO: 557142 - DNA, 120 bp, Artificial Sequence
  ENSG00000169085_31 (sequence is synthesized)
ctcctgtgccatgaagagagactcagtgttctttgttccaggcctgaggattattagaaaagcataactggcagttctttgctcccaaaagctctcagttggccctaatttgtacccttg

SEQ ID NO: 557143 - DNA, 120 bp, Artificial Sequence
  ENSG00000169085_32 (sequence is synthesized)
tctgtgtgggaatcgagcatatggaaaatctctgatccagacatctcaagaagatgactgaagagtatccagcccttccccaaggagcagaagcctctctaccactgacaggcagtgctt

SEQ ID NO: 557144 - DNA, 120 bp, Artificial Sequence
  ENSG00000169085_33 (sequence is synthesized)
acattcaaacaattcctttcttcccctgtgtcagccgctgacagggccattgcacagtggggcagggagagattccgtttggccacaaagagacagcctgcaggacataaattaagcttt

SEQ ID NO: 557145 - DNA, 120 bp, Artificial Sequence
  ENSG00000169085_34 (sequence is synthesized)
agacatttactgccagatccagagagagggaaaagagctgggagtctgctgcccacgtgcaggagttggaattccctctggaaactctgaaagtccaagttgaccctcggaatcagcagt

SEQ ID NO: 557146 - DNA, 120 bp, Artificial Sequence
  ENSG00000169085_35 (sequence is synthesized)
aagaaggcacaactgaaaataacctgagtgtccatgaagaggggaatggttaaaatgtggtgctgtcatgctgtggaatactatacaatgtcaacaggaataaactagatgtatgcctgt

SEQ ID NO: 557147 - DNA, 120 bp, Artificial Sequence
  ENSG00000169085_36 (sequence is synthesized)
gaacataggtagatctaagcataatgctgagtgccaaataagcaggctgaaaaattatatattatccagtccagccagaagaagagccaaaagctctcagcacctcttgaccaagaatgt

SEQ ID NO: 557148 - DNA, 120 bp, Artificial Sequence
  ENSG00000169085_37 (sequence is synthesized)
gatctaggtgacaaataaggagaagtgtgaatcaaagacgtcagcagatgggatcctgaggcttgtgtgttagcccgtgtcttctgcttttcctatcttgacctctctatgaccagcaag

SEQ ID NO: 557149 - DNA, 120 bp, Artificial Sequence
  ENSG00000169087_0 (sequence is synthesized)
gtgagagccggcgtttccgtaggagccgggcgggagtcgccggggctccttcctgtggtgcagcttcgggtctcggagtttggcccctactctgaccccaccccagctccgctccgcctt

SEQ ID NO: 557150 - DNA, 120 bp, Artificial Sequence
  ENSG00000169087_1 (sequence is synthesized)
gggttccggcagaacccgccttgcggtagccatggcagcaggctccgaggcgaccactcctgtgatcgttgcggctggggctggaggggaggaaggtgaacatgtcaaaccttttaagcc

SEQ ID NO: 557151 - DNA, 120 bp, Artificial Sequence
  ENSG00000169087_2 (sequence is synthesized)
agagaaagcaaaagaaattatcatgtctttacaacaacctgcaatcttctgtaacatggtgtttgattggccagcacgacactggaatgctaaatacctttcgcaggtccttcatggcaa

SEQ ID NO: 557152 - DNA, 120 bp, Artificial Sequence
  ENSG00000169087_3 (sequence is synthesized)
gcagatacgattcagaatggggatgaaaagcatgagcacagttcctcagtttgaaactacatgtaattacgtagaagctacactcgaagagtttctgacctggaactgtgaccagtctag

SEQ ID NO: 557153 - DNA, 120 bp, Artificial Sequence
  ENSG00000169087_4 (sequence is synthesized)
tatttctggaccatttagagattatgaccattccaagttctgggcttatgctgactataaatattttgtcagtctatttgaagacaagacagatcttttccaggatgtgaaatggtctga

SEQ ID NO: 557154 - DNA, 120 bp, Artificial Sequence
  ENSG00000169087_5 (sequence is synthesized)
cttcgggtttcctggaagaaatggacaggaaagtacattgtggattggctccttgggagcccacacaccctgtcatctggactcctatggttgtaacttggtattccaggtacaaggaag

SEQ ID NO: 557155 - DNA, 120 bp, Artificial Sequence
  ENSG00000169087_6 (sequence is synthesized)
gaaacgatggcatctctttcctcctgaagatactcctttcctttatccaactagaatcccttatgaagaatctagtgtgttcagtaaaatcaatgttgtcaatcctgatttaaagcgttt

SEQ ID NO: 557156 - DNA, 120 bp, Artificial Sequence
  ENSG00000169087_7 (sequence is synthesized)
tcctcagttccggaaagctcaaagacatgcggttacactgagcccaggacaggttctctttgttcccagacactggtggcattacgtagaatccattgatcctgtcactgtcagtataaa

SEQ ID NO: 557157 - DNA, 120 bp, Artificial Sequence
  ENSG00000169087_8 (sequence is synthesized)
aggcaatcacccgtatgcttgtgtgtgccctgaaaactgcagagaatccacaaaataccagagcctggttaaaccccactgaggttgaggaaacgtcccatgcagtcaactgttgctact

SEQ ID NO: 557158 - DNA, 120 bp, Artificial Sequence
  ENSG00000169087_9 (sequence is synthesized)
taaatgcagctgtttctgcattttttgatcgctgcagaacatctgaggtagtagaaatccaagcactgagaacagatggagagcacatgaaaaaggaagaattaaatgtgtgcaaccaca

SEQ ID NO: 557159 - DNA, 120 bp, Artificial Sequence
  ENSG00000169087_10 (sequence is synthesized)
tggaggtgggccaaacaggtagccagaacttgaccacaggaacagacaaaccggaggcagcaagtccctttggccctgatctggtccctgtagcacagaggtccgaagaaccgccttcag

SEQ ID NO: 557160 - DNA, 120 bp, Artificial Sequence
  ENSG00000169087_11 (sequence is synthesized)
aaagaggaggcatatttggaagtgatgggaaagactttgtggacaaggatggagaacactttggaaaattgcattgtgccaagagacaacaaataatgagcaacagtgaaaatgcaattg

SEQ ID NO: 557161 - DNA, 120 bp, Artificial Sequence
  ENSG00000169087_12 (sequence is synthesized)
aggaacagattgcctcaaatactactacgactcctcaaacattcatttctacggatgacttgctggactgcttggtgaatccacaagtaaccaggatagtggcacaacttttgatacaag

SEQ ID NO: 557162 - DNA, 120 bp, Artificial Sequence
  ENSG00000169087_13 (sequence is synthesized)
gaagaagtttatgattcaagtggaagatgacttttaaaataatattttttaaatatatatttttaagtagtatgactaaaataaagatgaaccagcaaaaggtcagtttgcacatttgta

SEQ ID NO: 557163 - DNA, 120 bp, Artificial Sequence
  ENSG00000169087_14 (sequence is synthesized)
aatgtatttatccttaccgaattacatgtcagtctgttgccaccttctttcatgcacattcctctttggccaaactggctgctctttgtttgtaagcttttgttcctctctcatcccata

SEQ ID NO: 557164 - DNA, 120 bp, Artificial Sequence
  ENSG00000169087_15 (sequence is synthesized)
cttttagcctgtgtcaaatgtaagtcccaagtatttccagcaggaagtaatgtcttcctcagcctcaaccagggaccaaccggctgcttacttttgcaaataaaattttactagaacacg

SEQ ID NO: 557165 - DNA, 120 bp, Artificial Sequence
  ENSG00000169087_16 (sequence is synthesized)
tttttaaaatgcttatcattgtgtcttttgcccattttttaaaatttgctcatttctcttattgatatgtgtagattattctacacattaatattttatcagttatatatgttacaggca

SEQ ID NO: 557166 - DNA, 120 bp, Artificial Sequence
  ENSG00000169087_17 (sequence is synthesized)
tctagtttgtttttttcctttgtggtgttttttcgtaaacagaagttgttgattttaatgcagttcctcattaatgctataccttatatttactctgtcttaaagccacgtttagatgga

SEQ ID NO: 557167 - DNA, 120 bp, Artificial Sequence
  ENSG00000169087_18 (sequence is synthesized)
tagccatctcattcttgtagccaagcatgtttattgtaatttttcttccatctctgaaataatttgcttgtcagactctatagggattattcctctgtatgtggtactttaaaaaaaaaa

SEQ ID NO: 557168 - DNA, 120 bp, Artificial Sequence
  ENSG00000169087_19 (sequence is synthesized)
ctttaaacatgtcaaataatggaaaagattggagaaaatatcataaggtgattcatacttaaggccatgacttatagatagaatacatacttaaatttgattggtgaaatattctgcagc

SEQ ID NO: 557169 - DNA, 120 bp, Artificial Sequence
  ENSG00000169087_20 (sequence is synthesized)
tcttctagatggcaggtgatagtaaatacacaaaaattgtggttctaccaatagcatattcattccttctataacaaagcttatattaatgagagaacagaagatgaaattaaaacagac

SEQ ID NO: 557170 - DNA, 120 bp, Artificial Sequence
  ENSG00000169087_21 (sequence is synthesized)
tattttgtcagtctatttgaagacaagacagatcttttccagatgcagcactcaaacagggcctcctgtttctagcaagactcaagacagattcctgggcccacattgacttcagacatt

SEQ ID NO: 557171 - DNA, 120 bp, Artificial Sequence
  ENSG00000169087_22 (sequence is synthesized)
acttcagacatttgactacccataagtggctgaacttaattgggaagagaatcccaactctcaatgctgtctatttttacactgacaattttgcttttttttttttttttttgagacaag

SEQ ID NO: 557172 - DNA, 120 bp, Artificial Sequence
  ENSG00000169087_23 (sequence is synthesized)
tcttgctctgtcactcaggcactcaggctggagtgctgtggtgcaaacatagctccctgaagccttgacctcccaagctcaagtgatcctcccttctcagcctcccaagtagctgggacc

SEQ ID NO: 557173 - DNA, 120 bp, Artificial Sequence
  ENSG00000169087_24 (sequence is synthesized)
caccacgcccagccaatttgttaaaaaaaaaaaaaaaacctttttgtagagacagagcctcaccaaacattgcccacgctggtcttgaactcctggacccaggcagtcctcccacctcag

SEQ ID NO: 557174 - DNA, 120 bp, Artificial Sequence
  ENSG00000169087_25 (sequence is synthesized)
gaccactcctgtgatcgttgcggctggggctggaggggaggaagaaggctacccagttatatctacccaagtatgaaccattttgggaataatcaaagccatgtgatctattggctctaa

SEQ ID NO: 557175 - DNA, 120 bp, Artificial Sequence
  ENSG00000169087_26 (sequence is synthesized)
ctaggactacaggaaacgatggcatctctttcctcctgaagatactcctttcctttatccaactagaatcccttatgaagaatctagtgtgttcagtaaaatcaatgttgtcaatcctga

SEQ ID NO: 557176 - DNA, 120 bp, Artificial Sequence
  ENSG00000169087_27 (sequence is synthesized)
tggaggaagacagtctacaagagtcattttcatttaggtcaggagaaaatgttcaaggcatgggtactcgagcatctctggaacatttaatcacagttagtatctgttcaattatgatag

SEQ ID NO: 557177 - DNA, 120 bp, Artificial Sequence
  ENSG00000169087_28 (sequence is synthesized)
cactgaacccagacacataaacacaggtcggaatgcctccaggtgtgggccaacgggcagaaggaaccgagaatgtttgcttttaagcaaaaatggatgttgttttcataaattactaac

SEQ ID NO: 557178 - DNA, 120 bp, Artificial Sequence
  ENSG00000169087_29 (sequence is synthesized)
tctgaaacatttccaaaggtactgtacatagtgctgcttcccagtgaggaaaatttccttttcaacattggcacttgctgtctgatatttcattaataatttgaaaggttttcttagtca

SEQ ID NO: 557179 - DNA, 120 bp, Artificial Sequence
  ENSG00000169087_30 (sequence is synthesized)
cttaagaagattttattctctcgattatccctctcccttgcctgtcttccatccattgtaccggtctcactggctcttttcctgcttccttcactcaagtactatcaactcaaacaattt

SEQ ID NO: 557180 - DNA, 120 bp, Artificial Sequence
  ENSG00000169087_31 (sequence is synthesized)
cacttgactgagttgcctcgacctgttagtcactctgcattcccctctccccacagcccctgacaacaactaatctttttctatctctagatttgcccattctggacatttcacacagtg

SEQ ID NO: 557181 - DNA, 120 bp, Artificial Sequence
  ENSG00000169087_32 (sequence is synthesized)
atggctgaataatattccattgtatggatatacaacattttgtttatctgttcatcagttgatggacatttgggttgtttctgctttgttggctattataagtaatgctactttgaacat

SEQ ID NO: 557182 - DNA, 120 bp, Artificial Sequence
  ENSG00000169087_33 (sequence is synthesized)
tcatgtacaagttttgtgtgtacatatgttttcaatactcttgggtatacctaggagtagaattgctgggttatatggtaaccctgtgtttaactttttgaggagttgtcaaactatttt

SEQ ID NO: 557183 - DNA, 120 bp, Artificial Sequence
  ENSG00000169087_34 (sequence is synthesized)
ccatagcagctgtactattttgcattcccaccagcattgtatgagggttccaatttctttttatctttcccaacacttgttttgcttttttatcattatttttacagccattccagagag

SEQ ID NO: 557184 - DNA, 120 bp, Artificial Sequence
  ENSG00000169087_35 (sequence is synthesized)
tgtgaagtggttgccaattcattttctcttctgtgtttaatagccaaatttgagtgattggttttgcctattgtatcagttttccttacatcctatccattctttaatccactcaaaccc

SEQ ID NO: 557185 - DNA, 120 bp, Artificial Sequence
  ENSG00000169087_36 (sequence is synthesized)
agctctttctgtcaccactttactgaaactttactctgataggacatgcataacctactaatgactatcaagtggccttttatagtttccagttttcctgaaaggatctctctttctatt

SEQ ID NO: 557186 - DNA, 120 bp, Artificial Sequence
  ENSG00000169087_37 (sequence is synthesized)
tcccagtcctgccttgttcacagcaaataccagtagtttcctaatgtgaagcccaaaagcttcacatcatttccatctactctgctcttaataggaaatctcatactgagtctggataga

SEQ ID NO: 557187 - DNA, 120 bp, Artificial Sequence
  ENSG00000169087_38 (sequence is synthesized)
tgccatccttcttgactctgcccattgcttttgtttattataccttcctatttatatcttaacgtttaataagtggacctttgcaagtatctcctgtccttctcagactctctcgatacc

SEQ ID NO: 557188 - DNA, 120 bp, Artificial Sequence
  ENSG00000169087_39 (sequence is synthesized)
actattttaaccatccccctacttagaatttctcaacaactcctagtgcctaccagataaaatctagattctgaagtccgctgtccctaaactaattcccctaccttatctcccattatt

SEQ ID NO: 557189 - DNA, 120 bp, Artificial Sequence
  ENSG00000169087_40 (sequence is synthesized)
ccctctgtgatagtaagactgacctacttgctatcttctgtagtcctacctccctcacctgtacctcttatccttcctggcatgtcctcattctttctgtgtctaaattctctcctagcc

SEQ ID NO: 557190 - DNA, 120 bp, Artificial Sequence
  ENSG00000169087_41 (sequence is synthesized)
cgggttcaaatcacacttcttccatccatgttgcccctgacctccctagttcatgcctgtttcacccacctctgaaattctgaaacaccattgtcccctgatttaccacttctataatgc

SEQ ID NO: 557191 - DNA, 120 bp, Artificial Sequence
  ENSG00000169087_42 (sequence is synthesized)
cacctttctatactttatcttctcattggctagattttgagctgtgagaaaacagaagccacgtcctatgtgttttacctatgccctttctcagaatgcacgcaactattttgtgacgga

SEQ ID NO: 557192 - DNA, 120 bp, Artificial Sequence
  ENSG00000169087_43 (sequence is synthesized)
aaggaggaaaaattagaatctcagaatcatgtactaagatttaggtgcagacaaagaaggcccaggattaaagagaatagagatgctggcagtatcctttgtagaacatgtgaacttgtc

SEQ ID NO: 557193 - DNA, 120 bp, Artificial Sequence
  ENSG00000169093_0 (sequence is synthesized)
cagccgcgctgcgcgcaccgcgggctccgggctcagaagtgcggacgcccggctcccggcgtggacgccatggtgctgtgcccggtgattgggaagctgctgcacaagcgcgtggtgctg

SEQ ID NO: 557194 - DNA, 120 bp, Artificial Sequence
  ENSG00000169093_1 (sequence is synthesized)
gccagcgcctccccacgccgtcaggagatcctcagcaacgcgggtctcaggtttgaggtggtcccctccaagtttaaagagaagctggacaaagcctccttcgctactccgtatgggtac

SEQ ID NO: 557195 - DNA, 120 bp, Artificial Sequence
  ENSG00000169093_2 (sequence is synthesized)
gccatggagaccgccaagcagaaggccctggaggtggccaaccggctgtaccagaaagacctgcgggcccccgacgtggtcattggagcggacacgatcgtgacagtcggggggctgatt

SEQ ID NO: 557196 - DNA, 120 bp, Artificial Sequence
  ENSG00000169093_3 (sequence is synthesized)
ctggagaagccggtggacaagcaggacgcctacaggatgctgtcccggttgagtgggagagaacacagcgtgttcacaggtgtcgcgatcgtccactgctccagcaaagaccatcagctg

SEQ ID NO: 557197 - DNA, 120 bp, Artificial Sequence
  ENSG00000169093_4 (sequence is synthesized)
gacaccagggtctcggaattctacgaggaaacgaaggtgaagttctcggagctgtccgaggagctgctctgggaatacgtccacagcggggagcccatggacaaagctggcggctacggg

SEQ ID NO: 557198 - DNA, 120 bp, Artificial Sequence
  ENSG00000169093_5 (sequence is synthesized)
atccaggccctgggcggcatgctggtggagtccgtacacggggactttctgaacgtggtgggattcccgctgaaccacttctgcaagcagctggtgaagctctactacccgccccgtccg

SEQ ID NO: 557199 - DNA, 120 bp, Artificial Sequence
  ENSG00000169093_6 (sequence is synthesized)
gaggacctgcggcggagtgtcaagcacgactccatcccggccgcggacaccttcgaagacctcagtgacgtggaggggggcggctcggagcccactcagagggacgcgggcagccgcgat

SEQ ID NO: 557200 - DNA, 120 bp, Artificial Sequence
  ENSG00000169093_7 (sequence is synthesized)
gagaaggccgaggcgggagaggcgggacaggccacggcagaggctgagtgtcacaggactcgggagaccctgcctccgttcccgacacgcctcctggagctgattgagggctttatgcta

SEQ ID NO: 557201 - DNA, 120 bp, Artificial Sequence
  ENSG00000169093_8 (sequence is synthesized)
aactgaaggtgttcgatttgttaaaagatgaagcaccccagaaggctgcggatattgccagcaaagtggacgcctctgcgtgtggaatggagaggcttctggacatctgtgctgccatgg

SEQ ID NO: 557202 - DNA, 120 bp, Artificial Sequence
  ENSG00000169093_9 (sequence is synthesized)
ggctcctggagaagacagagcaaggttacagtaacacagagacagcgaacgtctacctggcatcggatggcgaatactctctgcacggcttcatcatgcacaataatgacctcacatgga

SEQ ID NO: 557203 - DNA, 120 bp, Artificial Sequence
  ENSG00000169093_10 (sequence is synthesized)
acctctttacatacctggagtttgccatccgagagggaacaaaccagcaccacagggcgttggggaagaaggcggaagatctgttccaggatgcgtactaccagagcccggagacgcggc

SEQ ID NO: 557204 - DNA, 120 bp, Artificial Sequence
  ENSG00000169093_11 (sequence is synthesized)
tgaggttcatgcgggccatgcacggcatgacgaagctgactgcgtgccaggtggccacggccttcaatctgtcccgcttctcctccgcctgcgacgtgggaggctgcacgggtgcactgg

SEQ ID NO: 557205 - DNA, 120 bp, Artificial Sequence
  ENSG00000169093_12 (sequence is synthesized)
cccgagagctggcccgtgagtaccctcgtatgcaggtgactgtgtttgacctcccagacattatcgagctggccgcccacttccaaccccccggaccgcaggcagtgcagatccacttcg

SEQ ID NO: 557206 - DNA, 120 bp, Artificial Sequence
  ENSG00000169093_13 (sequence is synthesized)
cagcaggtgactttttcagggaccccctccccagcgctgagctgtacgtcctgtgccggatcctgcatgactggccagacgacaaagtccacaagttactcagcagggtcgccgagagct

SEQ ID NO: 557207 - DNA, 120 bp, Artificial Sequence
  ENSG00000169093_14 (sequence is synthesized)
gcaagccaggggccggcctgctgctggtggagacgctcctggatgaggagaagagggtggcgcagcgcgccctgatgcagtcactgaacatgctggtgcagactgaaggcaaggagcgga

SEQ ID NO: 557208 - DNA, 120 bp, Artificial Sequence
  ENSG00000169093_15 (sequence is synthesized)
gcctgggcgagtatcagtgcttgctggagctgcacggcttccaccaggtgcaggtggtgcacttggggggtgtcctggatgccatcttggccaccaaagtggccccctgaagcccaggca

SEQ ID NO: 557209 - DNA, 120 bp, Artificial Sequence
  ENSG00000169093_16 (sequence is synthesized)
gcatgttcattatagggatgtcctcccccaggctgcaggtggaccgcccggtccccaagtaccataggacagtcacataggagcgtgtagtcgtgactgaataaagaaagcaaaagcctg

SEQ ID NO: 557210 - DNA, 120 bp, Artificial Sequence
  ENSG00000169093_17 (sequence is synthesized)
gcctgggacgtcatccccatcccaggacgtggaagagatgcaccccctgcccgccataggcccagctgagagctgcctggcctggcgcctcccgtcagggccactgctggtgggatttgt

SEQ ID NO: 557211 - DNA, 120 bp, Artificial Sequence
  ENSG00000169093_18 (sequence is synthesized)
gaccccttccctcggcctctccgtaaaggtttccctggagaccccacagcgggacgatcggggagaagatgctggggacggatccaggattaaggacgcctcgctgcctcccctggtttt

SEQ ID NO: 557212 - DNA, 120 bp, Artificial Sequence
  ENSG00000169093_19 (sequence is synthesized)
agagccgcccggctcagaagcacaaacccttcacgaccacactgacccatggaggctcaaagaggcaaactcccaggacagagaggggcagggtgggagccaacgctgggctgcggtggg

SEQ ID NO: 557213 - DNA, 120 bp, Artificial Sequence
  ENSG00000169093_20 (sequence is synthesized)
gactggggaggcgctgggcaggggtagaggagttcacgtggtgggaggaggagaccccagaggtctgtgcccaggacgctggctgcaattaacacgaataaactctgtgatccaaagtca

SEQ ID NO: 557214 - DNA, 120 bp, Artificial Sequence
  ENSG00000169093_21 (sequence is synthesized)
atctccactcccctcccaccaggcacgaggacatccccatccccacgccactcgcaccgggtccgcggggaaccccctatctctaccttccccgacgcggctcccacaagacccccatct

SEQ ID NO: 557215 - DNA, 120 bp, Artificial Sequence
  ENSG00000169093_22 (sequence is synthesized)
ccaaccggctgtaccaggcaaggggcccctgcccttcggcccttatgaaaattcctttgctgtgatgaggggatttgcgggtggtaaatatacatgacacaaataaacgtcattcaaaag

SEQ ID NO: 557216 - DNA, 120 bp, Artificial Sequence
  ENSG00000169093_23 (sequence is synthesized)
ggcacagcttagctattgctatgttataatgtaatgcactattgcagtaacctaataataccattaatgatacagaattaatggagcttatctgttactgtgtgttataatattctcttg

SEQ ID NO: 557217 - DNA, 120 bp, Artificial Sequence
  ENSG00000169093_24 (sequence is synthesized)
caattgatacagtatcattgatgatatacaattaatgtagcttatctgttactatgtgttataataatttctcgcaattgatacagtatcatttatgatatacaattaatgtagcttatc

SEQ ID NO: 557218 - DNA, 120 bp, Artificial Sequence
  ENSG00000169093_25 (sequence is synthesized)
tattactatgtgttataatatcctcttgcaattgatatcatagtatcattgatgatacagaattaatgtagcttatctattactatgtgttataatattgtcacaattgatatcacagta

SEQ ID NO: 557219 - DNA, 120 bp, Artificial Sequence
  ENSG00000169100_0 (sequence is synthesized)
cctttcggtccaggcggcggcagggctgagccagcgacgccctccattcactctccgcgcccgttctccggctgtcctcccgttccgctgcccgccctgccaccatgacggaacaggcca

SEQ ID NO: 557220 - DNA, 120 bp, Artificial Sequence
  ENSG00000169100_1 (sequence is synthesized)
tctccttcgccaaagacttcttggccggaggcatcgccgccgccatctccaagacggccgtggctccgatcgagcgggtcaagctgctgctgcaggtccagcacgccagcaagcagatcg

SEQ ID NO: 557221 - DNA, 120 bp, Artificial Sequence
  ENSG00000169100_2 (sequence is synthesized)
ccgccgacaagcagtacaagggcatcgtggactgcattgtccgcatccccaaggagcagggcgtgctgtccttctggaggggcaaccttgccaacgtcattcgctacttccccactcaag

SEQ ID NO: 557222 - DNA, 120 bp, Artificial Sequence
  ENSG00000169100_3 (sequence is synthesized)
ccctcaacttcgccttcaaggataagtacaagcagatcttcctggggggcgtggacaagcacacgcagttctggaggtactttgcgggcaacctggcctccggcggtgcggccggcgcga

SEQ ID NO: 557223 - DNA, 120 bp, Artificial Sequence
  ENSG00000169100_4 (sequence is synthesized)
cctccctctgcttcgtgtacccgctggatttcgccagaacccgcctggcagcggacgtgggaaagtcaggcacagagcgcgagttccgaggcctgggagactgcctggtgaagatcacca

SEQ ID NO: 557224 - DNA, 120 bp, Artificial Sequence
  ENSG00000169100_5 (sequence is synthesized)
agtccgacggcatccggggcctgtaccagggcttcagtgtctccgtgcagggcatcatcatctaccgggcggcctacttcggcgtgtacgatacggccaagggcatgctccccgacccca

SEQ ID NO: 557225 - DNA, 120 bp, Artificial Sequence
  ENSG00000169100_6 (sequence is synthesized)
atcgtggtgagctggatgatcgcgcagaccgtgacggccgtggccggcgtggtgtcctaccccttcgacacggtgcggcggcgcatgatgatgcagtccgggcgcaaaggagctgacatc

SEQ ID NO: 557226 - DNA, 120 bp, Artificial Sequence
  ENSG00000169100_7 (sequence is synthesized)
atgtacacgggcaccgtcgactgttggaggaagatcttcagagatgaggggggcaaggccttcttcaagggtgcgtggtccaacgtcctgcggggcatggggggcgccttcgtgctggtc

SEQ ID NO: 557227 - DNA, 120 bp, Artificial Sequence
  ENSG00000169100_8 (sequence is synthesized)
ctgtacgacgagctcaagaaggtgatctaagggccgcggcctcctccacacacacacacacaccaggggaaccaagagaaccacgtagaatcctcaaccgtgcggaccatcaaccttcga

SEQ ID NO: 557228 - DNA, 120 bp, Artificial Sequence
  ENSG00000169100_9 (sequence is synthesized)
gaaattccagttgtctttttcccagccgcatcctgcctgtagatggccggggaaggctctagaaaaggggcgcattgcgatccaaccatcggcagccgattccgtgtcttgatcacgggg

SEQ ID NO: 557229 - DNA, 120 bp, Artificial Sequence
  ENSG00000169100_10 (sequence is synthesized)
tgggagggaaccgtggcgtccctgcgtggggcccatgggtgagacactccagtactgagacctagagtccagatgcttgtaggagccaagtcgtgttctaagtatttatttaaaacaaaa

SEQ ID NO: 557230 - DNA, 120 bp, Artificial Sequence
  ENSG00000169100_11 (sequence is synthesized)
gaatcacgttttcccatttgtacttcagcgctagcccctgttttgcacagccgagtactggcgagtatgttctatgttgggcctcctgctgcaaaacaataaacagaggacgcagaggtc

SEQ ID NO: 557231 - DNA, 80 bp, Artificial Sequence
  ENSG00000169105_0 (sequence is synthesized)
gcttcggcgccgcagcccgggagccggccacccctacacgcgccagggctgtcccctgccctcccctccccaactacccc

SEQ ID NO: 557232 - DNA, 120 bp, Artificial Sequence
  ENSG00000169105_1 (sequence is synthesized)
cctccccaactacccccggtcccagaccctcctcccgcccccagcccgagcccgccttccaggccgccctcggatcggccgggcccgcgcaggcccccaccccttgagcaccatgttccc

SEQ ID NO: 557233 - DNA, 120 bp, Artificial Sequence
  ENSG00000169105_2 (sequence is synthesized)
ccgggcgctgaggcgggcccctctgggcagggcccgggcggggctgggtgggccgcccctgctgctgccgtccatgctgatgtttgcggtgatcgtggcctccagcgggctgctgctcat

SEQ ID NO: 557234 - DNA, 120 bp, Artificial Sequence
  ENSG00000169105_3 (sequence is synthesized)
gtgatcgtggcctccagcgggctgctgctcatgatcgagcggggcatcctggccgagatgaagcccctgcccctgcacccgcccggccgcgagggcacagcctggcgcgggaaagccccc

SEQ ID NO: 557235 - DNA, 120 bp, Artificial Sequence
  ENSG00000169105_4 (sequence is synthesized)
aagcctgggggcctgtccctcagggctggggacgcggacttgcaagtgcggcaggacgtccggaacaggaccctgcgggcggtgtgcggacagccaggcatgccccgggacccctgggac

SEQ ID NO: 557236 - DNA, 120 bp, Artificial Sequence
  ENSG00000169105_5 (sequence is synthesized)
ttgccggtggggcagcggcgcaccctgctgcgccacatcctcgtaagtgaccgttaccgcttcctctactgctacgtccccaaggtggcctgctctaactggaagcgggtgatgaaggtg

SEQ ID NO: 557237 - DNA, 120 bp, Artificial Sequence
  ENSG00000169105_6 (sequence is synthesized)
ctggcaggcgtcctggacagcgtggacgtccgcctcaagatggaccaccgcagtgacctggtgttcctggccgacctgcggcctgaggagattcgctaccgcctgcagcactactttaag

SEQ ID NO: 557238 - DNA, 120 bp, Artificial Sequence
  ENSG00000169105_7 (sequence is synthesized)
ttcctgtttgtgcgggagcccttggaacgcctcctctctgcctaccgcaacaagtttggcgagatccgagagtaccagcaacgctatggggctgagatagtgaggcggtacagggctgga

SEQ ID NO: 557239 - DNA, 120 bp, Artificial Sequence
  ENSG00000169105_8 (sequence is synthesized)
gcggggcccagccctgcaggcgacgatgtcacattccccgagttcctgagatacctggtggatgaggaccctgagcgcatgaatgagcattggatgcccgtgtaccacctgtgccagcct

SEQ ID NO: 557240 - DNA, 120 bp, Artificial Sequence
  ENSG00000169105_9 (sequence is synthesized)
tgtgccgtgcactatgactttgtgggctcctatgagaggctggaggctgatgcaaatcaggtgctggagtgggtacgggcaccacctcacgtccgatttccagctcgccaggcctggtac

SEQ ID NO: 557241 - DNA, 120 bp, Artificial Sequence
  ENSG00000169105_10 (sequence is synthesized)
cggccagccagccccgaaagcctgcattaccacttgtgcagtgccccccgggccctgctgcaggatgtgctgcctaagtatatcctggacttctccctctttgcctacccactgcctaat

SEQ ID NO: 557242 - DNA, 120 bp, Artificial Sequence
  ENSG00000169105_11 (sequence is synthesized)
gtcaccaaggaggcgtgtcagcagtgaccatgggtgtggggccagcagctggtggggactggtttcaacgccagctttctgtgcttctgcctgtcattcggagaaactctggctctgggg

SEQ ID NO: 557243 - DNA, 120 bp, Artificial Sequence
  ENSG00000169105_12 (sequence is synthesized)
cttggggcttctcaggatcctggatggcagagactgccctcagaagttccttgtccagggtgggcacccacagtgactcagaggacagggctaggcaggagacctgctgctcctcattgg

SEQ ID NO: 557244 - DNA, 120 bp, Artificial Sequence
  ENSG00000169105_13 (sequence is synthesized)
ggggatctcttggggggcagacaccagtttgccaatgaagcaacacatctgatctaaagactggctccagaccccgggctgccaggattatgcagtccacttggtctaccttaatttaac

SEQ ID NO: 557245 - DNA, 120 bp, Artificial Sequence
  ENSG00000169105_14 (sequence is synthesized)
gcctcaggactagagtgagcaatcataccttataaatgacttttgtgcctttctgctccagtctcaaaatttcctacacctgccagttctttacatttttccaaggaaaggaaaacggaa

SEQ ID NO: 557246 - DNA, 120 bp, Artificial Sequence
  ENSG00000169105_15 (sequence is synthesized)
gcagggttcttgcctggtagctccaggacccagctctgcaggcacccaaagaccctctgtgcccagcctcttccttgagttctcggaacctcctccctaattctcccttccttccccaca

SEQ ID NO: 557247 - DNA, 120 bp, Artificial Sequence
  ENSG00000169105_16 (sequence is synthesized)
aggcctttgaggttgtgactgtggctggtatatctggctgccatttttctgatgcatttatttaaaatttgtactttttgatagaacccttgtaagggctttgttttcctaatagctgac

SEQ ID NO: 557248 - DNA, 120 bp, Artificial Sequence
  ENSG00000169105_17 (sequence is synthesized)
tttttaataaagcagttttatatataaggcgagcatttctgtgatttcccttggagctcctgtgggcccagcagatctcctcgatgtctgtcttcccatgtcaggggaggcagcctgtag

SEQ ID NO: 557249 - DNA, 120 bp, Artificial Sequence
  ENSG00000169105_18 (sequence is synthesized)
atagagaaagtaaggtataacttggttgggctggtccaatgggccgttgccattccatggagactttgggggctttctaataggctataccagatcacagactcagatcctgggatgtca

SEQ ID NO: 557250 - DNA, 120 bp, Artificial Sequence
  ENSG00000169105_19 (sequence is synthesized)
ccaaagggcaagcccagttaggaatggcctcacgtccagagcatacctacatgtattattccctaaaaaagtaggtgggtaggagatacgggatcctcctcttattcaataagagttgaa

SEQ ID NO: 557251 - DNA, 71 bp, Artificial Sequence
  ENSG00000169105_20 (sequence is synthesized)
aggagatacgggatcctcctcttattcaataagagttgaatgagaagttcccccagagatctgtcacccag

SEQ ID NO: 557252 - DNA, 86 bp, Artificial Sequence
  ENSG00000169105_21 (sequence is synthesized)
acctcggcccctgcctggccccggaccattttcaaatgaaaaagaaaatttttgtgtgagcaaggagatttttttctggcactaca

SEQ ID NO: 557253 - DNA, 120 bp, Artificial Sequence
  ENSG00000169105_22 (sequence is synthesized)
aatttttgtgtgagcaaggagatttttttctggcactacaaggaaggcaggcaaggaggttgagtgagggtcaggctcttgttgacttaggtccagagaaagttgtggaaggaatacagt

SEQ ID NO: 557254 - DNA, 120 bp, Artificial Sequence
  ENSG00000169105_23 (sequence is synthesized)
tggagcagcagaggacagacttcagtatggcccattgcccccactgctctccagggatcccaggcccatcaggagttgctgggcccaagggagagttgcaaggccagagctggcccttct

SEQ ID NO: 557255 - DNA, 120 bp, Artificial Sequence
  ENSG00000169105_24 (sequence is synthesized)
ctgttagccctatttcacacacccccagtgggaactgctgtactttatagagacctgaggctatggtaagaggggggcccaaggaagggaggcagggagggcccccttgcaggtgctacc

SEQ ID NO: 557256 - DNA, 120 bp, Artificial Sequence
  ENSG00000169105_25 (sequence is synthesized)
tgtcgctagctttgctattgattggactttgtagaggaaaactaacactatttcccatatttgggatagggggcttctatgggcacttatggctctccactatgactcatcaggccatgt

SEQ ID NO: 557257 - DNA, 120 bp, Artificial Sequence
  ENSG00000169105_26 (sequence is synthesized)
tgcttccagaaggccttacctgaccccctgtctggctcagatgtccttcttcagagtccccttggctctggggactttacctagaccgatcaagtcccagccctattcctcaccagatgc

SEQ ID NO: 557258 - DNA, 120 bp, Artificial Sequence
  ENSG00000169105_27 (sequence is synthesized)
ctatctctcagagcctctgttttctccaatgtgtcgtgggaataaaaacacctatctcatgtagattgctaggagaggggaggattaatgaagacaaaatgaataaaagggcccatcccc

SEQ ID NO: 557259 - DNA, 120 bp, Artificial Sequence
  ENSG00000169116_0 (sequence is synthesized)
agaagagcgcggagcaccggagggcacgcagctgacggagctgcgctgcgttcgcctcgtttgcctcgcgccctccactggagctgttcgcgcctcccggctcccaccgcagcccacccg

SEQ ID NO: 557260 - DNA, 120 bp, Artificial Sequence
  ENSG00000169116_1 (sequence is synthesized)
gcagaggagtcgctaccagcgcccagtgcgctctgtcagtccgcaaactccttgccgcccgccccgggctgggcaccaaataccaggctaccatggtctacaagactctcttcgctcttt

SEQ ID NO: 557261 - DNA, 120 bp, Artificial Sequence
  ENSG00000169116_2 (sequence is synthesized)
gcatcttaactgcaggatggagggtacagagtctgcctacatcagctcctttgtctgtttctcttccgacaaacattgtaccaccgaccaccatctggactagctctccacaaaacactg

SEQ ID NO: 557262 - DNA, 120 bp, Artificial Sequence
  ENSG00000169116_3 (sequence is synthesized)
atgcagacactgcctccccatccaacggcactcacaacaactcggtgctcccagttacagcatcagccccaacatctctgcttcctaagaacatttccatagagtccagagaagaggaga

SEQ ID NO: 557263 - DNA, 120 bp, Artificial Sequence
  ENSG00000169116_4 (sequence is synthesized)
tcaccagcccaggttcgaattgggaaggcacaaacacagacccctcaccttctgggttctcgtcaacaagcggtggagtccacttaacaaccacgttggaggaacacagctcgggcactc

SEQ ID NO: 557264 - DNA, 120 bp, Artificial Sequence
  ENSG00000169116_5 (sequence is synthesized)
ctgaagcaggcgtggcagctacactgtcgcagtccgctgctgagcctcccacactcatctcccctcaagctccagcctcatcaccctcatccctatcaacctcaccacctgaggtctttt

SEQ ID NO: 557265 - DNA, 120 bp, Artificial Sequence
  ENSG00000169116_6 (sequence is synthesized)
ctgcctccgttactaccaaccatagctccactgtgaccagcacccaacccactggagctccaactgcaccagagtccccgacagaggagtccagctctgaccacacacccacttcacatg

SEQ ID NO: 557266 - DNA, 120 bp, Artificial Sequence
  ENSG00000169116_7 (sequence is synthesized)
ccacagctgagccagtaccccaggagaaaacacccccaacaactgtgtcaggcaaagtgatgtgtgagctcatagacatggagaccaccaccacctttcccagggtgatcatgcaggaag

SEQ ID NO: 557267 - DNA, 120 bp, Artificial Sequence
  ENSG00000169116_8 (sequence is synthesized)
tagaacatgcattaagttcaggcagcatcgccgccattaccgtgacagtcattgccgtggtgctgctggtgtttggagttgcagcctacctaaaaatcaggcattcctcctatggaagac

SEQ ID NO: 557268 - DNA, 120 bp, Artificial Sequence
  ENSG00000169116_9 (sequence is synthesized)
ttttggacgaccatgactacgggtcctggggaaactacaacaaccctctgtacgatgactcctaacaatggaatatggcctgggatgaggattaactgttctttatttataagtgcttat

SEQ ID NO: 557269 - DNA, 120 bp, Artificial Sequence
  ENSG00000169116_10 (sequence is synthesized)
ccagtagaattaataagtacctgatgcgcattgaacgacaatcttaagccctgttttgttggtatggttgtttttgttttcctccctctcctctggctgctacaacttcccctttctggt

SEQ ID NO: 557270 - DNA, 120 bp, Artificial Sequence
  ENSG00000169116_11 (sequence is synthesized)
acaagaagaaccattctttaaaggtgagtggaggctgatttgcagctgaagtgggccagccttgcaccagccaggccagaccaccatggtgaaggcttctttccccactgcaggacccac

SEQ ID NO: 557271 - DNA, 120 bp, Artificial Sequence
  ENSG00000169116_12 (sequence is synthesized)
tttgagaaggaccgaggaggaggatttgggttgttttgttaggggttactttcaggggaacatttcatttgtgttatttcttaaacttctatttaggaaattacattaagtattaatgag

SEQ ID NO: 557272 - DNA, 120 bp, Artificial Sequence
  ENSG00000169116_13 (sequence is synthesized)
gggaaaggaaatgagctctacgaggatttcaccctgcatgggagagagcagggttttctcagattcctttttaatctctatttatctggttgtttctgacaggatgctgcctgcttggct

SEQ ID NO: 557273 - DNA, 120 bp, Artificial Sequence
  ENSG00000169116_14 (sequence is synthesized)
ctacaagctggaaagcagcttcttagctgcctaattaatgaaagatgaaaataggaagtgccctggagggggccagcaggtcacggggcagaatctctcaggttgctgtgggatctcagt

SEQ ID NO: 557274 - DNA, 120 bp, Artificial Sequence
  ENSG00000169116_15 (sequence is synthesized)
gtgcccctacctgttctcccctccaggccacctgtctctgtaaaggatgtctgctctgttcaaaaggcagctgggatcccagcccacaagtgatcagcagagttgcatttccaaagaaaa

SEQ ID NO: 557275 - DNA, 120 bp, Artificial Sequence
  ENSG00000169116_16 (sequence is synthesized)
aggctatgagatgagctgagttatagagagaaagggagaggcatgtacggtgtggggaagtggaagagaagctggcgggggagaaggaggctaacctgcactgagtacttcattaggaca

SEQ ID NO: 557276 - DNA, 120 bp, Artificial Sequence
  ENSG00000169116_17 (sequence is synthesized)
agtgagaatcagctattgataatggccagagatatccacagcttggaggagcccagagaccgtttgctttatacccacacagcaactggtccactgctttactgtctgttggataatggc

SEQ ID NO: 557277 - DNA, 120 bp, Artificial Sequence
  ENSG00000169116_18 (sequence is synthesized)
tgtaaaatgtttaaaaacaaaacaaaacaaaaaagaggcactagtctatctgcaattactcaacgaggcattttcataggaaacagactatgattaatccatttattcttcccacacact

SEQ ID NO: 557278 - DNA, 120 bp, Artificial Sequence
  ENSG00000169116_19 (sequence is synthesized)
taccttactaagtctttgctttaataaatgagcaaccctgggtatagtcttaaaattctgcacaataaattttgagaaagaattgttcctctttgtaggtatctgtgtattgcaatcatt

SEQ ID NO: 557279 - DNA, 120 bp, Artificial Sequence
  ENSG00000169116_20 (sequence is synthesized)
ctactagaagccaggaatgctgccaaacattctaccatgcacagcacaacctacaacagcaaagaatcatccaccccaaaatatcagtagtgccgagattgagaaaccctgatttatcac

SEQ ID NO: 557280 - DNA, 120 bp, Artificial Sequence
  ENSG00000169116_21 (sequence is synthesized)
aatgcccactgtgacagaacaagacactcacagattagtgatacgttttatttttaacaaaatgaaatgatgtgttaagtttttatttccaaagtgtttagtttattggctgatgggttg

SEQ ID NO: 557281 - DNA, 120 bp, Artificial Sequence
  ENSG00000169116_22 (sequence is synthesized)
ttcttggtatgcatggtgacctttttatttctgtgtgcttcctagagagctttatttcatggcgacaactctgtcttcttgtaacagctgatattagcaagcagcatcttatgtcctgat

SEQ ID NO: 557282 - DNA, 120 bp, Artificial Sequence
  ENSG00000169116_23 (sequence is synthesized)
ttcatatagtagaaaacaaacattgggtccgacttcaaaatgtgttgtattgtcctacagtgtcataaagaacctgaaaatgaacttttgtttctaaagttggaccttgctgccatgact

SEQ ID NO: 557283 - DNA, 120 bp, Artificial Sequence
  ENSG00000169116_24 (sequence is synthesized)
gtttagtttacagaaacttgaccccggctcatcctgtctctggctgtggcccggcaaagcactgaaaacccctctggtctcagagacagtaggggcagtgccactttctacaacctgcca

SEQ ID NO: 557284 - DNA, 120 bp, Artificial Sequence
  ENSG00000169116_25 (sequence is synthesized)
acccacacactggagtaattctgaaaaaaattattcctaaactctctaagtgtggacggagaatgagcaagccccagaagtattttacaaccagagtgggtaatgaggagggggcttact

SEQ ID NO: 557285 - DNA, 120 bp, Artificial Sequence
  ENSG00000169116_26 (sequence is synthesized)
ggaatcgtcatatctctgaatattgaaaacaacaactaaaaaagtggaccttctcagaaaaaaagggcagcaaatgaccaagggcgccccttctggccgtgcttggcttgagtaactgtc

SEQ ID NO: 557286 - DNA, 120 bp, Artificial Sequence
  ENSG00000169116_27 (sequence is synthesized)
tctctttccccacccccatcacagggctttcagtttggcaaaggaaaagcagataaaaacagaacattccatatgtttctttctccatcggccaaaaacattttgacacaatgtttgtga

SEQ ID NO: 557287 - DNA, 120 bp, Artificial Sequence
  ENSG00000169116_28 (sequence is synthesized)
aacacctttggagaggtgcacttctgaatgctgcctctgccgtaaatcctggggcaagggatcagcctcttcccaggaaccatcgccttctataaaccgtgaactcaagcaggcattttt

SEQ ID NO: 557288 - DNA, 120 bp, Artificial Sequence
  ENSG00000169116_29 (sequence is synthesized)
tttttcttaccgaaaggctgctattgtgcaagggcacataatgggtctgttgctcttattggcttccaaatgtgcatggcaaagagagagatgtgggcctagagcagatatattcagcaa

SEQ ID NO: 557289 - DNA, 120 bp, Artificial Sequence
  ENSG00000169116_30 (sequence is synthesized)
ggtgacagcttcccataacaattctaacacttcttatcttatgtgagaataaaatatttaagggttgaaccttattttgccaaatgtatcttttctgcttttgaattgggcagaagattt

SEQ ID NO: 557290 - DNA, 120 bp, Artificial Sequence
  ENSG00000169116_31 (sequence is synthesized)
tagcaactatattctacaaatgttacttataacacacacacacacatctgaaatatatgccgaaaattgacgtctttgacctcagggagagcacctgtccaggtctgcctaaaggaaatg

SEQ ID NO: 557291 - DNA, 120 bp, Artificial Sequence
  ENSG00000169116_32 (sequence is synthesized)
gctccagtgggtctaaacaaccacatcctatccatggataggtctagtcataacactttagagagaatgtcagagcaggagggaggcaagccgcctcttctcggccatcgactgcagatg

SEQ ID NO: 557292 - DNA, 120 bp, Artificial Sequence
  ENSG00000169116_33 (sequence is synthesized)
atgaaagagcgggattcaactttgttttcttttcctgtggccccagtgaaacctcctgccctccctgcacgtctgtgtcttcatttctaaaatgggggtgatgctttcatattgacctca

SEQ ID NO: 557293 - DNA, 120 bp, Artificial Sequence
  ENSG00000169116_34 (sequence is synthesized)
ccccatactacctcacagatgtgttgtgaggattaataaaattatgtctatggtattttcagtttctggagaaaaatacttatagacagtttaactattacatagatatataagtgatct

SEQ ID NO: 557294 - DNA, 120 bp, Artificial Sequence
  ENSG00000169116_35 (sequence is synthesized)
cagtttcttgtttgctgtgatactaatgtgttgttttaacttattccataaaatgacagttgtgtcctagccacatcagacagctatctaagctctggactacccctttgtgcagctgaa

SEQ ID NO: 557295 - DNA, 120 bp, Artificial Sequence
  ENSG00000169116_36 (sequence is synthesized)
tcactgcagggttgaccatgcctggtgccacagccatggtttccatttctagatgaaaggatggcctaggacataggtctcaaagactcttggatcagaatcaggagattagggaaaaca

SEQ ID NO: 557296 - DNA, 120 bp, Artificial Sequence
  ENSG00000169116_37 (sequence is synthesized)
ggatggatacctgagcactaacagcagtagacgtagacctctgtcctttaccatctgaggtcttctggattctttgtggggttaattttgatttgatgtcatctgtttgcccttcatctt

SEQ ID NO: 557297 - DNA, 120 bp, Artificial Sequence
  ENSG00000169116_38 (sequence is synthesized)
gcttgcaagtgtgcatggttcaatccctcacatccaggaaatgaattttgcaattgggccagatgctaatttgcacgttgattcaccttctttgcctttaagccttttttttcttttttt

SEQ ID NO: 557298 - DNA, 120 bp, Artificial Sequence
  ENSG00000169116_39 (sequence is synthesized)
tttttttggcaaatgaatgtaccatttcaactttgattttaatagtgctagttgatattggtaataatgctaaccaagagatcaatgccagatttttctcttggggtaagttagctgaag

SEQ ID NO: 557299 - DNA, 120 bp, Artificial Sequence
  ENSG00000169116_40 (sequence is synthesized)
tcatttaaagatggaaaggtgggaaaattctttgatatttgatgtcattgtatccacatttgttgtaagacatattgcataccaattataattatatcaattaaagttgataaaagcttc

SEQ ID NO: 557300 - DNA, 120 bp, Artificial Sequence
  ENSG00000169118_0 (sequence is synthesized)
ctgcgggtgggtagagaagcacttggcgcctcggggaggggaccgcgcccgcctcatttgcgccttgcagcactgctggaccaggttacaagatgttcacctaagattgagacctagtga

SEQ ID NO: 557301 - DNA, 120 bp, Artificial Sequence
  ENSG00000169118_1 (sequence is synthesized)
ctacatttcctacgggaacaaataaatggtttttcatctcccggagatacattacaaacaaatatggtgctaaaagaactccttacctttctctgactacaatttatttggacatacttt

SEQ ID NO: 557302 - DNA, 120 bp, Artificial Sequence
  ENSG00000169118_2 (sequence is synthesized)
tgtattgaagagaggtatacatactgaagctacttgctgtactataggagactctgtcctgtaggatcatggaccatcctagtagggaaaaggatgaaagacaacggacaactaaaccca

SEQ ID NO: 557303 - DNA, 120 bp, Artificial Sequence
  ENSG00000169118_3 (sequence is synthesized)
tggcacaaaggagtgcacactgctctcgaccatctggctcctcatcgtcctctggggttcttatggtgggacccaacttcagggttggcaagaagataggatgtgggaacttcggagagc

SEQ ID NO: 557304 - DNA, 120 bp, Artificial Sequence
  ENSG00000169118_4 (sequence is synthesized)
tcagattaggtaaaaatctctacaccaatgaatatgtagcaatcaaactggaaccaataaaatcacgtgctccacagcttcatttagagtacagattttataaacagcttggcagtgcag

SEQ ID NO: 557305 - DNA, 120 bp, Artificial Sequence
  ENSG00000169118_5 (sequence is synthesized)
gtgaaggtctcccacaggtgtattactttggaccatgtgggaaatataatgccatggtgctggagctccttggccctagcttggaggacttgtttgacctctgtgaccgaacatttactt

SEQ ID NO: 557306 - DNA, 120 bp, Artificial Sequence
  ENSG00000169118_6 (sequence is synthesized)
tgaagacggtgttaatgatagccatccagctgctttctcgaatggaatacgtgcactcaaagaacctcatttaccgagatgtcaagccagagaacttcctgattggtcgacaaggcaata

SEQ ID NO: 557307 - DNA, 120 bp, Artificial Sequence
  ENSG00000169118_7 (sequence is synthesized)
agaaagagcatgttatacacattatagactttggactggccaaggaatacattgaccccgaaaccaaaaaacacataccttatagggaacacaaaagtttaactggaactgcaagatata

SEQ ID NO: 557308 - DNA, 120 bp, Artificial Sequence
  ENSG00000169118_8 (sequence is synthesized)
tgtctatcaacacgcatcttggcaaagagcaaagccggagagatgatttggaagccctaggccatatgttcatgtatttccttcgaggcagcctcccctggcaaggactcaaggctgaca

SEQ ID NO: 557309 - DNA, 120 bp, Artificial Sequence
  ENSG00000169118_9 (sequence is synthesized)
cattaaaagagagatatcaaaaaattggtgacaccaaaaggaatactcccattgaagctctctgtgagaactttccagaggagatggcaacctaccttcgatatgtcaggcgactggact

SEQ ID NO: 557310 - DNA, 120 bp, Artificial Sequence
  ENSG00000169118_10 (sequence is synthesized)
tgattgggttgggagacctattcctactccagtagggtcagttcacgtagattctggtgcatctgcaataactcgagaaagccacacacatagggatcggccatcacaacagcagcctct

SEQ ID NO: 557311 - DNA, 120 bp, Artificial Sequence
  ENSG00000169118_11 (sequence is synthesized)
tcgaaatcagaatgtatcatcagagcgccgaggagagtgggaaattcagcccagccggcagaccaatacctcatacctaacgtctcacttggctgcagaccgccatgggggatcagtgca

SEQ ID NO: 557312 - DNA, 120 bp, Artificial Sequence
  ENSG00000169118_12 (sequence is synthesized)
ggtggttagctcaaccaatggagagctgaatgttgatgatcccacgggagcccactccaatgcaccaatcacagctcatgccgaggtggaggtagtggaggaagctaagtgctgctgttt

SEQ ID NO: 557313 - DNA, 120 bp, Artificial Sequence
  ENSG00000169118_13 (sequence is synthesized)
ctttaagaggaaaaggaagaagactgctcagcgccacaagtgaccagtgcctcccaggagtcctcaggccctggggactctgactcaattgtacctgcagctcctgccatttctcattgg

SEQ ID NO: 557314 - DNA, 120 bp, Artificial Sequence
  ENSG00000169118_14 (sequence is synthesized)
aagggactcctctttgggggagggtggatatccaaaccaaaaagaagaaaacagatgcccccagaaggggccagtgcgggcagccagggcctagtgggtcattggccatctccgcctgcc

SEQ ID NO: 557315 - DNA, 120 bp, Artificial Sequence
  ENSG00000169118_15 (sequence is synthesized)
taaggctctgagcaggtcccagagctgctgttcctccactgcttgcccatagggctgcctggttgactctccttcccattgtttacagtgaaggtgtcattcacaaaaactcaaggactg

SEQ ID NO: 557316 - DNA, 120 bp, Artificial Sequence
  ENSG00000169118_16 (sequence is synthesized)
ctattctccttcttccccttagtttactcctggtttttaccccaccctcaaccctctccagcataaaacctagtgagctaaaggctttgtctgcagaaggagatcaagaggctgggggta

SEQ ID NO: 557317 - DNA, 120 bp, Artificial Sequence
  ENSG00000169118_17 (sequence is synthesized)
aggccaagaaggtaggaggaaaatggcagacctgggctggagaagaaccttctccgtatcccaggtgtgcctggcagtatggtttcctcttcctctgtgcctgtgcagcattcatcccag

SEQ ID NO: 557318 - DNA, 120 bp, Artificial Sequence
  ENSG00000169118_18 (sequence is synthesized)
ctggccttggggttcaggttccttcttccctccctcctgtgaagttacactgtaggacacaagctgtgagcaatctgcagtctactgtccctgtgtgttggcgttcttagcttttttgac

SEQ ID NO: 557319 - DNA, 120 bp, Artificial Sequence
  ENSG00000169118_19 (sequence is synthesized)
aaactcttttctccaggtagtaggacaatgaaaattgttctaagcaaaggaaagaaaactgactttgttgcacttttagtttttttaaaaaaaacaaaaacaaaaacatggcagatgcat

SEQ ID NO: 557320 - DNA, 120 bp, Artificial Sequence
  ENSG00000169118_20 (sequence is synthesized)
atggttcctccaggagagatatttgtgcaccattaggaaaatcttctctgcagaggaagtagccttctttggagaaaatggaaaatgggttctgatatgtgatctcagagtagcccattt

SEQ ID NO: 557321 - DNA, 120 bp, Artificial Sequence
  ENSG00000169118_21 (sequence is synthesized)
cctagggcaccatggaaaacacaaatgtgatctttaagtatacctcttccccagtttggggaggaaaggactcagtttgcaccctttttgtatgtaaaataaaatgtcttacctttcttg

SEQ ID NO: 557322 - DNA, 120 bp, Artificial Sequence
  ENSG00000169118_22 (sequence is synthesized)
tgtttagttctgaccgaggctcagggtttgctagttgaaggggctaagtttgcgcagagataatctgcctccttgtgacctgcgtgcagtttcctaacatgctgcctgccatccagtagg

SEQ ID NO: 557323 - DNA, 120 bp, Artificial Sequence
  ENSG00000169118_23 (sequence is synthesized)
agcacagacagagattgcacactcctcctggccacaggatggccacagctccacatagagctcagtgcaggagacgtctgcccctcctcatttctgggacctttactctgagaggagctt

SEQ ID NO: 557324 - DNA, 120 bp, Artificial Sequence
  ENSG00000169118_24 (sequence is synthesized)
tgaaacaagcaagtgcaaaactgaaaatagattccttagcgtcttctgttctatcacctagtcactgcggctcacctcttctcttaattctgtattccatattaaaagtttttttctttc

SEQ ID NO: 557325 - DNA, 120 bp, Artificial Sequence
  ENSG00000169118_25 (sequence is synthesized)
cagaggacattctcagtggaaagagtttgatctgcagcacccagaagagaagccaaactcggtgtcattctgagtgaacactcaggttggcaagaaaacatacttgaattttcattcatc

SEQ ID NO: 557326 - DNA, 120 bp, Artificial Sequence
  ENSG00000169118_26 (sequence is synthesized)
ttctcagcagctgaagaatgtccctaccagagcatcttgacctaatcagcttacagtttgaaaacctagctctccagaacatgagatgagccagccgagccagactgtgaccaggaaaca

SEQ ID NO: 557327 - DNA, 120 bp, Artificial Sequence
  ENSG00000169118_27 (sequence is synthesized)
gctcatcccagagaaggagatgcttaacaaaaaaaaattgaaattgtttcccatgctgccagggacttccaactagatagccatgtgacgtcctggtgacttgggggaaaaattagtgat

SEQ ID NO: 557328 - DNA, 120 bp, Artificial Sequence
  ENSG00000169118_28 (sequence is synthesized)
tggaaaaaaagaggacagtgaacctgccttccacctgccagagggacctcagggtgtggcattatagggccaggaaaagaaaatcggtgtatcctatctgccccaatagctgagctgtag

SEQ ID NO: 557329 - DNA, 120 bp, Artificial Sequence
  ENSG00000169118_29 (sequence is synthesized)
catttgggctggcctgccttatcagaaaccaagcttatgaagatcttctcccagcaggtccatagcagtaggcttaggatgcagtatatggggccgcatttaaaaggagggaaagattgt

SEQ ID NO: 557330 - DNA, 120 bp, Artificial Sequence
  ENSG00000169118_30 (sequence is synthesized)
ttggtgctggaacattccagggaaaaggagactggaatgaaaggtctgaaattatcttctcaattggactccttccagaaaggtggccgtgcctctaagcatgtttttcccagtatgccc

SEQ ID NO: 557331 - DNA, 120 bp, Artificial Sequence
  ENSG00000169118_31 (sequence is synthesized)
taggcctccccccatggtgttttcatatgaggtactactgtgaaggatctggttcctcattcactgtttgacaagtctttcatgtgtggagttactcttctcatgcccaattttcatttg

SEQ ID NO: 557332 - DNA, 120 bp, Artificial Sequence
  ENSG00000169118_32 (sequence is synthesized)
agtttagtggcttaaccaaacaatgactcctcattccagcggtgacagaagagaaagggtcatttacatcaggaaagaggtcttgtatctgggagtagagagctaaccatggagcacagt

SEQ ID NO: 557333 - DNA, 120 bp, Artificial Sequence
  ENSG00000169118_33 (sequence is synthesized)
ggctggtgggtgacttagtctgatggtttgtggaccatagaagtcttcacctctggtttgaggtgcagggctgtcttttgtactggagggtgtggggatattttctgatagttgccattt

SEQ ID NO: 557334 - DNA, 120 bp, Artificial Sequence
  ENSG00000169118_34 (sequence is synthesized)
cttgaaaaattcccttgatgtaccttacacagagcagaaataacattaacatggatcagaggtactgggcttcatctgttccattggaccttggctagggaatatcatttcactggcatc

SEQ ID NO: 557335 - DNA, 120 bp, Artificial Sequence
  ENSG00000169118_35 (sequence is synthesized)
aaacctgcttagcttatgaaaagatggtaatatgtcatttctataaatgtttctatatatgaaacataaagtggcagggagatacaatatcacaccccttccccacaaggactgtgaata

SEQ ID NO: 557336 - DNA, 120 bp, Artificial Sequence
  ENSG00000169118_36 (sequence is synthesized)
ttgggatttatgtccttgccattacctagtggttacagccctatcactaaaatttacatcgtttctcagttgggatttgggcattgctaacttactgtatagaaagtttaacttttcctc

SEQ ID NO: 557337 - DNA, 83 bp, Artificial Sequence
  ENSG00000169118_37 (sequence is synthesized)
gcattgctaacttactgtatagaaagtttaacttttcctcacccctgtatagaaaatgccttgcctctcaagagagggcagag

SEQ ID NO: 557338 - DNA, 67 bp, Artificial Sequence
  ENSG00000169118_38 (sequence is synthesized)
gaaaaaaaaaaaagggcagagggaaatggtgggaatgcctggagcatcctggcactctatactctac

SEQ ID NO: 557339 - DNA, 120 bp, Artificial Sequence
  ENSG00000169118_39 (sequence is synthesized)
ggtgggaatgcctggagcatcctggcactctatactctactgagtgcctctcttcagcccctcaccctgcttccacacacacacacacaaaagcaaaggcactgaccagcttggctgcag

SEQ ID NO: 557340 - DNA, 120 bp, Artificial Sequence
  ENSG00000169118_40 (sequence is synthesized)
ggcaagctgccttgcagctggatttgcgactttttttttgtcttaaaatttttactggatcagttgtaggggactgtacttcctaagacactgttctcaccttccaacctcacaaatctc

SEQ ID NO: 557341 - DNA, 120 bp, Artificial Sequence
  ENSG00000169118_41 (sequence is synthesized)
ttactagatatttggtttttataacaagggtaaagaatcccaggtccctttagcatgcagagtaatggtgatccctccagagccattggcacttcaaagtggtcccagacctgggagatt

SEQ ID NO: 557342 - DNA, 120 bp, Artificial Sequence
  ENSG00000169118_42 (sequence is synthesized)
ctggtgggatcttccttaaaaataagcaaaaaacctgagtaccctagatgcaattggccatttgtttcaggcccatcagcgaatcagggctccctcctcaaccctactgctacagttcct

SEQ ID NO: 557343 - DNA, 120 bp, Artificial Sequence
  ENSG00000169118_43 (sequence is synthesized)
tagctgtatgcctcagccagatccttggggttagggcatgcactcgctgactgtccccacccatccacttgctctgtagtttctgagctttctccatttcacaagtatggtgcctaacga

SEQ ID NO: 557344 - DNA, 120 bp, Artificial Sequence
  ENSG00000169118_44 (sequence is synthesized)
tctttttctttaggattgatgcagttgtttttcctgaaagctaactcagcatctattcataaaaacccttaatagtatacattaggagttttcccaagctctacagtccctcagacattg

SEQ ID NO: 557345 - DNA, 120 bp, Artificial Sequence
  ENSG00000169118_45 (sequence is synthesized)
catcctaaacagatttgaggcacacaggccaagactccaccaaggcataaatggtcccccctactcccttttgaccagggtatcacttgtgtctctgcagtaagagttggtcaagttgct

SEQ ID NO: 557346 - DNA, 120 bp, Artificial Sequence
  ENSG00000169118_46 (sequence is synthesized)
ctacgcaccttggtgctttccagagatctcactccagactgcccccaagggtggatagagtatcctgacagccagtgtgcactcatgactgccttaattaacattcttctgctattatgg

SEQ ID NO: 557347 - DNA, 120 bp, Artificial Sequence
  ENSG00000169118_47 (sequence is synthesized)
agcctgtccagcaataaacagggtctaggaaggtacaagattagcttccagttaaaatcccattttatattggaatgcatgagctacagatgacagcagagatcctgaggtttctagaca

SEQ ID NO: 557348 - DNA, 120 bp, Artificial Sequence
  ENSG00000169118_48 (sequence is synthesized)
tgttgattgtctcttttttctaaatgaactccaagtacttagaaaacagtccctgtccatcagccagaaaaggtgaccatcacccctaaagtaatttccaaacttagttcagtgggaaga

SEQ ID NO: 557349 - DNA, 120 bp, Artificial Sequence
  ENSG00000169118_49 (sequence is synthesized)
tatgctggtagtgcatattcagtgttgattttcagtgctagtaaccacttttaatgccagaaatatgtaacaatgataatgtaacgtcaaagtggttactaaagattatagccttaactt

SEQ ID NO: 557350 - DNA, 72 bp, Artificial Sequence
  ENSG00000169118_50 (sequence is synthesized)
acaccaaagggctttattcggccgggagcatcagcaaacttaggtctcaaaaaacctaagggggtccacgta

SEQ ID NO: 557351 - DNA, 120 bp, Artificial Sequence
  ENSG00000169118_51 (sequence is synthesized)
tgaaaaatcttttctgtctcttcctctctgtgtgctgctcgtctcagactggatttctcatgcttgtaaccacagctttcttccttaactgttttaatttttgcatggtaccttaaggct

SEQ ID NO: 557352 - DNA, 120 bp, Artificial Sequence
  ENSG00000169118_52 (sequence is synthesized)
gctactgcccttctttagctgtgatttcggggaagacagtcacatttttctagttcacatgaaaaagacatagtgaaccgaaagaatcatgttatcagggctacagtggatagtagccat

SEQ ID NO: 557353 - DNA, 120 bp, Artificial Sequence
  ENSG00000169118_53 (sequence is synthesized)
atcagagccttaggactgttacagctgagcattatgatgttaacaactcagccatctggcacaggggaagaggcacctaaacagattcttctggacaaaagtcacatatgagcaagatca

SEQ ID NO: 557354 - DNA, 120 bp, Artificial Sequence
  ENSG00000169118_54 (sequence is synthesized)
agcagagtgttttgtccagcagtgaggccccttttcccacttcccagcacccacataaacaggaataatgtgctggaaatgaaaccaggtggcagaagcagctacacatgcaagagaagc

SEQ ID NO: 557355 - DNA, 120 bp, Artificial Sequence
  ENSG00000169118_55 (sequence is synthesized)
ctgattgggtccacattaaccagatgacaggagtgagagccttcacttacatttcggggaccatcagtgagaactgggatggcagtgaacctgaaataaagatcgttgaaataagactgg

SEQ ID NO: 557356 - DNA, 120 bp, Artificial Sequence
  ENSG00000169118_56 (sequence is synthesized)
tcttctcagaggaactttcgtttgatgcatctcccaagcccacatgcctcctgtgttccagccacctcttccatttcacatttaaaccagctctccattcccattgagttgccctaacaa

SEQ ID NO: 557357 - DNA, 120 bp, Artificial Sequence
  ENSG00000169118_57 (sequence is synthesized)
cattgtctccagtgtcagaaccatattaaggttcgtttctcagattgggagcctgcaacaccatacagccaacattgcctttgccacgccactgccaccatccccaccattgccctatgg

SEQ ID NO: 557358 - DNA, 120 bp, Artificial Sequence
  ENSG00000169118_58 (sequence is synthesized)
tgggcagatgaattccagaaaccctcagggagccaggataattaggcaacccatctgaattggccacgtaagtgacaggcacttatctctcgggttcttgcttttgcagactccagggaa

SEQ ID NO: 557359 - DNA, 120 bp, Artificial Sequence
  ENSG00000169118_59 (sequence is synthesized)
gtcctgtctagaggtcgatggcagagactcctagtctttcccatgaggggttgataggaatcaaattgggattcctttggctttgggttttgtttttttgttgttgtttttggttttcag

SEQ ID NO: 557360 - DNA, 120 bp, Artificial Sequence
  ENSG00000169118_60 (sequence is synthesized)
tttgttttttggtgtatggggggtgattttgtttctgaataagaaaaagaagaggcaaccatggcccttatgtgggtttatcctttttgagcaatgttttagccacaagtaaggaatctt

SEQ ID NO: 557361 - DNA, 120 bp, Artificial Sequence
  ENSG00000169118_61 (sequence is synthesized)
gaaagtcttttgtccagcaagcagtcttaaaaatgtttttcctaactccttttgcaggtgactaagtacaaaaaaatagttttctcattgtattcaaaatagtgagtaggttccctggat

SEQ ID NO: 557362 - DNA, 120 bp, Artificial Sequence
  ENSG00000169118_62 (sequence is synthesized)
aatacacagtggtagttgacatattttctcaaaacacaaccagaaaacccacttccggtatttgtaaatcacctttcaagggaaaaagtgaacacgtattccttgtatttctagtttgat

SEQ ID NO: 557363 - DNA, 120 bp, Artificial Sequence
  ENSG00000169118_63 (sequence is synthesized)
taccaaacctgatgttacaaagaaacctccgttctgtagacagaatttcttttatttttcttcttttactcctcacaatcactttcccagtgccatcaccatctataaggtctcagagca

SEQ ID NO: 557364 - DNA, 120 bp, Artificial Sequence
  ENSG00000169118_64 (sequence is synthesized)
gaggattattcatggtaataagtgggggtgtggtgcagccattccagtaacacccacaagaggacagctgttctgaatgtccccacccacccctctttcagtacaggtgagacattttca

SEQ ID NO: 557365 - DNA, 120 bp, Artificial Sequence
  ENSG00000169118_65 (sequence is synthesized)
gttcatgagctccagaccaaatcccaggccagcccttgcaccaaaagccttttttagaaggcttatcagtctattaggaatgtctcaggaaagatgagccatttctttggggagaaatat

SEQ ID NO: 557366 - DNA, 120 bp, Artificial Sequence
  ENSG00000169118_66 (sequence is synthesized)
atttacagatggaagtgtgtgactgcgtgtctgtgtgtgtgtgtggtgtgtgtgcgcacgtgagtgcgtgtgttcatctatgtgcatttcacttccataaagacccagcccaagctgctg

SEQ ID NO: 557367 - DNA, 120 bp, Artificial Sequence
  ENSG00000169118_67 (sequence is synthesized)
ggaaccatgtgttcctgagtattctcagaggttaaacaagtgacaagtgagcttctgaaattagtgtctcagcaagctggctttaggaatgagccccattttatcaagcagagaaaaaaa

SEQ ID NO: 557368 - DNA, 120 bp, Artificial Sequence
  ENSG00000169118_68 (sequence is synthesized)
ataacagcagaaaagataaagataaaccaaaaatatataccccccaatggaaaataatgttgattcagcaattcccataggatgtattacatgctctaatttattatattattatttatc

SEQ ID NO: 557369 - DNA, 120 bp, Artificial Sequence
  ENSG00000169118_69 (sequence is synthesized)
tgtctttgatctttgcccattgtactcttaaaaagatgttgggatgttgattgcgatttttaaacaactagataatgtataaatcagcagtggaaatcagttttaatgtgtggatgtgtc

SEQ ID NO: 557370 - DNA, 120 bp, Artificial Sequence
  ENSG00000169118_70 (sequence is synthesized)
tgattattgttaaatgcctctttttttactttttttttttttagatgtataatgtttcataaaccctggcactggtcacaaagctcagctgtgaaaatgaaatttgtagtatttttaaac

SEQ ID NO: 557371 - DNA, 120 bp, Artificial Sequence
  ENSG00000169118_71 (sequence is synthesized)
tgatgcgattcaagactcctgtgaacaaaaataatttggcattcttgtttcattccttggattaaatattgtcttctcctgtgagtcacttcaaaaataaatactgctgtctctcttcga

SEQ ID NO: 557372 - DNA, 120 bp, Artificial Sequence
  ENSG00000169122_0 (sequence is synthesized)
cagaccgaaccatcgcggccgccgccagccgggcccttcgcggccgcgcgtcctgggcccgttccgccagccccgtctgctctctacccgcggccccgcggcggcgaccgtgaacactcg

SEQ ID NO: 557373 - DNA, 120 bp, Artificial Sequence
  ENSG00000169122_1 (sequence is synthesized)
aacactcggcggcccctacagcccgctctcggcccttcgtccctcgcgggccccgactctccctccttgcagtcccccggagcctggctcccggctcgggccgcaccgccagggactggg

SEQ ID NO: 557374 - DNA, 120 bp, Artificial Sequence
  ENSG00000169122_2 (sequence is synthesized)
gtgagcggcccagaaatctccaaattggacatccagagcagcattcttgttctgtctacgtcttgaattagaaactatcaagctctgtaagtcctgaaaaggaaataaaaggtgcgtccc

SEQ ID NO: 557375 - DNA, 120 bp, Artificial Sequence
  ENSG00000169122_3 (sequence is synthesized)
tacccaagaggagaggtggccagtaaatgtcagctgaggcaccgaaggctgcgatgcaccagcccggtgccctgtgaggacggccacatcaatagtggtaacactcacaatttcctgctg

SEQ ID NO: 557376 - DNA, 120 bp, Artificial Sequence
  ENSG00000169122_4 (sequence is synthesized)
cagagagcattttaagaaaggacagcattcctgtgacctctgcctaccatccataaaatactcattcccctctcagctctgcctgcagttgaacacaaagacctggaggagactcccacc

SEQ ID NO: 557377 - DNA, 120 bp, Artificial Sequence
  ENSG00000169122_5 (sequence is synthesized)
tccttcagggagaagaaaggaggcagcgaagcagattaaaggaacttgtggcttgtggcctttttgtgcaagggccgcctggaaggggagaaaagtgtatgaaagccaccgtggcggtta

SEQ ID NO: 557378 - DNA, 120 bp, Artificial Sequence
  ENSG00000169122_6 (sequence is synthesized)
atgagctgtgagatgaggcgctgctgcggccgctgctgctgacactcgctcccaggctgcacccgccgcccttggcgcttcatgtacatgtgtctattcaggccttgcggaggcgcccag

SEQ ID NO: 557379 - DNA, 120 bp, Artificial Sequence
  ENSG00000169122_7 (sequence is synthesized)
aagagcatccaacacggctgccggggaaagaccgcccaccatgcccacggagaccctacagacaggtagcatggtgaagccggtcagccccgcgggcaccttcacctctgctgtgcccct

SEQ ID NO: 557380 - DNA, 120 bp, Artificial Sequence
  ENSG00000169122_8 (sequence is synthesized)
gcgcatcctgaacaaggggccagactacttccgcaggcaggccgagcccaaccccaagaggctcagcgccgtggagaggctggaggccgacaaggccaagtacgtcaagagccaggaggt

SEQ ID NO: 557381 - DNA, 120 bp, Artificial Sequence
  ENSG00000169122_9 (sequence is synthesized)
gatcaacgccaagcaggagcccgtgaagcccgccgtgctggccaagcccccggtgtgcccggctgccaagcgcgcactgggcagccccacgctcaaagtgttcggcaaccacgccaagac

SEQ ID NO: 557382 - DNA, 120 bp, Artificial Sequence
  ENSG00000169122_10 (sequence is synthesized)
cgagagcggcgtgcagagggagaacctgaagctggagatcctgaagaacatcatcaatagctccgagggctctagctcgggctcggggcacaagcacagctcccgcaactggccgcccca

SEQ ID NO: 557383 - DNA, 120 bp, Artificial Sequence
  ENSG00000169122_11 (sequence is synthesized)
ccggtcggaagccactgacctgcaccgtcactccttcgcggagtccctgaaggtctaccccacgcagggccgcaggagcccgcaggagggcggctcccacgtgggcaggagactgctgga

SEQ ID NO: 557384 - DNA, 120 bp, Artificial Sequence
  ENSG00000169122_12 (sequence is synthesized)
gcagtcagccgagtccttcctccacgtgtcccacagctcttcggacatccgcaaggtgaccagcgtgaagcccctcaaggccatcccctgcagtagctctgcccctcccctgcctcccaa

SEQ ID NO: 557385 - DNA, 120 bp, Artificial Sequence
  ENSG00000169122_13 (sequence is synthesized)
gcccaaaatcgcagccatcgcctccatgaagtcccccgaggccgaccctgtggaaccagcttgtggagtcagccgaagaccctccctccagcggtctaagtcagacttgagtgacagata

SEQ ID NO: 557386 - DNA, 120 bp, Artificial Sequence
  ENSG00000169122_14 (sequence is synthesized)
ggaaaactttgcaagggctaattctgacataatatccctcaacttccgcagcgcaagcatgatcagctcagactgtgaacagtctcaggacagtaacagtgaccttagaaatgatgacag

SEQ ID NO: 557387 - DNA, 120 bp, Artificial Sequence
  ENSG00000169122_15 (sequence is synthesized)
tgccaatgaccgcgtgccgtatggcatttctgccatcgaaagaaatgctagaatcatcaagtggttatatagcatcaaacaagctagagagtcacagaaggtctcccatgtgtaagacag

SEQ ID NO: 557388 - DNA, 120 bp, Artificial Sequence
  ENSG00000169122_16 (sequence is synthesized)
tgcgtggaaaggagggagcgtgggtctctgtgcttacgcagttgtgaaggttgtgaggtctccttgaagtgttgtgagcttctccactctttgtgttgcttgttgtgcaatgttttcaag

SEQ ID NO: 557389 - DNA, 120 bp, Artificial Sequence
  ENSG00000169122_17 (sequence is synthesized)
ttgcatgcttgtcaacatggggactgacctggcttccacgtcaccatcgctacagagcctggctgaacacgcgtcatctgccaaaagtttcaggccagaatctaattagggctttgctcg

SEQ ID NO: 557390 - DNA, 120 bp, Artificial Sequence
  ENSG00000169122_18 (sequence is synthesized)
taagcaaaactgtttacatgaaaatggtatacaacttcttcgatatttatgtggttcttgtgtttttatatcccgcgctattgtgtcttaattaaaagttttatcaactggcttttaagt

SEQ ID NO: 557391 - DNA, 120 bp, Artificial Sequence
  ENSG00000169122_19 (sequence is synthesized)
tgagagcagaatctttttgaaataaaaagccactttgcctacatgtgagactattccagtgggacagtaaatgggatctgctaccaaacagataatgactgaccgaacatagaaccaggc

SEQ ID NO: 557392 - DNA, 120 bp, Artificial Sequence
  ENSG00000169122_20 (sequence is synthesized)
tgggttttctgtggaataaagtggtgagcctgacgttaatcgtttacatgttgaaattctcttgccacttagtgaagcagtcattggggtaacaatgctacgttttgtgtccgattcagt

SEQ ID NO: 557393 - DNA, 120 bp, Artificial Sequence
  ENSG00000169122_21 (sequence is synthesized)
gtgtaaacgttggtggttctatgtaatactgaccccaaggaaagacgatcagatacaaagaaagatggttaaatctaggaggttgggtgtttgggggttttgttgatgttgttctgattg

SEQ ID NO: 557394 - DNA, 120 bp, Artificial Sequence
  ENSG00000169122_22 (sequence is synthesized)
tctgattgggataattcagaaattcctaatattatctttcgacagaatgaccaccctaaaacaaatactgaatgcctttaaaaaaaaaaaaagttgtggttttttgtttttttttttttt

SEQ ID NO: 557395 - DNA, 120 bp, Artificial Sequence
  ENSG00000169122_23 (sequence is synthesized)
tcgagaactactaatttcatgctatttctttctctctccctttgttgttatttgatttgggggaagggagtgaggcttgtgcagatttgagctatctgaagacatgaacagaagtcaaat

SEQ ID NO: 557396 - DNA, 120 bp, Artificial Sequence
  ENSG00000169122_24 (sequence is synthesized)
accagccatatcagtagagccttccattcaaaagtgaacacacttggtagctgaaccatatctgagcagcgtgattctgttgtcttgcatatgttattctctcaggctgtggatctttgt

SEQ ID NO: 557397 - DNA, 120 bp, Artificial Sequence
  ENSG00000169122_25 (sequence is synthesized)
tacagctctaggaaactgtagaaatacaatgctatgtagcttttccaccccatggtctctagtgctgcctatcaacttgtccccttttttcccaataacctgtcttccaggtggtacagt

SEQ ID NO: 557398 - DNA, 120 bp, Artificial Sequence
  ENSG00000169122_26 (sequence is synthesized)
tagctgtcactcagctgacaccatgatgtggcagcagagagggaaacctacaagtggtttgcctcattgcctttgccacatctgaagttctcagcagcactaccttagacttcatgagct

SEQ ID NO: 557399 - DNA, 120 bp, Artificial Sequence
  ENSG00000169122_27 (sequence is synthesized)
aataggaaactttttatggtgtaaatgctgtaagactttgtacatacttcagttgttatgaaatctttaaagaaaaaaagaaaaagttacgctaataaattgctgtggtgcaggcactaa

SEQ ID NO: 557400 - DNA, 120 bp, Artificial Sequence
  ENSG00000169122_28 (sequence is synthesized)
tgcattagagacatagatacagaggtgctgtactgtgttcttgcaacggtggaggtgctcggctggtaacgttaaagaaggaataaggcgcccgacagaaggcgtttgtctttgttgtgg

SEQ ID NO: 557401 - DNA, 120 bp, Artificial Sequence
  ENSG00000169122_29 (sequence is synthesized)
tgggaggtcagtgaaggaggctcagttcatgcaatttcctgctgcagagagcattttaagaaaggacagcattcctgtgacctctgcctaccatccataaaatactcattcccctctcag

SEQ ID NO: 557402 - DNA, 120 bp, Artificial Sequence
  ENSG00000169122_30 (sequence is synthesized)
tactcattcccctctcagatataagaagctctgatacgaaagccgggggctcctgttggctggaaggaggtttgcatctgccatcgccagcacttgcggagctgagctctgcctgcagtt

SEQ ID NO: 557403 - DNA, 120 bp, Artificial Sequence
  ENSG00000169122_31 (sequence is synthesized)
tcttacatggaggacttaaacaaaacagataaaagctgagtggatctgatcagagtggctggggcttggagcttcaccctatggcctttcccagaacccttcgttcccacatgctccaca

SEQ ID NO: 557404 - DNA, 120 bp, Artificial Sequence
  ENSG00000169122_32 (sequence is synthesized)
tcctcagctctgcagactccagcttgaaagccttcacccttgaaaaacaaccaagatgcatgaggaagagacagtcaaataaagttaaaaactgcaggagcagctgaagaccagcaggat

SEQ ID NO: 557405 - DNA, 120 bp, Artificial Sequence
  ENSG00000169122_33 (sequence is synthesized)
tccactggtcaaatgatgtgagacacaggggaagacctatgaaagcctgctggtgctaagacattgagctaaatgtcttaagtggtgaatagttcgaacagagaagacaggaacagactg

SEQ ID NO: 557406 - DNA, 120 bp, Artificial Sequence
  ENSG00000169122_34 (sequence is synthesized)
cacaggacaagcccatccaaatcagaggtgatgtagaagtggtgacggttcccctcctagtcatgaaggctctcaccctggaagtggactgtgaagtgctcaatgaggagaaggagtttc

SEQ ID NO: 557407 - DNA, 120 bp, Artificial Sequence
  ENSG00000169122_35 (sequence is synthesized)
gcatacccacctagatctccatctccccatgttcataagcagttgccatcacctgattgttgtagtactggggatgccataacatagataaaacctgctaagattctgtgagtcagtcct

SEQ ID NO: 557408 - DNA, 120 bp, Artificial Sequence
  ENSG00000169122_36 (sequence is synthesized)
gggttatcccagtacactggaaccacagctactggagatgtggccctagcattacagataaacaaactacaacaacaaaaaatggccttatagagattttagttcctataaccaactaat

SEQ ID NO: 557409 - DNA, 120 bp, Artificial Sequence
  ENSG00000169122_37 (sequence is synthesized)
tatatttcagatttttatatatggatatctgtaatattctggggaagaaatataaagacagaattcaccatgtctcctcgggactctgtgatgatctctgcaagaaacagtgcaaagaca

SEQ ID NO: 557410 - DNA, 120 bp, Artificial Sequence
  ENSG00000169122_38 (sequence is synthesized)
caaagacaatttttatttgctttaaaaactaaatgccttttttatgaagtatagttttaaaatactacatattttgtactaatagtactaaaaatcatggcaaattttttttctctgttt

SEQ ID NO: 557411 - DNA, 120 bp, Artificial Sequence
  ENSG00000169126_0 (sequence is synthesized)
agcgcgggcgcagagcgtctctggcgcgggcatacggtgcaacgggtccgcgggaatcttggatgcgcggaggtcccgagaccaggtgcgtgtgctaagctcaggtctgagcacggtgga

SEQ ID NO: 557412 - DNA, 120 bp, Artificial Sequence
  ENSG00000169126_1 (sequence is synthesized)
tcccatgggtgtggctctgaggaaattgacgcagtggactgctgccggacatggaactggaatcctcgaaatcacccctctaaatgaagcgatattgaaagaaattattgtgtttgtgga

SEQ ID NO: 557413 - DNA, 120 bp, Artificial Sequence
  ENSG00000169126_2 (sequence is synthesized)
gagttttatctataaacatcctcaagaggcaaaatttgtttttgtggaaccacttgaatggaacacaagtttggcgccctcagcatttgaatcaggttatgttgtcagtgaaacaacagt

SEQ ID NO: 557414 - DNA, 120 bp, Artificial Sequence
  ENSG00000169126_3 (sequence is synthesized)
caaatcagaagaagttgataaaaatggacagcctttgctatttctctctgtaccacaaattaaaattaggagctttgggcagctgtcacgcttgttacttattgccaaaactgggaagtt

SEQ ID NO: 557415 - DNA, 120 bp, Artificial Sequence
  ENSG00000169126_4 (sequence is synthesized)
gaaggaagcccaagcatgtgttgaagctaacagagaccccatagtaaaaatcctgggctctgattataatacaatgaaagaaaactcaattgcattaaatattcttggcaaaattaccag

SEQ ID NO: 557416 - DNA, 120 bp, Artificial Sequence
  ENSG00000169126_5 (sequence is synthesized)
agatgatgatcctgaaagtgaaattaagatgaagattgctatgctgcttaagcaattggatctgcacctcctcaatcattctctaaaacatatttcattagaaataagtttaagtcccat

SEQ ID NO: 557417 - DNA, 120 bp, Artificial Sequence
  ENSG00000169126_6 (sequence is synthesized)
gacggtgaagaaggatatagaactgctcaaacgtttctcaggaaaaggaaaccaaacagtcttggaatctattgaatatacctcagattatgaattttcaaatggatgtcgagccccacc

SEQ ID NO: 557418 - DNA, 120 bp, Artificial Sequence
  ENSG00000169126_7 (sequence is synthesized)
gtggagacaaattcgtggggaaatttgttatgtgctggtgaaacctcacgatggtgagactctgtgcattacttgcagtgcaggaggagtatttttaaatggtggcaaaacagatgatga

SEQ ID NO: 557419 - DNA, 120 bp, Artificial Sequence
  ENSG00000169126_8 (sequence is synthesized)
aggggacgttaattatgagagaaaaggttcaatttataaaaaccttgtcacatttttaagagaaaaatcaccaaaattttcagaaaatatgtctaaattgggaattagcttcagtgaaga

SEQ ID NO: 557420 - DNA, 120 bp, Artificial Sequence
  ENSG00000169126_9 (sequence is synthesized)
ccagcaaaaggaaaaggatcagcttggcaaagcccccaagaaggaagaagcagctgccctccgcaaagacatttctggttcagacaaaaggtcactggagaagaaccaaattaatttttg

SEQ ID NO: 557421 - DNA, 120 bp, Artificial Sequence
  ENSG00000169126_10 (sequence is synthesized)
gaggaatcaaatgaccaagagatgggaaccaagcttaaactggaagaccactgttaattacaaaggcaaaggctcagcaaaagaaatccaagaggacaaacacacaggaaaacttgaaaa

SEQ ID NO: 557422 - DNA, 120 bp, Artificial Sequence
  ENSG00000169126_11 (sequence is synthesized)
accaagaccatctgtttcacacggaagagcacaattacttcggaagagtgctgaaaagattgaggaaactgttagcgatagctcctcagaaagtgaggaagatgaagaaccacctgacca

SEQ ID NO: 557423 - DNA, 120 bp, Artificial Sequence
  ENSG00000169126_12 (sequence is synthesized)
tcgtcaggaagcaagtgcagatttgccatcagaatattggcaaattcagaagctggtgaaatatttaaagggaggaaatcaaacagctacagtgattgcgttgtgttcaatgagggattt

SEQ ID NO: 557424 - DNA, 120 bp, Artificial Sequence
  ENSG00000169126_13 (sequence is synthesized)
cagcttagctcaagaaacctgccagttggccatcagagatgttggaggcctggaagtgctgataaatttgcttgaaaccgatgaagtcaaatgtaagattggttcattaaaaatactgaa

SEQ ID NO: 557425 - DNA, 120 bp, Artificial Sequence
  ENSG00000169126_14 (sequence is synthesized)
ggaaatcagtcataatcctcaaatcagacagaatattgttgaccttgggggcttaccaattatggtgaatatacttgattctccacacaagagtctaaaatgtttggcagccgagactat

SEQ ID NO: 557426 - DNA, 120 bp, Artificial Sequence
  ENSG00000169126_15 (sequence is synthesized)
gaatgttgccaagtttaaaagagcacggcgggtggtgaggcagcacgggggtatcaccaaactggttgctctactagactgtgcacatgattccacaaaacctgcccaatcgagtctgta

SEQ ID NO: 557427 - DNA, 120 bp, Artificial Sequence
  ENSG00000169126_16 (sequence is synthesized)
tgaggccagagacgtggaagtggctcgctgtggggcactggccctgtggagctgcagtaagagtcatacgaataaagaagccatccgcaaagctgggggcattcctctgttggctcggct

SEQ ID NO: 557428 - DNA, 120 bp, Artificial Sequence
  ENSG00000169126_17 (sequence is synthesized)
gctgaagacttctcatgaaaacatgctaattccagtggtggggacattgcaagagtgtgcatcagaggaaaactaccgggctgcaatcaaagcagaaaggatcattgaaaaccttgtcaa

SEQ ID NO: 557429 - DNA, 120 bp, Artificial Sequence
  ENSG00000169126_18 (sequence is synthesized)
gaacctaaatagtgagaatgagcagctgcaggagcactgcgccatggccatttaccagtgtgctgaagataaggaaacccgggacctcgttaggctgcacggaggacttaagcccttggc

SEQ ID NO: 557430 - DNA, 120 bp, Artificial Sequence
  ENSG00000169126_19 (sequence is synthesized)
cagtctactcaataacactgacaataaagagcggttagctgctgtcacaggggctatatggaaatgttccatcagcaaagagaatgttaccaagtttcgggaatacaaagccattgaaac

SEQ ID NO: 557431 - DNA, 120 bp, Artificial Sequence
  ENSG00000169126_20 (sequence is synthesized)
cttggtgggacttctaacagatcagcctgaagaagtacttgtgaatgtggttggggccttgggagaatgctgccaagaacgtgaaaaccgagtcattgtccggaaatgtggtggcattca

SEQ ID NO: 557432 - DNA, 120 bp, Artificial Sequence
  ENSG00000169126_21 (sequence is synthesized)
accacttgtgaacctccttgttggaataaaccaagctcttcttgtgaatgttacaaaagcagttggtgcttgtgcagtagaacctgaaagtatgatgataattgatcgcttagatggagt

SEQ ID NO: 557433 - DNA, 120 bp, Artificial Sequence
  ENSG00000169126_22 (sequence is synthesized)
tcgtttgttgtggtccctgctgaaaaatcctcacccagacgtgaaggccagcgcagcatgggcactctgtccatgcatcaaaaatgcaaaggatgctggggaaatggttcgttcctttgt

SEQ ID NO: 557434 - DNA, 120 bp, Artificial Sequence
  ENSG00000169126_23 (sequence is synthesized)
tggtggtttggaacttattgtcaatttactgaaatcagataacaaagaagttctggcaagtgtatgtgctgccattaccaacatagcaaaagatcaagaaaatttagctgttatcacaga

SEQ ID NO: 557435 - DNA, 120 bp, Artificial Sequence
  ENSG00000169126_24 (sequence is synthesized)
tcatggagttgttcctttattgtccaaactggcaaatacaaataacaataaattgagacatcatctagcagaagctatttcacgttgctgtatgtggggcaggaatagagtggccttcgg

SEQ ID NO: 557436 - DNA, 120 bp, Artificial Sequence
  ENSG00000169126_25 (sequence is synthesized)
tgagcacaaagcagtggctccactagtgcgttatctgaaatcaaatgacaccaacgtgcatcgggcgacagctcaggccttgtaccaactctcagaagacgccgataactgcatcaccat

SEQ ID NO: 557437 - DNA, 120 bp, Artificial Sequence
  ENSG00000169126_26 (sequence is synthesized)
gcatgagaatggtgcagtaaagcttctactggatatggttgggtcccctgaccaggatctccaggaagctgcagctggttgtatatccaatatccgcaggctggctcttgctacagagaa

SEQ ID NO: 557438 - DNA, 120 bp, Artificial Sequence
  ENSG00000169126_27 (sequence is synthesized)
ggcaagatacacttgaaatttaaatggacattacaagctatcaaattctacatgacacaggacatgtcactcccatggccagaaagcctaaattgggaaacagttgttagcaaacccttt

SEQ ID NO: 557439 - DNA, 120 bp, Artificial Sequence
  ENSG00000169126_28 (sequence is synthesized)
caaccatctaaatgaaaacacacaaattgaaaatgcacagaatgtttttcatctgaaaattgcatggagacttttgtttctatttaatgttttcgagatatgacatgtgataagatggaa

SEQ ID NO: 557440 - DNA, 120 bp, Artificial Sequence
  ENSG00000169126_29 (sequence is synthesized)
agccaataaacctgtgataagtttctaagaatatgagaatatacgtatatgatgtatttttagttcagtgatgcttttgtatttgtggcgattttaataaaaaggatatggccttcccaa

SEQ ID NO: 557441 - DNA, 120 bp, Artificial Sequence
  ENSG00000169126_30 (sequence is synthesized)
gcatttagaatctaaagaaggacagaaagcattaagccaattatctgttgaaaagggaaaaatacgtgtagcaacagacatttgagtaaactgctactgacagcctgatgaggaataaat

SEQ ID NO: 557442 - DNA, 120 bp, Artificial Sequence
  ENSG00000169126_31 (sequence is synthesized)
ctctcagaagacgccgataactgcatcaccatgcatgagaatggtgcagtaaagacagagtctcgccatgtcgccaggctagagtgcagtgacaacgatcttggctcactgcaacctcca

SEQ ID NO: 557443 - DNA, 120 bp, Artificial Sequence
  ENSG00000169126_32 (sequence is synthesized)
tgaatgaacaattgaatgaaggaaggaatgagtgaatgaatggaaaaatagataacattaaattaagggggaaggattttgcctatacatttcctgtattaaaactaccatatagatcct

SEQ ID NO: 557444 - DNA, 120 bp, Artificial Sequence
  ENSG00000169126_33 (sequence is synthesized)
tcggagatgaaaataatacgtgtggctagcttgtgatgtattgatcagcttcttacaattgttcttatgttaatcatagaatgaaacttgttttttcccaaagggcaaaacagatgatga

SEQ ID NO: 557445 - DNA, 120 bp, Artificial Sequence
  ENSG00000169126_34 (sequence is synthesized)
aagcagagactgcagaacaatgaccaggtctgagggaggatgggcgaaacgcaggctagattttgacaggcatcaggtcaagggtttcctttccaagagagccgtacagggtggcagcag

SEQ ID NO: 557446 - DNA, 120 bp, Artificial Sequence
  ENSG00000169126_35 (sequence is synthesized)
ccagtggcatgtggagcctgggccattggtgtccatggaggtcagccagcgacaaggcagggcctggagcaggtgctgacagaagctagactgacctctgggccaaaattccctcttcct

SEQ ID NO: 557447 - DNA, 88 bp, Artificial Sequence
  ENSG00000169126_36 (sequence is synthesized)
tacagttgacccttgaacagcatgagtttgaagtgcatggatccaattttatgcagatttccttctgactcttcctcttcctcctctt

SEQ ID NO: 557448 - DNA, 120 bp, Artificial Sequence
  ENSG00000169126_37 (sequence is synthesized)
cactgtgtggaaagaagggccgttgctggggtgactctaacagggacagtgggccagcaggaagcagcaggtccctcctccctctgccagcctttcagtcttcctttagctgattctaat

SEQ ID NO: 557449 - DNA, 120 bp, Artificial Sequence
  ENSG00000169126_38 (sequence is synthesized)
agcatgatctttgacgttggaaagaccagttgagttgaaattctgccgcttactcaatggccttgggtgatgatgctgtaccctaattctaaaggaagcaatgaacccccttttcagcta

SEQ ID NO: 557450 - DNA, 120 bp, Artificial Sequence
  ENSG00000169126_39 (sequence is synthesized)
ccttactgataagcacttatgttctgccttctgctatcctgatggttcaggttgtctgtcttactatctacttcttgagtagagagaccacattaaatttattgctgtatctcgcagggc

SEQ ID NO: 557451 - DNA, 120 bp, Artificial Sequence
  ENSG00000169126_40 (sequence is synthesized)
atcttgctagtgtgcacaggctcgcctccctacctctgccccgatggtgtgaaggggagagggcgaggttccttagtggcagggctttgctgttcttcactctcagccccctgaaagcag

SEQ ID NO: 557452 - DNA, 120 bp, Artificial Sequence
  ENSG00000169126_41 (sequence is synthesized)
ttcttcctgcctctgagcctgtctttccttctgctgttaacttctttcctacttttcttgcatccctctctcttccttttcctgccgtctttcttgtagacatactagttgattgctgta

SEQ ID NO: 557453 - DNA, 120 bp, Artificial Sequence
  ENSG00000169126_42 (sequence is synthesized)
tttgctgactttatatggatattattttttcctctggccaaaattgttttaaaatcttgcaaggaaaatgtcttgcttttgatcacttccagagattaaaggagatggtttgttaatgtc

SEQ ID NO: 557454 - DNA, 120 bp, Artificial Sequence
  ENSG00000169126_43 (sequence is synthesized)
ggtccttcaagaagttactatatgaatgcacttggggaaaccagagctaccagaatcatgttcttcagtcatcattgtgatgatgcagatattgtcacttgcgtgtgctaagctcaggtc

SEQ ID NO: 557455 - DNA, 80 bp, Artificial Sequence
  ENSG00000169126_44 (sequence is synthesized)
cgataactgcatcaccatgcatgagaatggtgcagtaaaggctactcaacgggaagatgacttctactggatatggttgg

SEQ ID NO: 557456 - DNA, 120 bp, Artificial Sequence
  ENSG00000169126_45 (sequence is synthesized)
gtagaaggtaggagacagtgccctatgaagctgggacccagacctcttgggagggtccacttccaggctgtgctggtccccacagagttcagaccatctccatgaggcagggctccagat

SEQ ID NO: 557457 - DNA, 120 bp, Artificial Sequence
  ENSG00000169126_46 (sequence is synthesized)
ctctgaagagtgggcactgcccagttaatgctcatacctcgggaagaggatccttgtagagatggcagagctgggacctggacctttgaaaatggagcactggatgactgatagtgatat

SEQ ID NO: 557458 - DNA, 120 bp, Artificial Sequence
  ENSG00000169126_47 (sequence is synthesized)
atctgcaaattgactcatggatccataaattcactcctggaccccagttgagaaccctgaccctaaggattctgagcctgcaaaccctggagaaaagtggggtttggctgatctcagctg

SEQ ID NO: 557459 - DNA, 120 bp, Artificial Sequence
  ENSG00000169126_48 (sequence is synthesized)
ggccaggtgaggattagcaccaggttgcaagtagattcaattctgcttcctctgtcttcattgcaggatcagaggctacgtgagattagagtttcatagtccactgtgagcattaatttg

SEQ ID NO: 557460 - DNA, 120 bp, Artificial Sequence
  ENSG00000169129_0 (sequence is synthesized)
agagcagcgcagaagccgagccgcgaggagcgcactccgtggccccgatggagcggtacaaagccctggaacagctgctgacagagttggatgacttcctcaagattcttgaccaggaga

SEQ ID NO: 557461 - DNA, 120 bp, Artificial Sequence
  ENSG00000169129_1 (sequence is synthesized)
acctgagcagcacagcactggtgaagaagagctgcctggcggagctcctccggctttacaccaaaagcagcagctctgatgaggagtacatttatatgaacaaagtgaccatcaacaagc

SEQ ID NO: 557462 - DNA, 120 bp, Artificial Sequence
  ENSG00000169129_2 (sequence is synthesized)
aacagaatgcagagtctcaaggcaaagcgcctgaggagcagggcctgctacccaatggggagcccagccagcactcctcggcccctcagaagagccttccagacctcccgccacccaaga

SEQ ID NO: 557463 - DNA, 120 bp, Artificial Sequence
  ENSG00000169129_3 (sequence is synthesized)
tgattccagaacggaaacagcttgccatcccaaagacggagtctccagagggctactatgaagaggctgagccatatgacacatccctcaatgaggacggagaggctgtgagcagctcct

SEQ ID NO: 557464 - DNA, 120 bp, Artificial Sequence
  ENSG00000169129_4 (sequence is synthesized)
acgagtcctacgatgaagaggacggcagcaagggcaagtcggccccttaccagtggccctcgccggaggccggcatcgagctgatgcgtgacgcccgcatctgcgccttcctgtggcgca

SEQ ID NO: 557465 - DNA, 120 bp, Artificial Sequence
  ENSG00000169129_5 (sequence is synthesized)
agaagtggctgggacagtgggccaagcagctctgtgtcatcaaggacaacaggcttctgtgctacaaatcctccaaggaccacagccctcagctggacgtgaacctactgggcagcagcg

SEQ ID NO: 557466 - DNA, 120 bp, Artificial Sequence
  ENSG00000169129_6 (sequence is synthesized)
tcattcacaaggagaagcaagtgcggaagaaggagcacaagctgaagatcacgccgatgaatgccgatgtgattgtgctgggcctgcagagcaaggaccaggctgagcagtggctcaggg

SEQ ID NO: 557467 - DNA, 120 bp, Artificial Sequence
  ENSG00000169129_7 (sequence is synthesized)
tcatccaggaagtgagcggcctgccttccgaaggagcatctgaaggaaaccagtacaccccggatgcccagcgctttaactgccagaaaccagatatagctgagaagtacctgtcggctt

SEQ ID NO: 557468 - DNA, 120 bp, Artificial Sequence
  ENSG00000169129_8 (sequence is synthesized)
cagagtatgggagctccgtggatggccaccctgaggtcccagaaaccaaagacgtcaagaagaaatgttctgctggcctcaaactgagcaacctaatgaatctgggcaggaagaaatcca

SEQ ID NO: 557469 - DNA, 120 bp, Artificial Sequence
  ENSG00000169129_9 (sequence is synthesized)
cctcactggagcctgtggagaggtccctcgagacatccagttacctgaacgtgctggtgaacagccagtggaagtctcgctggtgctctgtcagggacaatcacctgcacttctaccagg

SEQ ID NO: 557470 - DNA, 120 bp, Artificial Sequence
  ENSG00000169129_10 (sequence is synthesized)
accggaaccggagcaaggtggcccagcaacccctcagcctggtgggctgcgaggtggtcccagaccccagccccgaccacctctactccttccgcatcctccacaagggcgaggagctgg

SEQ ID NO: 557471 - DNA, 120 bp, Artificial Sequence
  ENSG00000169129_11 (sequence is synthesized)
ccaagcttgaggccaagtcttccgaggaaatgggccactggctgggtctcctgctctctgagtcaggctccaagacagacccagaagagttcacctacgactatgtggatgccgataggg

SEQ ID NO: 557472 - DNA, 120 bp, Artificial Sequence
  ENSG00000169129_12 (sequence is synthesized)
tctcctgtattgtgagtgcggccaaaaactctctcttactgatgcagagaaagttctcagagcccaacacttacatcgatggcctgcctagccaggaccgccaggaggagctgtatgacg

SEQ ID NO: 557473 - DNA, 120 bp, Artificial Sequence
  ENSG00000169129_13 (sequence is synthesized)
acgtggacctgtcagagctcacagctgcggtggagcctaccgaggaagccacccctgttgcagatgacccaaatgagagagaatctgaccgagtgtacctggacctcacacctgtcaagt

SEQ ID NO: 557474 - DNA, 120 bp, Artificial Sequence
  ENSG00000169129_14 (sequence is synthesized)
cctttctgcatggccccagcagtgcacaggcccaggcctcctccccgacgttgtcctgcctggacaatgcaactgaggccctcccggcagactcaggcccaggtcccaccccagatgagc

SEQ ID NO: 557475 - DNA, 120 bp, Artificial Sequence
  ENSG00000169129_15 (sequence is synthesized)
tgcataaagtgtccagagaacctgggagaacagcagctggagagtttggagccagaggatccttccctgagaatcaccaccgtcaaaatccagacggaacagcagagaatctccttccca

SEQ ID NO: 557476 - DNA, 120 bp, Artificial Sequence
  ENSG00000169129_16 (sequence is synthesized)
ccgagctgcccggatgccgtggtggccaccccacctggtgccagcccacctgtgaaggacaggttgcgcgtgaccagtgcagagatcaagcttggcaagaatcggacagaagctgaggtg

SEQ ID NO: 557477 - DNA, 120 bp, Artificial Sequence
  ENSG00000169129_17 (sequence is synthesized)
aagcggtacacagaggagaaggagaggcttgaaaagaagaaggaagaaatccgggggcacctggctcagctccggaaagagaaacgggagctaaaggaaaccctactgaaatgcacagac

SEQ ID NO: 557478 - DNA, 120 bp, Artificial Sequence
  ENSG00000169129_18 (sequence is synthesized)
aaggaagtcctggcgagcctggagcagaagctgaaggaaattgacgaggagtgccggggcgaggagagcaggcgcgtggacctggagctcagcatcatggaggtgaaggacaacctgaag

SEQ ID NO: 557479 - DNA, 120 bp, Artificial Sequence
  ENSG00000169129_19 (sequence is synthesized)
aaggctgaggcagggcctgtgacgttaggcaccaccgtggacaccacccacctggagaatgtgagcccccgccccaaagctgtcacacctgcctctgccccagactgtaccccagtcaac

SEQ ID NO: 557480 - DNA, 120 bp, Artificial Sequence
  ENSG00000169129_20 (sequence is synthesized)
tctgcaaccacactcaagaacaggcctctctcggtcgtggtcacaggcaaaggcactgtactccagaaagccaaggaatgggagaagaaaggagcaagttagaaaacaagcttcatctaa

SEQ ID NO: 557481 - DNA, 120 bp, Artificial Sequence
  ENSG00000169129_21 (sequence is synthesized)
agactctcatgtcaatgtggaccttggtgacaatcctgctttgttaaagcaaaaactatgcgaaagggtgagtctgtttagaagaaaaagcaaagactgaggtactgtgaatggagagct

SEQ ID NO: 557482 - DNA, 120 bp, Artificial Sequence
  ENSG00000169129_22 (sequence is synthesized)
tcagctaagaggaggctctgtcccttttcagagccaaaggaaataatacaacaaaaaggaggcttctttggagacctaagtctattggatgtaaacaagacgttgtatttagggatgttc

SEQ ID NO: 557483 - DNA, 120 bp, Artificial Sequence
  ENSG00000169129_23 (sequence is synthesized)
tgtgtttctttcttttttgaagttgtcatcaattgctttactaagatttttaaatagtgaaaacctcctgtttagactttggtggaagatgaatcaaggaagcagggccctgtcttatgg

SEQ ID NO: 557484 - DNA, 120 bp, Artificial Sequence
  ENSG00000169129_24 (sequence is synthesized)
gtcacgtgtctttggtgagtgagaagacctaaactcctggccatcatctcttatccaatacttagcagttggggattaaaccatccttgccttcagttctctccaatattaccaggccca

SEQ ID NO: 557485 - DNA, 120 bp, Artificial Sequence
  ENSG00000169129_25 (sequence is synthesized)
actcagtcttcagtgattttaaacagcattgacatcatctgtaaaaccatcatctgtaaaaccatctatgacatgagttttgagaaacaataatggggaaaatatttgggaccaagctga

SEQ ID NO: 557486 - DNA, 120 bp, Artificial Sequence
  ENSG00000169129_26 (sequence is synthesized)
agcactaatcccactaagttaaagacttctttccagtccaaggcaggcctgaatcaactgtctttaaataaaattttaagtgatgctgtattatatataggaaaaaatgcttaaaatcct

SEQ ID NO: 557487 - DNA, 120 bp, Artificial Sequence
  ENSG00000169129_27 (sequence is synthesized)
gtcatttagaacagtgaaaagtatcttttgagattaaagtgactctttactgtaggaaaaatattactctgtgtttacagattcattgctgtggtcaggccatttttaagggaagagtta

SEQ ID NO: 557488 - DNA, 120 bp, Artificial Sequence
  ENSG00000169129_28 (sequence is synthesized)
tttaatataaatagtctctgattttaagttctgtttaatgttcattctccttccaagaacaaagtggtgatttttggttagggtgatcgccctcttaaaattggcagtgctgttccttgt

SEQ ID NO: 557489 - DNA, 120 bp, Artificial Sequence
  ENSG00000169129_29 (sequence is synthesized)
gctgcccctgtcttttcctctgatggcatttttttttttttttttttaacacaggttgaaacatttcatctattatctctgcctcatttctggagggttgtgtatcagttctctaacact

SEQ ID NO: 557490 - DNA, 120 bp, Artificial Sequence
  ENSG00000169129_30 (sequence is synthesized)
tgttcctgagaactaaatgtcttttttattcttatttcctctctcataaacatttggtgaccttttaccaagtggtgagttagttaggttttttaaaataaaatgttcattgtatttgaa

SEQ ID NO: 557491 - DNA, 120 bp, Artificial Sequence
  ENSG00000169129_31 (sequence is synthesized)
ggcgcgcaccgactcaagagccgactgtcagcctcggcgggccggagttctccggcgctgggacaggggcgctgggacaggggcgctgggggcgagccctggcgggggccaggtccgagg

SEQ ID NO: 557492 - DNA, 80 bp, Artificial Sequence
  ENSG00000169129_32 (sequence is synthesized)
cgagccctggcgggggccaggtccgaggaccctgggcgcggcggccccgccaggaggtccggccgcgagcgtgacctcac

SEQ ID NO: 557493 - DNA, 120 bp, Artificial Sequence
  ENSG00000169129_33 (sequence is synthesized)
gcgaggagcgcactccgtggccccgatggagcggtacaaagcacaggggtgttgctgtctggtggtacagagaaggatccggcaggtttctgcgtccctggaacagctgctgacagagtt

SEQ ID NO: 557494 - DNA, 120 bp, Artificial Sequence
  ENSG00000169129_34 (sequence is synthesized)
ctgggtctccagcacaccctggagaaaagcaggtcagggggtggtgcttctgtttccagatgagcaaactagggctgagggagagggcgttctctggtcagggtggtagagccagtctcg

SEQ ID NO: 557495 - DNA, 120 bp, Artificial Sequence
  ENSG00000169129_35 (sequence is synthesized)
tggaagccggctgagccactgaaacagaatcagttttctcatggaccaaacggggatagtgtctggcctgcgccaccccaagtgtattgtgaagatgaaatgagaaggggttttttgttg

SEQ ID NO: 557496 - DNA, 120 bp, Artificial Sequence
  ENSG00000169129_36 (sequence is synthesized)
tggttgctggaaggagatcctagaagggaggaatgggggagaagatggcaaagggatcctaggacgaggcgtatgggcaagggaagcttgtctttctgggaggaaaatctcgaaccaaga

SEQ ID NO: 557497 - DNA, 120 bp, Artificial Sequence
  ENSG00000169129_37 (sequence is synthesized)
atttcaggaagaaggcactgggaaaagagggaggaggtgccctcagatccatggaggtgagtgtcagcccccagatctcttgtgtggccaccactttcacggcaaccactcctcactggg

SEQ ID NO: 557498 - DNA, 120 bp, Artificial Sequence
  ENSG00000169129_38 (sequence is synthesized)
tcactcccagcctcccttggggccagcagaaatgtcactaaggtaggggcccatcttctgacccaggtggtgctttgtggcttttggcaccagctctgagcaagggctcggcactcacca

SEQ ID NO: 557499 - DNA, 120 bp, Artificial Sequence
  ENSG00000169129_39 (sequence is synthesized)
aggagtggccatggctttgccatgccttcagctcagtctctggcactgaccaaccagaaaggtgtctgcacttggttcgagcatccttccctgtgagcttggggatgcttcagttcttgc

SEQ ID NO: 557500 - DNA, 120 bp, Artificial Sequence
  ENSG00000169129_40 (sequence is synthesized)
tctaccattaaaactaaagaaacagactcacataggtggtttgaattgcccaaagttgcccacccaactactggcaaaattctcagcaagttgtgaatgaggaatccatgctatgatgcg

SEQ ID NO: 557501 - DNA, 120 bp, Artificial Sequence
  ENSG00000169129_41 (sequence is synthesized)
gtttctccctgatggctagtcaaaaaagtatcattaatcatttactcatttactcatttgtacactaaagaacatgcctagggctgcctttgcttttggcaaattctgctccttattcct

SEQ ID NO: 557502 - DNA, 120 bp, Artificial Sequence
  ENSG00000169129_42 (sequence is synthesized)
atcctccttacctgctggagatatttggaggtcccacaacaatggctaaccaataaatccatgcaagcatctgaacctccactcccttgttgctgtgagagacatcacttataggcactc

SEQ ID NO: 557503 - DNA, 120 bp, Artificial Sequence
  ENSG00000169129_43 (sequence is synthesized)
gctgttgtgccacagtctcaaaatctctgaataggcactctaagcagtgatgaacacacagggtttgaaacatttatcacctctgtgcctaaaatagtttttctcacattttttctatgt

SEQ ID NO: 557504 - DNA, 120 bp, Artificial Sequence
  ENSG00000169129_44 (sequence is synthesized)
atatcaaggttgctacagtggataactaactatctttttggtggggggtgggtgctggtatttgaatggtaccctaggaatgggagaagaaaggagcaagttagaaaacaagcttcatct

SEQ ID NO: 557505 - DNA, 120 bp, Artificial Sequence
  ENSG00000169129_45 (sequence is synthesized)
gccgagccgcgaggagcgcactccgtggccccgatggagcggtacaaagcctccaggtctctactcacgatgaaagaggcttcggggattctacttcatgaatgaagcccttagcatgtg

SEQ ID NO: 557506 - DNA, 120 bp, Artificial Sequence
  ENSG00000169129_46 (sequence is synthesized)
tgcgtcccctcctgcagcccggtcccctcctgcatctgcgtcccctcctggagcccagtcccctcttgcatccgcatccgcttcccctcccgcagccccgccccctcctgcatctgtgtg

SEQ ID NO: 557507 - DNA, 120 bp, Artificial Sequence
  ENSG00000169129_47 (sequence is synthesized)
ccctcccgaagccccgccccctcctgcatctgcgtcccctcctgcagccctgtcccctcctgcatctgcacttcctcctgcaggttacctgaacgtgctggtgaacagccagtggaagtc

SEQ ID NO: 557508 - DNA, 120 bp, Artificial Sequence
  ENSG00000169131_0 (sequence is synthesized)
agacgccgtcggggcggagccgggtcgcgaggctgcatcccggccggcggttccggagcctcgcggctggggaggcgcggcccgggacgctcgagcttagggagatctgccttctggaga

SEQ ID NO: 557509 - DNA, 120 bp, Artificial Sequence
  ENSG00000169131_1 (sequence is synthesized)
ctgcgccgtcctcccgggagagccagaaagaggacatggctgctgggcagcgggaagcgaggccccaggtgtcactgacgtttgaggatgtggctgtgctgtttacccgagatgagtgga

SEQ ID NO: 557510 - DNA, 120 bp, Artificial Sequence
  ENSG00000169131_2 (sequence is synthesized)
gaaagctggccccttctcagagaaacttgtaccgggatgtgatgctggagaactataggaacctggtctcactggggctcccatttaccaaaccaaaagtgatctccctgttgcagcaag

SEQ ID NO: 557511 - DNA, 120 bp, Artificial Sequence
  ENSG00000169131_3 (sequence is synthesized)
gagaagatccctgggaggtggagaaagacggttctggcgtctcctctctaggatcgaagagcagtcataaaaccacaaagtcaacgcaaacacaagactcttcatttcagggactgatac

SEQ ID NO: 557512 - DNA, 120 bp, Artificial Sequence
  ENSG00000169131_4 (sequence is synthesized)
tgaaaagatccaacaggaatgtaccttgggatttgaaattagaaaagccttacatatatgaaggcagattagagaaaaagcaggataaaaagggaagttttcagatagtttcagccaccc

SEQ ID NO: 557513 - DNA, 120 bp, Artificial Sequence
  ENSG00000169131_5 (sequence is synthesized)
acaaaaaaatccccactatagaaagaagccataaaaatactgaattgagccaaaacttcagcccaaagtcagtgcttattaggcaacagatacttcccagagaaaaaacaccaccaaaat

SEQ ID NO: 557514 - DNA, 120 bp, Artificial Sequence
  ENSG00000169131_6 (sequence is synthesized)
gtgaaatacaaggaaacagcctcaaacagaattcacaattacttaatcaaccaaaaattacagcagataaacgctataaatgtagtctgtgtgaaaaaaccttcattaacacttcatccc

SEQ ID NO: 557515 - DNA, 120 bp, Artificial Sequence
  ENSG00000169131_7 (sequence is synthesized)
ttcgtaaacatgagaaaaaccatagtggagagaaactatttaagtgtaaagaatgttcaaaagcctttagccaaagttcagctcttattcaacatcaaataacgcatactggagagaaac

SEQ ID NO: 557516 - DNA, 120 bp, Artificial Sequence
  ENSG00000169131_8 (sequence is synthesized)
cctacatatgtaaagaatgtgggaaagcctttactctcagtacatccctttataaacatctaagaacccatactgtggagaaatcctacagatgtaaagaatgtggtaaatccttcagcc

SEQ ID NO: 557517 - DNA, 120 bp, Artificial Sequence
  ENSG00000169131_9 (sequence is synthesized)
gaaggtcaggcctttttatacatcaaaaaattcatgctgaagaaaacccttgtaagtataatccgggtaggaaggcatctagttgcagcacatccctttctggatgtcaaagaattcatt

SEQ ID NO: 557518 - DNA, 120 bp, Artificial Sequence
  ENSG00000169131_10 (sequence is synthesized)
tagaaagaagtcctacttatgtaatgaatgtggcaacacctttaagtctagctcatcccttcgttatcatcagagaattcacactggagagaagccttttaaatgtagtgaatgtgggag

SEQ ID NO: 557519 - DNA, 120 bp, Artificial Sequence
  ENSG00000169131_11 (sequence is synthesized)
agccttcagccagagtgcctctcttattcaacatgaaagaattcacaccggagaaaagccctatagatgcaatgaatgtgggaaaggctttacttctatttcacgacttaatagacaccg

SEQ ID NO: 557520 - DNA, 120 bp, Artificial Sequence
  ENSG00000169131_12 (sequence is synthesized)
aatcattcatactggagagaagttttataattgtaatgaatgtggtaaagccttaagctcccactcaacacttattattcacgagcgaattcatactggagaaaaaccatgtaaatgtaa

SEQ ID NO: 557521 - DNA, 120 bp, Artificial Sequence
  ENSG00000169131_13 (sequence is synthesized)
agtatgtggaaaagccttcagacagagttcagctctcattcaacatcagagaatgcatactggagaaagaccctataaatgtaacgagtgtgggaaaacattcaggtgtaactcatcact

SEQ ID NO: 557522 - DNA, 120 bp, Artificial Sequence
  ENSG00000169131_14 (sequence is synthesized)
tagtaatcaccagagaattcatactggagagaaaccatatcgatgtgaggaatgtgggatatcttttggccaaagttcagctcttattcagcatcgaaggattcatacaggagaaaaacc

SEQ ID NO: 557523 - DNA, 120 bp, Artificial Sequence
  ENSG00000169131_15 (sequence is synthesized)
ctttaaatgtaatacatgtggaaaaacttttagacaaagctcatcacgtattgcacatcagagaattcatactggagagaaaccctatgaatgtaatacatgtgggaaacttttcaacca

SEQ ID NO: 557524 - DNA, 120 bp, Artificial Sequence
  ENSG00000169131_16 (sequence is synthesized)
taggtcatcccttactaatcattataaaattcatatcgaagaggacccctagaaagtagatttgtatgtgtgaaagccttaaaccaaagctcatcgaagaatacatccttgagagagatg

SEQ ID NO: 557525 - DNA, 120 bp, Artificial Sequence
  ENSG00000169131_17 (sequence is synthesized)
taataaatgtaatggatgtgaaaaaaactgtaataatttagccctcattaggtatttaattccatggataaacctcagctatataatagatatgaggaaagtgtttgtgcctgtcagaca

SEQ ID NO: 557526 - DNA, 120 bp, Artificial Sequence
  ENSG00000169131_18 (sequence is synthesized)
cttaaaaaaataacctgagatgaagaatttacaattgaagacattgactttagccatttgtgaaatgggtttgctttttcccttttcctacagacgtatatgctagatgtcacgtgatca

SEQ ID NO: 557527 - DNA, 120 bp, Artificial Sequence
  ENSG00000169131_19 (sequence is synthesized)
tcagaaacagatatccgagtgggtggggaggtgtgctttagatttctcattagaagaccaccaaactggtaatatttttatagcattttaatagcttgatcaaattgtacctttttagag

SEQ ID NO: 557528 - DNA, 120 bp, Artificial Sequence
  ENSG00000169131_20 (sequence is synthesized)
aaaaggaccaaaataaaagaaaaatgaattatgaactacctctcagtctctggggtttgtccttttcctaccctgatgtcaaacttatgcatggatttcattaaaaaagaaaaagaaaaa

SEQ ID NO: 557529 - DNA, 120 bp, Artificial Sequence
  ENSG00000169131_21 (sequence is synthesized)
gtgcagtgggtgctggcagtgccagctggcgccgaggaactcagcggcgtggggcgagccctggccctggtgggctcagcgggtcgctgctgccactgcggctccagcgtcccctccgta

SEQ ID NO: 557530 - DNA, 120 bp, Artificial Sequence
  ENSG00000169131_22 (sequence is synthesized)
agccccaagcctgtggggcctgggcctggccgggcggcccagcgctgctctggtccgcgggctcctggctcctcccgaatccctgtgagggcgcgcggggtccttctcagcgggagtcgg

SEQ ID NO: 557531 - DNA, 120 bp, Artificial Sequence
  ENSG00000169131_23 (sequence is synthesized)
ggtctcactggggccatacataaacaggcagtggtctgaatttggcccatgacccgtagtttgctgatcactgccatccttaaaagggagtcacataggccgggcgcggtggctcacacc

SEQ ID NO: 557532 - DNA, 120 bp, Artificial Sequence
  ENSG00000169131_24 (sequence is synthesized)
aggccgaggcgggcagatcacaagggctcccatttaccaaaccaaaagtgatctccctgttgcagcaaggagaagatccctgggaggtggagaaagacggttctggcgtctcctctctag

SEQ ID NO: 557533 - DNA, 120 bp, Artificial Sequence
  ENSG00000169136_0 (sequence is synthesized)
attccctgtcctcggatcacagtctcttctcactacagtgtcgccgcctctgcctgcgtagccccggccatggctctgtagcctcgacccctttgtgcccccggcccgtctccgcgctca

SEQ ID NO: 557534 - DNA, 120 bp, Artificial Sequence
  ENSG00000169136_1 (sequence is synthesized)
ccacgcctgcgctctccgctcccaccttctttcttcagccgaggccgccgccgcctctccttgctgcagccatggagtcttccactttcgccttggtgcctgtcttcgcccacctgagca

SEQ ID NO: 557535 - DNA, 120 bp, Artificial Sequence
  ENSG00000169136_2 (sequence is synthesized)
tcctccagagcctcgtgccagctgctggtgcagcctctcctgttgccatcagtgcccagcacctgtgctacagccatgtcactcctggcgaccctggggctggagctggacagggccctg

SEQ ID NO: 557536 - DNA, 120 bp, Artificial Sequence
  ENSG00000169136_3 (sequence is synthesized)
ctcccagctagtgggctgggatggctcgtagactatgggaaactccccccggcccctgcccccctggctccctatgaggtccttgggggagccctggagggcgggcttccagtgggggga

SEQ ID NO: 557537 - DNA, 120 bp, Artificial Sequence
  ENSG00000169136_4 (sequence is synthesized)
gagcccctggcaggtgatggcttctctgactggatgactgagcgagttgatttcacagctctcctccctctggagcctcccttaccccccggcaccctcccccaaccttccccaacccca

SEQ ID NO: 557538 - DNA, 120 bp, Artificial Sequence
  ENSG00000169136_5 (sequence is synthesized)
cctgacctggaagctatggcctccctcctcaagaaggagctggaacagatggaagacttcttcctagatgccccgcccctcccaccaccctccccgccgccactaccaccaccaccacta

SEQ ID NO: 557539 - DNA, 120 bp, Artificial Sequence
  ENSG00000169136_6 (sequence is synthesized)
ccaccagccccctccctccccctgtccctcccctcctttgacctcccccagccccctgtcttggatactctggacttgctggccatctactgccgcaacgaggccgggcaggaggaagtg

SEQ ID NO: 557540 - DNA, 120 bp, Artificial Sequence
  ENSG00000169136_7 (sequence is synthesized)
gggatgccgcctctgcccccgccacagcagccccctcctccttctccacctcaaccttctcgcctggccccctacccacatcctgccaccacccgaggggaccgcaagcaaaagaagaga

SEQ ID NO: 557541 - DNA, 120 bp, Artificial Sequence
  ENSG00000169136_8 (sequence is synthesized)
gcacggaatcgcgagctgaaggaacgggcagagtccgtggagcgcgagatccagtacgtcaaggacctgctcatcgaggtttacaaggcccggagccagaggacccgtagctgctagaag

SEQ ID NO: 557542 - DNA, 120 bp, Artificial Sequence
  ENSG00000169136_9 (sequence is synthesized)
gaagggcaggggtgtggcttctgggggctggtcttcagctctggcgccttcatccccctgcctctaccttcattccaaacccctctcggccgggtgcagtggcttatgcttgtaatccca

SEQ ID NO: 557543 - DNA, 86 bp, Artificial Sequence
  ENSG00000169136_10 (sequence is synthesized)
gtcaatattaaaaaaaaaaaatcaacccttcttccccaccaaaccacccaactcctctctactcttatccttttatcctctgtctc

SEQ ID NO: 557544 - DNA, 120 bp, Artificial Sequence
  ENSG00000169136_11 (sequence is synthesized)
cccaactcctctctactcttatccttttatcctctgtctctgcttatcacctctcttgcgtatttctggatctccttccctcctttctcgtccaaatcatgaaatgtttggccttagtca

SEQ ID NO: 557545 - DNA, 120 bp, Artificial Sequence
  ENSG00000169136_12 (sequence is synthesized)
atgtctatgcccgtcacataacagccgaggcaccgaggcccacagggaagcagctgggagcttggaaacctggtctcttgaatttcaaacctggtttcttacaggtggttgtctggggtg

SEQ ID NO: 557546 - DNA, 120 bp, Artificial Sequence
  ENSG00000169136_13 (sequence is synthesized)
ggtggagtggcgacaggatagagctgaaggactatgcaaatgaggaagtaagtcagggcgggctttgagaaggggacccatatcctacaggcaaaaagcaggctaggtgaccttgggaca

SEQ ID NO: 557547 - DNA, 120 bp, Artificial Sequence
  ENSG00000169136_14 (sequence is synthesized)
ctacgctaagggagggaggctaaaggcggccaggtttgcagtgcgggaagatgagcaggccagtgggaggaggggcagggcagggctgtagttggtgactgggtgttcattttagctcta

SEQ ID NO: 557548 - DNA, 120 bp, Artificial Sequence
  ENSG00000169136_15 (sequence is synthesized)
agaaaaaaaatcagtgtttcgtgaaggtgttggagaggggctgtgtctgggtgagggatggcggggtactgatttttttgggaggttatgagcaaaaataaaacgaaacatttcctctgg

SEQ ID NO: 557549 - DNA, 120 bp, Artificial Sequence
  ENSG00000169136_16 (sequence is synthesized)
atttgggagagtgctgtgactcatgctggactctaacccacgagggtttctcagagtcagcagctgggggatgaagaagtgaaaagtgactggcaggaaattctgcaagcaaggaaaggg

SEQ ID NO: 557550 - DNA, 120 bp, Artificial Sequence
  ENSG00000169136_17 (sequence is synthesized)
aaagagaaatgaactggtgcaggtctgcgggaagagaatgaggctggatcctcaaaatcacaggaggaagcaggcccagacctcagaggcagaaagagaaagaaaccagagcttagagtc

SEQ ID NO: 557551 - DNA, 120 bp, Artificial Sequence
  ENSG00000169136_18 (sequence is synthesized)
ggcagagcgaggagtgggatttgagtggataacattgctgaagggctgcggcctggggcagttcccctgggaactggtttgggatggaagctaggaaggcagtggggccaaaaggaaata

SEQ ID NO: 557552 - DNA, 120 bp, Artificial Sequence
  ENSG00000169136_19 (sequence is synthesized)
ttttagaggaaggggcgtggctggaagaaaatgtccctgggattgagtttttccttgaggcgaaatattctgaggtggatgggaggggcctaaggtcttccactttcgccttggtgcctg

SEQ ID NO: 557553 - DNA, 120 bp, Artificial Sequence
  ENSG00000169136_20 (sequence is synthesized)
gatccccaagagggcggaggtgtaaaggcaattggaccgctcgggcgacgtagcatgcgccttggccctcggcgcagagccgcgtgtggacgggtggcgttcgggtcttccactttcgcc

SEQ ID NO: 557554 - DNA, 120 bp, Artificial Sequence
  ENSG00000169136_21 (sequence is synthesized)
aatattgagtgcctacaatgtgccaggcactgttttaggtgctgaggatacggctgggaacaagaagaacatggtctgtgccttccagcagctcacactgtggggagtagaccagagata

SEQ ID NO: 557555 - DNA, 120 bp, Artificial Sequence
  ENSG00000169139_0 (sequence is synthesized)
ggctgcgtcgggctgcaggagaagatggcggtctccacaggagttaaagttcctcgtaattttcgcttgttggaagaacttgaagaaggacaaaaaggagtaggcgacggtacagttagc

SEQ ID NO: 557556 - DNA, 120 bp, Artificial Sequence
  ENSG00000169139_1 (sequence is synthesized)
tggggccttgaagatgatgaagatatgacacttacaaggtggacaggcatgattattgggccaccaaggacaaattatgaaaacagaatatatagcctgaaagtagaatgtggacctaaa

SEQ ID NO: 557557 - DNA, 120 bp, Artificial Sequence
  ENSG00000169139_2 (sequence is synthesized)
tacccagaagctcctccgtcagttagatttgtaacaaaaattaatatgaacggaataaataattccagtgggatggtggatgcccggagcataccagtgttagcaaaatggcaaaattca

SEQ ID NO: 557558 - DNA, 120 bp, Artificial Sequence
  ENSG00000169139_3 (sequence is synthesized)
tatagcattaaagttgtacttcaagagctaagacgtctaatgatgtccaaagaaaatatgaagcttccacagccaccagaaggacaaacatacaacaattaattttagtggatctcaaac

SEQ ID NO: 557559 - DNA, 120 bp, Artificial Sequence
  ENSG00000169139_4 (sequence is synthesized)
ttgtcttaaatcaacaaccttctactcatgttaatgtcttgattaaatatcacaatgcaaaatacacattaagtaaaagaattccagctggtaaacatgacctggacatttgtaagaata

SEQ ID NO: 557560 - DNA, 120 bp, Artificial Sequence
  ENSG00000169139_5 (sequence is synthesized)
tatttaatatatgtacacccattatgttttcaggtaacaggaggaaaaatgcagcacaattttttttctcttgaaaggcactgtcatttaaacataaacctggagtactcgaaatagaat

SEQ ID NO: 557561 - DNA, 120 bp, Artificial Sequence
  ENSG00000169139_6 (sequence is synthesized)
tcaggtttacaagatgaaagcgtgtggagaagtgtcagatggcagtggaagcatgtgtgtttctaaaaagtaaaaatctcaagaaaacagaaatggcatgctttacccatcttacttagt

SEQ ID NO: 557562 - DNA, 120 bp, Artificial Sequence
  ENSG00000169139_7 (sequence is synthesized)
gaaagagagctgcagttgaaattgtttaaaaagtagcaggtacaatgaatattgtcacagatgtgttaatttttgaagcaatgtgggtgctgactactagtagtatcaaaaatatgttca

SEQ ID NO: 557563 - DNA, 120 bp, Artificial Sequence
  ENSG00000169139_8 (sequence is synthesized)
ggattgttttgatacctgtatttataataaaaaatgttggggggagttgatgaattcctgttaaaagctgttcttgtgtgttacatgtaacagacatggtaaatatttgtttacagtctt

SEQ ID NO: 557564 - DNA, 120 bp, Artificial Sequence
  ENSG00000169139_9 (sequence is synthesized)
tgtttaacaaaccatgcatttaagtttaagtgaagtcaacaaaaaggaaataggtgtatggatatgtgattttgagattaaagttagtcttaaaatgtaaataaaatgtgaaacgtgtcc

SEQ ID NO: 557565 - DNA, 120 bp, Artificial Sequence
  ENSG00000169139_10 (sequence is synthesized)
tcagagactgtgccatttctattatgttgatgtatatgtacagtaccttgccagggaagcaaaaattggaattattgtagcttttcatgtatacacacttttatttaccctattttgtgt

SEQ ID NO: 557566 - DNA, 120 bp, Artificial Sequence
  ENSG00000169139_11 (sequence is synthesized)
acttcttgtgaattataatttgcagactatttcagaaaagaaattatctagtttaatttcttctttggacaaggagtcctaggtattatattttgagtttgatttcaccagaaataataa

SEQ ID NO: 557567 - DNA, 120 bp, Artificial Sequence
  ENSG00000169139_12 (sequence is synthesized)
tattaaaaagatctttgcattctggcagttcttttaggattataggttgcaaattatccaaatatatatcccattttttaaagcataatatcttttttagttgtttttctgtgaagcttt

SEQ ID NO: 557568 - DNA, 120 bp, Artificial Sequence
  ENSG00000169139_13 (sequence is synthesized)
tggttaataaatagggtcaactaattggagacttttctcttccaattagggcttttaatactaacaaggataactttattcattcctcgtattctctactctaacaaatatgaactctga

SEQ ID NO: 557569 - DNA, 120 bp, Artificial Sequence
  ENSG00000169139_14 (sequence is synthesized)
agttgaaaagtcatttatgttccgctttcaccaaagtgacgtgaggctttaggtcactgtttcacttcaaagtactggatccaaagctttgttgaaaatgctgtttgatgaattcactga

SEQ ID NO: 557570 - DNA, 120 bp, Artificial Sequence
  ENSG00000169139_15 (sequence is synthesized)
agaatatagaaaggtggtcaggtaaagtctacttttattttgtcaagcttaataatttgtgtcatactttaccccagtatatataggcaaaccaaaaccttatcaaatattaaattagtt

SEQ ID NO: 557571 - DNA, 87 bp, Artificial Sequence
  ENSG00000169139_16 (sequence is synthesized)
atataggcaaaccaaaaccttatcaaatattaaattagttgtttaaactttgcttataaagtattggccatgtggtggctcatgccg

SEQ ID NO: 557572 - DNA, 120 bp, Artificial Sequence
  ENSG00000169139_17 (sequence is synthesized)
aaaaattagccaggtgtggtggtgggtacttgtagtcccagctactcgggaggctgggcaggagaactacttgaaactggcagacagaggttgcagtgccgagagcgcaccactgctcca

SEQ ID NO: 557573 - DNA, 89 bp, Artificial Sequence
  ENSG00000169139_18 (sequence is synthesized)
ttgaccttggctgtatattaaaatagttacttttatagtagagcacatttctcaaacatgccctgaaaggcttttatcaagctcatata

SEQ ID NO: 557574 - DNA, 120 bp, Artificial Sequence
  ENSG00000169139_19 (sequence is synthesized)
tctcaaacatgccctgaaaggcttttatcaagctcatataaagttaaagctttgagctaccttttcttggccaataaagtcactgacagtttatgtaaacattaatttcaacatggctgt

SEQ ID NO: 557575 - DNA, 120 bp, Artificial Sequence
  ENSG00000169139_20 (sequence is synthesized)
tgcattttaattatcaaaaatgtttaaaatgctttaagatgacacatagagaacatacacatacatacaaattagtgcatttgtaatttgttaaatttgaaatgaactattaccttgaaa

SEQ ID NO: 557576 - DNA, 120 bp, Artificial Sequence
  ENSG00000169139_21 (sequence is synthesized)
tatagtctttaaaaatttttaatggttaaagattaaattgaatgaaactgtagtctaatggtaactgatgatctgaatccgtctctctgataacctcctttccattttgaaaatgtgtct

SEQ ID NO: 557577 - DNA, 120 bp, Artificial Sequence
  ENSG00000169139_22 (sequence is synthesized)
tattatacatggaagctagtaactacgtgaatgctgttggcaggatgagggtctgggtacctcagtctcttgtcctgtttccttcccccaaatccaccattgtgaagttgccaaccccct

SEQ ID NO: 557578 - DNA, 120 bp, Artificial Sequence
  ENSG00000169139_23 (sequence is synthesized)
gccgccttcccctgccaagtacatgttgtcagagtcagccctataatgttcatttcccctcttgtttgtgggattatggatctctgcagaaatctgcatgccaattaacccatttctaaa

SEQ ID NO: 557579 - DNA, 120 bp, Artificial Sequence
  ENSG00000169139_24 (sequence is synthesized)
gcagaatccattttgcatgtcacaatcaagatgtacttggcaatctaagacacactgggagactgtaagaggaattaatatagaaaagctcttaattataataacatttggaagaaattt

SEQ ID NO: 557580 - DNA, 120 bp, Artificial Sequence
  ENSG00000169139_25 (sequence is synthesized)
ttcctttgttttgtaaagtggctaaggttgtaggagtgtgtggtatttattaccttttaaatgaactgtaaatttgccttagaaatttgtttaaaaggctagcaagtgagacccttgagg

SEQ ID NO: 557581 - DNA, 120 bp, Artificial Sequence
  ENSG00000169139_26 (sequence is synthesized)
atgatcatatactaataaagattaccaaaagaaacttcttgtcctgttaggtcagtgttatgatttaatggttttaattacttaaccaattttaagaattgacaatttttaaaaatattt

SEQ ID NO: 557582 - DNA, 120 bp, Artificial Sequence
  ENSG00000169139_27 (sequence is synthesized)
ttttctaccattctaaagtaatgtcttttgttgtgggtttatgtgtaactacaggattttggaacataaacattttgaaggatagtcaatggtatttagtcttggatataaaaatagaga

SEQ ID NO: 557583 - DNA, 120 bp, Artificial Sequence
  ENSG00000169139_28 (sequence is synthesized)
aaatttatagctttatgttattaaaataatttatcacacagagtgatttgaggttttcgcagagtagatttgtttgactcatggtttattagtctggattacttaagaacaatatgttga

SEQ ID NO: 557584 - DNA, 120 bp, Artificial Sequence
  ENSG00000169139_29 (sequence is synthesized)
ttttaatgttaattcccactaaatatataatattgataaatacatgtgaaattaatattgtttggaaaatgtagaggacacagctgggaattatgaatgcttttttcttaataggtttgg

SEQ ID NO: 557585 - DNA, 120 bp, Artificial Sequence
  ENSG00000169139_30 (sequence is synthesized)
tgtgtgtggctttgaatggttctgctgatgcatcatggaaagacagcagggaactgtagcctgccatcaaaactgtatcaactcttttaatgagcatgtgactgtattaggtacattttg

SEQ ID NO: 557586 - DNA, 120 bp, Artificial Sequence
  ENSG00000169139_31 (sequence is synthesized)
aagaatataagtactgatgataaagtctagtatgcataataggattttggaggcatttcaggaattttccttttatagtatgctttttaggcatctgtatgtgtaatatcatagtatcat

SEQ ID NO: 557587 - DNA, 120 bp, Artificial Sequence
  ENSG00000169139_32 (sequence is synthesized)
ttattgctgggatggatcgaaaagcactgcttttacttttctgataagtatcaaaatgattttccagtaccaacttgactggcttttaattattgtcacacacacacaaaattcaactcc

SEQ ID NO: 557588 - DNA, 120 bp, Artificial Sequence
  ENSG00000169139_33 (sequence is synthesized)
tcaaggtttgggaaaattgtgtatttttttgtatacaagataaaagtgtcataaaaaggaatggatgaattgttgataggaacattagcagttaatttttacctgatactgagtttactg

SEQ ID NO: 557589 - DNA, 120 bp, Artificial Sequence
  ENSG00000169139_34 (sequence is synthesized)
taaaataggaaatgcataggaaggaatacctcctaaataatatgccttatagaatgatgaaatcttaccatagttcatactgaaaatgttgtttatttaaaagtattgtggagtgttgaa

SEQ ID NO: 557590 - DNA, 120 bp, Artificial Sequence
  ENSG00000169139_35 (sequence is synthesized)
aataaagatacacaataagtattttctgaagagaaaattaatgaaggtatttaatgatataggaaataagtgacaagttaaagtccattttgtttcaataaaggagttgtgcaaactcaa

SEQ ID NO: 557591 - DNA, 120 bp, Artificial Sequence
  ENSG00000169139_36 (sequence is synthesized)
gcaacttgggatcatattgataatactttgtagaattaattttgtaaaatctcatggaattaattttgtaaaatctcaatttttaagtatgcttattgcattttttctcaccatataggt

SEQ ID NO: 557592 - DNA, 120 bp, Artificial Sequence
  ENSG00000169139_37 (sequence is synthesized)
gaaataaatttgaatgtagaaaaataaattcttaatcataaacactgtcttacgtacattcatattgtactttcccttttttttttttagcacttagacattaatattttaggtattgtt

SEQ ID NO: 557593 - DNA, 120 bp, Artificial Sequence
  ENSG00000169139_38 (sequence is synthesized)
gtgcgtgcgggcggctgcgtcgggctgcaggagaagatggcggtctccacagagtcactcatgtggttgcatcagctggtgaagggataggcttgttgcccgggacgccttgctccccct

SEQ ID NO: 557594 - DNA, 120 bp, Artificial Sequence
  ENSG00000169139_39 (sequence is synthesized)
ccctgcagcctctccaggtggccagttaggacttcctcacatcccggtggtgtcagggtgttcagaattcttacatgatggttggcttccaaaagaacgaaagcagaagttagcattcct

SEQ ID NO: 557595 - DNA, 120 bp, Artificial Sequence
  ENSG00000169139_40 (sequence is synthesized)
gaagatggcggtctccacaggtcggttcccgggccgggctgcgtgattttccgctccgacccggctctgcccctccgtctgctgctggcgcccgagcgctgaccgtgcgggagaagcccg

SEQ ID NO: 557596 - DNA, 120 bp, Artificial Sequence
  ENSG00000169139_41 (sequence is synthesized)
ggacaggcatgattattgggccaccaaggctggaataattgaggaaggctgaacagtggaggaagttgcctttggaatgatccctaaaggactgactggtaggatttcagaaggtggtga

SEQ ID NO: 557597 - DNA, 120 bp, Artificial Sequence
  ENSG00000169139_42 (sequence is synthesized)
ctgaataaactcttaaaaagcagacacactttacttgtgtaaacactcttcttttttttttttttaaatggaatttctctcttgttgcccaggctggtgtgcaatggtgtgatcttggct

SEQ ID NO: 557598 - DNA, 63 bp, Artificial Sequence
  ENSG00000169139_43 (sequence is synthesized)
cgtatttctaatagagatggggttcctccatgttggtcaggctggtcacgaactcccaatctc

SEQ ID NO: 557599 - DNA, 74 bp, Artificial Sequence
  ENSG00000169139_44 (sequence is synthesized)
ccatgcccggctaatttcgtatttctaatagagatggggttcctccatgttggtcaggctggtcacgaactccc

SEQ ID NO: 557600 - DNA, 120 bp, Artificial Sequence
  ENSG00000169139_45 (sequence is synthesized)
atgtcactggaattatgtttttcacaggatcacttttaaattcattaagaagtttctttatgtatataagcctattcattttacttgaaaggttttctgtcttcccaaagtcaaatcctt

SEQ ID NO: 557601 - DNA, 120 bp, Artificial Sequence
  ENSG00000169139_46 (sequence is synthesized)
actaactaaaattaggaattttgaaaaaccatccatgaaaatctcacaaacacattaaaaaatgtattatctaaggtgcataaaattaaactccatattaccaatagcatttaagaaact

SEQ ID NO: 557602 - DNA, 120 bp, Artificial Sequence
  ENSG00000169139_47 (sequence is synthesized)
catataaaatgataatgttttctttaaagagacatactgaaagccaagtcagttgttcacaggaggtggttttgcaccattatttgaactttgatgtgtgaatttgctttagaagtccat

SEQ ID NO: 557603 - DNA, 120 bp, Artificial Sequence
  ENSG00000169139_48 (sequence is synthesized)
ggtctgtttactctctgacagattctgttttcacatgcccctcacatgaaggttcactcctcattcttttttttttttttttgagacaggttgggtgggactgcttcaggattctaaaag

SEQ ID NO: 557604 - DNA, 120 bp, Artificial Sequence
  ENSG00000169139_49 (sequence is synthesized)
acagtaccttctggtgcactttctaagatggaacataattctactctttgaaaatcattagagagtatatattaatgaactttggcttctatgaactttctgggcatgcctgtttgattg

SEQ ID NO: 557605 - DNA, 120 bp, Artificial Sequence
  ENSG00000169139_50 (sequence is synthesized)
gtgcagagtccttggctgtaacagaaacatcaaatagggaaaacgatttccttatggttgattgacttacatcagtataaaattgatgaggaatttatatacacgttgtatactgctgtt

SEQ ID NO: 557606 - DNA, 120 bp, Artificial Sequence
  ENSG00000169139_51 (sequence is synthesized)
aatgtttggtacagtgctttctttagtgttttcattttgaggggttattagattcagcattttctggagcagaatgctttttaaaggggatttggtctttttgggaaataatttataaag

SEQ ID NO: 557607 - DNA, 120 bp, Artificial Sequence
  ENSG00000169154_0 (sequence is synthesized)
aggactgcccggcccagccttggaggaagacttctgggcagaagcggaacacaggagcagagacacatagtcttggctccagtttcgtttcagttatgcccaccctttcagtgttcatgg

SEQ ID NO: 557608 - DNA, 120 bp, Artificial Sequence
  ENSG00000169154_1 (sequence is synthesized)
atgtgcccctcgcccacaagctagagggcagcttgttaaagacctacaaacaagatgattacccgaacaagatattcttagcctatagagtctgcatgacaaatgaaggccatccctggg

SEQ ID NO: 557609 - DNA, 120 bp, Artificial Sequence
  ENSG00000169154_2 (sequence is synthesized)
tttctctcgtggtgcagaagactcgactacagatttcacaggatccctccctgaattatgagtacttgcccaccatgggcctgaaatcattcatccaggcctctctagcactcctctttg

SEQ ID NO: 557610 - DNA, 120 bp, Artificial Sequence
  ENSG00000169154_3 (sequence is synthesized)
gaaagcacagccaagccattgtggagaacagggtagggggtgtacacactgttggtgacagtggtgccttccagcttggcgtccagtttctcagagcttggcataaggatgctcgtatag

SEQ ID NO: 557611 - DNA, 120 bp, Artificial Sequence
  ENSG00000169154_4 (sequence is synthesized)
tttacatcatctcttctcaaaaagaactgcatggactcgtcttccaggacatgggctttacagtttatgaatactctgtctgggaccccaagaagctatgcatggaccccgacatactcc

SEQ ID NO: 557612 - DNA, 120 bp, Artificial Sequence
  ENSG00000169154_5 (sequence is synthesized)
atcgactgcaagttgacaccaagtgggtgggcaaagttgatgtccatgataaagagcaagcagatattcccattttttgatattccctgtcaaggtttatacaccagtgacttggaagaa

SEQ ID NO: 557613 - DNA, 120 bp, Artificial Sequence
  ENSG00000169154_6 (sequence is synthesized)
gatactagaatcttacaatactttgtgtctcaaggctttgagttcttctgcagccagtctctgtccaagaattttggcatttatgatgaaggagtggggatgctagtggtggtggcagtc

SEQ ID NO: 557614 - DNA, 120 bp, Artificial Sequence
  ENSG00000169154_7 (sequence is synthesized)
aacaaccagcagctgctgtgtgtcctctcccagctggaaggattagcccaggccctgtggctaaacccccccaacacgggtgcacgtgtcatcacctccatcctctgcaaccctgctctg

SEQ ID NO: 557615 - DNA, 120 bp, Artificial Sequence
  ENSG00000169154_8 (sequence is synthesized)
ctgggagaatggaagcagagtctaaaagaagttgtagagaacatcatgctaaccaaggaaaaagtgaaggagaaactccagctcctgggaacccctgggtcctggggtcacatcaccgag

SEQ ID NO: 557616 - DNA, 120 bp, Artificial Sequence
  ENSG00000169154_9 (sequence is synthesized)
cagagtgggacccacggctatcttggactcaactcccagcaggtggaatacctggtcaggaagaagcacatctatatccccaagaacggtcagattaacttcagctgtatcaatgccaac

SEQ ID NO: 557617 - DNA, 120 bp, Artificial Sequence
  ENSG00000169154_10 (sequence is synthesized)
aacataaattacatcactgagggcatcaatgaggctgtcctcctcacagagagctcagagatgtgtcttccaaaggaaaaaaaaacactgattggaataaaactttagtctttgcaaaaa

SEQ ID NO: 557618 - DNA, 120 bp, Artificial Sequence
  ENSG00000169154_11 (sequence is synthesized)
gacccacggctatcttggactcaactgtaagggtctagggggctggtgtcccccctttctgacctttggcctgtatttgagcattaaacttcactgactaggtgaccagttcctagcttc

SEQ ID NO: 557619 - DNA, 120 bp, Artificial Sequence
  ENSG00000169155_0 (sequence is synthesized)
aggatcacctgagcccaggagtttgagactacagtagctatgatggtgccactacactccagcctgggtaaaagagtgagacctcatctctttaaaaaaaaattctgccaggagcggtgg

SEQ ID NO: 557620 - DNA, 120 bp, Artificial Sequence
  ENSG00000169155_1 (sequence is synthesized)
gtggttcatgcctataatcccaacactttaggaggctgaggctggtggatcacttgaagccaggaattcaagacgaacctgggcaaaaagtgagacccctgtctctacaaaaaaaattaa

SEQ ID NO: 557621 - DNA, 64 bp, Artificial Sequence
  ENSG00000169155_2 (sequence is synthesized)
gggcaaaaagtgagacccctgtctctacaaaaaaaattaattttttaaaaaaactagctgggca

SEQ ID NO: 557622 - DNA, 66 bp, Artificial Sequence
  ENSG00000169155_3 (sequence is synthesized)
aaaattaaccaggtgtacgaaaccagaaggtggaggtggcagtgagccgagatcacaccattgcac

SEQ ID NO: 557623 - DNA, 88 bp, Artificial Sequence
  ENSG00000169155_4 (sequence is synthesized)
aaaaaaactagctggacatggtggcatgtacatacgatagcttgattacccaagagttcaaggctgcagtgaactatgattgtgccac

SEQ ID NO: 557624 - DNA, 120 bp, Artificial Sequence
  ENSG00000169155_5 (sequence is synthesized)
ttaaaaaaaaattatattatttgaatgggtatcttgtttgttttaactgtaaatatttacagtacttggttttacttgggagatttgtatagcttacaaatcttgtccctatggattcag

SEQ ID NO: 557625 - DNA, 120 bp, Artificial Sequence
  ENSG00000169155_6 (sequence is synthesized)
ttctcttacccacagacacagaaccaaaatcaggagttccacaaggagtggtggtgagtcctgcctttggcaaacacgcacctgcaagctttgctctagggattgaatcccttacccagt

SEQ ID NO: 557626 - DNA, 120 bp, Artificial Sequence
  ENSG00000169155_7 (sequence is synthesized)
ggggcccataggctagaggactttgtggaactttggaacttgtcttaacaatggaggaggggataaaataagtttatctttgggctggaatttgtactaatttttctttctcttgtagca

SEQ ID NO: 557627 - DNA, 120 bp, Artificial Sequence
  ENSG00000169155_8 (sequence is synthesized)
ccgaacaagatttgtgatgaaatggagcctggaacaaactcttttcgggtagaatttcctgatttttccagcaccattctacagaaactgaaccagcagcgccagcaaggacaattatgt

SEQ ID NO: 557628 - DNA, 120 bp, Artificial Sequence
  ENSG00000169155_9 (sequence is synthesized)
gacgtctccattgttgtccaaggccacattttccgggcacacaaagccgttcttgctgccagttcaccctacttttgtgaccaggtactcctgaaaaacagcaggagaattgttttgcct

SEQ ID NO: 557629 - DNA, 120 bp, Artificial Sequence
  ENSG00000169155_10 (sequence is synthesized)
gatgtgatgaacccaagagtgtttgagaacattctcctatctagttatacaggacgtctagtaatgcccgctccagaaattgttagttacttgacagcggcaagcttcctccagatgtgg

SEQ ID NO: 557630 - DNA, 120 bp, Artificial Sequence
  ENSG00000169155_11 (sequence is synthesized)
catgtggtagacaaatgcactgaagttttagagggaaaccctacagtcctttgtcagaagctaaatcatggcagtgaccaccagtcaccaagcagcagtagttataatggcctggtagag

SEQ ID NO: 557631 - DNA, 120 bp, Artificial Sequence
  ENSG00000169155_12 (sequence is synthesized)
agctttgagctgggctctgggggtcatactgattttcccaaagcccaagaactgagagatggtgaaaatgaagaggagagcaccaaagacgagctgtcatcccagctcaccgagcacgaa

SEQ ID NO: 557632 - DNA, 120 bp, Artificial Sequence
  ENSG00000169155_13 (sequence is synthesized)
tacctgcccagcaactcgtccacagagcatgaccgcctgagcacggaaatggcaagccaggatggggaggagggcgccagcgacagcgccgagttccactacacccggcccatgtacagc

SEQ ID NO: 557633 - DNA, 120 bp, Artificial Sequence
  ENSG00000169155_14 (sequence is synthesized)
aagcccagcatcatggctcacaaacgctggatccacgtgaagcccgagcgcttagaacaggcttgcgagggcatggatgtgcacgcgacctacgacgagcaccaggtcacagagtccatc

SEQ ID NO: 557634 - DNA, 120 bp, Artificial Sequence
  ENSG00000169155_15 (sequence is synthesized)
aacaccgtgcagacagagcacacggtgcagccttcgggagtggaggaggacttccacatcggggagaagaaagtggaagctgagtttgatgaacaggctgatgaaagcaattatgatgag

SEQ ID NO: 557635 - DNA, 120 bp, Artificial Sequence
  ENSG00000169155_16 (sequence is synthesized)
caggtggatttctatggctcttccatggaagagttttccggagagaggtcagatgggaatctaattgggcacagacaggaggctgccctcgcagcaggttacagtgagaatattgaaatg

SEQ ID NO: 557636 - DNA, 120 bp, Artificial Sequence
  ENSG00000169155_17 (sequence is synthesized)
gtaacagggattaaagaagaagcttcccacttaggattctcagccactgacaagctgtatccttgtcagtgtgggaaaagtttcactcacaagagtcagagagatcggcacatgagcatg

SEQ ID NO: 557637 - DNA, 120 bp, Artificial Sequence
  ENSG00000169155_18 (sequence is synthesized)
cacctcggtcttcggccttacggctgtggggtctgcggtaagaaattcaaaatgaagcaccatctcgtgggccacatgaaaattcacacaggcataaagccgtatgagtgtaatatctgt

SEQ ID NO: 557638 - DNA, 120 bp, Artificial Sequence
  ENSG00000169155_19 (sequence is synthesized)
gcaaagaggtttatgtggagggacagtttccaccggcatgtgacttcttgtactaagtcctacgaagctgcaaaggctgagcagaatacaactgaggctaactaaaaataggatctggcc

SEQ ID NO: 557639 - DNA, 120 bp, Artificial Sequence
  ENSG00000169155_20 (sequence is synthesized)
cttgagtggcatgcacaaaaataaactatggtaattaatgcaaatctgggcacagatgatgcgtgctacttgctattatgagagaagcttaaaaaaaaaaaggaagatatttctgaaaga

SEQ ID NO: 557640 - DNA, 120 bp, Artificial Sequence
  ENSG00000169155_21 (sequence is synthesized)
ccagctctaagtaggccaattaaaaaaatctaattcctcaaatttgtgtgttccagtcctggcctggaatgggtaatggggtgagttaacccaccgcccagctggcaagggaaaccttct

SEQ ID NO: 557641 - DNA, 120 bp, Artificial Sequence
  ENSG00000169155_22 (sequence is synthesized)
cacccaccagttccattttgggtggcagcagctttggatcactcattattacaaggtcatgctgaaattttattttgctcttgctatagatacttaggtaatgtggatttgttttggtag

SEQ ID NO: 557642 - DNA, 120 bp, Artificial Sequence
  ENSG00000169155_23 (sequence is synthesized)
ctatttcactgaaggaagtgctacttatataaaagctagaaataatgtgattcctaggatgagaaattggttaacagagctctgttgtctggttttagtctttctaaaggatattttaac

SEQ ID NO: 557643 - DNA, 120 bp, Artificial Sequence
  ENSG00000169155_24 (sequence is synthesized)
taaaactatggagatgctaagagagtgactttctaaatatgaaacagataatttacggtacaaggctgacatagtgcccttgtcagtttctgtaagatgccactactgtcacaaggtgtt

SEQ ID NO: 557644 - DNA, 120 bp, Artificial Sequence
  ENSG00000169155_25 (sequence is synthesized)
tcagactcttgataaggcagtgttttgtattttagttctaacattgagtttggacaattttatctaattgtaattctctagggtgccagagataggtatttctcattggtttgctttccc

SEQ ID NO: 557645 - DNA, 120 bp, Artificial Sequence
  ENSG00000169155_26 (sequence is synthesized)
aaatcctgtttggttaattgtagcctccatacagtggggtcttctctgtggctggtagacaccaagctgctgtgactgaccacggtaccacgggctgccacagcccctgctctgtcttag

SEQ ID NO: 557646 - DNA, 120 bp, Artificial Sequence
  ENSG00000169155_27 (sequence is synthesized)
attatggtgctttacaaagagagtggtccatgaccacacttagtgagaaggagccacaagttgtggctgagagttccctgtgaacttgagtagttcatagagtgctaaggtgacactcca

SEQ ID NO: 557647 - DNA, 120 bp, Artificial Sequence
  ENSG00000169155_28 (sequence is synthesized)
ccaaccagagtgagagggcagataggcaggattctatgagtggttatacttaagggggacaaaactgcccaagaagaatcttgagaatacactctttcaaggtgggggagatactcttta

SEQ ID NO: 557648 - DNA, 120 bp, Artificial Sequence
  ENSG00000169155_29 (sequence is synthesized)
gagggtacactgagctaatactaccagttctttatgagcactggaatgtgtttgtaaaaggagtcctaagtttagcaaggtagtctacagaaccatgctcccacattatagataaagctg

SEQ ID NO: 557649 - DNA, 120 bp, Artificial Sequence
  ENSG00000169155_30 (sequence is synthesized)
aaaaaattaaaaaaacaaacaagaaaagcaactattctgagaccttttctgcccatcagttagatgatttaggttaaaaagaaaggtaatattgcacatgcttttaagctgtgtaacata

SEQ ID NO: 557650 - DNA, 120 bp, Artificial Sequence
  ENSG00000169155_31 (sequence is synthesized)
gaaaggtaatattgcacatgcttttaagctgtgtaacatacctgaggttatcaccagggtaggacagggtgctactaccatgtcatcttttccacaatcgtactgggttatttacttcta

SEQ ID NO: 557651 - DNA, 120 bp, Artificial Sequence
  ENSG00000169155_32 (sequence is synthesized)
aatagaaacttttttttcttaaaataaaaataatttttcttggatttggggtgaaattttatttgaaaagtttggctttgctgtaatgtaatagacattgctggcaatggcctctgattc

SEQ ID NO: 557652 - DNA, 120 bp, Artificial Sequence
  ENSG00000169155_33 (sequence is synthesized)
tcaagctcctaacaccagggtgtttacttgttgaacattgtctggaaagaggaaagaaaatacttatttaccagttaactcttgtaagcaagattacaaacagggatttattcacaacac

SEQ ID NO: 557653 - DNA, 120 bp, Artificial Sequence
  ENSG00000169155_34 (sequence is synthesized)
acactgtatcattctcgatatataaaaagcactttgtatttaaaactttattataaatatatatatatattgtttttttttaaacctagaaactagatattacctcttggttgtttgcca

SEQ ID NO: 557654 - DNA, 120 bp, Artificial Sequence
  ENSG00000169155_35 (sequence is synthesized)
aatagcttctcttagtattgaaacgttactggttagcagtcttttctctgtgtacctgacacacgtatactgaggggattgtacaatcaagcctattgtctccttttctttcactcatgg

SEQ ID NO: 557655 - DNA, 120 bp, Artificial Sequence
  ENSG00000169155_36 (sequence is synthesized)
tagaggccagtgggttttaggtatgatcctagccattatatttgaggagaaattgttctattactcctactaatttcagtactaaggtggtgatgccattttgttctgccaaaaactgat

SEQ ID NO: 557656 - DNA, 120 bp, Artificial Sequence
  ENSG00000169155_37 (sequence is synthesized)
caccctctcccatggtattagcagagcattttctgcctgtttggaaggtttgatgtcctgtttctcattgaagactatttacatgatcattaggacattgcaggagaagtctgagaggta

SEQ ID NO: 557657 - DNA, 120 bp, Artificial Sequence
  ENSG00000169155_38 (sequence is synthesized)
aaaatacagatattctgggagagtcgtggtccttcagttctgctgaaatcagcatagtgcccttgtcatgaggaagagtttctgttcagccaagagtggtggcacgcttgggtggtagtt

SEQ ID NO: 557658 - DNA, 120 bp, Artificial Sequence
  ENSG00000169155_39 (sequence is synthesized)
ttggaagcagtcagttgtgctaggacttatttaatatgttgtgaagagaagagtgtcttcttgaaagccttatgtgtccatcagctactaaatgtagaacttaaataagttgctcacatc

SEQ ID NO: 557659 - DNA, 120 bp, Artificial Sequence
  ENSG00000169155_40 (sequence is synthesized)
tgttcttttagtgttttgtggtatttgaggttttggcaaaaattgggatttttttatcaggcagccagagcctgggaggtggtagggtgtctgaaatgctggccatgttcagagaggcag

SEQ ID NO: 557660 - DNA, 120 bp, Artificial Sequence
  ENSG00000169155_41 (sequence is synthesized)
gagaagggggttgctttcatttgaatattaaaagtgaatttttgtaaactctggtttttacctttttttcatccccacgttgagttggaggaatagtctcttctcttcacctcaatatag

SEQ ID NO: 557661 - DNA, 120 bp, Artificial Sequence
  ENSG00000169155_42 (sequence is synthesized)
ctttagaaaatctttatccttcctaataagtttggatggttgtgggtaacattgttcaaacaatctttcagggatcacgtcaatggcctacaaccaagctatttgtcccctactttgagt

SEQ ID NO: 557662 - DNA, 120 bp, Artificial Sequence
  ENSG00000169155_43 (sequence is synthesized)
atttgtcccctactttgagtcttaactgtggtttttcttcaatccccatgggaaagggcttcaaggcaccaccagtggtatttaatattcatacttggggccaggcatggtggctcacgc

SEQ ID NO: 557663 - DNA, 120 bp, Artificial Sequence
  ENSG00000169155_44 (sequence is synthesized)
gaatctgttgcggcagctgaggctacaacaggcctgcgccggcggcagagaggatatcttgggcgggggatgtgagcgctgagcccttggcagaagtcaatgtgattttaatttgaagca

SEQ ID NO: 557664 - DNA, 86 bp, Artificial Sequence
  ENSG00000169155_45 (sequence is synthesized)
ctgggaggcggaggttgcagtgagccgcgattgcaccaccacactccagcctgcgcgacagattacttatgccatgcttttacctt

SEQ ID NO: 557665 - DNA, 120 bp, Artificial Sequence
  ENSG00000169155_46 (sequence is synthesized)
gccatgcttttacctttagatacacacgttacagtaatccacgtggtgaagtgcatgtcaccgttaactaaggaaggactgcggtaacttaccctgcagggctgtaggttgcctgcaggc

SEQ ID NO: 557666 - DNA, 120 bp, Artificial Sequence
  ENSG00000169155_47 (sequence is synthesized)
gctccaggcccccagcctgttgattccgatttctaggtctcatcttcctctggtcccttttggccactactttaaaagcttgcccaaagggatcccctccattctagtgggcatttgctg

SEQ ID NO: 557667 - DNA, 120 bp, Artificial Sequence
  ENSG00000169155_48 (sequence is synthesized)
aactaacctgcccctaaggctggcttctaaccaccggggaaagctgcttagcctccagggctccctccttgagaggctcacacacccccaagctgctgtggagtgaatttgagacggagc

SEQ ID NO: 557668 - DNA, 120 bp, Artificial Sequence
  ENSG00000169155_49 (sequence is synthesized)
agaagctgcaaagctgtgctttccctggggaaggggatgtgctgcggcctcctgggtgggcgtggagagggcgccatcacaacgagtccaggtttttgcttttggaaggtctctgataat

SEQ ID NO: 557669 - DNA, 120 bp, Artificial Sequence
  ENSG00000169155_50 (sequence is synthesized)
ttaggggtgctggaaaccagcactgtgttatccccaatccctcctgtgccaccagttttgtgatttaggttgctttagtgggtgactaacttttgttcagtgaaaccagggtttgtttgg

SEQ ID NO: 557670 - DNA, 120 bp, Artificial Sequence
  ENSG00000169155_51 (sequence is synthesized)
ggtttttttctttgctacttacatatttaaaggtacaagtttcttatttcaaatctctactgatagtgccctatggggagatgctggaacacattttgcaaatgtgactttttttttttt

SEQ ID NO: 557671 - DNA, 120 bp, Artificial Sequence
  ENSG00000169155_52 (sequence is synthesized)
ttttaatttttgcttgaagcctgtgtcatgttagttgctgctgccttctttccttttgtgaggttcccaatgtttcgtccagaaaagtactttatttatgcaagtcaggtgactcttagg

SEQ ID NO: 557672 - DNA, 120 bp, Artificial Sequence
  ENSG00000169155_53 (sequence is synthesized)
ccacaaaaccatttgatgataaacagattatcattaggtgcatatcttattgatattttgtgaaatgttatgcctatgttgcaaaagttgaatagttttgtctttatatattgctgtctt

SEQ ID NO: 557673 - DNA, 120 bp, Artificial Sequence
  ENSG00000169155_54 (sequence is synthesized)
cagtgtacagcatggttttacttaattgaatgttaatgtttaatattttcttcttatagaagagatcatgcccttttgtatgacatgttttaataaatgttatctgtcaactttgtaaaa

SEQ ID NO: 557674 - DNA, 120 bp, Artificial Sequence
  ENSG00000169155_55 (sequence is synthesized)
cgggaagcgtttccgggggctgaaggcacaggctgaatctgttgcggcagctgaggctacaacaggcctgcgccggcggcagagaggatatcttgggcgggggatgtgagcgctgagccc

SEQ ID NO: 557675 - DNA, 120 bp, Artificial Sequence
  ENSG00000169169_0 (sequence is synthesized)
ggacctgaatacccggctagggacacgagagagaggaatcggggtttctgggtgacggtgatctcggggtgggcaggactccaaaggcccgtcgacccggtggtggactccttgcactgg

SEQ ID NO: 557676 - DNA, 120 bp, Artificial Sequence
  ENSG00000169169_1 (sequence is synthesized)
gattggacatatgcaagcgggagatttggggccggcgctcaaaatcggggggcgggggtggactcgggtttggaccccaggatccgatcagcggacccttgattcaacgtgggctccagc

SEQ ID NO: 557677 - DNA, 120 bp, Artificial Sequence
  ENSG00000169169_2 (sequence is synthesized)
gtgacatggctgaagcgcaccaggccgtgggcttccgaccctcgctgacctcggacggggctgaagtggaactcagtgcccctgtgctgcaggagatctacctctctggcctgcgctcct

SEQ ID NO: 557678 - DNA, 120 bp, Artificial Sequence
  ENSG00000169169_3 (sequence is synthesized)
ggaaaaggcatctctcacgtttctggaatgactttctcaccggtgtgtttcctgccagccccctcagttggcttttcctcttcagtgccatccagcttgcctggttcctccagctggatc

SEQ ID NO: 557679 - DNA, 120 bp, Artificial Sequence
  ENSG00000169169_4 (sequence is synthesized)
cttccttaggactgatggagaagatcaaagagttgctgcctgactggggtggacaacaccacgggctccggggggtcctggcagccgcgctgtttgcctcgtgtttgtggggagccctga

SEQ ID NO: 557680 - DNA, 120 bp, Artificial Sequence
  ENSG00000169169_5 (sequence is synthesized)
tcttcacactgcacgtggccctgaggctgcttctgtcctaccacggctggcttcttgagccccacggagccatgtcctcccccaccaagacctggctggccctggtccgcatcttctctg

SEQ ID NO: 557681 - DNA, 120 bp, Artificial Sequence
  ENSG00000169169_6 (sequence is synthesized)
gccgccacccgatgctgttcagttaccagcgctccctgccacgccagcccgtgccctctgtgcaggacaccgtgcgcaagtacctggagtcggtccggcccatcctctccgacgaggact

SEQ ID NO: 557682 - DNA, 120 bp, Artificial Sequence
  ENSG00000169169_7 (sequence is synthesized)
tcgactggaccgcggtcctggcgcaggaattcctgaggctgcaggcgtcgctgctgcagtggtacctgcggctcaagtcctggtgggcgtccaattatgtcagtgactggtgggaggaat

SEQ ID NO: 557683 - DNA, 120 bp, Artificial Sequence
  ENSG00000169169_8 (sequence is synthesized)
ttgtgtacctgcgctcccgaaatccgctgatggtgaacagcaactattacatgatggacttcctgtatgtcacacccacgcctctgcaggcagctcgcgctgggaatgccgtccatgccc

SEQ ID NO: 557684 - DNA, 120 bp, Artificial Sequence
  ENSG00000169169_9 (sequence is synthesized)
tcctcctgtaccgccaccgcctgaaccgccaggagatacccccgactttgctgatgggaatgcgccccttatgctctgcccagtacgagaagatcttcaacaccacgcggattccagggg

SEQ ID NO: 557685 - DNA, 120 bp, Artificial Sequence
  ENSG00000169169_10 (sequence is synthesized)
tccaaaaagactacatccgccacctccatgacagccaacacgtggctgtcttccaccggggccgattcttccgcatggggacccactcccgaaacagcctgctttccccgagagccctgg

SEQ ID NO: 557686 - DNA, 120 bp, Artificial Sequence
  ENSG00000169169_11 (sequence is synthesized)
gatgatccctcaccggcctgcccccacgaggaacatctggcagctctgacagctgctcccaggggcacgtgggcccaggtgcggacatccctgaagacccaggcagcggaggccctggag

SEQ ID NO: 557687 - DNA, 120 bp, Artificial Sequence
  ENSG00000169169_12 (sequence is synthesized)
gcggtggaaggggccgctttctttgtgtcactggatgctgagcccgcggggctcaccagggaggacccggcagcgtcgttggatgcctacgcccatgctctgctggccggccggggccat

SEQ ID NO: 557688 - DNA, 120 bp, Artificial Sequence
  ENSG00000169169_13 (sequence is synthesized)
gatcgctggtttgacaaatccttcaccctaatcgtcttctctaacgggaagctgggcctcagcgtggagcactcctgggccgactgccccatctcaggacacatgtgggagttcactctg

SEQ ID NO: 557689 - DNA, 120 bp, Artificial Sequence
  ENSG00000169169_14 (sequence is synthesized)
gctacagaatgctttcagctgggctactcaacagacggccactgcaaggggcacccggaccccacactaccccagccccagcggctgcaatgggaccttccagaccagatccactcctcc

SEQ ID NO: 557690 - DNA, 120 bp, Artificial Sequence
  ENSG00000169169_15 (sequence is synthesized)
atctctctagccctgaggggagccaagatcttgtctgaaaatgtcgactgccatgtcgttccattctccctatttggcaagagcttcatccgacgctgccacctctcttcagacagcttc

SEQ ID NO: 557691 - DNA, 120 bp, Artificial Sequence
  ENSG00000169169_16 (sequence is synthesized)
atccagatcgccttgcaactggcccacttccgggacaggggtcaattctgcctgacttatgagtcggccatgactcgcttattcctggaaggccggacggagacggtgcggtcttgcacg

SEQ ID NO: 557692 - DNA, 120 bp, Artificial Sequence
  ENSG00000169169_17 (sequence is synthesized)
agggaggcctgcaactttgtcagggccatggaggacaaagagaagacggacccacagtgcctcgccctgttccgcgtggcagtggacaagcaccaggctctgctgaaggcagccatgagc

SEQ ID NO: 557693 - DNA, 120 bp, Artificial Sequence
  ENSG00000169169_18 (sequence is synthesized)
gggcagggagttgaccgccacctgtttgcgctgtacatcgtgtcccgattcctccacctgcagtcgcccttcctgacccaggtccattcggagcagtggcagctgtccaccagccagatc

SEQ ID NO: 557694 - DNA, 120 bp, Artificial Sequence
  ENSG00000169169_19 (sequence is synthesized)
cctgttcagcaaatgcatctgtttgacgtccacaattacccggactatgtttcctcaggcggtggattcgggcctgctgatgaccatggttatggtgtttcttatatcttcatgggggat

SEQ ID NO: 557695 - DNA, 120 bp, Artificial Sequence
  ENSG00000169169_20 (sequence is synthesized)
ggcatgatcaccttccacatctccagcaaaaaatcaagcacaaaaacggattcccacaggctggggcagcacattgaggacgcactgctggatgtggcctccctgttccaggcgggacag

SEQ ID NO: 557696 - DNA, 120 bp, Artificial Sequence
  ENSG00000169169_21 (sequence is synthesized)
cattttaagcgccggttcagagggtcagggaaggagaactccaggcacaggtgtggatttctctcccgccagactggggcctccaaggcctcaatgacatccaccgacttctgactcctt

SEQ ID NO: 557697 - DNA, 120 bp, Artificial Sequence
  ENSG00000169169_22 (sequence is synthesized)
ccagcaggcagctggcctctccaaggaataagggtgaaattgccacagctggctgacacaggacaggggcaactggtttggcaaccccacatccaggccaataaagatgtgtgagctggg

SEQ ID NO: 557698 - DNA, 120 bp, Artificial Sequence
  ENSG00000169169_23 (sequence is synthesized)
gtccttccctcaaaacctccgggtctacaaaccaggaccctcaagacccttcaggtgcttagagaaggatgagctaggttatgtagtcctgggtcggcgcaaaaaggcagctgaaagcgg

SEQ ID NO: 557699 - DNA, 120 bp, Artificial Sequence
  ENSG00000169169_24 (sequence is synthesized)
aggagactaagagacaatgagctgagtgaggagcccaggaacccgggttccgaacagctgcgtagaatgcgagcggccaaatggtggagaatctggccggaggtcccgaattgacgtcct

SEQ ID NO: 557700 - DNA, 120 bp, Artificial Sequence
  ENSG00000169169_25 (sequence is synthesized)
tgcctgactggtgaggtccccccactccagcccagtaacccccaatcactctcccttcacccagtaagttcctctgtcattgtggtgtacctgctaaagaaaagtaacctctgagactta

SEQ ID NO: 557701 - DNA, 120 bp, Artificial Sequence
  ENSG00000169169_26 (sequence is synthesized)
tgtggtgtacctgctaaagaaaagtaacctctgagacttacattgggtcagattaataaaggcatggcatgaagaaaaaggaggtgaggccgggcacagtggctcacccctgtaatccca

SEQ ID NO: 557702 - DNA, 120 bp, Artificial Sequence
  ENSG00000169169_27 (sequence is synthesized)
tcctggaaaaggcatctctcacgtttctggggtcttacttactttgttacccaggctggagtgcagtgtcaccatcacagctcacttcatccctgaactcctgggctcaagcgatcctcc

SEQ ID NO: 557703 - DNA, 120 bp, Artificial Sequence
  ENSG00000169169_28 (sequence is synthesized)
ccctcgccttggcatgaaaagcggcaatggggtggacagcgtcaatgtctaacaggtgtttgtttcatatgggtctaaaactaatgcttttctcaagaccccgcaactcagcctggacca

SEQ ID NO: 557704 - DNA, 120 bp, Artificial Sequence
  ENSG00000169169_29 (sequence is synthesized)
gcaactggcccacttccgggtcagttgggttccccatccacagcccccgcagggtctcagtccacctgagcccccaagacctgcccctccacggttccttgtggtcgctgccattgtggg

SEQ ID NO: 557705 - DNA, 120 bp, Artificial Sequence
  ENSG00000169169_30 (sequence is synthesized)
tcggccatcttgaattctctcttccaaccattcttgggctggctggaggaggctggaggtctggacagagataggtcaagtctgtaagatctcctgagcccagctgacagactcctcttc

SEQ ID NO: 557706 - DNA, 120 bp, Artificial Sequence
  ENSG00000169169_31 (sequence is synthesized)
ttgtcagggccatggaggacaaagagaagacggtgggtgcagccctcgcttgaggcttcagttatttctgtgtactcactcatccacttgcaaacgttgatgggacctactgaagccagc

SEQ ID NO: 557707 - DNA, 120 bp, Artificial Sequence
  ENSG00000169169_32 (sequence is synthesized)
ctccacgaggagcacaagggacaagggatgaatcggacctggcctctgacttcaaagagctcactgatggggggagacagcccagcatagtgtgatatctgctttcatggtggtctcaca

SEQ ID NO: 557708 - DNA, 120 bp, Artificial Sequence
  ENSG00000169169_33 (sequence is synthesized)
ggcgtgagccaatgcacctggctggaactccatttttacaacgtaactctgcccatttaacctctttgtgacttgtgaccttcctttgcacccctgtaccctctctgcccagatcccacc

SEQ ID NO: 557709 - DNA, 120 bp, Artificial Sequence
  ENSG00000169169_34 (sequence is synthesized)
tgccctgcacctcttctcccttgccctacacctagccccgcacctacaaggtattgtggttccatggaaggagtttggactctggggccagacacacctaggaacccgcctggctctccc

SEQ ID NO: 557710 - DNA, 120 bp, Artificial Sequence
  ENSG00000169169_35 (sequence is synthesized)
tggctgtgtgaacctggccaaatgatttcccctctctaagcctcagttccccatctgtaaaatggggttgatattcccaccttgcagggatgtggcaaactcagttgaggccagatgtgc

SEQ ID NO: 557711 - DNA, 120 bp, Artificial Sequence
  ENSG00000169169_36 (sequence is synthesized)
tggggcacagggaaagggttagagagggaagtgggagaccatggaagaagggagaggtttcagggaaggagggtgatgttgaaaaaggacccatcaaggccgggcacggtggctcacgcc

SEQ ID NO: 557712 - DNA, 82 bp, Artificial Sequence
  ENSG00000169169_37 (sequence is synthesized)
caaaaattagctgggtactgaggcaatagaatcccttgaacccgggaggcggaggctgtagtgagctgagatcgcaccactg

SEQ ID NO: 557713 - DNA, 120 bp, Artificial Sequence
  ENSG00000169169_38 (sequence is synthesized)
gattcgggcctgtgagtggagctgggcgcgctggcccccagaggaaagagggggctggggggcctgcactcctgcatagtgggggtggaggggaccggagctattttcttcccttcactc

SEQ ID NO: 557714 - DNA, 120 bp, Artificial Sequence
  ENSG00000169169_39 (sequence is synthesized)
aggagatacccccggtgagagggccccagtgggttagggatggaggtgtggtcctgtggcctttgggccacgtgggtcctggaaggcagctcacagcccacggtttcctgcagactttgc

SEQ ID NO: 557715 - DNA, 120 bp, Artificial Sequence
  ENSG00000169169_40 (sequence is synthesized)
acagcaggcagctggcctctccaaggaataagggtgaaattgccacagctggctgacacaggacaggggcaactggtttggcaaccccacatccaggccaataaagatgtgtgagctggg

SEQ ID NO: 557716 - DNA, 120 bp, Artificial Sequence
  ENSG00000169169_41 (sequence is synthesized)
ggtggtgagacgagtgaggggcgtggccagatagggcgtggtcaggagaagggcgtggttagggagaaggaggcccggatttacgggtaaaaaaaaagccagggatgcagggagtgaagt

SEQ ID NO: 557717 - DNA, 120 bp, Artificial Sequence
  ENSG00000169174_0 (sequence is synthesized)
agcgacgtcgaggcgctcatggttgcaggcgggcgccgccgttcagttcagggtctgagcctggaggagtgagccaggcagtgagactggctcgggcgggccgggacgcgtcgttgcagc

SEQ ID NO: 557718 - DNA, 120 bp, Artificial Sequence
  ENSG00000169174_1 (sequence is synthesized)
agcggctcccagctcccagccaggattccgcgcgccccttcacgcgccctgctcctgaacttcagctcctgcacagtcctccccaccgcaaggctcaaggcgccgccggcgtggaccgcg

SEQ ID NO: 557719 - DNA, 120 bp, Artificial Sequence
  ENSG00000169174_2 (sequence is synthesized)
cacggcctctaggtctcctcgccaggacagcaacctctcccctggccctcatgggcaccgtcagctccaggcggtcctggtggccgctgccactgctgctgctgctgctgctgctcctgg

SEQ ID NO: 557720 - DNA, 120 bp, Artificial Sequence
  ENSG00000169174_3 (sequence is synthesized)
gtcccgcgggcgcccgtgcgcaggaggacgaggacggcgactacgaggagctggtgctagccttgcgttccgaggaggacggcctggccgaagcacccgagcacggaaccacagccacct

SEQ ID NO: 557721 - DNA, 120 bp, Artificial Sequence
  ENSG00000169174_4 (sequence is synthesized)
tccaccgctgcgccaaggatccgtggaggttgcctggcacctacgtggtggtgctgaaggaggagacccacctctcgcagtcagagcgcactgcccgccgcctgcaggcccaggctgccc

SEQ ID NO: 557722 - DNA, 120 bp, Artificial Sequence
  ENSG00000169174_5 (sequence is synthesized)
gccggggatacctcaccaagatcctgcatgtcttccatggccttcttcctggcttcctggtgaagatgagtggcgacctgctggagctggccttgaagttgccccatgtcgactacatcg

SEQ ID NO: 557723 - DNA, 120 bp, Artificial Sequence
  ENSG00000169174_6 (sequence is synthesized)
aggaggactcctctgtctttgcccagagcatcccgtggaacctggagcggattacccctccacggtaccgggcggatgaataccagccccccgacggaggcagcctggtggaggtgtatc

SEQ ID NO: 557724 - DNA, 120 bp, Artificial Sequence
  ENSG00000169174_7 (sequence is synthesized)
tcctagacaccagcatacagagtgaccaccgggaaatcgagggcagggtcatggtcaccgacttcgagaatgtgcccgaggaggacgggacccgcttccacagacaggccagcaagtgtg

SEQ ID NO: 557725 - DNA, 120 bp, Artificial Sequence
  ENSG00000169174_8 (sequence is synthesized)
acagtcatggcacccacctggcaggggtggtcagcggccgggatgccggcgtggccaagggtgccagcatgcgcagcctgcgcgtgctcaactgccaagggaagggcacggttagcggca

SEQ ID NO: 557726 - DNA, 120 bp, Artificial Sequence
  ENSG00000169174_9 (sequence is synthesized)
ccctcataggcctggagtttattcggaaaagccagctggtccagcctgtggggccactggtggtgctgctgcccctggcgggtgggtacagccgcgtcctcaacgccgcctgccagcgcc

SEQ ID NO: 557727 - DNA, 120 bp, Artificial Sequence
  ENSG00000169174_10 (sequence is synthesized)
tggcgagggctggggtcgtgctggtcaccgctgccggcaacttccgggacgatgcctgcctctactccccagcctcagctcccgaggtcatcacagttggggccaccaatgcccaagacc

SEQ ID NO: 557728 - DNA, 120 bp, Artificial Sequence
  ENSG00000169174_11 (sequence is synthesized)
agccggtgaccctggggactttggggaccaactttggccgctgtgtggacctctttgccccaggggaggacatcattggtgcctccagcgactgcagcacctgctttgtgtcacagagtg

SEQ ID NO: 557729 - DNA, 120 bp, Artificial Sequence
  ENSG00000169174_12 (sequence is synthesized)
ggacatcacaggctgctgcccacgtggctggcattgcagccatgatgctgtctgccgagccggagctcaccctggccgagttgaggcagagactgatccacttctctgccaaagatgtca

SEQ ID NO: 557730 - DNA, 120 bp, Artificial Sequence
  ENSG00000169174_13 (sequence is synthesized)
tcaatgaggcctggttccctgaggaccagcgggtactgacccccaacctggtggccgccctgccccccagcacccatggggcaggttggcagctgttttgcaggactgtatggtcagcac

SEQ ID NO: 557731 - DNA, 120 bp, Artificial Sequence
  ENSG00000169174_14 (sequence is synthesized)
actcggggcctacacggatggccacagccgtcgcccgctgcgccccagatgaggagctgctgagctgctccagtttctccaggagtgggaagcggcggggcgagcgcatggaggcccaag

SEQ ID NO: 557732 - DNA, 120 bp, Artificial Sequence
  ENSG00000169174_15 (sequence is synthesized)
gggtgagggtgtctacgccattgccaggtgctgcctgctaccccaggccaactgcagcgtccacacagctccaccagctgaggccagcatggggacccgtgtccactgccaccaacaggg

SEQ ID NO: 557733 - DNA, 120 bp, Artificial Sequence
  ENSG00000169174_16 (sequence is synthesized)
ccacgtcctcacaggctgcagctcccactgggaggtggaggaccttggcacccacaagccgcctgtgctgaggccacgaggtcagcccaaccagtgcgtgggccacagggaggccagcat

SEQ ID NO: 557734 - DNA, 120 bp, Artificial Sequence
  ENSG00000169174_17 (sequence is synthesized)
ccacgcttcctgctgccatgccccaggtctggaatgcaaagtcaaggagcatggaatcccggcccctcaggagcaggtgaccgtggcctgcgaggagggctggaccctgactggctgcag

SEQ ID NO: 557735 - DNA, 120 bp, Artificial Sequence
  ENSG00000169174_18 (sequence is synthesized)
tgccctccctgggacctcccacgtcctgggggcctacgccgtagacaacacgtgtgtagtcaggagccgggacgtcagcactacaggcagcaccagcgaaggggccgtgacagccgttgc

SEQ ID NO: 557736 - DNA, 120 bp, Artificial Sequence
  ENSG00000169174_19 (sequence is synthesized)
catctgctgccggagccggcacctggcgcaggcctcccaggagctccagtgacagccccatcccaggatgggtgtctggggagggtcaagggctggggctgagctttaaaatggttccga

SEQ ID NO: 557737 - DNA, 120 bp, Artificial Sequence
  ENSG00000169174_20 (sequence is synthesized)
cttgtccctctctcagccctccatggcctggcacgaggggatggggatgcttccgcctttccggggctgctggcctggcccttgagtggggcagcctccttgcctggaactcactcactc

SEQ ID NO: 557738 - DNA, 120 bp, Artificial Sequence
  ENSG00000169174_21 (sequence is synthesized)
tgggtgcctcctccccaggtggaggtgccaggaagctccctccctcactgtggggcatttcaccattcaaacaggtcgagctgtgctcgggtgctgccagctgctcccaatgtgccgatg

SEQ ID NO: 557739 - DNA, 120 bp, Artificial Sequence
  ENSG00000169174_22 (sequence is synthesized)
tccgtgggcagaatgacttttattgagctcttgttccgtgccaggcattcaatcctcaggtctccaccaaggaggcaggattcttcccatggataggggagggggcggtaggggctgcag

SEQ ID NO: 557740 - DNA, 120 bp, Artificial Sequence
  ENSG00000169174_23 (sequence is synthesized)
ggacaaacatcgttggggggtgagtgtgaaaggtgctgatggccctcatctccagctaactgtggagaagcccctgggggctccctgattaatggaggcttagctttctggatggcatct

SEQ ID NO: 557741 - DNA, 120 bp, Artificial Sequence
  ENSG00000169174_24 (sequence is synthesized)
agccagaggctggagacaggtgcgcccctggtggtcacaggctgtgccttggtttcctgagccacctttactctgctctatgccaggctgtgctagcaacacccaaaggtggcctgcggg

SEQ ID NO: 557742 - DNA, 120 bp, Artificial Sequence
  ENSG00000169174_25 (sequence is synthesized)
gagccatcacctaggactgactcggcagtgtgcagtggtgcatgcactgtctcagccaacccgctccactacccggcagggtacacattcgcacccctacttcacagaggaagaaacctg

SEQ ID NO: 557743 - DNA, 120 bp, Artificial Sequence
  ENSG00000169174_26 (sequence is synthesized)
gaaccagagggggcgtgcctgccaagctcacacagcaggaactgagccagaaacgcagattgggctggctctgaagccaagcctcttcttacttcacccggctgggctcctcatttttac

SEQ ID NO: 557744 - DNA, 120 bp, Artificial Sequence
  ENSG00000169174_27 (sequence is synthesized)
gggtaacagtgaggctgggaaggggaacacagaccaggaagctcggtgagtgatggcagaacgatgcctgcaggcatggaactttttccgttatcacccaggcctgattcactggcctgg

SEQ ID NO: 557745 - DNA, 120 bp, Artificial Sequence
  ENSG00000169174_28 (sequence is synthesized)
cggagatgcttctaaggcatggtcgggggagagggccaacaactgtccctccttgagcaccagccccacccaagcaagcagacatttatcttttgggtctgtcctctctgttgccttttt

SEQ ID NO: 557746 - DNA, 120 bp, Artificial Sequence
  ENSG00000169174_29 (sequence is synthesized)
acagccaacttttctagacctgttttgcttttgtaacttgaagatatttattctgggttttgtagcatttttattaatatggtgactttttaaaataaaaacaaacaaacgttgtcctaa

SEQ ID NO: 557747 - DNA, 120 bp, Artificial Sequence
  ENSG00000169174_30 (sequence is synthesized)
ttatgagagaaaggcagagggagatttgacacacacaggaggggccacgtggagacagaggtggagattggagaaatgtggccacaagccagggaacaccagcagccaccagaagccgga

SEQ ID NO: 557748 - DNA, 120 bp, Artificial Sequence
  ENSG00000169174_31 (sequence is synthesized)
agacgtgaggcagggttcttcccagagccttcgctgctgagtctgggaatttgtgaccgaagccataagaagtgggtacacgccctgagcctcccacacttgctcacctgtcctgagatg

SEQ ID NO: 557749 - DNA, 120 bp, Artificial Sequence
  ENSG00000169174_32 (sequence is synthesized)
agaatctctactctgcagcatatttggaggatcactgcgggggccacagaggtgctgttcagatggcacttcagaagactcaggagaccctggggcaggagcagtttgactgacagccca

SEQ ID NO: 557750 - DNA, 120 bp, Artificial Sequence
  ENSG00000169174_33 (sequence is synthesized)
gagggctgccctctgattccacctgaggccctgcttttcctggctgcaggggttccagggccaggccatttccgctggcgcaggactctgctagcagcaacctgcctgaagtcttccttt

SEQ ID NO: 557751 - DNA, 120 bp, Artificial Sequence
  ENSG00000169174_34 (sequence is synthesized)
ggcctggctgagagtttctgagacctgcgctggagcggaggtgcttccttccttgcttcctttcttcctctctcccttctccatccagcaggctggacctgcctggcatctgtgagctct

SEQ ID NO: 557752 - DNA, 120 bp, Artificial Sequence
  ENSG00000169174_35 (sequence is synthesized)
ccctactttctcctataccctaacctttgtcctgcatgggcgactcccccagtgagtctcttgcagcttttaccccagtgcctgcttcttggagaatccaaactgatccagttagggatg

SEQ ID NO: 557753 - DNA, 120 bp, Artificial Sequence
  ENSG00000169174_36 (sequence is synthesized)
ataaagtgtagggtaggcgctcggtgactgttttctctgaggttgtgactcgtgtgaggcagaagcagtccccgtgagccctcctggtatcttgtggagtggagaacgcttggacctgga

SEQ ID NO: 557754 - DNA, 120 bp, Artificial Sequence
  ENSG00000169174_37 (sequence is synthesized)
gccaggaggcccagacatacatcctgtccgagctgcagcttcctgtctctaaaatgagccggccagcgcaggtggccagacatcactgttattctcctttgagtctttaaatcttgttgt

SEQ ID NO: 557755 - DNA, 120 bp, Artificial Sequence
  ENSG00000169174_38 (sequence is synthesized)
ctttcttgcagactcggtgagctgtgaaaggctataataggggctttattttacactttgatactattttttgaacattcatattattgttagatattgatattcatatgaaggagcagg

SEQ ID NO: 557756 - DNA, 120 bp, Artificial Sequence
  ENSG00000169174_39 (sequence is synthesized)
atgacttgggtccttcttggcagtagcattgccagctgatggccttggacagttacctgccctctctaggcctccctttccttgtctatgaaatacattatagaataggatgtagtgtgt

SEQ ID NO: 557757 - DNA, 120 bp, Artificial Sequence
  ENSG00000169174_40 (sequence is synthesized)
gaggattttttggaggttaaacgagtgaatatatttaaggcgctttcaccagtgcctgggatgtgctctgtagtttctgtgtgttaactataaggttgactttatgctcattccctcctc

SEQ ID NO: 557758 - DNA, 80 bp, Artificial Sequence
  ENSG00000169180_0 (sequence is synthesized)
ggcagtggccgtgtgggttgaggctgcgaggacagcgcgggcccccgggcctctcccctgagccggccgcctgggccgcg

SEQ ID NO: 557759 - DNA, 120 bp, Artificial Sequence
  ENSG00000169180_1 (sequence is synthesized)
aggccggggagcccctgcctgggcccgcagcctcccccgcgggggtcgggcccgggcgggggtcccgagcagctgccctcctcgccggcatccgagcctcatttcctgctttttcagttt

SEQ ID NO: 557760 - DNA, 120 bp, Artificial Sequence
  ENSG00000169180_2 (sequence is synthesized)
cgagcctcatttcctgctttttcagtttccttggggaggggcgggtgggtctggatgaattgtctcggggtcccccgatgaggcgacccgggcggccctgccctttttagagggtcccct

SEQ ID NO: 557761 - DNA, 120 bp, Artificial Sequence
  ENSG00000169180_3 (sequence is synthesized)
cggggcccggtggggaaggggttgtctttgcatgggtgggggacttcccgagtctgccgggaccatgacctgaactgtgcgagcgggacgtgtccgaagcccaagaaccagctcatctga

SEQ ID NO: 557762 - DNA, 120 bp, Artificial Sequence
  ENSG00000169180_4 (sequence is synthesized)
gccgccccctccccggccagcatggcatctgaagaagcctctctcagggcattggaaagtctgatgacagaattttttcacgattgtacaaccaatgaaagaaaacgtgagatagaggag

SEQ ID NO: 557763 - DNA, 120 bp, Artificial Sequence
  ENSG00000169180_5 (sequence is synthesized)
cttcttaataactttgcccagcaaataggagcctggagattctgcctgtactttctctccagcactaggaatgactatgtaatgatgtacagtttaacagtttttgagaatctgatcaat

SEQ ID NO: 557764 - DNA, 120 bp, Artificial Sequence
  ENSG00000169180_6 (sequence is synthesized)
aaaatgtggcttggggtcccatctcaggataagatggaaatccgtagctgtctgcccaaactccttttggctcaccataaaaccttaccttactttatccggaacaagctctgcaaagtt

SEQ ID NO: 557765 - DNA, 120 bp, Artificial Sequence
  ENSG00000169180_7 (sequence is synthesized)
attgttgatattggacgtcaggattggcccatgttctaccacgacttttttactaacattttacagttgatccagtcccctgtgacaaccccccttgggctgatcatgttgaagacaact

SEQ ID NO: 557766 - DNA, 120 bp, Artificial Sequence
  ENSG00000169180_8 (sequence is synthesized)
tcagaagagctggcttgtccccgtgaggacctcagtgtggctcggaaggaggagttgcggaagctgctactggaccaggtgcagacagtgcttgggctactgacaggtatcttggagact

SEQ ID NO: 557767 - DNA, 120 bp, Artificial Sequence
  ENSG00000169180_9 (sequence is synthesized)
gtctgggacaaacacagtgttactgctgccactccaccaccatccccgacctcaggagaaagtggtgacttactgagtaacctgttgcagagtcccagttcagccaaactgttgaatcag

SEQ ID NO: 557768 - DNA, 120 bp, Artificial Sequence
  ENSG00000169180_10 (sequence is synthesized)
ccaattcccatccttgatgtggagagtgagtatatctgttccctggctttggagtgcctggcccatctcttcagttggattcctctgtctgccagcatcaccccatccctccttaccacc

SEQ ID NO: 557769 - DNA, 120 bp, Artificial Sequence
  ENSG00000169180_11 (sequence is synthesized)
atcttccactttgcacgatttggctgtgacatccgggccagaaagatggcgtcagttaacggcagcagccagaactgtgtctcgggtcaggagcgcggccggctgggggtcctggccatg

SEQ ID NO: 557770 - DNA, 120 bp, Artificial Sequence
  ENSG00000169180_12 (sequence is synthesized)
tcctgcatcaatgaactcatgtccaagaactgtgtgcctatggaatttgaggagtatttactgcgtatgttccagcagactttctacctcctgcagaaaatcaccaaggataacaatgcc

SEQ ID NO: 557771 - DNA, 120 bp, Artificial Sequence
  ENSG00000169180_13 (sequence is synthesized)
cacacagtgaagagcaggctagaagagctcgatgagagctatatcgagaagtttactgactttcttcggctctttgtgagtgttcacctaagaagaatcgagtcttactcccagttccct

SEQ ID NO: 557772 - DNA, 120 bp, Artificial Sequence
  ENSG00000169180_14 (sequence is synthesized)
gtggtggagtttttgacacttttgttcaagtacacatttcatcagcctactcatgaaggttacttctcttgtttggatatctggacgctgtttttggactatctgacaagtaaaattaaa

SEQ ID NO: 557773 - DNA, 120 bp, Artificial Sequence
  ENSG00000169180_15 (sequence is synthesized)
agtcgtcttggagacaaggaagcagttctcaacaggtacgaagatgccctggtgctcctgctcacagaggtgttgaatcgaatccagttcagatacaaccaagcccagctggaggagttg

SEQ ID NO: 557774 - DNA, 120 bp, Artificial Sequence
  ENSG00000169180_16 (sequence is synthesized)
gatgatgagactctggatgacgatcagcagacggagtggcagcggtacttacggcagagcttggaggtggtggccaaagtgatggagctcctgcccacgcacgccttctccacactgttc

SEQ ID NO: 557775 - DNA, 120 bp, Artificial Sequence
  ENSG00000169180_17 (sequence is synthesized)
cctgttcttcaggacaatttagaagtttatttgggattacaacagtttatagtcacttcagggtcaggacacaggttgaacatcacggcggagaacgactgccggcggctgcactgctcc

SEQ ID NO: 557776 - DNA, 120 bp, Artificial Sequence
  ENSG00000169180_18 (sequence is synthesized)
gaaaggttggtcaaagtcactctgtacggatctcagataaaattgtacaacattgaaactgctgtgccatcagtattgaaacctgacctcattgatgtgcatgctcagtccctggctgcg

SEQ ID NO: 557777 - DNA, 120 bp, Artificial Sequence
  ENSG00000169180_19 (sequence is synthesized)
ctgcaggcttactctcactggttagcacagtattgcagtgaagttcaccggcagaacacgcagcagttcgtgacactcatctctactaccatggatgcaatcacacctctaatcagcacc

SEQ ID NO: 557778 - DNA, 120 bp, Artificial Sequence
  ENSG00000169180_20 (sequence is synthesized)
aaggtccaagacaagctgctgctatctgcgtgccacttactggtctcactggccaccaccgtgcggcccgtctttctgatcagcatccctgcagtgcagaaagtattcaacagaatcact

SEQ ID NO: 557779 - DNA, 120 bp, Artificial Sequence
  ENSG00000169180_21 (sequence is synthesized)
gatgcctctgccctgcgacttgtcgataaggcccaggtgttggtgtgccgagccctctctaacatcttgctgcttccgtggccaaaccttccagagaatgagcagcagtggcccgtgcgc

SEQ ID NO: 557780 - DNA, 120 bp, Artificial Sequence
  ENSG00000169180_22 (sequence is synthesized)
tccatcaaccacgccagcctcatctctgcactctcccgggactatcgcaacctgaagcccagtgctgttgccccacagagaaagatgccactggatgacaccaaactgattatccaccag

SEQ ID NO: 557781 - DNA, 120 bp, Artificial Sequence
  ENSG00000169180_23 (sequence is synthesized)
acactcagcgtcttagaagatattgtggagaatatctcgggggagtccaccaagtctcgacagatttgctaccagtcgctgcaggaatctgttcaggtctccctggccctctttccagct

SEQ ID NO: 557782 - DNA, 120 bp, Artificial Sequence
  ENSG00000169180_24 (sequence is synthesized)
tttatccatcagtcagatgtgactgatgagatgctgagcttcttcctcactctgtttcgaggccttagagtacagatgggtgtgcctttcactgagcaaatcatacagactttcctcaac

SEQ ID NO: 557783 - DNA, 120 bp, Artificial Sequence
  ENSG00000169180_25 (sequence is synthesized)
atgtttaccagagagcagttagccgagagcatcctccacgagggcagcacaggctgccgggtggtggagaagtttctgaagatcctgcaggtggtggtccaggagccaggccaggtgttc

SEQ ID NO: 557784 - DNA, 120 bp, Artificial Sequence
  ENSG00000169180_26 (sequence is synthesized)
aagcccttcctccccagcatcatcgccctgtgcatggagcaagtgtatcccatcattgccgagcgtccctcccctgatgtgaaggccgagctgtttgagctccttttccggacgctccat

SEQ ID NO: 557785 - DNA, 120 bp, Artificial Sequence
  ENSG00000169180_27 (sequence is synthesized)
cacaactggaggtacttcttcaagtccaccgtgctggccagtgtccagagggggatcgctgaggagcagatggagaatgagccccagttcagtgccatcatgcaggctttcggacagtcc

SEQ ID NO: 557786 - DNA, 120 bp, Artificial Sequence
  ENSG00000169180_28 (sequence is synthesized)
tttctccagcccgacatccacctttttaaacaaaatctcttctacttggagactctcaacaccaagcagaagctgtaccacaagaagatcttccggactgccatgctgttccagtttgtg

SEQ ID NO: 557787 - DNA, 120 bp, Artificial Sequence
  ENSG00000169180_29 (sequence is synthesized)
aacgtgctgctccaggtcctggtccacaagtcccatgatcttctgcaggaggagattggcatcgccatctacaacatggcctcagtcgactttgatggcttctttgccgccttcctccca

SEQ ID NO: 557788 - DNA, 120 bp, Artificial Sequence
  ENSG00000169180_30 (sequence is synthesized)
gagttcctgaccagctgtgatggtgtggatgccaaccagaaaagtgtgctggggcggaatttcaagatggatcgggacctgccctcattcacccagaatgtgcacaggctggtcaacgac

SEQ ID NO: 557789 - DNA, 120 bp, Artificial Sequence
  ENSG00000169180_31 (sequence is synthesized)
ctgcgctactacagactctgcaacgacagcctgccccctggcactgtgaagctctaggcctgctactgcctggggacacggacttctgctgctgccacctgcgccagccctaccttccac

SEQ ID NO: 557790 - DNA, 120 bp, Artificial Sequence
  ENSG00000169180_32 (sequence is synthesized)
cacagatgtctcccagatgggccttggtcacactccttggcttctcccaccgcaagcaacgctgcctgcctctgccgctcctccacatcttgccgctgcccagcagagctggcttctggg

SEQ ID NO: 557791 - DNA, 120 bp, Artificial Sequence
  ENSG00000169180_33 (sequence is synthesized)
tccacctgagcactggacggtgctcccagggcgttggagcaggcggaggggtgtgtggccaggtactaggaggcaccaggaaatcccgcggggtggcccatgcagaccaggcgcacgtgg

SEQ ID NO: 557792 - DNA, 120 bp, Artificial Sequence
  ENSG00000169180_34 (sequence is synthesized)
ctcatggggcagaattgccaaggacagctcacgacagtgccaccttctcaccattccagccaaggagagatgtgacgttggaactgctctggcacttctgtcaagcctcccccgccccaa

SEQ ID NO: 557793 - DNA, 120 bp, Artificial Sequence
  ENSG00000169180_35 (sequence is synthesized)
ttgccttgagatctctgctctttgtcagagatttgcaaagactcacgtttttgttgttttctcatcattccattgtgatactaagaaactaagaagcttaatgaaaagaaataaaatgcc

SEQ ID NO: 557794 - DNA, 120 bp, Artificial Sequence
  ENSG00000169180_36 (sequence is synthesized)
agagagggatccaaaaaccaaggaagtgaccgaatcaagggaggatgttttgtccttcatcttagcatcctccttattcagtttgaagaagttgtgttgaaaagacacaggttgaacatc

SEQ ID NO: 557795 - DNA, 120 bp, Artificial Sequence
  ENSG00000169180_37 (sequence is synthesized)
ctggttttgtttttgtgtctttagcaccattcactttagtattttggcctcccggaaagaaaaccagccttctagacttgccagattgaaatgacacagtgatctgcccatcaacttttt

SEQ ID NO: 557796 - DNA, 120 bp, Artificial Sequence
  ENSG00000169180_38 (sequence is synthesized)
atcatttcccttcactttaattgggtcacaacacaaatgacttagaaaatgtgagcgcactagattataagaagccttagcagacagtgtctgaggattaaagttgcttttctgctatgt

SEQ ID NO: 557797 - DNA, 120 bp, Artificial Sequence
  ENSG00000169180_39 (sequence is synthesized)
gatttcatcattctgctggaattaaacactggcatgtgtgtgtttctaaggaatagtagcattaaataatttcattgtctggattttttttgtaccatagcctactcatgaaggttactt

SEQ ID NO: 557798 - DNA, 120 bp, Artificial Sequence
  ENSG00000169180_40 (sequence is synthesized)
tgtaaagtagtttctcccaaggaagaaggcctttagtggtgtggtacagtgtttttatattgattgagttcattggagctagtctagtgtaagcatggcagttattccacagggtcagtt

SEQ ID NO: 557799 - DNA, 120 bp, Artificial Sequence
  ENSG00000169180_41 (sequence is synthesized)
gctaagatcagtctcctgcggcaaattttatacctttaagagactctggttttctatagcaaacattctaacatatgtactttcctattagaaacattcatggtctcgaggatacaaggc

SEQ ID NO: 557800 - DNA, 120 bp, Artificial Sequence
  ENSG00000169180_42 (sequence is synthesized)
gtatttggtggcaaacctttattctttaggtagatatttgaggtggctcagcagatttatatgttgcggtatctggagattaaagaaacatttggaaatgattcagagatttgattttat

SEQ ID NO: 557801 - DNA, 120 bp, Artificial Sequence
  ENSG00000169180_43 (sequence is synthesized)
gtctctccttctgttcctatacccatttactagaaaatctaaatatgacacagagttagacccataaatctttctgctgttatacatctgttttatttcatgttcctttttagttgtagc

SEQ ID NO: 557802 - DNA, 120 bp, Artificial Sequence
  ENSG00000169180_44 (sequence is synthesized)
ctacatgcattcagatacaactttacttttttagttatctgagttccacatgaatacatgctcactgtgaaaaagtaaaatatcattcagatttccagactaaaaagttgtgatacctct

SEQ ID NO: 557803 - DNA, 120 bp, Artificial Sequence
  ENSG00000169180_45 (sequence is synthesized)
cacgcaagcctggcacctgtgcagcaaggagggggcacattgaggcctctgggcgtggtctgtgcccaccctgcagcttggcggcagctcacgagatgcctgctgacctggtgctgtagc

SEQ ID NO: 557804 - DNA, 120 bp, Artificial Sequence
  ENSG00000169180_46 (sequence is synthesized)
ctgattgaggggcacagccttttccccagtcttggtgtctgtagcacgtatgttcttagtctcagccatggaggtcccgagttcctggctctgcagcccctccatttgtcttggcatctt

SEQ ID NO: 557805 - DNA, 120 bp, Artificial Sequence
  ENSG00000169180_47 (sequence is synthesized)
tgttcatacccaggaccctgccgttctccctcctgggtgatgagccccggtggggccagcattggagtgtgcccaggcttgcattcaggctgagatggttggtgcttgggagctgcactt

SEQ ID NO: 557806 - DNA, 120 bp, Artificial Sequence
  ENSG00000169180_48 (sequence is synthesized)
aggcctttatatttttaaaagaaaatatattacaaatttgtatagttctgtactgaaagaactttggattgaatttaagttctaaggaggtggctgggtttcttattgtcaccttttgtc

SEQ ID NO: 557807 - DNA, 120 bp, Artificial Sequence
  ENSG00000169180_49 (sequence is synthesized)
ggaacagaaaggtaggtgtgtgccagtaagtctgagattagctggaagggcttgggtggttaagggaagtgactgagtttgaaaaatgcttgtgccttgtgtaggtttgttgtcttttct

SEQ ID NO: 557808 - DNA, 120 bp, Artificial Sequence
  ENSG00000169180_50 (sequence is synthesized)
ccccatccatctcctgtcctcccttctactcctcttgcccccttttccttactatttgcttgcaggtctgaggtggtgcagggactgagactgctgctcctgcgtagccaagaacaggag

SEQ ID NO: 557809 - DNA, 120 bp, Artificial Sequence
  ENSG00000169180_51 (sequence is synthesized)
aagaggtccgtggaggtacaggagttataatcgccttttgtcacttggtgtcagtttttactatttgacttttcccaagtgaacatcctgcagtattcaggaatgttgttgttattgtga

SEQ ID NO: 557810 - DNA, 120 bp, Artificial Sequence
  ENSG00000169180_52 (sequence is synthesized)
aatatggggctcctggtgaggaacagaaaggtctgaggtggtgcagggactgagactgctgctcctgcgtagccaagaacaggagaagaggtccgtggagctgagaggtgcctgggagca

SEQ ID NO: 557811 - DNA, 80 bp, Artificial Sequence
  ENSG00000169181_0 (sequence is synthesized)
aggcgccagcggctcctagccgaggtgcactcgcgctccgggctccgggcgcgccgtagccgctcctccaccgccgcccg

SEQ ID NO: 557812 - DNA, 80 bp, Artificial Sequence
  ENSG00000169181_1 (sequence is synthesized)
gccgccgccgatctcaggcacccgagccccggggcgcggcgggcagcggccgctgacgcggggcgccagctgccaacttc

SEQ ID NO: 557813 - DNA, 120 bp, Artificial Sequence
  ENSG00000169181_2 (sequence is synthesized)
cttcgcgcgcggagctccccggcggtgcagtcccgtcccggcggcgcgggcggcatgaagactagccgccgcggccgagcgctcctggccgtggccctgaacctgctggcgctgctgttc

SEQ ID NO: 557814 - DNA, 120 bp, Artificial Sequence
  ENSG00000169181_3 (sequence is synthesized)
ccaccgctttcctcaccacgcactggtgccagggcacgcagcgggtccccaagccgggctgcggccagggcgggcgcgccaactgccccaactcgggcgccaacgccacggccaacggca

SEQ ID NO: 557815 - DNA, 120 bp, Artificial Sequence
  ENSG00000169181_4 (sequence is synthesized)
ccgccgcccccgccgccgccgccgccgccgccaccgcctcggggaacggcccccctggcggcgcgctctacagctgggagaccggcgacgaccgcttcctcttcaggaatttccacaccg

SEQ ID NO: 557816 - DNA, 120 bp, Artificial Sequence
  ENSG00000169181_5 (sequence is synthesized)
gcatctggtactcgtgcgaggaggagctcagcgggcttggtgaaaaatgtcgcagcttcattgacctggccccggcatcggagaaaggggtcctgtggctgtctgtggtctccgaggtgc

SEQ ID NO: 557817 - DNA, 120 bp, Artificial Sequence
  ENSG00000169181_6 (sequence is synthesized)
tgtacattctgctgctggtggttggcttcagcctcatgtgtctcgagctcttccactccagcaatgtcatcgacgggctcaagctcaatgccttcgcggctgtcttcacggtgctctcag

SEQ ID NO: 557818 - DNA, 120 bp, Artificial Sequence
  ENSG00000169181_7 (sequence is synthesized)
gcctcctgggaatggtcgcccacatgatgtacacgcaggtgttccaggtcaccgtgagcctcggtcctgaggactggagaccccattcctgggactacgggtggtccttctgcctggcgt

SEQ ID NO: 557819 - DNA, 120 bp, Artificial Sequence
  ENSG00000169181_8 (sequence is synthesized)
ggggctcctttacctgctgcatggcagcctctgtcaccacgctcaactcctacaccaagacggtcattgagttccggcacaagcgcaaggtctttgagcagggctaccgggaagagccga

SEQ ID NO: 557820 - DNA, 120 bp, Artificial Sequence
  ENSG00000169181_9 (sequence is synthesized)
ccttcatagaccctgaggccatcaagtacttccgggagaggatggagaagagggacgggagcgaggaggactttcacttagactgccgccacgagagataccctgcccgacaccagccac

SEQ ID NO: 557821 - DNA, 120 bp, Artificial Sequence
  ENSG00000169181_10 (sequence is synthesized)
acatggcggattcctggccccggagctccgcacaggaagcaccagagctgaaccgacagtgctgggtcttggggcactgggtgtgaccaagacctcaacctggcccgcggacctcaggcc

SEQ ID NO: 557822 - DNA, 120 bp, Artificial Sequence
  ENSG00000169181_11 (sequence is synthesized)
atcgctggcaccagcccctgctgcaagaccaccagagtggtgcccccagaaccctggcctgtgtgccgtgaactcagtcagcctgcgtgggagatgccaggcctgtcctgcccatcgctg

SEQ ID NO: 557823 - DNA, 120 bp, Artificial Sequence
  ENSG00000169181_12 (sequence is synthesized)
cctgggtcccatggccttggaaatggggccagggcaggcccaagggaatgcacagggctgcacagagtgactttgggacagcagccccggactcttgccatcatcacatgagccctgctg

SEQ ID NO: 557824 - DNA, 120 bp, Artificial Sequence
  ENSG00000169181_13 (sequence is synthesized)
ggcacagctgcgatgccaggagacacatggccactggccactgaatggctggcacccacaagccagtcaggtgcccagaggggcagagccctttggggggcagagagtggcttcctgaag

SEQ ID NO: 557825 - DNA, 120 bp, Artificial Sequence
  ENSG00000169181_14 (sequence is synthesized)
gagggggcagtggcgcaggcactgcaggggtgtcacacagcaggcacacagcaggggctcaataaatgcttgttgaacttgttttcttgcggtgtatggaggccagttgctctgtgggct

SEQ ID NO: 557826 - DNA, 120 bp, Artificial Sequence
  ENSG00000169181_15 (sequence is synthesized)
gtggctgccctgtcattgccccaccccattactcctcaaggaggctgaaggtgacagcagagactgtgcagaggccagggccagacactgcagggtggcagggagggagcacagagccca

SEQ ID NO: 557827 - DNA, 120 bp, Artificial Sequence
  ENSG00000169181_16 (sequence is synthesized)
ggctggacacaggctggcagggctgccttgtattccagagagtgggcaaggcaggggccaggcaagcaagagatgtggggcgagcaagaagtgggcccccaaacccaagccctaagcagg

SEQ ID NO: 557828 - DNA, 120 bp, Artificial Sequence
  ENSG00000169181_17 (sequence is synthesized)
gagggtgaagaagccacatttctcttcagagctcagcaacatcacaccaccctgaccctgaggaggctttaccctgtgcctagcaccacctttacagaaaatcccagggcttagatgcct

SEQ ID NO: 557829 - DNA, 120 bp, Artificial Sequence
  ENSG00000169181_18 (sequence is synthesized)
ggagaaacagattcttattataaagaggaggaaaattagggtcacagagatgaatgaagtaacttgcctgtgattacagagctagcaaatggcagagatggggtttgaatcaggactcct

SEQ ID NO: 557830 - DNA, 120 bp, Artificial Sequence
  ENSG00000169181_19 (sequence is synthesized)
gactccaagttcagtcatttcccaagaggccttattccttcccagaagaatttctagagcttttccccacgtagaatatattcttctcctttatccttccatccttccatccatcatcca

SEQ ID NO: 557831 - DNA, 120 bp, Artificial Sequence
  ENSG00000169181_20 (sequence is synthesized)
tcactcatccagccattatccattatccatccatccattcatcattcgtccatctattatccacccattcatcatctattatccatccatcattcatcatccatccatcattcataattc

SEQ ID NO: 557832 - DNA, 120 bp, Artificial Sequence
  ENSG00000169181_21 (sequence is synthesized)
catccactcattcatcagctatccatcatctatccatccatccatccatccagcatctatcactcatccagctattgtccattgtccattcatccatttttcattcatccctccatcatc

SEQ ID NO: 557833 - DNA, 120 bp, Artificial Sequence
  ENSG00000169181_22 (sequence is synthesized)
catcattaatccattatccacccactcatcatctattatccatctatagtccatcaaccatccatccttcatcatccatccatccatccttcatccatccatccacccatccatccatcc

SEQ ID NO: 557834 - DNA, 120 bp, Artificial Sequence
  ENSG00000169181_23 (sequence is synthesized)
atccatccatccatcatctgtccatccattatctatccattcatccatccattcatcatccacccacctattcatcagctatctatccatcatccatccatccatcatccatccatccat

SEQ ID NO: 557835 - DNA, 120 bp, Artificial Sequence
  ENSG00000169181_24 (sequence is synthesized)
tatccattcattgtctatgctttcatccatccattcatcatccatccacccattcgttagctatttatccattatccattcctccatctatccatcatccattcatcccttatccattca

SEQ ID NO: 557836 - DNA, 120 bp, Artificial Sequence
  ENSG00000169181_25 (sequence is synthesized)
accattatgcatttcttcatttatccattatttatccttccatccatcatccatcatctttccatccactatctatccattcatccatctatccatcatccatccatcctttatccatca

SEQ ID NO: 557837 - DNA, 120 bp, Artificial Sequence
  ENSG00000169181_26 (sequence is synthesized)
ttcatcagccatcatccctccatctatccattatccatcatccactcatccattcatccctccatctgcccattatccatcaaccatccatccatccattatccgtcatccacacatcca

SEQ ID NO: 557838 - DNA, 120 bp, Artificial Sequence
  ENSG00000169181_27 (sequence is synthesized)
ttcatccctccatctgcccattatccatcaaccatccatccatccattatccatttctgcattatccatttattctttatccatttcttcatctattcatcatctatccatccattatcc

SEQ ID NO: 557839 - DNA, 120 bp, Artificial Sequence
  ENSG00000169181_28 (sequence is synthesized)
ttacacctatctatcatccatccattccttcatctatccatcatccatcaattatccatccattcatccatccatctatccatcttctattgattgcttgtcatccttccttgtatcaga

SEQ ID NO: 557840 - DNA, 120 bp, Artificial Sequence
  ENSG00000169181_29 (sequence is synthesized)
cttccatccatcctccttccatgtgtcacacatcctcattactcaaccatccagctgtgcatccatctattcactgatatagttcactgtgcccctactatgtgccaagcactgtggtag

SEQ ID NO: 557841 - DNA, 120 bp, Artificial Sequence
  ENSG00000169181_30 (sequence is synthesized)
gcacttgaggtgggatgctggagcatccagagagggcatctattgtcgtgagcctgggttcagattccaccttctccacttgtgaccttgggcgagttacttgacctttctgtgcctgtt

SEQ ID NO: 557842 - DNA, 120 bp, Artificial Sequence
  ENSG00000169181_31 (sequence is synthesized)
tcctcatccattaaatccggataatcattatacctacctcttcaagctgttgtgcaaattaaatgagctaacatatttgaagtgtctagaacagagcctggcacaagtaaacactttgtg

SEQ ID NO: 557843 - DNA, 120 bp, Artificial Sequence
  ENSG00000169181_32 (sequence is synthesized)
ggtgtttactaacaggacaacaaggggaaatcggggctgtgggagctgtagtctagggaggctcctttgagaaaatgatgtctaagccaagacatgaagattgtctgggcatcagccagg

SEQ ID NO: 557844 - DNA, 120 bp, Artificial Sequence
  ENSG00000169181_33 (sequence is synthesized)
caagagtatagcagggaaagaaagtacattagaggactttaaaatagtcccaatggcaggtgtggagagcagggaggtcaggaggcagttgtgggaaattaggcatcagagggcagtgga

SEQ ID NO: 557845 - DNA, 120 bp, Artificial Sequence
  ENSG00000169181_34 (sequence is synthesized)
gccaggccaggaggaactggaaaccttcttagggagcttagagtttaccctggggcaatggggagtgggcagtgagatgcttttagcagactgggatgcgcctgggtgtacatttgagga

SEQ ID NO: 557846 - DNA, 120 bp, Artificial Sequence
  ENSG00000169181_35 (sequence is synthesized)
agatcaccgcaactatgggcacagaatagttgtgggagatgcttctcccttcctcatccctcttacactcaagaaagagaagaaagtgggctggcttaggaaagttgccctggggagggg

SEQ ID NO: 557847 - DNA, 120 bp, Artificial Sequence
  ENSG00000169181_36 (sequence is synthesized)
accatgcgggcagattcaggaaccaattaggagggaatagactgagtgggagaagaggaaagttggtgacgactctcaggttacagggtcagcttgggggatagggaagacggagacttc

SEQ ID NO: 557848 - DNA, 120 bp, Artificial Sequence
  ENSG00000169181_37 (sequence is synthesized)
gtggttcagatgtcttgagtctcaggggctcaggggacagccagctggaggtttgtgctcattcattcacgcattgattcatcaagcgaacaatttgttaattcactttccattcattca

SEQ ID NO: 557849 - DNA, 120 bp, Artificial Sequence
  ENSG00000169181_38 (sequence is synthesized)
gtaaatattaatgacctactaggtggggcttaaggcggggctggaaatgggcctgggagagcaattatggtccagctctactgaggccttgaatgtcagaacaaggaatttgggctttgg

SEQ ID NO: 557850 - DNA, 120 bp, Artificial Sequence
  ENSG00000169181_39 (sequence is synthesized)
cctcatgcaagagagggcggctgccatatatgggcctgggcagggacagatctgacagggatctagccctggccaccaggcatctaggagctcttgttctcacccagggtccttctgaag

SEQ ID NO: 557851 - DNA, 120 bp, Artificial Sequence
  ENSG00000169181_40 (sequence is synthesized)
ttggcgagtggaccgcaggaggtccaggagatgattgtagttgacacatggggaaaattttaatctattttaatagttgtgtttatgtaaatgtgtattagaaaaaaatgtacagtgggc

SEQ ID NO: 557852 - DNA, 120 bp, Artificial Sequence
  ENSG00000169181_41 (sequence is synthesized)
acatcagtgctatgacttcacagacgttactgcttaggatgaaaccaaaataggcatttaagtaaaagaaaaaaagagttggcttaaagaaaaatattaaataaataatcgtgcaagtgg

SEQ ID NO: 557853 - DNA, 120 bp, Artificial Sequence
  ENSG00000169181_42 (sequence is synthesized)
ggcagctgagtcagtgagcagcgccatgatgaggggcagtccctgccagcaccaacaggggctggaaacccagcgataggagcatcagcatctccgaggggtcctgtggctgtctgtggt

SEQ ID NO: 557854 - DNA, 120 bp, Artificial Sequence
  ENSG00000169184_0 (sequence is synthesized)
gttgctgcttctcccggcgctgggcgagaggcagacacagagaggggagccgagaccctcggaacgccccacgcagagcccccccgctagtcgggagaggggtgcgcagaccccccagag

SEQ ID NO: 557855 - DNA, 120 bp, Artificial Sequence
  ENSG00000169184_1 (sequence is synthesized)
ctgcccccgcgcccccctccccccattccgggctctgagagcgcagcgggaacgccttagcctgctcgcccggcgtggccccccgacccgcgtacgcccccctccctcaggtccgagagg

SEQ ID NO: 557856 - DNA, 120 bp, Artificial Sequence
  ENSG00000169184_2 (sequence is synthesized)
gactcgcgaagcacctcagcgcggaggcagggaaccggagccttggagcgacccaacccctcgtctcgctgccctcccgcgcctgcaacggtgcgcggagactccggcgaactcagacac

SEQ ID NO: 557857 - DNA, 120 bp, Artificial Sequence
  ENSG00000169184_3 (sequence is synthesized)
ccaacggcggagaacagaagcggcaggcggcggacgtggccgcgaagctgcgcgccgaacgcagcgcacccgctgccgagcagaggagccgcgcctttccccgaccctcggctccagccc

SEQ ID NO: 557858 - DNA, 120 bp, Artificial Sequence
  ENSG00000169184_4 (sequence is synthesized)
ccggcgcctgccgcctcgcagcccctctgcgtcctcggctcgggggccggcaccggcgatgccgagcggagcctccagtcctccgacccgctgaagaagcagcagccgctcgcccggagc

SEQ ID NO: 557859 - DNA, 120 bp, Artificial Sequence
  ENSG00000169184_5 (sequence is synthesized)
ctacggggattgtgcgagcggatcgtgctcggtggaggctcgggctgcggggcgcggggactccggggggcggggggagggaccgctctgtcggtgcccggcgccagccgcggctttgaa

SEQ ID NO: 557860 - DNA, 120 bp, Artificial Sequence
  ENSG00000169184_6 (sequence is synthesized)
gggtctccctcccctgcccttagcagctctgccacggactccgggaggctgcgggcggcgtcctgagggctccccagcagacccaatcggacttgagaaggtgatcgctctgctctccca

SEQ ID NO: 557861 - DNA, 120 bp, Artificial Sequence
  ENSG00000169184_7 (sequence is synthesized)
acccccttccctccccattccccccacttaactttttgtctccgttcatccgcggcttcgtcccctccccgcagacccacccgcggctgtgacaaccgcccggggcatgggccccccaac

SEQ ID NO: 557862 - DNA, 120 bp, Artificial Sequence
  ENSG00000169184_8 (sequence is synthesized)
acggctcctagaggccccgcggcctcgcaagatgtgagaggccctccccgggcagaatcggagcttcaggagaggagctaataccccgccccccgtccctcacatcaggcggggtggagg

SEQ ID NO: 557863 - DNA, 120 bp, Artificial Sequence
  ENSG00000169184_9 (sequence is synthesized)
tgcgcgctgagcccccgcggtgctgagcgtcccggagcgcccaatcctgggctggaacgagtagctggccggaggcgcgccgcggagagccggctgtcatgccctattgatccccctctg

SEQ ID NO: 557864 - DNA, 120 bp, Artificial Sequence
  ENSG00000169184_10 (sequence is synthesized)
ccccccgccaagtatgtttgggctggaccaattcgagccccaggtcaacagcaggaacgctggccagggcgagaggaactttaacgagaccggactgagcatgaacacccactttaaggc

SEQ ID NO: 557865 - DNA, 120 bp, Artificial Sequence
  ENSG00000169184_11 (sequence is synthesized)
cccggctttccacactggggggccccctggccctgtggatcctgctatgagcgcgctgggcgaacccccgatcttgggcatgaacatggagccctacggcttccacgcgcgcggccactc

SEQ ID NO: 557866 - DNA, 120 bp, Artificial Sequence
  ENSG00000169184_12 (sequence is synthesized)
ggagttgcacgcaggggggctgcaagcgcagcctgtgcacggcttctttggcggccagcagcctcaccacggccacccgggaagtcatcatccccaccagcatcacccccactttggggg

SEQ ID NO: 557867 - DNA, 120 bp, Artificial Sequence
  ENSG00000169184_13 (sequence is synthesized)
caacttcggtggcccggaccccggggcctcgtgcctgcacgggggtcgcctgctcggctacggcggcgcagccggaggcctgggcagccagccgcccttcgccgagggctatgagcacat

SEQ ID NO: 557868 - DNA, 120 bp, Artificial Sequence
  ENSG00000169184_14 (sequence is synthesized)
ggcggagagccaggggcctgagagcttcggcccgcagcgaccggggaacctcccggacttccacagttcaggtgcctccagccacgccgtgccggccccatgcctgccgctggaccagag

SEQ ID NO: 557869 - DNA, 120 bp, Artificial Sequence
  ENSG00000169184_15 (sequence is synthesized)
ccctaaccgagccgcctccttccacggcctgccgtcctccagcggctccgattcccacagtctggagccacggagggtgacgaaccaaggagccgtcgactcgctggaatacaattaccc

SEQ ID NO: 557870 - DNA, 120 bp, Artificial Sequence
  ENSG00000169184_16 (sequence is synthesized)
gggcgaggcgccctcgggacattttgacatgttttcgccctctgactccgaagggcagctgcctcattatgcagcgggtcgccaggttcctgggggcgctttcccgggcgcctcggccat

SEQ ID NO: 557871 - DNA, 120 bp, Artificial Sequence
  ENSG00000169184_17 (sequence is synthesized)
gcccagagctgcgggcatggtgggcttgtccaaaatgcacgcccagccaccgcagcagcagccccagcagcagcagcagccccagcagcagcagcagcagcatggtgtgttctttgagag

SEQ ID NO: 557872 - DNA, 120 bp, Artificial Sequence
  ENSG00000169184_18 (sequence is synthesized)
gttcagtggggccagaaagatgcctgtgggtctggagccctcagtgggctccaggcacccgttaatgcagcctccccagcaggccccgccaccccctcagcagcagcccccgcagcagcc

SEQ ID NO: 557873 - DNA, 120 bp, Artificial Sequence
  ENSG00000169184_19 (sequence is synthesized)
gccacagcagcagccgccgccgccacccgggcttctagtccgacaaaattcgtgcccgcctgcgctccctcggccccagcagggcgaggcgggcacgcccagcggcggcctgcaggacgg

SEQ ID NO: 557874 - DNA, 120 bp, Artificial Sequence
  ENSG00000169184_20 (sequence is synthesized)
aggccccatgctgcccagccagcacgcgcaattcgagtatcccatccaccggctggagaaccggagcatgcacccttattccgagcctgttttcagcatgcagcatcctcctccgcagca

SEQ ID NO: 557875 - DNA, 120 bp, Artificial Sequence
  ENSG00000169184_21 (sequence is synthesized)
ggcgcccaaccagcggctgcagcatttcgacgcgcccccctacatgaacgtggccaagaggccgcgcttcgactttccgggcagcgcgggagtggaccgctgcgcttcgtggaacggcag

SEQ ID NO: 557876 - DNA, 120 bp, Artificial Sequence
  ENSG00000169184_22 (sequence is synthesized)
catgcacaacggcgctctggataatcacctctccccttccgcctacccaggcctacccggcgagttcacaccgcctgtgcccgacagcttcccttcggggccgcccctgcagcatccggc

SEQ ID NO: 557877 - DNA, 120 bp, Artificial Sequence
  ENSG00000169184_23 (sequence is synthesized)
cagcagcagcagcagcagcagcaacagcagcagcagcagcagcaacagcaacagcaacagcagcagcagcagcagcgccaaaacgcggccctcatgattaagcagatggcgtcgcggaat

SEQ ID NO: 557878 - DNA, 120 bp, Artificial Sequence
  ENSG00000169184_24 (sequence is synthesized)
catgattaagcagatggcgtcgcggaatcagcagcagcggctgcgccagcccaacctggctcagctaggccaccccggggacgtgggccagggcggcctggtgcatggcggcccggtggg

SEQ ID NO: 557879 - DNA, 120 bp, Artificial Sequence
  ENSG00000169184_25 (sequence is synthesized)
cggcttggcccagccgaactttgagcgcgaaggcggcagcacgggcgccgggcgtctgggcaccttcgagcagcaggcgccgcacttggcgcaagagagcgcgtggttctcaggtccgca

SEQ ID NO: 557880 - DNA, 120 bp, Artificial Sequence
  ENSG00000169184_26 (sequence is synthesized)
tccgccgcccggagacctgctgccccgtaggatgggcggctcgggtctgcccgctgactgtggcccgcacgaccccagcctggcgccccctcctccgcctggtggctcgggggtgctgtt

SEQ ID NO: 557881 - DNA, 120 bp, Artificial Sequence
  ENSG00000169184_27 (sequence is synthesized)
ccggggccctctgcaggagccgatgaggatgcccggagagggccacgtgcccgcgctgccttcaccgggcctgcagttcgggggcagtctgggaggcctgggtcagctgcagtcgcccgg

SEQ ID NO: 557882 - DNA, 120 bp, Artificial Sequence
  ENSG00000169184_28 (sequence is synthesized)
ggcgggcgtggggctccccagcgctgcttcggagcgccggcccccgccgccggactttgctacgtctgcgctcgggggccagccgggctttccgtttggtgcagccggccggcagtccac

SEQ ID NO: 557883 - DNA, 120 bp, Artificial Sequence
  ENSG00000169184_29 (sequence is synthesized)
gccgcacagcggtccaggcgtgaactcgccccccagcgcgggagggggcggtggcagctctggtggcggcggtggcgggggtgcctacccgccgcagcctgatttccagcccagccagcg

SEQ ID NO: 557884 - DNA, 120 bp, Artificial Sequence
  ENSG00000169184_30 (sequence is synthesized)
cacctcggccagtaaattgggcgcgctctcgctgggctccttcaacaagcccagctccaaggacaacctgttcggccagagctgcctggctgcgctctccaccgcttgccagaacatgat

SEQ ID NO: 557885 - DNA, 120 bp, Artificial Sequence
  ENSG00000169184_31 (sequence is synthesized)
cgccagcctcggggcccccaacctcaacgtgaccttcaacaagaagaacccgccagagggcaagaggaaactgagccagaacgagaccgacggcgcggcagtggccggcaacccgggctc

SEQ ID NO: 557886 - DNA, 120 bp, Artificial Sequence
  ENSG00000169184_32 (sequence is synthesized)
gagggactgctcctggggccccaggacccggaggcccgtccgggaccagtagcagcggctccaaagcctcggggccgcccaaccctccagcccagggggacggcaccagcctctccccca

SEQ ID NO: 557887 - DNA, 120 bp, Artificial Sequence
  ENSG00000169184_33 (sequence is synthesized)
actacaccctggaatccacgtcggggaatgacggcaagccggtctccgggggcggcggccggggacggggtcgcagaaaaagggacagtggtcacgtgagccctggcaccttctttgaca

SEQ ID NO: 557888 - DNA, 120 bp, Artificial Sequence
  ENSG00000169184_34 (sequence is synthesized)
agtactcggcggctccggacagcgggggcgcacctggggtgagcccagggcagcagcaagcgtcaggcgcagccgtcgggggaagctccgcaggcgagacgcgcggggcaccgacgcccc

SEQ ID NO: 557889 - DNA, 120 bp, Artificial Sequence
  ENSG00000169184_35 (sequence is synthesized)
acgaaaaggcgctcacgtcgccatcctgggggaagggggctgagttgctcctgggggatcagccggacctcattgggtccctggacggcggggccaagtcggacagtagttcgccaaacg

SEQ ID NO: 557890 - DNA, 120 bp, Artificial Sequence
  ENSG00000169184_36 (sequence is synthesized)
tgggtgagttcgcctcggacgaggtgagcacgagctacgccaatgaggacgaggtgtcgtccagctctgacaacccccaggcactagttaaagcgagcaggagtcccctggtgaccggct

SEQ ID NO: 557891 - DNA, 120 bp, Artificial Sequence
  ENSG00000169184_37 (sequence is synthesized)
cgcccaaactccctccccgtggggtaggcgccggggaacacggaccgaaggcgcccccgcccgccctcggcctgggcatcatgtctaactctacctcgacccctgacagctacggcggcg

SEQ ID NO: 557892 - DNA, 120 bp, Artificial Sequence
  ENSG00000169184_38 (sequence is synthesized)
gtgggggcccgggccatccgggcactccgggcctggagcaggtccgcaccccgacgagcagcagcggcgccccgccacccgacgagatccaccccctggagatccttcaggcgcagatcc

SEQ ID NO: 557893 - DNA, 120 bp, Artificial Sequence
  ENSG00000169184_39 (sequence is synthesized)
agctacagaggcagcagttcagcatctccgaggaccagcctctggggctgaagggtggcaagaagggtgagtgcgccgtcggggcctcaggggcgcagaatggcgacagcgagctgggca

SEQ ID NO: 557894 - DNA, 120 bp, Artificial Sequence
  ENSG00000169184_40 (sequence is synthesized)
gctgctgctccgaggcggtcaagagcgccatgagcaccattgacctggactcgctgatggcagagcacagcgctgcctggtacatgcccgctgacaaggccctggtggacagcgcggacg

SEQ ID NO: 557895 - DNA, 120 bp, Artificial Sequence
  ENSG00000169184_41 (sequence is synthesized)
acgacaagacgttggcgccctgggagaaggccaaaccccagaaccccaacagcaaagaagcccacgacctccctgcaaacaaggcctcagcatcccagcctggcagccacttgcagtgcc

SEQ ID NO: 557896 - DNA, 120 bp, Artificial Sequence
  ENSG00000169184_42 (sequence is synthesized)
tgtctgtccactgcacagacgacgtgggtgacgccaaggctcgagcctccgtgcccacctggcggtccctgcattctgacatctccaacagatttgggacattcgtggctgccctaactt

SEQ ID NO: 557897 - DNA, 120 bp, Artificial Sequence
  ENSG00000169184_43 (sequence is synthesized)
gaatgacaagaaagatcccctcctctaccaggcccttcctctccccctgtctgtttccttccccctcaaccttaccccacccctctgttaatttgaaagggccactattgctgagtggat

SEQ ID NO: 557898 - DNA, 120 bp, Artificial Sequence
  ENSG00000169184_44 (sequence is synthesized)
gagttttttttttttctctaggttggtacctgcttagtggcatatggaccggaaagggttaatttaaagggggggaacctcaaaagtttttttaaaaaagaaacttgtctgccacagtat

SEQ ID NO: 557899 - DNA, 120 bp, Artificial Sequence
  ENSG00000169184_45 (sequence is synthesized)
gttaccagtgttaacccttctgcagttagcaaacttttgcttaagcctttttcctctagatactccccatgtttcggtaatcttggcatacattttttagatgacctctttccttgtttt

SEQ ID NO: 557900 - DNA, 120 bp, Artificial Sequence
  ENSG00000169184_46 (sequence is synthesized)
gttttcatgctgctgtatgtccaagtattgttatttcataataagacaagagttgctttcttttttattctttttccttttcttaccccctccccttttattttctttttgctttgttca

SEQ ID NO: 557901 - DNA, 120 bp, Artificial Sequence
  ENSG00000169184_47 (sequence is synthesized)
ctgcttattaaaatggaaatcctggagaatagtagttctggaatattgccgggtgaaagtccaattgtcatcacaatgttatatattgacaccccagtgtcatcagtcaggcaggagcca

SEQ ID NO: 557902 - DNA, 120 bp, Artificial Sequence
  ENSG00000169184_48 (sequence is synthesized)
aacaatgaatgcccctcttaggtattccgcctgggattttgttttgtctgttccctaagaaaatatattttcattcctgcaaacacagtgctcagccttcagttcccttccacttgagtt

SEQ ID NO: 557903 - DNA, 120 bp, Artificial Sequence
  ENSG00000169184_49 (sequence is synthesized)
ctctcttctcctgctggaagccgcccctctctgcgatggacgtgaggacgtgtccagctctgctctgtgggaaggagttggaatgttcgacagcagtgttttctctccttttctgggcct

SEQ ID NO: 557904 - DNA, 120 bp, Artificial Sequence
  ENSG00000169184_50 (sequence is synthesized)
cctcgcaaatgcccaggccctgcattttcacgctgtgctaagcagcctttggtctgcatgggggatggtgtgctcccagcctgcagtctttggagcaaggctgctgcccgtgccttgggt

SEQ ID NO: 557905 - DNA, 120 bp, Artificial Sequence
  ENSG00000169184_51 (sequence is synthesized)
gctggagttggaggaggctgttctcagccctttcccttttctgaaagctgttcctggccgggcatcccagggaagaaggaggggactgcgtgtatctcctccacctctcccattccatcc

SEQ ID NO: 557906 - DNA, 120 bp, Artificial Sequence
  ENSG00000169184_52 (sequence is synthesized)
ccagtccagcctgggcaaccccacccctgggagggatgaggcaccctcttgctcagcctgctcagccttctctgagcctttgcagggatctgcagactcctgagggctagaggacagaga

SEQ ID NO: 557907 - DNA, 120 bp, Artificial Sequence
  ENSG00000169184_53 (sequence is synthesized)
aagagaatagaatgaaatgactttgattcctgcgccttttagttttgaactctggaattcctctgccccctccccaacatttttttggaatctcaccctgttgcaaaactagagccatgt

SEQ ID NO: 557908 - DNA, 120 bp, Artificial Sequence
  ENSG00000169184_54 (sequence is synthesized)
cccaagcatctcacaaaggaataactgctctgagcagagatgagtggtggttggcaggggcaggcaactttgggtgctgctgatgcctgcaaaagccatttatggcttgtggtggggggc

SEQ ID NO: 557909 - DNA, 120 bp, Artificial Sequence
  ENSG00000169184_55 (sequence is synthesized)
acatagattccccggtgggttagacaggaagtaactgatatcacttcacccaaatatataaccgtgatggttatctatttaatttcagtttttgttaacgagcgtgtcttactaaaacgc

SEQ ID NO: 557910 - DNA, 120 bp, Artificial Sequence
  ENSG00000169184_56 (sequence is synthesized)
tccactttgagctcccccaccccctccaggtcctcagagtttgcagatctgggctttctaaagcaagtgacctgaaggctctgggctcaccatacaacacccacgttgtttatttcaaag

SEQ ID NO: 557911 - DNA, 120 bp, Artificial Sequence
  ENSG00000169184_57 (sequence is synthesized)
aacttttcagcgaagggagaggagctttcagaaaaacctcactctttcccctcccttctcccctctttccttctgccggtccttttggctggggtctgagtctgcggttctcgcctgggc

SEQ ID NO: 557912 - DNA, 120 bp, Artificial Sequence
  ENSG00000169184_58 (sequence is synthesized)
agtcttgacgaggagcaaaccccgccttcagagggcagacaaagcaggtggcatgaattgatcagcgagaaaggtgtgagccgaggcagttcctgcgttctgctacaaaaggaatggaaa

SEQ ID NO: 557913 - DNA, 120 bp, Artificial Sequence
  ENSG00000169184_59 (sequence is synthesized)
gggaagggaatttccccccaccatgggctgtgggagagttgaccgtattctgggcaagactccatgacccctctgattctgcagtgtacagctgtttgagagcctcatcattttactttt

SEQ ID NO: 557914 - DNA, 120 bp, Artificial Sequence
  ENSG00000169184_60 (sequence is synthesized)
gaaacaggaatgatttctccttaattgcttaaggccggggagcaaagtgtcttaacttctgtctttgactttcccagcgttgagtcatcaacactttgccaattagctcatggtcctggc

SEQ ID NO: 557915 - DNA, 120 bp, Artificial Sequence
  ENSG00000169184_61 (sequence is synthesized)
aacctcagaaacccctgaagttttaaaaactttctcgctccccacgaccccagaatgaaacagctttaaaaatagccttaagcaaaaggatgttatttcattaaatttggtttaatggaa

SEQ ID NO: 557916 - DNA, 120 bp, Artificial Sequence
  ENSG00000169184_62 (sequence is synthesized)
agaataaaagtaaatgaaaaacacaccctacacactagactccgaacactggtaatcagtactgcatagcaaactctttgggaaagaaaacgaaaatgttattgcacatgtaaaatatga

SEQ ID NO: 557917 - DNA, 120 bp, Artificial Sequence
  ENSG00000169184_63 (sequence is synthesized)
aaacttaactctgctgtgtgttaggcaatcctgtaatcttttttgactcttaaaagaaattcatttctgaaatgcttggttggaagactgtgacaatagctcatgaaattgagtgttatt

SEQ ID NO: 557918 - DNA, 120 bp, Artificial Sequence
  ENSG00000169184_64 (sequence is synthesized)
tttttctttcttttttaaaaaaatatgtaaagtgcagtcttctgtattcctgcatattgtatatacctgtatatgttttcctgagcagttaaataacaataaatatgacgttaatggtga

SEQ ID NO: 557919 - DNA, 120 bp, Artificial Sequence
  ENSG00000169184_65 (sequence is synthesized)
actttatgctggaaaatgtagcagaatcacttgtgacccgtttctctccacctgaatgacaatgacgtcggattgtgttctttgcccagggagtgatcagctttgccgaaagcatttagg

SEQ ID NO: 557920 - DNA, 120 bp, Artificial Sequence
  ENSG00000169188_0 (sequence is synthesized)
aggaagcagttcgctcgcgcctaggttggcgcgggctgggaggtgttccagccctttaagatgttgcgcgtggtgagctggaacatcaatgggattcggagacccctgcaaggggtggca

SEQ ID NO: 557921 - DNA, 120 bp, Artificial Sequence
  ENSG00000169188_1 (sequence is synthesized)
aatcaggaacccagcaactgtgccgccgtggccgtggggcgcattttggacgagctggatgcggatatcgtctgtctccaggaaaccaaagtgaccagggatgcactgacagagcccctg

SEQ ID NO: 557922 - DNA, 120 bp, Artificial Sequence
  ENSG00000169188_2 (sequence is synthesized)
gctatcgttgagggttataactcctatttcagcttcagccgcaaccgtagcggctattctggtgtagccaccttctgtaaggacaatgctaccccagtggctgctgaagaaggcctgagt

SEQ ID NO: 557923 - DNA, 120 bp, Artificial Sequence
  ENSG00000169188_3 (sequence is synthesized)
ggcctgtttgccacccagaatggggatgttggttgctatggaaacatggatgagtttacccaagaggaactccgggctctggatagtgagggcagggccctcctcacacagcataagatc

SEQ ID NO: 557924 - DNA, 120 bp, Artificial Sequence
  ENSG00000169188_4 (sequence is synthesized)
cgcacatgggaaggtaaggagaagaccttgaccctaatcaacgtgtactgcccccatgcggaccctgggaggcctgagcggctagtctttaagatgcgcttctatcgtttgctgcaaatc

SEQ ID NO: 557925 - DNA, 120 bp, Artificial Sequence
  ENSG00000169188_5 (sequence is synthesized)
cgagcagaagccctcctggcggcaggcagccatgtgatcattctgggtgacctgaatacagcccaccgccccattgaccactgggatgcagtcaacctggaatgctttgaagaggaccca

SEQ ID NO: 557926 - DNA, 120 bp, Artificial Sequence
  ENSG00000169188_6 (sequence is synthesized)
gggcgcaagtggatggacagcttgctcagtaacttggggtgccagtctgcctctcatgtagggcccttcatcgatagctaccgctgcttccaaccaaagcaggagggggccttcacctgc

SEQ ID NO: 557927 - DNA, 120 bp, Artificial Sequence
  ENSG00000169188_7 (sequence is synthesized)
tggtcagcagtcactggcgcccgccatctcaactatggctcccggcttgactatgtgctgggggacaggaccctggtcatagacacctttcaggcctctttcctgctgcctgaggtgatg

SEQ ID NO: 557928 - DNA, 120 bp, Artificial Sequence
  ENSG00000169188_8 (sequence is synthesized)
ggctctgaccactgccctgtgggtgcagtcttgagtgtgtcctctgtgcctgcaaaacagtgcccacctctgtgcacccgcttcctccctgagtttgcaggcacccagctcaagatcctt

SEQ ID NO: 557929 - DNA, 120 bp, Artificial Sequence
  ENSG00000169188_9 (sequence is synthesized)
cgcttcctagttcctctcgaacaaagtcctgtgttggagcagtcgacgctgcagcacaacaatcaaacccgggtacagacatgccaaaacaaagcccaagtgcgctcaaccaggcctcag

SEQ ID NO: 557930 - DNA, 120 bp, Artificial Sequence
  ENSG00000169188_10 (sequence is synthesized)
cccagtcaggttggctctagcagaggccagaaaaacctgaagagctactttcagccctcccctagctgtccccaagcctctcctgacatagagctgcctagcctaccactgatgagcgcc

SEQ ID NO: 557931 - DNA, 120 bp, Artificial Sequence
  ENSG00000169188_11 (sequence is synthesized)
ctcatgaccccgaagactccagaagagaaggcagtggccaaagtggtgaaggggcaggccaagacttcagaagccaaagatgagaaggagttacggacctcattctggaagtctgtgctg

SEQ ID NO: 557932 - DNA, 120 bp, Artificial Sequence
  ENSG00000169188_12 (sequence is synthesized)
gcggggcccttgcgcacacccctctgtgggggccacagggagccatgtgtgatgcgtactgtgaagaagccaggacccaacttgggccgccgcttctacatgtgtgccaggccccggggt

SEQ ID NO: 557933 - DNA, 120 bp, Artificial Sequence
  ENSG00000169188_13 (sequence is synthesized)
ccttccctgagctgcctcctgcttctccctcaaagtctcctacccttctcttcctcttttaagccctctcttcctcgctttccttcctacctagctccttgttggtgagcttcttgtgcc

SEQ ID NO: 557934 - DNA, 120 bp, Artificial Sequence
  ENSG00000169188_14 (sequence is synthesized)
ttaatcctgtgacccagccccttacaccactttccaccttcctgtccgaagtacacggacactagctgccccaggaagttgtgtgattttaaatcacttctgtctttgctggaaagtgta

SEQ ID NO: 557935 - DNA, 120 bp, Artificial Sequence
  ENSG00000169188_15 (sequence is synthesized)
tttgtgcataaataaagtctgtgtatttgtttcagggttgcactttggacattgtggaggtactccataaagttgagtcagagaagctatctcaatacttggtttgccggctggctgtag

SEQ ID NO: 557936 - DNA, 120 bp, Artificial Sequence
  ENSG00000169188_16 (sequence is synthesized)
cccaatgatgtaattcccagagaaaggggaggagggaggggggaggagggaatagtgaggcgtgagcagcagtgctcaccataaagggttctctgctcagttgtaggaatttcctgtacg

SEQ ID NO: 557937 - DNA, 120 bp, Artificial Sequence
  ENSG00000169188_17 (sequence is synthesized)
gctaaggtgaaatcagcaaggaaggtgggctgtgtagccttaaaccagagctttccagctagtgcgtcccacagctgccacagtgggttacagggttgaaagaaacggtcctcagccctc

SEQ ID NO: 557938 - DNA, 120 bp, Artificial Sequence
  ENSG00000169188_18 (sequence is synthesized)
agagttgccaggcagggcctgggaccacacaagtttcagggacgattgcctccttagcaagtagtatcattagtacccctaagtgtgccatggaaatgtttcctgtatactgtgacctgg

SEQ ID NO: 557939 - DNA, 120 bp, Artificial Sequence
  ENSG00000169188_19 (sequence is synthesized)
tgacctggaaagtgggagcattgctttgaacacagtgcttgctctagccaagcctcttctcacctttgaaaatgggactggtagaccaggcacagtggtgcacgcctgtaatcccagcac

SEQ ID NO: 557940 - DNA, 76 bp, Artificial Sequence
  ENSG00000169188_20 (sequence is synthesized)
cagcctaacatggtgagcgcgtgcctgtaatccaagctacttaggaggctgagacaggagaatagcttgtacctgg

SEQ ID NO: 557941 - DNA, 86 bp, Artificial Sequence
  ENSG00000169188_21 (sequence is synthesized)
aaaattaactgggcgtggtggcgcgtgcctgtaatccaagctacttaggaggctgagacaggagaatagcttgtatgcattgcact

SEQ ID NO: 557942 - DNA, 120 bp, Artificial Sequence
  ENSG00000169188_22 (sequence is synthesized)
aaaaaaagaaaagaaaaagaatgggactggtaaatcctgttctgtgggatgccgtgggagggagagaggataatggattgaggaagacatccatatccccttatggaaaatacctctttg

SEQ ID NO: 557943 - DNA, 120 bp, Artificial Sequence
  ENSG00000169188_23 (sequence is synthesized)
gttttggggaaccactcctttctagggaatttggttagggctgactcatttcctggcttcaggggctaccctgggcccagatttccagggcccggattaccagtgaagcgtcaatccctg

SEQ ID NO: 557944 - DNA, 120 bp, Artificial Sequence
  ENSG00000169188_24 (sequence is synthesized)
gatttttattgaaaccattggagaagagccatctcaaataaatctgccaagtatcctagctctttgcaactcactgtgtagtttttgggcatttccttcctctttctcattctgtttccc

SEQ ID NO: 557945 - DNA, 120 bp, Artificial Sequence
  ENSG00000169188_25 (sequence is synthesized)
tgttggtaaaatggaatggtgaccaacaagtgacctatggttacctcatagatctgccacttgtctgagggagtcagaatgcacttgtctgttccctgtccaataaaaggcttcacatgc

SEQ ID NO: 557946 - DNA, 120 bp, Artificial Sequence
  ENSG00000169189_0 (sequence is synthesized)
aaaggaagaagagtccaccttgcgaccgtatccgctagcgcggcctgggatgcgcttgggctccctgttcgttcccacatgcagggcagcacaaggagaatgggcgtcatgactgatgtc

SEQ ID NO: 557947 - DNA, 120 bp, Artificial Sequence
  ENSG00000169189_1 (sequence is synthesized)
caccggcgcttcctccagttgctgatgacccatggcgtgctagaggaatgggacgtgaagcgcttgcagacgcactgctacaaggtccatgaccgcaatgccaccgtagataagttggag

SEQ ID NO: 557948 - DNA, 120 bp, Artificial Sequence
  ENSG00000169189_2 (sequence is synthesized)
gacttcatcaacaacattaacagtgtcttggagtccttgtatattgagataaagagaggagtcacggaagatgatgggagacccatttatgcgttggtgaatcttgctacaacttcaatt

SEQ ID NO: 557949 - DNA, 120 bp, Artificial Sequence
  ENSG00000169189_3 (sequence is synthesized)
tccaaaatggctacggattttgcagagaatgaactggatttgtttagaaaggctctggaactgattattgactcagaaaccggctttgcgtcttccacaaacatattgaacctggttgat

SEQ ID NO: 557950 - DNA, 120 bp, Artificial Sequence
  ENSG00000169189_4 (sequence is synthesized)
aggaaggggagttcaccctgcacggccgggccatcctggagatggagcaatacatccgggagacgtaccccgacgcggtgaagatctgcaatatctgtcacagcctcctcatccagggtc

SEQ ID NO: 557951 - DNA, 120 bp, Artificial Sequence
  ENSG00000169189_5 (sequence is synthesized)
aaagctgcgaaacctgtgggatcaggatgcacttaccctgcgtggccaagtacttccagtcgaatgctgaaccgcgctgcccccactgcaacgactactggccccacgagatcccaaaag

SEQ ID NO: 557952 - DNA, 120 bp, Artificial Sequence
  ENSG00000169189_6 (sequence is synthesized)
tcttcgaccctgagaaggagagggagtctggtgtcttgaaatcgaacaaaaagtccctgcggtccaggcagcattagccatcgtgccctgctgaggggctggctgccttgagtggcctga

SEQ ID NO: 557953 - DNA, 120 bp, Artificial Sequence
  ENSG00000169189_7 (sequence is synthesized)
tcgccacagcccttcttggaagaaaggcgtccgtgtttcaggttccacgcgagtcacctctttcgtcttaatgttcaccgtccacagctttggaataaaccatcctgggaagttgctgca

SEQ ID NO: 557954 - DNA, 120 bp, Artificial Sequence
  ENSG00000169189_8 (sequence is synthesized)
aagagtccaccttgcgaccgtatccgctagcgcggcctgggatgcgcttgggctccctggtgaaaaagcaaaatataaaattcgattcaaactgtgattacatctatggaaaatacagcc

SEQ ID NO: 557955 - DNA, 120 bp, Artificial Sequence
  ENSG00000169189_9 (sequence is synthesized)
tttgccgaccaccctctttgtcccgccgccctccgtgctcccctctgttttgtgtacggagtttcttactttgtacaagtccgcagccgcttatgttacagccccgaggccagatgcgtt

SEQ ID NO: 557956 - DNA, 120 bp, Artificial Sequence
  ENSG00000169189_10 (sequence is synthesized)
tgcattggttgctgagggtctgctgagaggtgaggagcggcgctgcagcgtgtagtgaatgagctggtgcaccgatggagaggacggttcgtcactaagtgatctaccacagaccagcca

SEQ ID NO: 557957 - DNA, 120 bp, Artificial Sequence
  ENSG00000169189_11 (sequence is synthesized)
ctctccttccacccggctcttcccagcattgttcactggccatgcttggaagtgcccatggcagttctcatctttgcatctgtgtgcctgaaggtccagagaatctttttccccaggcgg

SEQ ID NO: 557958 - DNA, 120 bp, Artificial Sequence
  ENSG00000169189_12 (sequence is synthesized)
ttgggggaaagatgagagctacaggctgagaggtgaaatcctgtggcccctcacaaacctccccagccccgtgtcctgcccaccagcccttccttcttcccagcccagggtctgctctct

SEQ ID NO: 557959 - DNA, 120 bp, Artificial Sequence
  ENSG00000169189_13 (sequence is synthesized)
tcgcctctgcattggttgctgagggtctgctgagaggcaatgccaccgtagataagttggaggacttcatcaacaacattaacagtgtcttggagtccttgtatattgagataaagagag

SEQ ID NO: 557960 - DNA, 120 bp, Artificial Sequence
  ENSG00000169189_14 (sequence is synthesized)
agtgctggcaccaccttctgcagggcgcctctgagctcgagggagggtggacagaggatccgggagctgccacctgcaggagcgctgcagaagtagcagggggccctcagcactggcgct

SEQ ID NO: 557961 - DNA, 120 bp, Artificial Sequence
  ENSG00000169189_15 (sequence is synthesized)
gggcagtagccctagagaggcttcttgttgactgcctggcctgctggggccctcaggaggacgaaggaacgaagctaatgtggcaggggctgtgtggtgagactcctccaggttcctccg

SEQ ID NO: 557962 - DNA, 120 bp, Artificial Sequence
  ENSG00000169189_16 (sequence is synthesized)
gaatcctggctctgggcccagccctcctgcactgctggcgcatcctcccacaagagctggcggaggccatctcccaggacgtgtcaggacgcctccctgctgtgccccgcagggacgcac

SEQ ID NO: 557963 - DNA, 120 bp, Artificial Sequence
  ENSG00000169189_17 (sequence is synthesized)
tatttttctcaggaaggctgagtgttctgtgcaacctgcatcatcttggtagttttgtagtgagtgtctcttgtcgattgctgctttctggagtggtcttaacactggtttgcagggctt

SEQ ID NO: 557964 - DNA, 120 bp, Artificial Sequence
  ENSG00000169189_18 (sequence is synthesized)
tgcaaccgctgaaccagcgtggacattgatgtgtctttcagtttctatcgttttgcagctgtagctgtttgtaattgcaattgctcttacgggcctcgtacacctgtatccttgggcacc

SEQ ID NO: 557965 - DNA, 120 bp, Artificial Sequence
  ENSG00000169189_19 (sequence is synthesized)
tggtgattatttccttgggcggagtttctgggacaaagtgcactttttttttgaaagcttttgattcacattagcaaataagcttctgaaaagctgtggctgtccacacgccacctgcag

SEQ ID NO: 557966 - DNA, 120 bp, Artificial Sequence
  ENSG00000169189_20 (sequence is synthesized)
gatctgagtgcaggagtttgggagccctcggcttctgtcactgcgttcatgtgttcagaattgtttagtaaaacccaccgcaacaagcagcaagcaaacaaaagactccactgcactaag

SEQ ID NO: 557967 - DNA, 120 bp, Artificial Sequence
  ENSG00000169189_21 (sequence is synthesized)
gcgtttgggattattttcaatattaatctggggcccagaagataacacgatgccacctgctgcccatttcccttgtggcttccccggaggtttgcagaacatggaggtgtgcaccagctc

SEQ ID NO: 557968 - DNA, 120 bp, Artificial Sequence
  ENSG00000169189_22 (sequence is synthesized)
aggaaactaacatttattaagtgtttactagtagttctctcagtaatgaacttcattataattttatgttcgttcccacatgcagggcagcacaaggagaatgggcgtcatgactgatgt

SEQ ID NO: 557969 - DNA, 120 bp, Artificial Sequence
  ENSG00000169189_23 (sequence is synthesized)
ttgcagagaatgaactggatttgtttagaaaggctgtaagtagagtaatccccattgcccattgggtgggcttcttatgggaaagttctgtctccgtcattagcagtggcaactgcagtg

SEQ ID NO: 557970 - DNA, 120 bp, Artificial Sequence
  ENSG00000169189_24 (sequence is synthesized)
ttcaaggatcactggggggacatgggccaccattgctgtctgagaaaaggctttgcagggagatgtcactgtctacccatctggaactcacagctgccagggggtccccatggctgcctg

SEQ ID NO: 557971 - DNA, 120 bp, Artificial Sequence
  ENSG00000169189_25 (sequence is synthesized)
cagcgatcctttctggctcgcctctgcattggttgctgagggtctgctgagagcccagggtctgctctcttgggccagctccactcctgcacccccgtctcatccagggcctgccctgcc

SEQ ID NO: 557972 - DNA, 120 bp, Artificial Sequence
  ENSG00000169189_26 (sequence is synthesized)
aagtaggtaatacatgtctatgctaatcccaccattctccctacagtctcttctcatagagacaagggacataatatgcataaacaagcttatggttgtctttcttccactcctactttt

SEQ ID NO: 557973 - DNA, 120 bp, Artificial Sequence
  ENSG00000169189_27 (sequence is synthesized)
ggctgtggaactcggggactggggtcttggggtttcccccttcttgatggggaaactgaggcccagacaggggccgcagaaaacagcggactgggatgtcctcccgcaacacacacgcag

SEQ ID NO: 557974 - DNA, 120 bp, Artificial Sequence
  ENSG00000169189_28 (sequence is synthesized)
ttcaaaacaagtggctgattgaggaaggggagttcaccctgcacggccgggccatcctggagatggagcaatacatccgggagacgtaccccgacgcggtgaagatctgcaatatctgtc

SEQ ID NO: 557975 - DNA, 120 bp, Artificial Sequence
  ENSG00000169193_0 (sequence is synthesized)
gaggcggagcggaagccgagtgcgagggacgagcggagtaaaatctccacaagctgggaacaaacctcgtcccaactcccacccaccggcgtttctccagctcgatctggaggctgcttc

SEQ ID NO: 557976 - DNA, 120 bp, Artificial Sequence
  ENSG00000169193_1 (sequence is synthesized)
gccagtgtgggacgcagctgacgcccgcttattagctctcgctgcgtcgccccggctcagaagctccgtggcggcggcgaccgtgacgagaagcccacggccagctcagttctcttctac

SEQ ID NO: 557977 - DNA, 120 bp, Artificial Sequence
  ENSG00000169193_2 (sequence is synthesized)
tttgggagagagagaaagtcagatgccccttttaaactccctcttcaaaactcatctcctgggtgactgagttaatagagtggatacaaccttgctgaagatgaagaatatacaatattg

SEQ ID NO: 557978 - DNA, 120 bp, Artificial Sequence
  ENSG00000169193_3 (sequence is synthesized)
aggatatttttttcttttttttttcaagtcttgatttgtggcttacctcaagttaccatttttcagtcaagtctgtttgtttgcttcttcagaaatgttttttacaatctcaagaaaaaa

SEQ ID NO: 557979 - DNA, 120 bp, Artificial Sequence
  ENSG00000169193_4 (sequence is synthesized)
tatgtcccagaaattgagtttactgttgcttgtatttggactcatttggggattgatgttactgcactatacttttcaacaaccaagacatcaaagcagtgtcaagttacgtgagcaaat

SEQ ID NO: 557980 - DNA, 120 bp, Artificial Sequence
  ENSG00000169193_5 (sequence is synthesized)
actagacttaagcaaaagatatgttaaagctctagcagaggaaaataagaacacagtggatgtcgagaacggtgcttctatggcaggatatgcggatctgaaaagaacaattgctgtcct

SEQ ID NO: 557981 - DNA, 120 bp, Artificial Sequence
  ENSG00000169193_6 (sequence is synthesized)
tctggatgacattttgcaacgattggtgaagctggagaacaaagttgactatattgttgtgaatggctcagcagccaacaccaccaatggtactagtgggaatttggtgccagtaaccac

SEQ ID NO: 557982 - DNA, 120 bp, Artificial Sequence
  ENSG00000169193_7 (sequence is synthesized)
aaataaaagaacgaatgtctcgggcagtatcagatagcagttgaaaatcaccttgtgctgctccatccactgtggattatatcctatggcagaaaagctttataattgctggcttaggac

SEQ ID NO: 557983 - DNA, 120 bp, Artificial Sequence
  ENSG00000169193_8 (sequence is synthesized)
agagcaatactttacaataaaagctctacacattttcaaggagtatgctggattcatggaactctaattctgtacataaaaattttaaagttatttgtttgctttcaggcaagtctgttc

SEQ ID NO: 557984 - DNA, 120 bp, Artificial Sequence
  ENSG00000169193_9 (sequence is synthesized)
aatgctgtactatgtccttaaagagaatttggtaatttggttgatgtggtaagcagataggtgagttttgtataaatcttttgtgtttgagatcaagctgaaatgaaaacactgaaaaac

SEQ ID NO: 557985 - DNA, 120 bp, Artificial Sequence
  ENSG00000169193_10 (sequence is synthesized)
tcattctgtcatttgttctcaatagatgtaactgttagactacggctatttgaaaaaatgtgcttattgtactatattttgttattccaattatgagcagagaaaggaaatataatgttg

SEQ ID NO: 557986 - DNA, 120 bp, Artificial Sequence
  ENSG00000169193_11 (sequence is synthesized)
aaaataatgttttgaaatcatgacccaaagaatgtattgatttgcactatccttcagaataactgaaggttaattattgtatatttttaaaaattacacttataagagtataatcttgaa

SEQ ID NO: 557987 - DNA, 120 bp, Artificial Sequence
  ENSG00000169193_12 (sequence is synthesized)
atgggtagcagccactgtccattacctatcgtaaacattggggcaatttaataacagcattaaaatagttgtaaactctaatcttatacttattgaagaataaaagatatttttatgatg

SEQ ID NO: 557988 - DNA, 120 bp, Artificial Sequence
  ENSG00000169193_13 (sequence is synthesized)
agagtaacaataaagtattcatgatttttcacatacatgaatgttcatttaaaagtttaatcctttgagtgtctatgctatcaggaaagcacattatttccatatttgggttaattttgc

SEQ ID NO: 557989 - DNA, 120 bp, Artificial Sequence
  ENSG00000169193_14 (sequence is synthesized)
ttttattatattggtctaggaggaagggactttggagaatggaactcttgaggactttagccaggtgtatataataaaggtacttttgtgctgcattaaattgcttggaaaatgttaaca

SEQ ID NO: 557990 - DNA, 120 bp, Artificial Sequence
  ENSG00000169193_15 (sequence is synthesized)
agagtatcctttatgaaattttgaatttgtataacagatgcattagatattcattttatataatggccacttaaaataagaacatttaaaatataaactatgaagattgactatcttttc

SEQ ID NO: 557991 - DNA, 120 bp, Artificial Sequence
  ENSG00000169193_16 (sequence is synthesized)
gactatcttttcaggaaaaaagctgtatatagcacagggaaccctaatcttgggtaattctagtataaaacaaattatacttttatttaaatttcccttgtagcaaatctaattgccaca

SEQ ID NO: 557992 - DNA, 120 bp, Artificial Sequence
  ENSG00000169193_17 (sequence is synthesized)
tggtgccctatatttcatagtatttattctctatagtaactgcttaagtgcagctagcttctagatttagactatatagaatttagatattgtattgttcgtcattataatatgctacca

SEQ ID NO: 557993 - DNA, 120 bp, Artificial Sequence
  ENSG00000169193_18 (sequence is synthesized)
catgtagcaataattacaatattttattaaaataaatatgtgaaatattgtttcatgaaagacagatttccaaatctctcttctcttctctgtactgtctacctttatgtgaagaaatta

SEQ ID NO: 557994 - DNA, 120 bp, Artificial Sequence
  ENSG00000169193_19 (sequence is synthesized)
attatatgccattgccaggtagaagtttggaataattgtttagtctctcctattagatgtggacatttttgtttttgtttttgttttcagggatgaaataaaatatattatttctaccta

SEQ ID NO: 557995 - DNA, 120 bp, Artificial Sequence
  ENSG00000169193_20 (sequence is synthesized)
ggtgatcttggttacttaaaggctctaagcttgagttttctcatccatcaaaacacacacctgactaggtaatgctccagtgacttaataccaatgacattttcatgttgtccacaaatt

SEQ ID NO: 557996 - DNA, 120 bp, Artificial Sequence
  ENSG00000169193_21 (sequence is synthesized)
ctgagtagaaaccttttcaagcctgtagcctctctgagagctgactgttattaactgaatgagaggatgtcagcaaacagagttaatagagtggatacaaccttgctgaagatgaagaat

SEQ ID NO: 557997 - DNA, 120 bp, Artificial Sequence
  ENSG00000169193_22 (sequence is synthesized)
gtgatactttcattagctatgactgaagtgaccgaagtggcctctggacttgagttttgtgcttttgtttgtttaatcatcctgggttgtgtgttcttcactttatcttaaacctaacca

SEQ ID NO: 557998 - DNA, 120 bp, Artificial Sequence
  ENSG00000169193_23 (sequence is synthesized)
aaggattcattaaaatatgccgtcttcctaatttttgctgttttaagatggctgagaatgttcttaggaaattgatgactctgcttttctgtggatcagcttcagagactacttggaaga

SEQ ID NO: 557999 - DNA, 120 bp, Artificial Sequence
  ENSG00000169193_24 (sequence is synthesized)
gctgctgcggaaacccggcttaggaacgggccggcagcctccggccgcggccgggaaggctctttgtcccttcctttgggccgcgtctctgcccctccgcgtctgacagccgcggcgcct

SEQ ID NO: 558000 - DNA, 120 bp, Artificial Sequence
  ENSG00000169193_25 (sequence is synthesized)
cggctcgggcggagagccgagcgtggctggggctgcgcgagtcgagcggggcgggcttggtccggagctgcgggatgtagatcccgggcggcaccgcactcacttctttttctgtttttg

SEQ ID NO: 558001 - DNA, 120 bp, Artificial Sequence
  ENSG00000169193_26 (sequence is synthesized)
tgggtgactgtgactgcgtcttgcagtgttgcccaggatggtcttgtacttctggcttcaagaagtcctcccacctcaaccttgtaaagtgctgggattacaagtgtgaaccaccatgcc

SEQ ID NO: 558002 - DNA, 120 bp, Artificial Sequence
  ENSG00000169193_27 (sequence is synthesized)
cagcctgttttacttttctctggaaataatgttggactaaagacaagcacatatctttatgtctgtggctagggagaaaccactgaaaaatggcttaaatatttggttgtttacatatac

SEQ ID NO: 558003 - DNA, 120 bp, Artificial Sequence
  ENSG00000169193_28 (sequence is synthesized)
atagtgtgctgtttgtcaagtagcataatggagcttggaatagcacttttctccgaagatcttgtaaagtggagtggacatgttaatgcctgtaataaatatacaaatttagaaaaaaaa

SEQ ID NO: 558004 - DNA, 120 bp, Artificial Sequence
  ENSG00000169194_0 (sequence is synthesized)
aagccacccagcctatgcatccgctcctcaatcctctcctgttggcactgggcctcatggcgcttttgttgaccacggtcattgctctcacttgccttggcggctttgcctccccaggcc

SEQ ID NO: 558005 - DNA, 120 bp, Artificial Sequence
  ENSG00000169194_1 (sequence is synthesized)
ctgtgcctccctctacagccctcagggagctcattgaggagctggtcaacatcacccagaaccagaaggctccgctctgcaatggcagcatggtatggagcatcaacctgacagctggca

SEQ ID NO: 558006 - DNA, 120 bp, Artificial Sequence
  ENSG00000169194_2 (sequence is synthesized)
tgtactgtgcagccctggaatccctgatcaacgtgtcaggctgcagtgccatcgagaagacccagaggatgctgagcggattctgcccgcacaaggtctcagctgggcagttttccagct

SEQ ID NO: 558007 - DNA, 120 bp, Artificial Sequence
  ENSG00000169194_3 (sequence is synthesized)
tgcatgtccgagacaccaaaatcgaggtggcccagtttgtaaaggacctgctcttacatttaaagaaactttttcgcgagggacagttcaactgaaacttcgaaagcatcattatttgca

SEQ ID NO: 558008 - DNA, 120 bp, Artificial Sequence
  ENSG00000169194_4 (sequence is synthesized)
gagacaggacctgactattgaagttgcagattcatttttctttctgatgtcaaaaatgtcttgggtaggcgggaaggagggttagggaggggtaaaattccttagcttagacctcagcct

SEQ ID NO: 558009 - DNA, 120 bp, Artificial Sequence
  ENSG00000169194_5 (sequence is synthesized)
tgagctcggtggacccagggatgacatgtccctacacccctcccctgccctagagcacactgtagcattacagtgggtgccccccttgccagacatgtggtgggacagggacccacttca

SEQ ID NO: 558010 - DNA, 120 bp, Artificial Sequence
  ENSG00000169194_6 (sequence is synthesized)
cacacaggcaactgaggcagacagcagctcaggcacacttcttcttggtcttatttattattgtgtgttatttaaatgagtgtgtttgtcaccgttggggattggggaagactgtggctg

SEQ ID NO: 558011 - DNA, 120 bp, Artificial Sequence
  ENSG00000169194_7 (sequence is synthesized)
ctagcacttggagccaagggttcagagactcagggccccagcactaaagcagtggacaccaggagtccctggtaataagtactgtgtacagaattctgctacctcactggggtcctgggg

SEQ ID NO: 558012 - DNA, 120 bp, Artificial Sequence
  ENSG00000169194_8 (sequence is synthesized)
cctcggagcctcatccgaggcagggtcaggagaggggcagaacagccgctcctgtctgccagccagcagccagctctcagccaacgagtaatttattgtttttccttgtatttaaatatt

SEQ ID NO: 558013 - DNA, 120 bp, Artificial Sequence
  ENSG00000169194_9 (sequence is synthesized)
aaatatgttagcaaagagttaatatatagaagggtaccttgaacactgggggaggggacattgaacaagttgtttcattgactatcaaactgaagccagaaataaagttggtgacagata

SEQ ID NO: 558014 - DNA, 120 bp, Artificial Sequence
  ENSG00000169194_10 (sequence is synthesized)
tcccaagatgaggtcatgagcaggctgggcctggtcctaagatgcctgtaggtcaggaaaaatctccatggaccaaggcccggcccagccatgagggagagaggagctgggctggggggc

SEQ ID NO: 558015 - DNA, 120 bp, Artificial Sequence
  ENSG00000169194_11 (sequence is synthesized)
tcagcactgtggatggacctatggaggtgtctggcagactccccagggactacctgctctcctggcctggccttgtctgccactgccagctcctactcagccattcctgaacagaggaca

SEQ ID NO: 558016 - DNA, 120 bp, Artificial Sequence
  ENSG00000169194_12 (sequence is synthesized)
gcagagaagggccagcaccctcccagaaccatgtggcatttgccaactggattttgaccataacaatgcagccattctccccagcaccatcataggcccgcccttacaggaggattcctt

SEQ ID NO: 558017 - DNA, 120 bp, Artificial Sequence
  ENSG00000169194_13 (sequence is synthesized)
agtagagtccgctccttgccccactagtaacagctcacatgtctgagcactgcttacaccaggcctggtgcacgtgctttatgtgtcatttcatcactgccagccacctcaagaggcagg

SEQ ID NO: 558018 - DNA, 120 bp, Artificial Sequence
  ENSG00000169194_14 (sequence is synthesized)
cgatgaacccattctgctaaggttcagtgaggttaagtgacagaggctggattcaagccaggcctggccaacaccagagtgtccatgctcctaactgcagtgttccctcaccatcagaag

SEQ ID NO: 558019 - DNA, 120 bp, Artificial Sequence
  ENSG00000169194_15 (sequence is synthesized)
gcagggcatttaatacaccagatccccaccgcctcccatctgatttgtcttggtcaacagtggcccaggccactcctacttcactcgtccccaccctggcccttcccgcaggcccctgtc

SEQ ID NO: 558020 - DNA, 120 bp, Artificial Sequence
  ENSG00000169194_16 (sequence is synthesized)
ctcctgccctgactatggcaagccttgcatgcagcttgtcccttactagtggtgtcaatttttttctctcagctccaagaccctaaacagtgggacctcacccctatgcctgctgttcaa

SEQ ID NO: 558021 - DNA, 120 bp, Artificial Sequence
  ENSG00000169194_17 (sequence is synthesized)
agcagaaaacgaagctcaggaatgctgaggggctgccaggcctgcctctgtgccacaccagggatgcttgtggggcctgtgctggggcagacctggcctgggctgccagggcaggcccac

SEQ ID NO: 558022 - DNA, 120 bp, Artificial Sequence
  ENSG00000169194_18 (sequence is synthesized)
ccctgcccaccgctcccggcagggcttttggtggccatgggggataaggggcgttgactcacccgggcggggctccgggagttgcacagaccaaggcaaatgccgtggcctctgctgtgg

SEQ ID NO: 558023 - DNA, 120 bp, Artificial Sequence
  ENSG00000169194_19 (sequence is synthesized)
gggtttctggaggacttctaggaaaacgagggaagagcaggaaaaggcgacatggctgcaggggccaagcccaggagccgccctccacagcactcattctgcagaagggaaatttgaggc

SEQ ID NO: 558024 - DNA, 120 bp, Artificial Sequence
  ENSG00000169194_20 (sequence is synthesized)
gggtgtccagccggcccttgccctgcctggcgctcggaccgccacctttgccgccccctcgccagcctccgcagcttccagactggccggtctgcgcgcccacccctgcctcccggaccg

SEQ ID NO: 558025 - DNA, 120 bp, Artificial Sequence
  ENSG00000169194_21 (sequence is synthesized)
accggccaccgccggaggccgcggaggagggcccggccgcgcagatcccgcttatcgggcccatctcccgttacataaggccacccccctatctccgcgggccatcgccgccgcaaccgc

SEQ ID NO: 558026 - DNA, 89 bp, Artificial Sequence
  ENSG00000169203_0 (sequence is synthesized)
gaaaggaccaggacatgcgggtgcggtggatgctcttttggctcctctttgggctcctactggaatttatcagccatcagtgcatctct

SEQ ID NO: 558027 - DNA, 83 bp, Artificial Sequence
  ENSG00000169203_1 (sequence is synthesized)
tctgactttggtggaagtccttggttacatgtcattattgcgtttccgacaagttataaagttgtcattaccctctggatagt

SEQ ID NO: 558028 - DNA, 85 bp, Artificial Sequence
  ENSG00000169203_2 (sequence is synthesized)
gccggaggctgaggcagaaaaaccacgcaaacccaagaggcagagggcggctgagatggaaccacctcccgaacccaagaggcgg

SEQ ID NO: 558029 - DNA, 61 bp, Artificial Sequence
  ENSG00000169203_3 (sequence is synthesized)
aggctgaggcagaaaaaccacgcaaacccaagaggcagagggcggctgagatggaaccacc

SEQ ID NO: 558030 - DNA, 78 bp, Artificial Sequence
  ENSG00000169203_4 (sequence is synthesized)
acccgaacccaagaggcggaggttgagctgagaagaggccagtgcactcaagcctgagcaataagaataaaaccgagt

SEQ ID NO: 558031 - DNA, 65 bp, Artificial Sequence
  ENSG00000169203_5 (sequence is synthesized)
gctccactctcagcagatgataatatcaagatacctgctgagcgtctgcggattccgcttccacc

SEQ ID NO: 558032 - DNA, 120 bp, Artificial Sequence
  ENSG00000169208_0 (sequence is synthesized)
atggaaagaatcaacagcacactgttgactgcgtttatcctgacaggaattccgtatccactcaggctaaggacactcttttttgtgttcttttttctaatctacatcctgactcagctg

SEQ ID NO: 558033 - DNA, 120 bp, Artificial Sequence
  ENSG00000169208_1 (sequence is synthesized)
ggaaacctgcttattttaatcactgtctgggcagacccaaggctccatgcccgccccatgtacatctttcttggtgttctctcagtcattgatatgagcatctcctccatcattgtccct

SEQ ID NO: 558034 - DNA, 120 bp, Artificial Sequence
  ENSG00000169208_2 (sequence is synthesized)
cgcctcatgatgaacttcactttaggtgtcaaacccatcccatttggtggctgtgttgctcaactctatttctatcacttcctgggcagcacccagtgcttcctctacaccctaatggcc

SEQ ID NO: 558035 - DNA, 120 bp, Artificial Sequence
  ENSG00000169208_3 (sequence is synthesized)
atccatggggctctccaggccatcctaaccttccgcctgccctactgtgggcccaatcaggtggattacttcttctgtgacatccctgcagtgttgagactggcctgtgctgacacaaca

SEQ ID NO: 558036 - DNA, 120 bp, Artificial Sequence
  ENSG00000169208_4 (sequence is synthesized)
gtcaacgagctggtgacgtttgtagacattggggtggtggttgccagttgcttctccctgatcctcctctcctacatacagatcattcaggccatcctgagaatccacacagctgatggg

SEQ ID NO: 558037 - DNA, 120 bp, Artificial Sequence
  ENSG00000169208_5 (sequence is synthesized)
cggcgccgggctttttcaacttgtggagcccatgtaaccgtggtcaccgtgtactatgtgccctgtgccttcatctacctgaggcctgaaaccaacagccccctggatggggcagctgcc

SEQ ID NO: 558038 - DNA, 120 bp, Artificial Sequence
  ENSG00000169208_6 (sequence is synthesized)
ctagtccccacggccatcactcctttcctcaacccccttatctacactctgcggaaccaagaggtgaagctggccctgaaaagaatgctcagaagcccaagaactccgagtgaggtttga

SEQ ID NO: 558039 - DNA, 120 bp, Artificial Sequence
  ENSG00000169208_7 (sequence is synthesized)
gagagaccaaccttaacagttatcttcagtaagagccacagctcctcccccagttcataaggaagctggaagcagatatctctacaaataagcaggcaaataataaattaagtttccata

SEQ ID NO: 558040 - DNA, 120 bp, Artificial Sequence
  ENSG00000169208_8 (sequence is synthesized)
gtttgactctttactttgatccagccaaaagtaattagttgggtcttctgccacgagctcttcacaataattgctgctgacctatgagatattcaagattccttaggaatagatttgtat

SEQ ID NO: 558041 - DNA, 120 bp, Artificial Sequence
  ENSG00000169208_9 (sequence is synthesized)
ttgttttttctcttttatatagccatactgtatgatcaaacacagtttaaggtaaaatactaactttctaacagttccttagtatcctctcaagataactctcagccactgcaagagtag

SEQ ID NO: 558042 - DNA, 120 bp, Artificial Sequence
  ENSG00000169208_10 (sequence is synthesized)
agaatgagaccaaattctcacaaactaaaccacattaaacaatccagaagaaagaatgcaatagtgtattttccaatgtctcagtaataaattctcccacaccaaaacgtagagttcaat

SEQ ID NO: 558043 - DNA, 83 bp, Artificial Sequence
  ENSG00000169208_11 (sequence is synthesized)
tcagtaataaattctcccacaccaaaacgtagagttcaatatgatatttcccaatattatatttgatatttaatattgagtgt

SEQ ID NO: 558044 - DNA, 120 bp, Artificial Sequence
  ENSG00000169208_12 (sequence is synthesized)
gggtgttgccaaaagagattaacatttgaaggctgggaaaggcagatccacccttaatctgggcaggcgcaacctaatcagctgccggcgaggctagaatataagcaggcagaaaaatgt

SEQ ID NO: 558045 - DNA, 120 bp, Artificial Sequence
  ENSG00000169208_13 (sequence is synthesized)
ataagcaggcagaaaaatgtgaaaagaaagactggcctagcctcccagcctacatgtttctcctgtgctggaaccatcctaccctcaaacataaaactccaagttcttcagttttggaac

SEQ ID NO: 558046 - DNA, 120 bp, Artificial Sequence
  ENSG00000169208_14 (sequence is synthesized)
gatggcctattgtgggaccttgtgaccatgtgagtgaatacttaataaactcccctttatatatatataaatatatatatatttttttcccattagttctgtccgtctagaaaaccctaa

SEQ ID NO: 558047 - DNA, 65 bp, Artificial Sequence
  ENSG00000169208_15 (sequence is synthesized)
atttttttcccattagttctgtccgtctagaaaaccctaagcggatcacgaggtcaggagatcga

SEQ ID NO: 558048 - DNA, 120 bp, Artificial Sequence
  ENSG00000169208_16 (sequence is synthesized)
cctttctctccgtctgcaagaagagtttttgatggatgctgacaccttcagacagggtctctcactctatcacccaggctggagggcagtggttcaccttgaccttctgggctcaagaaa

SEQ ID NO: 558049 - DNA, 120 bp, Artificial Sequence
  ENSG00000169213_0 (sequence is synthesized)
ctcaggcgccactgtgaggacctgaccggaccagaccatcccgcagcgccccgccccggccccctccgcgccctcccgacgccaggtcctgccgtcccgccgaccgtccgggagcgaacc

SEQ ID NO: 558050 - DNA, 120 bp, Artificial Sequence
  ENSG00000169213_1 (sequence is synthesized)
aacccgtcgtcccgcactcggagtccgcgatggcttcagtgacagatggtaaaactggagtcaaagatgcctctgaccagaattttgactacatgtttaaactgcttatcattggcaaca

SEQ ID NO: 558051 - DNA, 120 bp, Artificial Sequence
  ENSG00000169213_2 (sequence is synthesized)
gcagtgttggcaagacctccttcctcttccgctatgctgatgacacgttcaccccagccttcgttagcaccgtgggcatcgacttcaaggtgaagacagtctaccgtcacgagaagcggg

SEQ ID NO: 558052 - DNA, 120 bp, Artificial Sequence
  ENSG00000169213_3 (sequence is synthesized)
tgaaactgcagatctgggacacagctgggcaggagcggtaccggaccatcacaacagcctattaccgtggggccatgggcttcattctgatgtatgacatcaccaatgaagagtccttca

SEQ ID NO: 558053 - DNA, 120 bp, Artificial Sequence
  ENSG00000169213_4 (sequence is synthesized)
atgctgtccaagactgggctactcagatcaagacctactcctgggacaatgcacaagttattctggtggggaacaagtgtgacatggaggaagagagggttgttcccactgagaagggcc

SEQ ID NO: 558054 - DNA, 120 bp, Artificial Sequence
  ENSG00000169213_5 (sequence is synthesized)
agctccttgcagagcagcttgggtttgatttctttgaagccagtgcaaaggagaacatcagtgtaaggcaggcctttgagcgcctggtggatgccatttgtgacaagatgtctgattcgc

SEQ ID NO: 558055 - DNA, 120 bp, Artificial Sequence
  ENSG00000169213_6 (sequence is synthesized)
tggacacagacccgtcgatgctgggctcctccaagaacacgcgtctctcggacaccccaccgctgctgcagcagaactgctcatgctaggcaaggcccaccttcctgacctcccctcatt

SEQ ID NO: 558056 - DNA, 120 bp, Artificial Sequence
  ENSG00000169213_7 (sequence is synthesized)
gtggccccacacccagtctgcttctccctgttacacactgtccgctctcagcccactctccctgttacacactgcccacactcagagcaagatgagttgctgctattctttgcctgcccc

SEQ ID NO: 558057 - DNA, 120 bp, Artificial Sequence
  ENSG00000169213_8 (sequence is synthesized)
tggggttctctgcagatggtcccagtaatagatactcagcactagactaacataacaggtcactacacgggtgcagaatcactttacaaaagaagactctgttttacgaaggggattcac

SEQ ID NO: 558058 - DNA, 120 bp, Artificial Sequence
  ENSG00000169213_9 (sequence is synthesized)
tacagggacttagagaacagtctcttttctgcctttaaaatgagagttcctccatttaccaaaatttgacacgcacacattcttcaggggcatgccaattgcgtaaagtgaggctcgcct

SEQ ID NO: 558059 - DNA, 120 bp, Artificial Sequence
  ENSG00000169213_10 (sequence is synthesized)
gcatagctaatcctgttaaagacaacttctcaaagcacaacgtgcttgtttcctatcgggctccctgcggggctttctctcactacaagtcaagcttgggctctcaaagccctgcgcctg

SEQ ID NO: 558060 - DNA, 120 bp, Artificial Sequence
  ENSG00000169213_11 (sequence is synthesized)
ttaccacggatgcccacagggcctgggcagttgctgtggcgacaggaagagctaatcttcagagagctcagactctctaatgatgctgaaggagcaaaggctgagtcagaaacacactta

SEQ ID NO: 558061 - DNA, 65 bp, Artificial Sequence
  ENSG00000169213_12 (sequence is synthesized)
tatcccctacaaaatgtcagaggttcctgctatatgaaagagcaagtaggtatgctcaagaaaga

SEQ ID NO: 558062 - DNA, 120 bp, Artificial Sequence
  ENSG00000169213_13 (sequence is synthesized)
cctgctatatgaaagagcaagtaggtatgctcaagaaagacaaacagagaaaaagagaaacaggcaagatcaagaaacagatcatgagtttctgattttgctgctttccagttggttctt

SEQ ID NO: 558063 - DNA, 120 bp, Artificial Sequence
  ENSG00000169213_14 (sequence is synthesized)
aactgtgggaacttagtgaaattggttattagttcttagactcctagaacctgaggattttagatttgacgggatgcccaaatttacctagtctgactagtcagttctaaccttcctttt

SEQ ID NO: 558064 - DNA, 120 bp, Artificial Sequence
  ENSG00000169213_15 (sequence is synthesized)
tctgacaagtgactgtcaagcctaacaatcaaatctctttcttttaaagcacaccttctaggcagggacaggagctcattttccacaccatctttgtcaactctcatagaaagttttcct

SEQ ID NO: 558065 - DNA, 120 bp, Artificial Sequence
  ENSG00000169213_16 (sequence is synthesized)
tgtatcgagctcaaatctgcctcctggaaattcttcttcttcttccctccctgttggtaccagctctgctgtcagagacttcacagtctgtgctccctctgccctgtgacgtcttcagac

SEQ ID NO: 558066 - DNA, 120 bp, Artificial Sequence
  ENSG00000169213_17 (sequence is synthesized)
tatttgagaacaggaatcatgactcctgggacttgccttttctctaggtcaaatacctctataattccatctgctgttcttcatagggtcttctccctatcctgcccttttcctccaatc

SEQ ID NO: 558067 - DNA, 120 bp, Artificial Sequence
  ENSG00000169213_18 (sequence is synthesized)
catcttttaactgctcttgagcagtctaactgagaagtatgattcaaagcaaaataaatcttaaggtggcatgactctgaaaaaattgagaaaattgaactcagagatcccgatcccaac

SEQ ID NO: 558068 - DNA, 120 bp, Artificial Sequence
  ENSG00000169213_19 (sequence is synthesized)
ccctttctcctgggagtgaaaccttagtttctaccagagagtgtgggaaaccacttctggtggaagccccttaattaaatacctgaggaaaaaaataaaagaaactcagagaccagaata

SEQ ID NO: 558069 - DNA, 120 bp, Artificial Sequence
  ENSG00000169213_20 (sequence is synthesized)
aattagctcattattctagcttgcttggccacagggacatattttgttttggctgaaataatgacatggaactggcagtgattccagaaaacctttcttctctatcatggcctgaatcct

SEQ ID NO: 558070 - DNA, 120 bp, Artificial Sequence
  ENSG00000169213_21 (sequence is synthesized)
cagccacctcaaaagtcagcgggcaggaggagtctctcgccagttttcttttcatttcaaatgaggctcattgtcctagaaaagtaattaactagcaaccagtccaatgactaaataaaa

SEQ ID NO: 558071 - DNA, 79 bp, Artificial Sequence
  ENSG00000169213_22 (sequence is synthesized)
ttggaaagccaaggcaggaggaatcaaattctatccctacaaaaaaaaaaattagccagatgtgatggtgcatgcctgt

SEQ ID NO: 558072 - DNA, 70 bp, Artificial Sequence
  ENSG00000169213_23 (sequence is synthesized)
atttgaggttgcagtgagctgtaattatgccactgcattccagtctgggtgacagagtaagaataagacc

SEQ ID NO: 558073 - DNA, 120 bp, Artificial Sequence
  ENSG00000169213_24 (sequence is synthesized)
cactgcattccagtctgggtgacagagtaagaataagaccctgtctctctgtctctctttctctctttttttttttaaaggagtcagctctacaaagatgttgctttctttgatgcaatg

SEQ ID NO: 558074 - DNA, 120 bp, Artificial Sequence
  ENSG00000169213_25 (sequence is synthesized)
cagagagcagagctttggacttggaatcaggagacccggactctgtcattaaatcaactgtgactctgggccagttactttccacttttgagtcttgatttcctacttataaaatgaggg

SEQ ID NO: 558075 - DNA, 120 bp, Artificial Sequence
  ENSG00000169213_26 (sequence is synthesized)
agcttatttggatgatctttaaggtctcttttggcactaataactcggtgtctcttttttttcaccttcaccatttcagttgatccaccaaacaaacctgagagatcaggattggcatcc

SEQ ID NO: 558076 - DNA, 120 bp, Artificial Sequence
  ENSG00000169213_27 (sequence is synthesized)
aagagttgtctcggccaactctgatgtcatgcttactctgtactagacattgttccaagcattttacgtgcattaactcatttatcttcccaacatcttgtgagggaggcactatagtga

SEQ ID NO: 558077 - DNA, 120 bp, Artificial Sequence
  ENSG00000169213_28 (sequence is synthesized)
gcctcatttgaagatgaggaaacaaaggtacaaagaggttctagctggacctctaaagtcacataataagtaagtggtagagctggagttcacatccaggcagtaggctccaaggtctgt

SEQ ID NO: 558078 - DNA, 120 bp, Artificial Sequence
  ENSG00000169213_29 (sequence is synthesized)
gctcttaaccacattctgggctgcatcttttatagacaaactatgatccagagagattacgagacttggatcacataccaagagagtgttaaagccacattaggattcaattccagggcc

SEQ ID NO: 558079 - DNA, 120 bp, Artificial Sequence
  ENSG00000169213_30 (sequence is synthesized)
atcagattccaagtccactggagaaaagatgtatatctctaatctgttaacaaattgctcaactactcagactaatcccaggtgatggatgtctaatgctcaggaaaggcgagtcagtct

SEQ ID NO: 558080 - DNA, 120 bp, Artificial Sequence
  ENSG00000169213_31 (sequence is synthesized)
ctgaggcaacagatcccatgggcctgggtagaaaatgcccagtgcttcccagtcccaagtgctggctttccctgtatctgcctctgccaggcaacacttatcaggctcccaatcagcagg

SEQ ID NO: 558081 - DNA, 120 bp, Artificial Sequence
  ENSG00000169213_32 (sequence is synthesized)
agcctccatgctccactttgaacagcctctatgctccagcaatggggcatttgtgaagagtgacttgattaacttttctgaccatgggtataatacagttgcttcagagggcagtggttc

SEQ ID NO: 558082 - DNA, 120 bp, Artificial Sequence
  ENSG00000169213_33 (sequence is synthesized)
tgggtgtgatttttacactgtaacattgtatacagtgtcatggataattactatttttttctggtcattaacactcacctactctagtactaggatttcagaccaaggtcctcatgacgc

SEQ ID NO: 558083 - DNA, 120 bp, Artificial Sequence
  ENSG00000169213_34 (sequence is synthesized)
ctggatattttagtatctatatccaataatcttttctctcctactgaatatccaggcaaagatgaaatcgttttctttaaaactgtcaaattctgtaaaactcaggagccagttcaaggg

SEQ ID NO: 558084 - DNA, 120 bp, Artificial Sequence
  ENSG00000169213_35 (sequence is synthesized)
aacaagcatcttcacaatagatggaatcaagagttaaatgttatagtggcaagcttgtctactgggcaacagacaaccagacctgcttgtgagatggcagctccccagccctgctctgtg

SEQ ID NO: 558085 - DNA, 120 bp, Artificial Sequence
  ENSG00000169213_36 (sequence is synthesized)
acctcatttctgtcaaatgaaaggcagcagcttccagctgattgcagcatagtgttcatcaatcacagtaatagcgcaattagccaccaaggttcaagctgtgtaatatgtgttagtggc

SEQ ID NO: 558086 - DNA, 120 bp, Artificial Sequence
  ENSG00000169213_37 (sequence is synthesized)
ttcaagctgtgtaatatgtgttagtggcaacttgtcctggatttaatcttcctcaacaatccaaataaaatatttaaaaactcttgacttctggctgggcgcagcagctcatgcctgtaa

SEQ ID NO: 558087 - DNA, 120 bp, Artificial Sequence
  ENSG00000169213_38 (sequence is synthesized)
caaacaacaacaacaaaaaacacctcttgacttctaaagacgcaaaagtggccaaaagtgcaatacagtattgtgtttatttacatctattttaaatgcatgtgtatctgtaaatacaaa

SEQ ID NO: 558088 - DNA, 120 bp, Artificial Sequence
  ENSG00000169213_39 (sequence is synthesized)
gtgattcgtgactcattgtctcctcagtctatagcattattaacttctaggagcagcagtggagtagagtgtactgaatggtcacagactcatcgattatcagatctggaaaggagctta

SEQ ID NO: 558089 - DNA, 120 bp, Artificial Sequence
  ENSG00000169213_40 (sequence is synthesized)
gagaagatctgttccaggctcctattttatagaagggaaggttgacatccaaagaatggaaggaaatctcctaattattctgagagtatcacagtgatggagccaggactaggtcctgga

SEQ ID NO: 558090 - DNA, 120 bp, Artificial Sequence
  ENSG00000169213_41 (sequence is synthesized)
tcacctctaagaagacacttagctatttgactatcgactagggcctagcattattaagcactagataaatacagatgaaaaaaaaaatgatccctgcctgcaaggtcctatgatctaatg

SEQ ID NO: 558091 - DNA, 120 bp, Artificial Sequence
  ENSG00000169213_42 (sequence is synthesized)
gagatgctgtttctaaaatattattatcccaatttggcagtcaaggaaacagccctggaaaagttaacatgctcaagtcacccactagcatcatttgaaccctcctctgtctgactcatg

SEQ ID NO: 558092 - DNA, 120 bp, Artificial Sequence
  ENSG00000169213_43 (sequence is synthesized)
ctctttcaaatttttttcttcagattgtcttagcagaagggtagatgggatataccctctggtagtaccaggctcccaaggattcttagagttaaataacctcagttaattaaatagcca

SEQ ID NO: 558093 - DNA, 120 bp, Artificial Sequence
  ENSG00000169213_44 (sequence is synthesized)
caattgcttggtgaccgaagccttataacatccacagaataagaccattctccagacctgactccccaactcatatcacctgctcctgccggccactaagctccttgcttggatatcgag

SEQ ID NO: 558094 - DNA, 120 bp, Artificial Sequence
  ENSG00000169213_45 (sequence is synthesized)
ttttctggagtatcctgaggaatgtttgtttgactttgtttgccaacagtttaggggaaggggaaagaactacaataaccagtgtcctgggatctcattgatttcagattccctgcccca

SEQ ID NO: 558095 - DNA, 120 bp, Artificial Sequence
  ENSG00000169213_46 (sequence is synthesized)
agcctacacccaattacctgccatagttggggaatcaagtagcatcctgtggctggaagtaaatgcaaaacactagtccgtgagatataaatactgttaaatgatggttttttaaggtcc

SEQ ID NO: 558096 - DNA, 120 bp, Artificial Sequence
  ENSG00000169213_47 (sequence is synthesized)
tgatccattatatgaagtagacaaaattcaaatttatttattcatttattttctcaacaaatgaatatatattatgtgccaggatacaagtagtggcaaattagacacagttcttgcttt

SEQ ID NO: 558097 - DNA, 120 bp, Artificial Sequence
  ENSG00000169213_48 (sequence is synthesized)
catgaaacgtatagcttcatgatttagtatagacattgtcaaatcatcacccaaatataattacaaagtactctaaaggaaaggcacgtgatgctgtgagaacactcaactgggaaaccg

SEQ ID NO: 558098 - DNA, 120 bp, Artificial Sequence
  ENSG00000169213_49 (sequence is synthesized)
tctgctacccactggccattgctttacattcctcaactaagctttcaccttttagtactaacctttgatgactgatcaaatacaaatgccccaagaagactgaggataggagaaagaata

SEQ ID NO: 558099 - DNA, 120 bp, Artificial Sequence
  ENSG00000169213_50 (sequence is synthesized)
tctctacctgtgaaacattgttagactgcctggctaggagttcattgttgttttctgaaggacgtaaccaaccactccaaaacttacaggcttaaaacaacaaacatgtatcatttctta

SEQ ID NO: 558100 - DNA, 120 bp, Artificial Sequence
  ENSG00000169213_51 (sequence is synthesized)
tgattctgtgggttggctgggtggttcttctggctgaggcaggatggtctaggatagctacatccacatgtctggggtcccagctgagatgactggggctgttgaggcctttctccctgt

SEQ ID NO: 558101 - DNA, 120 bp, Artificial Sequence
  ENSG00000169213_52 (sequence is synthesized)
ggtgtcatcctccagaaggctgcccagatttgtccatatggtagcaggagtttcctcgaagcaagagagggcaagatccaacacagaagcacttttcaagctctgtttccatcacatttg

SEQ ID NO: 558102 - DNA, 120 bp, Artificial Sequence
  ENSG00000169213_53 (sequence is synthesized)
caagctctgtttccatcacatttgccaatgtctcactgatgaacacaagttccatggccaagtccagttttaagaaatggagaaatagggcttggctcagtggctcatgtctgtaatccc

SEQ ID NO: 558103 - DNA, 120 bp, Artificial Sequence
  ENSG00000169213_54 (sequence is synthesized)
tgcttgaacccaggaggaggaggttgcaatgagcctaaatcgcaccactgcacttcagcctgggcgatagagccagactcagtctcaaaaaaaaaaaaggggagggggaaatagatgcca

SEQ ID NO: 558104 - DNA, 120 bp, Artificial Sequence
  ENSG00000169213_55 (sequence is synthesized)
ggagggggaaatagatgccatctctttatgggaggagctacaaaatatggtgaccaatttttcaatctaccacaggaagcaccctcagtcctctgaaactaagtctggtagatgtcctgg

SEQ ID NO: 558105 - DNA, 120 bp, Artificial Sequence
  ENSG00000169213_56 (sequence is synthesized)
ggtcttaaaacatggctccgatgatatcaccaaagacaagtggcaaaactgtatagggcagggcagtcttatcatttgtttaatagtgatccaaaggatttactttggaggaatcaagac

SEQ ID NO: 558106 - DNA, 120 bp, Artificial Sequence
  ENSG00000169213_57 (sequence is synthesized)
actcgagatgaagaagttttgatgcttgttaaacagtccatttggatacctcttagctatccccgagggatgaatctgacttctcatttcacaggattcaccgtagataatggttgtaat

SEQ ID NO: 558107 - DNA, 120 bp, Artificial Sequence
  ENSG00000169213_58 (sequence is synthesized)
tcctaccggaagttcctggccagaagcccagcagaaagattcagtatatatagaaaagatggctccaagaacagttgggccttctgttctaactgtacttccttctttgatgtactcgtc

SEQ ID NO: 558108 - DNA, 120 bp, Artificial Sequence
  ENSG00000169213_59 (sequence is synthesized)
tagtcccgaggctttagatgccaagtctttgataataacgtgtatctaagtgcctactggacattttcatgtctcaaacttaacatgtccaaattgaaactcttgattctgcccccaaac

SEQ ID NO: 558109 - DNA, 120 bp, Artificial Sequence
  ENSG00000169213_60 (sequence is synthesized)
ttgtttgaaccccagtcttcacagaaaactcatccttaattctttgatttttctctttttctcagcctccttgtctaatctagcagcagatcctagggttttacttctaaatatatctca

SEQ ID NO: 558110 - DNA, 120 bp, Artificial Sequence
  ENSG00000169213_61 (sequence is synthesized)
aatctgatcatttttctccattttcattggcatgaccttggtccaggccaccattgttttctgccctagagagctaccacagagttcctaacatttccctacttacgtaattactccact

SEQ ID NO: 558111 - DNA, 80 bp, Artificial Sequence
  ENSG00000169213_62 (sequence is synthesized)
atttccctacttacgtaattactccactctagtccattctgtctcacaggagtaacattttttatatatatatatatata

SEQ ID NO: 558112 - DNA, 120 bp, Artificial Sequence
  ENSG00000169213_63 (sequence is synthesized)
aagctggtttcaaattctggcctcaagcgatcctcttgccttggcctcctgagtcactaggattgtacgtatgagccaccgcatccagcctcaatggcaatctcttaaaaatctaaataa

SEQ ID NO: 558113 - DNA, 120 bp, Artificial Sequence
  ENSG00000169213_64 (sequence is synthesized)
cctcaatggcaatctcttaaaaatctaaataaatgaacggctcagtaacactgaggtttacttcacacaaaaacaatccaaaccttggcaagacggtgaaaccctgtctctacaaaaaat

SEQ ID NO: 558114 - DNA, 86 bp, Artificial Sequence
  ENSG00000169213_65 (sequence is synthesized)
ctacttgggaggctgaggtgggaggatcgattgagccctggaggtcaagaatacagtgagccatagccatgattgtacactgtgcc

SEQ ID NO: 558115 - DNA, 120 bp, Artificial Sequence
  ENSG00000169213_66 (sequence is synthesized)
aaagaaagaaagaaagaaaaaaaagaagaaaaggaaagaaatgaagagaattcagagacttccattattattaatacctattttattgattctgtttctagccctgagtccgctcctaac

SEQ ID NO: 558116 - DNA, 120 bp, Artificial Sequence
  ENSG00000169213_67 (sequence is synthesized)
attctgtttctagccctgagtccgctcctaacttgctataggatctctggtaaatcatttcctgtaataagcagctgtcacctctctccttgtttcttccagaaatagtaatctcttctt

SEQ ID NO: 558117 - DNA, 120 bp, Artificial Sequence
  ENSG00000169213_68 (sequence is synthesized)
tagtagtactactactccctaacccaaaccaggtgattctagtgaagactgtcaataaacggagcatgtgatcaagcagggcccatcagaatccttccctaagatttttataaaaagctg

SEQ ID NO: 558118 - DNA, 120 bp, Artificial Sequence
  ENSG00000169213_69 (sequence is synthesized)
gacctattctttttccatttgagtggcaaatatttgaagatatgaggtctaaagctgtgatggcttattctccatccctgtgtaaattctggtctatagtaagcgaaaacaaggccatta

SEQ ID NO: 558119 - DNA, 120 bp, Artificial Sequence
  ENSG00000169213_70 (sequence is synthesized)
ggcagagggcagcagagacataaggtgagaaagagtgtggtctctggttttctagaccctgattctggtttggaggcttggctgatcacctcttcctttgattctgatagaaagctcaat

SEQ ID NO: 558120 - DNA, 120 bp, Artificial Sequence
  ENSG00000169213_71 (sequence is synthesized)
gtatctttctaataaaacccccctttgctttgcttgttggagttaggttcttatcccttgcaaccaaaaatatattgtctcttcttttgttctcagttttctcatttatatatccttcta

SEQ ID NO: 558121 - DNA, 120 bp, Artificial Sequence
  ENSG00000169213_72 (sequence is synthesized)
acaaacaaacaaaaacaaacaaaaaaaacctgggtcattcagaaaatcccactgatatagactttctgatccagaatgtataatctgaaaagaagcctaccctcgtctccatcctctctt

SEQ ID NO: 558122 - DNA, 120 bp, Artificial Sequence
  ENSG00000169213_73 (sequence is synthesized)
aaagaagcctaccctcgtctccatcctctcttcttgtacctgaaggaacgaagaagagggatttctcaaggtgagaagcagttctccatggacactgatgacagcacaggcaaagtttcc

SEQ ID NO: 558123 - DNA, 120 bp, Artificial Sequence
  ENSG00000169213_74 (sequence is synthesized)
tatgactagggatcactgtccacacagagtctggcttcccaggtatccagcaggtagacaaaacagctaactccactgccactcctttctccacatccgttcctatttctcagccatctc

SEQ ID NO: 558124 - DNA, 120 bp, Artificial Sequence
  ENSG00000169213_75 (sequence is synthesized)
agtgacatccgccatcttgagagtcaactactgactggactgagttgtgtggtatatgcttctgtttacttctcttctgtcttttttaagtggccaaatagcaaacgcttaaataggaaa

SEQ ID NO: 558125 - DNA, 120 bp, Artificial Sequence
  ENSG00000169213_76 (sequence is synthesized)
tctctgggagacttgaataaaagactttgcttggtagaaaatcatgtcacagaaaggctaatagacagcaaagtaaatcagcaagtccctgagcagtaggattaggattcctgtctcctt

SEQ ID NO: 558126 - DNA, 120 bp, Artificial Sequence
  ENSG00000169213_77 (sequence is synthesized)
tcagattcaaatgcatctgtttctggggttaacagtggactgttaagaggctgtgcagcttgggttaagtcattcttatctctgggcttcaggagcttagaccagatagtttctacaggc

SEQ ID NO: 558127 - DNA, 120 bp, Artificial Sequence
  ENSG00000169213_78 (sequence is synthesized)
tctcttggtgctgatgccttgggattctgtggctgttttctgtaagatctgcaagggggaaacaggattttggcagcaatcctttcattactaaagcttcctttcttttcgggtacagtg

SEQ ID NO: 558128 - DNA, 120 bp, Artificial Sequence
  ENSG00000169213_79 (sequence is synthesized)
aaaagagccaaggctgtgtgaccccctcatcacttagccaggcgtatggtcctggtttctgaggctgccagaaagcatcttagcaatttgtgtttggatggtccatgcctgactattcta

SEQ ID NO: 558129 - DNA, 120 bp, Artificial Sequence
  ENSG00000169213_80 (sequence is synthesized)
ggctggaggttcctaaagagtaacaagaggaagagaaacaagaatctctgacacttgttgagaatagagcacagtcccatttgtttgaaaagagacaccaggcagccatgtttatgtgcc

SEQ ID NO: 558130 - DNA, 120 bp, Artificial Sequence
  ENSG00000169213_81 (sequence is synthesized)
agaaatgcattccacctcaaggaggacttaatttatggacccgtgtgtgccaggctgagctgggcaagatctttctcaggacaaactctgccatgcagctaaaagcctggaaactaaagg

SEQ ID NO: 558131 - DNA, 120 bp, Artificial Sequence
  ENSG00000169213_82 (sequence is synthesized)
atttcatgtagtaaactatcttccaacccctgtagacatcagaccacaggatgaggtttcagaaggtcataaggcagaatagttaagcctacagggcttacagtctgacagacctgggtt

SEQ ID NO: 558132 - DNA, 120 bp, Artificial Sequence
  ENSG00000169213_83 (sequence is synthesized)
cagttcttgggtcttcatcactagttttgtgacttcgggaagatgactcccggagcctcagtgagcctcagttacttcatatgtaaatgaagtaatactatctacttcacaaggctgttg

SEQ ID NO: 558133 - DNA, 120 bp, Artificial Sequence
  ENSG00000169213_84 (sequence is synthesized)
aaaggattaaatggagaatgggtgtaaaacccttagtgcagtgccgtgcacacacagtagatgccgaacgtgtgatgttggcactacacaatgtgtaatcccaatcaggcagagctaggc

SEQ ID NO: 558134 - DNA, 120 bp, Artificial Sequence
  ENSG00000169213_85 (sequence is synthesized)
aggcaaatctaatccaggatctttgtaaggggactgagaaccagagactggagaaagccagtgtaaacaccatgagcaaaggagcaagagaaggggcattgtgtaagtaggagatggagc

SEQ ID NO: 558135 - DNA, 120 bp, Artificial Sequence
  ENSG00000169213_86 (sequence is synthesized)
ttgaacttactaagtggatcagggtagaagaatccagtcaggaccaagggaggagagtccaggaaaatgccatgagcagctctgtagcatgaccttgttgggctgggttaaagtagggtc

SEQ ID NO: 558136 - DNA, 120 bp, Artificial Sequence
  ENSG00000169213_87 (sequence is synthesized)
tgccaccagtcatgtgacagaaaggtacctcatgcacttcctccttcccccagaaatcagcctccaggagtgaggaatgagcccagaatgagagtttagagtgctccagagcctttgtta

SEQ ID NO: 558137 - DNA, 120 bp, Artificial Sequence
  ENSG00000169213_88 (sequence is synthesized)
gaggtgccctccgacattcagaaaaccaggattccagagacctgggtttgagtcctgactttgcagcatactaactgtgtgatcttgaaccaacatattttcacctaatgaggctgacaa

SEQ ID NO: 558138 - DNA, 120 bp, Artificial Sequence
  ENSG00000169213_89 (sequence is synthesized)
tcttccctacttcacaaaatagttatgagagtcaaataaaagtacattttagaaagtgaaatgctgtggacatttaaggtggagccactgtgagagtctagggggatagatggtattcgt

SEQ ID NO: 558139 - DNA, 120 bp, Artificial Sequence
  ENSG00000169213_90 (sequence is synthesized)
ctcagaatgaaacgaatacacccctctcagagccctttccaaggatcccctccttctttcagctccttccctccacctcaatacacactcctgtcccaggaacctaacctcatctagaaa

SEQ ID NO: 558140 - DNA, 120 bp, Artificial Sequence
  ENSG00000169213_91 (sequence is synthesized)
taccagggccagcatgccttacacctagaggtttggttggcttcagagaaacttctggaggctaaaagcagccaagaagaatcagccactacatgctgggcctggatgaacagagcagtg

SEQ ID NO: 558141 - DNA, 120 bp, Artificial Sequence
  ENSG00000169213_92 (sequence is synthesized)
agctgtgatggggctggggctggggcccaggaggagcaggcaggagagtttgtatgcaccgtgattcaaatattataacaaaaatcatcgatcatgtgttaggcactttacagttcccaa

SEQ ID NO: 558142 - DNA, 120 bp, Artificial Sequence
  ENSG00000169213_93 (sequence is synthesized)
agcactttcccatccatgccctgatgatctttgacacaacactgtgatgtgggttttattatttccagtacagatgaggaagactgaggcctgcatcagtgaagcaacctatccaagact

SEQ ID NO: 558143 - DNA, 120 bp, Artificial Sequence
  ENSG00000169213_94 (sequence is synthesized)
acatagagaaggcagtaaatggcagggttagtctcagaacaggggagggtctgttccccccgcagtgggcagtcctaattctgaacttcacctatctgggggtgatagaggggaacaaga

SEQ ID NO: 558144 - DNA, 120 bp, Artificial Sequence
  ENSG00000169213_95 (sequence is synthesized)
ggaagcctgctgaagagaaaacctaaacatctgttttgtctacgtatgacttcctctgcttgtgggagagaaggaaggaaaggaacacattgttgtcagccccacaaccccaacagaatt

SEQ ID NO: 558145 - DNA, 120 bp, Artificial Sequence
  ENSG00000169213_96 (sequence is synthesized)
aaaccctggagcaggttgaacagcagaggcttccctcagatcaaggagccaggagcagatgatctatctctgtggccacacagagagatgtcaccttatgcaatttgcatatcatattca

SEQ ID NO: 558146 - DNA, 120 bp, Artificial Sequence
  ENSG00000169213_97 (sequence is synthesized)
attcccccaactgctctttctaatttattcaactggggaccaggctggtctcatgccaacctaggagatgtaccatagcagtatgagcagaattcctcaggaggaacaattagcaaaaac

SEQ ID NO: 558147 - DNA, 120 bp, Artificial Sequence
  ENSG00000169213_98 (sequence is synthesized)
tgcagttgcctctcgataggcctgagcagagagaggaacaatagctctcacgtctctcctcatcagattctaactaagcagatgttctcatgcttttttcttcttcctatgttctgtata

SEQ ID NO: 558148 - DNA, 120 bp, Artificial Sequence
  ENSG00000169213_99 (sequence is synthesized)
ctgacacctcttctcagtggcatatgaaatatgaaatgtcatgtgttgtgagtttgtataaatataaaggaatatatatacacagtagcaaaagagaagatctcatttacaaatatctat

SEQ ID NO: 558149 - DNA, 120 bp, Artificial Sequence
  ENSG00000169213_100 (sequence is synthesized)
ggtgtttccttgttctgtgttgatctgttttattgatacaaactgaattttcttaatgtatcttctatctctattatagtggcaatgatggtatatgcattaaagttcttctgaattgtg

SEQ ID NO: 558150 - DNA, 120 bp, Artificial Sequence
  ENSG00000169214_0 (sequence is synthesized)
gttaaagggctcagtgcggggactctgttttctggtttcagtaccacaatggacacaggcaacaaaactctgccccaggactttctcttactgggctttcctggttctcaaactcttcag

SEQ ID NO: 558151 - DNA, 120 bp, Artificial Sequence
  ENSG00000169214_1 (sequence is synthesized)
ctctctctctttatgctttttctggtgatgtacatcctcacagttagtggtaatgtggctatcttgatgttggtgagcacctcccatcagttgcatacccccatgtacttctttctgagc

SEQ ID NO: 558152 - DNA, 120 bp, Artificial Sequence
  ENSG00000169214_2 (sequence is synthesized)
aacctctccttcctggagatttggtataccacagcagcagtgcccaaagcactggccatcctactggggagaagtcagaccatatcatttacaagctgtcttttgcagatgtactttgtt

SEQ ID NO: 558153 - DNA, 120 bp, Artificial Sequence
  ENSG00000169214_3 (sequence is synthesized)
ttctcattaggctgcacagagtacttcctcctggcagccatggcttatgaccgctgtcttgccatctgctatcctttacactacggagccatcatgagtagcctgctctcagcgcagctg

SEQ ID NO: 558154 - DNA, 120 bp, Artificial Sequence
  ENSG00000169214_4 (sequence is synthesized)
ctgtgacattgcaccctggattgccctggcctgcaccaacacacaggcagtagagcttgtggcctttgtgattgctgttgtggttatcctgagttcatgcctcatcacctttgtctccta

SEQ ID NO: 558155 - DNA, 120 bp, Artificial Sequence
  ENSG00000169214_5 (sequence is synthesized)
tgtgtacatcatcagcaccatcctcaggatcccctctgccagtggccggagcaaagccttctccacgtgctcctcgcatctcaccgtggtgctcatttggtatgggtccacagttttcct

SEQ ID NO: 558156 - DNA, 120 bp, Artificial Sequence
  ENSG00000169214_6 (sequence is synthesized)
tcacgtccgcacctctatcaaagatgccttggatctgatcaaagctgtccacgtcctgaacactgtggtgactccagttttaaaccccttcatctatacgcttcgtaataaggaagtaag

SEQ ID NO: 558157 - DNA, 120 bp, Artificial Sequence
  ENSG00000169214_7 (sequence is synthesized)
agagactctgctgaagaaatggaagggaaaataaatctcctctaccacaacagatgtcctgtaaatggtctctgcatctatacagaggttccaagtaagaatgtggaggaatagggcaaa

SEQ ID NO: 558158 - DNA, 120 bp, Artificial Sequence
  ENSG00000169214_8 (sequence is synthesized)
aaaacaacaaaagggaagtggaatggaactaggacagaatggggtcagagcataagaacaaaaggaaacagaaaaagactgagctctaatttcaaagattatgaaagtttgagttaataa

SEQ ID NO: 558159 - DNA, 120 bp, Artificial Sequence
  ENSG00000169214_9 (sequence is synthesized)
aggagtaatggatgtcaaccgaaggaagcacactattaaacagcaagataatcaaagaaaaacagagatatagagggaataattgcaatcaaaatatattatttttaaataaagaaaatc

SEQ ID NO: 558160 - DNA, 120 bp, Artificial Sequence
  ENSG00000169214_10 (sequence is synthesized)
catgtatgataaaaatgggagtttttgacataagcaaatgggatttttaagcaaaaaataattatacattgaattaggtttgctctggactttggtttataaattagagacatctgcaat

SEQ ID NO: 558161 - DNA, 120 bp, Artificial Sequence
  ENSG00000169214_11 (sequence is synthesized)
aaaaagagtgctttggtatatcagctctaaattcttgtttctttttaaagattagcaaaattgtcttagtataaaatattgagaactacatttgtggaacacgagggaagagaaataggc

SEQ ID NO: 558162 - DNA, 120 bp, Artificial Sequence
  ENSG00000169214_12 (sequence is synthesized)
atggaataaaaaatgagtaaaagtaaggtcaagagacaaagcttttggagtttatggcagaaagaatttcaactgggtgattcatgtgcccattagagcttgagaagcactgcttggaag

SEQ ID NO: 558163 - DNA, 120 bp, Artificial Sequence
  ENSG00000169217_0 (sequence is synthesized)
gcagtcctcttccgggtgatggcggccgggtgccccggatgtagccctggcgcaagcatctcttcttttttccacctcgccttccgcggattcccagcttgagaaacacctctttgcccc

SEQ ID NO: 558164 - DNA, 120 bp, Artificial Sequence
  ENSG00000169217_1 (sequence is synthesized)
gtcatgccaaagaggaaagtgaccttccaaggcgtgggagatgaggaggatgaggatgaaatcattgtccccaagaagaagctggtggaccctgtggctgggtcagggggtcctgggagc

SEQ ID NO: 558165 - DNA, 120 bp, Artificial Sequence
  ENSG00000169217_2 (sequence is synthesized)
cgctttaaaggcaaacactctttggatagcgatgaggaggaggatgatgatgatggggggtccagcaaatatgacatcttggcctcagaggatgtagaaggtcaggaggcagccacactc

SEQ ID NO: 558166 - DNA, 120 bp, Artificial Sequence
  ENSG00000169217_3 (sequence is synthesized)
cccagcgaggggggtgttcggatcacaccctttaacctgcaggaggagatggaggaaggccactttgatgccgatggcaactacttcctgaaccgggatgctcagatccgagacagctgg

SEQ ID NO: 558167 - DNA, 120 bp, Artificial Sequence
  ENSG00000169217_4 (sequence is synthesized)
ctggacaacattgactgggtgaagatccgggagcggccacctggccagcgccaggcctcagactcggaggaggaggacagcttgggccagacctcaatgagtgcccaagccctcttggag

SEQ ID NO: 558168 - DNA, 120 bp, Artificial Sequence
  ENSG00000169217_5 (sequence is synthesized)
ggacttttggagctcctattgcctagagagacagtggctggggcactgaggcgtctgggggcccgaggaggaggcaaagggagaaaggggcctgggcaacccagttcccctcagcgcctg

SEQ ID NO: 558169 - DNA, 120 bp, Artificial Sequence
  ENSG00000169217_6 (sequence is synthesized)
gaccggctctccgggttggccgaccagatggtggcccggggcaaccttggtgtgtaccaggaaacaagggaacggttggctatgcgtctgaagggtttggggtgtcagaccctaggaccc

SEQ ID NO: 558170 - DNA, 120 bp, Artificial Sequence
  ENSG00000169217_7 (sequence is synthesized)
cacaatcccacacccccaccctccctggacatgttcgctgaggagttggcggaggaggaactggagaccccaacccctacccagagaggagaagcagagtcgcggggagatggtctggtg

SEQ ID NO: 558171 - DNA, 120 bp, Artificial Sequence
  ENSG00000169217_8 (sequence is synthesized)
gatgtgatgtgggaatataagtgggagaacacgggggatgccgagctgtatgggcccttcaccagcgcccagatgcagacctgggtgagtgaaggctacttcccggacggtgtttattgc

SEQ ID NO: 558172 - DNA, 120 bp, Artificial Sequence
  ENSG00000169217_9 (sequence is synthesized)
cggaagctggacccccctggtggtcagttctacaactccaaacgcattgactttgacctctacacctgagcctgctgggggcccagtttggtgggcccttctttcctggactttgtggag

SEQ ID NO: 558173 - DNA, 120 bp, Artificial Sequence
  ENSG00000169217_10 (sequence is synthesized)
gaggcaccaagtgtctcaggcagcgaggaaattggaggccatttttcagtcaatttccctttcccaataaaagcctttagttgtgtactggggccttggctgtgctgatggccagaagcc

SEQ ID NO: 558174 - DNA, 120 bp, Artificial Sequence
  ENSG00000169217_11 (sequence is synthesized)
aggggccttctccacagtccctttggacttgtcttggtccctgagtactcccatgaagatccttcttggaggtgcctgtcaggtatcctgtggcctccctgcctggactctgcttgccgt

SEQ ID NO: 558175 - DNA, 120 bp, Artificial Sequence
  ENSG00000169217_12 (sequence is synthesized)
gtaaacacccccaactgcgctgctctgtgctcctctcccaggtttcttgttcgattcctcttaggtctttggctttcaggacctcagattctttatccttgtagccaccagaggacagag

SEQ ID NO: 558176 - DNA, 120 bp, Artificial Sequence
  ENSG00000169217_13 (sequence is synthesized)
ccccagaagtggatgttttaggcccagaaggaccagggcatcgagaagacattgggaccctgttgggggtgagcatggaaccctcttactctcgcttcaccctctcaagctccttagatg

SEQ ID NO: 558177 - DNA, 120 bp, Artificial Sequence
  ENSG00000169217_14 (sequence is synthesized)
tgggcagaagtgggatgagtggcccaagaccgagatccctaaggttctgagagccagtgtcttccctaatctggctttcctctatccttgccgtcgttcccacagcccttcagtgaagtg

SEQ ID NO: 558178 - DNA, 120 bp, Artificial Sequence
  ENSG00000169217_15 (sequence is synthesized)
caaactcagtggccaagtgtgggccaagtgtgcattgtactggcacagagaggggcagtgactcactggagatcacaggaatcaaagggctggcccagacccagtgggctcctttcccag

SEQ ID NO: 558179 - DNA, 120 bp, Artificial Sequence
  ENSG00000169217_16 (sequence is synthesized)
acctttcttggcacaaagcctttgctgcctggccttggaggccctgcggcctacattctctggaccccactatgtgcctggcacagggctagtgccttgaggaaactgaggtagctgggt

SEQ ID NO: 558180 - DNA, 120 bp, Artificial Sequence
  ENSG00000169217_17 (sequence is synthesized)
tggtccccttccaggaattcagagtctggtggcaggggcatgggaaatagacagatgtaattctatagcctgggcctggcaccctccacctccacgccccaccagcattgccttacgcct

SEQ ID NO: 558181 - DNA, 120 bp, Artificial Sequence
  ENSG00000169217_18 (sequence is synthesized)
cccttgccccacgttagatggtttcttccggttttgcactctggctgccccttggagtctcctggggagctgtaatatctctttggagattcagattgagctggtctaggttgtggccca

SEQ ID NO: 558182 - DNA, 120 bp, Artificial Sequence
  ENSG00000169217_19 (sequence is synthesized)
ggcattgggcattttggaagcccccaggtgttttcagcttgcagccaggccgagagagagcccctgagtcagatccccatggtttaggcacacctagcgggaggggtggctcctggaccc

SEQ ID NO: 558183 - DNA, 120 bp, Artificial Sequence
  ENSG00000169217_20 (sequence is synthesized)
caccgtggttggagagctgagcatgtgtgtggctttagtggggtctgttagttatgggggtctgggcactggagctgcaggacacttgggatcccaggtcagaaagggccagatgagcaa

SEQ ID NO: 558184 - DNA, 120 bp, Artificial Sequence
  ENSG00000169217_21 (sequence is synthesized)
ctaggaaagacttgggggccagggcggagtggggtcacctgacactcttgtgaggccccttctagtgcctgctcacaccggaatttcattcactccaagaagccatcaggggtaagatac

SEQ ID NO: 558185 - DNA, 120 bp, Artificial Sequence
  ENSG00000169217_22 (sequence is synthesized)
cttcctttaaacgtcactaagaaagaagaggcctgccggtgacacagtaagatgccattgatctaaagatgcgtcttgatttcagaaaggtccggaagtggaaagcaggtttcagggctg

SEQ ID NO: 558186 - DNA, 120 bp, Artificial Sequence
  ENSG00000169217_23 (sequence is synthesized)
ctgaggtacagggttctcctgtaggccccagggatggtctcaggggtgctgagtgcgtgcgtggtaaatggatggagcccaggggcgcctcctgccagtgtcctccaggcactcaaacct

SEQ ID NO: 558187 - DNA, 120 bp, Artificial Sequence
  ENSG00000169217_24 (sequence is synthesized)
agcccttctgaagccgacctcacgtgacctcacagcccctcctgaaggcgcctcactgatgacggtgggtggaataacagcccccagagatgtccaggtttggaaccccaggacgtggga

SEQ ID NO: 558188 - DNA, 120 bp, Artificial Sequence
  ENSG00000169217_25 (sequence is synthesized)
aagtgttaccttgcgtggcaaaagggacccggcgcctgtgcttcagttcaggatttcgtggtggggagatgaccgtggatggttgaggtgggccctgagtaatcatgggggcccttataa

SEQ ID NO: 558189 - DNA, 120 bp, Artificial Sequence
  ENSG00000169217_26 (sequence is synthesized)
gggaaggggagtcacgagggtctgcgcatgaagcaaggaagcttctggctgtgaagatggcaagaaggcctggggccaggcgatgaggtggcccctggaggagctggaaaaggcattgga

SEQ ID NO: 558190 - DNA, 120 bp, Artificial Sequence
  ENSG00000169217_27 (sequence is synthesized)
ttctgccccagagcctccgtggagaaacaaagccgcactgacaagacttcagcctggtgaaaaccattttggactcctgacctctagaactgtaagataataaattggtgtggttttcaa

SEQ ID NO: 558191 - DNA, 120 bp, Artificial Sequence
  ENSG00000169217_28 (sequence is synthesized)
gggggatccagagggtccgctcctccgtccccgccccgtttaactcgcggatgctagacccaagtcctggaggcctcctggctgccagcttcctttcggcccctgcttttgtgctccctc

SEQ ID NO: 558192 - DNA, 120 bp, Artificial Sequence
  ENSG00000169217_29 (sequence is synthesized)
cgctcccaaactgtacctgtcacagaccaggaaaaatgtttgctgtgctgcgtctgttggcgagtcccctcctcacccggttcccttcctctgcatcctttcctcagcttgagaaacacc

SEQ ID NO: 558193 - DNA, 120 bp, Artificial Sequence
  ENSG00000169217_30 (sequence is synthesized)
aaaagggcacctgtgtctttggtgcaggtcaggaggcagccacactccccagcgaggggggtgttcggatcacaccctttaacctgcaggaggagatggaggaaggccactttgatgccg

SEQ ID NO: 558194 - DNA, 120 bp, Artificial Sequence
  ENSG00000169218_0 (sequence is synthesized)
ccctctccgggctgggagctccggccgagcggaggcgcgacggagagcaccagcgcagggcagagagcccggagcgaccggccagagtagggcatccgctcgggtgctgcggagaacgag

SEQ ID NO: 558195 - DNA, 120 bp, Artificial Sequence
  ENSG00000169218_1 (sequence is synthesized)
ggcagctccgagccgccccggaggaccgatgcgccgggtggggcgctggccccgagggcgtgagccgtccgcagattgagcaacttgggaacgggcgggcggagcgcaggcgagccgggc

SEQ ID NO: 558196 - DNA, 120 bp, Artificial Sequence
  ENSG00000169218_2 (sequence is synthesized)
gcccaggacagtcccgcagcgggcgggtgagcgggccgcgccctcgcccctcccgggcctgcccccgtcgcgactggcagcacgaagctgagattgtggtttcctggtgattcaggtggg

SEQ ID NO: 558197 - DNA, 120 bp, Artificial Sequence
  ENSG00000169218_3 (sequence is synthesized)
agtgggccagaagatcaccgctggcaaggactgggttggtttttggagtagtccctgctgacgtgacaaaaagatctctcatatgatattccgaggtatctttgaggaagtctctctttg

SEQ ID NO: 558198 - DNA, 120 bp, Artificial Sequence
  ENSG00000169218_4 (sequence is synthesized)
aggacctccctttgagctgatggagaactgggctccccacaccctctctgtccccagctgagattatggtggatttgggctacggcccaggcctgggcctcctgctgctgacccagcccc

SEQ ID NO: 558199 - DNA, 120 bp, Artificial Sequence
  ENSG00000169218_5 (sequence is synthesized)
agaggtgttagcaagagccgtgtgctatccaccctccccgagaccacccctccgaccaggggcctggagctggcgcgtgactatgcggcttgggctgtgtgtggtggccctggttctgag

SEQ ID NO: 558200 - DNA, 120 bp, Artificial Sequence
  ENSG00000169218_6 (sequence is synthesized)
ctggacgcacctcaccatcagcagccgggggatcaaggggaaaaggcagaggcggatcagtgccgaggggagccaggcctgtgccaaaggctgtgagctctgctctgaagtcaacggctg

SEQ ID NO: 558201 - DNA, 120 bp, Artificial Sequence
  ENSG00000169218_7 (sequence is synthesized)
cctcaagtgctcacccaagctgttcatcctgctggagaggaacgacatccgccaggtgggcgtctgcttgccgtcctgcccacctggatacttcgacgcccgcaaccccgacatgaacaa

SEQ ID NO: 558202 - DNA, 120 bp, Artificial Sequence
  ENSG00000169218_8 (sequence is synthesized)
gtgcatcaaatgcaagatcgagcactgtgaggcctgcttcagccataacttctgcaccaagtgtaaggagggcttgtacctgcacaagggccgctgctatccagcttgtcccgagggctc

SEQ ID NO: 558203 - DNA, 120 bp, Artificial Sequence
  ENSG00000169218_9 (sequence is synthesized)
ctcagctgccaatggcaccatggagtgcagtagtcctgcgcaatgtgaaatgagcgagtggtctccgtgggggccctgctccaagaagcagcagctctgtggtttccggaggggctccga

SEQ ID NO: 558204 - DNA, 120 bp, Artificial Sequence
  ENSG00000169218_10 (sequence is synthesized)
ggagcggacacgcagggtgctacatgcccctgtgggggaccatgctgcctgctctgacaccaaggagacccggaggtgcacagtgaggagagtgccgtgtcctgaggggcagaagaggag

SEQ ID NO: 558205 - DNA, 120 bp, Artificial Sequence
  ENSG00000169218_11 (sequence is synthesized)
cagtggggccactcacatctgcagggcctgcctagggacactgtccagcctccaggcccatgcagaaagagttcagtgctactctgcgtgattcaagctttcctgaactggaacgtcggg

SEQ ID NO: 558206 - DNA, 120 bp, Artificial Sequence
  ENSG00000169218_12 (sequence is synthesized)
ggcaaagcatacacacacactccaatccatccatgcatacatagacacaagacacacacgctcaaacccctgtccacatatacaaccatacatacttgcacatgtgtgttcatgtacaca

SEQ ID NO: 558207 - DNA, 120 bp, Artificial Sequence
  ENSG00000169218_13 (sequence is synthesized)
acatacacacacacacacacacacacctgaggccaccagaagacacttccatccctcgggcccagcagtacacacttggtttccagagctcccagtggacatgtcagagacaacacttcc

SEQ ID NO: 558208 - DNA, 120 bp, Artificial Sequence
  ENSG00000169218_14 (sequence is synthesized)
ggacatgtcagagacaacacttcccagcatctgagaccaaactgcagaggggagccttctggagaagctgctgggatcggaccagccactgtggcagatgggagccaagcttgaggactg

SEQ ID NO: 558209 - DNA, 120 bp, Artificial Sequence
  ENSG00000169218_15 (sequence is synthesized)
ctggtgacctgggaagaaaccttcttcccatcctgttcagcactcccagctgtgtgactttatcgttggagagtattgttacccttccaggatacatatcagggttaacctgactttgaa

SEQ ID NO: 558210 - DNA, 120 bp, Artificial Sequence
  ENSG00000169218_16 (sequence is synthesized)
aactgcttaaaggtttatttcaaattaaaacaaaaaaatcaacgacagcagtagacacaggcaccacattcctttgcagggtgtgagggtttggcgaggtatgcgtaggagcaagaaggg

SEQ ID NO: 558211 - DNA, 120 bp, Artificial Sequence
  ENSG00000169218_17 (sequence is synthesized)
acagggaatttcaagagaccccaaatagcctgctcagtagagggtcatgcagacaaggaagaaaacttaggggctgctctgacggtggtaaacaggctgtctatatccttgttactcaga

SEQ ID NO: 558212 - DNA, 120 bp, Artificial Sequence
  ENSG00000169218_18 (sequence is synthesized)
gcatggcccggcagcagtgttgtcacagggcagcttgttaggaatgagaatctcaggtctcattccagacctggtgagccagagtctaaattttaagattcctgatgattggcatgttac

SEQ ID NO: 558213 - DNA, 120 bp, Artificial Sequence
  ENSG00000169218_19 (sequence is synthesized)
ccaaatttgagaagtgctgctgtaattccccttaaaggacgggagaaagggccccggccatcttgcagcaggagggattctggtcagctataaaggaggactttccatctgggagaggca

SEQ ID NO: 558214 - DNA, 120 bp, Artificial Sequence
  ENSG00000169218_20 (sequence is synthesized)
gaatctatatactgaagggctagtggcactgccaggggaagggagtgcgtaggcttccagtgatggttggggacaatcctgcccaaaggcagggcagtggatggaataactccttgtggc

SEQ ID NO: 558215 - DNA, 120 bp, Artificial Sequence
  ENSG00000169218_21 (sequence is synthesized)
attctgaagtgtgtgccaggctctggactaggtgctaggtttccagggaggagccaaacacgggccttgctcttgtggagcttagaggttggtggggaagaaaataggcatgcaccaagg

SEQ ID NO: 558216 - DNA, 120 bp, Artificial Sequence
  ENSG00000169218_22 (sequence is synthesized)
aattgtacaaacacatatataactacaaaaggatggtgccaagggcaggtgaccactggcatctatgcttagctatgaaagtgaataaagcagaataaaaataaaatactttctctcagg

SEQ ID NO: 558217 - DNA, 120 bp, Artificial Sequence
  ENSG00000169218_23 (sequence is synthesized)
cgcgccctcgcccctcccgggcctgcccccgtcgcgactggcagcacgaagctgagattgtggtttcctggtgattcaggtgggagtgggccagaagatcaccgctggcaaggactggtg

SEQ ID NO: 558218 - DNA, 120 bp, Artificial Sequence
  ENSG00000169218_24 (sequence is synthesized)
tttgtcaactgtaaggactcatggaacagatctaccagggattctcagaccttagtttgagaaatgctgcaattaaaggcaaatcctatcactctgagtgatcgctttggtgtcgaggca

SEQ ID NO: 558219 - DNA, 120 bp, Artificial Sequence
  ENSG00000169220_0 (sequence is synthesized)
ctctccactgcctgcccgccaccgtgcaagctctggccggcgctgcccacagtccccatggtgggcagcccccgcggcggggacccctgatcggcagcggcatgccagggaagcccaagc

SEQ ID NO: 558220 - DNA, 120 bp, Artificial Sequence
  ENSG00000169220_1 (sequence is synthesized)
acctgggcgtccccaacgggcgcatggttctggctgtgtcagatggagagctgagcagcacgacggggccccagggccagggcgagggccgcggcagctctctcagcatccacagcctcc

SEQ ID NO: 558221 - DNA, 120 bp, Artificial Sequence
  ENSG00000169220_2 (sequence is synthesized)
ccagtggtcccagcagccccttcccaaccgaggagcagcctgtggccagctgggccctgtccttcgagcggctgttgcaggacccgctgggcctggcttacttcactgagttcctgaaga

SEQ ID NO: 558222 - DNA, 120 bp, Artificial Sequence
  ENSG00000169220_3 (sequence is synthesized)
aggagttcagcgcggaaaacgtgactttctggaaggcctgcgagcgcttccagcagatcccggccagcgatacccagcagctagctcaggaggcccgcaacatctaccaggagttcctgt

SEQ ID NO: 558223 - DNA, 120 bp, Artificial Sequence
  ENSG00000169220_4 (sequence is synthesized)
ccagccaggcgctgagcccagtgaacatcgaccgtcaggcctggcttggcgaggaggtgctggccgagccccggccggacatgtttcgggcacagcagcttcagatcttcaacttgatga

SEQ ID NO: 558224 - DNA, 120 bp, Artificial Sequence
  ENSG00000169220_5 (sequence is synthesized)
agttcgacagctatgcgcgcttcgtcaagtccccgctgtaccgcgagtgcctgctagccgaagccgagggacgccctctgcgggaacctggctcctcgcgcctcggcagccctgacgcca

SEQ ID NO: 558225 - DNA, 120 bp, Artificial Sequence
  ENSG00000169220_6 (sequence is synthesized)
cgaggaagaagccgaagctgaagcccgggaagtcgctgccgctgggtgtggaggagttggggcagctgccacccgttgagggtcctgggggccgccctctccgcaagtccttccgccggg

SEQ ID NO: 558226 - DNA, 120 bp, Artificial Sequence
  ENSG00000169220_7 (sequence is synthesized)
agctgggcgggactgcaaacgccgccttgcgccgagagtctcagggctccctcaactcctccgccagcctggaccttggcttcctagccttcgtcagcagcaaatctgagagccaccgga

SEQ ID NO: 558227 - DNA, 120 bp, Artificial Sequence
  ENSG00000169220_8 (sequence is synthesized)
agagccttgggagcacggagggtgaaagtgaaagccggccagggaagtactgctgtgtgtacctgcccgatggcacagcctccttggccctggccagacctggcctcaccatccgagaca

SEQ ID NO: 558228 - DNA, 120 bp, Artificial Sequence
  ENSG00000169220_9 (sequence is synthesized)
catcaaggtctacctggtgggcaatgaacaggccctggtcctggatcaggactgcaccgtgctggcggatcaggaagtgcggctggaaaacaggatcaccttcgagctggagctgacggc

SEQ ID NO: 558229 - DNA, 120 bp, Artificial Sequence
  ENSG00000169220_10 (sequence is synthesized)
gctggagcgcgtggtacgaatctcagccaagcccaccaagcggctgcaggaggcgctgcagcccattctggagaagcacggcttgagcccgctagaggtggtgctgcaccggccaggcga

SEQ ID NO: 558230 - DNA, 120 bp, Artificial Sequence
  ENSG00000169220_11 (sequence is synthesized)
gaaacagcctctggatctggggaagctagtgagctcggtggcggcccagagactggttttggacactcttccaggtgtgaagatctccaaagcccgtgacaaatctccctgccgcagcca

SEQ ID NO: 558231 - DNA, 120 bp, Artificial Sequence
  ENSG00000169220_12 (sequence is synthesized)
gggctgcccacctagaactcaggataaggccacccatccccctccagcgtcccccagttctctggtgaaggtgcccagtagtgccactggaaagcggcagacctgtgacatcgaaggcct

SEQ ID NO: 558232 - DNA, 120 bp, Artificial Sequence
  ENSG00000169220_13 (sequence is synthesized)
ggtggagctgctgaaccgggtgcagagcagcggggcccacgaccagaggggccttctgaggaaagaggacctggtacttccagaatttctgcagctgcccgcccaagggcccagctccga

SEQ ID NO: 558233 - DNA, 120 bp, Artificial Sequence
  ENSG00000169220_14 (sequence is synthesized)
ggagaccccaccacagaccaaatcagcagcccagcccatcgggggatccttgaactccaccaccgactcagccctctgacagctacccaacagtccaggacagctgcatggcacccggcg

SEQ ID NO: 558234 - DNA, 120 bp, Artificial Sequence
  ENSG00000169220_15 (sequence is synthesized)
ggccgagcatgccatgggtccgctctgcatgccctgtctgtgccatgagtgtccctggccccttcctgccatgggcaggcccgcaggaagagccggtaggggtggaaaggggactcagat

SEQ ID NO: 558235 - DNA, 120 bp, Artificial Sequence
  ENSG00000169220_16 (sequence is synthesized)
gagacacaccccacagctgccaccgccttgtccctcaacaagctcacccccaatcccttgcagccaggccacaatgggggaggtgagtccagccccttggaacaggcttgcccaacatgg

SEQ ID NO: 558236 - DNA, 120 bp, Artificial Sequence
  ENSG00000169220_17 (sequence is synthesized)
agggatggcgttggcagtgccagcctccccagcctgtgccaagcttcaacaggggcaagaggaggggccggcccctcctcaggaagctggtatgagtaaggccttgagggtgcaggcagg

SEQ ID NO: 558237 - DNA, 120 bp, Artificial Sequence
  ENSG00000169220_18 (sequence is synthesized)
cagccctgtaccccacccacatagactatactgtacatacagattttgcagtaggcttggggcagctgggtttgtccttgatgtatgatactgttattataataattattattattctgc

SEQ ID NO: 558238 - DNA, 120 bp, Artificial Sequence
  ENSG00000169220_19 (sequence is synthesized)
gaaggtgcgtgggactgggcgagggactgggcgaggcagggggtcctgcggaccgcgtgcaagaggggacgcctccgggtgcagatctgcgagtctgtgcccacggtctgcatgcgggct

SEQ ID NO: 558239 - DNA, 120 bp, Artificial Sequence
  ENSG00000169220_20 (sequence is synthesized)
agtctgtaagtctgtgaaaattgaaacccaggtcccagtgaccaccacactcccctgggtggttcgggtcttgggctagacctcagacgtttggaaatctccaacggtggtgtcgctccc

SEQ ID NO: 558240 - DNA, 120 bp, Artificial Sequence
  ENSG00000169220_21 (sequence is synthesized)
agggatttacacctgggcccctgcaggatggctccaaacaaggcccaccagtggggaacaggcttccgcagaggatgggtgagggcggggggctgttcgcgttcatcgctccctcttcac

SEQ ID NO: 558241 - DNA, 120 bp, Artificial Sequence
  ENSG00000169220_22 (sequence is synthesized)
aatccagccctaggtttggggcggggccagccccaaggacccggcctgggtgcaggcagcccagcgcccccaccccagccccggctcacctgttccggggtcgccccgcagatcttcaac

SEQ ID NO: 558242 - DNA, 120 bp, Artificial Sequence
  ENSG00000169220_23 (sequence is synthesized)
tcctgatcctgaccccaactccatttctgtctctgctcagtcatggctccaaccccaattcaagttctaaacccaactccaaagcaccctcagcaccaactttcactcactcagacatcc

SEQ ID NO: 558243 - DNA, 120 bp, Artificial Sequence
  ENSG00000169220_24 (sequence is synthesized)
aaattctcgcagggctgcccacctagaactcaggataaggccacccatccccctccagcgtcccccagttctctggtgaaggtgcccagtagtgccactggaaagcggcagacctgtgac

SEQ ID NO: 558244 - DNA, 120 bp, Artificial Sequence
  ENSG00000169220_25 (sequence is synthesized)
cagagtggggtcctctgtcagcttcctcatctagccttcctgcagcaccctcttcctcttctcccagctgggaacttttcttccttctccctgtccttgtctctgcctctcattttctct

SEQ ID NO: 558245 - DNA, 120 bp, Artificial Sequence
  ENSG00000169220_26 (sequence is synthesized)
ccctgtcttcagatcggtctggctccgtctgtctgtctggccctgtctgtctggcttggtctcttggccctgtctctgtcccaatctttttgatcacatcccccagtttggtctctgtgt

SEQ ID NO: 558246 - DNA, 120 bp, Artificial Sequence
  ENSG00000169221_0 (sequence is synthesized)
gagacgctggcgcggagccggctctgcggcgtgtgcgcaggcgcgaggtcggcggctcgcccccaagcaggagggagggggcggtggcgagagcgcgcgagggggtgagagggctcgaga

SEQ ID NO: 558247 - DNA, 80 bp, Artificial Sequence
  ENSG00000169221_1 (sequence is synthesized)
gtgagagggctcgagagagaccccggcgcgcggcgccccccgacccctgccccgcctctgcgcgcccagcggccgctccg

SEQ ID NO: 558248 - DNA, 80 bp, Artificial Sequence
  ENSG00000169221_2 (sequence is synthesized)
tttctcggctggcctcgccgggaggcccgaggggcggcgccttctgcggcctccccggcggggggatgtgaggggcggcc

SEQ ID NO: 558249 - DNA, 120 bp, Artificial Sequence
  ENSG00000169221_3 (sequence is synthesized)
cgggcccgtcgtggtggtggctccgggacctccagtgactacggccacttcggcccccgtcaccctggtggcccccggggaggcgcggcccgcctgggtcccggggtcggccgagacctc

SEQ ID NO: 558250 - DNA, 120 bp, Artificial Sequence
  ENSG00000169221_4 (sequence is synthesized)
gagacctctgctccggccccggccccagccccggccccagccccggctgtcacgggcagcacggtggtggtgctgaccctggaggcctcgcccgaagccccaaagccgcagctcccctcc

SEQ ID NO: 558251 - DNA, 120 bp, Artificial Sequence
  ENSG00000169221_5 (sequence is synthesized)
cgcccgaagccccaaagccgcagctcccctccggcccggaatccccagagcccgcggcagtggctggagttgagacatcgagggctctggccgcaggggcagactcgccgaagacagagg

SEQ ID NO: 558252 - DNA, 120 bp, Artificial Sequence
  ENSG00000169221_6 (sequence is synthesized)
aggctcgaccctcacccgccccaggaccagggacccccaccgggacccctaccaggaccccttccagaacggctcctggtgccctgaccgccaaacccccgcttgcccccaagccgggaa

SEQ ID NO: 558253 - DNA, 120 bp, Artificial Sequence
  ENSG00000169221_7 (sequence is synthesized)
ccacagtggcctcaggagtgactgcacggagtgcatcaggacaagtgacaggtgggcatggagctgccgcagcaacatcagcatcagcaggacaggctcctgaggacccctcaggccctg

SEQ ID NO: 558254 - DNA, 120 bp, Artificial Sequence
  ENSG00000169221_8 (sequence is synthesized)
gcacaggcccctctgggacttgtgaggctccggtagctgtcgtgaccgtgaccccagctccggagcctgctgaaaactctcaagacctgggctccacgtccagcctgggacctggcatct

SEQ ID NO: 558255 - DNA, 120 bp, Artificial Sequence
  ENSG00000169221_9 (sequence is synthesized)
ctgggcctcgagggcaggccccggacacgctgagttacttggactccgtgagcctcatgtctgggaccttggagtccttggcggatgatgtgagctccatgggctcagattcagagataa

SEQ ID NO: 558256 - DNA, 120 bp, Artificial Sequence
  ENSG00000169221_10 (sequence is synthesized)
acgggctggccctgcgcaagacggacaagtatggcttccttgggggcagccagtactcgggcagcctagagagctccattcccgtggacgtggctcggcagcgggagctcaaatggctgg

SEQ ID NO: 558257 - DNA, 120 bp, Artificial Sequence
  ENSG00000169221_11 (sequence is synthesized)
acatgttcagtaactgggataagtggctgtcacggcgattccagaaggtgaagctgcgctgccggaaggggatcccctcctctctcagagccaaagcctggcagtacctgtctaatagca

SEQ ID NO: 558258 - DNA, 120 bp, Artificial Sequence
  ENSG00000169221_12 (sequence is synthesized)
aggaacttctggagcagaacccaggaaagtttgaggagctggaacgggctcctggggaccccaagtggctggatgtgattgagaaggacctgcaccgccagttccctttccacgagatgt

SEQ ID NO: 558259 - DNA, 120 bp, Artificial Sequence
  ENSG00000169221_13 (sequence is synthesized)
ttgctgctcgaggggggcatgggcaacaggacctgtaccgaatcctgaaggcctacaccatctaccggcctgacgagggttactgccaggcccaggcccccgtggctgcggtcctgctca

SEQ ID NO: 558260 - DNA, 120 bp, Artificial Sequence
  ENSG00000169221_14 (sequence is synthesized)
cggggagatcttttttgcactcctgcgccgggcctccccgctggcgcatcgccacctgcggcggcagcgcattgaccctgtgctctacatgacggagtggttcatgtgcatcttcgcccg

SEQ ID NO: 558261 - DNA, 120 bp, Artificial Sequence
  ENSG00000169221_15 (sequence is synthesized)
caccctgccctgggcgtcggtgctgcgtgtctgggacatgtttttctgtgaaggcgttaagatcatcttccgggtggccctggtcctgctgcgccacacgctgggctcagtggagaagct

SEQ ID NO: 558262 - DNA, 120 bp, Artificial Sequence
  ENSG00000169221_16 (sequence is synthesized)
gcgctcctgccaaggcatgtatgagaccatggagcagctgcgtaacctgccccagcagtgcatgcaggaagacttcctggtgcatgaggtgaccaatctgccggtgacagaagcactgat

SEQ ID NO: 558263 - DNA, 120 bp, Artificial Sequence
  ENSG00000169221_17 (sequence is synthesized)
tgagcgggagaatgcagcccagctcaagaagtggcgggaaacgcggggggagctgcagtatcggccctcacggcgactgcatgggtcccgggccatccacgaggagcgccggcggcaaca

SEQ ID NO: 558264 - DNA, 120 bp, Artificial Sequence
  ENSG00000169221_18 (sequence is synthesized)
aacagccacccctgggcccctcctccagcctcctcagcctccctggcctcaagagccgaggctcccgggcagctggaggggccccgtccccgccgccccccgtccgcagagccagtgctg

SEQ ID NO: 558265 - DNA, 120 bp, Artificial Sequence
  ENSG00000169221_19 (sequence is synthesized)
tgccccagggcctgtggtcactgctgagggactgcatccatcccttccctcacccactggcaatagcacccccttgggttccagcaaggagacccggaagcaggagaaggagcggcagaa

SEQ ID NO: 558266 - DNA, 120 bp, Artificial Sequence
  ENSG00000169221_20 (sequence is synthesized)
acaggagaaggagcggcagaaacaggagaaggagcgggagaaggagcggcagaagcaggagaaagagcgagagaagcaggaaaaggagcgagagaagcaggagaaggagcggcagaagca

SEQ ID NO: 558267 - DNA, 120 bp, Artificial Sequence
  ENSG00000169221_21 (sequence is synthesized)
ggagaagaaggctcaaggccggaagctttcgctgcgtcgaaaggcagatgggcccccaggcccccatgatggtggggacaggccctcagccgaggcccggcaggacgcttacttctgacc

SEQ ID NO: 558268 - DNA, 120 bp, Artificial Sequence
  ENSG00000169221_22 (sequence is synthesized)
tctgccctggggctggactgcatggcccccctctttccctcagccaagaacaggcctggcccaaggtgccaccccctagcaccttgtcaggctgtcccttgctggggaaagtggcttggt

SEQ ID NO: 558269 - DNA, 120 bp, Artificial Sequence
  ENSG00000169221_23 (sequence is synthesized)
tccccatctcctcgccagctgctgatccctacacgggcaggacagatgggcagctgcaaatgagtctggagcctctcatctcccatgaggctcagctggggtctctgtcgctcctgcccc

SEQ ID NO: 558270 - DNA, 120 bp, Artificial Sequence
  ENSG00000169221_24 (sequence is synthesized)
agttccctctgggtcccctcctaggtgctgtcctgaatggcccgttgtcatcccaggggtgactcctggtgatgggagtcagcagtttcagattcttacactccatagctccccttacca

SEQ ID NO: 558271 - DNA, 120 bp, Artificial Sequence
  ENSG00000169221_25 (sequence is synthesized)
tgaggtggagctggcttccttttccctgtcttcagccctccctgtctcccccacttcctggccagggctctcattctggacctgtgttgtaattgtgtacagaggatggcgttggcctgg

SEQ ID NO: 558272 - DNA, 120 bp, Artificial Sequence
  ENSG00000169221_26 (sequence is synthesized)
ggtgggggtgctcgctttgtcttctgtcctttggttctccttccataatgctcctgtacccagtttatttaaggggacatgcactggaataggaaatgtcccccatctcccttcctgcac

SEQ ID NO: 558273 - DNA, 120 bp, Artificial Sequence
  ENSG00000169221_27 (sequence is synthesized)
cctgctgtgctccctccaaacccaccttgctctgtgttctcaggcccccctgcttttgtctcaccaggacccatacctttcaccttgttcccttccacccctccagttagtccctatctg

SEQ ID NO: 558274 - DNA, 120 bp, Artificial Sequence
  ENSG00000169221_28 (sequence is synthesized)
ggtaagggtcttcccttgagctccagggggtggaacccaatgtttacattctcttctgtctctgcccccaccccatgcagcgctttgaggaattggaaaagaacctgctgttgtacctgg

SEQ ID NO: 558275 - DNA, 120 bp, Artificial Sequence
  ENSG00000169221_29 (sequence is synthesized)
ctgtgtgaccagtggctctctcctcaatagcaggctgtcctgaggaactcgggctgaacttagtttgggggagtccctcttgtgtgccaggcactatgccgggtgctgtttctttgcttt

SEQ ID NO: 558276 - DNA, 120 bp, Artificial Sequence
  ENSG00000169221_30 (sequence is synthesized)
gtagctttgtccctgtaagatcagcttcaatgccagagaactctacctcttgggcaagactgactgtaatccatgttactttcgcagcgttcagtggctcgctgctgtccacaggatgaa

SEQ ID NO: 558277 - DNA, 120 bp, Artificial Sequence
  ENSG00000169221_31 (sequence is synthesized)
gttcaggctctttggcctgcgcatagcctctctggtcacctttgccaccattcctcaccgggtgctttgcgctgtggtcctgctgaactagttgtagtcctttccccttcatattcaggc

SEQ ID NO: 558278 - DNA, 120 bp, Artificial Sequence
  ENSG00000169221_32 (sequence is synthesized)
tgtgcacctgccaagggtgctcttctcccctttctttgcctgctaagttctactcatttcttcatggcttacctcagatgtcccctcctccaggaagcttccctgatacccactgccccc

SEQ ID NO: 558279 - DNA, 120 bp, Artificial Sequence
  ENSG00000169221_33 (sequence is synthesized)
actccaattagatgtgtctttggtgcatctttgtcattgcatttcccatgctgtattacagttatcgctcctcttaggctgtaaccttcttgagggccagaaggtatcttactcttccca

SEQ ID NO: 558280 - DNA, 120 bp, Artificial Sequence
  ENSG00000169221_34 (sequence is synthesized)
gcccttggtagagtttgtaaccgacttatgatagaaattaatgagagatggtctctctgtttaaggagcttctagaacaaaggaaactaacatttaacgagccccttctatttaacagat

SEQ ID NO: 558281 - DNA, 120 bp, Artificial Sequence
  ENSG00000169221_35 (sequence is synthesized)
aactaacatttaacgagccccttctatttaacagatgtttatatgcagtttctcaatagtcttctcataactttgtgatgtaggtggtggtggtgttttttttgttttgttttgttttgt

SEQ ID NO: 558282 - DNA, 60 bp, Artificial Sequence
  ENSG00000169221_36 (sequence is synthesized)
ggattgaagacatgtgccaccacacccggctgagtttgcatttttagtagagacagggtt

SEQ ID NO: 558283 - DNA, 120 bp, Artificial Sequence
  ENSG00000169221_37 (sequence is synthesized)
caggcatgagccaccatgcccggcccggtggtgtctttttataattgaggaagggactcaggtcatcccttgacaaagctccctattgtctcagagacagaactgaaatttgaacttagg

SEQ ID NO: 558284 - DNA, 120 bp, Artificial Sequence
  ENSG00000169221_38 (sequence is synthesized)
taggtttgattcttaagacccaagctttcttccgttctactcacctcctagtactggctcctacaagtaagtgtttgaagaatgatggggcaccatgagtatgaacctctgacagaacag

SEQ ID NO: 558285 - DNA, 120 bp, Artificial Sequence
  ENSG00000169221_39 (sequence is synthesized)
tgagtaaatagggcagggagtcctttatttgcctggggtgatttcagggaggaggaggtagagtaaattgcaggtgacccaagggatcttaaacatttgataggacaaaactcagatggt

SEQ ID NO: 558286 - DNA, 90 bp, Artificial Sequence
  ENSG00000169221_40 (sequence is synthesized)
aagggatcttaaacatttgataggacaaaactcagatggttgcgtctaaagagacagaagtacatttgttctgtagatggagtctcgctc

SEQ ID NO: 558287 - DNA, 80 bp, Artificial Sequence
  ENSG00000169221_41 (sequence is synthesized)
gtgcagtggcacaatcttgactcactgcattcgcgaatagctgggatttcaagcacgtgccaccatgcctggctaatttt

SEQ ID NO: 558288 - DNA, 73 bp, Artificial Sequence
  ENSG00000169221_42 (sequence is synthesized)
caggtgggagccaccatgcccggcctattttattattttatttttattttttgtagagacagaatctcgttgc

SEQ ID NO: 558289 - DNA, 120 bp, Artificial Sequence
  ENSG00000169221_43 (sequence is synthesized)
catgcctggccctctagggtattttattttatggatagtaaggtattacttaatgggcacttcgctgtgtgttatttcgtataaaccccttcgggtagatattgttactttctccacctt

SEQ ID NO: 558290 - DNA, 120 bp, Artificial Sequence
  ENSG00000169221_44 (sequence is synthesized)
acagatgaggaaattgggcttagcaaaattaagtgatttgcccaaggtcacacaatgaataaatggtaaagctaggacgtggatccagatctaatgcaaaatgtggctttaaaatactcc

SEQ ID NO: 558291 - DNA, 120 bp, Artificial Sequence
  ENSG00000169221_45 (sequence is synthesized)
atactctctccccagatttggatgtgtcagaagtgagatttaaatatgacctctgaatagagatccatcagggaaggaagccctttcagtgtgccttgggatgcccaagtggccagacat

SEQ ID NO: 558292 - DNA, 120 bp, Artificial Sequence
  ENSG00000169221_46 (sequence is synthesized)
tggcttgcctcagttccccctgcaatgcaggttttacactattgctactgaccccttccgtgctcccccgaccctgcagagagagctccattcccgtggacgtggctcggcagcgggagc

SEQ ID NO: 558293 - DNA, 120 bp, Artificial Sequence
  ENSG00000169221_47 (sequence is synthesized)
tggtgatgggggagctccctgctccctgcttctcaggccccacccctcctccttgttcttgctcttctcagcaagccttttggtgcctggtgcagatctgcgacaagtacctcccaggtt

SEQ ID NO: 558294 - DNA, 120 bp, Artificial Sequence
  ENSG00000169221_48 (sequence is synthesized)
actacagtgcagggctggtgagtgtctggaggctgggtgcatccggggctgtggcgtttcctccaggctgcaggcaggtccttgccttgccccaccctggccttcccggcttctgcccac

SEQ ID NO: 558295 - DNA, 120 bp, Artificial Sequence
  ENSG00000169221_49 (sequence is synthesized)
ctgggacatgtttttctgtgaaggtacttctgtggccctccaggccatgaggggctggggtttctgtggtggctaccaggggttctgtcatatttctggtggtccatggacaaaaggtac

SEQ ID NO: 558296 - DNA, 120 bp, Artificial Sequence
  ENSG00000169221_50 (sequence is synthesized)
ttgttgggtggaggtttcaccataagcagctgggggctggagaaacaggcctgattttagttctgccaccaacccagagcctgctctccctgccaagatcctgagactgatagcagctca

SEQ ID NO: 558297 - DNA, 120 bp, Artificial Sequence
  ENSG00000169221_51 (sequence is synthesized)
tgtactttcacagggcctcagtttcctcatctgagattggcagtagatggggatgggggctgtgagtctatcctgatcaggacaggctgagatcttgggtctgaccaccccatgctctct

SEQ ID NO: 558298 - DNA, 120 bp, Artificial Sequence
  ENSG00000169221_52 (sequence is synthesized)
tgtggagtatgtagccaaaggcggagccccggggcctggagtgctctgctgtgggctgagcctttagctgaagctcgctcagcaggactgggcaggtggatggaggagcctggtgataaa

SEQ ID NO: 558299 - DNA, 120 bp, Artificial Sequence
  ENSG00000169221_53 (sequence is synthesized)
gacatttagtgctagaggagggctgatgctgcagctgtggaaagcttcctggagaaaatgacctggaaggtttctgggatgtggctgaggaaggagggcgagggtgcagcctgtgctggg

SEQ ID NO: 558300 - DNA, 120 bp, Artificial Sequence
  ENSG00000169221_54 (sequence is synthesized)
atgcctgcggagcaagccttttggtgcctggtgcagatctgcgacaagtacctcccaggttactacagtgcagggctggcgttaagatcatcttccgggtggccctggtcctgctgcgcc

SEQ ID NO: 558301 - DNA, 120 bp, Artificial Sequence
  ENSG00000169223_0 (sequence is synthesized)
agtggccgagaggagaggagaatggcggcggaaggctggatttggcgttggggctggggccggcggtgcctgggaaggcctgggcttctcggccccggccctggccccactacacctctc

SEQ ID NO: 558302 - DNA, 120 bp, Artificial Sequence
  ENSG00000169223_1 (sequence is synthesized)
tttcttcttttgttgttggggtctgtgactgcggatataactgacggcaacagtgaacatctcaagcgggagcattcgctcattaagccctaccaaggggtcggttccagctctatgccc

SEQ ID NO: 558303 - DNA, 120 bp, Artificial Sequence
  ENSG00000169223_2 (sequence is synthesized)
ctctgggacttccagggcagcactatgctcacgagccagtacgtacgtctgacccctgacgagcgcagcaaagagggctctatctggaaccaccagccgtgcttcctcaaagactgggaa

SEQ ID NO: 558304 - DNA, 120 bp, Artificial Sequence
  ENSG00000169223_3 (sequence is synthesized)
atgcacgtccacttcaaagtccacggcacagggaagaagaacctccatggagacggcatcgccttgtggtacacccgggaccgcctcgtgccagggcctgtgtttggaagcaaagataac

SEQ ID NO: 558305 - DNA, 120 bp, Artificial Sequence
  ENSG00000169223_4 (sequence is synthesized)
ttccacggcttagccatcttcctggacacctaccccaatgatgagaccactgagcgcgtgttcccgtacatctcggtgatggtgaacaatggctccctgtcctacgaccacagcaaggat

SEQ ID NO: 558306 - DNA, 120 bp, Artificial Sequence
  ENSG00000169223_5 (sequence is synthesized)
gggcgctggaccgagctggcgggctgcacggctgacttccgcaaccgcgatcacgacaccttcctggctgtgcgctactcccggggccgtctgacggtgatgaccgacctggaggacaag

SEQ ID NO: 558307 - DNA, 120 bp, Artificial Sequence
  ENSG00000169223_6 (sequence is synthesized)
tactacttcggggcctccgccggcaccggcgacctgtctgacaatcatgacatcatctccatgaagctgttccagctgatggtggagcacacgcccgacgaggagagcatcgactggacc

SEQ ID NO: 558308 - DNA, 120 bp, Artificial Sequence
  ENSG00000169223_7 (sequence is synthesized)
aagatcgagcccagcgtcaacttcctcaagtcgcccaaagacaacgtggacgaccccacggggaacttccgcagcgggcccctgacggggtggcgggtgttcctgctgctgctgtgcgct

SEQ ID NO: 558309 - DNA, 120 bp, Artificial Sequence
  ENSG00000169223_8 (sequence is synthesized)
ctcctgggcatcgttgtctgcgccgtggtgggggccgtggtgttccagaagcggcaggagcggaacaagcgcttctactgagtggcgcctccggcggggcctgtccctgggcccaggagc

SEQ ID NO: 558310 - DNA, 120 bp, Artificial Sequence
  ENSG00000169223_9 (sequence is synthesized)
caatgtgaacttttttttttaccgggattataaaagaacaacaagatgaccttatttcttaactgtttcaaataaatgattaaagtattttcatacattttgcttcttgcccagcaggga

SEQ ID NO: 558311 - DNA, 120 bp, Artificial Sequence
  ENSG00000169223_10 (sequence is synthesized)
caggtggcagagccgaggcttagggtctggcaccccccacagctggagacggaggctctcctggggctggtgtctcaggagcaggggtctgtgtctacagatgggctgtggcccctgcag

SEQ ID NO: 558312 - DNA, 120 bp, Artificial Sequence
  ENSG00000169223_11 (sequence is synthesized)
gcagctgttgaacactggagggtcccccggaccacactggggtgggctcctgaggacgtggggaagtgattttgttttgtggtgtgtggcacgtgtggcgacggataaggcctgaactgg

SEQ ID NO: 558313 - DNA, 120 bp, Artificial Sequence
  ENSG00000169223_12 (sequence is synthesized)
gaaacccaggccttcctgttcaccctgagctgcttcctgagacagatgctcaagtgaggctgcaggcgcggtgtggtggggccgagtgtgaccgtttgctaaataaagtgaaatacccaa

SEQ ID NO: 558314 - DNA, 120 bp, Artificial Sequence
  ENSG00000169223_13 (sequence is synthesized)
aaacaggccctagccggctgggcagtgctctccccaggggcctggcaggtttactggctgcagcagcagctttccttgtgggagggtcttgggccacgtgccctgcggctggcctgtagg

SEQ ID NO: 558315 - DNA, 120 bp, Artificial Sequence
  ENSG00000169223_14 (sequence is synthesized)
ccggcgacctgtctggtgagtgggccgggccaggcgttggttcccagcccagctcaccctgagggactgggagctttccatgcagttgattgcctgccttcatgtggtttctgagctcac

SEQ ID NO: 558316 - DNA, 120 bp, Artificial Sequence
  ENSG00000169223_15 (sequence is synthesized)
ctggctgtgttcctcctcctcctttcttctgtaaatggcctgtccgggcctcagttcctgtggtttctgggctcacctggctgtgttcctcctcctcctttcttctgtaaatggcctgtc

SEQ ID NO: 558317 - DNA, 120 bp, Artificial Sequence
  ENSG00000169223_16 (sequence is synthesized)
gactgcggatataactgacggcaacagtgaacatctcaagcgggagcattcgctcattaagccctaccaaggtgaagcccttggggcgggaatgagtgaagagtgagggcgaggctgaac

SEQ ID NO: 558318 - DNA, 120 bp, Artificial Sequence
  ENSG00000169223_17 (sequence is synthesized)
agggctaggggaaggcgtgccctttctcctgagcagagcatctctgtgggtttcctgcctctggtgaggccagtcctggcgtggcctcttagcacctgtctcttcccacaggggtcggtt

SEQ ID NO: 558319 - DNA, 120 bp, Artificial Sequence
  ENSG00000169223_18 (sequence is synthesized)
ccccaatgatgagaccactgagcatcgactggaccaagatcgagcccagcgtcaacttcctcaagtcgcccaaagacaacgtggacgaccccacggggaacttccgcagcgggcccctga

SEQ ID NO: 558320 - DNA, 120 bp, Artificial Sequence
  ENSG00000169224_0 (sequence is synthesized)
agaacttccccaagtggagtgaaactcaggagctgagaaaccgagtcactgtgaaaagatgggaaattatctcctgcgaaaactcagttgcctgggagagaatcaaaagaagcccaagaa

SEQ ID NO: 558321 - DNA, 120 bp, Artificial Sequence
  ENSG00000169224_1 (sequence is synthesized)
aggaaacccagatgaggaaagaaaacggcaggaaatgactacatttgaaagaaaacttcaagatcaagataagaaaagccaagaagtttcatccacttctaatcaggaaaacgagaatgg

SEQ ID NO: 558322 - DNA, 120 bp, Artificial Sequence
  ENSG00000169224_2 (sequence is synthesized)
cagtggttctgaagaagtgtgctacactgtcattaatcacatcccccatcagagatcctccctgagctccaatgatgatggctatgagaacattgactccctcacaaggaaagtgagaca

SEQ ID NO: 558323 - DNA, 120 bp, Artificial Sequence
  ENSG00000169224_3 (sequence is synthesized)
gtttagagaaaggtcagagacagaatatgcccttcttaggacttctgttagtaggccttgttcctgcacccatgagcatgattatgaagttgtgtttccacactaaaatcctcaagctgc

SEQ ID NO: 558324 - DNA, 120 bp, Artificial Sequence
  ENSG00000169224_4 (sequence is synthesized)
tttatcaccttccagcaatgaagacaatgcagaatagcagactctggcgaagttgttcaccctgagcagtgcatgaaacattcctttctggctaaagtttagaaatattatcttattata

SEQ ID NO: 558325 - DNA, 120 bp, Artificial Sequence
  ENSG00000169224_5 (sequence is synthesized)
tatccttaggcaactctgatatgtggcatctctgtggcttaggtgaaatcatagaaattgacacaatgacctaaaatattctatgtgtttttgcttgtaaagtttgaggacatggaggtg

SEQ ID NO: 558326 - DNA, 120 bp, Artificial Sequence
  ENSG00000169224_6 (sequence is synthesized)
ataaaaaaaactttcttaggacaataatgtaaaatgaaaataaatttctaatccccctgactaactgaatggaccctcttctaggccaaagagacctcagatgaacctgaaagactgaat

SEQ ID NO: 558327 - DNA, 120 bp, Artificial Sequence
  ENSG00000169224_7 (sequence is synthesized)
tctggccatgataggaagggaggtgagacacaccttgttataccccttcccttttggagtttatgcacaagtgaccaggatgagtcataagactgatgaaatagactgattgtggcaata

SEQ ID NO: 558328 - DNA, 120 bp, Artificial Sequence
  ENSG00000169224_8 (sequence is synthesized)
agagtcccaattccaacctgactctggtgtagatcacacactgtctgagggattccatctatgagactttgtctacataacagagaccttggtttccacaacccctttattttagctaaa

SEQ ID NO: 558329 - DNA, 120 bp, Artificial Sequence
  ENSG00000169224_9 (sequence is synthesized)
gcattcttttctactgacttcttaagtctttagacaaagcttaactctttcaaccaattgccaatcagacaaactttgaatctacctatgacctgtaagctctctcctgcttcaagatct

SEQ ID NO: 558330 - DNA, 120 bp, Artificial Sequence
  ENSG00000169224_10 (sequence is synthesized)
tgcctctttaagctgaaccgatgtgcactttccatttaatgatttatgtctttgcttgtaactcctgtctccctaaaatgtataaaagtaaacggtgacctgaccacctcaggcacactt

SEQ ID NO: 558331 - DNA, 120 bp, Artificial Sequence
  ENSG00000169224_11 (sequence is synthesized)
tctcaggacctcctgagagtgtatcccaggccatggtaagtcatgttggctcagaatcaacctctttaaatattttacagaatttgggttttggttaccaataagtctccacaaatatat

SEQ ID NO: 558332 - DNA, 120 bp, Artificial Sequence
  ENSG00000169224_12 (sequence is synthesized)
gtccaagaatcttcaattccaagcctgctcaccaaatttcaaatgccaacatctccccatccaattacctatttcatctttgaggtgtaatctactcaataaactgtgtaagaccagtga

SEQ ID NO: 558333 - DNA, 120 bp, Artificial Sequence
  ENSG00000169224_13 (sequence is synthesized)
ccagaccctttgctaacctgacatttacttcaatttttctttttctatgtactggatatttttgcatataaacttgcagtaatagttcaaaaattaatagtttttgacattggcttttct

SEQ ID NO: 558334 - DNA, 120 bp, Artificial Sequence
  ENSG00000169224_14 (sequence is synthesized)
gagaagagaaattgaaagtgtcacaaaataaaaaaagatgaaatgaagcatatataattgtcaattttttcaattttctagccaacagagaatcgaaggattctgttcaaatattagtaa

SEQ ID NO: 558335 - DNA, 120 bp, Artificial Sequence
  ENSG00000169224_15 (sequence is synthesized)
acctgtgactagttatctctaccgaaggtggatgtgtagtttctggttttaaaattcaagcaaactggaaaataatccatctaattatgctttctttcccaagaagttttttaatgatat

SEQ ID NO: 558336 - DNA, 120 bp, Artificial Sequence
  ENSG00000169224_16 (sequence is synthesized)
gccagcttcctaatttggagacaaaagccttaattgacaatgcattcattatatatttttttgtatagttacagtatacgagttgagtatcccttagatgagatgcttgggaccagaagt

SEQ ID NO: 558337 - DNA, 120 bp, Artificial Sequence
  ENSG00000169224_17 (sequence is synthesized)
gttttggatttcagatttatttttggattttggaatatttccatacatataatgagagagttggaaaatgggattcaagtctaatcataaaattcacttatgtttgatatacaccttatc

SEQ ID NO: 558338 - DNA, 120 bp, Artificial Sequence
  ENSG00000169224_18 (sequence is synthesized)
aattttatacaatattttaaataattttatgcctgaaacagagtttgcgcacattggaccatcagaaagcagaagtgtcactatttcaagtcagtgctcaaaaagtttcagatgttaagc

SEQ ID NO: 558339 - DNA, 120 bp, Artificial Sequence
  ENSG00000169224_19 (sequence is synthesized)
gtttcagatgttaagctggtgatgcagttcatgccagtgatccgagtactttgggaagccaagacaggtggatctcttgagcccaggagtttgaggccagactgcacaacacagtgagac

SEQ ID NO: 558340 - DNA, 81 bp, Artificial Sequence
  ENSG00000169224_20 (sequence is synthesized)
tagtaggattgtttgagactgggaggttgaggctgaactgagccaggatcttgccaccacattccagcttgggcaacagag

SEQ ID NO: 558341 - DNA, 120 bp, Artificial Sequence
  ENSG00000169224_21 (sequence is synthesized)
tgagaccctgtctcaaaaaaaaaaaaagtttcagattttggagcatttcagatcttcagattagggattttcaacctgtactgaccttttagtcattgacaagcattaatcaataggtgg

SEQ ID NO: 558342 - DNA, 120 bp, Artificial Sequence
  ENSG00000169224_22 (sequence is synthesized)
ctgaccttttagtcattgacaagcattaatcaataggtggactccagataactcatttgctgtatacacattttgcctctctattcaacgaattcttatgccctcttgtggtgattttaa

SEQ ID NO: 558343 - DNA, 120 bp, Artificial Sequence
  ENSG00000169224_23 (sequence is synthesized)
tgtgcggaagggaaacaatagaaattttgcaattctagaaaagtcattctgtcaaaatatgtcagtcctgtagatattagccaattttaggaaaatgacaaaattttttacttttcgtct

SEQ ID NO: 558344 - DNA, 120 bp, Artificial Sequence
  ENSG00000169224_24 (sequence is synthesized)
gcctttgtagctgttttatgatataaataccttatttgtaataaaattaattttaatttgagtaacaatctggaattatcagagaaggggcaagcaataggttaataaacagtattgatt

SEQ ID NO: 558345 - DNA, 120 bp, Artificial Sequence
  ENSG00000169224_25 (sequence is synthesized)
ggtagaaggaacgttgaaatccaagagcatcaatgtcttctggtggttcaccataagccacagcagatgtcttaatctttccgagatctagtttttcagcaaagcaggatttaagaaatg

SEQ ID NO: 558346 - DNA, 120 bp, Artificial Sequence
  ENSG00000169224_26 (sequence is synthesized)
taactatcttatgtggttatgaagaacaatagaatcattgctgtataagtgctttttaacctgtaaattttgtgaagcttatcttttatgcatataaatatttgaacattttacattgtt

SEQ ID NO: 558347 - DNA, 120 bp, Artificial Sequence
  ENSG00000169224_27 (sequence is synthesized)
tatatttttaatcagttttactcaagtgtgattatatacaagaaaatgtaaccactgtaagggtagagttataagaattttgtcaaatgtattcacccatgtagtcacctccttatgaag

SEQ ID NO: 558348 - DNA, 120 bp, Artificial Sequence
  ENSG00000169224_28 (sequence is synthesized)
agacagaacacgtacatcctcccagaaagttccacagtgctccttttccctgagtttcaccagtcctggcaaccaatgatctgcttcgtataattataactgttctagatatttgtagca

SEQ ID NO: 558349 - DNA, 120 bp, Artificial Sequence
  ENSG00000169224_29 (sequence is synthesized)
atgtaccctttccatatttattttgtgtgtgtaaggcttcttttagtcattataatatttttgagattcatctatgtttaatgttctatcagtagttgtacatcttacttgtctcagcat

SEQ ID NO: 558350 - DNA, 120 bp, Artificial Sequence
  ENSG00000169224_30 (sequence is synthesized)
atcaccatatagatatactataatttgttaatctaatcactgatggatatgtaggatatttaagtttttgacattatgaataaagtggctataaatgaataaagcgactacaaatttgaa

SEQ ID NO: 558351 - DNA, 120 bp, Artificial Sequence
  ENSG00000169224_31 (sequence is synthesized)
tttccctttgataccctctgtttgtaacaatcccaatgccaacactgtcctgtttctacaagagacaatgacaaatatgagcctgaaggaagatgagctgatggcattcccagcttatta

SEQ ID NO: 558352 - DNA, 120 bp, Artificial Sequence
  ENSG00000169224_32 (sequence is synthesized)
ccactccttgggggccttatcttacatacatggattcaattcgtagattcagctgggatttactgcctcaagatggttatgttggaggattccaatagttctactggatgtggagccaga

SEQ ID NO: 558353 - DNA, 120 bp, Artificial Sequence
  ENSG00000169224_33 (sequence is synthesized)
ctcgtggttggcaagagcacgaacccgtggtcagatgcaacgtcctgcctcatgcattttcctcttggtgctttggtcagaacttccccaagtggagtgaaactcaggagctgagaaacc

SEQ ID NO: 558354 - DNA, 120 bp, Artificial Sequence
  ENSG00000169224_34 (sequence is synthesized)
ggccagatgaggacacagcaagcaggcagatggctgcgagctggaagggaagcgtcatcagaaaccaaccctgagggtaccttgatcttggacttccagtctccagaactgcccctggca

SEQ ID NO: 558355 - DNA, 120 bp, Artificial Sequence
  ENSG00000169224_35 (sequence is synthesized)
ttcccgcgcggctgccgccctttccacggtgacgccgtctgcactagcgccgcacccgcttcaactgcctgcaaccgccgctgaattccctcatccccacgctgagaggacgagaaaggc

SEQ ID NO: 558356 - DNA, 120 bp, Artificial Sequence
  ENSG00000169224_36 (sequence is synthesized)
cgggaggacatggaggtggactgactgccccatgtccttcaaagttaattgcaaaagagttcattgcaagagatgatgtgctggtggaaagatagatgctgctacttctttccttagtgg

SEQ ID NO: 558357 - DNA, 120 bp, Artificial Sequence
  ENSG00000169228_0 (sequence is synthesized)
ctctagccccctcccgcgggagtcgcggcgctgcgggtaggagccgggttgcgggagaccccaggttcggttgggattcccagccagaacggagcttaagccgggcaggcgagcgaatga

SEQ ID NO: 558358 - DNA, 120 bp, Artificial Sequence
  ENSG00000169228_1 (sequence is synthesized)
cggagtagcgagctgcacggcggcgtgctgcgctgttgaggacgctgtcccgcgcgctcccaggccgccccgaggcttggggtcttcgaaggataatcggcgcccggggccgaacagcgg

SEQ ID NO: 558359 - DNA, 120 bp, Artificial Sequence
  ENSG00000169228_2 (sequence is synthesized)
gggcacacggggcgctgccgaagtgcaaggccacggccagagctcgagcccgacgcgctgtctggagtcgtaggttggcgccgtttggggtcggggtctgaggcttgggcgctgcctggg

SEQ ID NO: 558360 - DNA, 120 bp, Artificial Sequence
  ENSG00000169228_3 (sequence is synthesized)
ccgagcggagatcggggtttgcctcccgtccccgctcaggaccctgacgtggctgaagcggccccgggagcatgagcgggcagcgcgtggacgtcaaggtggtgatgctgggcaaggagt

SEQ ID NO: 558361 - DNA, 120 bp, Artificial Sequence
  ENSG00000169228_4 (sequence is synthesized)
acgtgggcaagactagcctggtggagcgctacgtgcacgaccgctttctggtggggccttatcagaacaccatcggggccgccttcgtggccaaggtgatgtcggtcggagaccggactg

SEQ ID NO: 558362 - DNA, 120 bp, Artificial Sequence
  ENSG00000169228_5 (sequence is synthesized)
tgacattaggtatttgggacacagcaggctctgagcgctatgaggccatgagtagaatctactatcggggtgccaaggctgccatcgtctgctatgacctcacagacagcagcagctttg

SEQ ID NO: 558363 - DNA, 120 bp, Artificial Sequence
  ENSG00000169228_6 (sequence is synthesized)
gcgcagcctagaggagggctgccaaatctacttatgtggcaccaagagtgacctgctggaagaagaccggaggcgtcgacgtgtggacttccacgacgtccaggactatgcagacaatat

SEQ ID NO: 558364 - DNA, 120 bp, Artificial Sequence
  ENSG00000169228_7 (sequence is synthesized)
caaagctcagctctttgaaacatccagcaagacaggccagagtgtggacgagctcttccagaaagtggcagaggattacgtcagtgtggctgccttccaggtgatgacagaggacaaggg

SEQ ID NO: 558365 - DNA, 120 bp, Artificial Sequence
  ENSG00000169228_8 (sequence is synthesized)
cgtggatctgggccagaagccaaacccctacttctacagctgttgtcatcactgagtcagcactcacctggcctgggggaattaaaggaattccccgtaagggctggacccagctccttt

SEQ ID NO: 558366 - DNA, 120 bp, Artificial Sequence
  ENSG00000169228_9 (sequence is synthesized)
ctgggcttgggtagtcaaatgtctgagctaccccaggtcctcatgtcagcagagtggcgcctgcctgtgctggcccatggaacggagacagcattgggctgactgtgggcatgaggaggg

SEQ ID NO: 558367 - DNA, 120 bp, Artificial Sequence
  ENSG00000169228_10 (sequence is synthesized)
ataaggctgatttggaccccaggcttctgccctggacagcacttgtgtctgcagattatttaagtggcttttgatctgtaaataaaatcagtgcactgtgcatcacacccagcccctttc

SEQ ID NO: 558368 - DNA, 120 bp, Artificial Sequence
  ENSG00000169228_11 (sequence is synthesized)
cctgctgtgtggattaggtgtcaagacacctagttcttcctggggccacccggctggcctcactgcttatattaaggctcctcccaactctcattttcctttggaaaacaagactttttt

SEQ ID NO: 558369 - DNA, 120 bp, Artificial Sequence
  ENSG00000169228_12 (sequence is synthesized)
ccccatggttaccgctgagatactggggctgtagtagtataaaagctcacagttccttctgagtgctgaaaagagtgcatgagttgcttcgaaataaaagggtcaagcattcctacctga

SEQ ID NO: 558370 - DNA, 120 bp, Artificial Sequence
  ENSG00000169228_13 (sequence is synthesized)
gtctgggtggatcaaagaaaatagggactgccttggctgccagggcaaggtgctctaggaggtcttcctggcctccttgaactgtggggtccaggagactccctgaactgctagccctcc

SEQ ID NO: 558371 - DNA, 120 bp, Artificial Sequence
  ENSG00000169228_14 (sequence is synthesized)
gaccgctttctggtggggccttatcagaacgtgagtgcatccggaggggccaggcacggtgggcgggggagtggggggccggtaatctgcacctatggccccgatctcttccctctcgtt

SEQ ID NO: 558372 - DNA, 120 bp, Artificial Sequence
  ENSG00000169228_15 (sequence is synthesized)
ggaacatgcaggggcaccagaggaagctgaatagggcacagagggctgggtcactgggagatcccagggctactggcattgggccctcgctgatcatcatttttcctgccagacgagctc

SEQ ID NO: 558373 - DNA, 120 bp, Artificial Sequence
  ENSG00000169230_0 (sequence is synthesized)
cggcagctgcttgggcgcggtgcggtggtgactgagctacgagcctggcggcgggtgtgcgccgagccccggcccggcccggccctcgcgtgcctcccaggctccgcacccctgatgctg

SEQ ID NO: 558374 - DNA, 120 bp, Artificial Sequence
  ENSG00000169230_1 (sequence is synthesized)
ctcgcgtgcctcccaggctccgcacccctgatgctgcgcgggtgctgagcccgcttcggccgggacgatggtgaagtatttcctgggccagagcgtgctccggagttcctgggaccaagt

SEQ ID NO: 558375 - DNA, 120 bp, Artificial Sequence
  ENSG00000169230_2 (sequence is synthesized)
gttcgccgccttctggcagcggtacccgaatccctatagcaaacatgtcttgacggaagacatagtacaccgggaggtgacccctgaccagaaactgctgtcccggcgactcctgaccaa

SEQ ID NO: 558376 - DNA, 120 bp, Artificial Sequence
  ENSG00000169230_3 (sequence is synthesized)
gaccaacaggatgccacgctgggccgagcgactatttcctgccaatgttgctcactcggtgtacgtcctggaggactctattgtggacccacagaatcagaccatgactaccttcacctg

SEQ ID NO: 558377 - DNA, 120 bp, Artificial Sequence
  ENSG00000169230_4 (sequence is synthesized)
gaacatcaaccacgcccggctgatggtggtggaggaacgatgtgtttactgtgtgaactctgacaacagtggctggactgaaatccgccgggaagcctgggtctcctctagcttatttgg

SEQ ID NO: 558378 - DNA, 120 bp, Artificial Sequence
  ENSG00000169230_5 (sequence is synthesized)
gtcttgcccgattcaaaagcaacgtgaccaagactatgaagggttttgaatatatcttggctaagctgcaaggcgaggccccttccaaaacacttgttgagacagccaaggaagccaagg

SEQ ID NO: 558379 - DNA, 120 bp, Artificial Sequence
  ENSG00000169230_6 (sequence is synthesized)
agaaggcaaaggagacggcactggcagctacagagaaggccaaggacctcgccagcaaggcggccaccaagaagcagcagcagcagcaacagtttgtgtagccagtctaccaccaccaca

SEQ ID NO: 558380 - DNA, 120 bp, Artificial Sequence
  ENSG00000169230_7 (sequence is synthesized)
gcaccccagacagctaggcttagcctctctgccctcccttcattgtactttatcattaaaaatcaacttccagccctgtctgctgtctacgtggtgggttgtggggatgcagtttggcat

SEQ ID NO: 558381 - DNA, 120 bp, Artificial Sequence
  ENSG00000169230_8 (sequence is synthesized)
ctgcagtacaccaagcacatgattcatgtctgagccaggtctgcttattctcccattgggcagctgaggaccgaggcacagaggtgcggtgacttgcccggggctccaggtagcctgcag

SEQ ID NO: 558382 - DNA, 120 bp, Artificial Sequence
  ENSG00000169230_9 (sequence is synthesized)
gttaactggcggtaagtgctagactgtaagcccgacaagggcagggcttttggttttgttctctgatgtgtctcagtatctagcacataatagacactcaataaatacttgttgaattca

SEQ ID NO: 558383 - DNA, 120 bp, Artificial Sequence
  ENSG00000169230_10 (sequence is synthesized)
ctggaaggccctttgttgatctcaagagagagaccttttgccttctagtttaagagtcagaagagaggttttcgagagcaaaacgaccttatttatggcttcttgttctgtcagtgccac

SEQ ID NO: 558384 - DNA, 120 bp, Artificial Sequence
  ENSG00000169230_11 (sequence is synthesized)
ctttcggtgttggggctgggctggggtcagtgggcaactcagtatccttcccattctcatctcatgccaggaatttggtcttgcccgattcaaaagcaacgtgaccaagactatgaaggg

SEQ ID NO: 558385 - DNA, 120 bp, Artificial Sequence
  ENSG00000169231_0 (sequence is synthesized)
gtagtgagccggctgagaggcatggagacgcaggaacttcggggggccctggctcttctcctcctttgctttttcacatctgccagtcaggatctgcaggtaattgacctgctgactgtg

SEQ ID NO: 558386 - DNA, 120 bp, Artificial Sequence
  ENSG00000169231_1 (sequence is synthesized)
ggcgagtctcggcagatggtagctgtggcagagaagatccggacagccttgctcactgctggggacatctacctcttatccaccttccgcctgccccccaagcagggtggtgtcctcttt

SEQ ID NO: 558387 - DNA, 120 bp, Artificial Sequence
  ENSG00000169231_2 (sequence is synthesized)
ggcctctattctcgccaagacaacactcgatggctggaggcctctgttgtaggcaagatcaacaaagtactggtgcgataccagcgggaggatggcaaagtccacgccgtgaacctacag

SEQ ID NO: 558388 - DNA, 120 bp, Artificial Sequence
  ENSG00000169231_3 (sequence is synthesized)
caagcgggcctggctgatgggcgcacacacacagttctcctgcgactccgaggtccctccagacccagccctgccctacatctctacgtggactgcaaactgggtgaccaacatgcaggc

SEQ ID NO: 558389 - DNA, 120 bp, Artificial Sequence
  ENSG00000169231_4 (sequence is synthesized)
cttccagcactggcccccattcctccagcggaggtcgatgggctggagattaggactggacagaaggcgtatttgaggatgcagggctttgtggaatctatgaaaattattctgggtggg

SEQ ID NO: 558390 - DNA, 120 bp, Artificial Sequence
  ENSG00000169231_5 (sequence is synthesized)
tccatggcccgggtaggagccctgagtgagtgtccattccaaggggacgagtccatccacagtgcagtgaccaatgcactgcactccattctaggggagcagaccaaggcgctggtcacc

SEQ ID NO: 558391 - DNA, 120 bp, Artificial Sequence
  ENSG00000169231_6 (sequence is synthesized)
caactcaccctcttcaaccagatcctggtggagctgcgggatgatatacgagaccaggtgaaggaaatgtccctgatccgaaacaccattatggagtgtcaggtgtgcggcttccatgag

SEQ ID NO: 558392 - DNA, 120 bp, Artificial Sequence
  ENSG00000169231_7 (sequence is synthesized)
cagcgttcccactgcagccccaatccctgcttccgaggtgtggactgcatggaagtgtacgagtacccaggctaccgctgtgggccctgcccccctggcctgcagggcaacggcacccac

SEQ ID NO: 558393 - DNA, 120 bp, Artificial Sequence
  ENSG00000169231_8 (sequence is synthesized)
tgcagtgacatcaatgagtgtgctcacgctgacccctgtttcccgggctccagctgcatcaacaccatgcccggcttccactgtgaggcctgtcctcgagggtacaagggcacacaggtg

SEQ ID NO: 558394 - DNA, 120 bp, Artificial Sequence
  ENSG00000169231_9 (sequence is synthesized)
tctggtgtgggcattgactatgcccgggccagcaaacaggtctgcaatgacatcgatgaatgcaacgatggcaacaatggtggctgtgacccaaactccatctgcaccaacactgtgggc

SEQ ID NO: 558395 - DNA, 120 bp, Artificial Sequence
  ENSG00000169231_10 (sequence is synthesized)
tctttcaagtgtggtccctgccgcctgggtttcctgggcaaccagagccagggctgcctcccagcccggacctgccacagcccagcccacagcccctgccacatccatgctcactgtctc

SEQ ID NO: 558396 - DNA, 120 bp, Artificial Sequence
  ENSG00000169231_11 (sequence is synthesized)
tttgaacgcaatggtgcagtgtcctgccagtgtaacgtgggctgggctgggaatgggaacgtgtgtgggactgacacagacatcgatggctacccagaccaagcactgccctgcatggac

SEQ ID NO: 558397 - DNA, 120 bp, Artificial Sequence
  ENSG00000169231_12 (sequence is synthesized)
aacaacaaacactgcaaacaggacaactgccttttgacacccaactctgggcaggaagatgctgataatgatggtgtgggggaccagtgtgatgatgatgctgatggggatgggatcaag

SEQ ID NO: 558398 - DNA, 120 bp, Artificial Sequence
  ENSG00000169231_13 (sequence is synthesized)
tccccaacaaagaccagcagaactcagatacagattcatttggtgatgcctgtgacaattgccccaacgttcccaacaatgaccagaaggacacagatggcaatggggaaggagatgcct

SEQ ID NO: 558399 - DNA, 120 bp, Artificial Sequence
  ENSG00000169231_14 (sequence is synthesized)
gtgacaacgacgtggatggggatggcatccccaatggattggacaattgccctaaagtccccaacccactacagacagacagggatgaggacggggtgggagatgcttgcgacagctgcc

SEQ ID NO: 558400 - DNA, 120 bp, Artificial Sequence
  ENSG00000169231_15 (sequence is synthesized)
ctgaaatgagcaatcctacccagacagatgcagacagcgacctggtgggggatgtctgtgatactaatgaagacagcgatggggatgggcatcaggacaccaaggacaactgcccacagc

SEQ ID NO: 558401 - DNA, 120 bp, Artificial Sequence
  ENSG00000169231_16 (sequence is synthesized)
tgccaaatagctcccagctggactctgataacgatggacttggagatgagtgtgatggggatgatgacaatgatggcatcccagattatgtgcctcctggtcccgataactgccgcctgg

SEQ ID NO: 558402 - DNA, 120 bp, Artificial Sequence
  ENSG00000169231_17 (sequence is synthesized)
tacccaatcccaatcagaaggactcagatggcaatggcgttggtgatgtgtgtgaggatgactttgacaatgatgctgtggtcgaccccctggatgtgtgtcctgaaagtgcagaggtaa

SEQ ID NO: 558403 - DNA, 120 bp, Artificial Sequence
  ENSG00000169231_18 (sequence is synthesized)
cgcttacggattttcgggcctatcagaccgtcgtcctggatcctgagggtgatgctcagattgacccaaactgggttgtgctcaaccagggcatggaaatcgttcagaccatgaacagtg

SEQ ID NO: 558404 - DNA, 120 bp, Artificial Sequence
  ENSG00000169231_19 (sequence is synthesized)
accctggcttggcagttggatacacggccttcaatggtgtggactttgaaggcaccttccatgtgaacacagtgactgatgatgactacgcaggctttctcttcagttatcaagacagtg

SEQ ID NO: 558405 - DNA, 120 bp, Artificial Sequence
  ENSG00000169231_20 (sequence is synthesized)
gccgcttctacgtagtcatgtggaagcagaccgagcagacctactggcaggctacacccttccgggcggttgcccagcccgggctgcagctcaaggcagtgacatcagtgtctggcccag

SEQ ID NO: 558406 - DNA, 120 bp, Artificial Sequence
  ENSG00000169231_21 (sequence is synthesized)
gtgagcacctccgaaatgccctgtggcatactggccacacccctgatcaggtacgactgctgtggacagacccacgaaatgtgggctggcgggacaagacctcctatcgctggcagcttc

SEQ ID NO: 558407 - DNA, 120 bp, Artificial Sequence
  ENSG00000169231_22 (sequence is synthesized)
tgcaccggcctcaagttggctacattcgggtgaagctctatgagggaccccagcttgtggcggattctggggtgatcattgacacatccatgcgaggggggcgtcttggtgtattctgct

SEQ ID NO: 558408 - DNA, 120 bp, Artificial Sequence
  ENSG00000169231_23 (sequence is synthesized)
tctcccaagaaaacataatttggtccaatctccagtatcgatgcaatgacacagtgcctgaggactttgagccattccggaggcagctgctccagggaagggtgtgaggaggaggccacc

SEQ ID NO: 558409 - DNA, 120 bp, Artificial Sequence
  ENSG00000169231_24 (sequence is synthesized)
agattcagaattcagaattttagaccctttggccttggggtccatcctggagaccctgaggtctaagctacagcccctcagccaaccacagacccttctctggctcccaaaaggagttca

SEQ ID NO: 558410 - DNA, 120 bp, Artificial Sequence
  ENSG00000169231_25 (sequence is synthesized)
gtcccagaggggtggtcaccccacccttcaggggatgagaagttttcaaggggtattactcaggcactaaccccaggaaagatgacagcacattgccataaagttttggttgttttctaa

SEQ ID NO: 558411 - DNA, 120 bp, Artificial Sequence
  ENSG00000169231_26 (sequence is synthesized)
ctgggtagtgtgtgtggacaagggatcttggccttgtagaggccaggggcttctgggttggacatgggacccttgtgatgaatgggacatggatggctttgcatcggctttgggtctggg

SEQ ID NO: 558412 - DNA, 120 bp, Artificial Sequence
  ENSG00000169231_27 (sequence is synthesized)
cttaatgttgatgttcacagataaggccataccagtgtcctctgctgtatctgaggagacccaccataggtctggttccacccaaagtctgccccttcaggtctgcaatgacatcgatga

SEQ ID NO: 558413 - DNA, 120 bp, Artificial Sequence
  ENSG00000169231_28 (sequence is synthesized)
ggcaggaagatgctgataatgatggtgtgggggaccagtgtgatgatgatgctgatggggatgggatcaagaatgttgaggtgactcccagactgccctgccccttgaagctcctctccc

SEQ ID NO: 558414 - DNA, 120 bp, Artificial Sequence
  ENSG00000169231_29 (sequence is synthesized)
ctcctcctgtcctctctgtgcctcacttacctcatctggcagctctctagtaagggccaaatactccaaatcagggaggcaaaaacctcgtgcccaggacaaggaggctgggtgggtggg

SEQ ID NO: 558415 - DNA, 120 bp, Artificial Sequence
  ENSG00000169231_30 (sequence is synthesized)
actgtactgagcagtttgtccatcacaagggtgtgatcttagaaaaggatacagagacaaggtaggtgcaagatgacaagtgatttaggggagacctgacccttcccctcccacccctct

SEQ ID NO: 558416 - DNA, 120 bp, Artificial Sequence
  ENSG00000169231_31 (sequence is synthesized)
gtggactagagcctgggaagcgggtgacttcaccccccagcccattgtgcttattgtcatggcaacccaatcctcgcttggaatgcggctggtgctttgagatgcaaaaggagctggaca

SEQ ID NO: 558417 - DNA, 120 bp, Artificial Sequence
  ENSG00000169231_32 (sequence is synthesized)
aagagctaggggccccaggcctgagaaaagcaccccccttccctctccttcctgcctccctttccctccctcccttctctctcaggcctggtgagctcaaggggggctggggaaaagcaa

SEQ ID NO: 558418 - DNA, 120 bp, Artificial Sequence
  ENSG00000169231_33 (sequence is synthesized)
ggcccatccagaggtggcccacgtagcgggacagcgctgtcggcccggcgcgcctcggagagtcacggcgcctcgtccaagtggagccccgaacccctgaaggcgcggcaggctctggag

SEQ ID NO: 558419 - DNA, 120 bp, Artificial Sequence
  ENSG00000169231_34 (sequence is synthesized)
tgactgggaaccctcttacccagacatctggcttggaggccggctctctggggccccagggcattttcatgaccgccttgaatccctttcccacctgcacttaccgacctgttgtctccc

SEQ ID NO: 558420 - DNA, 120 bp, Artificial Sequence
  ENSG00000169239_0 (sequence is synthesized)
gtagcttcgatggccggacgtgcaggctgcggatccccgtaggcgagcgagcggctaggttcgtgatctggagagacgctcagattattaagttcctgcaacttaactgggaactgatca

SEQ ID NO: 558421 - DNA, 120 bp, Artificial Sequence
  ENSG00000169239_1 (sequence is synthesized)
agatttcaagctaaagatggtggtgatgaacagcctgagggtcattcttcaagcctctccaggcaaattgctgtggagaaagttccagattccgagattcatgccagcgaggccctgcag

SEQ ID NO: 558422 - DNA, 120 bp, Artificial Sequence
  ENSG00000169239_2 (sequence is synthesized)
cctctatacttgtacttacaaaacccggaaccgagccttgcatccactctgggagagcgtggacctggttcctgggggcgatcgccagtcacccatcaacattcggtggagggacagtgt

SEQ ID NO: 558423 - DNA, 120 bp, Artificial Sequence
  ENSG00000169239_3 (sequence is synthesized)
ttatgatcccggcttaaaaccactgaccatctcttatgacccagccacctgcctccacgtctggaataatgggtactctttcctcgtggaatttgaagattctacagataaatcagtgat

SEQ ID NO: 558424 - DNA, 120 bp, Artificial Sequence
  ENSG00000169239_4 (sequence is synthesized)
caagggaggacccctggaacacaactaccgattgaagcagttccattttcactggggggccatcgatgcctggggttctgagcacaccgtggacagcaaatgcttcccagcagagctgca

SEQ ID NO: 558425 - DNA, 120 bp, Artificial Sequence
  ENSG00000169239_5 (sequence is synthesized)
cttagtgcattggaacgcagtcagatttgaaaactttgaggatgcagcactggaagaaaatggtttggctgtgataggagtatttttaaagctaggcaaacatcataaggagctacagaa

SEQ ID NO: 558426 - DNA, 120 bp, Artificial Sequence
  ENSG00000169239_6 (sequence is synthesized)
attagtggatactttgccgtcaattaagcataaggacgcccttgtggaatttgggtcatttgacccttcctgcctgatgcctacctgcccagattactggacctactcagggtctctgac

SEQ ID NO: 558427 - DNA, 120 bp, Artificial Sequence
  ENSG00000169239_7 (sequence is synthesized)
taccccacccctctccgagtctgtcacctggatcattaagaagcaaccagtagaggttgatcatgatcagcttgagcaatttcggaccctgcttttcacttccgaaggggagaaagagaa

SEQ ID NO: 558428 - DNA, 120 bp, Artificial Sequence
  ENSG00000169239_8 (sequence is synthesized)
aagaatggtggacaacttccgcccccttcagccactgatgaatcgcactgttcgttcatccttccggcatgattatgtgctgaatgtacaagcgaaacccaagccggccaccagccaagc

SEQ ID NO: 558429 - DNA, 120 bp, Artificial Sequence
  ENSG00000169239_9 (sequence is synthesized)
aaccccctaaaacattcatatctaggcagtattttgcttttgctttaatatatactagcttactataaattgttaactagactattctaagtgcctgcatttgataatatttacagatgt

SEQ ID NO: 558430 - DNA, 120 bp, Artificial Sequence
  ENSG00000169239_10 (sequence is synthesized)
gcatttcttagcatgagagtgcttcatcagtctttgaggaaggctattcggtaccagcaagagacacaagtttctcttacagatacctgttggtaattgtaatgccttttttttttcttt

SEQ ID NO: 558431 - DNA, 120 bp, Artificial Sequence
  ENSG00000169239_11 (sequence is synthesized)
agatacctgttggtaattgtaatgccttttttttttctttaagagactaggtcttgctctgctgcccaggctagagtgcagtggccaaatgatagctcactgcagccttgaactcctagg

SEQ ID NO: 558432 - DNA, 120 bp, Artificial Sequence
  ENSG00000169239_12 (sequence is synthesized)
gctacaggtgctggccgcctggcccagcttgtaatatctttttatgtctgacatttttgagctatctttttatgtttatccattagtggttctatagcactatacatagggattataatc

SEQ ID NO: 558433 - DNA, 120 bp, Artificial Sequence
  ENSG00000169239_13 (sequence is synthesized)
aaaatttttaacatgtggtaaggcacagacactgaccagaactcaggccttgcagaaacagcctatgggcccagactggtacttcctggctgaatattggccatggttttagatgtattt

SEQ ID NO: 558434 - DNA, 120 bp, Artificial Sequence
  ENSG00000169239_14 (sequence is synthesized)
tattttataacatgaatgtgtattctttcataagggcttatcagtcagtatatttgccccagtgtttagttgttacaaggacatgatatgcttacttactatcagtttatgatgtagaaa

SEQ ID NO: 558435 - DNA, 120 bp, Artificial Sequence
  ENSG00000169239_15 (sequence is synthesized)
atatattttgtaattataagaaaacaagacttttcctatacccagaaatccctttgcatttccgaagatcagatattttgcttaaaggtctgatcatataggaaatatatgcagaacatt

SEQ ID NO: 558436 - DNA, 85 bp, Artificial Sequence
  ENSG00000169239_16 (sequence is synthesized)
cagcctggccaacatgatgaaaccctgtcactactacaaatatgccagctactcgggaagctgaggctggagaatcgcttgaacc

SEQ ID NO: 558437 - DNA, 84 bp, Artificial Sequence
  ENSG00000169239_17 (sequence is synthesized)
agtgagactctgtgtccttaaagtgcctagaacttagaattctttcattgcacatttccagaaatatttttcttttcttttttt

SEQ ID NO: 558438 - DNA, 120 bp, Artificial Sequence
  ENSG00000169239_18 (sequence is synthesized)
taatctaatagcctatagtttatattattattttgtattatttgcacgctgttacatagtatataatgataatgttttctacagtgaaagagctatcccgtcttccctttacaactgtct

SEQ ID NO: 558439 - DNA, 120 bp, Artificial Sequence
  ENSG00000169239_19 (sequence is synthesized)
gaactttatttactcattagtcaaggttctttgcaaggcaggtgattaacttaaatatctcagtttatacagtggtttaaaagacttttgttatggtaatagggagagaaacttgtcaga

SEQ ID NO: 558440 - DNA, 120 bp, Artificial Sequence
  ENSG00000169239_20 (sequence is synthesized)
taggctaaaatctagataattctacatattctgaggaattcatgctcctgtggctcttgcttataaatatcttggaatgtttctgaatgcctctaagcctatgttcagactctgttgcgt

SEQ ID NO: 558441 - DNA, 120 bp, Artificial Sequence
  ENSG00000169239_21 (sequence is synthesized)
caatgactggtagtatttctttcattaatatgtttgtcatctggtctgcaagatagggttggatgaatatacttaacactactgaactgtacacttaaagatcgttaggaaggaaacggg

SEQ ID NO: 558442 - DNA, 120 bp, Artificial Sequence
  ENSG00000169239_22 (sequence is synthesized)
actacatcaaacttaaaaatgtctgtgtgtcaaaggaagcaatcaacaaagtgaaaacgcaagctctagaatgagagaaaataattgcaaatcgtctatcttataaggagcccaaatcca

SEQ ID NO: 558443 - DNA, 120 bp, Artificial Sequence
  ENSG00000169239_23 (sequence is synthesized)
gaatatatgaggaacttctacaactcaacaacaaaaaaccaaataactcaatttttaaaaatgggcaaaggacttgcacagacatttctccaaagaagttatacaattggccaataagaa

SEQ ID NO: 558444 - DNA, 120 bp, Artificial Sequence
  ENSG00000169239_24 (sequence is synthesized)
attggggaggatgcagagaagttgaaacccttgtgcactgttggtggtaatgtaaaacggtgcagtcattacggaaaacagtacacaggtttcccaaataactgaaaacagaattaccat

SEQ ID NO: 558445 - DNA, 82 bp, Artificial Sequence
  ENSG00000169239_25 (sequence is synthesized)
gaggttctggaagcatcccaaatgtccatcaacagatgaatagataaaggaaatgtggtatatacagtcaatggaatattat

SEQ ID NO: 558446 - DNA, 120 bp, Artificial Sequence
  ENSG00000169239_26 (sequence is synthesized)
gataaaggaaatgtggtatatacagtcaatggaatattattcagcctttaaaaagaaggaaatcctgtcaaatgtacaatgtggatgaaccttgaaggcattatgccaagtgaaataagc

SEQ ID NO: 558447 - DNA, 120 bp, Artificial Sequence
  ENSG00000169239_27 (sequence is synthesized)
cagccaacaaaagaacaaatgctatatgattcctccatgtgaagtatgcaaagtagtcaaaatcatacaatagaaagtagaaaggtggttgccaagcaacggttgggggaaggggagagg

SEQ ID NO: 558448 - DNA, 120 bp, Artificial Sequence
  ENSG00000169239_28 (sequence is synthesized)
gtgaatttgtatttagtgggtacagagcttgtgttgcaagaattctagagatctgttgcaaaacaagtgtgattgtacttaacactactgaactgtatacgtataagtttgagaaatatc

SEQ ID NO: 558449 - DNA, 120 bp, Artificial Sequence
  ENSG00000169239_29 (sequence is synthesized)
tcttttaaaaagggggaaatgtgaaggcttttgcatgtatgccctaggaaatgcatagaattcttagaaaggtaaacatggtaaaaaaagaagtctttgttaactttctgcagttcacct

SEQ ID NO: 558450 - DNA, 120 bp, Artificial Sequence
  ENSG00000169239_30 (sequence is synthesized)
tgcagttcacctgtttcaaagtatagttacctttaaaagggtaaacacacaagatatgcattttccaaagcatacaggctttcctcctagctgtcttgttttttatttttttttattttt

SEQ ID NO: 558451 - DNA, 120 bp, Artificial Sequence
  ENSG00000169239_31 (sequence is synthesized)
gtgtgagccactgtgcctggccttcctagctgtcttgtgaaacgataagtcaaaaccctactgcagtgagttttccaaactgaagggagaagcaatgtacagaatgcctgacttgccctt

SEQ ID NO: 558452 - DNA, 120 bp, Artificial Sequence
  ENSG00000169239_32 (sequence is synthesized)
tgacttgcccttacatcttatacctggtgttctggcatgattattaaccacactctttttcactttgaaccatgtcctggtttgcatggccagcttccctgcagaggtgatagaaactga

SEQ ID NO: 558453 - DNA, 120 bp, Artificial Sequence
  ENSG00000169239_33 (sequence is synthesized)
cttgaggcagtttctttctccatgccttagttagatgaccctcaaaggggcacagcagatttccctggctactgatacaccttaacaagaagcttgtgttttttatgccctcaaaagtgt

SEQ ID NO: 558454 - DNA, 120 bp, Artificial Sequence
  ENSG00000169239_34 (sequence is synthesized)
tttacttatactttcctagacataaaggtggaaaatgggcctaaggtctgtcaaaggtcttggaaaagaagattgtattaaaattgctgtccgtcttcattaaataatactagatcgata

SEQ ID NO: 558455 - DNA, 120 bp, Artificial Sequence
  ENSG00000169239_35 (sequence is synthesized)
caatgctttctttacagtattagtggttggtgaaagacttccttcctattgttacagtatatgtatatatctgtaaaattaatgagatatcctttaacttgtagattagaaagcgactaa

SEQ ID NO: 558456 - DNA, 120 bp, Artificial Sequence
  ENSG00000169239_36 (sequence is synthesized)
aaactcataggggatttactaaagaagcaacaatgggaagaagcagccgatcctcctcagtgcacctttttctgttgcacagtacagtgcacagtgtgctggcatcaccatatagggcaa

SEQ ID NO: 558457 - DNA, 120 bp, Artificial Sequence
  ENSG00000169239_37 (sequence is synthesized)
gctgtgaccgcctttctcctttcccagggctacatggtgccaagcaggttcagtgtacactggttaccaacctgtctgattccattgtgacagaacacactcacacccaatacattacat

SEQ ID NO: 558458 - DNA, 120 bp, Artificial Sequence
  ENSG00000169239_38 (sequence is synthesized)
gaagcagatttattacttacagacaggaagcaagggacaaaagaggccctggctccattgtgagccagtcccccagggctcaagaaagctgcccagggcggggctgatggagtcttgatt

SEQ ID NO: 558459 - DNA, 120 bp, Artificial Sequence
  ENSG00000169239_39 (sequence is synthesized)
gtacgtgccccacttgcaccacagcctgccttgggttatataccataggagccacataactcattgggcaaagctttaaagtacatcctccttccaggggaaagaggaacacaacctcgc

SEQ ID NO: 558460 - DNA, 120 bp, Artificial Sequence
  ENSG00000169239_40 (sequence is synthesized)
tgtctcaaacagttccctaaatcaagatgttacattccctaggagggacaacaacaaggccaacctgtttcaggcagttcctccatatcaggatattgcattcccagtgcattctacagt

SEQ ID NO: 558461 - DNA, 120 bp, Artificial Sequence
  ENSG00000169239_41 (sequence is synthesized)
tattcttaagaactacaagcaaggaagaagggagaactgggtcagtccaaggccacctggagaactgtcttgtacatgggttagggtaaagttggctattctaaaactaagcatccgccc

SEQ ID NO: 558462 - DNA, 120 bp, Artificial Sequence
  ENSG00000169239_42 (sequence is synthesized)
aaaagaagtcttggaagatgtctttccctgttaaattcagatgatggtaattatagtttggaagtggaattggcttttagagttacttcctgtaatgaaattaacaagcaattcaggcct

SEQ ID NO: 558463 - DNA, 120 bp, Artificial Sequence
  ENSG00000169239_43 (sequence is synthesized)
atttctgaaaatgaattcagtggttaattgttaaaaataaatgtctaactcctataaaaggaaatttacattcatttctaactcactaaaaaatctatggccgggtgcggtggctcatgc

SEQ ID NO: 558464 - DNA, 72 bp, Artificial Sequence
  ENSG00000169239_44 (sequence is synthesized)
gctgaggcatcttagaaggaattgttacttattgttctgaagtgaaagtctggtctgattcagaagaaatgt

SEQ ID NO: 558465 - DNA, 120 bp, Artificial Sequence
  ENSG00000169239_45 (sequence is synthesized)
tgttctgaagtgaaagtctggtctgattcagaagaaatgttacaacaacttaaacactgatgctttcagaacgggcagcaattctcagcgtaaattctgatcacagggaccagcaaaatt

SEQ ID NO: 558466 - DNA, 120 bp, Artificial Sequence
  ENSG00000169239_46 (sequence is synthesized)
ggtgagttgcatagctacaacattctgtgccatccagggcactctagtttggggatacaactgccaaacctccaactagagagtttagtttaagatttagtcaagaagcagaaaggtaaa

SEQ ID NO: 558467 - DNA, 120 bp, Artificial Sequence
  ENSG00000169239_47 (sequence is synthesized)
ggtgacaatgtgtagtaaaccatgatagatgttataaaaggtggaatacttgtactggaaatgcatacagcgcctcatcccctcttgaggggtcaggaagttttcacactaatgatgatg

SEQ ID NO: 558468 - DNA, 120 bp, Artificial Sequence
  ENSG00000169239_48 (sequence is synthesized)
gtgatgagatgatgtaacagctaaagttttggaggcattcactattgctaggcactgtatcagcatataacatggcttatcttactcagttttcacaataaaagggttatgagatgggaa

SEQ ID NO: 558469 - DNA, 120 bp, Artificial Sequence
  ENSG00000169239_49 (sequence is synthesized)
ccatccatggtacttctaaaggacagggaaatggaccaccccaaactgatgtacattggttctgctcatcacacttgggggtctcaacaggctgatctgtgttatcagcaagtctgctga

SEQ ID NO: 558470 - DNA, 120 bp, Artificial Sequence
  ENSG00000169239_50 (sequence is synthesized)
tacttatcagggacttgctacagagacctggtgcttgactctggaagaaaatcagcatcagcaatgtcttcagtgcctgtggaggataaattatatgtgtacaccttaatagataatctc

SEQ ID NO: 558471 - DNA, 120 bp, Artificial Sequence
  ENSG00000169239_51 (sequence is synthesized)
tgggaagtttaattaggtgaactgtattcagccttagaagaaaacttgccatttatgattccaggggacagaagtcatcattctgtgggtaggcagtgagctttctggttttgctgcagt

SEQ ID NO: 558472 - DNA, 120 bp, Artificial Sequence
  ENSG00000169239_52 (sequence is synthesized)
gccgctgaggacttggggactcaggaacatattgctgtcccctcctctgttcctgacaccggctccttctaagtccttgtgaacacacccagagcagccttctgttctgtagctgccatc

SEQ ID NO: 558473 - DNA, 120 bp, Artificial Sequence
  ENSG00000169239_53 (sequence is synthesized)
ccgtaggcgagcgagcggctaggttcgtgatctggagagacgctcagcacagtgctcgacatgagataatcactcactgttccttcagttcaggactggaaatcaatggaaaggaagaac

SEQ ID NO: 558474 - DNA, 120 bp, Artificial Sequence
  ENSG00000169239_54 (sequence is synthesized)
agtacaccacttccttaaagagaacaaaaagggctccagcctgagtgacagagtgaaatctcatctcttagaaaaaaagagaaaagaaaagagggagcaagtgtgcaagagcaaaaatac

SEQ ID NO: 558475 - DNA, 120 bp, Artificial Sequence
  ENSG00000169239_55 (sequence is synthesized)
tcatctttataataatcacacatgttaaacatttgtagctatgctgtctttggctttccagtgtaggattatatgccttatgaactgtgagaataactgtttctctgttgattcatgaaa

SEQ ID NO: 558476 - DNA, 120 bp, Artificial Sequence
  ENSG00000169239_56 (sequence is synthesized)
gtggtcttgtaaggagttaaagaaacagtgtcatgttaacagaggacacatcaaactctctccatgatagtattgacctctttgtgagcaatggcatggaactcattgatcttaactttt

SEQ ID NO: 558477 - DNA, 120 bp, Artificial Sequence
  ENSG00000169239_57 (sequence is synthesized)
tgactgtctggcactctgtgactgcctcttatttcctgtttattctttgctgctatttctccatgttgttgcaaaacaatcaatagcatgcaaagaggaaaaaaagagtgaatgaacata

SEQ ID NO: 558478 - DNA, 120 bp, Artificial Sequence
  ENSG00000169239_58 (sequence is synthesized)
aaaaataaaaagtgaaagaaagcaagacattttagaaacaaaggcaagaaacaattctagaaaagtaaaaacctaataaatatcgatgtctataaatttcaaagacaaaaccctaagaaa

SEQ ID NO: 558479 - DNA, 120 bp, Artificial Sequence
  ENSG00000169239_59 (sequence is synthesized)
ggaatttgaagattctacagataaatcagtggcactatcacaacagagtgacataatggtgggataacatggacacttgtcttcttccttactgtaatgggactatttctactccacata

SEQ ID NO: 558480 - DNA, 120 bp, Artificial Sequence
  ENSG00000169241_0 (sequence is synthesized)
aggtcccggcaaccgcaggctcgcggcgggcgctgggcgcgggatccgactctagtcgtaatggaggcgggcggctttctggactcgctcatttacggagcatgcgtggtcttcaccctt

SEQ ID NO: 558481 - DNA, 120 bp, Artificial Sequence
  ENSG00000169241_1 (sequence is synthesized)
ggcatgttctccgccggcctctcggacctcaggcacatgcgaatgacccggagtgtggacaacgtccagttcctgccctttctcaccacggaagtcaacaacctgggctggctgagttat

SEQ ID NO: 558482 - DNA, 120 bp, Artificial Sequence
  ENSG00000169241_2 (sequence is synthesized)
ggggctttgaagggagacgggatcctcatcgtcgtcaacacagtgggtgctgcgcttcagaccctgtatatcttggcatatctgcattactgccctcggaagcgtgttgtgctcctacag

SEQ ID NO: 558483 - DNA, 120 bp, Artificial Sequence
  ENSG00000169241_3 (sequence is synthesized)
actgcaaccctgctaggggtccttctcctgggttatggctacttttggctcctggtacccaaccctgaggcccggcttcagcagttgggcctcttctgcagtgtcttcaccatcagcatg

SEQ ID NO: 558484 - DNA, 120 bp, Artificial Sequence
  ENSG00000169241_4 (sequence is synthesized)
tacctctcaccactggctgacttggctaaggtgattcaaactaaatcaacccaatgtctctcctacccactcaccattgctacccttctcacctctgcctcctggtgcctctatgggttt

SEQ ID NO: 558485 - DNA, 120 bp, Artificial Sequence
  ENSG00000169241_5 (sequence is synthesized)
caggaactactggctcctgcaaacctgaggctgctcatctgaccactgggcaccttagtgccaacctgaaccaaagagacctccttgtttcagctgggcctgctgtccagcttcccaggt

SEQ ID NO: 558486 - DNA, 120 bp, Artificial Sequence
  ENSG00000169241_6 (sequence is synthesized)
gcagtgggttgtgggaacaagagatgactttgaggataaaaggaccaaagaaaaagctttacttagatgattgattggggcctaggagatgaaatcactttttattttttagagattttt

SEQ ID NO: 558487 - DNA, 83 bp, Artificial Sequence
  ENSG00000169241_7 (sequence is synthesized)
cctaggagatgaaatcactttttattttttagagatttttttttttaattttggaggttggggtgcaatctttagaatatgcc

SEQ ID NO: 558488 - DNA, 65 bp, Artificial Sequence
  ENSG00000169241_8 (sequence is synthesized)
gatatgaatatgccttatatgctgatatgaatatgccttaaaataaagtgttccccacccctgcc

SEQ ID NO: 558489 - DNA, 120 bp, Artificial Sequence
  ENSG00000169241_9 (sequence is synthesized)
aaaagaggaaggcttggtgattcctggtaatgtgttattttgagaaaaagcttcggcagcacactccagaaaaaaacttcccaaaccctgggcaactgaggttctgatgtggagctctgg

SEQ ID NO: 558490 - DNA, 120 bp, Artificial Sequence
  ENSG00000169241_10 (sequence is synthesized)
atggaaagcgtgctgaagtcttgttaaactagcaagcttttgtttggaggtccaccgccgaaggcgcacaggcctgtgggaacacgagcgttgagactgggggcgtctagatgatccaag

SEQ ID NO: 558491 - DNA, 65 bp, Artificial Sequence
  ENSG00000169241_11 (sequence is synthesized)
gaaaggctaccagagggaggtgggggcggggcaggaggagcaagagtgaaagagacgggcggatc

SEQ ID NO: 558492 - DNA, 120 bp, Artificial Sequence
  ENSG00000169241_12 (sequence is synthesized)
acactatttcctagaagactgtaacagctggcactgccaccttttccaggaaggcctctccagccttgcaggtccccttcctctatgaagccagccttctgagatgaacacattgccccc

SEQ ID NO: 558493 - DNA, 120 bp, Artificial Sequence
  ENSG00000169242_0 (sequence is synthesized)
agatctgtgagcccagcgctgactgcgccgcggagaaagccagtgggaacccagacccataggagacccgcgtccccgctcggcctggccaggccccgcgctatggagttcctctgggcc

SEQ ID NO: 558494 - DNA, 120 bp, Artificial Sequence
  ENSG00000169242_1 (sequence is synthesized)
cctctcttgggtctgtgctgcagtctggccgctgctgatcgccacaccgtcttctggaacagttcaaatcccaagttccggaatgaggactacaccatacatgtgcagctgaatgactac

SEQ ID NO: 558495 - DNA, 120 bp, Artificial Sequence
  ENSG00000169242_2 (sequence is synthesized)
gtggacatcatctgtccgcactatgaagatcactctgtggcagacgctgccatggagcagtacatactgtacctggtggagcatgaggagtaccagctgtgccagccccagtccaaggac

SEQ ID NO: 558496 - DNA, 120 bp, Artificial Sequence
  ENSG00000169242_3 (sequence is synthesized)
caagtccgctggcagtgcaaccggcccagtgccaagcatggcccggagaagctgtctgagaagttccagcgcttcacacctttcaccctgggcaaggagttcaaagaaggacacagctac

SEQ ID NO: 558497 - DNA, 120 bp, Artificial Sequence
  ENSG00000169242_4 (sequence is synthesized)
tactacatctccaaacccatccaccagcatgaagaccgctgcttgaggttgaaggtgactgtcagtggcaaaatcactcacagtcctcaggcccatgacaatccacaggagaagagactt

SEQ ID NO: 558498 - DNA, 120 bp, Artificial Sequence
  ENSG00000169242_5 (sequence is synthesized)
gcagcagatgacccagaggtgcgggttctacatagcatcggtcacagtgctgccccacgcctcttcccacttgcctggactgtgctgctccttccacttctgctgctgcaaaccccgtga

SEQ ID NO: 558499 - DNA, 120 bp, Artificial Sequence
  ENSG00000169242_6 (sequence is synthesized)
cacaggcataagctatcacctagcagcctcaaaacgggtcagtattaaggttttcaaccggaaggaggccaaccagcccgacagtgccatccccaccttcacctcggagggatggagaaa

SEQ ID NO: 558500 - DNA, 120 bp, Artificial Sequence
  ENSG00000169242_7 (sequence is synthesized)
gaagtggagacagtcctttcccaccattcctgcctttaagccaaagaaacaagctgtgcaggcatggtcccttaaggcacagtgggagctgagctggaaggggccacgtggatgggcaaa

SEQ ID NO: 558501 - DNA, 120 bp, Artificial Sequence
  ENSG00000169242_8 (sequence is synthesized)
gcttgtcaaagatgccccctccaggagagagccaggatgcccagatgaactgactgaaggaaaagcaagaaacagtttcttgcttggaagccaggtacaggagaggcagcatgcttgggc

SEQ ID NO: 558502 - DNA, 120 bp, Artificial Sequence
  ENSG00000169242_9 (sequence is synthesized)
tgacccagcatctcccagcaagacctcatctgtggagctgccacagagaagtttgtagccaggtactgcattctctcccatcctggggcagcactccccagagctgtgccagcagggggg

SEQ ID NO: 558503 - DNA, 120 bp, Artificial Sequence
  ENSG00000169242_10 (sequence is synthesized)
ctgtgccaacctgttcttagagtgtagctgtaagggcagtgcccatgtgtacattctgcctagagtgtagcctaaagggcagggcccacgtgtatagtatctgtatataagttgctgtgt

SEQ ID NO: 558504 - DNA, 120 bp, Artificial Sequence
  ENSG00000169242_11 (sequence is synthesized)
gtctgtcctgatttctacaactggagtttttttatacaatgttctttgtctcaaaataaagcaatgtgttttttcggacatgcttttctgccactccatattaaaacatatgaccattga

SEQ ID NO: 558505 - DNA, 120 bp, Artificial Sequence
  ENSG00000169242_12 (sequence is synthesized)
tacccaggactaaagagacgccagtccagagtagagtccgtaggcagccaagctgggcccagcgtgggggcaaatatgaggctacaatgaacggggtaggtgaggctggcatgggtgact

SEQ ID NO: 558506 - DNA, 120 bp, Artificial Sequence
  ENSG00000169242_13 (sequence is synthesized)
caggccagtgggcagcagccctgggatctccaggcctcaggcgggggcagcatgctgagaagggcgccagcctccctcatgctggagggcaggcccctcattctgacctgccagctccct

SEQ ID NO: 558507 - DNA, 120 bp, Artificial Sequence
  ENSG00000169242_14 (sequence is synthesized)
ttgtttggaggacactgttgggggtgagtgggcgctgtgccctcctggggtcctgggggctgtgcacatttgacaaggttccggaatgaggactacaccatacatgtgcagctgaatgac

SEQ ID NO: 558508 - DNA, 120 bp, Artificial Sequence
  ENSG00000169242_15 (sequence is synthesized)
tgggagttgaaacttcggaaaaatctcttggggtccagtgtgaaatgtgagaggtcatgtaaacattcagaggcccaaggatctggcctggcttctgaatgaccacctgcttcttccccc

SEQ ID NO: 558509 - DNA, 120 bp, Artificial Sequence
  ENSG00000169245_0 (sequence is synthesized)
gagacattcctcaattgcttagacatattctgagcctacagcagaggaacctccagtctcagcaccatgaatcaaactgccattctgatttgctgccttatctttctgactctaagtggc

SEQ ID NO: 558510 - DNA, 120 bp, Artificial Sequence
  ENSG00000169245_1 (sequence is synthesized)
attcaaggagtacctctctctagaactgtacgctgtacctgcatcagcattagtaatcaacctgttaatccaaggtctttagaaaaacttgaaattattcctgcaagccaattttgtcca

SEQ ID NO: 558511 - DNA, 120 bp, Artificial Sequence
  ENSG00000169245_2 (sequence is synthesized)
cgtgttgagatcattgctacaatgaaaaagaagggtgagaagagatgtctgaatccagaatcgaaggccatcaagaatttactgaaagcagttagcaaggaaaggtctaaaagatctcct

SEQ ID NO: 558512 - DNA, 120 bp, Artificial Sequence
  ENSG00000169245_3 (sequence is synthesized)
taaaaccagaggggagcaaaatcgatgcagtgcttccaaggatggaccacacagaggctgcctctcccatcacttccctacatggagtatatgtcaagccataattgttcttagtttgca

SEQ ID NO: 558513 - DNA, 120 bp, Artificial Sequence
  ENSG00000169245_4 (sequence is synthesized)
actctaccctggcactataatgtaagctctactgaggtgctatgttcttagtggatgttctgaccctgcttcaaatatttccctcacctttcccatcttccaagggtactaaggaatctt

SEQ ID NO: 558514 - DNA, 120 bp, Artificial Sequence
  ENSG00000169245_5 (sequence is synthesized)
tctgctttggggtttatcagaattctcagaatctcaaataactaaaaggtatgcaatcaaatctgctttttaaagaatgctctttacttcatggacttccactgccatcctcccaagggg

SEQ ID NO: 558515 - DNA, 120 bp, Artificial Sequence
  ENSG00000169245_6 (sequence is synthesized)
cccaaattctttcagtggctacctacatacaattccaaacacatacaggaaggtagaaatatctgaaaatgtatgtgtaagtattcttatttaatgaaagactgtacaaagtagaagtct

SEQ ID NO: 558516 - DNA, 120 bp, Artificial Sequence
  ENSG00000169245_7 (sequence is synthesized)
tagatgtatatatttcctatattgttttcagtgtacatggaataacatgtaattaagtactatgtatcaatgagtaacaggaaaattttaaaaatacagatagatatatgctctgcatgt

SEQ ID NO: 558517 - DNA, 120 bp, Artificial Sequence
  ENSG00000169245_8 (sequence is synthesized)
tacataagataaatgtgctgaatggttttcaaaataaaaatgaggtactctcctggaaatattaagaaagactatctaaatgttgaaagatcaaaaggttaataaagtaattataactaa

SEQ ID NO: 558518 - DNA, 89 bp, Artificial Sequence; identical to SEQ ID NO: 558026
  ENSG00000169246_0 (sequence is synthesized)

SEQ ID NO: 558519 - DNA, 83 bp, Artificial Sequence; identical to SEQ ID NO: 558027
  ENSG00000169246_1 (sequence is synthesized)

SEQ ID NO: 558520 - DNA, 120 bp, Artificial Sequence
  ENSG00000169246_2 (sequence is synthesized)
gggaacctcagaaatccattgaagttccattgttaagaagttctgtttgtttggcaactgctttaaacccgatagaacaagatcagaagtggcagtctataactgaaaatgtggtaaagt

SEQ ID NO: 558521 - DNA, 120 bp, Artificial Sequence
  ENSG00000169246_3 (sequence is synthesized)
acttgaagcaaacatcccgcatcgctattggacctctgagactttctactttaacagtttcacagtctttgccagttctaagtaccttgcagctgtattgctcgtctgctttggagacca

SEQ ID NO: 558522 - DNA, 120 bp, Artificial Sequence
  ENSG00000169246_4 (sequence is synthesized)
cagactttcaacagaggactgtcttattccactcttcggcgaagctttacgttcatgtaaacagcatgacgtgaggccgtggatgcaggcattaaggtttcaggcacagaactgtatatc

SEQ ID NO: 558523 - DNA, 78 bp, Artificial Sequence
  ENSG00000169246_5 (sequence is synthesized)
aggtggagtttgtcccagagccgcacaaaatcatcaccagcatgattaaacggagtagacttcagaaaaagcagtttg

SEQ ID NO: 558524 - DNA, 77 bp, Artificial Sequence
  ENSG00000169246_6 (sequence is synthesized)
atctcaagacacctcccgagtgtctactcactccccttccaccctcagctctgccgagtgtctgctccatccccttc

SEQ ID NO: 558525 - DNA, 85 bp, Artificial Sequence; identical to SEQ ID NO: 558028
  ENSG00000169246_7 (sequence is synthesized)

SEQ ID NO: 558526 - DNA, 61 bp, Artificial Sequence; identical to SEQ ID NO: 558029
  ENSG00000169246_8 (sequence is synthesized)

SEQ ID NO: 558527 - DNA, 78 bp, Artificial Sequence; identical to SEQ ID NO: 558030
  ENSG00000169246_9 (sequence is synthesized)

SEQ ID NO: 558528 - DNA, 65 bp, Artificial Sequence
  ENSG00000169246_10 (sequence is synthesized)
tttaaaggatgactgatggtccttggaagagaaacagtaaacaaataaggtatgatctcgtgaaa

SEQ ID NO: 558529 - DNA, 120 bp, Artificial Sequence
  ENSG00000169247_0 (sequence is synthesized)
agggaggaggcgggaggagggacaccgttgggaggctgtcccttgcagcactcttctggcctgtgttcccaagggcctcggccagggtaggatggtacacacatgggtggctgcttctgc

SEQ ID NO: 558530 - DNA, 120 bp, Artificial Sequence
  ENSG00000169247_1 (sequence is synthesized)
atccccagggagcggagtctgacccggggcccaggtaaagaaactccttccaaggatccaactgtatcgagtgagtgtatagcctcatctgaatacaaggaaaaatgttttctgccacag

SEQ ID NO: 558531 - DNA, 120 bp, Artificial Sequence
  ENSG00000169247_2 (sequence is synthesized)
aacattaatccagacctgacactctccttctgtgtaaagagccgctccaggaggtgtgtaaatggacccctacaggaagctgctcggaggcggctctgggcactggagaatgaggaccag

SEQ ID NO: 558532 - DNA, 120 bp, Artificial Sequence
  ENSG00000169247_3 (sequence is synthesized)
gaggtgcgcatgctgtttaaggacctctcagcaaggttggtcagtatccagtctcagagggcccagtttctcatcaccttcaagaccatggaggaaatctggaagttctccacctacctt

SEQ ID NO: 558533 - DNA, 120 bp, Artificial Sequence
  ENSG00000169247_4 (sequence is synthesized)
aatttaggctacgtatccatgtgtctagaacatctcctctttgaccacaagtactggctcaactgcatattggtggaggatacagagatccaagtgtctgtagatgataaacacctggaa

SEQ ID NO: 558534 - DNA, 120 bp, Artificial Sequence
  ENSG00000169247_5 (sequence is synthesized)
acaatatacctgggactcctgatacaggaaggccacttcttctgcagagccctgtgctccgtgactccaccagccgagaaggaaggggaatgcttgacactttgcaagaatgagttaatc

SEQ ID NO: 558535 - DNA, 120 bp, Artificial Sequence
  ENSG00000169247_6 (sequence is synthesized)
tcagtgaagatggcagaagctggctccgagttggaaggcgtgtctttggtgacaggtcagcggggcctggtactggtgtcagccttggagcctctgcctctccctttccaccagtggttc

SEQ ID NO: 558536 - DNA, 120 bp, Artificial Sequence
  ENSG00000169247_7 (sequence is synthesized)
ctaaagaattatccaggaagctgtggcctttccaggaagagggattggacaggctcctatcagattggcagaggacgctgtaaggccttgacgggttatgagccaggagaaaaggatgaa

SEQ ID NO: 558537 - DNA, 120 bp, Artificial Sequence
  ENSG00000169247_8 (sequence is synthesized)
ctgaatttctaccagggagaaagcattgagatcatcggctttgtcatacctgggcttcagtggttcattggaaagtcgacaagttcaggacaagtgggctttgtccccaccaggaacata

SEQ ID NO: 558538 - DNA, 120 bp, Artificial Sequence
  ENSG00000169247_9 (sequence is synthesized)
gatcctgattcttattccccaatgagcaggaactctgcctttctcagtgatgaggagagatgctccctgttggccctgggaagtgataagcagactgagtgttccagcttcctccacact

SEQ ID NO: 558539 - DNA, 120 bp, Artificial Sequence
  ENSG00000169247_10 (sequence is synthesized)
cttgctcgcactgacatcacatctgtctaccggctcagtgggtttgaatccatccagaatcctccaaatgatctgagtgcatcccagcctgaaggtttcaaggaggtcaggcctggcaga

SEQ ID NO: 558540 - DNA, 120 bp, Artificial Sequence
  ENSG00000169247_11 (sequence is synthesized)
gcctgggaggagcatcaggccgtggggtccagacagtccagcagctctgaggactccagcctggaggaggagctcctctcggccacctcagacagctatcgcctgccggagcctgatgac

SEQ ID NO: 558541 - DNA, 120 bp, Artificial Sequence
  ENSG00000169247_12 (sequence is synthesized)
cttgatgacccggaactgctcatggacctaagcactggtcaggaggaggaggctgagaacttcgcccccatattggcttttctggatcatgagggttatgctgaccactttaagagtctc

SEQ ID NO: 558542 - DNA, 120 bp, Artificial Sequence
  ENSG00000169247_13 (sequence is synthesized)
tatgacttctccttctctttcctcacttcttccttttatagcttctctgaggaggatgagtttgtggcctacctggaggcatcaagaaagtgggccaagaagagccacatgacctgggcc

SEQ ID NO: 558543 - DNA, 120 bp, Artificial Sequence
  ENSG00000169247_14 (sequence is synthesized)
catgcccgtctctgcttcctcctgggccggctgagcatcaggaaggtcaaactctctcaggccagggtgtacttcgaggaggccatccacattctcaatggagcatttgaggacctatcc

SEQ ID NO: 558544 - DNA, 120 bp, Artificial Sequence
  ENSG00000169247_15 (sequence is synthesized)
ttggtggccactctgtacatcaatttggctgccatctacctgaaacagaggctgagacataaaggctccgccctgttggaaaaggcaggtgccctgctggcctgcctgcctgaccgtgag

SEQ ID NO: 558545 - DNA, 120 bp, Artificial Sequence
  ENSG00000169247_16 (sequence is synthesized)
atccgcttgctcctgagcctaggccggcacgaggaggtcctgccctttgccgagcgcctgcagctcctctctggacaccctcctgcctctgaggctgtggccagtgttttgagttttctg

SEQ ID NO: 558546 - DNA, 120 bp, Artificial Sequence
  ENSG00000169247_17 (sequence is synthesized)
tatgacaagaaatatcttccacaccttgcagtggcctctgtccagcaacatggtatccagagtgcccaagggatgtctcttcctatttggcaggtccaccttgtcctccagaacacaacc

SEQ ID NO: 558547 - DNA, 120 bp, Artificial Sequence
  ENSG00000169247_18 (sequence is synthesized)
aagctccttggctttccttccccaggctggggtgaagtttctgccttggcctgcccaatgctcagacaggccctggctgcctgtgaggaactagcagaccggagcacccagagggccctg

SEQ ID NO: 558548 - DNA, 120 bp, Artificial Sequence
  ENSG00000169247_19 (sequence is synthesized)
tgtctcatcctttccaaagtgtacctcgagcacaggtctcctgacggtgccatccactacctgagccaggccttggtgctagggcagctgctgggtgagcaggaatcctttgagtcttct

SEQ ID NO: 558549 - DNA, 120 bp, Artificial Sequence
  ENSG00000169247_20 (sequence is synthesized)
ctctgcctggcatgggcctatctcttagccagccaggccaagaaggctttggatgtgcttgagccactgctatgctccctgaaggagacagagagtctcactcaaaggggagtcatctat

SEQ ID NO: 558550 - DNA, 120 bp, Artificial Sequence
  ENSG00000169247_21 (sequence is synthesized)
aacctcctgggacttgcactccaaggtgaaggccgggtgaacagggcagccaagagctatcttcgggccttgaacagagcccaggaggtgggagatgtgcataaccaggcagtggctatg

SEQ ID NO: 558551 - DNA, 120 bp, Artificial Sequence
  ENSG00000169247_22 (sequence is synthesized)
gccaatcttggccacctgagccttaagtcctgggctcagcatccagccagaaactatctcctgcaggctgtacgactctattgtgaacttcaggccagtaaggagacagacatggaatta

SEQ ID NO: 558552 - DNA, 120 bp, Artificial Sequence
  ENSG00000169247_23 (sequence is synthesized)
gtacaggtgtttctctggttggcccaagttctggtgtctggacaccagctgacccatggccttctttgttatgaaatggcattgctgtttggcttaaggcatcgacatctaaagagtcag

SEQ ID NO: 558553 - DNA, 120 bp, Artificial Sequence
  ENSG00000169247_24 (sequence is synthesized)
cttcaggccaccaaatccctctgccatttctacagctctgtgtccccaaaccctgaggcatgcatcacctaccatgagcactggctggccctggctcagcaactcagggaccgggagatg

SEQ ID NO: 558554 - DNA, 120 bp, Artificial Sequence
  ENSG00000169247_25 (sequence is synthesized)
gaagggaggctgctggagtccctggggcagctttatcggaacctaaataccgccaggtccctcaggaggtcactcacatgcatcaaggagagcctgcgtatcttcattgacctgggggag

SEQ ID NO: 558555 - DNA, 120 bp, Artificial Sequence
  ENSG00000169247_26 (sequence is synthesized)
acagacaaggctgctgaggcctggcttggggcggggcgactccactacctcatgcaggaagacgagctggtggagctgtgcctgcaggcagccatccagacagccctgaagtcagaggag

SEQ ID NO: 558556 - DNA, 120 bp, Artificial Sequence
  ENSG00000169247_27 (sequence is synthesized)
cctttgctggctctcaaactttatgaagaagcaggtgatgtgttcttcaatgggacccgccacaggcatcatgcagtggagtactaccgagctggagctgttcctttagcaaggaggttg

SEQ ID NO: 558557 - DNA, 120 bp, Artificial Sequence
  ENSG00000169247_28 (sequence is synthesized)
aaggcggtgagaactgagctccggattttcaataagctgacagagctgcagattagcctcgaaggctatgagaaggctttggaatttgccaccctggccgccaggctcagcacagtcaca

SEQ ID NO: 558558 - DNA, 120 bp, Artificial Sequence
  ENSG00000169247_29 (sequence is synthesized)
ggagatcagaggcaagagctggtggcctttcaccgcctggctacagtgtactactccctgcacatgtatgagatggctgaggactgctacctgaagaccctgtccctctgtccaccatgg

SEQ ID NO: 558559 - DNA, 120 bp, Artificial Sequence
  ENSG00000169247_30 (sequence is synthesized)
ctgcagagtcccaaggaggccctgtactatgccaaggtgtattatcgcctgggcagactcaccttctgccagctgaaggatgcccatgatgccactgagtacttccttctggccctggca

SEQ ID NO: 558560 - DNA, 120 bp, Artificial Sequence
  ENSG00000169247_31 (sequence is synthesized)
gcagcggtcctgctgggtgatgaggagcttcaggacaccattaggagcaggctggacaacatctgccagagccccctgtggcacagcaggccctccgggtgctcctcagagagggcgcgg

SEQ ID NO: 558561 - DNA, 120 bp, Artificial Sequence
  ENSG00000169247_32 (sequence is synthesized)
tggctgagtggtggtggcctggccctctgaggaaagctgtcctgtctctggacatttggcatggccagactctgaccccactgccctaggctcttaaatactcattgggagggtccgagt

SEQ ID NO: 558562 - DNA, 120 bp, Artificial Sequence
  ENSG00000169247_33 (sequence is synthesized)
tttctcctctgttgcccaggctggagttcagtggtacagtcagggcttcctgcgacctcagactccggggctcaagtgatcctccagtgtcaacctcctgagtagctggaactacagggc

SEQ ID NO: 558563 - DNA, 120 bp, Artificial Sequence
  ENSG00000169247_34 (sequence is synthesized)
agttgcaggctggcccagggcagacccaactgagggcaatggtccttagagctatggccaccctgacgtggatgcctggtgagaggcttgtgaacagagaagactaactgtggagatgct

SEQ ID NO: 558564 - DNA, 120 bp, Artificial Sequence
  ENSG00000169247_35 (sequence is synthesized)
gacccatttagcttttacctgtcccaggatggttggagatctctgggagagagagagaggtaatgaggactcagttttgaccaaggcaagatggcttcaaaaaaataacaaatgccttgg

SEQ ID NO: 558565 - DNA, 120 bp, Artificial Sequence
  ENSG00000169247_36 (sequence is synthesized)
caatgatttcttggacatgataccagaagcacaggcaacaaaagcaaaaacagatgagtaacactacatcaaactaaaaacttctgcacagcaaaggaaacaaccaacaaaatgagaagg

SEQ ID NO: 558566 - DNA, 120 bp, Artificial Sequence
  ENSG00000169247_37 (sequence is synthesized)
caacttacagaatggaagaaaatatttgagaaccatatatctggtaaaggcaaaagactcccaccggaagccaaccagatgtggctgcctaatcttggacttcccagtctccagaactgt

SEQ ID NO: 558567 - DNA, 120 bp, Artificial Sequence
  ENSG00000169247_38 (sequence is synthesized)
ccaatgacttggtgtgtttcttcaatatgaagattcatgtctttcttcaattctggaaaattttcagtccttcttcctttgaatattgcctctctctcgttctttttagtctctcttctg

SEQ ID NO: 558568 - DNA, 120 bp, Artificial Sequence
  ENSG00000169247_39 (sequence is synthesized)
agaagaatgaagtccaggaggagaagggctcattgcaggccacagaaagatttgatggtgcagcgatgagaattcctggttccaggctttgcatctggagcctttaccggttgactgttg

SEQ ID NO: 558569 - DNA, 120 bp, Artificial Sequence
  ENSG00000169247_40 (sequence is synthesized)
ccttccacacaaacagcctctgaaaagcactttctccatacataattctggagaagatgagggatcttgccctccaggagccttccttcctcccccaatgaggaaatcagtcactgcact

SEQ ID NO: 558570 - DNA, 120 bp, Artificial Sequence
  ENSG00000169247_41 (sequence is synthesized)
ggtgcaaaggcaagcagattggaatttgtgctcttcaccgattttctcagggaaagaccccttccccttgccagcagaggaacctgtagttttttccatttctttcttcagaaccaaagt

SEQ ID NO: 558571 - DNA, 120 bp, Artificial Sequence
  ENSG00000169247_42 (sequence is synthesized)
atgtatcactcctcatgctcacagggattgacaggagagaattcaccaggatcttagctcaaaagacacagcctcagaatggccagatggattgcacgaaacctgacttggattcaccat

SEQ ID NO: 558572 - DNA, 120 bp, Artificial Sequence
  ENSG00000169247_43 (sequence is synthesized)
cttcctcctgccataaggctgtgctcccacataacctcccagaagctccagggaagctttccaagagcaaaggcttggaaattgaatgttaagaaaattatgacataaattacatgtaaa

SEQ ID NO: 558573 - DNA, 120 bp, Artificial Sequence
  ENSG00000169247_44 (sequence is synthesized)
tagtgtatatgattaaatattgtccagttacatttacacacacattttgtctcatccacaatgggggcagatgagatggaggacttgatggatgggagagaataccaatacatgtctttt

SEQ ID NO: 558574 - DNA, 120 bp, Artificial Sequence
  ENSG00000169247_45 (sequence is synthesized)
ggcctaaaacacttataatctcatggtttctgaagggcaggaatccaagcatgacttagctgagcccaccagcttagggtggttcacaggctgcaatcagctggggctgcagttatctca

SEQ ID NO: 558575 - DNA, 120 bp, Artificial Sequence
  ENSG00000169247_46 (sequence is synthesized)
acttcaactagagaaggatgggcttccaagctcacccacacagctgttgttaggagtcagttttttgctagctgttggccagaggcttcctgcagccacttgccacgtgggcctctccac

SEQ ID NO: 558576 - DNA, 120 bp, Artificial Sequence
  ENSG00000169247_47 (sequence is synthesized)
agggcagtcacaacatggcaccatgcttcactagagggagcaaacaagaggagcaagaaccagagtgagcaggagaaaagggagtgactctttctataacctgatcacagaagtgacatc

SEQ ID NO: 558577 - DNA, 120 bp, Artificial Sequence
  ENSG00000169247_48 (sequence is synthesized)
tccttagtcttgcctattcaattcataataaatgagtcactaggtctagctcccacaagaggggagtgtttaccaacagcttgaataccagatggtgaggaatcattggggatcatttca

SEQ ID NO: 558578 - DNA, 120 bp, Artificial Sequence
  ENSG00000169247_49 (sequence is synthesized)
gaagtgacctaccacagtatctgagttctttgataatgaaattgggaattctctaatttcagcaaactgaaaatatggtccactaaccagcagcatcagcatcacctgtgagattgtttg

SEQ ID NO: 558579 - DNA, 120 bp, Artificial Sequence
  ENSG00000169247_50 (sequence is synthesized)
aaatgaaaatctgtggccccacctatgatctctgaatcagaatctctggatcccagaacgctgactcgtccaagctttcctggtgattttaatgcaccctaaagtatgggaagcaccact

SEQ ID NO: 558580 - DNA, 120 bp, Artificial Sequence
  ENSG00000169247_51 (sequence is synthesized)
gcagggcaagagccctcagatagtgtgcataactattacctggtgaggttgtggaacatgaacttcttggtttctatctctaataattctgattcagtagatctgggatgtatcccagga

SEQ ID NO: 558581 - DNA, 120 bp, Artificial Sequence
  ENSG00000169247_52 (sequence is synthesized)
acatgcatttttagaaagcaactcaagcaagcctgatgcaggtggttcacccttgctccttttctgtgaaccacaaggataccagccataattccctgcatctgatgcccatcagcttag

SEQ ID NO: 558582 - DNA, 120 bp, Artificial Sequence
  ENSG00000169247_53 (sequence is synthesized)
cttttattatcagaccatctgcccttaatttctagcttcttgggctgaccagatgattggttgtatgaaagggtgagatgggagtggtgagttgagccgccattgcatcttctagtcatc

SEQ ID NO: 558583 - DNA, 120 bp, Artificial Sequence
  ENSG00000169247_54 (sequence is synthesized)
aaggttgtctactaattggcacacattttctcttagagatgtggttggttgtcaaaaggctgtctactctagagagtattctccaggaaggagaagcttccagttgtctaattagtaaag

SEQ ID NO: 558584 - DNA, 120 bp, Artificial Sequence
  ENSG00000169247_55 (sequence is synthesized)
ttatctaatctactaccatggagaatagatgtggttttgcccccaccacaagctgtaaaagccccaagctgggagggacgttgcggttgaggctattcagtctaatctcccgtgcatagt

SEQ ID NO: 558585 - DNA, 120 bp, Artificial Sequence
  ENSG00000169247_56 (sequence is synthesized)
cctttcaacaacattcctgggagacagtcaggggcacacacattccagaacagttacatatcgtgtatttgaagaaggctcacacagccctggaaaccatgccactggccattccccatc

SEQ ID NO: 558586 - DNA, 120 bp, Artificial Sequence
  ENSG00000169247_57 (sequence is synthesized)
tgactcaggttacagatcccctcccttttcccactgaccactcactctcctctggccagatttgtttctgtttctctgaaagagcagttcccacaactgcatgaggcttttgatattggc

SEQ ID NO: 558587 - DNA, 120 bp, Artificial Sequence
  ENSG00000169247_58 (sequence is synthesized)
cggtgggtgaagagtacagagggatgttactatacttaatttgattcttcctctccccagcagccacatctgtccttggcttccattgagctttataatcagttgaaacttctgtgtctt

SEQ ID NO: 558588 - DNA, 120 bp, Artificial Sequence
  ENSG00000169247_59 (sequence is synthesized)
ctgacttgaacttctgtttggacagatctttctcaattgctgcaaatatgcacatgcatttgcatatgcatacacatacacacacatacgtgaagagcgttgtttctatccatgttacat

SEQ ID NO: 558589 - DNA, 120 bp, Artificial Sequence
  ENSG00000169247_60 (sequence is synthesized)
ctccttggaaattttagctaaaatttcccaattctgtgcactttgatttacctataaatctgatgaatttacccataaccaggtcagttataaaaatgtttagcatgtttccaaagacaa

SEQ ID NO: 558590 - DNA, 120 bp, Artificial Sequence
  ENSG00000169247_61 (sequence is synthesized)
gggtaagactatttttttaaaataagaaaaacattgtgctatataattgcaattactacattctatatgtaaaccgcttgctaaaactcttttaaaaagtgtttaaaattttcatttttg

SEQ ID NO: 558591 - DNA, 120 bp, Artificial Sequence
  ENSG00000169247_62 (sequence is synthesized)
aaatgtgggccagctattccctttggaaacatgttgatgctgtctttttttcatgatccacagagagtaaagtggtgattggatttggtctctacttaaacatttaaaaaaataagtgta

SEQ ID NO: 558592 - DNA, 120 bp, Artificial Sequence
  ENSG00000169247_63 (sequence is synthesized)
tcatagccaaacatgatctagttaccctctttattctaattgttccctcaaatcttatatgggctgtgtgactgctggctccttacatctaatctaaataaagaacaagaagggcattgc

SEQ ID NO: 558593 - DNA, 120 bp, Artificial Sequence
  ENSG00000169247_64 (sequence is synthesized)
tgctggagtccctggggcagctttatcggaacctaaataccgccaggtgagtcagggtcaggaactgtcctagaagcagctttccttccttaaggagaaacagtgttctttcccacagga

SEQ ID NO: 558594 - DNA, 120 bp, Artificial Sequence
  ENSG00000169247_65 (sequence is synthesized)
agcaagtccaaatgtacatggtataggcggggctttgtgcaaaagagcaagggctctgcagccaccacaatgcatccatcacttattagtggtgtagccttgggcaagctatttaatttc

SEQ ID NO: 558595 - DNA, 120 bp, Artificial Sequence
  ENSG00000169247_66 (sequence is synthesized)
tccatgtctcagtttcctcatcagccaaaggaagataataatggcatctatcttatagtgttattgtgaaggataaatgagttaatgctcataaaacactcataactgtgcctgatacat

SEQ ID NO: 558596 - DNA, 120 bp, Artificial Sequence
  ENSG00000169247_67 (sequence is synthesized)
agataggtctcagtaatgccactgttacttgtgtgtttctataaccacctgtcacaggatcatgactgaggctgcataattcagagaagtggcagttataccaaggacagaagaaccttc

SEQ ID NO: 558597 - DNA, 120 bp, Artificial Sequence
  ENSG00000169247_68 (sequence is synthesized)
aggaggtcttcattgccaagggcaactggttttaaagaaaggtcacccccactgaaagcaggggtgtaaaatgtcatggtaaaaaaaagttttatcgggaacttacctttaaaatgaaat

SEQ ID NO: 558598 - DNA, 120 bp, Artificial Sequence
  ENSG00000169247_69 (sequence is synthesized)
tgtagattatgaaatgaagtgtgttttcaccttttagttaagaatatttagattacaatttcaactttgcattaagtcttagaataaacatggaataaaaggagtgttgactttttggct

SEQ ID NO: 558599 - DNA, 120 bp, Artificial Sequence
  ENSG00000169247_70 (sequence is synthesized)
taattgtgctgacaaaatgatgtaacagcacaatggagcattctttgttttgtgattgattttttaggactaccttaaaaatcctcatttttgtaaaaataaatcaaaacttaacagttt

SEQ ID NO: 558600 - DNA, 120 bp, Artificial Sequence
  ENSG00000169247_71 (sequence is synthesized)
gcctgggcagactcaccttctgccagctgaagggtcttgctgtgtagcccaggctggagtagcatggctcaatcttggctcactacagcctctgcatctggggctcaagcaatccttcta

SEQ ID NO: 558601 - DNA, 120 bp, Artificial Sequence
  ENSG00000169247_72 (sequence is synthesized)
attatccatgtaacagccatagcacaatcctgggtacatggtaagtccttggtaagtgttgcctgtgccacactattattatattacaggtgctgttgttccccaagtgtaaagtaaatg

SEQ ID NO: 558602 - DNA, 120 bp, Artificial Sequence
  ENSG00000169247_73 (sequence is synthesized)
atattttattctcttcataagctatgttcccattgcaaaaggactgtgccctgaattttaaattagttaatttttagttaaaagtgcattttcccatgaagctaaaatgtaaatgaaggt

SEQ ID NO: 558603 - DNA, 120 bp, Artificial Sequence
  ENSG00000169247_74 (sequence is synthesized)
caggttcccattaccctaactcagaacatagctgaatatcttgtgtttatgtcaaaagctagtgggaaacaataatagtcatcagaacagataaatggcagaataaaaaagatttaaaaa

SEQ ID NO: 558604 - DNA, 120 bp, Artificial Sequence
  ENSG00000169247_75 (sequence is synthesized)
cccctcatcttgaatgttggtgtttgaagaaaagcaggtttgatagagaagccttgattagatgtaagggtaaatgtaatattctgtgatgattccaggagggtcttctgggcattttca

SEQ ID NO: 558605 - DNA, 120 bp, Artificial Sequence
  ENSG00000169247_76 (sequence is synthesized)
agggcatcgggtgtggatgataccggactttattttgtctaattgcattcttgagagagccttccctcttttccctacctttttccttattgcataggatctcatctgagtgactgtgtg

SEQ ID NO: 558606 - DNA, 120 bp, Artificial Sequence
  ENSG00000169247_77 (sequence is synthesized)
ctaatctcaggaaaggccttggaggccccaggcagttcctctgagcactctttatccctcactggatgggagctgaagggaggttgtatgcatcctttatataagtacttcccctgtggc

SEQ ID NO: 558607 - DNA, 120 bp, Artificial Sequence
  ENSG00000169247_78 (sequence is synthesized)
tgatttttccatatcagagaattttctctctcttagattttcttttttaattttggcttttggctctttgaagcttaaaagtgatgtttttagatggtatcccacagccaccttgcaaat

SEQ ID NO: 558608 - DNA, 120 bp, Artificial Sequence
  ENSG00000169247_79 (sequence is synthesized)
attccaaagacatgattgtaagcctttgttccctgtaaaagattgctctgtattaaaacaaatccaccaaacaacaagtcatagacccgttagaaaccagcattctaaagcatggtttaa

SEQ ID NO: 558609 - DNA, 120 bp, Artificial Sequence
  ENSG00000169247_80 (sequence is synthesized)
gtgtgaacaggtgtttgtagcttatctgagactgacagtaggtaaaggggccaaggagagactgctacatggtggtacccaagataattctctgaagagagagacttttgtgtgaggaag

SEQ ID NO: 558610 - DNA, 120 bp, Artificial Sequence
  ENSG00000169247_81 (sequence is synthesized)
acatttattatacagagtgatttattgcaattcttagctactccatcaagctagacttgtcaccatgtcccattaaaagggtttaagaagaattctttctcagaatcctgcattacagta

SEQ ID NO: 558611 - DNA, 120 bp, Artificial Sequence
  ENSG00000169247_82 (sequence is synthesized)
gcatctgcaataaggagaaaattttcttctgggaatcactccaggaaaccttgacccatcctctacttagtcactcttatagagccctgcattttcttttgtagcatttatgacatgtgt

SEQ ID NO: 558612 - DNA, 120 bp, Artificial Sequence
  ENSG00000169247_83 (sequence is synthesized)
catgtgagacaataagctttatgagtacaggcacctcttctgtcttatttcctatgccccagcacagtccctgacatctagtagaccttcaaaaagttttatggaatgaatgagtgaaca

SEQ ID NO: 558613 - DNA, 120 bp, Artificial Sequence
  ENSG00000169247_84 (sequence is synthesized)
agtctgctacaggatccctagcatctaagacagcatctggaacaaagtaggtcctcggaaaaaacatctaataggtagactgaatgaatgaaagattccgtgcacattctctgcacagga

SEQ ID NO: 558614 - DNA, 120 bp, Artificial Sequence
  ENSG00000169247_85 (sequence is synthesized)
gtggagaggagtgggcaggaactctgaatgaggcaacttggagttgctgagtcagagaaaatttggtttcaaatattctattagttgtgatctttgacaagttacttaacctatatagaa

SEQ ID NO: 558615 - DNA, 120 bp, Artificial Sequence
  ENSG00000169247_86 (sequence is synthesized)
tgggagttgttataatacctacctcattaagtatactttttttctaatgcggtaatttcaaattctttttttttactgtgatacaatatacataacataaaattttccattttaatcatt

SEQ ID NO: 558616 - DNA, 120 bp, Artificial Sequence
  ENSG00000169247_87 (sequence is synthesized)
ttttaagtgtatgattctctatgacactaagtacattcacaacctatccacctccagaactttttcatcatctcaaactgaaattccatatctattaaacaataactcccattatcccca

SEQ ID NO: 558617 - DNA, 120 bp, Artificial Sequence
  ENSG00000169247_88 (sequence is synthesized)
tgtctcagctcctggtaaccgctaagtatatatttttaaagtaccaagattgccaatcaaaaaacaataccttataaatacttgggtgagaggaggaaaaaaacaataaagtaaataaac

SEQ ID NO: 558618 - DNA, 120 bp, Artificial Sequence
  ENSG00000169247_89 (sequence is synthesized)
caatttctcatctttcatagtaggtagataatatcttcatttgttaaaaccaaggaagaatggtatgatcaaattatttacagtttaggatgtattaagtaggagaactaaagtcagaaa

SEQ ID NO: 558619 - DNA, 120 bp, Artificial Sequence
  ENSG00000169247_90 (sequence is synthesized)
tggaaaaaagttgtttcaactagaggtagggaaaggataatattactttacataaactaatatgttctagttactttttacagtttctgcatgaatctggtacaaactgaaggagaaaag

SEQ ID NO: 558620 - DNA, 120 bp, Artificial Sequence
  ENSG00000169247_91 (sequence is synthesized)
tgttctaaatgtcatgcagcaaaaaaagataatgtctggtttttcagggggaaaacgagattgtatgagtagagagcttggcattgtgtttggtgatatgtgttccataaacagtagcta

SEQ ID NO: 558621 - DNA, 120 bp, Artificial Sequence
  ENSG00000169247_92 (sequence is synthesized)
catttttttgaattttattttattttttttaatatctggaattcaggaactgggagacactggctgctattggtactgtagattttcctttattttgagtctcatttggtatggcaggag

SEQ ID NO: 558622 - DNA, 120 bp, Artificial Sequence
  ENSG00000169247_93 (sequence is synthesized)
cagggttgattgagagagctggtctgctgggctgaagcttgagtcagacatacttgtgggctacagttgaggcctggagtcagctagatctgaaatctaatcaaggctccgcagcttact

SEQ ID NO: 558623 - DNA, 120 bp, Artificial Sequence
  ENSG00000169247_94 (sequence is synthesized)
ccctgaaggtgaccttggacaatttacttaacctctctgtgccttggcccccttgaatatgcaacagggataatgccatttttcattagatctaagatgccattgattataaaatgcact

SEQ ID NO: 558624 - DNA, 120 bp, Artificial Sequence
  ENSG00000169247_95 (sequence is synthesized)
gttattttatgtacttccaagaaagaaaacaaatgctgccaattatggttgatgacatacttccttatcttttagttcagaagtggttaaatgtgataaaagcacattttggaatggccc

SEQ ID NO: 558625 - DNA, 120 bp, Artificial Sequence
  ENSG00000169247_96 (sequence is synthesized)
aaatactgtcattgcattctcttcatagcgcttttgtgggagttaaatgacatattgctcataaagctctgggtgaagtgccagggatgtagtaaattctctgtaagttgatttttacct

SEQ ID NO: 558626 - DNA, 120 bp, Artificial Sequence
  ENSG00000169247_97 (sequence is synthesized)
agcaccccttccctaatgatggatctggggcctcctggggtttggtatggcagaaggaaccccagagttctgattttactgaactggggcttttcttctggattcttctatcttcttctt

SEQ ID NO: 558627 - DNA, 120 bp, Artificial Sequence
  ENSG00000169247_98 (sequence is synthesized)
cctctaagtttccctcatgatagagctcctggagttggtactgatgacaggacctggcctggtggagggatgttctgaccgtcacttgttacagtcaactccggaggcttggacaaacaa

SEQ ID NO: 558628 - DNA, 120 bp, Artificial Sequence
  ENSG00000169247_99 (sequence is synthesized)
aaaacaaaacaaaagaaaacaaaaaaacccccaagaggcttatagtcttcctgtcactctccttgtgagcatgtaaattggaaagccttcctgggggacagttgggtgactgcattttag

SEQ ID NO: 558629 - DNA, 120 bp, Artificial Sequence
  ENSG00000169247_100 (sequence is synthesized)
gccttcctgggggacagttgggtgactgcattttaggattgaaaatgtgcatatccttgcatttccaattgcacctcttagaaatacatgtgttaaaacaattaagaatgtgcacaaaga

SEQ ID NO: 558630 - DNA, 120 bp, Artificial Sequence
  ENSG00000169247_101 (sequence is synthesized)
tttagctataaagatgtttatcacagtaccatttaggattttaaaaaatgtaaaacaatccaaacatgaaaccataagaaaatgataataattcattatgttaatgcaacaatggcacat

SEQ ID NO: 558631 - DNA, 120 bp, Artificial Sequence
  ENSG00000169247_102 (sequence is synthesized)
gtaaccattaagaatggtgtaaactttgtgatgacatagaagatgctttgcaaaatattgcttagcagcaaaagaagattgcaaaataatttatgcaatgtgattctatatatgtgaaat

SEQ ID NO: 558632 - DNA, 120 bp, Artificial Sequence
  ENSG00000169247_103 (sequence is synthesized)
agttatatggaaacttgtgtaggaaaaaagatgcaaatttattacatgaagatgttaacactgatgatctttaggagtagggactagggatgattatttttgtgtgttttggtttttctg

SEQ ID NO: 558633 - DNA, 120 bp, Artificial Sequence
  ENSG00000169247_104 (sequence is synthesized)
ttttcagctttgtattaataaaaataatcattagacatagactcataatcaaatttgctttcaagatgccttctatgaatcagcgtcctttatcctcccacatacacttttttttttaaa

SEQ ID NO: 558634 - DNA, 120 bp, Artificial Sequence
  ENSG00000169247_105 (sequence is synthesized)
cacaaaaagtagcattctttgcccatagttctattccctggcttcttttgctgctgccgctgtatagcagtattatatctggagcctatatcagtacacaaagagcttctttcttctttt

SEQ ID NO: 558635 - DNA, 120 bp, Artificial Sequence
  ENSG00000169247_106 (sequence is synthesized)
ctgtggctgcataatacaatatttcactttatggataaattgtactccattttaaccaatctcttattgatgaatatttaagttgtttccattttttggtgacgtaaaaatcaatgccat

SEQ ID NO: 558636 - DNA, 120 bp, Artificial Sequence
  ENSG00000169247_107 (sequence is synthesized)
aatcaagaagttcatacagagtatttggtctatataagagcttgctaatgggacacttctgtcatcccaggctgactcattgtttcctttacgtaggacctctcagcaaggttggtcagt

SEQ ID NO: 558637 - DNA, 120 bp, Artificial Sequence
  ENSG00000169247_108 (sequence is synthesized)
atccagtctcagagggcccagtttctcatcaccttcaagaccatggaggaaatctggaagttctccacctaccttaatttaggtatggtacaaggcaagcaggtggaggatgacctcctc

SEQ ID NO: 558638 - DNA, 120 bp, Artificial Sequence
  ENSG00000169247_109 (sequence is synthesized)
cacaatttagccaatttgtagggcttgacatgaaggaattggcctggctctggtaattaagagaaatagagccttaaaaaagatggttaacttttgaaatttcacaaagtgcctcaaact

SEQ ID NO: 558639 - DNA, 120 bp, Artificial Sequence
  ENSG00000169247_110 (sequence is synthesized)
aaatctaaggcaaatattaactattattctaaaatgccgtatgaagaagtttgcttttttgtgtccagggagatctttttttattagataaccaatcaattggaaaacagttattggtca

SEQ ID NO: 558640 - DNA, 120 bp, Artificial Sequence
  ENSG00000169247_111 (sequence is synthesized)
tctactaagttcaaagtactgaaatagatgtgaacttggtgctagtgtgtgtgttttaaactatagggaactaatcttgagtaagatcgaagtagctgctcaacatagtcaatagcaaag

SEQ ID NO: 558641 - DNA, 120 bp, Artificial Sequence
  ENSG00000169247_112 (sequence is synthesized)
ttccagatgttttattgcatgtatttggaaaagagttaaagaaagaaatagagaaattatctgcttatagcaacctaaggctgcagcgttttctagaaggtaaagaaggacattgggatg

SEQ ID NO: 558642 - DNA, 120 bp, Artificial Sequence
  ENSG00000169247_113 (sequence is synthesized)
cagcgtcagttccactgtggtgggaaatggttcacctgccttctccagacagaacaacttataatggggaagttaaagtgaagccaaacaaaacaacaggccacctaatttgatggatgt

SEQ ID NO: 558643 - DNA, 120 bp, Artificial Sequence
  ENSG00000169247_114 (sequence is synthesized)
tttatatctcccagaaaatgctgggctccatgccgacatacacaaggacagattttgtgcaggggtggagggtcaagatgactcatgactggaaaacataaggtgtatcttctcctctta

SEQ ID NO: 558644 - DNA, 120 bp, Artificial Sequence
  ENSG00000169247_115 (sequence is synthesized)
tggtctggagatctgatctccacactacacatctccttcctgaccatcagacatcctcactattcaaactgtgctccatagaccggctcgttggcagcacatagagtctgttaaaaaaaa

SEQ ID NO: 558645 - DNA, 120 bp, Artificial Sequence
  ENSG00000169247_116 (sequence is synthesized)
gtgtgtatgatccacaggcacttgttcttattgttgtttgtgtcattgccgttgttgtgggtggtgatcttgagaggcagttttaataggatattggggacagatgtcattttcataact

SEQ ID NO: 558646 - DNA, 120 bp, Artificial Sequence
  ENSG00000169247_117 (sequence is synthesized)
tatatttggacttctgcacctcacgctaatttacctcaaatgacacactctccagatatcagagctccttgaatcacagcaacagagggatgggttttgagctcagaggaatgacccaac

SEQ ID NO: 558647 - DNA, 120 bp, Artificial Sequence
  ENSG00000169247_118 (sequence is synthesized)
tccacgcaagcaagccgctgaagtctctgcacgctgccgtccgactggccactgggtgtcactcttgtctatgtttgctgggtgtcagggtctgagaagaaattcagcctttgctgaagt

SEQ ID NO: 558648 - DNA, 120 bp, Artificial Sequence
  ENSG00000169247_119 (sequence is synthesized)
atcgcctgggcagactcaccttctgccagctgaagggcagttgcaggctggcccagggcagacccaactgagggcaatggtccttagagctatggccaccctgacgtggatgcctggtga

SEQ ID NO: 558649 - DNA, 120 bp, Artificial Sequence
  ENSG00000169247_120 (sequence is synthesized)
ctgagtgttccagcttcctccacactcttgctcgcactgacatcacatctgtctaccggctcagtgggtttgaatccatccagaatcctccaaatgatctgagtggtgagtagcgatcat

SEQ ID NO: 558650 - DNA, 120 bp, Artificial Sequence
  ENSG00000169247_121 (sequence is synthesized)
gctgaacctgacattcatccttgaggacagcacttctgtcctcttgccaagagcggccaccttaggtgcaggtgcccaaggttgctcaactttgcctgtccttacagcatcccagcctga

SEQ ID NO: 558651 - DNA, 120 bp, Artificial Sequence
  ENSG00000169248_0 (sequence is synthesized)
gttcagcatttctactccttccaagaagagcagcaaagctgaagtagcagcagcagcaccagcagcaacagcaaaaaacaaacatgagtgtgaagggcatggctatagccttggctgtga

SEQ ID NO: 558652 - DNA, 120 bp, Artificial Sequence
  ENSG00000169248_1 (sequence is synthesized)
tattgtgtgctacagttgttcaaggcttccccatgttcaaaagaggacgctgtctttgcataggccctggggtaaaagcagtgaaagtggcagatattgagaaagcctccataatgtacc

SEQ ID NO: 558653 - DNA, 120 bp, Artificial Sequence
  ENSG00000169248_2 (sequence is synthesized)
caagtaacaactgtgacaaaatagaagtgattattaccctgaaagaaaataaaggacaacgatgcctaaatcccaaatcgaagcaagcaaggcttataatcaaaaaagttgaaagaaaga

SEQ ID NO: 558654 - DNA, 120 bp, Artificial Sequence
  ENSG00000169248_3 (sequence is synthesized)
atttttaaaaatatcaaaacatatgaagtcctggaaaagagcatctgaaaaacctagaacaagtttaactgtgactactgaaatgacaagaattctacagtaggaaactgagacttttct

SEQ ID NO: 558655 - DNA, 120 bp, Artificial Sequence
  ENSG00000169248_4 (sequence is synthesized)
atggttttgtgactttcaacttttgtacagttatgtgaaggatgaaaggtgggtgaaaggaccaaaaacagaaatacagtcttcctgaatgaatgacaatcagaattccactgcccaaag

SEQ ID NO: 558656 - DNA, 120 bp, Artificial Sequence
  ENSG00000169248_5 (sequence is synthesized)
gagtccaacaattaaatggatttctaggaaaagctaccttaagaaaggctggttaccatcggagtttacaaagtgctttcacgttcttacttgttgcattatacattcatgcatttctag

SEQ ID NO: 558657 - DNA, 120 bp, Artificial Sequence
  ENSG00000169248_6 (sequence is synthesized)
gttgtgactatgagaacatttctgtctctagaagtcatctgtctgtattgatctttatgctatattactatctgtggttacggtggagacattgacattattactggagtcaagccctta

SEQ ID NO: 558658 - DNA, 120 bp, Artificial Sequence
  ENSG00000169248_7 (sequence is synthesized)
taagtcaaaagcatctatgtgtcgtaaaacattcctcaaacattttttcatgcaaatacacacttctttccccaaacatcatgtagcacatcaatatgtagggagacattcttatgcatc

SEQ ID NO: 558659 - DNA, 120 bp, Artificial Sequence
  ENSG00000169248_8 (sequence is synthesized)
atttggtttgttttataaccaattcattaaatgtaattcataaaatgtactatgaaaaaaattatacgctatgggatactggcaaaagtgcacatatttcataaccaaattagtagcacc

SEQ ID NO: 558660 - DNA, 120 bp, Artificial Sequence
  ENSG00000169248_9 (sequence is synthesized)
agtcttaatttgatgtttttcaacttttattcattgagatgttttgaagcaattaggatatgtgtgtttactgtactttttgttttgatccgtttgtataaatgatagcaatatcttgga

SEQ ID NO: 558661 - DNA, 120 bp, Artificial Sequence
  ENSG00000169248_10 (sequence is synthesized)
cacatctgaaatacaaaatgtttttgtctaccaaagaaaaatgttgaaaaataagcaaatgtatacctagcaatcacttttactttttgtaattctgtctcttagaaaaatacataatct

SEQ ID NO: 558662 - DNA, 120 bp, Artificial Sequence
  ENSG00000169248_11 (sequence is synthesized)
aatcaatttctttgttcatgcctatatactgtaaaatttaggtatactcaagactagtttaaagaatcaaagtcatttttttctctaataaactaccacaacctttcttttttaaaaaaa

SEQ ID NO: 558663 - DNA, 120 bp, Artificial Sequence
  ENSG00000169248_12 (sequence is synthesized)
aagacatcaagacttaaacgaaggaaaggattcaaaagaggagaggaaagtgcattttcatgctagaaaaaccatattatacaaatataaaaaatagggatctctcaggctcaccagatg

SEQ ID NO: 558664 - DNA, 120 bp, Artificial Sequence
  ENSG00000169248_13 (sequence is synthesized)
aggggatgctgtgaaagaaggtaatcttcctcatgtgatgtcagagagtatagagccagaacaagtcacaatcctgaagacacgtctgaccccacacatctacaaagccagcagaaatca

SEQ ID NO: 558665 - DNA, 120 bp, Artificial Sequence
  ENSG00000169249_0 (sequence is synthesized)
gaggggcggggcggtgccggcaagatggctgcgcccgagaagatgacgtttcccgagaaaccaagccacaaaaagtacagggccgccctgaagaaggagaaacgaaagaaacgtcggcag

SEQ ID NO: 558666 - DNA, 120 bp, Artificial Sequence
  ENSG00000169249_1 (sequence is synthesized)
gaacttgctcgactgagagactcaggactctcacagaaggaggaagaggaggacacttttattgaagaacaacaactagaagaagagaagctattggaaagagagaggcaaagattacat

SEQ ID NO: 558667 - DNA, 120 bp, Artificial Sequence
  ENSG00000169249_2 (sequence is synthesized)
gaggagtggttgctaagagagcagaaggcacaagaagaattcagaataaagaaggaaaaggaagaggcggctaaaaaacggcaagaagaacaagagagaaagttaaaggaacaatgggaa

SEQ ID NO: 558668 - DNA, 120 bp, Artificial Sequence
  ENSG00000169249_3 (sequence is synthesized)
gaacagcagaggaaagagagagaagaggaggagcagaaacgacaggagaagaaagaaaaagaggaagctttgcagaagatgctggatcaggctgaaaatgagttggaaaatggtaccaca

SEQ ID NO: 558669 - DNA, 120 bp, Artificial Sequence
  ENSG00000169249_4 (sequence is synthesized)
tggcaaaacccagaaccacccgtggatttcagagtaatggagaaggatcgagctaattgtcccttctacagtaaaacaggagcttgcagatttggagatagatgttcacgtaaacataat

SEQ ID NO: 558670 - DNA, 120 bp, Artificial Sequence
  ENSG00000169249_5 (sequence is synthesized)
ttcccaacatccagtcctacccttcttattaagagcatgtttacgacgtttggaatggagcagtgcaggagggatgactatgaccctgacgcaagcctggagtacagcgaggaagaaacc

SEQ ID NO: 558671 - DNA, 120 bp, Artificial Sequence
  ENSG00000169249_6 (sequence is synthesized)
gtggggaaagtgattcagttcaaggtcagctgcaatttggaacctcacctgaggggcaatgtatatgttcagtaccagtcggaagaagaatgccaagcagccctttctctgtttaacgga

SEQ ID NO: 558672 - DNA, 120 bp, Artificial Sequence
  ENSG00000169249_7 (sequence is synthesized)
cgatggtatgcaggacgacagctgcagtgtgaattctgccccgtgacccggtggaaaatggcgatttgtggtttatttgaaatacaacaatgtccaagaggaaagcactgcaactttctt

SEQ ID NO: 558673 - DNA, 120 bp, Artificial Sequence
  ENSG00000169249_8 (sequence is synthesized)
catgtgttcagaaatcccaacaatgaattctgggaagctaatagagacatctacttgtctccagatcggactggctcctcctttgggaagaactccgaaaggagggagaggatgggccac

SEQ ID NO: 558674 - DNA, 120 bp, Artificial Sequence
  ENSG00000169249_9 (sequence is synthesized)
cacgacgactactacagcaggctgcggggaaggagaaaccctagtccagaccactcctacaaaagaaatggggaatccgagaggaaaagtagtcgtcacagggggaagaaatctcacaaa

SEQ ID NO: 558675 - DNA, 120 bp, Artificial Sequence
  ENSG00000169249_10 (sequence is synthesized)
cgcacatcaaagagtcgggagaggcacaattcacgaagcagaggaagaaatagggaccgcagcagggaccgcagccggggccggggcagccggagccggagccggagccggagccgcagg

SEQ ID NO: 558676 - DNA, 120 bp, Artificial Sequence
  ENSG00000169249_11 (sequence is synthesized)
agccgccgcagccggagccaaagttcctctaggtcccgaagtcgtggcaggaggaggtcgggtaatagagacagaactgttcagagtcccaaatccaaataaactagttttgttcttaaa

SEQ ID NO: 558677 - DNA, 79 bp, Artificial Sequence
  ENSG00000169249_12 (sequence is synthesized)
tctgcccgcctcggcctcagaaatttcttaatgtctctaagcttctatttccttgtctgtaatatggagataaagtcaa

SEQ ID NO: 558678 - DNA, 120 bp, Artificial Sequence
  ENSG00000169249_13 (sequence is synthesized)
agcttctatttccttgtctgtaatatggagataaagtcaatcacagtatccacctcacagaattgtgaagattaaaggaggtgatggatgtatagtgtttaacacagtgtcagcagatga

SEQ ID NO: 558679 - DNA, 120 bp, Artificial Sequence
  ENSG00000169249_14 (sequence is synthesized)
gaggtgctgtgatagctctagttcttattattatagatttctgttatgatgaagacaatagatacggtatgaaataagagagtaatttttttcctgtttatttgaaatgcttcttttaaa

SEQ ID NO: 558680 - DNA, 120 bp, Artificial Sequence
  ENSG00000169249_15 (sequence is synthesized)
agatgacgtttcccgagaaaccaagaggagcggggagctcgggcagcgctgcattgtagccgctgatcgtcgtgtatatgtcttaatcttccagccacaaaaagtacagggccgccctga

SEQ ID NO: 558681 - DNA, 120 bp, Artificial Sequence
  ENSG00000169251_0 (sequence is synthesized)
gcatttcgctcgcgagatcttctctgtggcggagacagccaggttggcagctgacgggacagccggggtctattttgttgcgggttttcagcaaatccagggctggtctggaggcgcgaa

SEQ ID NO: 558682 - DNA, 120 bp, Artificial Sequence
  ENSG00000169251_1 (sequence is synthesized)
aacttaaggcatacagaacgatggagtatatggcagaatccaccgaccgcagccctggacacatcttgtgctgtgagtgtggtgttccgataagtccaaatcctgccaatatttgtgtgg

SEQ ID NO: 558683 - DNA, 120 bp, Artificial Sequence
  ENSG00000169251_2 (sequence is synthesized)
cctgtttgcgaagtaaagtggacatcagccaaggtattccgaaacaagtctcgatttcgttctgcaaacaatgtcaaaggtattttcaaccaccaggaacttggatacagtgtgctttag

SEQ ID NO: 558684 - DNA, 120 bp, Artificial Sequence
  ENSG00000169251_3 (sequence is synthesized)
aatccagggaacttcttgctttgtgcttgaaaaaaatcaaagcccctctgagtaaggtacggcttgtagatgcaggctttgtttggactgagcctcattctaagagacttaaagttaaac

SEQ ID NO: 558685 - DNA, 120 bp, Artificial Sequence
  ENSG00000169251_4 (sequence is synthesized)
tgactattcagaaagaggtgatgaatggtgctatccttcaacaagtgtttgtggtggattatgttgttcagtcccaaatgtgtggagattgccatagagtagaagctaaggatttctgga

SEQ ID NO: 558686 - DNA, 120 bp, Artificial Sequence
  ENSG00000169251_5 (sequence is synthesized)
aggctgtgattcaagtgaggcaaaagactttgcataaaaaaactttctactatctggaacagttaattctgaaatatggaatgcatcagaatacacttcgtatcaaagagattcatgatg

SEQ ID NO: 558687 - DNA, 120 bp, Artificial Sequence
  ENSG00000169251_6 (sequence is synthesized)
gtctggatttttattattcctcaaaacaacatgctcagaagatggtcgaatttcttcagtgtacagttccctgtagatacaaagcatcacaaagactgatctctcaagatatccatagta

SEQ ID NO: 558688 - DNA, 120 bp, Artificial Sequence
  ENSG00000169251_7 (sequence is synthesized)
acacatacaattacaaaagcactttttctgtggaaattgttccaatatgcaaggataatgttgtctgtctgtctccaaaactggcacaaagcctgggaaatatgaaccagatttgtgtgt

SEQ ID NO: 558689 - DNA, 120 bp, Artificial Sequence
  ENSG00000169251_8 (sequence is synthesized)
gtattcgagtaaccagtgccattcacctcattgatccaaacaccctacaagtggcagatattgatgggagcactttctggagtcaccctttcaatagtttatgtcatcccaaacagctag

SEQ ID NO: 558690 - DNA, 120 bp, Artificial Sequence
  ENSG00000169251_9 (sequence is synthesized)
aggagtttattgtgatggaatgcagcatagtccaagatataaaacgtgctgcaggtgctggaatgatatcaaaaaagcataccctcggggaagtctgggtacagaagacatctgaaatga

SEQ ID NO: 558691 - DNA, 120 bp, Artificial Sequence
  ENSG00000169251_10 (sequence is synthesized)
atacagataaacagtatttttgtcgtactcatttgggacatcttctaaatcccggagacctggtgttagggtttgatttggccaactgtaacttaaatgatgagcatgtcaacaaaatga

SEQ ID NO: 558692 - DNA, 120 bp, Artificial Sequence
  ENSG00000169251_11 (sequence is synthesized)
actcagatagagttccagatgtggtattaatcaagaagagctatgaccggaccaaacgtcagcgtcgtagaaactggaaattgaaagagcttgcaagagagagagaaaacatggatacag

SEQ ID NO: 558693 - DNA, 120 bp, Artificial Sequence
  ENSG00000169251_12 (sequence is synthesized)
ggcaattcgaaaaaatgtcaacatttacagagattcagccatccctgtggaaagtgacaccgatgatgaaggagcacctcgaattagtctggctgagatgcttgaagaccttcatatttc

SEQ ID NO: 558694 - DNA, 120 bp, Artificial Sequence
  ENSG00000169251_13 (sequence is synthesized)
ccaagatgccactggtgaagaaggtgcatcaatgctgacataatgagatgttgtagactgtttccatacatgggcttaagaagttggacagagttaccttaagtgtctctactatctttg

SEQ ID NO: 558695 - DNA, 120 bp, Artificial Sequence
  ENSG00000169251_14 (sequence is synthesized)
cctccagatttcaagaggagaaatttagttttaaacctgaataaacatgtttgttttcagtgctcactcaaaccactaaaacagatggatagctttgaggttttagataaggaaagatta

SEQ ID NO: 558696 - DNA, 120 bp, Artificial Sequence
  ENSG00000169251_15 (sequence is synthesized)
tggagaatgtagttgttattgatttttggcaattttacatttggaattttatcactgtgcttttttatatgaggcactgtagtattttcacatagtatagtactctggatgtaaaagctc

SEQ ID NO: 558697 - DNA, 120 bp, Artificial Sequence
  ENSG00000169251_16 (sequence is synthesized)
aaaaattgtgattccttgaacgttcactaaatcttcaagcaaaaacacatttttacattatttttacgttgattattttagtgaaagaccatatgaagaagcatttttaatattaacttg

SEQ ID NO: 558698 - DNA, 120 bp, Artificial Sequence
  ENSG00000169251_17 (sequence is synthesized)
ttacatactttgatccactttacatcatttttatgttgttgaggtagggaaattagggttcagtttatcactggacattcaggaggcaagtcaatcttttttatttccttataaaattaa

SEQ ID NO: 558699 - DNA, 120 bp, Artificial Sequence
  ENSG00000169251_18 (sequence is synthesized)
ctcttcaaaagccgttaaacagagagttatcttaatttttattgcagtaggaggaaatatatttaaaatatttgtagatttatagcaaatagagactcgttatttaaaggttaaataaca

SEQ ID NO: 558700 - DNA, 120 bp, Artificial Sequence
  ENSG00000169251_19 (sequence is synthesized)
atttgttcttttgttgtttttgccagtttagggcagtagctgcttttgtcataaatatcttcctaccacatcaaaaatgctgcttttaaaatttttgtttataaattgagaaggaatttt

SEQ ID NO: 558701 - DNA, 120 bp, Artificial Sequence
  ENSG00000169251_20 (sequence is synthesized)
ctctctataagtttctgtcattgaacagatcaccattaaaaagaatattagaatccagcatgaagataatggctaataaaaatgaggtacatactttataaaaccattaatcagatttga

SEQ ID NO: 558702 - DNA, 120 bp, Artificial Sequence
  ENSG00000169251_21 (sequence is synthesized)
atgaggaatgcttcccacatccttgaaagaaaaactgtggcttacgttttgaagtattctgagaatgaagtattaagatccaatttctataagcaagatcagacttgttaagtatgccgc

SEQ ID NO: 558703 - DNA, 120 bp, Artificial Sequence
  ENSG00000169251_22 (sequence is synthesized)
aagtaagagctaattcattcattccatgtgtgccactaaataaagagattgagcaagtgccactgtgtggaacatttttcttttttttaatattggactttccaattttgaaattatgga

SEQ ID NO: 558704 - DNA, 120 bp, Artificial Sequence
  ENSG00000169251_23 (sequence is synthesized)
taaagtcctaaattttctatagtggcttcttttctgtctgcatattttgttaaaattgtggatctaaaagccatatcctgtctttggtggtggcctggtaggaatggcttgtcctagttc

SEQ ID NO: 558705 - DNA, 120 bp, Artificial Sequence
  ENSG00000169251_24 (sequence is synthesized)
ttcaaaggtaagattgaccaaagcaagttctcattggtggtctgtgtttacatcttccgtgtcaagatattttaaagcatgaaaataaagccattcttgccctttttcgtgtgtttgaaa

SEQ ID NO: 558706 - DNA, 120 bp, Artificial Sequence
  ENSG00000169251_25 (sequence is synthesized)
ggcgtgggtggccctcgggcgccgggacgccgtccggagactcctgtggcgtgggtctgaggcgcggtggtccggtgcggtccctgggctggtggagagcgggagggcccgggcgtccac

SEQ ID NO: 558707 - DNA, 120 bp, Artificial Sequence
  ENSG00000169251_26 (sequence is synthesized)
aatcccgagctgacctcgcccttggtcgtccagggttggagcccaggtgagatggaggtcagcggcagagctgggtggcccgagggtcttgcagctgggaagctcaggaaatcccatggt

SEQ ID NO: 558708 - DNA, 120 bp, Artificial Sequence
  ENSG00000169251_27 (sequence is synthesized)
cctcatcttaaagttctttttaacgaacttacccagtggagttgggtttccttctttcctgctttttcgaagttctgtgaatatattaattattcagagagactggaggaagacgtaaaa

SEQ ID NO: 558709 - DNA, 70 bp, Artificial Sequence
  ENSG00000169251_28 (sequence is synthesized)
atctgcacctgaagctgctgatttagagtcagaagtcactgaggggccaagtgtggtggtcaggccagga

SEQ ID NO: 558710 - DNA, 120 bp, Artificial Sequence
  ENSG00000169251_29 (sequence is synthesized)
ccagcctgggcgacagagtgagactctgttcccccactcccccaataaaaaaagtctgatgagcaagaaaagttcaggggtagagttgcttgtgtaattgagatgtttaacagcatcagg

SEQ ID NO: 558711 - DNA, 120 bp, Artificial Sequence
  ENSG00000169251_30 (sequence is synthesized)
aacagcatcaggctaattccttgccatagtagaacccagaagctctgagctgtgtgccaggagatacctccctggtcagtacttagtaccagagttttccctagattctttaattttagt

SEQ ID NO: 558712 - DNA, 120 bp, Artificial Sequence
  ENSG00000169251_31 (sequence is synthesized)
aaatgtgctcacattgagtcaatccttacataactgggtatgttatttccagcccaaggaatgtttatttttaaaaatatttttaattatccataatttcagacttacaaaatgtcgcaa

SEQ ID NO: 558713 - DNA, 120 bp, Artificial Sequence
  ENSG00000169251_32 (sequence is synthesized)
gtattcccggataccatttacctagatttgccaaatgtaaacaatttgcctcatttgctttctttccccttctcactaataattttttcctcaacatttaagagtaaaatgcagacatga

SEQ ID NO: 558714 - DNA, 120 bp, Artificial Sequence
  ENSG00000169251_33 (sequence is synthesized)
cccaatccctccgacatccctgcgccggggcccttccctagcgctccgggaaagcgttcgccgcaggcctgttaggggcccaccaataccgtaacaccgttcccgtcctcttcctcggca

SEQ ID NO: 558715 - DNA, 120 bp, Artificial Sequence
  ENSG00000169251_34 (sequence is synthesized)
ccgctgcaaacgccccgggtcgctacccggatttgacggtggctggagcggcacgggcgacgcaaggcagatgcggactgaattacaccgctggctttccttgttctccagcttgcaggc

SEQ ID NO: 558716 - DNA, 120 bp, Artificial Sequence
  ENSG00000169251_35 (sequence is synthesized)
cttgtgctgtgagtgtggtgttccgataagtccaaatcctgccaatatttgtgtggcctgtttgcgaagtaaagtggacatcagccaaggtattttcaaccaccaggaacttggatacag

SEQ ID NO: 558717 - DNA, 120 bp, Artificial Sequence
  ENSG00000169251_36 (sequence is synthesized)
ggtgagttaaaactcaaaagcatttgaaattatgtcagatttttatttcaacatacctaagtaatcttatatttactgataatatctggattagtactgtccaaaagaactttctgttag

SEQ ID NO: 558718 - DNA, 120 bp, Artificial Sequence
  ENSG00000169251_37 (sequence is synthesized)
acagccaggttggcagctgacgggacagccggggtctattttgttgcgggttttcagcaaatccagggctggtctggaggcgcgaagtaggttccggagtccgagacctgggctgtcggc

SEQ ID NO: 558719 - DNA, 65 bp, Artificial Sequence
  ENSG00000169252_0 (sequence is synthesized)
gctgggacgttacaccatattggccaggatcttttgctttctatagcttcaaaatgttcttaatg

SEQ ID NO: 558720 - DNA, 120 bp, Artificial Sequence
  ENSG00000169252_1 (sequence is synthesized)
aggatcttttgctttctatagcttcaaaatgttcttaatgttaagacattcttaatactctgaaccatatgaatttgccattttggtaagtcacagacgccagatggtggcaatttcaca

SEQ ID NO: 558721 - DNA, 120 bp, Artificial Sequence
  ENSG00000169252_2 (sequence is synthesized)
tggcacaacccgaaagattaacaaactatccagcagatgaaaggattttttttagtttcattgggtttactgaagaaattgtttgaattctcattgcatctccagttcaacagataatga

SEQ ID NO: 558722 - DNA, 120 bp, Artificial Sequence
  ENSG00000169252_3 (sequence is synthesized)
gtgagtgatgccacactctcaagagttaaaaacaaaacaacaaaaaaattaaaacaaaagcacacaactttctctctctgtcccaaaatacatacttgcatacccccgctccagataaaa

SEQ ID NO: 558723 - DNA, 120 bp, Artificial Sequence
  ENSG00000169252_4 (sequence is synthesized)
tccaaagggtaaaactgtcttcatgcctgcaaattcctaaggagggcacctaaagtacttgacagcgagtgtgctgaggaaatcagcagctgttgaagtcacctcctgtgctcttgccaa

SEQ ID NO: 558724 - DNA, 120 bp, Artificial Sequence
  ENSG00000169252_5 (sequence is synthesized)
atgtttgaaagggaatacactgggttaccgggtgtatgttgggaggggagcattatcagtgctcgggtgaggcaagttcggagtacccagatggagacatccgtgtctgtgtcgctctgg

SEQ ID NO: 558725 - DNA, 120 bp, Artificial Sequence
  ENSG00000169252_6 (sequence is synthesized)
atgcctccaagccagcgtgtgtttactttctgtgtgtgtcaccatgtctttgtgcttctgggtgcttctgtgtttgtttctggccgcgtttctgtgttggacaggggtgactttgtgccg

SEQ ID NO: 558726 - DNA, 120 bp, Artificial Sequence
  ENSG00000169252_7 (sequence is synthesized)
gatggcttctgtgtgagagcgcgcgcgagtgtgcatgtcggtgagctgggagggtgtgtctcagtgtctatggctgtggttcggtataagtctgagcatgtctgccagggtgtatttgtg

SEQ ID NO: 558727 - DNA, 120 bp, Artificial Sequence
  ENSG00000169252_8 (sequence is synthesized)
cctgtatgtgcgtgcctcggtgggcactctcgtttccttccgaatgtggggcagtgccggtgtgctgccctctgccttgagacctcaagccgcgcaggcgcccagggcaggcaggtagcg

SEQ ID NO: 558728 - DNA, 120 bp, Artificial Sequence
  ENSG00000169252_9 (sequence is synthesized)
gccacagaagagccaaaagctcccgggttggctggtaaggacaccacctccagctttagccctctggggccagccagggtagccgggaagcagtggtggcccgccctccagggagcagtt

SEQ ID NO: 558729 - DNA, 120 bp, Artificial Sequence
  ENSG00000169252_10 (sequence is synthesized)
gggccccgcccgggccagccccaggagaaggagggcgaggggaggggagggaaaggggaggagtgcctcgccccttcgcggctgccggcgtgccattggccgaaagttcccgtacgtcac

SEQ ID NO: 558730 - DNA, 120 bp, Artificial Sequence
  ENSG00000169252_11 (sequence is synthesized)
ggcgagggcagttcccctaaagtcctgtgcacataacgggcagaacgcactgcgaagcggcttcttcagagcacgggctggaactggcaggcaccgcgagcccctagcacccgacaagct

SEQ ID NO: 558731 - DNA, 120 bp, Artificial Sequence
  ENSG00000169252_12 (sequence is synthesized)
gagtgtgcaggacgagtccccaccacacccacaccacagccgctgaatgaggcttccaggcgtccgctcgcggcccgcagagccccgccgtgggtccgcccgctgaggcgcccccagcca

SEQ ID NO: 558732 - DNA, 120 bp, Artificial Sequence
  ENSG00000169252_13 (sequence is synthesized)
gtgcgctcacctgccagactgcgcgccatggggcaacccgggaacggcagcgccttcttgctggcacccaatggaagccatgcgccggaccacgacgtcacgcaggaaagggacgaggtg

SEQ ID NO: 558733 - DNA, 120 bp, Artificial Sequence
  ENSG00000169252_14 (sequence is synthesized)
caagttcgagcgtctgcagacggtcaccaactacttcatcacttcactggcctgtgctgatctggtcatgggcctggcagtggtgccctttggggccgcccatattcttatgaaaatgtg

SEQ ID NO: 558734 - DNA, 120 bp, Artificial Sequence
  ENSG00000169252_15 (sequence is synthesized)
gacttttggcaacttctggtgcgagttttggacttccattgatgtgctgtgcgtcacggccagcattgagaccctgtgcgtgatcgcagtggatcgctactttgccattacttcaccttt

SEQ ID NO: 558735 - DNA, 120 bp, Artificial Sequence
  ENSG00000169252_16 (sequence is synthesized)
caagtaccagagcctgctgaccaagaataaggcccgggtgatcattctgatggtgtggattgtgtcaggccttacctccttcttgcccattcagatgcactggtaccgggccacccacca

SEQ ID NO: 558736 - DNA, 120 bp, Artificial Sequence
  ENSG00000169252_17 (sequence is synthesized)
ggaagccatcaactgctatgccaatgagacctgctgtgacttcttcacgaaccaagcctatgccattgcctcttccatcgtgtccttctacgttcccctggtgatcatggtcttcgtcta

SEQ ID NO: 558737 - DNA, 120 bp, Artificial Sequence
  ENSG00000169252_18 (sequence is synthesized)
ctccagggtctttcaggaggccaaaaggcagctccagaagattgacaaatctgagggccgcttccatgtccagaaccttagccaggtggagcaggatgggcggacggggcatggactccg

SEQ ID NO: 558738 - DNA, 120 bp, Artificial Sequence
  ENSG00000169252_19 (sequence is synthesized)
cagatcttccaagttctgcttgaaggagcacaaagccctcaagacgttaggcatcatcatgggcactttcaccctctgctggctgcccttcttcatcgttaacattgtgcatgtgatcca

SEQ ID NO: 558739 - DNA, 120 bp, Artificial Sequence
  ENSG00000169252_20 (sequence is synthesized)
ggataacctcatccgtaaggaagtttacatcctcctaaattggataggctatgtcaattctggtttcaatccccttatctactgccggagcccagatttcaggattgccttccaggagct

SEQ ID NO: 558740 - DNA, 120 bp, Artificial Sequence
  ENSG00000169252_21 (sequence is synthesized)
tctgtgcctgcgcaggtcttctttgaaggcctatgggaatggctactccagcaacggcaacacaggggagcagagtggatatcacgtggaacaggagaaagaaaataaactgctgtgtga

SEQ ID NO: 558741 - DNA, 120 bp, Artificial Sequence
  ENSG00000169252_22 (sequence is synthesized)
agacctcccaggcacggaagactttgtgggccatcaaggtactgtgcctagcgataacattgattcacaagggaggaattgtagtacaaatgactcactgctgtaaagcagtttttctac

SEQ ID NO: 558742 - DNA, 120 bp, Artificial Sequence
  ENSG00000169252_23 (sequence is synthesized)
ttttaaagacccccccccccaacagaacactaaacagactatttaacttgagggtaataaacttagaataaaattgtaaaattgtatagagatatgcagaaggaagggcatccttctgcc

SEQ ID NO: 558743 - DNA, 120 bp, Artificial Sequence
  ENSG00000169252_24 (sequence is synthesized)
ttttttatttttttaagctgtaaaaagagagaaaacttatttgagtgattatttgttatttgtacagttcagttcctctttgcatggaatttgtaagtttatgtctaaagagctttagtc

SEQ ID NO: 558744 - DNA, 120 bp, Artificial Sequence
  ENSG00000169252_25 (sequence is synthesized)
ctagaggacctgagtctgctatattttcatgacttttccatgtatctacctcactattcaagtattaggggtaatatattgctgctggtaatttgtatctgaaggagattttccttccta

SEQ ID NO: 558745 - DNA, 120 bp, Artificial Sequence
  ENSG00000169252_26 (sequence is synthesized)
cacccttggacttgaggattttgagtatctcggacctttcagctgtgaacatggactcttcccccactcctcttatttgctcacacggggtattttaggcagggatttgaggagcagctt

SEQ ID NO: 558746 - DNA, 120 bp, Artificial Sequence
  ENSG00000169252_27 (sequence is synthesized)
cagttgttttcccgagcaaagtctaaagtttacagtaaataaattgtttgaccatgccttcattgcacctgtttctccaaaaccccttgactggagtgctgttgcctcccccactggaaa

SEQ ID NO: 558747 - DNA, 120 bp, Artificial Sequence
  ENSG00000169255_0 (sequence is synthesized)
gtggtctgcgcgcgcccggccgtgcgtgcggatgcggggaggctgcgtgtgtgcgcagggagagaacgccggccaccttcccgcttccgagctgggtgcgcgccgagcacaggagattgc

SEQ ID NO: 558748 - DNA, 120 bp, Artificial Sequence
  ENSG00000169255_1 (sequence is synthesized)
ctgcgtttaggaggtggctgcgttgtgggaaaagctatcaaggaagaaattgccaaaccatgtctttttttctgttttcagagtagttcacaacagatctgagtgttttaattaagcatg

SEQ ID NO: 558749 - DNA, 120 bp, Artificial Sequence
  ENSG00000169255_2 (sequence is synthesized)
gaatacagaaaacaacaaaaaacttaagctttaatttcatctggaattccacagttttcttagctccctggacccggttgacctgttggctcttcccgctggctgctctatcacgtggtg

SEQ ID NO: 558750 - DNA, 120 bp, Artificial Sequence
  ENSG00000169255_3 (sequence is synthesized)
ctctccgactactcaccccgagtgtaaagaaccttcggctcgcgtgcttctgagctgctgtggatggcctcggctctctggactgtccttccgagtaggatgtcactgagatccctcaaa

SEQ ID NO: 558751 - DNA, 120 bp, Artificial Sequence
  ENSG00000169255_4 (sequence is synthesized)
tggagcctcctgctgctgtcactcctgagtttctttgtgatgtggtacctcagccttccccactacaatgtgatagaacgcgtgaactggatgtacttctatgagtatgagccgatttac

SEQ ID NO: 558752 - DNA, 120 bp, Artificial Sequence
  ENSG00000169255_5 (sequence is synthesized)
agacaagactttcacttcacacttcgagagcattcaaactgctctcatcaaaatccatttctggtcattctggtgacctcccacccttcagatgtgaaagccaggcaggccattagagtt

SEQ ID NO: 558753 - DNA, 120 bp, Artificial Sequence
  ENSG00000169255_6 (sequence is synthesized)
acttggggtgaaaaaaagtcttggtggggatatgaggttcttacatttttcttattaggccaagaggctgaaaaggaagacaaaatgttggcattgtccttagaggatgaacaccttctt

SEQ ID NO: 558754 - DNA, 120 bp, Artificial Sequence
  ENSG00000169255_7 (sequence is synthesized)
tatggtgacataatccgacaagattttttagacacatataataacctgaccttgaaaaccattatggcattcaggtgggtaactgagttttgccccaatgccaagtacgtaatgaagaca

SEQ ID NO: 558755 - DNA, 120 bp, Artificial Sequence
  ENSG00000169255_8 (sequence is synthesized)
gacactgatgttttcatcaatactggcaatttagtgaagtatcttttaaacctaaaccactcagagaagtttttcacaggttatcctctaattgataattattcctatagaggattttac

SEQ ID NO: 558756 - DNA, 120 bp, Artificial Sequence
  ENSG00000169255_9 (sequence is synthesized)
caaaaaacccatatttcttaccaggagtatcctttcaaggtgttccctccatactgcagtgggttgggttatataatgtccagagatttggtgccaaggatctatgaaatgatgggtcac

SEQ ID NO: 558757 - DNA, 120 bp, Artificial Sequence
  ENSG00000169255_10 (sequence is synthesized)
gtaaaacccatcaagtttgaagatgtttatgtcgggatctgtttgaatttattaaaagtgaacattcatattccagaagacacaaatcttttctttctatatagaatccatttggatgtc

SEQ ID NO: 558758 - DNA, 120 bp, Artificial Sequence
  ENSG00000169255_11 (sequence is synthesized)
tgtcaactgagacgtgtgattgcagcccatggcttttcttccaaggagatcatcactttttggcaggtcatgctaaggaacaccacatgccattattaacttcacattctacaaaaagcc

SEQ ID NO: 558759 - DNA, 120 bp, Artificial Sequence
  ENSG00000169255_12 (sequence is synthesized)
tagaaggacaggatactttgtggaaagtgttaaataaagtaggtactgtggaaaattcatggggaggtcagtgtgctggcttacactgaactgaaactcatgaaaaacccagactggaga

SEQ ID NO: 558760 - DNA, 120 bp, Artificial Sequence
  ENSG00000169255_13 (sequence is synthesized)
ggaattaaatataaaggaattggaggtttttgctaaagaaattaataggaccaaacaatttggacatgtcattctgtagactagaatttcttaaaagggtgttactgagttataagctca

SEQ ID NO: 558761 - DNA, 120 bp, Artificial Sequence
  ENSG00000169255_14 (sequence is synthesized)
ctaggctgtaaaaacaaaacaatgtagagttttatttattgaacaatgtagtcacttgaaggttttgtgtatatcttatgtggattaccaatttaaaaatatatgtagttctgtgtcaaa

SEQ ID NO: 558762 - DNA, 120 bp, Artificial Sequence
  ENSG00000169255_15 (sequence is synthesized)
aaacttcttcactgaagttatactgaacaaaattttacctgtttttggtcatttataaagtacttcaagatgttgcagtatttcacagttattattatttaaaattacttcaactttgtg

SEQ ID NO: 558763 - DNA, 120 bp, Artificial Sequence
  ENSG00000169255_16 (sequence is synthesized)
tttttaaatgttttgacgatttcaatacaagataaaaaggatagtgaatcattctttacatgcaaacattttccagttacttaactgatcagtttattattgatacatcactccattaat

SEQ ID NO: 558764 - DNA, 120 bp, Artificial Sequence
  ENSG00000169255_17 (sequence is synthesized)
gtaaagtcataggtcattattgcatatcagtaatctcttggactttgttaaatattttactgtggtaatatagagaagaattaaagcaagaaaatctgaagtattgtcttgtttttaaaa

SEQ ID NO: 558765 - DNA, 120 bp, Artificial Sequence
  ENSG00000169255_18 (sequence is synthesized)
aatacagttcctagtgtttttagaagtcacttaatttgtctcatttttccacctggaaattaggaataatgtagaatgcaaggcagtaatttccttttggaaaggactctgaaggcagaa

SEQ ID NO: 558766 - DNA, 120 bp, Artificial Sequence
  ENSG00000169255_19 (sequence is synthesized)
aagaagggagagaacctcatgggcagaatattataaaaagagtgtcatattccagcatttgaattggaaagagaagagtgaagatccaagttgcattattaatctgccctgtgttttttc

SEQ ID NO: 558767 - DNA, 120 bp, Artificial Sequence
  ENSG00000169255_20 (sequence is synthesized)
cttttaacaatcagtttgagctgctgctgttatgagtttctcatcaagatgaaagccctaatatgtaaagtcaaatccgatttaaattttgtgcttttatagaaagaaatttcttcatag

SEQ ID NO: 558768 - DNA, 120 bp, Artificial Sequence
  ENSG00000169255_21 (sequence is synthesized)
acgtggtgatatatcatttgttggacctgctaatagtaggtcaaaggggagcactccttgccccctgttcctgggtttatgcagttttctttttagagtttatatagggcaagtggttct

SEQ ID NO: 558769 - DNA, 120 bp, Artificial Sequence
  ENSG00000169255_22 (sequence is synthesized)
ttttctctgaattacaggatggaaaaaggtcatatcctttgtcaggaaatataaacttgaaagtatgtagtcagctcttgtaatactcatatttatgattgtcctatatgaaaaacaact

SEQ ID NO: 558770 - DNA, 120 bp, Artificial Sequence
  ENSG00000169255_23 (sequence is synthesized)
tcagttaaaactataatgtgtgattctgtataacaaggtgatgtctgtttcccagggctcagacctaatccagttataataaaatcaattaaatgaaatattctatagaatcgatctatg

SEQ ID NO: 558771 - DNA, 120 bp, Artificial Sequence
  ENSG00000169255_24 (sequence is synthesized)
cccttgttaatctccatccatataggagtcacgttctttaagacagatggtggtagttatttttgtggcatggttagatttgactggttttgcagaagattacagttatgtactgcataa

SEQ ID NO: 558772 - DNA, 120 bp, Artificial Sequence
  ENSG00000169255_25 (sequence is synthesized)
tgacatatacaatagtggtcccataaaattataatggagcagaaaatctattgcctcatgatgttttagccgttttaatgtcatagcctagtgcattactcacgtgtctgtggagatgct

SEQ ID NO: 558773 - DNA, 120 bp, Artificial Sequence
  ENSG00000169255_26 (sequence is synthesized)
ggtgtaaacaaacctactacactgccagttgtataaaagtacagcacattcagttatgtacagtatgtaatactgataatgacaataaatgacaccggtttgtgtatttactttttataa

SEQ ID NO: 558774 - DNA, 120 bp, Artificial Sequence
  ENSG00000169255_27 (sequence is synthesized)
gaaaacaacaaaaaacttaagctttaatttcatctggaattccacagagacaaggccactttatgtttcccaggctggactggaacccctgggctcaaatgatcctcctacctaagcctg

SEQ ID NO: 558775 - DNA, 71 bp, Artificial Sequence
  ENSG00000169255_28 (sequence is synthesized)
agctcactgcaatctccgtctctcaaaccttcggctcgcgtgcttctgagctgctgtggatggcctcggct

SEQ ID NO: 558776 - DNA, 120 bp, Artificial Sequence
  ENSG00000169255_29 (sequence is synthesized)
gcgccgtcctcggaaacgcctagaccccggcagctaggccgggaggcaccgcccactcctctagagcggagcgtggcccaggttgagccgccgcaccgtgggtctcgggtctcggtgacg

SEQ ID NO: 558777 - DNA, 120 bp, Artificial Sequence
  ENSG00000169255_30 (sequence is synthesized)
gacgagcagctgcccgcctccggtgagcgcgggagaaggggcccagtggggcagtgggcgacgcggagggcccaggcccaggccgcggccgcgccgcatccgctggttgtccaccttgcc

SEQ ID NO: 558778 - DNA, 120 bp, Artificial Sequence
  ENSG00000169255_31 (sequence is synthesized)
cccagggtgcaatacctgccttgcgtcgcccgtgccgctccagccaccgtcaaatccgggtagcgacccggggcgtttgcagcggtgccgaggaagaggacgggaacggtgttacgattg

SEQ ID NO: 558779 - DNA, 120 bp, Artificial Sequence
  ENSG00000169255_32 (sequence is synthesized)
ttgagtgtcggcaacttgaggacagggcttgtctgtctgcttccccactgctgccccaacctctaacacaggtccagaacactgaatgaaggaatgaaataccctcagatgactaaagca

SEQ ID NO: 558780 - DNA, 120 bp, Artificial Sequence
  ENSG00000169255_33 (sequence is synthesized)
aaccatgtctttttttctgttttcagagactaaaatgttcgttcaaatgaatggccattggataactccagacctgaaaataaacactgttgtcaaaacagcatccaggccgggcgcggt

SEQ ID NO: 558781 - DNA, 120 bp, Artificial Sequence
  ENSG00000169255_34 (sequence is synthesized)
acaggcctgcggcgaacgctttcccggagcgctagggaagggccccggcgcagggatgtcggagggattgggaaggaatgtgaaactaagtggggaatgtggagaacgggcggagagaga

SEQ ID NO: 558782 - DNA, 120 bp, Artificial Sequence
  ENSG00000169255_35 (sequence is synthesized)
aggaaatcccacggggctagggctacaggattcctacaggcagtgttaaggaacatacagggcgttttaaaaagattcctagaggtgcaacggagtctcacttttccaagcagtaaggaa

SEQ ID NO: 558783 - DNA, 120 bp, Artificial Sequence
  ENSG00000169255_36 (sequence is synthesized)
tgatgccatcctcaagtacgggtagtctttgaattcagtatccgttcgccttcttaatgttggatttaggagggagatttgcagggctttcatgattttgtttcctctgcgttttgcaca

SEQ ID NO: 558784 - DNA, 120 bp, Artificial Sequence
  ENSG00000169255_37 (sequence is synthesized)
tgggaacaagttttttagcttctcccaggaggcttaagcaaaagaagggcgctgaatttgtgctcttagtatgcatgtgtcgatgcctgataaaagcacaaattactgaacgcgtatcag

SEQ ID NO: 558785 - DNA, 120 bp, Artificial Sequence
  ENSG00000169255_38 (sequence is synthesized)
caacagagtgagactccatctccaaaacaaacaaaaaacaaaaaaacagtgtccaagtataatttcagattagagcatgaggtgatttgaaagcgagaagagaggatcaaggcttttcca

SEQ ID NO: 558786 - DNA, 120 bp, Artificial Sequence
  ENSG00000169255_39 (sequence is synthesized)
ggtgatttgaaagcgagaagagaggatcaaggcttttccaaaaatgaaaaaagtgttgatatgtaataaatggctccaaaaacaacttgctaagtatacaacattgattttagatgtcat

SEQ ID NO: 558787 - DNA, 120 bp, Artificial Sequence
  ENSG00000169255_40 (sequence is synthesized)
tgcggatgcggggaggctgcgtgtgtgcgcagggagagaacgccggccaccttcccgcttccgagctgggtgcgcgccgagcacaggaggtgagtgagaagggcggccctgcagggtctc

SEQ ID NO: 558788 - DNA, 120 bp, Artificial Sequence
  ENSG00000169255_41 (sequence is synthesized)
gcgaggacttcagttttcttagctccctggacccggttgacctgttggctcttcccgctggctgctctatcacgtggtgctctccgactactcaccccgagtgtaaagaaccttcggctc

SEQ ID NO: 558789 - DNA, 71 bp, Artificial Sequence
  ENSG00000169255_42 (sequence is synthesized)
ccaggccgggcgcggtggctcacgccgggagttcgagatcggcttggccaacgtggtgaaaccccgtctct

SEQ ID NO: 558790 - DNA, 120 bp, Artificial Sequence
  ENSG00000169255_43 (sequence is synthesized)
tccttagcttttctttctatcctctgtatttcttgtaaaatttgattagattccagttaaacattacattgtatctcattaggagatacataataggtgtttgttccatcatttatgatg

SEQ ID NO: 558791 - DNA, 120 bp, Artificial Sequence
  ENSG00000169255_44 (sequence is synthesized)
ttacgattaattattgggttagaatggtgacaccctgatcctccaatgtaaagtttatattttttcagttcttgcaactaaaaagtaatcttcgtggtgttactttggcatcatacagat

SEQ ID NO: 558792 - DNA, 120 bp, Artificial Sequence
  ENSG00000169255_45 (sequence is synthesized)
agccaattgtccatcaaccttttatttattatcaaaactctgatgtataatcatcatcagtaatttcatgaaagattgcaaaatgacagttttcttattctgtcattccatctatagtag

SEQ ID NO: 558793 - DNA, 120 bp, Artificial Sequence
  ENSG00000169255_46 (sequence is synthesized)
tctctgcttatccatgggggctgtgttcaacagcctgtcccccaaacatgcctgaaaccatgatagtaccacaccctacccaaagaatgccaaggtcaccttttcacttaaaggaagcac

SEQ ID NO: 558794 - DNA, 120 bp, Artificial Sequence
  ENSG00000169255_47 (sequence is synthesized)
tttgagcttctctttgacctatctgaagtgtcagcatcctacttttctgccttggggccattattaggtaaaataagggtgacttgcacacaagtactgagataccatgacagtgaatct

SEQ ID NO: 558795 - DNA, 120 bp, Artificial Sequence
  ENSG00000169255_48 (sequence is synthesized)
ggtaactgagggctcctatgtgactaacaggtgggtagcatatatagtgtggatacgctgggaagagggaggattcatgttctacctgagacagagaaggatggtgcgagattttgtcat

SEQ ID NO: 558796 - DNA, 120 bp, Artificial Sequence
  ENSG00000169255_49 (sequence is synthesized)
attactcagaacagtgcgcgatttaaagcttatgaattgtttatttctggaatttttcacttaatatttccagactgtagttgactgtggataactgaaactatgggccaggaaactgca

SEQ ID NO: 558797 - DNA, 120 bp, Artificial Sequence
  ENSG00000169255_50 (sequence is synthesized)
ggggtaatttctagacatttctaattggcatttttcttttaaaaatttttaaattatttatttatttatttttgaaacggtcacgctttgtcacccaggctacagtgcagtggcacaatc

SEQ ID NO: 558798 - DNA, 120 bp, Artificial Sequence
  ENSG00000169255_51 (sequence is synthesized)
acagctcactgcagcccggacctcccacacccaaaccatccttctgcctcagcctcccgggtagctgggaccacaggctcatgccaccatgcctggctaattttattattcttttgtaga

SEQ ID NO: 558799 - DNA, 87 bp, Artificial Sequence
  ENSG00000169255_52 (sequence is synthesized)
ctggtcattaggattacaggtgtgagccatgacacccagcctataagtggcatttttctataaagaagagctttttctcttcaatta

SEQ ID NO: 558800 - DNA, 120 bp, Artificial Sequence
  ENSG00000169255_53 (sequence is synthesized)
tggcatttttctataaagaagagctttttctcttcaattagagctatttgcttcctctgaactatagatgattgattctttaaagcaggaaataaaaaatgctgtctttcctccatcatc

SEQ ID NO: 558801 - DNA, 120 bp, Artificial Sequence
  ENSG00000169255_54 (sequence is synthesized)
ccagtaattttcaagtaagagattggtatagtagctaccgagttgaaacattttacattgctcatgtgcagtgcagatatggtgttctctttaaatttatggatgaaacaaattgtgtat

SEQ ID NO: 558802 - DNA, 120 bp, Artificial Sequence
  ENSG00000169255_55 (sequence is synthesized)
aacaaatttttaagaaattttatggtttttaaattttttaagtgttttccatattttttgcaattgatttataattatgctgtggttagagaatgtagcctgtattattgtttttaaaat

SEQ ID NO: 558803 - DNA, 120 bp, Artificial Sequence
  ENSG00000169255_56 (sequence is synthesized)
tgttgagaaggcttgtattacctaatattattagttttctttttaaatgtgttatgttgtcttaaaaatgaatgtttctattctttttattggatgaaaggtactaaatgtttcatttga

SEQ ID NO: 558804 - DNA, 120 bp, Artificial Sequence
  ENSG00000169255_57 (sequence is synthesized)
agatgtattaaaaatctcccattaggattataagttttcccatttatacccatactcttcaggttttgctttatatattttgatactgtgtttttatggttatagagcttcatgattgtt

SEQ ID NO: 558805 - DNA, 120 bp, Artificial Sequence
  ENSG00000169255_58 (sequence is synthesized)
aaattatctttttggatggtttcttcttacagagctttatgataaagtatctttttggatggtttcttctgttagtaataacatctcctttgtcccttattaatgatgtttgtttattta

SEQ ID NO: 558806 - DNA, 120 bp, Artificial Sequence
  ENSG00000169255_59 (sequence is synthesized)
gggcactaacacattctgagagtgcaaactcagttccctgctgtggattttggtcactagtttagaaacatttgagctggaaagcctcccccatgttctctaggtgggcctcactcatga

SEQ ID NO: 558807 - DNA, 120 bp, Artificial Sequence
  ENSG00000169255_60 (sequence is synthesized)
gaaatgttaactgcagcagctccccgatactcttcctccagtggataaagctctttgtaacaaaacagacacagaaagcccagctttcagggcagtcttgctgctgttctgcctgacttt

SEQ ID NO: 558808 - DNA, 120 bp, Artificial Sequence
  ENSG00000169258_0 (sequence is synthesized)
cgcatctcgcccaggagccggagcagcggcactgcctgaaccagacagcagccttgggtgcaggcgtggtcatgagggcagatggacactgctgaagacccggcctggctccagctgctt

SEQ ID NO: 558809 - DNA, 120 bp, Artificial Sequence
  ENSG00000169258_1 (sequence is synthesized)
caaaaggattccagccccccaggaccccgacccacagccttcttctgcccacaggatgggagcctgggggctggcagctcggctatgagggattactgcccctcccagcaaaaggcaagc

SEQ ID NO: 558810 - DNA, 120 bp, Artificial Sequence
  ENSG00000169258_2 (sequence is synthesized)
cctgcaccccccaggcacacccctgaccaaagcccaggcatggagtctagacacagaagccccagtggggctggggaaggggcctcctgctctgacggccccagagggagcctggcctgc

SEQ ID NO: 558811 - DNA, 120 bp, Artificial Sequence
  ENSG00000169258_3 (sequence is synthesized)
ccctccccaacctgcttctctccccaggagtcaccctccaaggagacattggaggcacatggagcctccatctcagggacaccagaagccaccacgtctgggaagccagagcctgtgtcc

SEQ ID NO: 558812 - DNA, 120 bp, Artificial Sequence
  ENSG00000169258_4 (sequence is synthesized)
tccgtgaaaactgagcccaaatcctcagatgacagaaatcccatgttcttagagaagatggatttcaagtcctcaaagcaggccgattccacttccataggaaaggaggatcctgggtcc

SEQ ID NO: 558813 - DNA, 120 bp, Artificial Sequence
  ENSG00000169258_5 (sequence is synthesized)
tcacggaaggcagatcccatgtttacaggaaaggcagagcctgaaatcttgggaaagggggatcctgtggctcctggaaggatggatcccatgactgtaagaaaggaagatcttggatcc

SEQ ID NO: 558814 - DNA, 120 bp, Artificial Sequence
  ENSG00000169258_6 (sequence is synthesized)
ctgggaaaagtagatcctttgtgctccagcaagacgtatacagtgtcaccgaggaaggaggatcctgggtctttgagaaaggtggatcctgtgtcctcagacaaagtggaccctgtattc

SEQ ID NO: 558815 - DNA, 120 bp, Artificial Sequence
  ENSG00000169258_7 (sequence is synthesized)
ccaagaaaggaggagcccaggtattcaggaaaagagcatcctgtgtcctcagaaaaggtcgctcctacatctgcagaaaaggtagatcttgtattgtcgggaaagagagatcctgggccc

SEQ ID NO: 558816 - DNA, 120 bp, Artificial Sequence
  ENSG00000169258_8 (sequence is synthesized)
tcgggaaaggcagatcccatgcccttggaaagcatggattctgcgtccacaggaaagacagagccggggctcctgggcaagctgattccaggctcatcaggcaagaatgggcctgtatcc

SEQ ID NO: 558817 - DNA, 120 bp, Artificial Sequence
  ENSG00000169258_9 (sequence is synthesized)
tctgggaccggggctcctgggtccttgggaaggctggatcccacatgcttggggatggcagatcccgcatctgtgggaaatgtagaaactgtgcctgccacaaaagaggactcccggttc

SEQ ID NO: 558818 - DNA, 120 bp, Artificial Sequence
  ENSG00000169258_10 (sequence is synthesized)
ctgggaaagatggaccctgcctcctcaggagaggggcgtcctgtgtctggccacacggatactacggcttcagcaaagacagatctcacatctttgaaaaatgtggatcccatgtcttca

SEQ ID NO: 558819 - DNA, 120 bp, Artificial Sequence
  ENSG00000169258_11 (sequence is synthesized)
ggcaaggtggatccagtttctctgggaaagatggaccccatgtgctcaggaaagccagagctcttgtctcctggacaggcagagcgtgtgtctgtgggaaaggcaggaactgtatcccca

SEQ ID NO: 558820 - DNA, 120 bp, Artificial Sequence
  ENSG00000169258_12 (sequence is synthesized)
ggaaaagaggacccggtgtcctccagaagggaggaccccatatctgctggaagtagaaagacatcatctgaaaaagtgaatcctgagtcttcaggaaagacaaaccctgtgtcttcaggt

SEQ ID NO: 558821 - DNA, 120 bp, Artificial Sequence
  ENSG00000169258_13 (sequence is synthesized)
ccaggcgatcccaggtccttggggacagcaggtcccccatctgcagtaaaggctgagccagcgacggggggaaaaggagatcccctgtcctcggagaaggcaggtctggtggcctctgga

SEQ ID NO: 558822 - DNA, 120 bp, Artificial Sequence
  ENSG00000169258_14 (sequence is synthesized)
aaggcggctcccacagcctcagggaaggccgagcccctcgcggtgggcaaggaggaccctgtgagcaagggaaaggcagacgctggcccctctggacaaggggactctgtgtctataggt

SEQ ID NO: 558823 - DNA, 120 bp, Artificial Sequence
  ENSG00000169258_15 (sequence is synthesized)
aaagtggtctcaactccaggaaaaacagtcccggtgccctcggggaaggtggatcccgtgtccctgggaaaagcagaagctatcccagagggaaaagtgggttctctgcctctagagaag

SEQ ID NO: 558824 - DNA, 120 bp, Artificial Sequence
  ENSG00000169258_16 (sequence is synthesized)
gggcctcggggaaagcacagccgcagtctggtggcaaagcagaaacaaagctccctgggcaagagggcgctgcagcaccaggggaagcaggggctgtgtgtttgaaaaaggagacaccac

SEQ ID NO: 558825 - DNA, 120 bp, Artificial Sequence
  ENSG00000169258_17 (sequence is synthesized)
aggcctcagagaaggtggatcctggatcctgcagaaaagcagagccccttgcctcagggaagggagagcctgtgtccctggggaaagccgactctgcaccttccagaaaaacggagtccc

SEQ ID NO: 558826 - DNA, 120 bp, Artificial Sequence
  ENSG00000169258_18 (sequence is synthesized)
catccttggggaaggtggtccccctgagtctggagaagaccaagccgtcctcctcctccaggcagttagaccgcaaagccctcggctcagcccggtctcccgagggtgccaggggcagtg

SEQ ID NO: 558827 - DNA, 120 bp, Artificial Sequence
  ENSG00000169258_19 (sequence is synthesized)
aaggccgcgtggagccgaaggccgagcccgtgtccagcaccgaggcctccagtctcggccagaaagacctggaagccgctggggccgagagaagcccctgcccagaggccgcagcgcccc

SEQ ID NO: 558828 - DNA, 120 bp, Artificial Sequence
  ENSG00000169258_20 (sequence is synthesized)
ccgcggactcgcgacaacttcaccaaggcgccgtcgtgggaggcgagcgccccgccgccgccgcgcgaggacgcgggcactcaggcgggcgcgcaggcctgcgtctcagtggccgtgagc

SEQ ID NO: 558829 - DNA, 120 bp, Artificial Sequence
  ENSG00000169258_21 (sequence is synthesized)
gtggccgtgagccccatgtctccgcaggacggcgctgggggctcggccttcagcttccaggcggcgccgcgcgcgcccagcccgccctcgcgccgagatgcgggcctgcaggtgtcgctg

SEQ ID NO: 558830 - DNA, 120 bp, Artificial Sequence
  ENSG00000169258_22 (sequence is synthesized)
cctgcaggtgtcgctgggcgccgccgagacgcgctccgtggccactgggcccatgacacctcaagccgccgcgccgcccgccttccccgaagtgcgggtgcggcccggctcagcgctggc

SEQ ID NO: 558831 - DNA, 120 bp, Artificial Sequence
  ENSG00000169258_23 (sequence is synthesized)
agccggctgagcccgtgcgagacgtgagctgggacgagaagggcatgacgtgggaggtatacggcgccgccatggaggtggaggtgctgggcatggccatccagaagcatctggagcgac

SEQ ID NO: 558832 - DNA, 120 bp, Artificial Sequence
  ENSG00000169258_24 (sequence is synthesized)
gaggtgctgggcatggccatccagaagcatctggagcgacagatcgaggagcacggccgccaaggggcgcccgcgccgccgcccgccgcccgtgccggccccggccgttcgggctcggtg

SEQ ID NO: 558833 - DNA, 120 bp, Artificial Sequence
  ENSG00000169258_25 (sequence is synthesized)
gcctgttccgcgcgctgctgcagagtgtgcgccggccgcggtgctgctcgcgggcgggacccacggccgagtgatctgcccccattttgtacgcccgagtttccgaccttctcaggctcc

SEQ ID NO: 558834 - DNA, 120 bp, Artificial Sequence
  ENSG00000169258_26 (sequence is synthesized)
cttcttgatcacaggcccctagaaggggtcccctctgcgtgccacaggcctccgaggggttgtgcagcctctagggctgttgcgtccccgtctttccagcccctcccatcacaaatacag

SEQ ID NO: 558835 - DNA, 120 bp, Artificial Sequence
  ENSG00000169258_27 (sequence is synthesized)
aagaaccccttctaccaagctccctcgtggccacgaggccacgaacccggccagccctgacgccccactgtcccctcacagccctcagctctactcccggtcacactgggcgaccacggg

SEQ ID NO: 558836 - DNA, 120 bp, Artificial Sequence
  ENSG00000169258_28 (sequence is synthesized)
ggcctgctcagcaccctcacctcccaccccctgagagctggggcaggctcctgagatgtctagactggtgcgttgtggtctccggtggggccagatccccagaacagggagagactgcat

SEQ ID NO: 558837 - DNA, 120 bp, Artificial Sequence
  ENSG00000169258_29 (sequence is synthesized)
acaagtctgagtggcagaagcttcaagtgggtgaggatcggtgtgtgagacccgcgagtgggcacgtctctgaatgtgaggtctcgggcagcacgtgaggtagaacgagtgtgagcgtct

SEQ ID NO: 558838 - DNA, 120 bp, Artificial Sequence
  ENSG00000169258_30 (sequence is synthesized)
ccacgcagtggctggccccgtggccggggcgtctcttgcatgctgttggtggtccttccccagttcctatctcccacccgcctggttccagccccatcccctctcccactgagtcacagg

SEQ ID NO: 558839 - DNA, 120 bp, Artificial Sequence
  ENSG00000169258_31 (sequence is synthesized)
tttgagattcccagagaggccaaagacagctacaggaagtaccctgggggctcagctgagagagagtcacagaaaggccagagggtctcaggaaggtctggaggtcacagctgggctcac

SEQ ID NO: 558840 - DNA, 120 bp, Artificial Sequence
  ENSG00000169258_32 (sequence is synthesized)
agaagctcttgggccctggcatcctgggtgaccggtgttcttgggtattggggacaggacagagagctcattctataaccacagttgtcttttaaaggccaccctctccagccccttgtc

SEQ ID NO: 558841 - DNA, 120 bp, Artificial Sequence
  ENSG00000169258_33 (sequence is synthesized)
ccccctgtgctgtgagcccaagtcccttgtgaccactcagtgtcccgtccccacccctccagccgcagtttttggctacaaactgtcacagtatacattggtaataaaatatttccccaa

SEQ ID NO: 558842 - DNA, 120 bp, Artificial Sequence
  ENSG00000169271_0 (sequence is synthesized)
agtcagtaggcaactgcaggggctcgccactgactgaaggcagtggaaggttggcagaaggaggctgttcaaggctgtttttgccttcactatggcaaaaatcattttgaggcacctcat

SEQ ID NO: 558843 - DNA, 120 bp, Artificial Sequence
  ENSG00000169271_1 (sequence is synthesized)
agagattccagtgcgttaccaggaagagtttgaagctcgaggtctagaagactgcaggctggatcatgctttatatgcactgcctgggccaaccatcgtggacctgaggaaaaccagggc

SEQ ID NO: 558844 - DNA, 120 bp, Artificial Sequence
  ENSG00000169271_2 (sequence is synthesized)
gtggtccagttcctccctgaagacatcatcattcagaccttcgaaggctggctgctgataaaagcacaacacggaaccagaatggatgagcacggttttatctcaagaagcttcacccga

SEQ ID NO: 558845 - DNA, 120 bp, Artificial Sequence
  ENSG00000169271_3 (sequence is synthesized)
cagtacaaactaccagatggtgtggaaatcaaagatttgtctgcagtcctctgtcatgatggaattttggtggtggaagtaaaggatccagttgggactaagtgacatcgtatcggttcc

SEQ ID NO: 558846 - DNA, 120 bp, Artificial Sequence
  ENSG00000169271_4 (sequence is synthesized)
tgttcagatgacatggggaagatgatggttcagccactggtactacgagaatgtttgtattacccacatttgaaatgatttgctatgatttttatgaagattaaaaatatatacacagtt

SEQ ID NO: 558847 - DNA, 120 bp, Artificial Sequence
  ENSG00000169282_0 (sequence is synthesized)
agaaaaatcaattcagattactttgatgacagtgacttccagtcttctctgaaagatctccacgatgctggcagcccggacaggggcagcggggagtcagatctcagaggagaacaccaa

SEQ ID NO: 558848 - DNA, 120 bp, Artificial Sequence
  ENSG00000169282_1 (sequence is synthesized)
gttaaggagacagtctgggttttctgtagcagggaaagacaaatctcccaagaaagcctcagaaaacgctaaagacagcagccttagtccctcaggggaaagccagctcagggcgcgtca

SEQ ID NO: 558849 - DNA, 120 bp, Artificial Sequence
  ENSG00000169282_2 (sequence is synthesized)
actggctctgctgcgcgaagtggagatgaactggtacctaaagctctgcgacctgtccagcgagcacaccaccgtctgcaccacaggcatgccgcacaggaatcttggaaaatcaggact

SEQ ID NO: 558850 - DNA, 120 bp, Artificial Sequence
  ENSG00000169282_3 (sequence is synthesized)
cagagtttcttgcttgggtcttggaacatgggtgacatttggaggtcaaatttcagatgaggttgctgaacggctgatgaccatcgcctatgaaagtggtgttaacctctttgatactgc

SEQ ID NO: 558851 - DNA, 120 bp, Artificial Sequence
  ENSG00000169282_4 (sequence is synthesized)
cgaagtctatgctgctggaaaggctgaagtgattctggggagcatcatcaagaagaaaggctggaggaggtccagtctggtcataacaaccaaactctactggggtggaaaagctgaaac

SEQ ID NO: 558852 - DNA, 120 bp, Artificial Sequence
  ENSG00000169282_5 (sequence is synthesized)
agaaagagggctgtcaagaaagcatattattgaaggattgaagggctccctccagaggctgcagctcgagtatgtggatgtggtctttgcaaatcgaccggacagtaacactcccatgga

SEQ ID NO: 558853 - DNA, 120 bp, Artificial Sequence
  ENSG00000169282_6 (sequence is synthesized)
agaaattgtccgagccatgacacatgtgataaaccaaggcatggcgatgtactggggcacctcgagatggagtgctatggagatcatggaagcctattctgtagcaagacagttcaatat

SEQ ID NO: 558854 - DNA, 120 bp, Artificial Sequence
  ENSG00000169282_7 (sequence is synthesized)
gatcccaccggtctgtgaacaagctgagtaccatcttttccagagagagaaagtggaggtccagctgccagagctctaccacaaaataggtgttggcgcaatgacatggtctccacttgc

SEQ ID NO: 558855 - DNA, 120 bp, Artificial Sequence
  ENSG00000169282_8 (sequence is synthesized)
ctgtggaatcatctcaggaaaatacggaaacggggtgcctgaaagttccagggcttcactgaagtgctaccagtggttgaaagaaagaattgtaagtgaagaagggagaaaacagcaaaa

SEQ ID NO: 558856 - DNA, 120 bp, Artificial Sequence
  ENSG00000169282_9 (sequence is synthesized)
caagctaaaagacctttccccaattgcggagcgtctgggatgcacactacctcagctagctgttgcgtggtgcctgagaaatgaaggtgtgagttctgtgctcctgggatcatccactcc

SEQ ID NO: 558857 - DNA, 120 bp, Artificial Sequence
  ENSG00000169282_10 (sequence is synthesized)
tgaacaactcattgaaaaccttggtgccattcaggttctcccaaagatgacatcacatgtggtaaatgagattgataacatactgcgcaacaagccctacagcaagaaggactatagatc

SEQ ID NO: 558858 - DNA, 120 bp, Artificial Sequence
  ENSG00000169282_11 (sequence is synthesized)
ataaggcaatgcatgaaccacagaagctgcatggttaaaatagcggcctgtgcccagtacagaaaggtgttactaaccagtcttttgaatcacttagcagcttgctgctcaacctctagt

SEQ ID NO: 558859 - DNA, 120 bp, Artificial Sequence
  ENSG00000169282_12 (sequence is synthesized)
gtccctccctggattctttgaggtgtctgctgtcgctaccactgtgcacatctgaaaactcacaaccaagaaaatccattctattttcttatcttggactggagtcacctattcttgcat

SEQ ID NO: 558860 - DNA, 120 bp, Artificial Sequence
  ENSG00000169282_13 (sequence is synthesized)
ctgtatacacctcatgcttatgcaatgggaagaatatgggggccagggggtgtggtactaccttcaggcatttggtaactcaaagaaggctgtacagatatattttttcaaaagaacaaa

SEQ ID NO: 558861 - DNA, 120 bp, Artificial Sequence
  ENSG00000169282_14 (sequence is synthesized)
atccacagatgcaatgtgagttgcgtaagaaacagagtagatagactaaattcagtgaaggaaaggaattgagagatttttcttagtaaatagattattgttaagtaaatagttattaaa

SEQ ID NO: 558862 - DNA, 120 bp, Artificial Sequence
  ENSG00000169282_15 (sequence is synthesized)
aatatatctcactgcaaaaaaaaaaaagcagtatcttcactcaaaagtcttgcttggaagaataagcagaaataattttatatattttttttctattttcacattcatactaacaagttt

SEQ ID NO: 558863 - DNA, 120 bp, Artificial Sequence
  ENSG00000169282_16 (sequence is synthesized)
tgttccatttgttattcaataaaacaaaaatttctaggtatttgctttattacctttcaaatatttactgttgcttggccccaagaatggccttgtacaacttatccagaatgtctatta

SEQ ID NO: 558864 - DNA, 120 bp, Artificial Sequence
  ENSG00000169282_17 (sequence is synthesized)
ggattctaatgttatgtccacttacaagtagagacagtaaaaggatgaatacccaatctttagtgacaatgcagctgatttatgaaagagagggctacactgctatggaaacttagcttc

SEQ ID NO: 558865 - DNA, 120 bp, Artificial Sequence
  ENSG00000169282_18 (sequence is synthesized)
aaagaaaatgcaatgtatctgcaattaggtgttcattttttactacattttattaaaacctgctttatactttcaactgcttgtaggcacaacttctgcaagtttaaatatttgagcttt

SEQ ID NO: 558866 - DNA, 120 bp, Artificial Sequence
  ENSG00000169282_19 (sequence is synthesized)
acaaataaacatacacatgctcagttttttaagtaaacctgtaaaatacccaggaaggcaaatgttcattgtttaattagcactgggattttataatataatgtttggtatttttgaggc

SEQ ID NO: 558867 - DNA, 120 bp, Artificial Sequence
  ENSG00000169282_20 (sequence is synthesized)
attgttaacatgaaagtcaaccactggctttgtgaaaaatgctatgtcactattcagaatatgctgggtaaattgacttgcctagtgaaaagcaaaatgttaaagaaagaacttctggtt

SEQ ID NO: 558868 - DNA, 120 bp, Artificial Sequence
  ENSG00000169282_21 (sequence is synthesized)
ctataatcatattatatgcactaaactatatgcatgaaagttctttgcatggattaatggggcttacccttgttgcactcgaaatctgaggtgtatctagccctgccactattggctact

SEQ ID NO: 558869 - DNA, 120 bp, Artificial Sequence
  ENSG00000169282_22 (sequence is synthesized)
taccctcattaatatcccacttgagaaaaattgtgagactatactgtgtcaatatctgtaaaaagagagaaaacatgttttgtttttttttgaagggggtggtgtgggagtggcccttta

SEQ ID NO: 558870 - DNA, 120 bp, Artificial Sequence
  ENSG00000169282_23 (sequence is synthesized)
actctatttggctatctgaggatgtacaaaattctcatttaattttctggtcagcaagttccccacacagaaatcactctgaggtttacagaagaactgtaatattattttaaaatgcga

SEQ ID NO: 558871 - DNA, 120 bp, Artificial Sequence
  ENSG00000169282_24 (sequence is synthesized)
tttttctgtcattagttctagatatgtacttcatggttaaattctaaatctgaaaatgctagtgggagatatcaagaaattttctttttgattactagtacctgtattctaacagagagt

SEQ ID NO: 558872 - DNA, 120 bp, Artificial Sequence
  ENSG00000169282_25 (sequence is synthesized)
ttgaattttttgcccgtgttatcagaatgatggaaattgatcattttcagttgttcattgtgtattcaatccagcgaactgctgtatgtatagaggagctgaggtgctgtctaatgggaa

SEQ ID NO: 558873 - DNA, 120 bp, Artificial Sequence
  ENSG00000169282_26 (sequence is synthesized)
agttccaactgttgtgctgcagcagatttggtctgagtctgggcagagcccctttttatggagcaaccctcccgatttgttacagcaagagcctggtgcaagtgatctttgccttcccat

SEQ ID NO: 558874 - DNA, 120 bp, Artificial Sequence
  ENSG00000169282_27 (sequence is synthesized)
cgcacacaaaggcaaagagctccttaaagggacctgcctgctcctccgtgcagctgcaaacccgtgtcggtgcaggctcagcaacccaggctttcgctcgagaatgagtggggaggggtc

SEQ ID NO: 558875 - DNA, 120 bp, Artificial Sequence
  ENSG00000169282_28 (sequence is synthesized)
ttgaggagcccccacgtcctcccggagcggaggcgggagggagctgacagccggagtggatggagaccaccagtccgaggggacccgcttgcgattagctgcttcttgggatgctccgcg

SEQ ID NO: 558876 - DNA, 120 bp, Artificial Sequence
  ENSG00000169282_29 (sequence is synthesized)
cgccagttgagcatcctgcctgtggtccaggggatgctggcggcgcatcttgcggtaagcctgcgctgatttgagccatcgcccagaagcgagcccgcattcagacaccgcggaccggct

SEQ ID NO: 558877 - DNA, 120 bp, Artificial Sequence
  ENSG00000169282_30 (sequence is synthesized)
ccgcgaagggctgcgtgcagtcaccatgaatgctcagctctaggcttctgtaaaaacctcccccactgcatggatttggctgtttaatcagccgagattacagcccgggaagatttgcaa

SEQ ID NO: 558878 - DNA, 120 bp, Artificial Sequence
  ENSG00000169282_31 (sequence is synthesized)
acctgattctccctccagctgctgtgacaacttcggggccgtctgtttacttctctgggtccccggggactctttcctgcatcgcagccccttgtgccactttgtgggcttggctcgaaa

SEQ ID NO: 558879 - DNA, 120 bp, Artificial Sequence
  ENSG00000169282_32 (sequence is synthesized)
gtcagccgccaggactcctctgacggcatccccaggaagggggagcaaggagggcttaaaagaaaagcagaaatccccgcaactgctcaacctctcgtgactgcctgtgttctggggttc

SEQ ID NO: 558880 - DNA, 120 bp, Artificial Sequence
  ENSG00000169282_33 (sequence is synthesized)
tgagagggaccgtgcgctgcctggggaagcaatgcaagtctccatagcctgcacagagcacaatttgaagagtcggaatggtgaggaccgacttctgagcaagcagagctccaccgcccc

SEQ ID NO: 558881 - DNA, 120 bp, Artificial Sequence
  ENSG00000169282_34 (sequence is synthesized)
caatgtggtgaacgcagcccgggccaaattccgcacggtcgctatcatcgcgcgcagcctggggacgttcacgcctcagcatcacatttctctcaaagagtccaccgcaaagcagactgg

SEQ ID NO: 558882 - DNA, 120 bp, Artificial Sequence
  ENSG00000169282_35 (sequence is synthesized)
gcttatgtgtattttccatatatgtaaaacatacacatgtaaaatatatgtggccataaattaggcaataatcatctaaataaaaattatattggcagctaagctgcactgaatactcaa

SEQ ID NO: 558883 - DNA, 120 bp, Artificial Sequence
  ENSG00000169282_36 (sequence is synthesized)
atgcacaggcctgggcagggacacacaaccaacagctctgtcgggaacttaggagcctgctcgcctacaaaaatgataagagagatctaaagaaaacaagctaaaccttttgagggacat

SEQ ID NO: 558884 - DNA, 120 bp, Artificial Sequence
  ENSG00000169282_37 (sequence is synthesized)
actgaagccagataacccaaggtattcacagcaagatacagtgagtcttaaagttaagcaccgtgcaattagctttgcttccttgggtttttgaaacatgcatctgtataaacctgcctg

SEQ ID NO: 558885 - DNA, 120 bp, Artificial Sequence
  ENSG00000169282_38 (sequence is synthesized)
tgcagacatcccgagccccaagctgggtctgccaaaatccagtgaatcggctctaaaatgtagatggcacctagcagtgaccaagactcagcctcaggcggcctgcaaacctgtgaggcc

SEQ ID NO: 558886 - DNA, 120 bp, Artificial Sequence
  ENSG00000169282_39 (sequence is synthesized)
cagtggagcagccgaacagaaatatgtggaaaagtttctacgtgttcatggaatttcgttgcaggaaaccaccagagcagagacgggcatggcatacaggaatcttggaaaatcaggact

SEQ ID NO: 558887 - DNA, 120 bp, Artificial Sequence
  ENSG00000169282_40 (sequence is synthesized)
tctgagatttaaattgcaatccaaacatattctatcatcaatcaatcaatggagattaactactgaagataccatttctcactgggttttagaacactccgcactaaggttaaggcttca

SEQ ID NO: 558888 - DNA, 120 bp, Artificial Sequence
  ENSG00000169282_41 (sequence is synthesized)
caaattcacttttaaaaacttacttgcaaatcaaaaccaaatataaatattatggcttagctgtgggaacagccagttttttatatgcgaatctgtcatggtaaatatactaatgtattt

SEQ ID NO: 558889 - DNA, 120 bp, Artificial Sequence
  ENSG00000169282_42 (sequence is synthesized)
cacagttagttagttagttagttatgtccttaagaaaaaattccacgcactcttattattttcttttctcttccaaaaagaattccctggcagagaatctatcattccaaaaggtaacct

SEQ ID NO: 558890 - DNA, 120 bp, Artificial Sequence
  ENSG00000169282_43 (sequence is synthesized)
agctttgcctgaggcctctgggcttcatgcaggaggaggagatcccagaacaaaatcaaccccattttgcaaaccaggaagctaaatttacagagaggtcagatgatttgcctacgttta

SEQ ID NO: 558891 - DNA, 120 bp, Artificial Sequence
  ENSG00000169282_44 (sequence is synthesized)
ggctgtcaagaaagcatattattgaagcaaattcttgaaagaaaccaaacttcaactctgaatagtgctcatatttagattttggggtttgtttcctgcttctgctcccaggattgaagg

SEQ ID NO: 558892 - DNA, 120 bp, Artificial Sequence
  ENSG00000169282_45 (sequence is synthesized)
attccctttcaggatgctcctacagcagctgcctaatactctcagttgcagtcagatgttggctgggaccacagtcatctaaggatactgctcaagctggctgttgtctggaaactcagc

SEQ ID NO: 558893 - DNA, 120 bp, Artificial Sequence
  ENSG00000169282_46 (sequence is synthesized)
tggggctactgatcagagcacctgcatgtggctgtccagcaaggcaatgttaaggtcccatccagatctactgaatcataatctccagaagtgagatccagaacctgcattttcaggctg

SEQ ID NO: 558894 - DNA, 120 bp, Artificial Sequence
  ENSG00000169282_47 (sequence is synthesized)
acagatgctctttccatgccatgcagctgctgctgtggggtgggagaagggtggcatcggcaattcaccgctgtctttcctactctcttcactgcctttttcagcgatatgaagttaaaa

SEQ ID NO: 558895 - DNA, 120 bp, Artificial Sequence
  ENSG00000169282_48 (sequence is synthesized)
cctatgaaagtggtgttaacctctttgatactgccgaagtctatgctgctggaaaggctgaagtgattctggggagcatcatcaagaagaaaggctggaggaagtaacttgacaagaagc

SEQ ID NO: 558896 - DNA, 120 bp, Artificial Sequence
  ENSG00000169282_49 (sequence is synthesized)
caaagctttcttatctgaacacatttagtcagcatctctcctgtgtgcccaggaaccctattatctggctattcagaacaatgcttcatctgctatccttgagaaacatgaggggctgtg

SEQ ID NO: 558897 - DNA, 120 bp, Artificial Sequence
  ENSG00000169282_50 (sequence is synthesized)
cttacacgtccctttccaacacctcctgtagccaaagatagtggtaataagggaagctataacatctatgggcagtggggaggtaatacttccccatttcactatagatttcagccccaa

SEQ ID NO: 558898 - DNA, 120 bp, Artificial Sequence
  ENSG00000169282_51 (sequence is synthesized)
acactctacagggataaggtttaattcacaggaaatggtaaaattgactcagagattattgttgattttatttttcctgttgtattttttacatttagactattaatagcccttgaagct

SEQ ID NO: 558899 - DNA, 120 bp, Artificial Sequence
  ENSG00000169282_52 (sequence is synthesized)
gtacattatatatgcaggttgaacagtcagagaatgaaacaatttggaattaacattagtcactttatgaaaagattgtattgctgtgatgttgttttgctttatttgtttgtttacttt

SEQ ID NO: 558900 - DNA, 120 bp, Artificial Sequence
  ENSG00000169282_53 (sequence is synthesized)
gtgttgattcaatggctgctctacaatggcgcctgagattttgctgagctgtgggtggcaggagttttacaacagtcacagctctgtctcagcctcaaggaaaaagtcacaagctttcag

SEQ ID NO: 558901 - DNA, 120 bp, Artificial Sequence
  ENSG00000169282_54 (sequence is synthesized)
ctttgggcaggctaaatcccagccttcaagtaacccctcagtgccctatgtctgaaggaaagaatacttctgtcctatggatactggctgagacttctttctttccctctccactaaaac

SEQ ID NO: 558902 - DNA, 120 bp, Artificial Sequence
  ENSG00000169288_0 (sequence is synthesized)
gcaatccggagtgcccaacatggcggcggccgtaaggtgcatgggtagagccttgatacatcatcaaaggcatagcctttccaagatggtttatcagacatcactttgttcttgttctgt

SEQ ID NO: 558903 - DNA, 120 bp, Artificial Sequence
  ENSG00000169288_1 (sequence is synthesized)
aaacatccgagtgcccaacagacattttgctgctgctacaaagtctgcaaagaaaacaaaaaaaggtgctaaagaaaaaacaccagatgagaaaaaagatgaaatagaaaaaataaaagc

SEQ ID NO: 558904 - DNA, 120 bp, Artificial Sequence
  ENSG00000169288_2 (sequence is synthesized)
atatccctatatggaaggcgaacctgaggatgatgtctatttaaaacgcttatacccgagacagatatatgaggtggagaaagctgttcacttacttaagaaatttcaaattcttgactt

SEQ ID NO: 558905 - DNA, 120 bp, Artificial Sequence
  ENSG00000169288_3 (sequence is synthesized)
tactagtccaaagcaaagtgtttatcttgatttgacactggatatggcactgggaaagaagaaaaacgtggagccatttaccagtgttcttagtttgccatacccatttgcttccgaaat

SEQ ID NO: 558906 - DNA, 120 bp, Artificial Sequence
  ENSG00000169288_4 (sequence is synthesized)
agatttgggatgatgaaattgttgcagacttttacgtagctgttccagaaataatgcctgaacttaatcgattaaggaagaaactgaataaaaaatatccaaagctttctcgaaattcca

SEQ ID NO: 558907 - DNA, 120 bp, Artificial Sequence
  ENSG00000169288_5 (sequence is synthesized)
ttggccgtgacatccccaaaatgcttgaattatttaaaaatggacatgaaattaaggtagatgaagaaagggagaactttctccagaccaaaatagcaacattggatatgtcaagtgacc

SEQ ID NO: 558908 - DNA, 120 bp, Artificial Sequence
  ENSG00000169288_6 (sequence is synthesized)
agatagctgccaatctgcaagcagttattaatgaagtttgtaggcacagaccgctgaatttgggtccctttgtggtacgtgctttccttcgtagttcaacaagtgaaggtttattactga

SEQ ID NO: 558909 - DNA, 120 bp, Artificial Sequence
  ENSG00000169288_7 (sequence is synthesized)
agattgatccattgttgcctaaagaagtaaaaaatgaagaaagtgaaaaagaagatgcctaaatgtggtgaattgtgaaattactttcagtggtttaagaagcaatggagaaaatgataa

SEQ ID NO: 558910 - DNA, 120 bp, Artificial Sequence
  ENSG00000169288_8 (sequence is synthesized)
tacagcataatttttacatttgatgtcttgttattgatcatacttgaaagtgaactttaacattgaaaaatcgtacagtcatttcaagaataagaaaataaaattttctctttgtctgaa

SEQ ID NO: 558911 - DNA, 120 bp, Artificial Sequence
  ENSG00000169288_9 (sequence is synthesized)
gcatgggtagaggtaaggcgaggggttgtcttgcaggggaaatggctctggcaccgagtctctggttgcagcagagtgcaaggcggattctgctctgggtgctgaaaatgcctcgtgctg

SEQ ID NO: 558912 - DNA, 120 bp, Artificial Sequence
  ENSG00000169288_10 (sequence is synthesized)
agataatcctaggaataatgtatgctgagggtatgccgtgctctctatgtaatgagttcctcacattgattcatctatggaagacttgcttgagcatggtgggagtgatgtctcttcagt

SEQ ID NO: 558913 - DNA, 120 bp, Artificial Sequence
  ENSG00000169288_11 (sequence is synthesized)
ggcacagtcttcattctatttcttaccctttaaataattcacatttttcagtgcatggaattaaattttcaagattccattggccgtgacatccccaaaatgcttgaattatttaaaaat

SEQ ID NO: 558914 - DNA, 120 bp, Artificial Sequence
  ENSG00000169291_0 (sequence is synthesized)
gtctgtcgctgcgccggggatactcccgccgcctccgctcggtcctctctggtccctgggagcgtgggctgggccgcagggggcttccgtgggcctggcctctcccaccgcaggaggaaa

SEQ ID NO: 558915 - DNA, 120 bp, Artificial Sequence
  ENSG00000169291_1 (sequence is synthesized)
cgcccgccgcctccgagagccacggtgtcctcgggccgggcaggcgttgaagacgagcccgggcggggccccccgcgcgtcgtgcctgtcgcctgccgtgtccggagcagaggctagcgc

SEQ ID NO: 558916 - DNA, 80 bp, Artificial Sequence
  ENSG00000169291_2 (sequence is synthesized)
tccggagcagaggctagcgcccgcccgctcggcgccccgagccgtgagaaccccaccctgccgggcgtgggcgacggccg

SEQ ID NO: 558917 - DNA, 120 bp, Artificial Sequence
  ENSG00000169291_3 (sequence is synthesized)
ggcctccagcgccccagtcacggggaatgcagtggtccccgacccctggcgcctctgcgtgtctgggctgggcttcctcgctcgcctgctccacggccccgacgctcctgggccgagccg

SEQ ID NO: 558918 - DNA, 120 bp, Artificial Sequence
  ENSG00000169291_4 (sequence is synthesized)
gccggggccccctcatggcggccaagtggttcaaggagttccccctgaacctgaagaccgtgtcggagcgggccaagcccgggggcggcggcggcaaattgcgcaagaactcggaggcgg

SEQ ID NO: 558919 - DNA, 120 bp, Artificial Sequence
  ENSG00000169291_5 (sequence is synthesized)
gcggcgctgggccgggtcctggcaagggccgcaagaactcggcggccgagctggggagcggcagggccggcgtcggccccaaggacagccggctgtcccgcgacagcctgcagggtctga

SEQ ID NO: 558920 - DNA, 120 bp, Artificial Sequence
  ENSG00000169291_6 (sequence is synthesized)
ttcaggccgccgcgggcaagggccgcaaaaactcccgggccacggaggaggagccccaccggggtgcaaccaagagctcgggctgcagcacctacatcaacaggctcatcaaggtggaca

SEQ ID NO: 558921 - DNA, 120 bp, Artificial Sequence
  ENSG00000169291_7 (sequence is synthesized)
ctcaggagaagaacgggaagagcaactaccccagcagcagtagctccagctccagctcctcttcctccgcgtcctcttccccttcctccctggggcccgagctggacaagggcaagatta

SEQ ID NO: 558922 - DNA, 120 bp, Artificial Sequence
  ENSG00000169291_8 (sequence is synthesized)
ttaagcagcaagagacggtcatcattttagaagactatgctgacccttatgatgccaaacggacaaagggtcaaagggatgcagagagagtcggagagaacgacggttacatggaaccat

SEQ ID NO: 558923 - DNA, 120 bp, Artificial Sequence
  ENSG00000169291_9 (sequence is synthesized)
atgatgcacagcaaatgataacagaaattagacgacggggttccaaagatcccctggtgaaggctctccagctgcttgacagtccctgtgaacccgcagacggtggcctgaaatcagaga

SEQ ID NO: 558924 - DNA, 120 bp, Artificial Sequence
  ENSG00000169291_10 (sequence is synthesized)
ccttggccaaaagacggagttccaaggacctcctggggaagccgccacagctatacgacactccctacgagcctgcagaaggggggcccagggcagaggggaaggcgcggcccccagaca

SEQ ID NO: 558925 - DNA, 120 bp, Artificial Sequence
  ENSG00000169291_11 (sequence is synthesized)
gccggctgcccgagaacgacgagaggcccgcggcagagtacgagcagccatgggagtggaagaaggagcagatcgtgcgggctctgtcagtccagtttgaaggagctgagcgaccttcct

SEQ ID NO: 558926 - DNA, 120 bp, Artificial Sequence
  ENSG00000169291_12 (sequence is synthesized)
tcagggaggagacagtgaggcagcaccaccggcagaagagctggacccagaagatcctgaagccagccctctcggaccacagtgagggagagaaagtggacccgggcctgcccctggaga

SEQ ID NO: 558927 - DNA, 120 bp, Artificial Sequence
  ENSG00000169291_13 (sequence is synthesized)
agcagccctggtatcatggtgccatcagccgtgctgaggctgagagtcgactacagccctgcaaagaagctggttacctggttcgaaatagtgagtcagggaacagcaggtactccattg

SEQ ID NO: 558928 - DNA, 120 bp, Artificial Sequence
  ENSG00000169291_14 (sequence is synthesized)
ccctaaagactagtcaaggatgtgtccacatcatagtggctcagaccaaagacaacaaatacacactgaatcagacaagcgctgtgtttgacagcatccctgaagtggtacactattatt

SEQ ID NO: 558929 - DNA, 120 bp, Artificial Sequence
  ENSG00000169291_15 (sequence is synthesized)
ccaatgaaaagttgcctttcaaaggggcagaacacatgactttactctacccagtgcacagcaagcttcactaagattcagccactgcaagccctgggcctctggcaccttcaagggcat

SEQ ID NO: 558930 - DNA, 120 bp, Artificial Sequence
  ENSG00000169291_16 (sequence is synthesized)
catcagcgcacaaccagcatctcagaggacaaggctggactagcaactgctagaaaatgggagtcttccttgaaaagtcagagagtgatttgttttgttttgtttgagacgaagtctcgc

SEQ ID NO: 558931 - DNA, 120 bp, Artificial Sequence
  ENSG00000169291_17 (sequence is synthesized)
gcaatggcgcaatcttggctcactgcaacatctgactcctgggttcaagcagttcttccccatcagcctcccaagtaggtgggactataggttcgcaccaccactcccagctaatttttt

SEQ ID NO: 558932 - DNA, 69 bp, Artificial Sequence
  ENSG00000169291_18 (sequence is synthesized)
catcagcctcccaagtaggtgggactataggttcgcaccaccaccttcgtcaggctggtctcaaactcc

SEQ ID NO: 558933 - DNA, 120 bp, Artificial Sequence
  ENSG00000169291_19 (sequence is synthesized)
caggcatgagccactgcacccggccaagtctttggtcttaaagtgattccatgacactttgtttgtggcctgtcccttgtttccttgctaagtagttctacaataagaaatcatgattta

SEQ ID NO: 558934 - DNA, 120 bp, Artificial Sequence
  ENSG00000169291_20 (sequence is synthesized)
atgatttagctgttgcctccagctctggggtagggtgttctttttatggtgtgaccctcaggaaggttaagtcaggagttcaggagcatcagagttctctagaaatgtgcctacttgtta

SEQ ID NO: 558935 - DNA, 120 bp, Artificial Sequence
  ENSG00000169291_21 (sequence is synthesized)
cctggaatacctggtctctaaacaaaccaacaaaaaatccacgtggcttttccacatgatggtgcagactggaagaggatgttatattggactcgttattggggaaatgaatgagcggga

SEQ ID NO: 558936 - DNA, 120 bp, Artificial Sequence
  ENSG00000169291_22 (sequence is synthesized)
gaaaatgtgaatgacgggcaagaaggtggtctttctccctcagaagtcctaattcagctctggagttcatggaaatccgcaacttcagagtgtggcctaaggattattttgttggtcagc

SEQ ID NO: 558937 - DNA, 120 bp, Artificial Sequence
  ENSG00000169291_23 (sequence is synthesized)
ctttccaagaaagtgtgtgttctctcaatctctgtggattttctcattttttagcaaatcagtgagataagcataaataggaaggaagataccccaggtttaagaatcaccaatatcatt

SEQ ID NO: 558938 - DNA, 120 bp, Artificial Sequence
  ENSG00000169291_24 (sequence is synthesized)
aggcattggcatcattattagaattctgaattatagaataaaaggtacaacaaaaatttcatttctgaattttaaaattctggaaatttgcaaagctccacaactgtttttttactgaat

SEQ ID NO: 558939 - DNA, 120 bp, Artificial Sequence
  ENSG00000169291_25 (sequence is synthesized)
taattacatagaacttcgatgtcttttgtttcatcatcattgggcattttagttgctatggaataatttttaatttttgtctctaaaattagatttgctttgtagtaaattttttaaaaa

SEQ ID NO: 558940 - DNA, 120 bp, Artificial Sequence
  ENSG00000169291_26 (sequence is synthesized)
tgcaaccctaagatctgattatatgaactgggtctctaaagcctacaaagattctctcgttctgtaccaagcagactgccttgtactatacagaagtgtttgaaaagacctagaggtttt

SEQ ID NO: 558941 - DNA, 120 bp, Artificial Sequence
  ENSG00000169291_27 (sequence is synthesized)
tatcaccagtttatttactgtgaaaaaaaccatgggaatggcatactgtgagaagagtactatggtgaatggctccagaattaaaattcagcagatgtgtctgtattctggggttggtca

SEQ ID NO: 558942 - DNA, 120 bp, Artificial Sequence
  ENSG00000169291_28 (sequence is synthesized)
tttgggtctcaaaactgccccatatgcaaatgtactgactgtcatcaatgaaaagttaacctttgtagcttataaatacacacaaaatgttgatttggttaattttttaggaaagtatac

SEQ ID NO: 558943 - DNA, 120 bp, Artificial Sequence
  ENSG00000169291_29 (sequence is synthesized)
ctttgtagttactagttacatttgactgtaagatttagaggttagtaaatttttgcttctttattcagataagatctcagccaaaaggttgtgtgatctttgattttaaaaatttaagag

SEQ ID NO: 558944 - DNA, 120 bp, Artificial Sequence
  ENSG00000169291_30 (sequence is synthesized)
aaaatttaagaggaacttttcctcactggaacacaatgattttattaataaagaatgtaggctgggtgcggtggctcatgcacgtaatcccaacaatttgggaggctgaggcaggcagat

SEQ ID NO: 558945 - DNA, 67 bp, Artificial Sequence
  ENSG00000169291_31 (sequence is synthesized)
gattatgtcactgcactccatggcctggtggtggatgcctgtggttccagctattcgggaggctgag

SEQ ID NO: 558946 - DNA, 120 bp, Artificial Sequence
  ENSG00000169291_32 (sequence is synthesized)
gtggtggatgcctgtggttccagctattcgggaggctgaggtaggtggatcacctctgctcaggtcaaggctgcagcgagccatgatcgcaccattgcactccagcctgagtgacagagt

SEQ ID NO: 558947 - DNA, 120 bp, Artificial Sequence
  ENSG00000169291_33 (sequence is synthesized)
gagaccctgtctcaacaagcaagcaaacaaaaaaccaaaaggaatgtttttttcagatactgatagaatgttttcagtgtgtattggttcatttactatatctttagtgtaagattttaa

SEQ ID NO: 558948 - DNA, 120 bp, Artificial Sequence
  ENSG00000169291_34 (sequence is synthesized)
aaggttttttcagcatccattcaacaaatatttattatctttatacaaattattcattgtgttaaacttatttttagtttaacattctagaaatgaaacgtttttacttaaccttattct

SEQ ID NO: 558949 - DNA, 120 bp, Artificial Sequence
  ENSG00000169291_35 (sequence is synthesized)
acaaagggaatacagcagttattctaattttaataaatgctaaaagctttatacaatttttctttgtgcactaaatgatttttggcccatacccagcaactgtgatgaatgtataatgaa

SEQ ID NO: 558950 - DNA, 120 bp, Artificial Sequence
  ENSG00000169291_36 (sequence is synthesized)
ataacatcttgaaaacaggccagatacattaagtatttattgagcttctgtcatatgcccagtattatgcttcttctatactgtttctctgtgacaagtcatactatattctttatagaa

SEQ ID NO: 558951 - DNA, 120 bp, Artificial Sequence
  ENSG00000169291_37 (sequence is synthesized)
ttaaaagtagaggagaggcagagtttacatattgtccagttgctttacagttgtacaggaggttataagaagaaatatagtaaattagtgggaagtcagaggtgggggcgttagtgagct

SEQ ID NO: 558952 - DNA, 120 bp, Artificial Sequence
  ENSG00000169291_38 (sequence is synthesized)
attttcttcttgaggttgtgacacaagctgacaaaagccagggagttcacagctgtgtggtggcacaaagttccatatgttctaaaaacaattaggcccagcagggtgtccctaatggct

SEQ ID NO: 558953 - DNA, 120 bp, Artificial Sequence
  ENSG00000169291_39 (sequence is synthesized)
tccttgttaaacctccatggccagctgatctgaagctctgtgacatgttctctgagctctgaatgctctggctttttgtcattttgtcttgagacaagtattttcctgtagtcctcattc

SEQ ID NO: 558954 - DNA, 120 bp, Artificial Sequence
  ENSG00000169291_40 (sequence is synthesized)
cttcgagttattccatctcccaggatattctctggtgagaagaatgtctttcagtgaatttgccttgaatttagcatccatagagctgtgtcagtgttcttcttgatcacaccttcttta

SEQ ID NO: 558955 - DNA, 120 bp, Artificial Sequence
  ENSG00000169291_41 (sequence is synthesized)
aaaaaaatacttgcttgcgatgactggacaagttcagttggttagtttcaggcctataagaagagagagtaaaggaccttgctatttactttgataccatagttgtatctcaggatggcc

SEQ ID NO: 558956 - DNA, 120 bp, Artificial Sequence
  ENSG00000169291_42 (sequence is synthesized)
tgcaaaccactggccttgtgtgtatttaagctaggaataaaataatggagaagtgttaatatgtatacaaaaaggtaaatattgatatatctactctctgttgggggcagaagtgtcatt

SEQ ID NO: 558957 - DNA, 120 bp, Artificial Sequence
  ENSG00000169291_43 (sequence is synthesized)
ttaagttattcaaagcactttcttaagcattttagaaagcctttattctttgctgttggaagtctccgtactttgcagaattggtatttgtgtactagcctctgccgcaggatggggagg

SEQ ID NO: 558958 - DNA, 120 bp, Artificial Sequence
  ENSG00000169291_44 (sequence is synthesized)
tgggcaggtagctgataggggcagccaggagtttttgaggcaggtggtgggaaattgtcctaatttgttaattggattatgtaactctgttactagtctgttattggctgttgttactgg

SEQ ID NO: 558959 - DNA, 120 bp, Artificial Sequence
  ENSG00000169291_45 (sequence is synthesized)
atgcatcttgatattcagaagaataactgtgaggcattcttcagttgcgggttaagtggggttagtttctgttctgtcagatgccctttttcagtcaaaggttagccccttgtttctccc

SEQ ID NO: 558960 - DNA, 120 bp, Artificial Sequence
  ENSG00000169291_46 (sequence is synthesized)
tccttccagggtttagggagtgcagtgatgtcgatttcatttcccttccccgcaccccttgacactcagcaggattgcactgaaacccttcacagatctctcgttcactagttgtctcct

SEQ ID NO: 558961 - DNA, 120 bp, Artificial Sequence
  ENSG00000169291_47 (sequence is synthesized)
atttttccataactagcactagtttggccttatgacctggttagaatcactcttctgtattctcatttccaatttttgtgccccactaacgtggactagagaaacttggcctgctgtgca

SEQ ID NO: 558962 - DNA, 120 bp, Artificial Sequence
  ENSG00000169291_48 (sequence is synthesized)
gtgggccttctgttcaacttaccctccaccgctgaccctgtgtgaagagagatggtgcgttactgccatctaatgggaaaagagaaaactgcagttgggaaaagcagctgtgcatttaag

SEQ ID NO: 558963 - DNA, 120 bp, Artificial Sequence
  ENSG00000169291_49 (sequence is synthesized)
ggtagggctttctgaaggatttctgatacagtccagaaaagggaaaatgatgacacagcagttgccatcttgaaaaatgccctttcctgcggaaagggtgttttgaagtctaatacaact

SEQ ID NO: 558964 - DNA, 120 bp, Artificial Sequence
  ENSG00000169291_50 (sequence is synthesized)
atcatcacaaggtccctggactaaggctggatcgtgtaatttagaatctcaaattgtattttaattaatatgctggcaacagaatcattgaaacaggcgtctcattttgtcaagttctta

SEQ ID NO: 558965 - DNA, 120 bp, Artificial Sequence
  ENSG00000169291_51 (sequence is synthesized)
gccgttcagtttgtcaggggctttaatattttagatatcaactaatacatagtttcaacttttaaaaatgtttgaagattgtatgtaatataggtgtctatctatagtgccttagtaatt

SEQ ID NO: 558966 - DNA, 120 bp, Artificial Sequence
  ENSG00000169291_52 (sequence is synthesized)
taaatcagaaatattttataaaacttctggttgttttgcagtagccaatataggcttcatgccctcctgaagatagtttcctctgaaatgtaactttaaataaacattattccaagaaaa

SEQ ID NO: 558967 - DNA, 120 bp, Artificial Sequence
  ENSG00000169291_53 (sequence is synthesized)
tgtttcacaggggtgtgcattgcagaaaataagaggcatttgtttggacaatggaacatgagacacttggatgagaatgcaaaattggtattgggtaaatgcctccattatctattatga

SEQ ID NO: 558968 - DNA, 120 bp, Artificial Sequence
  ENSG00000169291_54 (sequence is synthesized)
taatgaaggtcttattgcattatctttgtgcattagtcaatgtctaccttacattacctaatctggagtaggccctctcagtagagaaataattcctgatgaaaagaattatttctaaca

SEQ ID NO: 558969 - DNA, 120 bp, Artificial Sequence
  ENSG00000169291_55 (sequence is synthesized)
gggtagtacagtcattcttcttttattccctagtattggggactttaataaatcaagatccccctgattgtcaaaatgccaactgcaattttgacaccagtttcttctggtgaagaagga

SEQ ID NO: 558970 - DNA, 120 bp, Artificial Sequence
  ENSG00000169291_56 (sequence is synthesized)
aatgctgacttgcctgttgctccctctgtctgattgtacacagaaaattcacttttgcctggtaggcctggtggagtgtgtatcatggaaattctcactgctccgtgagttcagtgtccc

SEQ ID NO: 558971 - DNA, 120 bp, Artificial Sequence
  ENSG00000169291_57 (sequence is synthesized)
tgtattggaggatcattgtcaagagccctaacagcatttccttcctgaggaagctgagcccctgcagctgaaacaatcaggctggaggagaacagagtcgggcgggggagttgagcaata

SEQ ID NO: 558972 - DNA, 120 bp, Artificial Sequence
  ENSG00000169291_58 (sequence is synthesized)
tggctcagaaaatgggataggccaccagatatacaataccaggaatagctcgactgtgttcctgaaattggtgcttgtggattaaatctttgagcttttggtgccagctttcattttata

SEQ ID NO: 558973 - DNA, 120 bp, Artificial Sequence
  ENSG00000169291_59 (sequence is synthesized)
caaccaggaatggtctttccagatgcgaggggaggaaatggtttttattattattatttatgtgttctttttggaaaaaaagaagaagaacccttacttacgtccttttagctgtggtga

SEQ ID NO: 558974 - DNA, 120 bp, Artificial Sequence
  ENSG00000169291_60 (sequence is synthesized)
tcaagtgatccgcccacttcggcctcccacagtgctgggatacaggcgtgagccaccgtgcccagccgaggatgagtttctacctcaccttagtagcctcgtgcttgggcgtaagcactg

SEQ ID NO: 558975 - DNA, 120 bp, Artificial Sequence
  ENSG00000169291_61 (sequence is synthesized)
gtagcctcgtgcttgggcgtaagcactggttttgcaatttgagagctagaagggacttggcattctttttaattgttttctttgttccactacctgatgactcatatgtgataaggataa

SEQ ID NO: 558976 - DNA, 120 bp, Artificial Sequence
  ENSG00000169291_62 (sequence is synthesized)
accactcaaggattacatgcgtttagactgtgaaatttctgagagtaccactagagtgtggaatgcatttctgtgtgtgtagaaccattacgggatggatgagaacctatcaacctagtg

SEQ ID NO: 558977 - DNA, 120 bp, Artificial Sequence
  ENSG00000169291_63 (sequence is synthesized)
cagccgtgctgaggctgagagtcgactacagccctgcaaagaagctggttacctggttcgaaatagtgagtcagggaacagcaggtactccattgccctaaaaaatcaccatctgctctc

SEQ ID NO: 558978 - DNA, 120 bp, Artificial Sequence
  ENSG00000169291_64 (sequence is synthesized)
ctaagttcttctggaaagagcaccgtaaccatgtcatcctaacagcaatgccatgaagaaagggaggcagctccctccacgtcctggctccagtgcccactcccgtgccccctccatggc

SEQ ID NO: 558979 - DNA, 120 bp, Artificial Sequence
  ENSG00000169291_65 (sequence is synthesized)
aggagatggcggccaccatcacctgtcctgtggctttcctctgactgcccaggtgggggcccagaggcggcgcctctcagtccagctttgagtggagttacataatttccaggcttccct

SEQ ID NO: 558980 - DNA, 120 bp, Artificial Sequence
  ENSG00000169291_66 (sequence is synthesized)
gcagttctcgcctccccatccctgaactgtttacacagtagctctcacccacaaagagtccgcatgatggcttttcctctgtttggaagatgtggatggctgtgtcccaagtttttccta

SEQ ID NO: 558981 - DNA, 120 bp, Artificial Sequence
  ENSG00000169291_67 (sequence is synthesized)
cctaagatccttttcagtaggggatggatttggtctatctgatgatcaagagttcagggtggcctttgtgatagtgttacaccccctcccaggtccaataaacagtcttctgacaaataa

SEQ ID NO: 558982 - DNA, 120 bp, Artificial Sequence
  ENSG00000169297_0 (sequence is synthesized)
agaactgggctacgggcgccgcgggccatggcgggcgagaaccaccagtggcagggcagcatcctctacaacatgcttatgagcgcgaagcaaacgcgcgcggctcctgaggctccagag

SEQ ID NO: 558983 - DNA, 120 bp, Artificial Sequence
  ENSG00000169297_1 (sequence is synthesized)
acgcggctggtggatcagtgctggggctgttcgtgcggcgatgagcccggggtgggcagagaggggctgctgggcgggcggaacgtggcgctcctgtaccgctgctgcttttgcggtaaa

SEQ ID NO: 558984 - DNA, 120 bp, Artificial Sequence
  ENSG00000169297_2 (sequence is synthesized)
gaccacccacggcagggcagcatcctctacagcatgctgacgagcgcaaagcaaacgtacgcggcaccgaaggcgcccgaggcgacgctgggtccgtgctggggctgttcgtgcggctct

SEQ ID NO: 558985 - DNA, 120 bp, Artificial Sequence
  ENSG00000169297_3 (sequence is synthesized)
gatcccggggtgggcagagcggggcttccgggtgggcggcccgtggcactcctgtaccgctgctgcttttgtggtgaagaccacccgcggcagggcagcatcctctacagcttgctcact

SEQ ID NO: 558986 - DNA, 120 bp, Artificial Sequence
  ENSG00000169297_4 (sequence is synthesized)
agctcaaagcaaacgcacgtggctccggcagcgcccgaggcacggccagggggcgcgtggtgggaccgctcctacttcgcgcagaggccagggggtaaagaggcgctaccaggcgggcgg

SEQ ID NO: 558987 - DNA, 120 bp, Artificial Sequence
  ENSG00000169297_5 (sequence is synthesized)
gccacggcgcttctgtaccgctgctgcttttgcggtgaagaccacccgcagcagggcagcaccctctactgcgtgcccacgagcacaaatcaagcgcaggcggctccggaggagcggccg

SEQ ID NO: 558988 - DNA, 120 bp, Artificial Sequence
  ENSG00000169297_6 (sequence is synthesized)
agggccccctggtgggacacctcctctggtgcgctgcggccggtggcgctcaagagtccacaggtggtctgcgaggcagcctcagcgggcctgttgaagacgctgcgcttcgtcaagtac

SEQ ID NO: 558989 - DNA, 120 bp, Artificial Sequence
  ENSG00000169297_7 (sequence is synthesized)
aggtgctgcccctggaccagcagctggtgctggtgcgcaactgctgggcgtccctgctcatgcttgagctggcccaggaccgcttgcagttcgagactgtggaagtctcggagcccagca

SEQ ID NO: 558990 - DNA, 120 bp, Artificial Sequence
  ENSG00000169297_8 (sequence is synthesized)
tgctgcagaagatcctcaccaccaggcggcgggagaccgggggcaacgagccactgcccgtgcccacgctgcagcaccatttggcaccgccggcggaggccaggaaggtgccctccgcct

SEQ ID NO: 558991 - DNA, 120 bp, Artificial Sequence
  ENSG00000169297_9 (sequence is synthesized)
cccaggtccaagccatcaagtgctttctttccaaatgctggagtctgaacatcagtaccaaggagtacgcctacctcaaggggaccgtgctctttaacccggacgtgccgggcctgcagt

SEQ ID NO: 558992 - DNA, 120 bp, Artificial Sequence
  ENSG00000169297_10 (sequence is synthesized)
gcgtgaagtacattcagggactccagtggggaactcagcaaatactcagtgaacacaccaggatgacgcaccaagggccccatgacagattcatcgaacttaatagtacccttttcctgc

SEQ ID NO: 558993 - DNA, 120 bp, Artificial Sequence
  ENSG00000169297_11 (sequence is synthesized)
tgagattcatcaatgccaatgtcattgctgaactgttcttcaggcccatcatcggcacagtcagcatggatgatatgatgctggaaatgctctgtacaaagatataaagtcatgtgggcc

SEQ ID NO: 558994 - DNA, 120 bp, Artificial Sequence
  ENSG00000169297_12 (sequence is synthesized)
acacaagtgcagtagtgcagttcaccatgagggaagaataaagagctgtgggcaaaagagtgtaaaatattttaaaataaactttcttaatatttttacatgcagagtatttttgtattc

SEQ ID NO: 558995 - DNA, 120 bp, Artificial Sequence
  ENSG00000169297_13 (sequence is synthesized)
aattaaagaaataattttattccagacagtcacaaatttctctgttccatagttaaagaagacatttgccaacaggtagcatagctctgtacatcttttaaaaaaaaaatagcagggtac

SEQ ID NO: 558996 - DNA, 120 bp, Artificial Sequence
  ENSG00000169297_14 (sequence is synthesized)
tagtataataagctattttcacaagtgtagcaatttcatggaacctgctcaaatcaaatttgtacatattgttataataaattttaaggtcttaactattaacttgattgaaaaaagctt

SEQ ID NO: 558997 - DNA, 120 bp, Artificial Sequence
  ENSG00000169297_15 (sequence is synthesized)
taattacttgaatacaagttaaagaactttgcaacgatattatcatcatggaagatcaaaggaccttcaaaagcagcctcctcttattactttccttataaaaacttacatccacttaaa

SEQ ID NO: 558998 - DNA, 120 bp, Artificial Sequence
  ENSG00000169299_0 (sequence is synthesized)
agatctcaccgcctgcttccctctgcagcggtagcacaagctcagcgatggcggctccagaaggcagcggtctaggcgaggacgcccggctggaccaggagaccgcccagtggctgcgct

SEQ ID NO: 558999 - DNA, 120 bp, Artificial Sequence
  ENSG00000169299_1 (sequence is synthesized)
gggacaagaattccttaactttggaggcagtgaaacgactaatagcagaaggtaataaagaagaactacgaaaatgttttggggcccgaatggagtttgggacagctggcctccgagctg

SEQ ID NO: 559000 - DNA, 120 bp, Artificial Sequence
  ENSG00000169299_2 (sequence is synthesized)
ctatgggacctggaatttctcgtatgaatgacttgaccatcatccagactacacagggattttgcagatacctggaaaaacaattcagtgacttaaagcagaaaggcatcgtgatcagtt

SEQ ID NO: 559001 - DNA, 120 bp, Artificial Sequence
  ENSG00000169299_3 (sequence is synthesized)
ttgacgcccgagctcatccatccagtgggggtagcagcagaaggtttgcccgacttgctgcaaccacatttatcagtcaggggattcctgtgtacctcttttctgatataacgccaaccc

SEQ ID NO: 559002 - DNA, 120 bp, Artificial Sequence
  ENSG00000169299_4 (sequence is synthesized)
cctttgtgcccttcacagtatcacatttgaaactttgtgctggaatcatgataactgcatctcacaatccaaagcaggataatggttataaggtctattgggataatggagctcagatca

SEQ ID NO: 559003 - DNA, 120 bp, Artificial Sequence
  ENSG00000169299_5 (sequence is synthesized)
tttctcctcacgataaagggatttctcaagctattgaagaaaatctagaaccgtggcctcaagcttgggacgattctttaattgatagcagtccacttctccacaatccgagtgcttcca

SEQ ID NO: 559004 - DNA, 120 bp, Artificial Sequence
  ENSG00000169299_6 (sequence is synthesized)
tcaataatgactactttgaagaccttaaaaagtactgtttccacaggagcgtgaacagggagacaaaggtgaagtttgtgcacacctctgtccatggggtgggtcatagctttgtgcagt

SEQ ID NO: 559005 - DNA, 120 bp, Artificial Sequence
  ENSG00000169299_7 (sequence is synthesized)
cagctttcaaggcttttgaccttgttcctcctgaggctgttcctgaacagaaagatccggatcctgagtttccaacagtgaaatacccgaatcccgaagaggggaaaggtgtcttgactt

SEQ ID NO: 559006 - DNA, 120 bp, Artificial Sequence
  ENSG00000169299_8 (sequence is synthesized)
tgtcttttgctttggctgacaaaaccaaggccagaattgttttagctaacgacccggatgctgatagacttgctgtggcagaaaagcaagacagtggtgaatggagggtgttttcaggca

SEQ ID NO: 559007 - DNA, 120 bp, Artificial Sequence
  ENSG00000169299_9 (sequence is synthesized)
atgagttgggggccctcctgggctggtggctttttacatcttggaaagagaagaaccaggatcgcagtgctctcaaagacacgtacatgttgtccagcaccgtctcctccaaaatcttgc

SEQ ID NO: 559008 - DNA, 120 bp, Artificial Sequence
  ENSG00000169299_10 (sequence is synthesized)
gggccattgccttaaaggaaggttttcattttgaggaaacattaactggctttaagtggatgggaaacagagccaaacagctaatagaccaggggaaaactgttttatttgcatttgaag

SEQ ID NO: 559009 - DNA, 120 bp, Artificial Sequence
  ENSG00000169299_11 (sequence is synthesized)
aagctattggatacatgtgctgcccttttgttctggacaaagatggagtcagtgccgctgtcataagtgcagagttggctagcttcctagcaaccaagaatttgtctttgtctcagcaac

SEQ ID NO: 559010 - DNA, 120 bp, Artificial Sequence
  ENSG00000169299_12 (sequence is synthesized)
taaaggccatttatgtggagtatggctaccatattactaaagcttcctattttatctgccatgatcaagaaaccattaagaaattatttgaaaacctcagaaactacgatggaaaaaata

SEQ ID NO: 559011 - DNA, 120 bp, Artificial Sequence
  ENSG00000169299_13 (sequence is synthesized)
tcttcccactagtaaaagcagccaaatgatcaccttcacctttgctaatggaggcgtggccaccatgcgcaccagtgggacagagcccaaaatcaagtactatgcagagctgtgtgcccc

SEQ ID NO: 559012 - DNA, 120 bp, Artificial Sequence
  ENSG00000169299_14 (sequence is synthesized)
acctgggaacagtgatcctgagcagctgaagaaggaactgaatgaactggtcagtgctattgaagaacattttttccagccacagaagtacaatctgcagccaaaagcagactaaaatag

SEQ ID NO: 559013 - DNA, 120 bp, Artificial Sequence
  ENSG00000169299_15 (sequence is synthesized)
tccagccttgggtatacttgcatttacctacaattaagctgggtttaacttgttaagcaatatttttaagggccaaatgattcaaaacatcacaggtatttatgtgttttacaaagacct

SEQ ID NO: 559014 - DNA, 120 bp, Artificial Sequence
  ENSG00000169299_16 (sequence is synthesized)
acattcctcattgtttcatgtttgacctttaaggtgaaaaaagaaaatggccaaacccaacaaactaacattcctactaaaaagttgagcttggacatattttgaatttttgtaagtgaa

SEQ ID NO: 559015 - DNA, 120 bp, Artificial Sequence
  ENSG00000169299_17 (sequence is synthesized)
gatttttaaactgactaacttaaaaaaatagattgtaattgatgtgccttaatttgcataaatcataaatgtatgtcctctctgtaattgttttaatgtgtgcttgaaatatccagaaaa

SEQ ID NO: 559016 - DNA, 120 bp, Artificial Sequence
  ENSG00000169299_18 (sequence is synthesized)
cctatggagttagtaaattctgggctgtcatatgtaggatagccactttttaggtatatgtacatttatatttctatcaattccttagaaagtaaaataaatgaatagatcaaatgttgt

SEQ ID NO: 559017 - DNA, 120 bp, Artificial Sequence
  ENSG00000169299_19 (sequence is synthesized)
gttcatgtttggggaaaatataatttgcagaaacctatgaagtagagcaaagatgctttaaaaagataagtttttttgaactaaattttttttagttctaataatgcacataggatatta

SEQ ID NO: 559018 - DNA, 120 bp, Artificial Sequence
  ENSG00000169299_20 (sequence is synthesized)
gtacatcgtacacgtgctaggaaaaaacagcttcagtgtctttgtttaatgtgttgaaactcatctttttaaatcttgaaaaaccaattgtttacttgaaacttgaaagtagcatatttt

SEQ ID NO: 559019 - DNA, 120 bp, Artificial Sequence
  ENSG00000169299_21 (sequence is synthesized)
tctgttttttggttgtttgttcatttgtattagcacaatttaatgtaattcctggtttggaggcagcaagacctatgagcaagaactatttacttgaccctcgtttttttctcttgttct

SEQ ID NO: 559020 - DNA, 120 bp, Artificial Sequence
  ENSG00000169299_22 (sequence is synthesized)
tgtgtggtctgaaatctaaaactagactttattatgatagatttcctataagccaatttctaataacaaatagatttattatttaatctgtaccttctatcttctcataattcgtggtct

SEQ ID NO: 559021 - DNA, 120 bp, Artificial Sequence
  ENSG00000169299_23 (sequence is synthesized)
tacagccttccaaaataactccagttgggcacccatgagctaggatcaaactttctttatatactttatatattttacattatttctgatttttaaagcaaatgattgccattatgatta

SEQ ID NO: 559022 - DNA, 120 bp, Artificial Sequence
  ENSG00000169299_24 (sequence is synthesized)
cactcaacctaaatagttatgaacagtttcagaacaatgaaaaattacaatactatgtgatagtattgtaactatttttctattttagtcatatgtcgcttatatcctaccagaactctt

SEQ ID NO: 559023 - DNA, 120 bp, Artificial Sequence
  ENSG00000169299_25 (sequence is synthesized)
aaatctataatattcgatatattctacaaactgctttattgtagaagccatatttatgtttattttataatgttttctagtgtcaaactgtactgtggagaaaagaaatgttagatctgt

SEQ ID NO: 559024 - DNA, 120 bp, Artificial Sequence
  ENSG00000169299_26 (sequence is synthesized)
aggcttagaccatcgttgtgtttgaagaattttctagctctaccaagtagaagatggaatgagaaggcactgaggaaattactcacctttcttattaggaaatacatcctggaattatga

SEQ ID NO: 559025 - DNA, 120 bp, Artificial Sequence
  ENSG00000169299_27 (sequence is synthesized)
gattcaaagatccacagtgaaacacggtttattttgcctctccagcactcaggttgaatgtcgaactgtcctactccaaaattgacatctcagatgatttacagccaaaaggaatgtctt

SEQ ID NO: 559026 - DNA, 120 bp, Artificial Sequence
  ENSG00000169299_28 (sequence is synthesized)
ggttttcattttgaggtagggtgtttctgggactcactcattttcctttcatctgctctgtagaagatctaaggcatgtctttctcttttggattatccctttaggaaacattaactggc

SEQ ID NO: 559027 - DNA, 120 bp, Artificial Sequence
  ENSG00000169302_0 (sequence is synthesized)
agtccagcgcagcccagcccagcccagcccggcgctcgcagcctccgccgcttccgggcagataggtgccttttcttgctccttgctcttggagttcttctcttagtccctgttccctgg

SEQ ID NO: 559028 - DNA, 120 bp, Artificial Sequence
  ENSG00000169302_1 (sequence is synthesized)
atgaaagcatcgctccgagcctcatgggaggaatgaaggaagaatcgagactagatatccaactaaggcttcgggacatgttttgagcgaagatgggtgtttctgcccggatagtataaa

SEQ ID NO: 559029 - DNA, 120 bp, Artificial Sequence
  ENSG00000169302_2 (sequence is synthesized)
tcgaggatccaggtctgggcagattcaaccatgggagcgaacacttcaagaaaaccaccagtgtttgatgaaaatgaagatgtcaactttgaccactttgaaattttgcgagccattggg

SEQ ID NO: 559030 - DNA, 120 bp, Artificial Sequence
  ENSG00000169302_3 (sequence is synthesized)
aaaggcagttttgggaaggtctgcattgtacagaagaatgataccaagaagatgtacgcaatgaagtacatgaataaacaaaagtgcgtggagcgcaatgaagtgagaaatgtcttcaag

SEQ ID NO: 559031 - DNA, 120 bp, Artificial Sequence
  ENSG00000169302_4 (sequence is synthesized)
gaactccagatcatgcagggtctggagcaccctttcctggttaatttgtggtattccttccaagatgaggaagacatgttcatggtggtggacctcctgctgggtggagacctgcgttat

SEQ ID NO: 559032 - DNA, 120 bp, Artificial Sequence
  ENSG00000169302_5 (sequence is synthesized)
cacctgcaacagaacgtccacttcaaggaagaaacagtgaagctcttcatctgtgagctggtcatggccctggactacctgcagaaccagcgcatcattcacagggatatgaagcctgac

SEQ ID NO: 559033 - DNA, 120 bp, Artificial Sequence
  ENSG00000169302_6 (sequence is synthesized)
aatattttacttgacgaacatgggcacgtgcacatcacagatttcaacattgctgcgatgctgcccagggagacacagattaccaccatggctggcaccaagccttacatggcacctgag

SEQ ID NO: 559034 - DNA, 120 bp, Artificial Sequence
  ENSG00000169302_7 (sequence is synthesized)
atgttcagctccagaaaaggagcaggctattcctttgctgttgactggtggtccctgggagtgacggcatatgaactgctgagaggccggagaccgtatcatattcgctccagtacttcc

SEQ ID NO: 559035 - DNA, 120 bp, Artificial Sequence
  ENSG00000169302_8 (sequence is synthesized)
agcaaggaaattgtacacacgtttgagacgactgttgtaacttacccttctgcctggtcacaggaaatggtgtcacttcttaaaaagctactcgaacctaatccagaccaacgattttct

SEQ ID NO: 559036 - DNA, 120 bp, Artificial Sequence
  ENSG00000169302_9 (sequence is synthesized)
cagttatctgatgtccagaacttcccgtatatgaatgatataaactgggatgcagtttttcagaagaggctcattccaggtttcattcctaataaaggcaggctgaattgtgatcctacc

SEQ ID NO: 559037 - DNA, 120 bp, Artificial Sequence
  ENSG00000169302_10 (sequence is synthesized)
tttgaacttgaggaaatgattttggagtccaaacctctacataagaaaaaaaagcgtctggcaaagaaggagaaggatatgaggaaatgcgattcttctcagacatgtcttcttcaagag

SEQ ID NO: 559038 - DNA, 120 bp, Artificial Sequence
  ENSG00000169302_11 (sequence is synthesized)
caccttgactctgtccagaaggagttcataattttcaacagagaaaaagtaaacagggactttaacaaaagacaaccaaatctagccttggaacaaaccaaagacccacaaggtgaggat

SEQ ID NO: 559039 - DNA, 120 bp, Artificial Sequence
  ENSG00000169302_12 (sequence is synthesized)
ggtcagaataacaacttgtaaaggcctcatgtcttcttcttgggacaatctcatgccagaaacttctaattacatatgtcaagaaaagctgacagtagttcttgccactccacacaccat

SEQ ID NO: 559040 - DNA, 120 bp, Artificial Sequence
  ENSG00000169302_13 (sequence is synthesized)
gacttagaaaatgtgaatgaatatatttcaaaaaaggcagcacaacacagtgaagggtcctgggcctgagctcctgggatgtcatttcacatcaatcaactgtgtgatctagagcaagtc

SEQ ID NO: 559041 - DNA, 120 bp, Artificial Sequence
  ENSG00000169302_14 (sequence is synthesized)
acttagccactttctgtgctttactttatttatctaaaatgagagggttatactagacgagccataccctgcctttttagtgctatagttgttattctaaaccgcctttatttttatttt

SEQ ID NO: 559042 - DNA, 120 bp, Artificial Sequence
  ENSG00000169302_15 (sequence is synthesized)
aaaattaatatatgaatatagatttatttttccactccttctaattatgcagtgacaaatggacaaatggacacaggactcagtgagacttttcagacctcgaaagtttcataaagtggt

SEQ ID NO: 559043 - DNA, 120 bp, Artificial Sequence
  ENSG00000169302_16 (sequence is synthesized)
cagaatgccccaggctacttggataaagataaggaattctatcagggaggcatgaatggaatcagattaaaagtaacagagatggatgagggccttccagtgatatgcgtgaatcagcat

SEQ ID NO: 559044 - DNA, 120 bp, Artificial Sequence
  ENSG00000169302_17 (sequence is synthesized)
tagatccgcttatctcagctggcaggagcctgctgtgcacaccacttcccagctccctcttcaacaatgtgaaagtggtaacttgaaattggtaataatgggagcatttacaccacggaa

SEQ ID NO: 559045 - DNA, 120 bp, Artificial Sequence
  ENSG00000169302_18 (sequence is synthesized)
actggtaaatgctcgttttttccctcctaacaagtgaattgctaaatattagcccaccactccttccaagaagcatgttccttgagggctaattgtcctctgaagattagcagagacctg

SEQ ID NO: 559046 - DNA, 120 bp, Artificial Sequence
  ENSG00000169302_19 (sequence is synthesized)
tatctggagaggatcagaaaagaatgtcatcacactgaaagtatgtccaccttgcagttcagaaaagttgcatcttatatggggtttattgtctaagttagaaatgaatttagaagatag

SEQ ID NO: 559047 - DNA, 120 bp, Artificial Sequence
  ENSG00000169302_20 (sequence is synthesized)
taaaatttaccgttgaaaaaccccttaaattacccataaagtatatgggaagtatcttttctcagtaaagcccaatacagtgtcacctttcactaatgaaacaagccattgcttttgttt

SEQ ID NO: 559048 - DNA, 120 bp, Artificial Sequence
  ENSG00000169302_21 (sequence is synthesized)
tgttttgacttagttatttttatttttggtctcattttggctaataccagatgagctaaaatgttgaacaaattatacttgtttttatagactagaattactcttttttttcttttcagg

SEQ ID NO: 559049 - DNA, 83 bp, Artificial Sequence
  ENSG00000169302_22 (sequence is synthesized)
caagtgattcttgtgtctcagcctcctaagtagctgggatcgcatgtgtgtgccaccatgtgtgctaagctggccaggttggt

SEQ ID NO: 559050 - DNA, 60 bp, Artificial Sequence
  ENSG00000169302_23 (sequence is synthesized)
tttgtatttttagtagagataggattttgctaagctggccaggttggtttcaaactcctg

SEQ ID NO: 559051 - DNA, 120 bp, Artificial Sequence
  ENSG00000169302_24 (sequence is synthesized)
acagtggaatgcccacacatccaagacaggcaagttcatggagactaagggaacagtggtatcatgtctcccttctcccttgtgcttactacaagaatggcaggcagaattccctactta

SEQ ID NO: 559052 - DNA, 120 bp, Artificial Sequence
  ENSG00000169302_25 (sequence is synthesized)
tttaaaatatcactgatgtctcactctttttctttatattttatttattgatttgccacaaagtttaattcacctaagtgagacgtgcatatgatgtaactccactgtacagatacacag

SEQ ID NO: 559053 - DNA, 120 bp, Artificial Sequence
  ENSG00000169302_26 (sequence is synthesized)
atctttacagaagaactatttttggcaacccctatgcccctgggtagggtccagaagtgaacaggcttggtgggggattgttttcacctcttggctactcagagtacctaaacctgtcct

SEQ ID NO: 559054 - DNA, 120 bp, Artificial Sequence
  ENSG00000169302_27 (sequence is synthesized)
tacttatggagagcatgtgtcacaccaagatggcagtaagctggcaactgcgaagacctgactgatgcccatttgggaagccaggcaagtgaaaatggaccgaagaaacagagatggctg

SEQ ID NO: 559055 - DNA, 120 bp, Artificial Sequence
  ENSG00000169302_28 (sequence is synthesized)
tcttttatgcagggcttttccataaagaggttacactggggcaaccaagtatgtgtagaaagccagagctaaacttcagcttggcattcacagttttctcttcactgagctaataggccc

SEQ ID NO: 559056 - DNA, 120 bp, Artificial Sequence
  ENSG00000169302_29 (sequence is synthesized)
agagtttcgggcagagctgtgaaatagtgcttctctaatagcaaccatattattgttacataattaaaagccagctcttttgttgtttgtttgattccttttccctacagttcccacatc

SEQ ID NO: 559057 - DNA, 120 bp, Artificial Sequence
  ENSG00000169302_30 (sequence is synthesized)
atttgtctgtgctattctgtttttctccaaacactataaacttgaagcaattgccctgactcgatttcagagaaggggatgtgttggaaagagcaagaataagaaagtgaccagattctg

SEQ ID NO: 559058 - DNA, 120 bp, Artificial Sequence
  ENSG00000169302_31 (sequence is synthesized)
ctgcagtctggtaaccccacgagtgtcagggactacttgcatgtttacttctatccttcatttgttttgattcaagcctttatgtgctgtggactcacctccctaagtaaccaggttcct

SEQ ID NO: 559059 - DNA, 120 bp, Artificial Sequence
  ENSG00000169302_32 (sequence is synthesized)
cctctcgctgcaaccttgtttgcatccttcccaagaagaggctttgggaaatttttctgtaattacacttaccaaagagccatggaaccattaggatctccactgtgatgagagttaagc

SEQ ID NO: 559060 - DNA, 120 bp, Artificial Sequence
  ENSG00000169302_33 (sequence is synthesized)
catagtgccatttcacacgtatacatttatgatgggatgggaacccgatacaatctctgtaggctgaatccctagttttatttccagtgagctgcttctgtgactgaagcacctctgtgg

SEQ ID NO: 559061 - DNA, 120 bp, Artificial Sequence
  ENSG00000169302_34 (sequence is synthesized)
gcttttgggaaccatggatgcacagatgagagagcacaggctcagagagtaagatggatttctagtgctagccaggtgaatgacacacagtgtatttcaagtttgaaaagcaaaaccatg

SEQ ID NO: 559062 - DNA, 120 bp, Artificial Sequence
  ENSG00000169302_35 (sequence is synthesized)
gtatctgacagtgctgattgtaatcacctcccaccactgtgcattttaaacatgagaacaaaaaacttttccaaaatttaaacttttcctaaatctttgtggtcattgctagttgttgac

SEQ ID NO: 559063 - DNA, 120 bp, Artificial Sequence
  ENSG00000169302_36 (sequence is synthesized)
atcagatcctttggttttattctataacttgggctaaacgttaatatcccactaggtggaacatgtctcttccggagttgtgacaaccgaggctcagagctgtgatttttagaaaacaag

SEQ ID NO: 559064 - DNA, 120 bp, Artificial Sequence
  ENSG00000169302_37 (sequence is synthesized)
atgactattaaatcctttggcctggtattcttgaatgtttttctcccagtgcttcccttgcctgtatggagcatctgcaaagtctgagcaggttttgaagtccaagagcatcccagctat

SEQ ID NO: 559065 - DNA, 120 bp, Artificial Sequence
  ENSG00000169302_38 (sequence is synthesized)
aaggctcttgcactgtgacagagctgcccacctccagtacaccctcagtgacctcgagtagatgcgtagggcagtcaaacccggcaacttatgccacaaccctaattccaggaagtcgtc

SEQ ID NO: 559066 - DNA, 120 bp, Artificial Sequence
  ENSG00000169302_39 (sequence is synthesized)
tgctaatggctaacccactgccatggtggcactggttttgcctgaggtcattgctagggcaggaatgaacagcaaccagcacagagcattgctaaattaattacagtaatctaattaatt

SEQ ID NO: 559067 - DNA, 120 bp, Artificial Sequence
  ENSG00000169302_40 (sequence is synthesized)
agtagctaggcttcttctgataggaaagtttcaaccagaaaccactagatgttctattatcatagcttttgtagattggatggaagaataagtaggaagaaagagtattaatgtagctag

SEQ ID NO: 559068 - DNA, 120 bp, Artificial Sequence
  ENSG00000169302_41 (sequence is synthesized)
tagggaccagtgttgctgcttgtggctgaggcagtaatgctaaggctttagctcttcaaaagcagaatgaaaaggcacaaaaagcacttcaagcttgtttctgtacccagttgtccctgt

SEQ ID NO: 559069 - DNA, 120 bp, Artificial Sequence
  ENSG00000169302_42 (sequence is synthesized)
attgtctacataaaatcctgtttcctgctatctgtctgtgattcctgtttattacaaattcagtgtgtctgactgatattaaacactgatattaaaatttcaaacttcacttatctgtgc

SEQ ID NO: 559070 - DNA, 120 bp, Artificial Sequence
  ENSG00000169302_43 (sequence is synthesized)
tgttgtgaacaggcagctgatctggcagccctcgaatgggaaacaagtgcttctgttgagctgtagcatatataatataaatgtgcctatgtgtattaaaatgtcttctgtaaacaatga

SEQ ID NO: 559071 - DNA, 120 bp, Artificial Sequence
  ENSG00000169302_44 (sequence is synthesized)
caagaaaaccaccagtgtttgatgaaaatgaagatggtacctgctgcatccttggagattcaaaatgtcatcatggcattctaggctagactggcagtggagaaatcacttcaactttga

SEQ ID NO: 559072 - DNA, 120 bp, Artificial Sequence
  ENSG00000169302_45 (sequence is synthesized)
ggactctaatttaggcaaagcaacagcaggtgtggatgtgaggaggcaaaaggagacagggggtggttatataactacattatcaaccatatttttcccatttatagtctttaagctcac

SEQ ID NO: 559073 - DNA, 120 bp, Artificial Sequence
  ENSG00000169302_46 (sequence is synthesized)
atcatctgtgcaattctagagttacacaagaaaatgatgcttaatactactaacattactttatggcaatgtaaatgctttatatgatccaatggaccaatatctacatgcttagataca

SEQ ID NO: 559074 - DNA, 120 bp, Artificial Sequence
  ENSG00000169302_47 (sequence is synthesized)
ccatttcttccatttactagcctgtgaccttgggttaagcttcagttttctgatttaaaaattggggattttctgtctcataaatttactgtgagaattgaatgagaagatgagtattga

SEQ ID NO: 559075 - DNA, 120 bp, Artificial Sequence
  ENSG00000169302_48 (sequence is synthesized)
gaagctagtacactgtttcaactccagttagctttcttaagcctttttgcccctaccccttagttctgttcgttttattgtgagcaactttcttttttctttttactcctctagggatat

SEQ ID NO: 559076 - DNA, 120 bp, Artificial Sequence
  ENSG00000169302_49 (sequence is synthesized)
tttgctgcttagtgaaataggagaagtagatcagccgggtttctaaaagggcagaccagagctcctctgaggatcctagcagcaacattttacttgtaggctttccgtctagagttctgc

SEQ ID NO: 559077 - DNA, 120 bp, Artificial Sequence
  ENSG00000169302_50 (sequence is synthesized)
cattaacttgactcagttatttctctcttccagttctcaattcaaaatttacaaatttcctgggagaggaactgtcattggccaagcttaggtcaggggatgattcataaaattatggta

SEQ ID NO: 559078 - DNA, 120 bp, Artificial Sequence
  ENSG00000169302_51 (sequence is synthesized)
aaggggcaggtttcaaagtacacacatggttgttttggacctcactcctgctttgaggagtttctgggagcagccaaccctagagatgatgtctgttctttgccacaagcagaattttat

SEQ ID NO: 559079 - DNA, 120 bp, Artificial Sequence
  ENSG00000169302_52 (sequence is synthesized)
gatatcaagcctcacagaagagtgtctgttcacaggaatgacggaattctaacatggtggagcactattgctggatttcaggctgagttaaattaactttgtaactaagtatattattct

SEQ ID NO: 559080 - DNA, 120 bp, Artificial Sequence
  ENSG00000169302_53 (sequence is synthesized)
ctgtcagagtcagagctcagatttcagtgaagtaacttgcaaacactcagtaggattttatactcacatgtggctctatgaattataatgatgatgaagtaataaagttactttgcctct

SEQ ID NO: 559081 - DNA, 120 bp, Artificial Sequence
  ENSG00000169302_54 (sequence is synthesized)
ctcaatttggggctattcattgaatagactgtcaccaggttattggctgtttgaagattctcatttgtctgctaactatacctctattttttttctacgttcacctggaagacatgtctt

SEQ ID NO: 559082 - DNA, 120 bp, Artificial Sequence
  ENSG00000169302_55 (sequence is synthesized)
aggcaaagctgcatgagtgagtctgaggactttgtaggctcatagctaggttttaccttccactttccatgggacctttggcagctttcctaatctccactataccaatgtcctttgtcc

SEQ ID NO: 559083 - DNA, 120 bp, Artificial Sequence
  ENSG00000169302_56 (sequence is synthesized)
aaagggagctgcagttgggcatgtggtggatagttaaatgatttgtttgtcctctgtgctgttccttggcagttgaagttacccccattgctcattgttacagaaaatacattatcaaca

SEQ ID NO: 559084 - DNA, 120 bp, Artificial Sequence
  ENSG00000169302_57 (sequence is synthesized)
tgtacatgaatgataaccagtgctcataatattatagaatgaagctgtgccttctgaatttccaactgccaagcttttgtgtactagacaaatcccataatgctacgtcatagaaaaaag

SEQ ID NO: 559085 - DNA, 120 bp, Artificial Sequence
  ENSG00000169302_58 (sequence is synthesized)
gcaacaacaatggccatcaagcattttgtttgcacctctgtgatcagaagcagcagtgtcggaagcacagatcctcagaatttggagaacacagttcttgctttccaccctgactctcac

SEQ ID NO: 559086 - DNA, 120 bp, Artificial Sequence
  ENSG00000169302_59 (sequence is synthesized)
aggctgtgtgcaaactgctccggaacatgtgtgtgctcagctccctcccatggggctggaggatgagggatgggtagctgctgctgtgctaagagcttaagttggtcataattaactgcg

SEQ ID NO: 559087 - DNA, 120 bp, Artificial Sequence
  ENSG00000169302_60 (sequence is synthesized)
attagacagattctgccagtgcaatcgctgtctaggaggggagacagattcctggtgcttcctgttttgccagcttcccggaatcttcttcacatagcatccattttgaagatactactt

SEQ ID NO: 559088 - DNA, 120 bp, Artificial Sequence
  ENSG00000169302_61 (sequence is synthesized)
caagtcccactgaattggagtttcaggagaccgaagcccaggcacatgtattttgcaaaactacactgaagtttctgataatgacggatatcaacaattaaacgcttacttcttgccaaa

SEQ ID NO: 559089 - DNA, 120 bp, Artificial Sequence
  ENSG00000169306_0 (sequence is synthesized)
actgtacaaggaaaaccccgtcggatctgttattgcgggatacttgtgaaatatacataggattctttcttatggctgcatcccggatctggaaattttacttggggaccaggaggattt

SEQ ID NO: 559090 - DNA, 120 bp, Artificial Sequence
  ENSG00000169306_1 (sequence is synthesized)
gaaaggctgcatgtactcagaagatttgcaagcaacactccaattcttgtcatagagctcgcagacttctcacttatcggcttttttccttccttattttttaagaattattcttatttt

SEQ ID NO: 559091 - DNA, 120 bp, Artificial Sequence
  ENSG00000169306_2 (sequence is synthesized)
cccctctctttttctgctctctcctctctcagtctctccttttctatctgcctcttcatttttctcctagtctgtttttttttttcctgctctgcacctggattgtatcttcagcaaaca

SEQ ID NO: 559092 - DNA, 120 bp, Artificial Sequence
  ENSG00000169306_3 (sequence is synthesized)
atcgggcactttgagaactaactggagacagtcttgtagggaagatctgtatggaattatctgcttttatggtgaacttggcatttgtgaatgggaatcttgttcacaatattaattgct

SEQ ID NO: 559093 - DNA, 120 bp, Artificial Sequence
  ENSG00000169306_4 (sequence is synthesized)
agcaaaaacaagaaaaagaacacaggagtaaaacgtggatttttctgaatacgcattgtgatgaccagcaattaccttaccgactaatatccagaggagaataatttggaagactgttgt

SEQ ID NO: 559094 - DNA, 120 bp, Artificial Sequence
  ENSG00000169306_5 (sequence is synthesized)
ggggaacggcctttaagagctggaagatgaaagctccgattccacacttgattctcttatacgctacttttactcagagtttgaaggttgtgaccaaaagaggctccgccgatggatgca

SEQ ID NO: 559095 - DNA, 120 bp, Artificial Sequence
  ENSG00000169306_6 (sequence is synthesized)
ctgactggtctatcgatatcaagaaatatcaagttttggtgggagagcctgttcgaatcaaatgtgcactcttttatggttatatcagaacaaattactcccttgcccaaagtgctggac

SEQ ID NO: 559096 - DNA, 120 bp, Artificial Sequence
  ENSG00000169306_7 (sequence is synthesized)
tcagtttgatgtggtacaaaagttctggtcctggagactttgaagagccaatagcctttgacggaagtagaatgagcaaagaagaagactccatttggttccggccaacattgctacagg

SEQ ID NO: 559097 - DNA, 120 bp, Artificial Sequence
  ENSG00000169306_8 (sequence is synthesized)
acagtggtctctacgcctgtgtcatcagaaactccacttactgtatgaaagtatccatctcactgacagtgggtgaaaatgacactggactctgctataattccaagatgaagtattttg

SEQ ID NO: 559098 - DNA, 120 bp, Artificial Sequence
  ENSG00000169306_9 (sequence is synthesized)
aaaaagctgaacttagcaaaagcaaggaaatttcatgccgtgacatagaggattttctactgccaaccagagaacctgaaatcctttggtacaaggaatgcaggacaaaaacatggaggc

SEQ ID NO: 559099 - DNA, 120 bp, Artificial Sequence
  ENSG00000169306_10 (sequence is synthesized)
caagtattgtattcaaaagagatactctgcttataagagaagtcagagaagatgacattggaaattatacctgtgaattaaaatatggaggctttgttgtgagaagaactactgaattaa

SEQ ID NO: 559100 - DNA, 120 bp, Artificial Sequence
  ENSG00000169306_11 (sequence is synthesized)
ctgttacagcccctctgactgataagccacccaagcttttgtatcctatggaaagtaaactgacaattcaggagacccagctgggtgactctgctaatctaacctgcagagctttctttg

SEQ ID NO: 559101 - DNA, 120 bp, Artificial Sequence
  ENSG00000169306_12 (sequence is synthesized)
ggtacagcggagatgtcagtcctttaatttactggatgaaaggagaaaaatttattgaagatctggatgaaaatcgagtttgggaaagtgacattagaattcttaaggagcatcttgggg

SEQ ID NO: 559102 - DNA, 120 bp, Artificial Sequence
  ENSG00000169306_13 (sequence is synthesized)
aacaggaagtttccatctcattaattgtggactctgtggaagaaggtgacttgggaaattactcctgttatgttgaaaatggaaatggacgtcgacacgccagcgttctccttcataaac

SEQ ID NO: 559103 - DNA, 120 bp, Artificial Sequence
  ENSG00000169306_14 (sequence is synthesized)
gagagctaatgtacacagtggaacttgctggaggccttggtgctatactcttgctgcttgtatgtttggtgaccatctacaagtgttacaagatagaaatcatgctcttctacaggaatc

SEQ ID NO: 559104 - DNA, 120 bp, Artificial Sequence
  ENSG00000169306_15 (sequence is synthesized)
agctcgatggagacaataaagattatgatgcatacttatcatacaccaaagtggatcctgaccagtggaatcaagagactggggaagaagaacgttttgcccttgaaatcctacctgata

SEQ ID NO: 559105 - DNA, 120 bp, Artificial Sequence
  ENSG00000169306_16 (sequence is synthesized)
tgcttgaaaagcattatggatataagttgtttataccagatagagatttaatcccaactggaacatacattgaagatgtggcaagatgtgtagatcaaagcaagcggctgattattgtca

SEQ ID NO: 559106 - DNA, 120 bp, Artificial Sequence
  ENSG00000169306_17 (sequence is synthesized)
tgaccccaaattacgtagttagaaggggctggagcatctttgagctggaaaccagacttcgaaatatgcttgtgactggagaaattaaagtgattctaattgaatgcagtgaactgagag

SEQ ID NO: 559107 - DNA, 120 bp, Artificial Sequence
  ENSG00000169306_18 (sequence is synthesized)
gaattatgaactaccaggaggtggaggccctgaagcacaccatcaagctcctgacggtcattaaatggcatggaccaaaatgcaacaagttgaactccaagttctggaaacgtttacagt

SEQ ID NO: 559108 - DNA, 120 bp, Artificial Sequence
  ENSG00000169306_19 (sequence is synthesized)
atgaaatgccttttaagaggatagaacccattacacatgagcaggctttagatgtcagtgagcaagggccttttggggagctgcagactgtctcggccatttccatggccgcggccacct

SEQ ID NO: 559109 - DNA, 120 bp, Artificial Sequence
  ENSG00000169306_20 (sequence is synthesized)
ccacagctctagccactgcccatccagatctccgttctacctttcacaacacgtaccattcacaaatgcgtcagaaacactactaccgaagctatgagtacgacgtacctcctaccggca

SEQ ID NO: 559110 - DNA, 120 bp, Artificial Sequence
  ENSG00000169306_21 (sequence is synthesized)
ccctgcctcttacctccataggcaatcagcatacctactgtaacatccctatgacactcatcaacgggcagcggccacagacaaaatcgagcagggagcagaatccagatgaggcccaca

SEQ ID NO: 559111 - DNA, 120 bp, Artificial Sequence
  ENSG00000169306_22 (sequence is synthesized)
caaacagtgccatcctgccgctgttgccaagggagaccagtatatccagtgtgatatggtgacagaaaagcaagggacatcccgtccctgggaggttgagtggaatctgcagtccagtgc

SEQ ID NO: 559112 - DNA, 120 bp, Artificial Sequence
  ENSG00000169306_23 (sequence is synthesized)
ctggaactaaatcctcgactgctgctgttaaaaaacatgcattagaatctctagaacacgaggaaaaacagggtcttgtacatatgttttttggaatttctttgtagcatcagtgtcctc

SEQ ID NO: 559113 - DNA, 120 bp, Artificial Sequence
  ENSG00000169306_24 (sequence is synthesized)
ctgttttaccatgtcttttaccattacattttttgactttgttttatatgtcgttggaatttgtaaatttacattttttttaaagaagagactgatgtgtagatagaaaacccttttttt

SEQ ID NO: 559114 - DNA, 120 bp, Artificial Sequence
  ENSG00000169306_25 (sequence is synthesized)
gcttcattagtttagttttagaatgggtttttattttatttccttttttaaaattttactttgcttttaacatttccttggggtgcttggacaaatctatccgatgggacaaggagcacc

SEQ ID NO: 559115 - DNA, 120 bp, Artificial Sequence
  ENSG00000169306_26 (sequence is synthesized)
caccggattctttctcgggttctgcctagcatcaactgggccacgtcggccttcagagaacagtgcaacaaatgccagcattgccattcgggggaaaaaaaaaaaaaaaaaaaaaagatg

SEQ ID NO: 559116 - DNA, 120 bp, Artificial Sequence
  ENSG00000169306_27 (sequence is synthesized)
gaacacttgttcataggagggccccaccagtcagagccctgaatctcttccttgtcccacctcattccccacctctacctttctaatggcggcatgatgtgtaaactctgtgcaggggtg

SEQ ID NO: 559117 - DNA, 120 bp, Artificial Sequence
  ENSG00000169306_28 (sequence is synthesized)
ggggcgggtctaactgtcttaacattcaagtcactgctcttcagaatacactctagacccaaaggtgtgctaatcacttcacagtgaccactacagagtactaagaagagaagatcaagg

SEQ ID NO: 559118 - DNA, 120 bp, Artificial Sequence
  ENSG00000169306_29 (sequence is synthesized)
aagggcatgaaattggggaagagtgttatttccgttttttaaatgagttgatgtacccttatatatatatacatatatatataaatataaatatatataaaaacaacaaaacaaaacaaa

SEQ ID NO: 559119 - DNA, 120 bp, Artificial Sequence
  ENSG00000169313_0 (sequence is synthesized)
actgttgttacacaacaaacatcatagtgctgaaatgacaaaaatccagggtagtgatcacaatcagaagacaggagctgcagaacagaacactttctcatgtccagggtcagattacaa

SEQ ID NO: 559120 - DNA, 120 bp, Artificial Sequence
  ENSG00000169313_1 (sequence is synthesized)
gagcactcaagactttactgacgaaaactcaggaaatcctctatcacaaagaggtttggcaactaaactaagacattaaaaggaaaataccagatgccactctgcaggttgcaataacta

SEQ ID NO: 559121 - DNA, 120 bp, Artificial Sequence
  ENSG00000169313_2 (sequence is synthesized)
ctacttactggatacattcaaaccctccagaatcaacagttatcaggtaaccaacaagaaatgcaagccgtcgacaacctcacctctgcgcctggtaacaccagtctgtgcaccagagac

SEQ ID NO: 559122 - DNA, 120 bp, Artificial Sequence
  ENSG00000169313_3 (sequence is synthesized)
tacaaaatcacccaggtcctcttcccactgctctacactgtcctgttttttgttggacttatcacaaatggcctggcgatgaggattttctttcaaatccggagtaaatcaaactttatt

SEQ ID NO: 559123 - DNA, 120 bp, Artificial Sequence
  ENSG00000169313_4 (sequence is synthesized)
atttttcttaagaacacagtcatttctgatcttctcatgattctgacttttccattcaaaattcttagtgatgccaaactgggaacaggaccactgagaacttttgtgtgtcaagttacc

SEQ ID NO: 559124 - DNA, 120 bp, Artificial Sequence
  ENSG00000169313_5 (sequence is synthesized)
tccgtcatattttatttcacaatgtatatcagtatttcattcctgggactgataactatcgatcgctaccagaagaccaccaggccatttaaaacatccaaccccaaaaatctcttgggg

SEQ ID NO: 559125 - DNA, 120 bp, Artificial Sequence
  ENSG00000169313_6 (sequence is synthesized)
gctaagattctctctgttgtcatctgggcattcatgttcttactctctttgcctaacatgattctgaccaacaggcagccgagagacaagaatgtgaagaaatgctctttccttaaatca

SEQ ID NO: 559126 - DNA, 120 bp, Artificial Sequence
  ENSG00000169313_7 (sequence is synthesized)
tacactcattacaaaagaactgtaccggtcatacgtaagaacgaggggtgtaggtaaagtccccaggaaaaaggtgaacgtcaaagttttcattatcattgctgtattctttatttgttt

SEQ ID NO: 559127 - DNA, 120 bp, Artificial Sequence
  ENSG00000169313_8 (sequence is synthesized)
tgttcctttccattttgcccgaattccttacaccctgagccaaacccgggatgtctttgactgcactgctgaaaatactctgttctatgtgaaagagagcactctgtggttaacttcctt

SEQ ID NO: 559128 - DNA, 120 bp, Artificial Sequence
  ENSG00000169313_9 (sequence is synthesized)
aaatgcatgcctggatccgttcatctattttttcctttgcaagtccttcagaaattccttgataagtatgctgaagtgccccaattctgcaacatctctgtcccaggacaataggaaaaa

SEQ ID NO: 559129 - DNA, 120 bp, Artificial Sequence
  ENSG00000169313_10 (sequence is synthesized)
agaacaggatggtggtgacccaaatgaagagactccaatgtaaacaaattaactaaggaaatatttcaatctctttgtgttcagaactcgttaaagcaaagcgctaagtaaaaatattaa

SEQ ID NO: 559130 - DNA, 120 bp, Artificial Sequence
  ENSG00000169313_11 (sequence is synthesized)
ctgacgaagaagcaactaagttaataataatgactctaaagaaacagaagattacaaaagcaattttcatttacctttccagtatgaaaagctatcttaaaatatagaaaactaatctaa

SEQ ID NO: 559131 - DNA, 120 bp, Artificial Sequence
  ENSG00000169313_12 (sequence is synthesized)
actgtagctgtattagcagcaaaacaaacgacatccaattgtcatgctgcatgcaaaactacacagaattcatgttttgcagagttttgccaaaatgagtaatcatataatatttactgt

SEQ ID NO: 559132 - DNA, 120 bp, Artificial Sequence
  ENSG00000169313_13 (sequence is synthesized)
aatttttaaaatacattatcgttcacaattttattttttcataatcaactaaggaagaacgatcaattggatataatcttcttaccaaaaatgatagttaaaatgtatatatatcctagt

SEQ ID NO: 559133 - DNA, 120 bp, Artificial Sequence
  ENSG00000169314_0 (sequence is synthesized)
gggctcagtggggaggaagaggaggccaggagtcttggactagctgcagggtttgagctaggctgaagcagcagaaccacagaggtggctgagcaggggcctggccctgggacccagcca

SEQ ID NO: 559134 - DNA, 120 bp, Artificial Sequence
  ENSG00000169314_1 (sequence is synthesized)
tccacactcacacatccacttctccctccagagcccggccctgaagcaggtctctgctccacgcttttccttagttggggaatcgagagttgggggatcaaagccccccacatctccctc

SEQ ID NO: 559135 - DNA, 120 bp, Artificial Sequence
  ENSG00000169314_2 (sequence is synthesized)
acccgctgcagctatgtttatcaaggtgatgtttggggctggctgctcggtgctggtgaacacctcttgcaggctggtgaacctcaccgcccacctgaggcagaaagcagggttgccccc

SEQ ID NO: 559136 - DNA, 120 bp, Artificial Sequence
  ENSG00000169314_3 (sequence is synthesized)
gagcgagccatatatgtcctcgttcggatcatcaagggagaggacatggcctccacccgctatgagtccctattggagaacctggatgaccattacccagagctggcagaggaactgcgc

SEQ ID NO: 559137 - DNA, 120 bp, Artificial Sequence
  ENSG00000169314_4 (sequence is synthesized)
aggctgtcaggcctctcctctgtgggccacaactggaggaagcgtatgggcactcggcgaggccgccatgagcaaagccccacttcaaggcccagaaagggccctgattaaggggatgga

SEQ ID NO: 559138 - DNA, 120 bp, Artificial Sequence
  ENSG00000169314_5 (sequence is synthesized)
ttgcacactgtagtgagacatccatcctgaccccacctcatcagccagggagctccctgaagacaggccatcgagagaggcacacaacaggctgtggtctaaaataaacttttaattgca

SEQ ID NO: 559139 - DNA, 120 bp, Artificial Sequence
  ENSG00000169314_6 (sequence is synthesized)
actccctactgaaggagcgagccatatatgtcctcgttcggatcatcagtaaggtggcccaagagggagaggacatggcctccacccgctatgagtccctattggagaacctggatgacc

SEQ ID NO: 559140 - DNA, 120 bp, Artificial Sequence
  ENSG00000169314_7 (sequence is synthesized)
attacccagagctggcaggtgcaaacagacaacaacccagcaggactcctcttgcagaatctggaattgctgagaagttgcatcagcaagaggggcaagggccctgattaaggggatgga

SEQ ID NO: 559141 - DNA, 120 bp, Artificial Sequence
  ENSG00000169314_8 (sequence is synthesized)
gtaagaggggggcatagcagaccatagaccacccaaggccctgtccggcctcccacctcggctggggacctagccccaatccatccctacccaatgctctgctcccagcctggactagca

SEQ ID NO: 559142 - DNA, 120 bp, Artificial Sequence
  ENSG00000169314_9 (sequence is synthesized)
aacagttccagagtgagaggcagagtagggaccattaggccagtcaggtgtccttcatcgtctctccacatgtcacagagggagaggacatggcctccacccgctatgagtccctattgg

SEQ ID NO: 559143 - DNA, 120 bp, Artificial Sequence
  ENSG00000169314_10 (sequence is synthesized)
agaacctggatgaccattacccagagctggcaggtgagtgtcagggtacagcccagggggagggcacaccttctccctaacccctaccaacaggacttcctgggccttccagaggaactg

SEQ ID NO: 559144 - DNA, 120 bp, Artificial Sequence
  ENSG00000169314_11 (sequence is synthesized)
ggtgagctccctgccacccaggagttgctagctggggcagggagccaggtacagagcagatttggacatccacagagacacccagagtgggatcccttcctgcaggacagacacatatga

SEQ ID NO: 559145 - DNA, 120 bp, Artificial Sequence
  ENSG00000169314_12 (sequence is synthesized)
tgaggggcagaccctcaacaccaactccacgcacatatacccccagatggaacacactgtaccctgagacaggtccccaccaccccacgggagtgccagcgcactaagggccggaatgtc

SEQ ID NO: 559146 - DNA, 120 bp, Artificial Sequence
  ENSG00000169314_13 (sequence is synthesized)
ctcaggcttcacagatgtggcataggggctggcacacagtaggagctcagtgcacaactgctggatgaactcaatgaaggcggcagcatggtgtgtgatggcacggcccacactgggttt

SEQ ID NO: 559147 - DNA, 120 bp, Artificial Sequence
  ENSG00000169314_14 (sequence is synthesized)
gaagggcttgttcttccattctggcaggcttggggacctggcacactactgccaactagccaagttggactcagacccaagggggttagccatgacctctgccttgtgtgatcaggtgca

SEQ ID NO: 559148 - DNA, 120 bp, Artificial Sequence
  ENSG00000169314_15 (sequence is synthesized)
aacagacaacaacccagcaggactcctcttgcagaatctggaattgctgagaagttgcatcagcaagaggggcaaggtcagacaggatttgaggccgccaggggcacctaagctgtgggt

SEQ ID NO: 559149 - DNA, 120 bp, Artificial Sequence
  ENSG00000169314_16 (sequence is synthesized)
gcagagaatgggatgcagaggtagagacaagaagggtagaggtggcaggtatccctgataagggggagaccatgggttcatcctgggattccaccctcagagtcagatgcccttgggatc

SEQ ID NO: 559150 - DNA, 120 bp, Artificial Sequence
  ENSG00000169314_17 (sequence is synthesized)
accgactaatgcctctccacctcactctggactgcccaaggaatctgtcctgtgctacccacagtgcagattgcaacagggctcctcctccccacccagggccctgattaaggggatgga

SEQ ID NO: 559151 - DNA, 120 bp, Artificial Sequence
  ENSG00000169327_0 (sequence is synthesized)
ccaactaaccaaccaaccaaggagaaaagatcctctctatgacagagtttcatctgcaaagccaaatgccctcaataagactcatcttcagaaggctgtccttaggcagaattaaaccca

SEQ ID NO: 559152 - DNA, 120 bp, Artificial Sequence
  ENSG00000169327_1 (sequence is synthesized)
gtcagagccccaggtgttcaacctcatttatggtggtgccttctttctccatcgcagagcactggagaaggatgaaaggggcaaacctgagccaagggatggagtttgagctcttgggcc

SEQ ID NO: 559153 - DNA, 120 bp, Artificial Sequence
  ENSG00000169327_2 (sequence is synthesized)
tcaccactgacccccagctccagaggctgctcttcgtggtgttcctgggcatgtacacagccactctgctggggaacctggtcatgttcctcctgatccatgtgagtgccaccctgcaca

SEQ ID NO: 559154 - DNA, 120 bp, Artificial Sequence
  ENSG00000169327_3 (sequence is synthesized)
cacccatgtactccctcctgaagagcctctccttcttggatttctgctactcctccacggttgtgccccagaccctggtgaacttcttggccaagaggaaagtgatctcttattttggct

SEQ ID NO: 559155 - DNA, 120 bp, Artificial Sequence
  ENSG00000169327_4 (sequence is synthesized)
tgtctcctgaggtctgtgcctcgctgattgtgggctcctacagtgcaggattcctcaattctcttatccacactggctgtatctttagtctgaaattctgcggtgctcatgtcgtcactc

SEQ ID NO: 559156 - DNA, 120 bp, Artificial Sequence
  ENSG00000169327_5 (sequence is synthesized)
acttcttctgtgatgggccacccatcctgtccttgtcttgtgtagacacctcactgtgtgagatcctgctcttcatttttgctggtttcaaccttttgagctgcaccctcaccatcttga

SEQ ID NO: 559157 - DNA, 120 bp, Artificial Sequence
  ENSG00000169327_6 (sequence is synthesized)
tctcctacttcttaattctcaacaccatcctgaaaatgagctcggcccagggcaggtttaaggcattttccacctgtgcatcccacctcactgccatctgcctcttctttggcacaacac

SEQ ID NO: 559158 - DNA, 120 bp, Artificial Sequence
  ENSG00000169327_7 (sequence is synthesized)
tttttatgtacctgcgccccaggtccagctactccttgacccaggaccgcacagttgctgtcatctacacagtggtgatcccagtgctgaaccccctcatgtactctttgagaaacaagg

SEQ ID NO: 559159 - DNA, 120 bp, Artificial Sequence
  ENSG00000169327_8 (sequence is synthesized)
atgtgaagaaagctttaataaaggtttggggtaggaaaacaatggaatgatttctcaatgcattaccacatatctttagaaagtcaagggaacttttaccttaggtggtgtcaccctgag

SEQ ID NO: 559160 - DNA, 120 bp, Artificial Sequence
  ENSG00000169327_9 (sequence is synthesized)
cacacctctgacaacgtgaaagactaaagtcggtgacaggctctgatccccagactcagtctatgaatgcagagtctggctttgtctttgctgtgtttccatggaagacttgtgttctga

SEQ ID NO: 559161 - DNA, 120 bp, Artificial Sequence
  ENSG00000169327_10 (sequence is synthesized)
cccctacagcaacagctctgacatcaagccaggtgctttgctggaattacatggtttgctgaaggacatctgaagctactttgaaggaagaaatgctctggtgttagattatcatcaggt

SEQ ID NO: 559162 - DNA, 120 bp, Artificial Sequence
  ENSG00000169327_11 (sequence is synthesized)
agtaacccagatttccggaaatggttaaccacagataggtcttctggagggaagagcatgtccaggatgaccatcctacccacaggctgatttcccaggacacggacaaatccagcaagc

SEQ ID NO: 559163 - DNA, 120 bp, Artificial Sequence
  ENSG00000169327_12 (sequence is synthesized)
taggaagagatacgtatatgtggctcaggaagatctgtttgctcctgcaagtaccccatggtttagtgtttctcagagtgaggttcagagacctcctgtctcagtcagaatcaccagact

SEQ ID NO: 559164 - DNA, 120 bp, Artificial Sequence
  ENSG00000169327_13 (sequence is synthesized)
ttggggccaagctatagacctattggatcaaattttctgtgggttgggacctggaatctgcacatgtaacaagcttctcctgtgaaccttgggcaaggcagcttactgtttaagaaccat

SEQ ID NO: 559165 - DNA, 120 bp, Artificial Sequence
  ENSG00000169327_14 (sequence is synthesized)
tgtttgggatcactgttgctcagggaatctcactggctgcttttcttggctgcctgcccttcatatccacatgtgctctcactgtgctatcccagggatgggggcaatgagtcggagcac

SEQ ID NO: 559166 - DNA, 120 bp, Artificial Sequence
  ENSG00000169327_15 (sequence is synthesized)
tacctgccacagaagaaatgatggtgtcctagagactaagaagtgagaagggtgtgtctgcttgttgcataattcaacctgttggcaagatttagtaatccatgttgagatgcttcattc

SEQ ID NO: 559167 - DNA, 120 bp, Artificial Sequence
  ENSG00000169327_16 (sequence is synthesized)
atttttcccagttagtgtatttcctttcctttcccaccctccctccctccctccccacctccctttcttccttccttccttccttctttccttctttcctttctctctctctctgtctct

SEQ ID NO: 559168 - DNA, 90 bp, Artificial Sequence
  ENSG00000169327_17 (sequence is synthesized)
tctttccttcacccccgaggctggagcacagtggcatgaacattgctcattgcagcctcaacctcctggcctcaagcgatcctcctgcct

SEQ ID NO: 559169 - DNA, 120 bp, Artificial Sequence
  ENSG00000169327_18 (sequence is synthesized)
tgcatgccaccacacctggctaaattcctgatagggagaacacagagctaagcaaatggaaaactatgaatatatatttggtgagtgactgtttcattacttagaatttttaagatcccc

SEQ ID NO: 559170 - DNA, 120 bp, Artificial Sequence
  ENSG00000169327_19 (sequence is synthesized)
aagaccaaattgtggatattgctcttatattttccattgctgctcaggtaatgcttgtcagctaaccaaccagccaaccaaggagagaagaccctctctatgacagagtttcatctacaa

SEQ ID NO: 559171 - DNA, 89 bp, Artificial Sequence
  ENSG00000169327_20 (sequence is synthesized)
aggagagaagaccctctctatgacagagtttcatctacaaagccaaatgccctaaataagactcatcttcagagggctatttttaattt

SEQ ID NO: 559172 - DNA, 87 bp, Artificial Sequence
  ENSG00000169327_21 (sequence is synthesized)
aagtgattctcccaccttggcctcccgtggcctgtcattcttcttctttttcttcttcttctttttttttttgaggcagagttttgc

SEQ ID NO: 559173 - DNA, 66 bp, Artificial Sequence
  ENSG00000169327_22 (sequence is synthesized)
atgcagggattacaggcatgagccaccgcactggctgtcttctttttaaatataggcatttaagac

SEQ ID NO: 559174 - DNA, 120 bp, Artificial Sequence
  ENSG00000169327_23 (sequence is synthesized)
cgcactggctgtcttctttttaaatataggcatttaagacaaattttttcaaattctatttagcctgcatcccatatgttttgaaatatggtgtttttagtattaagttctgtgtatatt

SEQ ID NO: 559175 - DNA, 120 bp, Artificial Sequence
  ENSG00000169327_24 (sequence is synthesized)
ctaatttttattatcatttattctttaatccatgagtggatttttttaaaatttcctaatatctgggcatttatgaaaaatctacacccaacattatacttactagtgaaataatgcttt

SEQ ID NO: 559176 - DNA, 120 bp, Artificial Sequence
  ENSG00000169327_25 (sequence is synthesized)
ccccttaagatttgaagcaaggcaagttttctgctattgccatctctatttaaaattgttctgaagattgtagcaagtacattaaaacaaacaaagcatctagattggaaagggagaaga

SEQ ID NO: 559177 - DNA, 120 bp, Artificial Sequence
  ENSG00000169327_26 (sequence is synthesized)
aaaattgagtttatttgtagataacatgatcctgaatatagaaagttccaagtaatctattaaaaaactccactggaactaataaccaagttcagtaaaattacagcatataaaaaatat

SEQ ID NO: 559178 - DNA, 120 bp, Artificial Sequence
  ENSG00000169327_27 (sequence is synthesized)
agaaaaattaattatatttttatatattggcaagaaacaatccaaaaatgaaattaagaaaacaattctttcacaaaaatgttgtcatttccatatactggaaatcataaaacgttcctg

SEQ ID NO: 559179 - DNA, 120 bp, Artificial Sequence
  ENSG00000169327_28 (sequence is synthesized)
agaaaagttagagaagatctaaataaatggagagaccttcaatattcatggattggaataatcaatatcattaacatggcaatacttcccaaactgttctatagattcaatataatcctt

SEQ ID NO: 559180 - DNA, 120 bp, Artificial Sequence
  ENSG00000169327_29 (sequence is synthesized)
aggaaaatctcagaggctgtatcttaaaaatttgactagttggtcctaagatgtatatgcaaatacaaataaaccagaatacctaaacaattttaaaaagaaggagaggttgggcttggt

SEQ ID NO: 559181 - DNA, 82 bp, Artificial Sequence
  ENSG00000169327_30 (sequence is synthesized)
acaggtggattgcttgaggctaggaacttgagaccagcctgggcaagatggaaaaaaccccatctctactgaaaatacaaaa

SEQ ID NO: 559182 - DNA, 120 bp, Artificial Sequence
  ENSG00000169327_31 (sequence is synthesized)
gctactccggaggctgaggtgggaggatcacatgagcctgggaagtcgaggcctcagtgagccgtgattgtgccactggactccagcctggacaacagggcaagatcctgtcttaaaaat

SEQ ID NO: 559183 - DNA, 120 bp, Artificial Sequence
  ENSG00000169327_32 (sequence is synthesized)
agcctggacaacagggcaagatcctgtcttaaaaataaaaatttaaaaacattgactaagttggaagaatacagacccaattttaaaactttccatactgctataattaccaaaataatg

SEQ ID NO: 559184 - DNA, 120 bp, Artificial Sequence
  ENSG00000169327_33 (sequence is synthesized)
tatgctcaattgacttatctgaaaaaaaaactgacaaaagtataaaaggcctgtatatttaaaacaacaaaatactgtttaaagatatggaacacctaaataaatgaagatatataccaa

SEQ ID NO: 559185 - DNA, 120 bp, Artificial Sequence
  ENSG00000169327_34 (sequence is synthesized)
gtttattggttaccaaatttaatattgttaagatgtaaatactccccaaattgatcttgagattcaattctatcccaatcaaaatcccaccagtctttttatagatgctgacaaattgat

SEQ ID NO: 559186 - DNA, 120 bp, Artificial Sequence
  ENSG00000169327_35 (sequence is synthesized)
tctaaaattcatatggaaatgcaaagacttagaataaccaacgcaactttgaaaaagaacaaagttgaaagtctgactacctgatttcaagaattatatggctacagtaatcaagacagt

SEQ ID NO: 559187 - DNA, 120 bp, Artificial Sequence
  ENSG00000169327_36 (sequence is synthesized)
gtgattgctgtagaaatagatcaatggaacagaatagagagaccacaatttgaccacaaacaaaatgtggacagctgattttcaacaaagttaccaaggcaatttaatagggaaagaaca

SEQ ID NO: 559188 - DNA, 120 bp, Artificial Sequence
  ENSG00000169327_37 (sequence is synthesized)
gtcttttcaacaaatggcataggaatatttagttatctatatgcataaaaatcaacttttattcatacatcacatcaaataagaacaattatgaatggatcgtagacctgaccgtaagac

SEQ ID NO: 559189 - DNA, 120 bp, Artificial Sequence
  ENSG00000169327_38 (sequence is synthesized)
ctaaaactataaaacttctaaaagaaaacaggagaaaacttttgtgaccttgaggtagccaaagatttctgagatatgacacaggaagcatgatctataaaagaacaaattaataagttg

SEQ ID NO: 559190 - DNA, 120 bp, Artificial Sequence
  ENSG00000169327_39 (sequence is synthesized)
agcctcattcaaactaaaatacatcaaaagagacttacagtagtaaaaaggccaagtgcagtggtacgtgtttatagtcctcactatgagaggtttaggcaagaggatcacttgggctca

SEQ ID NO: 559191 - DNA, 120 bp, Artificial Sequence
  ENSG00000169327_40 (sequence is synthesized)
tatgagaggtttaggcaagaggatcacttgggctcaggatttagaggaggctgcagtgtgatgatctcacctgtggatagacactgcgcttcagcctgggcaacataatgagaccctgtc

SEQ ID NO: 559192 - DNA, 120 bp, Artificial Sequence
  ENSG00000169327_41 (sequence is synthesized)
cacacacacacacacacacacaaagagaagccacaggttataagaaaatattttcaattgtatatgtgataaagcactagcatcctgaatacatagaaaactccctaagctccataaaaa

SEQ ID NO: 559193 - DNA, 120 bp, Artificial Sequence
  ENSG00000169327_42 (sequence is synthesized)
gctccataaaaacatctcagtaagaaaagaggcaaaagatttgaacagccacttcaccaaagaagatatacagaaggcaaaaaagcacatgaaaagatgtttaacatcataaggagatgc

SEQ ID NO: 559194 - DNA, 120 bp, Artificial Sequence
  ENSG00000169327_43 (sequence is synthesized)
aaattaaaatgcaagttaaatgaaatgcaacgagacaacaaaacacctaaaaaataggtaaaatgaacaagattgactatagcaagtgatggtgaggatgagaagcaactggaactctaa

SEQ ID NO: 559195 - DNA, 120 bp, Artificial Sequence
  ENSG00000169327_44 (sequence is synthesized)
tacactgctggtgggaatgtgaaatggtaaaaccacgttggaaaacagtttggtggtttcacaaaatgttcaatagatacctaccatataaaacaactattccattcgttatattctacc

SEQ ID NO: 559196 - DNA, 120 bp, Artificial Sequence
  ENSG00000169327_45 (sequence is synthesized)
aagagaaataaaagcatacgatatatatgctttatgatatatgcttttatttctcttggtggaatataataaatggaatagttgtatatggtaaactatacaaaagacttgtgttcaaat

SEQ ID NO: 559197 - DNA, 120 bp, Artificial Sequence
  ENSG00000169327_46 (sequence is synthesized)
gttcttagcagctctatttggaatactctaaaactagaaataacccaatgtctattaacaggtaaatgaggggaaaaacccctggtccctacaaggcaatactactcagcaatgaaatga

SEQ ID NO: 559198 - DNA, 120 bp, Artificial Sequence
  ENSG00000169327_47 (sequence is synthesized)
attattatttacatgttacagcacaaaagaatctcaaaatatgccaaataaaagaaaacagacaaaatgtatatattgtacattttcatctgtataaaattctagaagaccaacaggtca

SEQ ID NO: 559199 - DNA, 120 bp, Artificial Sequence
  ENSG00000169327_48 (sequence is synthesized)
ggcgatggtgatggagcctgaagagacataaggggaagaagggaagattacaaagggacacaagaaaactgtaggagatgaggtatatgtttattatcataatagtggtgatggtttcgt

SEQ ID NO: 559200 - DNA, 120 bp, Artificial Sequence
  ENSG00000169327_49 (sequence is synthesized)
ggatatacatgtgtcaaaacttaaccaaattttacactataaatatttgtgtttatttcatggcaattatacatcaatctagatgtcaaaatagggccacaagctcttttctgttgcttt

SEQ ID NO: 559201 - DNA, 120 bp, Artificial Sequence
  ENSG00000169327_50 (sequence is synthesized)
cagtaagagatggattttaattctctttcccctgagtctgggttggccttagtgtctggtttgaccattagaatgtagcagatattaggacttctgagcttaggtcataagaggacttgc

SEQ ID NO: 559202 - DNA, 120 bp, Artificial Sequence
  ENSG00000169327_51 (sequence is synthesized)
acctttggcacagctgtctgggaacactctctgggatccctgagccgccacataagaagtctggctaccttgaggttgtaatgctagagaggccatgtgtagacactccagttgaggctc

SEQ ID NO: 559203 - DNA, 120 bp, Artificial Sequence
  ENSG00000169327_52 (sequence is synthesized)
ccagctgagcccagccttctccatcaaagtgccagatgtatgggtgaccagctcacaccagcccaggtgccagctgaataccacaaagtaacctttgttactgtcatatggaaaaaaata

SEQ ID NO: 559204 - DNA, 120 bp, Artificial Sequence
  ENSG00000169327_53 (sequence is synthesized)
tcaccccaattgagccctgtttgaattcctaacttctgaaactgtgagatgtgttacaataaaatccctgttgtttgaagtcattggaaagttttggagcagtttattacgcagcagtag

SEQ ID NO: 559205 - DNA, 120 bp, Artificial Sequence
  ENSG00000169327_54 (sequence is synthesized)
ataacaagaaatgaattagtcacttggaagttgggagtgcttttgtaacaaaaacatgtggcattgacattggtactgggcagtgggcagaaactggaagggccatgaagagactgatag

SEQ ID NO: 559206 - DNA, 120 bp, Artificial Sequence
  ENSG00000169327_55 (sequence is synthesized)
tgaaagcttgaaggtcaatgaggagaatgttattggagctggagaagatatgacacattatgtggtgataagaagttttgtgaaactgttgattttggtaacatcgaaaatagaatgtac

SEQ ID NO: 559207 - DNA, 120 bp, Artificial Sequence
  ENSG00000169327_56 (sequence is synthesized)
ctaatgtatctaatgaactggtagatccgacaaaggagattttcaagcagaatgtttaaggtgccaaatggtttatttggctgcatatactgagagatacggctacattagattcacact

SEQ ID NO: 559208 - DNA, 120 bp, Artificial Sequence
  ENSG00000169327_57 (sequence is synthesized)
cgagatatggctacactagagatatggctaaaaaaggatgaaatacaaaagaaactgttcagtatgcaaaatttagagggattataaagtagccagagcttgctaggattaaaactgaaa

SEQ ID NO: 559209 - DNA, 120 bp, Artificial Sequence
  ENSG00000169327_58 (sequence is synthesized)
ttaaaactgaaactgggccaggtgtgaaggctcatgcctataatctcaacactttgggaggccgaggtcggaggattgcttgaggccaggatttcaagaccagcctgagcaacatagtga

SEQ ID NO: 559210 - DNA, 120 bp, Artificial Sequence
  ENSG00000169327_59 (sequence is synthesized)
accccaaaatttttttaattgaaaaaaatccaaaaactgtttctctttcccatcttattcagatggcaaaatgttctcaaactaaaaaccaaaacaagcaaaaataactcaaagtcaaga

SEQ ID NO: 559211 - DNA, 120 bp, Artificial Sequence
  ENSG00000169327_60 (sequence is synthesized)
caatcttaagggtgttgctgagaggccctttattaagactttaatcagttccttatagactcttttaactagaaaaaaaaaaagactttgaagaatcttaaggacaccttgcagcctcct

SEQ ID NO: 559212 - DNA, 120 bp, Artificial Sequence
  ENSG00000169327_61 (sequence is synthesized)
gacccacagtccaaactaggaatggcctgtctagaagagattggggagtatggcttttgactaatagaatgaacccaaactggattcctaggaaccccacaaagtttttagaaaggatta

SEQ ID NO: 559213 - DNA, 120 bp, Artificial Sequence
  ENSG00000169327_62 (sequence is synthesized)
tattggtggaagggtgatctcttgggctaaaaagggcagagttcaaaattaaaagagccttcaaaactcccaaacttttatggtcaggaggcagcgtgacaaacctgcaaaatgggacat

SEQ ID NO: 559214 - DNA, 120 bp, Artificial Sequence
  ENSG00000169327_63 (sequence is synthesized)
ttctagtgcaaaaggtaggtgacgcagggctcttccattaaagtctttgatcaattttgagttgattttatatggtgtgagataagggaaaaacttcattcttttgcatgtggctatcca

SEQ ID NO: 559215 - DNA, 120 bp, Artificial Sequence
  ENSG00000169327_64 (sequence is synthesized)
gttgtcccagtacaatttgcagaaaataatattttccacattgaatggtcttggcaccattgtcaaaaatcagttgatcataaatgtttgggtttacttttggattctctattctattcc

SEQ ID NO: 559216 - DNA, 120 bp, Artificial Sequence
  ENSG00000169327_65 (sequence is synthesized)
attgatctatatgtgtatccttaccccagaaccacactgtcttgattacggttgcttttagtaagttttgaaatcaggaaatgtgagtccatctactttgtccttcttttcaagatattt

SEQ ID NO: 559217 - DNA, 120 bp, Artificial Sequence
  ENSG00000169327_66 (sequence is synthesized)
ttggctattctagcttactagcaattccatgtggatttttgaatcagcttgtcaatgtctacagtgaagtcagctgctattttgaaatggattgtgttgaatctgtagatcaatttgggg

SEQ ID NO: 559218 - DNA, 120 bp, Artificial Sequence
  ENSG00000169330_0 (sequence is synthesized)
gccctgcgcccggggcgcctcggagaactgacctgaagtttcagtgtagtcagagagctcttcaagtaataaatcatggagaccagtcaggaaacttccctcttcttggtgaagatcttg

SEQ ID NO: 559219 - DNA, 120 bp, Artificial Sequence
  ENSG00000169330_1 (sequence is synthesized)
gaggaactggacagcaagcaaaataccgtttcttatcaggacctgtgcaaatctctctgtgcccggttcgacctgtcgcagcttgccaaactgagaagtgtgctcttctacacagcttgt

SEQ ID NO: 559220 - DNA, 120 bp, Artificial Sequence
  ENSG00000169330_2 (sequence is synthesized)
ctcgatcccaattttccagccacgctattcaaagacaagatgaaatgcactgtgaataaccagcaatcaaagaaaatcatggtggcagcagatattgtgacgatattcaacctgatccaa

SEQ ID NO: 559221 - DNA, 120 bp, Artificial Sequence
  ENSG00000169330_3 (sequence is synthesized)
atgaatggcggggctgccaaggagaagctgcccacgggccgccagaaggtacgcaagaaggaggcatcctttgaatcatgtaggtcggacacagagatctgcaatgcagctgagtgtgag

SEQ ID NO: 559222 - DNA, 120 bp, Artificial Sequence
  ENSG00000169330_4 (sequence is synthesized)
cccctgaactgtgagctgagtgagaggtctttcagccggggctaccccatcaggcagtcgtccaagtgccggaagatggactgcaaggactgcccacagtttgtccctgcctctgagcct

SEQ ID NO: 559223 - DNA, 120 bp, Artificial Sequence
  ENSG00000169330_5 (sequence is synthesized)
aacttcctgttgggagttagcaaagaggtgaaaaaccgcgccgcttccctggacaggttgcaggccctggctccgtactctgtgaccagccctcagccctgtgagatgcagaggacctac

SEQ ID NO: 559224 - DNA, 120 bp, Artificial Sequence
  ENSG00000169330_6 (sequence is synthesized)
ttccccatgaacatcgaaaacgagtccatttcagaccaggactccctgcccatcaatcagagcatcaaggagaccttcatttccaatgaggagccatttgtggtccagtcctgtgtccag

SEQ ID NO: 559225 - DNA, 120 bp, Artificial Sequence
  ENSG00000169330_7 (sequence is synthesized)
aaaaggaatatcttcaaagaggattttcacaatttgatggcagtgtcccccagtttggttggccccatcagcaaagcagagaatgagcacagggaaccccagagtcgaaaggaaccccac

SEQ ID NO: 559226 - DNA, 120 bp, Artificial Sequence
  ENSG00000169330_8 (sequence is synthesized)
aagccacccttcttcaaccacagctttgaaatgccctataacagccagtacctgaatccagtgtattccccggttcctgacaaaaggcgagcaaagcacgaaagcttagatgaccttcaa

SEQ ID NO: 559227 - DNA, 120 bp, Artificial Sequence
  ENSG00000169330_9 (sequence is synthesized)
gcctctacatattttgggcccactcccgtgatgggaacccaagaagccaggcgctgtctagggaagcccaacaagcagactccctggccagccaaaagctggagcctaaacacagaggaa

SEQ ID NO: 559228 - DNA, 120 bp, Artificial Sequence
  ENSG00000169330_10 (sequence is synthesized)
gttcctgactttgaacggtcctttttcaatagaaatccctccgaggagaagctacactatccaaatgccagtagccagacccccaatttcccagccccagaaaggcgcccaacttacctt

SEQ ID NO: 559229 - DNA, 120 bp, Artificial Sequence
  ENSG00000169330_11 (sequence is synthesized)
gtgccaaaggatcaacagccaattctccccattgcttatgcggcaaaacaaaatgggctcaaatctaaagagatctcatcccctgttgacctggagaagcatgaaccagtcaaaaagttt

SEQ ID NO: 559230 - DNA, 120 bp, Artificial Sequence
  ENSG00000169330_12 (sequence is synthesized)
aaagacaagagcattaactgcaccagtgggcagctcagctcagacaccagtagcgtgggcacccagactgagcacgtgctggagcccaagaaatgcagagacctgtgcacctctggtcag

SEQ ID NO: 559231 - DNA, 120 bp, Artificial Sequence
  ENSG00000169330_13 (sequence is synthesized)
ggcaagtacagtgacaggcacaccatgaagcactcagacgatgactcagaaattgtcagcgacgacatcagtgacattttccgatttcttgatgacatgagcatcagtggctccacggga

SEQ ID NO: 559232 - DNA, 120 bp, Artificial Sequence
  ENSG00000169330_14 (sequence is synthesized)
gtgatacagtcgtcctgctacaacagcacaggatccttgtctcagctccataagtcagactgcgacagttcccctgagcacaacttaaccaaaattgccaatggggtccccaacagcaag

SEQ ID NO: 559233 - DNA, 120 bp, Artificial Sequence
  ENSG00000169330_15 (sequence is synthesized)
ggagacaagggcaaccggcctgaaaacacccaccactcggaagaagagctgaagaccagtgtgtgcaaactggtgctcaggattggcgaaattgaacggaagctggaatccctgtcgggt

SEQ ID NO: 559234 - DNA, 120 bp, Artificial Sequence
  ENSG00000169330_16 (sequence is synthesized)
gtccgtgatgaaatctcccaggtcttgggcaaactaaataaattggaccagaaaatgcaacagcctgagaaggtgagtgtgcagatagatctgaactccttgacaagcgagggtccgtct

SEQ ID NO: 559235 - DNA, 120 bp, Artificial Sequence
  ENSG00000169330_17 (sequence is synthesized)
gatgacagtgcctctccccggatgttccacgcacacagtggctcccacggacccaaactagagaacaaccctgactggtgctgctctgatgctagcgggagcaacagtgaaagcctgcgg

SEQ ID NO: 559236 - DNA, 120 bp, Artificial Sequence
  ENSG00000169330_18 (sequence is synthesized)
gtcaaggccttaaaaaaaagcctcttcaccaggccatcctctaggtccctaacagaggagaacagtgccacagagtccaaaattgccagcatctccaactcgcccagagactggcgcacc

SEQ ID NO: 559237 - DNA, 120 bp, Artificial Sequence
  ENSG00000169330_19 (sequence is synthesized)
atcacttataccaaccgtgtgggcctcaatgaggaggagataaaagacacaggcccaggagataataaagactggcatcggaaatctaaagaggcagacaggcagtacgacattccccca

SEQ ID NO: 559238 - DNA, 120 bp, Artificial Sequence
  ENSG00000169330_20 (sequence is synthesized)
cagcaccgactgcccaagcagcccaaagatggcttcctggtggagcaggtgttcagccctcacccctaccctgcctccctcaaggcccacatgaagagcaaccccctgtacacagacatg

SEQ ID NO: 559239 - DNA, 120 bp, Artificial Sequence
  ENSG00000169330_21 (sequence is synthesized)
cggctgaccgagttggccgaggtgaagcggggccaaccttcttggaccattgaggagtatgcacggaatgcgggcgacaagggcaagctgacagccctggacctgcagacgcaagaatct

SEQ ID NO: 559240 - DNA, 120 bp, Artificial Sequence
  ENSG00000169330_22 (sequence is synthesized)
ttaaacccaaataatttagagtactggatggaagacatttatactccaggatacgattcattactaaaacgtaaagaagccgaattcagacgagccaaggtctgcaagatagctgctctg

SEQ ID NO: 559241 - DNA, 120 bp, Artificial Sequence
  ENSG00000169330_23 (sequence is synthesized)
atcgctgctgcggcatgcaccgtcatcctcgttattgtcgtgcccatctgcacaatgaaatcatgagctaagaatgcaaccttacgtacagcttatgactaccaatgtcgtcgtctgtat

SEQ ID NO: 559242 - DNA, 120 bp, Artificial Sequence
  ENSG00000169330_24 (sequence is synthesized)
cttagaatcttgcagcagtgaggcaacaatttgttgaaatggagatgaaatcatggaggcatttctacaaatgttgaatgaaggtggttttcagaaagtatacattctagtgagaaatct

SEQ ID NO: 559243 - DNA, 120 bp, Artificial Sequence
  ENSG00000169330_25 (sequence is synthesized)
acctacctattagctttgactcaattacactctgacgcatttttagaagtgcaatatcttttcctaccaaaagaacatcatggactatcaataaatacaaattgaatattccaagccaaa

SEQ ID NO: 559244 - DNA, 120 bp, Artificial Sequence
  ENSG00000169330_26 (sequence is synthesized)
aaaggaagattaattgggttctttccattttgatgatgtttcatggtggggaataagttatacagaagatatttaatacacgcctctttagaagaaactaagggaaatagcaacataaga

SEQ ID NO: 559245 - DNA, 120 bp, Artificial Sequence
  ENSG00000169330_27 (sequence is synthesized)
agaaaagaggtggcttctcttttccataatgttcttagaccattgctggtgaagtaacagggtgtgtgtccctaaagggtattacttctctgtcgacttttatcaagggctactgacgtt

SEQ ID NO: 559246 - DNA, 120 bp, Artificial Sequence
  ENSG00000169330_28 (sequence is synthesized)
ttttgtcatcaacacgacagagtgtctgcatcactgcagatcttcatggaaacattctggaccttcttccttgcacttggagtgagaaggagctggactaccaagtcaggcgtggaatga

SEQ ID NO: 559247 - DNA, 120 bp, Artificial Sequence
  ENSG00000169330_29 (sequence is synthesized)
agtatgctcagactgcatgatgggccaaggtattcaggccaggagacctcgtcctcaatccaaagtgtaggggagctgcctgctaacgatgtaaggtcagtatttgaaaatcatggccac

SEQ ID NO: 559248 - DNA, 120 bp, Artificial Sequence
  ENSG00000169330_30 (sequence is synthesized)
tccaaaggatctcctgttcttgctttggtgtgtggctccattccttgattttctatctcctggtggtaccagatgctctgcctctcatacatgagttgaagagtttggaacttgtccttg

SEQ ID NO: 559249 - DNA, 120 bp, Artificial Sequence
  ENSG00000169330_31 (sequence is synthesized)
tgccttgaagagtagagacaatggctaaacgttgacattctatctgtaaaccatggttttcacgcaccactaatatctgccattttcaatggctttaaaaagattttgaaagcttgctca

SEQ ID NO: 559250 - DNA, 120 bp, Artificial Sequence
  ENSG00000169330_32 (sequence is synthesized)
ataatgttcaataatataataataataaaggcactgaggtcttctcagttaccccaacacctactccagagttttgaatacttgtcagcagtgcaaaaaatattatctgtttaaccactt

SEQ ID NO: 559251 - DNA, 120 bp, Artificial Sequence
  ENSG00000169330_33 (sequence is synthesized)
atctatatgtctatctatctatctatatgtctatctatctatctaaatacttgatttttatttattgtcttctctgttaaataacttgagagcaaggtttctttcgtgtaaaagaagctg

SEQ ID NO: 559252 - DNA, 120 bp, Artificial Sequence
  ENSG00000169330_34 (sequence is synthesized)
ttgtaatttcatccaaatttgatctgtttccacctgctgaatggtgctctgacaataatggaacagaaagaatccttatcagcatctgattccaatgtcttgttacaggtcaaagaaaaa

SEQ ID NO: 559253 - DNA, 120 bp, Artificial Sequence
  ENSG00000169330_35 (sequence is synthesized)
aggattgacagaaactagctaccttatatatattttttgataataaggtgggatataaatagattttggtagcaagtgtaatcactccgtatgatataataaatttctaaaagatttgag

SEQ ID NO: 559254 - DNA, 120 bp, Artificial Sequence
  ENSG00000169330_36 (sequence is synthesized)
agcatctcaatttttaaagcaataggagtctagcatccattctgaaaaatcgcaaataatgcttagcttgctgtgtctgattctgttgttcaccattaaggggtagacagttaattttat

SEQ ID NO: 559255 - DNA, 120 bp, Artificial Sequence
  ENSG00000169330_37 (sequence is synthesized)
tatgttaacaagtgagggatgaatgttttcatctgtggtgaacctttatttttagaagtcttcatgttatctatttgtattatcatgtttatgtatggattttcaatttcagtaaccgaa

SEQ ID NO: 559256 - DNA, 120 bp, Artificial Sequence
  ENSG00000169330_38 (sequence is synthesized)
aacttaagccttagtatgaaaaactgaggatttataattgaaaatgaaaaaaatatgttactctctatcatcagaattatagtctttggtgctctgttttcaatggggcatattacataa

SEQ ID NO: 559257 - DNA, 120 bp, Artificial Sequence
  ENSG00000169330_39 (sequence is synthesized)
ggttgtttctttcaccccaaagagactactaggttaccactctgggcattgcctttccacctaacccctcaaccagtaagactctacaccatattgtagccccactattctcctctttat

SEQ ID NO: 559258 - DNA, 120 bp, Artificial Sequence
  ENSG00000169330_40 (sequence is synthesized)
cacagatgaagtgccagagcatcagagataggtagctcccaacctcttgctctggatttgcagaagagggggagatgtacttacccaggataagaaaaatctagtcaaatccaccccaaa

SEQ ID NO: 559259 - DNA, 120 bp, Artificial Sequence
  ENSG00000169330_41 (sequence is synthesized)
tcttccatttaacaggtaggaccatcgaggctggaccaaaccactttttccactgcccttggtgaatctattcctagtggaccccatttgggcatgtgcctagctaccttgggaaggcat

SEQ ID NO: 559260 - DNA, 120 bp, Artificial Sequence
  ENSG00000169330_42 (sequence is synthesized)
gactataagtcacacctcaggcttggaaatgaaaggattctatagaatattctatactttccatagctggagaggtagtcagaaattcagtcttgctctgagtccacagtagctttaaaa

SEQ ID NO: 559261 - DNA, 120 bp, Artificial Sequence
  ENSG00000169330_43 (sequence is synthesized)
ttcaactcaacattgttgtcacgtaacggaaacatctagacctggtaataatccaggaaattgcaaaatggaggccaaaagtaaggtgggtttctctggaaaggggtcatcctcagtctg

SEQ ID NO: 559262 - DNA, 120 bp, Artificial Sequence
  ENSG00000169330_44 (sequence is synthesized)
ataataccaagtctgacgctgaggttatgaatcattaccatggcttggagctattggatgcttggggtcttgggatagatagaaggtgaggttcacagttggagcttttcttgccattga

SEQ ID NO: 559263 - DNA, 120 bp, Artificial Sequence
  ENSG00000169330_45 (sequence is synthesized)
ccccaagctcaccccagccttccttccctgaccctgagactcaccctatctatctcccctattccctcagtttgcagaatgagcaagatagagtctggctaggagggaaacatctatcca

SEQ ID NO: 559264 - DNA, 120 bp, Artificial Sequence
  ENSG00000169330_46 (sequence is synthesized)
tctctctaatctttgcccatcacctcctgttgcaatgagttcccgcaggtgacatacggactggcctctctactgtactgggtgccatctcccaccatactctggcatttttatgtaaag

SEQ ID NO: 559265 - DNA, 120 bp, Artificial Sequence
  ENSG00000169330_47 (sequence is synthesized)
gataatttcttgtacctgagtctaaaattacaacgttatcaaaattcacttcgtttttcctgcattttaaaagtaataaaatattatttgagattattttgaaattaaatatccttaacc

SEQ ID NO: 559266 - DNA, 120 bp, Artificial Sequence
  ENSG00000169330_48 (sequence is synthesized)
aatgattaaattcataatcatttcatcttctttcataatcatttcatcttctaatctgaatttgttttgaacacagccttgcagaaaagcaaaaaatatttccccgctcaaattttgccg

SEQ ID NO: 559267 - DNA, 120 bp, Artificial Sequence
  ENSG00000169330_49 (sequence is synthesized)
acattttataccagtatccccttcattacagtaaactaaatcataacttacatcatccattactagctgatcataaattgttagtattttaaggtatgcaactatgtgattgacatctgt

SEQ ID NO: 559268 - DNA, 120 bp, Artificial Sequence
  ENSG00000169330_50 (sequence is synthesized)
aaggctagtttaatagacgtgctaaatatcactgttctgaatatctgtgccatagttctgatacccttattggaatcaaggcagtgctgtttctgtttacaagttatcaagataagagca

SEQ ID NO: 559269 - DNA, 120 bp, Artificial Sequence
  ENSG00000169330_51 (sequence is synthesized)
gtggcatcacatttgttgttgttgtttttttttttgaaatagaaaaaaacagaagaagctctgccaacaataaaagattttgttaagtggtataaaaatttgtgaatgttgaaattcaac

SEQ ID NO: 559270 - DNA, 120 bp, Artificial Sequence
  ENSG00000169330_52 (sequence is synthesized)
atgcttcatattataaccaacctgcaagaatattgtggtcaattgtgtgaataccaaatcagtatatactgtatactgtactatgaaaatttgtatttaaaggcaaagatacaagtaatt

SEQ ID NO: 559271 - DNA, 120 bp, Artificial Sequence
  ENSG00000169330_53 (sequence is synthesized)
gttggtataattggggaaaagggtattcaatatttattaagtaacaatgagaaatgcaacaaacttccttatttatgccttatgaataaaagagtgtggaatgtaaggtgaaattttatg

SEQ ID NO: 559272 - DNA, 120 bp, Artificial Sequence
  ENSG00000169330_54 (sequence is synthesized)
tgcaagatcctgaaggaatgggtattcttgaaggcagggactgtcttttctatgtttgttctgtacagctctcagcacactcttggtgcttgataaatgttatgttatataataccaata

SEQ ID NO: 559273 - DNA, 120 bp, Artificial Sequence
  ENSG00000169330_55 (sequence is synthesized)
actaagcacatttttagatcttttttcaaatggcttgtgtaaaatttggttaatgtacaatggttggtttgaagctatcatgtaaaattggcctctccaaatataatcagaaataaaccg

SEQ ID NO: 559274 - DNA, 120 bp, Artificial Sequence
  ENSG00000169340_0 (sequence is synthesized)
agaactttgctgctgaggctgctgtggcctctgtgtgcccaggaagggacttcatttctgcctgtggattctttagaatgcccagtcgtctgcgggtcctgccctgatcacaaggagaag

SEQ ID NO: 559275 - DNA, 120 bp, Artificial Sequence
  ENSG00000169340_1 (sequence is synthesized)
ccaggagcctcctcttcaggctacaaccttccttcttaagggccacagagtttgtggccccacccccagcacagccccaccttggccccaggaaccctgggagtggccttggcttcctgc

SEQ ID NO: 559276 - DNA, 120 bp, Artificial Sequence
  ENSG00000169340_2 (sequence is synthesized)
aggacagccatggacctactctggatgcccctgctgctggtggccgcttgtgtctctgctgtccacagctcaccagaggttaacgccggtgtttccagcatccacataaccaagcctgtg

SEQ ID NO: 559277 - DNA, 120 bp, Artificial Sequence
  ENSG00000169340_3 (sequence is synthesized)
cacatcctggaggaacgcagtctcctagtgctaacgcccgctggcctgacccagatgctgaaccagacccgcttcctcatggtgcttttccacaacccatcctcaaagcaatccaggaac

SEQ ID NO: 559278 - DNA, 120 bp, Artificial Sequence
  ENSG00000169340_4 (sequence is synthesized)
ttggcggaagagctgggcaaagctgtggagatcatgggcaaaggcaagaatgggatcggctttggcaaagtggacattaccatagagaaggagcttcagcaggagtttgggattaccaag

SEQ ID NO: 559279 - DNA, 120 bp, Artificial Sequence
  ENSG00000169340_5 (sequence is synthesized)
gccccggagttgaagctgttttttgagggcaacaggtcagagcccatcagctgcaaaggagtggttgaatctgctgccttagtcgtttggttgagacgacaaattagccagaaagcattt

SEQ ID NO: 559280 - DNA, 120 bp, Artificial Sequence
  ENSG00000169340_6 (sequence is synthesized)
ttgttcaacagcagcgagcaggtggcagagtttgtgatatccaggcccttggtcatcgttggcttcttccaggatttagaggaagaagtagcagagttgttctatgatgtgatcaaagac

SEQ ID NO: 559281 - DNA, 120 bp, Artificial Sequence
  ENSG00000169340_7 (sequence is synthesized)
tttccagagctaacgtttggagtcataacgattggcaatgtcattgggcgtttccacgtcacccttgacagcgtcctggtgttcaaaaagggaaaaattgtgaaccgccaaaagcttatt

SEQ ID NO: 559282 - DNA, 120 bp, Artificial Sequence
  ENSG00000169340_8 (sequence is synthesized)
atcatgagtcacatgctgctgtttgtctccaaaagctccgagtcatatggtatcataattcagcattataagctggcatcaaaggaattccaaaacaagatccttttcatccttgtggat

SEQ ID NO: 559283 - DNA, 120 bp, Artificial Sequence
  ENSG00000169340_9 (sequence is synthesized)
gcagacgaacccagaaatggacgtgtcttcaagtacttccgggtcacagaggtcgatatcccatccgtccaaatcctaaacttgagctctgacgccaggtacaaaatgccttcagatgac

SEQ ID NO: 559284 - DNA, 120 bp, Artificial Sequence
  ENSG00000169340_10 (sequence is synthesized)
ataacctacgaaagcctcaagaaatttggccgcagcttcctgagtaaaaatgccacaaaacatcaatccagtgaagagattccaaaatactgggaccagggactggttaagcagctcgtg

SEQ ID NO: 559285 - DNA, 120 bp, Artificial Sequence
  ENSG00000169340_11 (sequence is synthesized)
gggaagaacttcaacgtagtcgtctttgacaaagaaaaggacgtatttgtgatgttctatgcaccctggtctaaaaagtgcaagatgctgttcccactgttggaggaattgggcagaaaa

SEQ ID NO: 559286 - DNA, 120 bp, Artificial Sequence
  ENSG00000169340_12 (sequence is synthesized)
tatcaaaaccactccacaattatcattgccaagatcgatgtcacagcaaatgacattcagctgatgtacctggaccggtacccattcttcaggctgttccccagcggctctcaacaagct

SEQ ID NO: 559287 - DNA, 120 bp, Artificial Sequence
  ENSG00000169340_13 (sequence is synthesized)
gtcctgtataagggagaacacaccctgaagggcttctctgacttcctggaaagccacatcaaaactaagattgaggatgaggatgagctgttgtctgttgagcaaaatgaagtgatagaa

SEQ ID NO: 559288 - DNA, 120 bp, Artificial Sequence
  ENSG00000169340_14 (sequence is synthesized)
gaggaagtgctagctgaggaaaaggaggtgcctatgatgaggaaagggttacctgaacagcagtcgcctgagctggagaacatgaccaagtacgtatccaagctggaagagcccgctggg

SEQ ID NO: 559289 - DNA, 120 bp, Artificial Sequence
  ENSG00000169340_15 (sequence is synthesized)
aagaagaaaacatctgaggaggtggtggtggtggtggctaagccaaagggacctccagtgcaaaagaagaaaccaaaagtcaaggaagaactttagcttctccaataccaggaaaaaaga

SEQ ID NO: 559290 - DNA, 120 bp, Artificial Sequence
  ENSG00000169340_16 (sequence is synthesized)
tgcttattttccagatcctggcatcattttctgaatggattgattccaataaaagcatatatcattgtggtagggtaggtggggcgggggtaggggtggataataaagcctctgagtgtc

SEQ ID NO: 559291 - DNA, 120 bp, Artificial Sequence
  ENSG00000169344_0 (sequence is synthesized)
aacaacaacctcacagcttggacaaggcaaacattatgccaggaggaaaaaatattccacccccaagaaaacaatatcaaaaaacagaactagagactaattggaggagagattgccagc

SEQ ID NO: 559292 - DNA, 120 bp, Artificial Sequence
  ENSG00000169344_1 (sequence is synthesized)
ctggggcaaatgtgtatatataagtatgaggcacatcatgaccagactaactctacctttctggcttcaggacaccagacatcagagacagagagaaaaattcaaagggccaacccgtct

SEQ ID NO: 559293 - DNA, 120 bp, Artificial Sequence
  ENSG00000169344_2 (sequence is synthesized)
ttcctttgggcaggtgctatctagacctgaagtagcgggaagagcagaaaggatggggcagccatctctgacttggatgctgatggtggtggtggcctcttggttcatcacaactgcagc

SEQ ID NO: 559294 - DNA, 120 bp, Artificial Sequence
  ENSG00000169344_3 (sequence is synthesized)
cactgacacctcagaagcaagatggtgctctgaatgtcacagcaatgccacctgcacggaggatgaggccgttacgacgtgcacctgtcaggagggcttcaccggcgatggcctgacctg

SEQ ID NO: 559295 - DNA, 120 bp, Artificial Sequence
  ENSG00000169344_4 (sequence is synthesized)
cgtggacctggatgagtgcgccattcctggagctcacaactgctccgccaacagcagctgcgtaaacacgccaggctccttctcctgcgtctgccccgaaggcttccgcctgtcgcccgg

SEQ ID NO: 559296 - DNA, 120 bp, Artificial Sequence
  ENSG00000169344_5 (sequence is synthesized)
tctcggctgcacagacgtggatgagtgcgctgagcctgggcttagccactgccacgccctggccacatgtgtcaatgtggtgggcagctacttgtgcgtatgccccgcgggctaccgggg

SEQ ID NO: 559297 - DNA, 120 bp, Artificial Sequence
  ENSG00000169344_6 (sequence is synthesized)
ggatggatggcactgtgagtgctccccgggctcctgcgggccggggttggactgcgtgcccgagggcgacgcgctcgtgtgcgcggatccgtgccaggcgcaccgcaccctggacgagta

SEQ ID NO: 559298 - DNA, 120 bp, Artificial Sequence
  ENSG00000169344_7 (sequence is synthesized)
ctggcgcagcaccgagtacggggagggctacgcctgcgacacggacctgcgcggctggtaccgcttcgtgggccagggcggtgcgcgcatggccgagacctgcgtgccagtcctgcgctg

SEQ ID NO: 559299 - DNA, 120 bp, Artificial Sequence
  ENSG00000169344_8 (sequence is synthesized)
caacacggccgcccccatgtggctcaatggcacgcatccgtccagcgacgagggcatcgtgagccgcaaggcctgcgcgcactggagcggccactgctgcctgtgggatgcgtccgtcca

SEQ ID NO: 559300 - DNA, 120 bp, Artificial Sequence
  ENSG00000169344_9 (sequence is synthesized)
ggtgaaggcctgtgccggcggctactacgtctacaacctgacagcgccccccgagtgtcacctggcgtactgcacagaccccagctccgtggaggggacgtgtgaggagtgcagtataga

SEQ ID NO: 559301 - DNA, 120 bp, Artificial Sequence
  ENSG00000169344_10 (sequence is synthesized)
tggagcacaggctggaatgtggggccaatgacatgaaggtgtcgctgggcaagtgccagctgaagagtctgggcttcgacaaggtcttcatgtacctgagtgacagccggtgctcgggct

SEQ ID NO: 559302 - DNA, 120 bp, Artificial Sequence
  ENSG00000169344_11 (sequence is synthesized)
tcaatgacagagacaaccgggactgggtgtctgtagtgaccccagcccgggatggcccctgtgggacagtgttgacgaggaatgaaacccatgccacttacagcaacaccctctacctgg

SEQ ID NO: 559303 - DNA, 120 bp, Artificial Sequence
  ENSG00000169344_12 (sequence is synthesized)
cagatgagatcatcatccgtgacctcaacatcaaaatcaactttgcatgctcctaccccctggacatgaaagtcagcctgaagaccgccctacagccaatggtcagtgctctaaacatca

SEQ ID NO: 559304 - DNA, 120 bp, Artificial Sequence
  ENSG00000169344_13 (sequence is synthesized)
gagtgggcgggaccggcatgttcaccgtgcggatggcgctcttccagaccccttcctacacgcagccctaccaaggctcctccgtgacactgtccactgaggcttttctctacgtgggca

SEQ ID NO: 559305 - DNA, 120 bp, Artificial Sequence
  ENSG00000169344_14 (sequence is synthesized)
ccatgttggatgggggcgacctgtcccgatttgcactgctcatgaccaactgctatgccacacccagtagcaatgccacggaccccctgaagtacttcatcatccaggacagatgcccac

SEQ ID NO: 559306 - DNA, 120 bp, Artificial Sequence
  ENSG00000169344_15 (sequence is synthesized)
acactagagactcaactatccaagtggtggagaatggggagtcctcccagggccgattttccgtccagatgttccggtttgctggaaactatgacctagtctacctgcactgtgaagtct

SEQ ID NO: 559307 - DNA, 120 bp, Artificial Sequence
  ENSG00000169344_16 (sequence is synthesized)
atctctgtgacaccatgaatgaaaagtgcaagcctacctgctctgggaccagattccgaagtgggagtgtcatagatcaatcccgtgtcctgaacttgggtcccatcacacggaaaggtg

SEQ ID NO: 559308 - DNA, 120 bp, Artificial Sequence
  ENSG00000169344_17 (sequence is synthesized)
tccaggccacagtctcaagggcttttagcagcttggggctcctgaaagtctggctgcctctgcttctctcggccaccttgaccctgacttttcagtgactgacagcggaaagccctgtgc

SEQ ID NO: 559309 - DNA, 120 bp, Artificial Sequence
  ENSG00000169344_18 (sequence is synthesized)
tccatggctgccatctcacctcctgctgggcagggggcatgatgcgggccagtgctccagccacagaaaagaaagttcatgctttgttcagcctgccttcttttctcccttttaatcctg

SEQ ID NO: 559310 - DNA, 120 bp, Artificial Sequence
  ENSG00000169344_19 (sequence is synthesized)
gctgtcgagaaacagcctgtgtctttaaatgctgctttttctcaaaatgggacttgtgacggtgtacctgaggcccccatctccttaaagagtgtggcaaaataatgatttttaaatctc

SEQ ID NO: 559311 - DNA, 120 bp, Artificial Sequence
  ENSG00000169344_20 (sequence is synthesized)
agactaactctacctttctggcttcaggtaaggctatctgtagctgtcttctcctagcccagcttctccccatcctatttgagggaggtaggagaggaaattaagaccttggacactggg

SEQ ID NO: 559312 - DNA, 120 bp, Artificial Sequence
  ENSG00000169344_21 (sequence is synthesized)
acgatatgtgagttgcatgaaggagcagactgccatgttcattgttctccatggtgactagctccctgtttggcacaatgtagctactcaatagatgtttgttgaatgaataagtgatcc

SEQ ID NO: 559313 - DNA, 120 bp, Artificial Sequence
  ENSG00000169344_22 (sequence is synthesized)
gcagaggatcagttaaaatccaaagctgccttcagtaaagtggtgagtccagaacactattccatctggctacttcctgctccaaatgactgagttcttcaaaatgtgcaatgtgctgag

SEQ ID NO: 559314 - DNA, 120 bp, Artificial Sequence
  ENSG00000169344_23 (sequence is synthesized)
aggactccgcagagaggaggcgacactgagcagggtcctgatgaagatttcaccagccagggaagcagaaaacataaaatgtgcaaagaaagggaggggcaacaggttcaccgtaaatcc

SEQ ID NO: 559315 - DNA, 120 bp, Artificial Sequence
  ENSG00000169344_24 (sequence is synthesized)
aatactggcatccaccctggactatttttccaattggaagaaatagtaagtgaccactccagaaacatttaaatgcattgtgaaggttaattacctctcaagttgctcgtctcaagccac

SEQ ID NO: 559316 - DNA, 120 bp, Artificial Sequence
  ENSG00000169347_0 (sequence is synthesized)
gtgcaccaattgaggagagacacatgggtgggaaattgcaataaaaagacggcccacagcaggctgcattcccatggctggccagaggaggaacgctttgtgttctcatcggagctgcat

SEQ ID NO: 559317 - DNA, 120 bp, Artificial Sequence
  ENSG00000169347_1 (sequence is synthesized)
gggaagtctgcatacagcaaagtgacctgcatgcctcaccttatggaaaggatggtgggctctggcctcctgtggctggccttggtctcctgcattctgacccaggcatctgcagtgcag

SEQ ID NO: 559318 - DNA, 120 bp, Artificial Sequence
  ENSG00000169347_2 (sequence is synthesized)
cgaggttatggaaaccccattgaagccagttcgtatgggctggacctggactgcggagctcctggcaccccagaggctcatgtctgttttgacccctgtcagaattacaccctcctggat

SEQ ID NO: 559319 - DNA, 120 bp, Artificial Sequence
  ENSG00000169347_3 (sequence is synthesized)
gaacccttccgaagcacagagaactcagcagggtcccaggggtgcgataaaaacatgagcggctggtaccgctttgtaggggaaggaggagtaaggatgtcggagacctgtgtccaggtg

SEQ ID NO: 559320 - DNA, 120 bp, Artificial Sequence
  ENSG00000169347_4 (sequence is synthesized)
caccgatgccagacagacgctcccatgtggctgaatgggacccaccctgcccttggggatggcatcaccaaccacactgcctgtgcccattggagtggcaactgctgtttctggaaaaca

SEQ ID NO: 559321 - DNA, 120 bp, Artificial Sequence
  ENSG00000169347_5 (sequence is synthesized)
gaggtgctggtgaaggcctgcccaggcgggtaccatgtgtaccggttggaaggcactccctggtgtaatctgagatactgcacagacccatccactgtggaggacaagtgtgagaaggcc

SEQ ID NO: 559322 - DNA, 120 bp, Artificial Sequence
  ENSG00000169347_6 (sequence is synthesized)
tgccgccccgaggaggagtgccttgccctcaacagcacctggggctgtttctgcagacaggacctcaatagttctgatgtccacagtttgcagcctcagctagactgtgggcccagggag

SEQ ID NO: 559323 - DNA, 120 bp, Artificial Sequence
  ENSG00000169347_7 (sequence is synthesized)
atcaaggtgaaggtggacaaatgtttgctgggaggcctgggtttgggggaggaggtcattgcctacctgcgagacccaaactgcagcagcatcttgcagacagaggagaggaactgggta

SEQ ID NO: 559324 - DNA, 120 bp, Artificial Sequence
  ENSG00000169347_8 (sequence is synthesized)
tctgtgaccagccccgtccaggctagtgcctgcaggaacattctggagagaaatcaaacccatgccatctacaaaaacaccctctccttggtcaatgatttcatcatcagagacaccatc

SEQ ID NO: 559325 - DNA, 120 bp, Artificial Sequence
  ENSG00000169347_9 (sequence is synthesized)
ctcaacatcaacttccaatgtgcctacccactggacatgaaagtcagcctccaagctgccttgcagcccattgtaagttccctgaacgtcagtgtggacgggaatggagagttcattgtc

SEQ ID NO: 559326 - DNA, 120 bp, Artificial Sequence
  ENSG00000169347_10 (sequence is synthesized)
aggatggccctcttccaagaccagaactacacgaatccttacgaaggggatgcagttgaactgtctgttgagtccgtgctgtatgtgggtgccatcttggaacaaggggacacctcccgg

SEQ ID NO: 559327 - DNA, 120 bp, Artificial Sequence
  ENSG00000169347_11 (sequence is synthesized)
tttaacctggtgttgaggaactgctatgccacccccactgaagacaaggctgaccttgtgaagtatttcatcatcagaaacagctgctcaaatcaacgtgattccaccatccacgtggag

SEQ ID NO: 559328 - DNA, 120 bp, Artificial Sequence
  ENSG00000169347_12 (sequence is synthesized)
gagaatgggcagtcctcggaaagccggttctcagttcagatgttcatgtttgctggacattatgacctagttttcctgcattgtgagattcatctctgtgattctcttaatgaacagtgc

SEQ ID NO: 559329 - DNA, 120 bp, Artificial Sequence
  ENSG00000169347_13 (sequence is synthesized)
cagccttcttgctcaagaagtcaagtccgcagtgaagtaccggccatcgacctagcccgggttctagatttggggcccatcactcggagaggtgcacagtctcccggtgtcatgaatgga

SEQ ID NO: 559330 - DNA, 120 bp, Artificial Sequence
  ENSG00000169347_14 (sequence is synthesized)
tgactgtcctcctggcttggctgttctgagagctccgctgagcatctggccttgaagtttgtgttcttccctctggcaatggctcccttcagcacttctgctttccactccaattcacac

SEQ ID NO: 559331 - DNA, 120 bp, Artificial Sequence
  ENSG00000169347_15 (sequence is synthesized)
ctttccactccaattcacacaggcttggtattaatagaatcaaggccaagctaggttaggaaaagggaagagctttcaccttctttaaaactctcggctgggcgcagtggctcatgcctg

SEQ ID NO: 559332 - DNA, 120 bp, Artificial Sequence
  ENSG00000169347_16 (sequence is synthesized)
aaaaaaaaaaaaaagaaaagcaacatagtggggtttctgtcaatctgtcctcggctgcccttctcatttgttgatgggaccttgaaagcaagcttgctaggtgccctctgtggctccagc

SEQ ID NO: 559333 - DNA, 120 bp, Artificial Sequence
  ENSG00000169347_17 (sequence is synthesized)
cagcctttaccggaagtgtggtgcatgtttttaacttcagggaagcggtatcctgtcactggggtatgggatgagcatggagaagaggcaccagccacgattccttcctaagcatctcct

SEQ ID NO: 559334 - DNA, 120 bp, Artificial Sequence
  ENSG00000169347_18 (sequence is synthesized)
gttctgactgctcatgaattgaagaaactgacccttgtgttcactctgcttcctctgattgtttctatcatggtttccaaaaattgccatgggaacatgtcaaagggccacttttggaga

SEQ ID NO: 559335 - DNA, 120 bp, Artificial Sequence
  ENSG00000169347_19 (sequence is synthesized)
ctctgctccaggaagaactagtccccatagctcccctatcccccaccataccacagacatgctgtgacttagagaactacacaaacatccttgggacctagatgctggaggaatgactta

SEQ ID NO: 559336 - DNA, 120 bp, Artificial Sequence
  ENSG00000169347_20 (sequence is synthesized)
atttgatgcagaaactccatcacccaagggagtacctctcactgtaaacagtgctgtgcttgctctgaaggattaagcaagaagtcccaacagaagcaatgcaccagtcctgctatggga

SEQ ID NO: 559337 - DNA, 120 bp, Artificial Sequence
  ENSG00000169347_21 (sequence is synthesized)
atgaaactgcaaagcctaggagatgggtgaagtccctttctggagacctttaatgagtacttcaaagcacccgacacagatgcagcaaatagggcatcacacatacacaggcattaatac

SEQ ID NO: 559338 - DNA, 120 bp, Artificial Sequence
  ENSG00000169347_22 (sequence is synthesized)
tcacgggcatatagatgctgacatgtgtacactgacttacgcccttcccacagctacagataaggcctcgcaaagttggcctcagagacacatcaggaaccaaggtggaccagcaggtgc

SEQ ID NO: 559339 - DNA, 120 bp, Artificial Sequence
  ENSG00000169347_23 (sequence is synthesized)
cgagcctgtgtatctgcttggaggagacgttccaatgtgctgccttgttcagagatggtgtagttgcaagaaacagaaacccaccacaatttctcaggcaaaaagggagttaattataag

SEQ ID NO: 559340 - DNA, 120 bp, Artificial Sequence
  ENSG00000169347_24 (sequence is synthesized)
gacataagagcacaaagttccagtgcaagagatacatccaggctgcacaagctccgggagtggggcctggcaagccaaaagaaaccaaagtttgtcttgccttctgttcctctttctgaa

SEQ ID NO: 559341 - DNA, 120 bp, Artificial Sequence
  ENSG00000169347_25 (sequence is synthesized)
gccacatagccttttatgactgtgtatttttgcatcgcttttgttttctttttatgtctctgaagccagcttttcctgttcactcatcccttgattaaatatggacattctagcttcaca

SEQ ID NO: 559342 - DNA, 120 bp, Artificial Sequence
  ENSG00000169347_26 (sequence is synthesized)
attatgaagattaaatgtgagaagtcaagaacgcaaagcagtgcccagcatgttcagcattcagcacacagcactattgtttgtaggaagcattcgcacaatgctgagacagctggaagg

SEQ ID NO: 559343 - DNA, 120 bp, Artificial Sequence
  ENSG00000169347_27 (sequence is synthesized)
cagattctgtactaggagcaaggaacatgaggctcggtttggcatggttccacagtcacagaaatctacatccatagaggacatttcagggggctcttagcagcacccaatgcataaaac

SEQ ID NO: 559344 - DNA, 120 bp, Artificial Sequence
  ENSG00000169359_0 (sequence is synthesized)
atatgctttttctggagtcctgtagagaaagtgctctctgccgcattgatagcagcgagagctggaggtgttgggtcgggagaccagccgttcgatcccgccgcaggtaggagctggttt

SEQ ID NO: 559345 - DNA, 120 bp, Artificial Sequence
  ENSG00000169359_1 (sequence is synthesized)
ccatcctggcaccacggcacacacctccagcctcgagcccggcgctgctgcccgggggtctccttcaggctctttgacgccgttccagggggcacctatccaggcatcctctgggcctct

SEQ ID NO: 559346 - DNA, 120 bp, Artificial Sequence
  ENSG00000169359_2 (sequence is synthesized)
agccagaggactggctcccggcttcagcactccgggctgcagtaagaagtgcccttatcgctctgagccctgccaccatcccgtgaaccaccgaaaccctggtccagcgcgacagccttg

SEQ ID NO: 559347 - DNA, 120 bp, Artificial Sequence
  ENSG00000169359_3 (sequence is synthesized)
gacctgggactggacggatccaaaacgctcagcctcggccccccacagacggggctctgcatcgtctctgatatgtcacccaccatctcccacaaggacagcagccggcaacggcggcca

SEQ ID NO: 559348 - DNA, 120 bp, Artificial Sequence
  ENSG00000169359_4 (sequence is synthesized)
gggaatttcagtcactctctggatatgaagagcggtcccctgccgccaggcggttgggatgacagtcatttggactcagcgggccgggaaggggacagagaagctcttctgggggatacc

SEQ ID NO: 559349 - DNA, 120 bp, Artificial Sequence
  ENSG00000169359_5 (sequence is synthesized)
ggcactggcgacttcttaaaagccccacagagcttccgggccgaactaagcagcattttgctactactctttctttacgtgcttcagggtattcccctgggcttggcgggaagcatccca

SEQ ID NO: 559350 - DNA, 120 bp, Artificial Sequence
  ENSG00000169359_6 (sequence is synthesized)
ctcattttgcaaagcaaaaatgttagctatacagaccaagctttcttcagttttgtcttttggcccttcagtctcaaattactctgggccccgttggttgatgcggtctacgttaagaac

SEQ ID NO: 559351 - DNA, 120 bp, Artificial Sequence
  ENSG00000169359_7 (sequence is synthesized)
ttcggtcgtcgcaaatcttggcttgtcccgacacagtatatactaggactcttcatgatctatttatccactcaggtggaccgtttgcttgggaataccgatgacagaacacccgacgtg

SEQ ID NO: 559352 - DNA, 120 bp, Artificial Sequence
  ENSG00000169359_8 (sequence is synthesized)
attgctctcactgtggcgttctttttgtttgaattcttggccgccactcaggacattgccgtcgatggttgggcgttaactatgttatccagggaaaatgtgggttatgcttctacttgc

SEQ ID NO: 559353 - DNA, 120 bp, Artificial Sequence
  ENSG00000169359_9 (sequence is synthesized)
aattcggtgggccaaacagcgggttactttttgggcaatgttttgtttttggcccttgaatctgccgacttttgtaacaaatatttgcggtttcagcctcaacccagaggaatcgttact

SEQ ID NO: 559354 - DNA, 120 bp, Artificial Sequence
  ENSG00000169359_10 (sequence is synthesized)
cagatttcctttttttctggggaactgtatttttaataacaacaacattggttgcccttctgaaaaaagaaaacgaagtatcagtagtaaaagaagaaacacaagggatcacagatactt

SEQ ID NO: 559355 - DNA, 120 bp, Artificial Sequence
  ENSG00000169359_11 (sequence is synthesized)
acaagctgctttttgcaattataaaaatgccagcagttctgacattttgccttctgattctaactgcaaagattggtttttcagcagcagatgctgtaacaggactgaaattggtagaag

SEQ ID NO: 559356 - DNA, 120 bp, Artificial Sequence
  ENSG00000169359_12 (sequence is synthesized)
agggagtacccaaagaacatttagccttattggcagttccaatggttcctttgcagataatactgcctctgattatcagcaaatacactgcaggtccccagccattaaacacattttaca

SEQ ID NO: 559357 - DNA, 120 bp, Artificial Sequence
  ENSG00000169359_13 (sequence is synthesized)
aagccatgccctacagattattgcttgggttagaatatgccctactggtttggtggactcctaaagtagaacatcaagggggattccctatatattactatatcgtagtcctgctgagtt

SEQ ID NO: 559358 - DNA, 120 bp, Artificial Sequence
  ENSG00000169359_14 (sequence is synthesized)
atgctttacatcaggttacagtgtacagcatgtatgtttctataatggctttcaatgcaaaggttagtgatccacttattggaggaacatacatgacccttttaaataccgtgtccaatc

SEQ ID NO: 559359 - DNA, 120 bp, Artificial Sequence
  ENSG00000169359_15 (sequence is synthesized)
tgggaggaaactggccttctacagtagctctttggcttgtagatcccctcacagtaaaagagtgtgtaggagcatcaaaccagaattgtcgaacacctgatgctgttgagctttgcaaaa

SEQ ID NO: 559360 - DNA, 120 bp, Artificial Sequence
  ENSG00000169359_16 (sequence is synthesized)
aactgggtggctcatgtgttacagccctggatggttattatgtggagtccattatttgtgttttcattggatttggttggtggttctttcttggtccaaaatttaaaaagttacaggatg

SEQ ID NO: 559361 - DNA, 120 bp, Artificial Sequence
  ENSG00000169359_17 (sequence is synthesized)
aaggatcatcttcgtggaaatgcaaaaggaacaattaatatatatgctactggacattctagcaaggttgaattttagagtggggtttttataagtaatggaggataaaatgggtgggag

SEQ ID NO: 559362 - DNA, 120 bp, Artificial Sequence
  ENSG00000169359_18 (sequence is synthesized)
aaaatggcacacagcacctgaagaaagatggggcagtgacctctagaactcatgcattgccattggaaagcctgtgttgggcatcgatgtcagatcctgaagaatcacctggaaaaaatc

SEQ ID NO: 559363 - DNA, 120 bp, Artificial Sequence
  ENSG00000169359_19 (sequence is synthesized)
ccatcctagaggcaaggaggctacaccaaaccatacactacagtactttgtcacatggttgtccattatcatgtattagagtctaaatgattacttgaataaagaaaaaaaaccacttaa

SEQ ID NO: 559364 - DNA, 120 bp, Artificial Sequence
  ENSG00000169359_20 (sequence is synthesized)
gtataaaatattattttaaacagcgaaattaataatataaaatgccaaatggttgaaaaaatagaaacctttctgtatatttgatcatattttttttttgccttgtcaatgtatttaaag

SEQ ID NO: 559365 - DNA, 120 bp, Artificial Sequence
  ENSG00000169359_21 (sequence is synthesized)
tttacttaaggtcaggaaattctaaaacaacttttctggccttgttatttgatgtatatcttttaaatttactgaccaaagcatgttttaagctgcaatgcagtagtcacgggtggtaac

SEQ ID NO: 559366 - DNA, 120 bp, Artificial Sequence
  ENSG00000169359_22 (sequence is synthesized)
catgtagtcaggtattgttattagtacctatcactgctgagctgtatttaaaattttggtacaatatataaaatggagaagagcttgatattcaggtactaaccacaactagtctgacat

SEQ ID NO: 559367 - DNA, 120 bp, Artificial Sequence
  ENSG00000169359_23 (sequence is synthesized)
tgttggcagttaaaatcttattttgaattgtaaattagttaaattttatgtggaatttgctgagaaaagaatatagactactgaaatgtcattttagttatttttcttatgaccacattg

SEQ ID NO: 559368 - DNA, 120 bp, Artificial Sequence
  ENSG00000169359_24 (sequence is synthesized)
ccacattgtacaaatgaatctgtgttaaaaagactattttaaatgtatttcctgcttttgtaagcattaaagatttataagaaaattattcaaactattttttataaaatgaaagttatg

SEQ ID NO: 559369 - DNA, 120 bp, Artificial Sequence
  ENSG00000169359_25 (sequence is synthesized)
acttattgattcctcttgcccctaccccctctttttggaagatattttgattccttataaacttttaccctaagcttatatatgttttctgtcacaagtgcttcctggcacacagacagc

SEQ ID NO: 559370 - DNA, 120 bp, Artificial Sequence
  ENSG00000169359_26 (sequence is synthesized)
caatggaggggatcaaattcagtgttgtatgtatgtttatggcaacattttgaaaataaaaattaaatgtttttcttcaagtagtttttttttaattgctgagagaaaaaaacagtaaag

SEQ ID NO: 559371 - DNA, 120 bp, Artificial Sequence
  ENSG00000169359_27 (sequence is synthesized)
ctttctgattaagtaaaatttaaatgggcagtaccataatttaaaaaactaatactttaaagagagagacaaagatattttgtgcctttgacaaattaaatctaatagtggaaaaatgtt

SEQ ID NO: 559372 - DNA, 120 bp, Artificial Sequence
  ENSG00000169359_28 (sequence is synthesized)
tcttaattaagcactttactagtgaaaaagatctcacaatttatgccaaatcaggtactgtattttcatgtattaacacataaccttttgtttgaatactatagttttcagtggacagtt

SEQ ID NO: 559373 - DNA, 120 bp, Artificial Sequence
  ENSG00000169359_29 (sequence is synthesized)
gctattccaagaaaattaagcttttgagtactttagcaattcccagcgtattacatacacccagtgataaggttctttgcatgttttgtgttatgtattactctgactctttagagatta

SEQ ID NO: 559374 - DNA, 120 bp, Artificial Sequence
  ENSG00000169359_30 (sequence is synthesized)
tataaatcctccaaaagttagacgaaacaagatagtacattatgagtcttaattttatcattgtggaaaaatgtgtactaactcctgattttgttaattttataacataggttgaatttt

SEQ ID NO: 559375 - DNA, 120 bp, Artificial Sequence
  ENSG00000169359_31 (sequence is synthesized)
gaaactcagattgccataataaccttttatttcttcccgtgtatattattacaaattatatatactttcaaacatagttttttttttttttaattgagacagagtctcactttgtcaccc

SEQ ID NO: 559376 - DNA, 120 bp, Artificial Sequence
  ENSG00000169359_32 (sequence is synthesized)
aatgtcagtacatctttaatgacttgaagttttaaaacattttaagcctttaaggtgaaagccatttaattaatttgctctagaaataagcacaaaaaattatagttaatttgaatacat

SEQ ID NO: 559377 - DNA, 120 bp, Artificial Sequence
  ENSG00000169359_33 (sequence is synthesized)
gtatgtaatgcatgtcaaaataacttgttaatagctatgtgcaactgtgttgcatacattgatcactaatggcatttaaaaatgatctgcctaaatctgaggatctgtttattataaatc

SEQ ID NO: 559378 - DNA, 120 bp, Artificial Sequence
  ENSG00000169359_34 (sequence is synthesized)
agtagtactaaaatataccaccctgtttttatgttgtgggtgtttttcttgattgattgatcctgataaattaaacagtaccttcaagtatggacttttaactcctccagttaatgcatc

SEQ ID NO: 559379 - DNA, 120 bp, Artificial Sequence
  ENSG00000169359_35 (sequence is synthesized)
gaacatttttctctctatgtcagtatctccatatgcacattggttgccgcatatatacatctgagtttgaaaagttcttctgagattacctaaaagtaacaccacagattccttccattg

SEQ ID NO: 559380 - DNA, 120 bp, Artificial Sequence
  ENSG00000169359_36 (sequence is synthesized)
cagattccttccattgtaaatactttattttattttattattattttttagagacatggtctcacttttgcccaagctggagtacagtgatgcaatcatagctcactgcagcctcaaatt

SEQ ID NO: 559381 - DNA, 79 bp, Artificial Sequence
  ENSG00000169359_37 (sequence is synthesized)
catagctcactgcagcctcaaattcctaggctcaagggatcttccttaggctggatgctgtggctcacacctgtaatca

SEQ ID NO: 559382 - DNA, 120 bp, Artificial Sequence
  ENSG00000169359_38 (sequence is synthesized)
tctttatgacttcttttttttttttaattatccaggcatggtggtacacaccagtagtcccagctacttgggaagcttaggcgggagggttacttgaacccaggaggtcaaggcttcagt

SEQ ID NO: 559383 - DNA, 120 bp, Artificial Sequence
  ENSG00000169359_39 (sequence is synthesized)
ggtgacagagtgagaccctgtctcaacaacaaaaaaggatctttccacctcagcctctctggtagctaggactacaggcacacagcactatgcccagctaataaaaaataataatttttt

SEQ ID NO: 559384 - DNA, 120 bp, Artificial Sequence
  ENSG00000169359_40 (sequence is synthesized)
tatgcccagctaataaaaaataataattttttatagaggtggggtccgctatattttccaggctagtcccaatctcatagcttcaagcagtcgtccagccttgacctctcaaaatgctgg

SEQ ID NO: 559385 - DNA, 120 bp, Artificial Sequence
  ENSG00000169359_41 (sequence is synthesized)
gattacaggtgtaagccaccgtgccctgcccatgataaatattttaattttgcctgataagtcataaaaagtttattcaacaccttaaatagatttctcaattttttaaaaatattaaac

SEQ ID NO: 559386 - DNA, 120 bp, Artificial Sequence
  ENSG00000169359_42 (sequence is synthesized)
ctttgaaatcgaaagtaatttttggatttcacccctttattgcaaggtttttgatgtctgtgggaaaaacccctgaattgcttgtgaaactctggatatgtaattttttttctttttctg

SEQ ID NO: 559387 - DNA, 120 bp, Artificial Sequence
  ENSG00000169359_43 (sequence is synthesized)
aacagagtaaaatcttggatgggccatgatccaaaaatcatggttttgaaagtagaccgtactataagccataatcacaaatctgaggtaatagttgtgaaagtgtttaaaacatcctga

SEQ ID NO: 559388 - DNA, 120 bp, Artificial Sequence
  ENSG00000169359_44 (sequence is synthesized)
aaacaatgttgaaaaaaaaaatctatgataaaaactataaaatctctgcatatgttatactgtattgaacttgaaactttgaaggaattagagtagataagacattaatggtagaagaga

SEQ ID NO: 559389 - DNA, 120 bp, Artificial Sequence
  ENSG00000169359_45 (sequence is synthesized)
aaccacaggggtgaattatatcctacaaaagagaaatcttcatgatttaaccttttttttctgagtgacttttattttgccttattaacagaaacctgagaaagtatgttgctttgtatt

SEQ ID NO: 559390 - DNA, 120 bp, Artificial Sequence
  ENSG00000169359_46 (sequence is synthesized)
aaatggttgagaccattatttgatataaaagctgaaaatttaatttttgtattttggagaattctgtggttccaagtaattgaaagaatgactaaagctgtatgtcatagaccctgctaa

SEQ ID NO: 559391 - DNA, 120 bp, Artificial Sequence
  ENSG00000169359_47 (sequence is synthesized)
aatgaaataacttgttgggaacattccatgcagatttccaaaatgtattttaccttattattagagaaagaaaataaacttttaaaataatctgataactagcattcatatatttaataa

SEQ ID NO: 559392 - DNA, 120 bp, Artificial Sequence
  ENSG00000169359_48 (sequence is synthesized)
gtattttggttacagaagggaaggtgatactgtacattgtaactgctgagacttttttttaaccaatgtctttggtagatagcgaggcacaattattttctcttagggaggattttgaat

SEQ ID NO: 559393 - DNA, 90 bp, Artificial Sequence
  ENSG00000169359_49 (sequence is synthesized)
cgagactccgtttccacctactgcagaccatgttctttttactttattttattttattatttttttgagatggagtctggctctgttgcc

SEQ ID NO: 559394 - DNA, 83 bp, Artificial Sequence
  ENSG00000169359_50 (sequence is synthesized)
aaaacacctactgcagaccatgttctttttactttattttattttattatttttttgagatggagtctggctctgttgcccaa

SEQ ID NO: 559395 - DNA, 69 bp, Artificial Sequence
  ENSG00000169359_51 (sequence is synthesized)
cagccttccaagtagctgggactacagatgtgcactactacgcccagcttatttttgtatttttggtag

SEQ ID NO: 559396 - DNA, 120 bp, Artificial Sequence
  ENSG00000169359_52 (sequence is synthesized)
gggattacaggcgtgagccaccgctgctggctctttttactttagattgtatctgcctgatttgacaatgccaaattttttatgtaatcaccatttggtttgggactgagagctctttca

SEQ ID NO: 559397 - DNA, 120 bp, Artificial Sequence
  ENSG00000169359_53 (sequence is synthesized)
ttcattttctaccagtcaaaccactattagagtcttcatgttacttccccaatttgctagcaaggtagaatcagcatggatagcttattttccttattggaattctgttttggaagaggc

SEQ ID NO: 559398 - DNA, 120 bp, Artificial Sequence
  ENSG00000169359_54 (sequence is synthesized)
aggtcttatagcagggcagactaattaatgtgctgaactcattccctcctgcttaagtgaataaaaacttttatttgactatggattataaagattgcctttaaggagccttgtttattt

SEQ ID NO: 559399 - DNA, 120 bp, Artificial Sequence
  ENSG00000169359_55 (sequence is synthesized)
tggggaaggagaatggatattttgtaggagaaaaagactttatatagtaaatgaaaagtctatgggctgggtgtagtggctcatacctttaatcccaacactttgggatgccaaggtagg

SEQ ID NO: 559400 - DNA, 120 bp, Artificial Sequence
  ENSG00000169359_56 (sequence is synthesized)
agtattgcttgagctcaggagatcgagaccagggagactgcatctctatttttaattaaaaaggaaagaaaaagaaagaaagttctatgactaatcacctttactctaaaaaaattttgc

SEQ ID NO: 559401 - DNA, 120 bp, Artificial Sequence
  ENSG00000169359_57 (sequence is synthesized)
ccaaatgtgtaatgaaagagatcatatttaaatatcagcaatattaatttgcatagctcataagaagtcttgactcatttagaaaaaggttgctacagtttaatagttttttattgtcaa

SEQ ID NO: 559402 - DNA, 120 bp, Artificial Sequence
  ENSG00000169359_58 (sequence is synthesized)
tatagacaatataactttataacaattttatgtgaagaataatgattaaatggcatgactgaaatgcacaaggtacaggtacaatccttagggagttatcttaaatttcttttttttttt

SEQ ID NO: 559403 - DNA, 78 bp, Artificial Sequence
  ENSG00000169359_59 (sequence is synthesized)
tgcagtggcatgactccctgcactccattagctgggattacaggtgccttccaccacacctggctaatttttttgtat

SEQ ID NO: 559404 - DNA, 79 bp, Artificial Sequence
  ENSG00000169359_60 (sequence is synthesized)
caagtgattctccttcctcagcctctccattagctgggattacaggtgccttccaccacacctggctaatttttttgta

SEQ ID NO: 559405 - DNA, 120 bp, Artificial Sequence
  ENSG00000169359_61 (sequence is synthesized)
gattgcaggtgtgagccactgcacctggcgggaattatcttaaatttctaaaattgaataccccagtcagctacaattaatcaatcactaatgtaaatattaaagcctattcttattttc

SEQ ID NO: 559406 - DNA, 120 bp, Artificial Sequence
  ENSG00000169359_62 (sequence is synthesized)
ttattttccttgaaatgatcttaaatgttggaaaagtttaattttgtagtcagagttagtgaaattgaaatttttttatcacctgcccctataaaattagagaaatataagattggaaaa

SEQ ID NO: 559407 - DNA, 120 bp, Artificial Sequence
  ENSG00000169359_63 (sequence is synthesized)
ttggaaaaaaatttgatatttaagaaagtggcatatttgaaccaggtgtgttggcttacacctgtagtcccattagtttgggaggcttaggcaggagaatcacttgaggtcaggagtttg

SEQ ID NO: 559408 - DNA, 120 bp, Artificial Sequence
  ENSG00000169359_64 (sequence is synthesized)
gagagggatgttgcagtgagccgagattgtgctactattctccagcctgggcaatagagtgagactcagtctcaattaaaaaaaaaaaaaaaaaatgcggccgggtccagtggctcacgt

SEQ ID NO: 559409 - DNA, 60 bp, Artificial Sequence
  ENSG00000169359_65 (sequence is synthesized)
gagatcgcaccatcgcactccagcctgggtgcaagagcgaaactctgtctcaaaaaaaaa

SEQ ID NO: 559410 - DNA, 120 bp, Artificial Sequence
  ENSG00000169359_66 (sequence is synthesized)
gcgaaactctgtctcaaaaaaaaaaaggaagtggcatatttggtaaattgataaattaccactgtcaaattatattggtgagtctatatctattgttgtccccagatgttgcctttgcaa

SEQ ID NO: 559411 - DNA, 120 bp, Artificial Sequence
  ENSG00000169359_67 (sequence is synthesized)
gcaagaattagtgtaaaattggaaaaaatactcaatgttgaaagctgtcattgttgagatctttatgaaattattgtgcccatgtccaagtttgaattagagatacacagcacacaatca

SEQ ID NO: 559412 - DNA, 120 bp, Artificial Sequence
  ENSG00000169359_68 (sequence is synthesized)
tttctgttaccacttttggaatatctagcattagccttgatagttttgtgtggtgtgttttgagtatatctgaactgttagttatatttggttaatttattaaaagatgtgtgttaaacc

SEQ ID NO: 559413 - DNA, 120 bp, Artificial Sequence
  ENSG00000169359_69 (sequence is synthesized)
gtgtgttaaaccttaatatttatgcagtgtttaagtatttggaatatatttgaaataaattatccagtgttttagataaatggttatttaattgcttaaagtgattctctaaaaaataaa

SEQ ID NO: 559414 - DNA, 120 bp, Artificial Sequence
  ENSG00000169359_70 (sequence is synthesized)
aaataaaaccttactaaataagaaagggtaaaatgaggaacattcatcaataccactaatatctgagcgtagaattatatatatggaaaaagatttgaaaagcatcttttttcaatatta

SEQ ID NO: 559415 - DNA, 120 bp, Artificial Sequence
  ENSG00000169359_71 (sequence is synthesized)
tttatatgcacttttatctttttaacctcctaacaggtttagatacagcttctttcatatggtaggcacacggatttctgtttttgttgttgttgttatttaagctaaaatggaagtcaa

SEQ ID NO: 559416 - DNA, 120 bp, Artificial Sequence
  ENSG00000169359_72 (sequence is synthesized)
aatgcaaaaatagtggacatgccaagtgaatgctgttaataatatgtaaaattatttgattaaacatttattacttaaaaaaaagtggacattagcctcacttataaggataatgttatt

SEQ ID NO: 559417 - DNA, 120 bp, Artificial Sequence
  ENSG00000169359_73 (sequence is synthesized)
aatacattattgttcattcctttcgaaccagattccaaaatgctagaaattatgttaagatgttattttatactgggcgtggtggctcacacccgtgatcctggctctttgggaggccaa

SEQ ID NO: 559418 - DNA, 120 bp, Artificial Sequence
  ENSG00000169371_0 (sequence is synthesized)
agggcaggtgattcgtcggccccggtggcggcggcgcgtgcgacggtcacctcggtttggggaagatggaagagttgagtcaggccctggctagtagcttttctgtgtctcaagatctga

SEQ ID NO: 559419 - DNA, 120 bp, Artificial Sequence
  ENSG00000169371_1 (sequence is synthesized)
acagcacagctgccccacacccccgcctatcccagtacaagtccaagtacagttccttggagcagagtgagcgccgccggaggttactggaactgcagaaatccaagcggctggattatg

SEQ ID NO: 559420 - DNA, 120 bp, Artificial Sequence
  ENSG00000169371_2 (sequence is synthesized)
tgaaccatgccagaagactggctgaagatgactggacagggatggagagtgaggaagaaaataagaaagatgatgaagaaatggacattgacactgtcaagaagttaccaaaacactatg

SEQ ID NO: 559421 - DNA, 120 bp, Artificial Sequence
  ENSG00000169371_3 (sequence is synthesized)
ctaatcaattgatgctttctgagtggttaattgacgttccttcagatttggggcaggaatggattgtggtcgtgtgccctgttggaaaaagagcccttatcgtggcctccaggggttcta

SEQ ID NO: 559422 - DNA, 120 bp, Artificial Sequence
  ENSG00000169371_4 (sequence is synthesized)
ccagtgcctacaccaagagtggctactgtgtcaacaggttttcttcacttctgccaggaggcaacaggcgaaactcaacagcaaaagactacaccattctagattgcatttacaatgagg

SEQ ID NO: 559423 - DNA, 120 bp, Artificial Sequence
  ENSG00000169371_5 (sequence is synthesized)
accagaagaagaaggactgggagagaaaaccaagcttaatccttttaaatttgtggggctaaagaacttcccttgcactcccgaaagcctgtgtgatgtgctatctatggatttcccttt

SEQ ID NO: 559424 - DNA, 120 bp, Artificial Sequence
  ENSG00000169371_6 (sequence is synthesized)
tgaggtagatggacttctcttctaccacaaacagacccactacagccccggaagcactcccttggtgggctggctgcgcccctacatggtgtcagatgtccttggtgtagctgtgccggc

SEQ ID NO: 559425 - DNA, 120 bp, Artificial Sequence
  ENSG00000169371_7 (sequence is synthesized)
tggcccgctgaccaccaagccagactatgctgggcaccagctccagcagattatggagcacaagaagagccagaaggaaggcatgaaggagaaactcacacacaaggcctctgagaatgg

SEQ ID NO: 559426 - DNA, 120 bp, Artificial Sequence
  ENSG00000169371_8 (sequence is synthesized)
gcactatgaattggagcacctgtctactcccaagttgaagggttcttcccatagcccagaccaccctggatgcctcatggagaattaaagagagaagcctccttaaggagccacaggatg

SEQ ID NO: 559427 - DNA, 120 bp, Artificial Sequence
  ENSG00000169371_9 (sequence is synthesized)
gtacctggccccaaaaggaatcctggagaggaggacagtgacaacaggtgacttcattctttagagtgaactttccaaacccagtccagctggaaacagcttatctataatctgaaatgc

SEQ ID NO: 559428 - DNA, 120 bp, Artificial Sequence
  ENSG00000169371_10 (sequence is synthesized)
tggctcaaacagttatggggaggttcccagattgcgtagcattcagattgatttgagcagctcctactgtgataagtgtatcccagatccacaatgtaaatatatgtgatttgtaagaaa

SEQ ID NO: 559429 - DNA, 120 bp, Artificial Sequence
  ENSG00000169371_11 (sequence is synthesized)
gtgcgacggtcacctcggtttgggtgagtccctgggttcgagcccgggccccgccagctgccgagttgcctctcggtgccggactgtgactccctctggccggccctgcactctggcctc

SEQ ID NO: 559430 - DNA, 120 bp, Artificial Sequence
  ENSG00000169371_12 (sequence is synthesized)
ctgggacgtcatctggagggatagagccaggcctgggactccttttgggagagtttccgttcttctattccgtgctgtccggccaggacccctcagggacttctgtggggcaggggcgaa

SEQ ID NO: 559431 - DNA, 120 bp, Artificial Sequence
  ENSG00000169371_13 (sequence is synthesized)
tcatgcatggcctagatgaccccatgcctagaaaaaggcagtgcggggcggtggcggcgcgcacggccgagtgaagcagatagcgtccccggggctggagcccggtagcagggccgggcg

SEQ ID NO: 559432 - DNA, 120 bp, Artificial Sequence
  ENSG00000169371_14 (sequence is synthesized)
aaaaaaaaacaacaacaacaaagaaaaaacaaaacgaaacagcaggaacccgccaagaacagccttgaaggaagggaagatggaagagttgagtcaggccctggctagtagcttttctgt

SEQ ID NO: 559433 - DNA, 120 bp, Artificial Sequence
  ENSG00000169371_15 (sequence is synthesized)
ggcgcgaggcctgtgggcccagcggtgaggcagcagctgggggcggggggagggcggacctagcttcccagggcaggtgattcgtcggccccggtggcggcggcgcgtgcgacggtcacc

SEQ ID NO: 559434 - DNA, 120 bp, Artificial Sequence
  ENSG00000169371_16 (sequence is synthesized)
tcggtttggggtccacctaaagtgggaagtctgttttcaaaatgacatctactccatgcctgtcttgtttccctaatgtactttatggaagttcttcacactactggagcattgacgtta

SEQ ID NO: 559435 - DNA, 120 bp, Artificial Sequence
  ENSG00000169371_17 (sequence is synthesized)
gtaatccaggcaattggcactgcccgtttaagagcacgggcccaagaggggaaggggactccaggtgaagccctaaggcccgggaagatctgcgggaggcggcagggcccagggcgttga

SEQ ID NO: 559436 - DNA, 120 bp, Artificial Sequence
  ENSG00000169371_18 (sequence is synthesized)
atgcccggccacaagatcagcctcctcccattggcgaaaggagccccgaagagcttgtgttcaggagggaggcctcggcctggtcaagtcatctagcaggaagagtcccggacagtgcaa

SEQ ID NO: 559437 - DNA, 120 bp, Artificial Sequence
  ENSG00000169371_19 (sequence is synthesized)
agcaaatgcaagaagaccccctccctagccgatgggaaatgccccagccgttgaaggcggaaataacggcctgtaggcaacggaactcccagcgttcgcaaaggagggaggagccggaaa

SEQ ID NO: 559438 - DNA, 120 bp, Artificial Sequence
  ENSG00000169371_20 (sequence is synthesized)
cccgccctgcagaggctacaccctggcaggacttaatctcctaaatctctgccgcttaccctagtcttttgcaccaatttaatcattccttcacgcagggtctactgagcgccatccctt

SEQ ID NO: 559439 - DNA, 120 bp, Artificial Sequence
  ENSG00000169371_21 (sequence is synthesized)
gtgctggactctggctacttaaataggaatcaagccaggtccctaccattgctcagcccgcagccgagtgggaaagaagctcgcaaaagcagcaaacaggcagtaatcgagggaagatgg

SEQ ID NO: 559440 - DNA, 120 bp, Artificial Sequence
  ENSG00000169371_22 (sequence is synthesized)
agggagttggagcgggggttactggtgctaagaccacctggggctaaggtccgaacacttggaggcagcaccatccaaggaatgggttgaaacagcaggagcccggcggggcgcagtggc

SEQ ID NO: 559441 - DNA, 120 bp, Artificial Sequence
  ENSG00000169371_23 (sequence is synthesized)
tctcaaaaaaaaaaaaaaaaaaatagcatggggtgtttttgtttatattagagtttgaaatggaaagtatttcatctttctgtttcccttctctgtggcagactgatttccgattctact

SEQ ID NO: 559442 - DNA, 120 bp, Artificial Sequence
  ENSG00000169371_24 (sequence is synthesized)
gaatgggacaaagctgattctggagaaaggatgtacttgctgcccttcagagcctgagctccacccatgctggataagtcagaatgctggcactggaagggcccttaatggacagctcgt

SEQ ID NO: 559443 - DNA, 120 bp, Artificial Sequence
  ENSG00000169371_25 (sequence is synthesized)
ccaactccctcatcttacagatggagaaactgaggtccggagaaactgaggcccagataggagcaagacttgcatgcctagatccttcttgtgtgcctcttcctactgcaagctgagacc

SEQ ID NO: 559444 - DNA, 120 bp, Artificial Sequence
  ENSG00000169372_0 (sequence is synthesized)
gccattaacaaagatggtgcttatggggcaggttccctaacagtcaggattccggttgcagtttttctcccccgccccaaagatacgtggttgcagacggagaaatggaggccagagaca

SEQ ID NO: 559445 - DNA, 120 bp, Artificial Sequence
  ENSG00000169372_1 (sequence is synthesized)
aacaagtactccgctcacttcgcctggagctgggtgcagaggtattggtggagggactggttcttcagtacctctaccaggaaggaatcttgacggaaaaccatattcaagaaatcaatg

SEQ ID NO: 559446 - DNA, 120 bp, Artificial Sequence
  ENSG00000169372_2 (sequence is synthesized)
ctcaaaccacaggcctccggaaaacaatgctcctgctggatatcctaccttccaggggccctaaagcatttgatacattcctagattccctacaggagtttccctgggtcagggagaagc

SEQ ID NO: 559447 - DNA, 120 bp, Artificial Sequence
  ENSG00000169372_3 (sequence is synthesized)
tgaagaaggcaagggaagaggccatgaccgacctgcctgcaggtgacagattgactgggatcccctcgcacatcctcaacagctccccatcagaccggcagattaaccagctggcccaga

SEQ ID NO: 559448 - DNA, 120 bp, Artificial Sequence
  ENSG00000169372_4 (sequence is synthesized)
ggccttcatccgttggcggcagcgcttcgggaagcaggccaccttccagagcctgcacaacgggctgcgggctgtggaggtggacccctcgctgctcctgcacatgttggagtgatggtg

SEQ ID NO: 559449 - DNA, 120 bp, Artificial Sequence
  ENSG00000169372_5 (sequence is synthesized)
cctccagcaaccgctggggagtgtgtccctgagtcatgtgggctgaatcctgactttcactcagagcaggtggttttttgtgtaggtttgttttttatttttgatgatcttcagatggaa

SEQ ID NO: 559450 - DNA, 120 bp, Artificial Sequence
  ENSG00000169372_6 (sequence is synthesized)
ggagaaaacagggtttccactagacattacttgaaaggccagattactcagcagatctcccatgttggctcaacaattctttgtttttaattgcttgaagattgcattgttgtaattgtt

SEQ ID NO: 559451 - DNA, 120 bp, Artificial Sequence
  ENSG00000169372_7 (sequence is synthesized)
cagtttttaaatgtgtaatggcattttaatagactagtaaatcacagtggttcaaaatatatatccatatatatatatatccatatatatatctcatgtcatcacattacaggcaggtgt

SEQ ID NO: 559452 - DNA, 120 bp, Artificial Sequence
  ENSG00000169372_8 (sequence is synthesized)
ctcatatgtaaaacatttacctgaatgttgtctgaggactgaactgtggactttactattcataatgataaaataataaaatgcgaattactatatataatgtgcctcactcatgagaaa

SEQ ID NO: 559453 - DNA, 120 bp, Artificial Sequence
  ENSG00000169372_9 (sequence is synthesized)
aagggtttcagcggccgaagcagagcctttttaaatagttcccaatgggcgctcacggccaaacgtgaacacctcccctcctcacctgtcacctcctgaactttacagggttgcgagggg

SEQ ID NO: 559454 - DNA, 120 bp, Artificial Sequence
  ENSG00000169372_10 (sequence is synthesized)
gagtgtgggatcgggtgtcgcctagccgtggtcgtactgcccgggtgtgtctgaagccccatctgtcatccctgcctgccttcccggtcacttaaccttcactgccttacacacaaccaa

SEQ ID NO: 559455 - DNA, 120 bp, Artificial Sequence
  ENSG00000169372_11 (sequence is synthesized)
atgcgccacgccctgttcctccttcatcacccagctcctcctcctagtgttcagggcttagctttagcctccttcccctggaaggccttccctaatgaagttaggagctcctctgtataa

SEQ ID NO: 559456 - DNA, 120 bp, Artificial Sequence
  ENSG00000169372_12 (sequence is synthesized)
ccaaaggcactgctcactggttttgctgggcacatttataaccattcactcaatgtcatgcttcttagcagactggcctcaggcaaataagaatctagttcaggaagtgtaaggtcagat

SEQ ID NO: 559457 - DNA, 120 bp, Artificial Sequence
  ENSG00000169372_13 (sequence is synthesized)
ttcctcgttgccccgtctcatacttcctgttcctcttctgggctctgccagaacggtaactccactcttgtggcctctgctatgaacaaaccccgctctcttcccttcctgctaccctat

SEQ ID NO: 559458 - DNA, 120 bp, Artificial Sequence
  ENSG00000169372_14 (sequence is synthesized)
ggcctcttaggtttattttgttctcagcagccctcttggctctggcttctgttagcagctacacgttttctcggtaatatttcaagttcaacctcatcggcgagggtagctgtttggttt

SEQ ID NO: 559459 - DNA, 120 bp, Artificial Sequence
  ENSG00000169372_15 (sequence is synthesized)
agcctttgtcctctagcacgtgcctttcctgcagggaggggcattcccagccttggaacaggccccatcactaaggccacagacagtgccagagggagctggggtctgtgcagccattct

SEQ ID NO: 559460 - DNA, 120 bp, Artificial Sequence
  ENSG00000169372_16 (sequence is synthesized)
tgaattcccccagaatgccttgcctggccttgagtaaaagggatagaagtgaaaaaagcctgttacaaagcagcatgtacgaggtgacagattgactgggatcccctcgcacatcctcaa

SEQ ID NO: 559461 - DNA, 120 bp, Artificial Sequence
  ENSG00000169372_17 (sequence is synthesized)
tgaccgacctgcctgcagttgccatcatcaggcttcctagagaattgagcctgcccactctgttatgaagtctacccagaagagctggcagagtaggccccttcactgggactgcagcaa

SEQ ID NO: 559462 - DNA, 120 bp, Artificial Sequence
  ENSG00000169372_18 (sequence is synthesized)
cactgaccaaagcaaatccttctcttggaagaaacaaactcattcctcacacctgcctcaccccgctcccaccgccaccccctgcaccacacgccagcccttaataaaaactaaaactga

SEQ ID NO: 559463 - DNA, 120 bp, Artificial Sequence
  ENSG00000169372_19 (sequence is synthesized)
ttcatgtcccgccggacattcaaggaatccgactatgttttctatataaacatatagtatttttcacatctgaaaatatacactgaattttccaggactgtgtataaatagaggtacaag

SEQ ID NO: 559464 - DNA, 120 bp, Artificial Sequence
  ENSG00000169372_20 (sequence is synthesized)
tacaaaggcccaggaatagctagttagcttgccctggtgtcactgctcactcctgtgaagaataaggataaaccatgaggatagtagtggtaatggtgaaacagaaagaacacagaaagc

SEQ ID NO: 559465 - DNA, 120 bp, Artificial Sequence
  ENSG00000169372_21 (sequence is synthesized)
tgattctagagtagggctatctaatagaaatatcatgcaagccaccaattggagccacatatgtggtttacatttggaagtagctacattttaaaaagtaaaaagaatatgtaacattaa

SEQ ID NO: 559466 - DNA, 120 bp, Artificial Sequence
  ENSG00000169372_22 (sequence is synthesized)
tgaccgacctgcctgcagagatgaggaaactgaggccaaaggattctgttacttgcctggcttcacagctcacctggagattctgaactggcatcttcctctctctgccatcaccccaga

SEQ ID NO: 559467 - DNA, 120 bp, Artificial Sequence
  ENSG00000169372_23 (sequence is synthesized)
acaattctgtgtatgtgtgtgggtgggcggggggcaggggattatgttggcatctagtgagtagataacagagatgctgctaaacctacaatgctcagatggcccctaacaaagaagtat

SEQ ID NO: 559468 - DNA, 120 bp, Artificial Sequence
  ENSG00000169372_24 (sequence is synthesized)
gttgtccaaaatgtcaatggtgcagagggtgagaagccctggtctatacagagctcagcagtccagagcaattgcaacctctgggagttgccaagagctcctctgcccagcaacaggctt

SEQ ID NO: 559469 - DNA, 120 bp, Artificial Sequence
  ENSG00000169372_25 (sequence is synthesized)
ggcctctctcctgtggctgccacaagagttaaagccactgtctggaatgccctttggcagtggccaagtgtcccctgcagaactgactgcgggacatgcggtgcatcagccggagctgat

SEQ ID NO: 559470 - DNA, 120 bp, Artificial Sequence
  ENSG00000169372_26 (sequence is synthesized)
gtgttttgtaatttatagtcacagggcgcctgtcttcatttagcagtaggcctgctggcagcttccctgccagggaggaagcaagttccacagaggcccacagcccccgccagctgccgg

SEQ ID NO: 559471 - DNA, 120 bp, Artificial Sequence
  ENSG00000169372_27 (sequence is synthesized)
gtggggatgaggacctgaaggaggcccatgagacctcaggcatgggccctggaactctgcctttttgaagcctgttgacaatctcaccctaatttaaccctttgtggaattcttccatga

SEQ ID NO: 559472 - DNA, 120 bp, Artificial Sequence
  ENSG00000169372_28 (sequence is synthesized)
aggtgcccagtgtgccagcactgaaggaaggcctggctgcttggcaagcattggtgatgctgtgacattgagttcctggggaggctgcctgctcagggttagaggaaaaaggaaggactg

SEQ ID NO: 559473 - DNA, 120 bp, Artificial Sequence
  ENSG00000169372_29 (sequence is synthesized)
agagaagtggctggagagaactttcagagtatcaccatcttcacacagcaaacatcgctgaaccagacactcccagacctcagcgagctcactgtcaggtgacagattgactgggatccc

SEQ ID NO: 559474 - DNA, 120 bp, Artificial Sequence
  ENSG00000169372_30 (sequence is synthesized)
tgaccgacctgcctgcagggtgttggccatgatccttatgatggggaggaagggaatcaccaattttctaccccatcccactgagcaacttagagatgacctaaggcctcgttacctgtg

SEQ ID NO: 559475 - DNA, 120 bp, Artificial Sequence
  ENSG00000169372_31 (sequence is synthesized)
gcctgcaggcaagagacagctgtgctagaagaatggaggattataataaatttgaaaaaccagaacagttcttcagtagctctcctaatgagtgtgaagtggaatggattttttaaaaga

SEQ ID NO: 559476 - DNA, 120 bp, Artificial Sequence
  ENSG00000169375_0 (sequence is synthesized)
gttaaacagctgcttttaatttggtccccccaatctcaggcgtttggggggctagtccgccggccgctcggtctggccggcccgacgtggtgtgggccctgcgggccctgggaccgagct

SEQ ID NO: 559477 - DNA, 120 bp, Artificial Sequence
  ENSG00000169375_1 (sequence is synthesized)
gaggggaggctcggagttccgcggccgaggttttgtagtgcatccctgagcatgagcacagaatgaagcggcgtttggatgaccaggagtcaccggtgtatgcagcccagcagcgtcgga

SEQ ID NO: 559478 - DNA, 120 bp, Artificial Sequence
  ENSG00000169375_2 (sequence is synthesized)
tccctggcagcacagaggcttttcctcaccagcaccgggtgcttgcccctgcccctcctgtgtatgaagcagtgtctgagaccatgcagtcagctacgggaattcagtactctgtaacac

SEQ ID NO: 559479 - DNA, 120 bp, Artificial Sequence
  ENSG00000169375_3 (sequence is synthesized)
ccagctaccaggtttcagccatgccacagagctccggcagtcatgggcccgctatagcagcagttcatagcagccatcatcacccaacagcggtgcagccccacggaggccaggtggtcc

SEQ ID NO: 559480 - DNA, 120 bp, Artificial Sequence
  ENSG00000169375_4 (sequence is synthesized)
agagtcatgctcatccagccccaccagttgcaccagtgcagggacagcagcaatttcagaggctgaaggtggaggatgcgctatcttatcttgaccaggtgaagctgcagtttggtagtc

SEQ ID NO: 559481 - DNA, 120 bp, Artificial Sequence
  ENSG00000169375_5 (sequence is synthesized)
agcctcaggtctacaatgatttccttgacatcatgaaggaatttaaatctcagagcatcgacaccccaggagtgattagtcgtgtgtcccagctattcaaaggccaccccgatctgataa

SEQ ID NO: 559482 - DNA, 120 bp, Artificial Sequence
  ENSG00000169375_6 (sequence is synthesized)
tgggattcaacaccttcttgccccctggctacaaaattgaggtgcaaaccaatgacatggtgaatgtgacaactcctggccaggttcatcagattcccacccatggcatccagccacagc

SEQ ID NO: 559483 - DNA, 120 bp, Artificial Sequence
  ENSG00000169375_7 (sequence is synthesized)
ctcaaccaccaccccaacatccttcccagccttcagcccagtcagccccagctcctgcccagccagctcctcagcccccacctgccaaagtcagcaagccctcccaactgcaagcacata

SEQ ID NO: 559484 - DNA, 120 bp, Artificial Sequence
  ENSG00000169375_8 (sequence is synthesized)
ctccggccagtcagcagactcccccacttccaccgtatgcatccccacgttctccgccggtccagcctcacacaccagtgacaatctcgttgggaacggccccatccttgcagaacaatc

SEQ ID NO: 559485 - DNA, 120 bp, Artificial Sequence
  ENSG00000169375_9 (sequence is synthesized)
aacctgtggagtttaatcatgccatcaactatgttaataagatcaagaacagatttcagggccaaccagacatctacaaagcattcctggagattttgcacacatatcagaaagagcaga

SEQ ID NO: 559486 - DNA, 120 bp, Artificial Sequence
  ENSG00000169375_10 (sequence is synthesized)
gaaatgccaaggaagctggaggaaactacactccagcattgacagagcaggaggtgtatgcccaggttgctcgtctctttaaaaaccaggaagatttgttgtcagagtttggacaattcc

SEQ ID NO: 559487 - DNA, 120 bp, Artificial Sequence
  ENSG00000169375_11 (sequence is synthesized)
taccagatgccaacagctccgtgcttttaagcaaaacaactgctgagaaggttgattctgtgagaaatgatcatggaggcactgtcaagaagccccaactgaacaacaagccgcagaggc

SEQ ID NO: 559488 - DNA, 120 bp, Artificial Sequence
  ENSG00000169375_12 (sequence is synthesized)
ccagccagaatggctgccagatccgcagacatcctacaggaaccacccctccagttaagaagaaacccaaactgctcaatctgaaggattcttctatggcagatgccagcaaacatggtg

SEQ ID NO: 559489 - DNA, 120 bp, Artificial Sequence
  ENSG00000169375_13 (sequence is synthesized)
gtggaacagaatcgttattttttgataaggtccgaaaggctcttcggagtgcagaagcctacgaaaatttcctacgctgtcttgttatttttaaccaggaggtgatctctcgtgctgagc

SEQ ID NO: 559490 - DNA, 120 bp, Artificial Sequence
  ENSG00000169375_14 (sequence is synthesized)
ttgtgcaactagtctctcctttcctggggaaattccctgagttgtttaattggtttaaaaactttctgggctataaggagtctgtacatctggaaacttatccaaaggagcgagccacag

SEQ ID NO: 559491 - DNA, 120 bp, Artificial Sequence
  ENSG00000169375_15 (sequence is synthesized)
agggcattgctatggagatagattatgcttcttgtaaacgattgggctccagctatcgagccttaccaaagagttaccagcagcccaagtgtacaggacggactcctctctgtaaagagg

SEQ ID NO: 559492 - DNA, 120 bp, Artificial Sequence
  ENSG00000169375_16 (sequence is synthesized)
ttttaaatgatacctgggtttccttcccttcgtggtctgaggactctacctttgtgagttccaagaagactcaatatgaagaacatatttatcgttgtgaagatgaacgctttgagcttg

SEQ ID NO: 559493 - DNA, 120 bp, Artificial Sequence
  ENSG00000169375_17 (sequence is synthesized)
atgtagttttagagaccaatctggcaacaatccgggttctggaagcaatacagaagaagctttcccgcttgtctgctgaagaacaagccaaatttcgcttggacaacacccttgggggca

SEQ ID NO: 559494 - DNA, 120 bp, Artificial Sequence
  ENSG00000169375_18 (sequence is synthesized)
catcagaagtcatccatagaaaagcactccagaggatatatgctgataaagcagctgacatcattgatggtctgagaaagaatccctccattgctgttccaattgtccttaaaaggttga

SEQ ID NO: 559495 - DNA, 120 bp, Artificial Sequence
  ENSG00000169375_19 (sequence is synthesized)
agatgaaagaggaagaatggcgagaagctcagagaggctttaacaaagtatggcgagaacaaaatgagaaatactacttgaagtctctggaccaccaggggatcaactttaaacagaatg

SEQ ID NO: 559496 - DNA, 120 bp, Artificial Sequence
  ENSG00000169375_20 (sequence is synthesized)
acaccaaggtcctgaggtctaagagcttactcaatgagattgagagtatctatgatgagaggcaagagcaggctacggaggagaatgctggtgtacctgttggcccacacctctcacttg

SEQ ID NO: 559497 - DNA, 120 bp, Artificial Sequence
  ENSG00000169375_21 (sequence is synthesized)
caaacaaatactggaagatgctgctgctctgattatccaccatgtgaagaggcagacaggcattcagaaggaggacaaatataagataaaacaaatcatgcatcattttattccagattt

SEQ ID NO: 559498 - DNA, 120 bp, Artificial Sequence
  ENSG00000169375_22 (sequence is synthesized)
gctctttgcccaaagaggtgatctctcagatgtggaggaagaggaagaagaagagatggatgtagatgaagccacaggggcagttaagaagcacaatggtgttgggggcagtccccctaa

SEQ ID NO: 559499 - DNA, 120 bp, Artificial Sequence
  ENSG00000169375_23 (sequence is synthesized)
gtccaagttactgtttagtaacacagcagctcaaaaattaagaggaatggatgaagtatacaacctcttctatgtcaacaacaactggtatatttttatgcgactgcaccagattctctg

SEQ ID NO: 559500 - DNA, 120 bp, Artificial Sequence
  ENSG00000169375_24 (sequence is synthesized)
cctgaggctgctacggatttgttcccaagccgaacggcaaattgaagaagaaaaccgagagagagaatgggaacgggaagtgctgggcataaagcgagacaagagtgacagccctgccat

SEQ ID NO: 559501 - DNA, 120 bp, Artificial Sequence
  ENSG00000169375_25 (sequence is synthesized)
tcagctacgtctcaaagaacctatggatgttgatgtagaagattattacccagctttcctggacatggtgcggagcctgctggatggcaacatagactcatcacagtatgaagattcact

SEQ ID NO: 559502 - DNA, 120 bp, Artificial Sequence
  ENSG00000169375_26 (sequence is synthesized)
gagagagatgttcaccattcatgcctacattgcctttaccatggacaaactgatccagagcattgtcagacagctgcagcatatcgtgagtgatgagatctgtgtgcaggtgactgacct

SEQ ID NO: 559503 - DNA, 120 bp, Artificial Sequence
  ENSG00000169375_27 (sequence is synthesized)
ttacctggcagaaaataataatggggccaccggaggccagctgaacacacagaactcaaggagcctcctggagtcaacgtatcagcggaaagctgagcagctaatgtcagatgagaattg

SEQ ID NO: 559504 - DNA, 120 bp, Artificial Sequence
  ENSG00000169375_28 (sequence is synthesized)
ctttaagcttatgtttattcagagccaaggccaggtccagctgactattgagcttctggacacagaagaggagaattcggatgaccctgtggaagcagagcgctggtcagactacgtgga

SEQ ID NO: 559505 - DNA, 120 bp, Artificial Sequence
  ENSG00000169375_29 (sequence is synthesized)
gcgatacatgaattcagatactacctcgcctgagcttcgtgaacatctagcacagaaaccagtatttctccccaggaatctacggcggatccggaagtgtcaacgtggtcgagagcagca

SEQ ID NO: 559506 - DNA, 120 bp, Artificial Sequence
  ENSG00000169375_30 (sequence is synthesized)
ggaaaaggaagggaaggaaggaaacagcaagaagaccatggagaatgtggatagtctggataagctggagtgtagattcaagctgaattcctacaagatggtgtatgtgatcaaatcaga

SEQ ID NO: 559507 - DNA, 120 bp, Artificial Sequence
  ENSG00000169375_31 (sequence is synthesized)
ggactatatgtatcggaggaccgccctgctccgggctcatcagtcccatgagcgtgtaagcaagcgtctacatcagagattccaggcctgggtagataaatggaccaaggagcatgtgcc

SEQ ID NO: 559508 - DNA, 120 bp, Artificial Sequence
  ENSG00000169375_32 (sequence is synthesized)
ccgtgaaatggcagcagagaccagcaagtggctcatgggtgaggggctggagggcctggtgccctgtaccaccacctgtgatacagagaccctgcattttgtgagcattaacaagtatcg

SEQ ID NO: 559509 - DNA, 120 bp, Artificial Sequence
  ENSG00000169375_33 (sequence is synthesized)
tgtcaaatacggcacagtattcaaagccccttaactgcaaagccagagcagataacttggggtgtgtgtggggatgtgtgtgtgggcctatgcactcacacactgaagaaacaaggaaga

SEQ ID NO: 559510 - DNA, 120 bp, Artificial Sequence
  ENSG00000169375_34 (sequence is synthesized)
tgcctttcaagcctcactgggcctctctgggacatggccacctgacctgtgtgtggctggtgcagcctggcaccaagtgggctacctgttaggaacatgaataccttacaaagctgaagc

SEQ ID NO: 559511 - DNA, 120 bp, Artificial Sequence
  ENSG00000169375_35 (sequence is synthesized)
tggaacttttcccaaagggttttgggtatagcctgccctggaggggaaggaagtccatgcaagcaaagacatgcagtttgcttgcacacaccagcagagctaagactggagtctcctgtg

SEQ ID NO: 559512 - DNA, 120 bp, Artificial Sequence
  ENSG00000169375_36 (sequence is synthesized)
gcctaactttcaatgagggaaccggatgctgttcacactttgactggatggagatgcatttacaaaacagactggagaaggacttaatactcagatggattggaactatcatggtcactg

SEQ ID NO: 559513 - DNA, 120 bp, Artificial Sequence
  ENSG00000169375_37 (sequence is synthesized)
ctcctctcccctccccacaaaaggaaaaaaaagctggatttgattttttttttctggtcactcgagcacatctaagatcacccattaggttttatctgggacctgcagtttggctttggg

SEQ ID NO: 559514 - DNA, 120 bp, Artificial Sequence
  ENSG00000169375_38 (sequence is synthesized)
attgatcatcttgtggattttattcctgacgattcccttgctgcctacccttttctctcctctggttctcaacctcaacgagttcaaatcagttgtcctttttagctcccgtggaactgt

SEQ ID NO: 559515 - DNA, 120 bp, Artificial Sequence
  ENSG00000169375_39 (sequence is synthesized)
tttgtatctgcctctttactagtctaccttagtgccatccaccagctttactctctgacacacacacgcacacacacacacaattttaacttgtttttttgtacataatgtacatactgt

SEQ ID NO: 559516 - DNA, 120 bp, Artificial Sequence
  ENSG00000169375_40 (sequence is synthesized)
caattttttattaaaagaaatatgctttgatgtgctagcataactgctctagcttcttgtgtaccatagtactgtggcttcagatttagtacctatgaacagatgtacaagacatttatt

SEQ ID NO: 559517 - DNA, 120 bp, Artificial Sequence
  ENSG00000169375_41 (sequence is synthesized)
acactttttaccaaagggagttaccattgtagtacttttgtgtaaaacttgtcttcccctttgcccccaacttttttttttttttttttgtaaataaataaagcttggttcttacttaag

SEQ ID NO: 559518 - DNA, 120 bp, Artificial Sequence
  ENSG00000169375_42 (sequence is synthesized)
aacagagaagcggccgcggcggtagaggcggcggagacggtttctccatcttcccccctccccttcccccctcggagtttccctccctccctccctccctccttcccagtctgggcaccg

SEQ ID NO: 559519 - DNA, 120 bp, Artificial Sequence
  ENSG00000169375_43 (sequence is synthesized)
gagcctgtgaccgcttcgttagtggagaggtagctggcagtccgcttcggcgggcctgtgccccgcgccgttctcggggcctccctgctgagctcgcggctcacgctgagagggacacgc

SEQ ID NO: 559520 - DNA, 120 bp, Artificial Sequence
  ENSG00000169375_44 (sequence is synthesized)
acttgtcccaaatcaaaatattccaaaatcttagaatacttaagtcttttagtacgtgtttttttcccttgttcaaataatctgaaaatattttatatttgggtaagttgtcaagctatg

SEQ ID NO: 559521 - DNA, 120 bp, Artificial Sequence
  ENSG00000169375_45 (sequence is synthesized)
tagtttgtatttctatatattttttcttattcacattggtgatggatgggggtgagcaacttaaataccaaaccagtgtttgaaaaaaaagtgtgcataaggcatgtggtataccttata

SEQ ID NO: 559522 - DNA, 120 bp, Artificial Sequence
  ENSG00000169375_46 (sequence is synthesized)
aatggagttgggagggagagaatttgaaatgggatacctatttttttaattacataaatttaaactagcagacatttaaacatgaatgattaggatttttctatgtggttaacctggact

SEQ ID NO: 559523 - DNA, 120 bp, Artificial Sequence
  ENSG00000169375_47 (sequence is synthesized)
ttctgaacaaagaccaactgagcccctcccagtactctggtggatttttcttcagcaaccattacgcaagtcttagttgtaaccagcaatgttctgtgtgttttatgtttgctttttagt

SEQ ID NO: 559524 - DNA, 120 bp, Artificial Sequence
  ENSG00000169375_48 (sequence is synthesized)
taaaaatcaccaccaccaccaaaaagaaaaacaaaattttttggctcctggattttcaaaacacatggtagacctctctgattttaggcttttattgtttaaagacagtgtctcgcttta

SEQ ID NO: 559525 - DNA, 89 bp, Artificial Sequence
  ENSG00000169375_49 (sequence is synthesized)
attttaggcttttattgtttaaagacagtgtctcgctttatgacccacactggagtgcagtgccacgatcatagctcactgcaggcttg

SEQ ID NO: 559526 - DNA, 90 bp, Artificial Sequence
  ENSG00000169375_50 (sequence is synthesized)
ggcctcctgagtagctgcatgccaccacgcccagctaattttttaactttttgtagagacagggtcttgctatgctgcctgtcctcccac

SEQ ID NO: 559527 - DNA, 120 bp, Artificial Sequence
  ENSG00000169375_51 (sequence is synthesized)
cctggcctgattttaggctttttttgtactggggagaagagactgtgagccaaagtgtagggtgccaaaaagagctttgtgggatgagattttagggcaaagctggggcagtgtctgact

SEQ ID NO: 559528 - DNA, 120 bp, Artificial Sequence
  ENSG00000169375_52 (sequence is synthesized)
tggcggtggtcatgtgtactgatttaggggaaagatcttgaggttttctcaaataattcacctatccccgtgttccctcaagaaaggtcatgttgacctggaaccataggggaaattggt

SEQ ID NO: 559529 - DNA, 120 bp, Artificial Sequence
  ENSG00000169375_53 (sequence is synthesized)
ggggtgtgatcagggtcagccccagctgttgctgcccctgcagtgttttgtccagagcacttgcctgcaggtcaggataggatttcaaggccagttcaggagaaagtcccaacccaccag

SEQ ID NO: 559530 - DNA, 120 bp, Artificial Sequence
  ENSG00000169375_54 (sequence is synthesized)
tgcaaccaacaaaagagtaagttttacctacagcctgggttttcacaagtagcatttttattcctcctgctgtctgacatctgagctccaagctctaaacccaacctgtattatatgcag

SEQ ID NO: 559531 - DNA, 120 bp, Artificial Sequence
  ENSG00000169375_55 (sequence is synthesized)
cagcaggttatctttgttttaaatcacatttgttattctgtacttagtcacctttccgtgtgatctgcatttgaaatgttgtaaacttggtcagtatttccattaaaatatcagggctaa

SEQ ID NO: 559532 - DNA, 72 bp, Artificial Sequence
  ENSG00000169375_56 (sequence is synthesized)
gttgatcttctggacttaagcgaccctcctaccttagcctcccatgtagctgggactacagggctaggcttg

SEQ ID NO: 559533 - DNA, 120 bp, Artificial Sequence
  ENSG00000169375_57 (sequence is synthesized)
cttagcctcccatgtagctgggactacagggctaggcttgctgacatatgggctattggaggatatgcaggtccacatcctttatttgcagttctgaaatgcaagagtttttgttttttg

SEQ ID NO: 559534 - DNA, 120 bp, Artificial Sequence
  ENSG00000169375_58 (sequence is synthesized)
tagcccgtggggggcgttcccccccattcaggactcctcgcctggctcggaaggctcgagtgcagtagcgagatctcagctcacctcagcctctgtctcctggactcacatgatcctccc

SEQ ID NO: 559535 - DNA, 120 bp, Artificial Sequence
  ENSG00000169375_59 (sequence is synthesized)
ttaagcgatgtcagaaatctagattgtaatgtgaaggaaactttcacacatttgccactataaattttgttctttaacaaaatgctctgtggggaaatgaaacttgtcagtgagccagct

SEQ ID NO: 559536 - DNA, 120 bp, Artificial Sequence
  ENSG00000169375_60 (sequence is synthesized)
tctacctgtttatgacttctcataaccttagcacctcagaaacttagcagtattgctggctaacagaatttttaatccgtgttccaatacctactaacaatcatgtctttatagaaaggg

SEQ ID NO: 559537 - DNA, 120 bp, Artificial Sequence
  ENSG00000169375_61 (sequence is synthesized)
ttgcaccagtgcagggacagcagcaatttcagaggctgaaggtggtattcagctctttttcttgggtcaaaaaatttatctttagcaggaaatactggttgcagcttgttggttgtggtg

SEQ ID NO: 559538 - DNA, 120 bp, Artificial Sequence
  ENSG00000169375_62 (sequence is synthesized)
gtacaacttctaacctgagatactagctgtcgaatcacaagttttaccgtttttgttttgtgaaatttgcttatgtttcctatcttggcatcagtgcctgatccagagaagaatatactc

SEQ ID NO: 559539 - DNA, 120 bp, Artificial Sequence
  ENSG00000169375_63 (sequence is synthesized)
aaatgtttgtggactgtatgaatgcatgtcggtcaaatgttatcaggattgtggggccattttaatacaaaataaaccttaaaattcattttttggctgcttccttttgaactctctatt

SEQ ID NO: 559540 - DNA, 120 bp, Artificial Sequence
  ENSG00000169375_64 (sequence is synthesized)
gagcacatatatgattggctacaggttagtacagtaaattggcccagtaatatatcttacagttcaatctttttaaattcttaaaaatttttttttttagtttttagtttcagagatggg

SEQ ID NO: 559541 - DNA, 120 bp, Artificial Sequence
  ENSG00000169375_65 (sequence is synthesized)
gtctcaaactgctggcctcaagtgattctcccatcttggccttcgaaagtgttgggattacaggtgcgagccactatgcccagctcatgcctgtaatgttcttattacctttatcttttt

SEQ ID NO: 559542 - DNA, 120 bp, Artificial Sequence
  ENSG00000169375_66 (sequence is synthesized)
tgttcttattacctttatctttttattcctgtttatgaatagctgaattgactcacatcatcaagtccattcttagtaaaacacatgctcctttttggggggaatctttataaagttcag

SEQ ID NO: 559543 - DNA, 120 bp, Artificial Sequence
  ENSG00000169375_67 (sequence is synthesized)
ggaaaactgtaactgtgaatgaattatcagtgttttcatattttctgctgagtatgtgtggtacgttttcagtgctttgaaattcatgaggcatccctggagaagtgaagcttgtgttcc

SEQ ID NO: 559544 - DNA, 120 bp, Artificial Sequence
  ENSG00000169375_68 (sequence is synthesized)
cagctaaccttgtatctctgaccacttgaatgttacttttcaaaatatgtgattgttgcagcaagtgttcaggtttcaatttttctaattttacgtttatataaaattaagttcaggaaa

SEQ ID NO: 559545 - DNA, 120 bp, Artificial Sequence
  ENSG00000169375_69 (sequence is synthesized)
taataaatggaggaactctgaagagatgttaaatcttcatttggttattgcaacctacttatgttgcttgcaggcacgaatgagaaataaaccctctaaggacatatccatatgcagcaa

SEQ ID NO: 559546 - DNA, 120 bp, Artificial Sequence
  ENSG00000169375_70 (sequence is synthesized)
atagttgtttcttctgttttccctgatacttactttagttcttcttgatccctgccctcgttggtgtggattcttgggaacttgtttaatattggcctaagagtattaaatgctacataa

SEQ ID NO: 559547 - DNA, 120 bp, Artificial Sequence
  ENSG00000169375_71 (sequence is synthesized)
atattataaagtacagcaaagctatgtgatttagagtaattttgtaaaatttactctctatattggcttacatagtattgactaatgcatagccttttaaagagagtacaggttttttag

SEQ ID NO: 559548 - DNA, 120 bp, Artificial Sequence
  ENSG00000169375_72 (sequence is synthesized)
tgctgcgggcttagcactttactaagtcctgaaaatattttttttaaaacttggttgtgcgtgatttaattctgtattaacactgtatattcagtagttatactttaatgttgcaaaata

SEQ ID NO: 559549 - DNA, 120 bp, Artificial Sequence
  ENSG00000169375_73 (sequence is synthesized)
gcttataaacttgcttattaaactaacaaaaacatatgtatttctatagcctttttcaatcaaccctatcaaagcacaacaccagtttttacccaccttcctcacaggactctttggtat

SEQ ID NO: 559550 - DNA, 120 bp, Artificial Sequence
  ENSG00000169375_74 (sequence is synthesized)
aagtatatggattatgttttgtttgctttatggaaactggcaaggaaacaaggaaaggttttggatttggggttatagagtgagtcatagatagagttaggatttcttgttgtgttcttt

SEQ ID NO: 559551 - DNA, 120 bp, Artificial Sequence
  ENSG00000169375_75 (sequence is synthesized)
tagtcacaagctcttgactatattcctgcataaaataacttgttgaatttcctttctgatgaggagaggtaaaatgcttcttgtacctccatgtaatttaactcagtattcccacattgc

SEQ ID NO: 559552 - DNA, 120 bp, Artificial Sequence
  ENSG00000169375_76 (sequence is synthesized)
ttcccacattgcctgtcatttttggatcagtcttaaaatgcattacaagcatttgaatcaacttcaataaatcatttatattctataataatgtaggccgggcatggtggcttacacctg

SEQ ID NO: 559553 - DNA, 120 bp, Artificial Sequence
  ENSG00000169375_77 (sequence is synthesized)
gtcaggagttcaagaccagcctgacaaatgtgatgaaaccatgcctctactaaaaatacaaaatgagccaggcatggtggcgcatgcctgtaataatcccagctactcaggaggctgagg

SEQ ID NO: 559554 - DNA, 120 bp, Artificial Sequence
  ENSG00000169375_78 (sequence is synthesized)
actcaggaggctgaggcaggagaatcgttggaacccaggaggcagagattgcagtaagccaagatcataccactgcactcgagtctgggcgacaagagtgaaactccgtctcagaaaaaa

SEQ ID NO: 559555 - DNA, 120 bp, Artificial Sequence
  ENSG00000169375_79 (sequence is synthesized)
tccgtctcagaaaaaacaaacaaaaaaaaagaaatgttcagtgagaatgcttacacattatttcaagcctcaacattgtcttttttttttgttttttgtctttggtagattggtggtgac

SEQ ID NO: 559556 - DNA, 120 bp, Artificial Sequence
  ENSG00000169375_80 (sequence is synthesized)
aagaagggatttgaacgatttgaggcatgtttggtgttatttagttattgaatgtcagcagcagtgatatttggtacatatttagcaggttatctttacagttgcttgtgtttttctctc

SEQ ID NO: 559557 - DNA, 120 bp, Artificial Sequence
  ENSG00000169375_81 (sequence is synthesized)
ccaacaagattgtagacttcaggagattcggggccttaatagtaaatccctgttgaagtgagctaagaaactttatcagcagagtctaagggtctccccaagtgcttccttaaatctgta

SEQ ID NO: 559558 - DNA, 120 bp, Artificial Sequence
  ENSG00000169375_82 (sequence is synthesized)
gcttctaaataactacatccaagttttttttttaagttgtgctacctagaactgtatacatgcatttatagagagtttatataagagttggactatgctttaggtgatgagagaatttcc

SEQ ID NO: 559559 - DNA, 120 bp, Artificial Sequence
  ENSG00000169375_83 (sequence is synthesized)
tcactatttttacatgtaggtgtcttatttattatgtgagtgtcatgcagagtttttaaagcataggattattctataacttttattttacttttttgtttttttgagacagagtctcac

SEQ ID NO: 559560 - DNA, 120 bp, Artificial Sequence
  ENSG00000169375_84 (sequence is synthesized)
tcactctgctgcccaggctgtagtgcagtggcgccatctcaactcactgcaccctcccctgcctgggttcaagtgattcttatgcctcagtctcccaaatagctgggattacaggcatgc

SEQ ID NO: 559561 - DNA, 81 bp, Artificial Sequence
  ENSG00000169375_85 (sequence is synthesized)
gggattacaggcatgcaccaccaagcctaatttttgtatttttttttttttttactaggacggggtttttggatccaccct

SEQ ID NO: 559562 - DNA, 120 bp, Artificial Sequence
  ENSG00000169375_86 (sequence is synthesized)
aggcatgagccaccacacctggcctataactaatttttaaacagtggtttgcttggtttgctgtgactttcagtacctttttgtttcagacatatacatatcacacataattgctttctt

SEQ ID NO: 559563 - DNA, 120 bp, Artificial Sequence
  ENSG00000169375_87 (sequence is synthesized)
gctttcttttgggtttctgtactttttccgtctctgcagtagttaccttataccataccatgtcttattgataactgttcttttgttgtgtaatgatgcatgctattcttaaatatcttc

SEQ ID NO: 559564 - DNA, 120 bp, Artificial Sequence
  ENSG00000169375_88 (sequence is synthesized)
caaagtcttggttccttttgcaaacttaatatattttgtgttcacttaagttggtcattaatgaaacattttagtatggaaagttcagaatatgaattaaaatagtccattgaatttcaa

SEQ ID NO: 559565 - DNA, 120 bp, Artificial Sequence
  ENSG00000169375_89 (sequence is synthesized)
atttttgttatgtggttcagatgaggaacctcagttgaaagaaactgttaaggaatggtaaattggggtacatttttctgcagcagttaaagagaataagacaaatctatcatgaaatga

SEQ ID NO: 559566 - DNA, 120 bp, Artificial Sequence
  ENSG00000169375_90 (sequence is synthesized)
aaaaatattcatgacagtaagtgaaaagttgaggacaaaatatatagtatgatcctattttgtcttaaaaacaaatcccaaagcagaactgtagctggtaattacatgtgtaaatttaca

SEQ ID NO: 559567 - DNA, 120 bp, Artificial Sequence
  ENSG00000169375_91 (sequence is synthesized)
gacagaggcctagaagtttctcattaaaactcttaactggctacatctgctaagtcaagtaggggatgggtgaagatttctgctttttattctgtgtacctttgcagttgaaattttttt

SEQ ID NO: 559568 - DNA, 120 bp, Artificial Sequence
  ENSG00000169375_92 (sequence is synthesized)
aggtaagctggagccaaccaagggactagaatgagggaagagaaatagtggttttaggcaattataaaactttttttaatactgtgttagatattaaaaattgttgagtatgtgtaaggt

SEQ ID NO: 559569 - DNA, 120 bp, Artificial Sequence
  ENSG00000169375_93 (sequence is synthesized)
aaagagcccctgcgcctcgccgctagccctgcgagctgccgggtctccaaactccctggccgtggcggtcgagtcagcattcggtgccggaacccgtcaggccgcgacccagcaaggagc

SEQ ID NO: 559570 - DNA, 75 bp, Artificial Sequence
  ENSG00000169375_94 (sequence is synthesized)
tcgcctcccagactcaagcaatctcacctcagccctccaagtagctgggactacaggttttgtagtgcatccctg

SEQ ID NO: 559571 - DNA, 120 bp, Artificial Sequence
  ENSG00000169375_95 (sequence is synthesized)
attcaggactcctcgcctggctcggaagctacccagccttcatgctgttttggaacatgtcaagcacatgtgagccctcacaaagacatgagggtctttgcggttgctgtcccctctgcc

SEQ ID NO: 559572 - DNA, 120 bp, Artificial Sequence
  ENSG00000169375_96 (sequence is synthesized)
tagtcgaagaccttgctggtgacaatgtcagttgttaggattctctgaaccagaagttaaagccggggtactttgacctgtgattctactcctggaccttttaatgagttcaccagagaa

SEQ ID NO: 559573 - DNA, 120 bp, Artificial Sequence
  ENSG00000169375_97 (sequence is synthesized)
ctacaaagtggaagtaattgtcttcctggacaatctactttgtttctttcctgcctttaaagaaaaaaaaaaaactagttatatatgatttttacaattttgtattctttttctctgaac

SEQ ID NO: 559574 - DNA, 120 bp, Artificial Sequence
  ENSG00000169379_0 (sequence is synthesized)
gcttttctttagccgggtcccgctaactcggctacggtgtatctgcgtctttggtcaggttgttccttggctaagagggcagtcgtcgcggacccacgcggttagcaaggcttagtgctc

SEQ ID NO: 559575 - DNA, 120 bp, Artificial Sequence
  ENSG00000169379_1 (sequence is synthesized)
gggccggccgccttcacttccctcccggcttttcctcccgacttatccactttaggggcgtctcggagtgccggaggcccccggggaagagcggggtgccggtgtccgctccgggctcgg

SEQ ID NO: 559576 - DNA, 120 bp, Artificial Sequence
  ENSG00000169379_2 (sequence is synthesized)
atgggaagtggtgggaggagcgacccgggatgttcagtctgatggccagttgctgcggctggttcaagcggtggcgggagcctgtcagaaaggtgactcttttgatggtgggacttgata

SEQ ID NO: 559577 - DNA, 120 bp, Artificial Sequence
  ENSG00000169379_3 (sequence is synthesized)
atgctggtaaaaccgcaacagcaaagggaatccaaggagaataccctgaagatgtagctcctactgttggattttcaaaaattaaccttagacaaggaaagtttgaagtcaccatctttg

SEQ ID NO: 559578 - DNA, 120 bp, Artificial Sequence
  ENSG00000169379_4 (sequence is synthesized)
acttgggaggtggaataagaattcggggaatctggaagaattactatgctgaatcctatggggtaatatttgttgtggattccagtgatgaagagagaatggaagagacaaaagaggcta

SEQ ID NO: 559579 - DNA, 120 bp, Artificial Sequence
  ENSG00000169379_5 (sequence is synthesized)
tgtcagaaatgctaagacatcctaggatatcgggaaagcctatattggtgttggcaaataaacaagataaagaaggagctttaggagaagctgatgtcattgaatgtctatctctggaaa

SEQ ID NO: 559580 - DNA, 120 bp, Artificial Sequence
  ENSG00000169379_6 (sequence is synthesized)
aattggtcaatgagcacaagtgcctgtgtcagatagaaccatgttcagcaatctcggggtatggaaagaaaattgacaagtccattaaaaaaggcctttattggctgctacatgttattg

SEQ ID NO: 559581 - DNA, 120 bp, Artificial Sequence
  ENSG00000169379_7 (sequence is synthesized)
caagagactttgatgccttaaatgaacgcatccaaaaagagacaacagagcagcgtgctcttgaggaacaagagaaacaagaaagagctgaacgagtgcgaaaattacgagaagaaagaa

SEQ ID NO: 559582 - DNA, 120 bp, Artificial Sequence
  ENSG00000169379_8 (sequence is synthesized)
aacaaaatgaacaggagcaggctgaactcgatggaaccagtggtctggctgagttggacccagaaccaacgaatcctttccagccaatagcatctgtaatcattgagaatgaaggaaaac

SEQ ID NO: 559583 - DNA, 120 bp, Artificial Sequence
  ENSG00000169379_9 (sequence is synthesized)
ttgaaagagagaaaaaaaaccaaaaaatggagaaagacagtgatggctgccacctgaaacataaaatggagcatgagcaaatagagacacaaggccaggttaatcacaatggccaaaaaa

SEQ ID NO: 559584 - DNA, 120 bp, Artificial Sequence
  ENSG00000169379_10 (sequence is synthesized)
ataatgaatttggactagtagaaaattataaggaggcattaacacagcagttaaagaatgaagatgagacagaccggccatcattggaatcagctaatggtaaaaagaaaactaagaaac

SEQ ID NO: 559585 - DNA, 120 bp, Artificial Sequence
  ENSG00000169379_11 (sequence is synthesized)
taagaatgaaaaggaaccaccgggtagaaccacttaatatagatgactgtgctcctgagagtccaacgccacccccaccccctcctcctgttggctggggaacccctaaagtcactagac

SEQ ID NO: 559586 - DNA, 120 bp, Artificial Sequence
  ENSG00000169379_12 (sequence is synthesized)
ttccaaaacttgagcctcttggtgaaacacatcataatgatttctataggaagccactgcctcccctggctgtgccacagcgacctaacagtgatgctcatgatgtgatctcataaacaa

SEQ ID NO: 559587 - DNA, 120 bp, Artificial Sequence
  ENSG00000169379_13 (sequence is synthesized)
gacgtatggaggagttctcttaatatcagcaaggtgaactgggacattcttctttctcagaagaagaaacatcttgtaaattgatgactggggcaagataaccataataattttagtgag

SEQ ID NO: 559588 - DNA, 120 bp, Artificial Sequence
  ENSG00000169379_14 (sequence is synthesized)
aagattaatactcaaggacctgacttgataattacttatttgtgtttttcatggttaaaaaaataaaagaagcacaatgaccagtacatgaaatcagcatttggaccaaattagcaagat

SEQ ID NO: 559589 - DNA, 120 bp, Artificial Sequence
  ENSG00000169379_15 (sequence is synthesized)
ttactgttgactctggtttatacatccccactcatgagcatacttctgaaggaaaactttacaaaaagagccaatggactcagcactttctttactatttgttcaatagcctatatttct

SEQ ID NO: 559590 - DNA, 80 bp, Artificial Sequence
  ENSG00000169379_16 (sequence is synthesized)
agcctatatttctagatattaaatattttttgtaagatatatgcacatagaagggggacttctaggaatttataaccaaa

SEQ ID NO: 559591 - DNA, 120 bp, Artificial Sequence
  ENSG00000169379_17 (sequence is synthesized)
tacaccttttttatagatgatttgtttaaattatatctggaaaatagagttgatttactttcagacatgaactatacaaacaggatatatttatatggcttgaggtatgttttgtaatag

SEQ ID NO: 559592 - DNA, 120 bp, Artificial Sequence
  ENSG00000169379_18 (sequence is synthesized)
cgttgttctttaagtgtacatcgtaatttgacctaatttaaaaataatatattttcgaagtagtagattctcagatctttattctaacaattacatgatttgaaaacagtactcaatgag

SEQ ID NO: 559593 - DNA, 120 bp, Artificial Sequence
  ENSG00000169379_19 (sequence is synthesized)
actggaaataccttttgtacctaaatgttttttaaattaatcaaaatacattctgtgagatactattaaaagtctcagtaaagtcctattttaaaggttagacactttcagagatcaagg

SEQ ID NO: 559594 - DNA, 120 bp, Artificial Sequence
  ENSG00000169379_20 (sequence is synthesized)
tgctccctatactcccttgttccatcagaagctgcagtgactcttttaggtgattctaattctttcatgccttgaaattaaactatgaaattaaaggcagaaaaactggaaaacctactg

SEQ ID NO: 559595 - DNA, 120 bp, Artificial Sequence
  ENSG00000169379_21 (sequence is synthesized)
caggtccagagacttctgttttacaactgggaaacagcttgtgtactaaagtaatgagaataaaaatgttggcccaaaattacttttataaataaataattccaaaataatttcttaatt

SEQ ID NO: 559596 - DNA, 120 bp, Artificial Sequence
  ENSG00000169379_22 (sequence is synthesized)
taaaatgatagcacttctcttgcacttaagaatggcatccataagattctgtatttggcatttagactaacttctagatgtatatttttaataatagattcataatgttacatttaattg

SEQ ID NO: 559597 - DNA, 120 bp, Artificial Sequence
  ENSG00000169379_23 (sequence is synthesized)
aaaacaaacctttatatccaatgaaaatagtataaacagaatgatttttataccaccttgttaagattggtgcttttggtaacttgtactgacacaacagacatgtgctagtatctgata

SEQ ID NO: 559598 - DNA, 120 bp, Artificial Sequence
  ENSG00000169379_24 (sequence is synthesized)
acattaagtacattttatgtcgtttaatataattatttactttaaaaattgtacttcagaacatcagattttattcacattttttaactcactgaactttaataatcaggtcacctgtac

SEQ ID NO: 559599 - DNA, 120 bp, Artificial Sequence
  ENSG00000169379_25 (sequence is synthesized)
tctagtcagcactgtatatattcttggagtttgtacatgggacttagcaaccacactgagtgaggtaaaagcatttgatttcagatctaaaattcgtaacaacctaaatttgagaggtgg

SEQ ID NO: 559600 - DNA, 120 bp, Artificial Sequence
  ENSG00000169379_26 (sequence is synthesized)
ctgaaatgtgatgaaaagcaatacgaaaagacaatgtaaactttgaaaaggattttagagggaaaattgcatagctttttgtaacatttacttaattttaaaactaaactcatacttttg

SEQ ID NO: 559601 - DNA, 120 bp, Artificial Sequence
  ENSG00000169379_27 (sequence is synthesized)
ctatctttttaatatttatctcgtttgggagtatacgtgtttttaaaatttgtgttttctatctgtttactatagtgtagctactggcttcatttaataaaaataaatgattttgaaatt

SEQ ID NO: 559602 - DNA, 120 bp, Artificial Sequence
  ENSG00000169379_28 (sequence is synthesized)
tatagaattcacattttatatagctctctcaaaaattaatttttattccttaagcattttaaaaacattttaaaaaatgttttgtaaatccaggtgtattttaacaattaaatgcctatt

SEQ ID NO: 559603 - DNA, 120 bp, Artificial Sequence
  ENSG00000169379_29 (sequence is synthesized)
tgttatacttttattcttaattctgaattttgacattttcacacaataaaaataatttatatcaatattctgtttctcttttcaattggtagatttaaatgatttcctttgggtaataaa

SEQ ID NO: 559604 - DNA, 120 bp, Artificial Sequence
  ENSG00000169379_30 (sequence is synthesized)
tcctttgggtaataaaataggtaaagattttaaaatatgattattgaaaaacagtttaaatcagtagattaaaataatgcatttttttgatactttacacacaaaacttttttctctctg

SEQ ID NO: 559605 - DNA, 120 bp, Artificial Sequence
  ENSG00000169379_31 (sequence is synthesized)
caagtttttatgtatgtgggaaagaatttgtgattttaaatgcagctacaaatagcatttcaccatatgatgttagaggatttgatgtctgtcttgcgttaaagctgttggtcaacagat

SEQ ID NO: 559606 - DNA, 120 bp, Artificial Sequence
  ENSG00000169379_32 (sequence is synthesized)
atgtttttatgtatttaaaagaggctcttgtgtgcctttatgtgtaaaatgcatattacgtagtatacatgatattgtatgtaactgacttcaaatataaaactatgcatagaaacaaca

SEQ ID NO: 559607 - DNA, 120 bp, Artificial Sequence
  ENSG00000169379_33 (sequence is synthesized)
agcaaagggaatccaaggagagatggggtctccctatgttgcccaagctggtctggaatgcctagcctcaagctattcttctgccttggcctccaagagtgctgggattacaggcatgag

SEQ ID NO: 559608 - DNA, 120 bp, Artificial Sequence
  ENSG00000169385_0 (sequence is synthesized)
agaacaaccagctggatcagttctcacaggagctacagcgcggagactgggaaacatggttccaaaactgttcacttcccaaatttgtctgcttcttctgttggggcttctggctgtgga

SEQ ID NO: 559609 - DNA, 120 bp, Artificial Sequence
  ENSG00000169385_1 (sequence is synthesized)
gggctcactccatgtcaaacctccacagtttacctgggctcaatggtttgaaacccagcacatcaatatgacctcccagcaatgcaccaatgcaatgcaggtcattaacaattatcaacg

SEQ ID NO: 559610 - DNA, 120 bp, Artificial Sequence
  ENSG00000169385_2 (sequence is synthesized)
gcgatgcaaaaaccaaaatactttccttcttacaacttttgctaacgtagttaatgtttgtggtaacccaaatatgacctgtcctagtaacaaaactcgcaaaaattgtcaccacagtgg

SEQ ID NO: 559611 - DNA, 120 bp, Artificial Sequence
  ENSG00000169385_3 (sequence is synthesized)
aagccaggtgcctttaatccactgtaacctcacaactccaagtccacagaatatttcaaactgcaggtatgcgcagacaccagcaaacatgttctatatagttgcatgtgacaacagaga

SEQ ID NO: 559612 - DNA, 120 bp, Artificial Sequence
  ENSG00000169385_4 (sequence is synthesized)
tcaacgacgagaccctccacagtatccggtggttccagttcacctggatagaatcatctaagctcctgtatcagcactcctcatcatcactcatctgccaagctcctcaatcatagccaa

SEQ ID NO: 559613 - DNA, 120 bp, Artificial Sequence
  ENSG00000169385_5 (sequence is synthesized)
gatcccatctctccatatactttgggtatcagcatctgtcctcatcagtctccataccccttcagctttcctgagctgaagtgccttgtgaaccctgcaataaactgctttgcaaattca

SEQ ID NO: 559614 - DNA, 120 bp, Artificial Sequence
  ENSG00000169393_0 (sequence is synthesized)
actgccttctgacagtaaccactgatgaagaaccctcctttgagaagctgcctttgtgtcctacagacaggctggggccaaagccattcaaccaatccccagataatccagagctcttgg

SEQ ID NO: 559615 - DNA, 120 bp, Artificial Sequence
  ENSG00000169393_1 (sequence is synthesized)
gagcagaaccttaaagagagatcgtggagagagccagggcccagaagaactctctcaaagagaagagggcagccaagatgacccgatggtccagttacctgttgggatggacaaccttcc

SEQ ID NO: 559616 - DNA, 120 bp, Artificial Sequence
  ENSG00000169393_2 (sequence is synthesized)
ttctctattcctatgagtcaagtggagggatgcatgaggaatgtgtctttcctttcacctacaagggatctgtttacttcacttgcacccatattcatagcttatccccttggtgtgcca

SEQ ID NO: 559617 - DNA, 120 bp, Artificial Sequence
  ENSG00000169393_3 (sequence is synthesized)
ccagagccgtgtacaacggccagtggaagtactgccagagtgaagattacccacgctgtatcttccctttcatctatcgaggaaaggcttataacagctgcatctcccagggcagcttct

SEQ ID NO: 559618 - DNA, 120 bp, Artificial Sequence
  ENSG00000169393_4 (sequence is synthesized)
tacagaaataatgtggtctctgattgcatggaggatgaaagcaacaagctctggtgcccaaccacagagaacatggataaggatggaaagtggagtttctgtgccgacaccagaatttcc

SEQ ID NO: 559619 - DNA, 120 bp, Artificial Sequence
  ENSG00000169393_5 (sequence is synthesized)
gcgttggtccctggctttccttgtcactttccgttcaactataaaaacaagaattattttaactgcactaacgaaggatcaaaggagaaccttgtgtggtgtgcaacttcttacaactac

SEQ ID NO: 559620 - DNA, 120 bp, Artificial Sequence
  ENSG00000169393_6 (sequence is synthesized)
gaccaagaccacacctgggtgtattgctgatgctgaggaaaggagaaatatcttcagaggaagactgccgccatactgaggctgagcacagatttgtctttttcattgcatctgtcaagc

SEQ ID NO: 559621 - DNA, 120 bp, Artificial Sequence
  ENSG00000169393_7 (sequence is synthesized)
ttaaataaccacctttagaaataccctctgcaccacctgcttcaatcagctggtcctttgtgaagaacgtagagagaatgcggcataaccaccaataaaggagtcttgatttaaccctgg

SEQ ID NO: 559622 - DNA, 120 bp, Artificial Sequence
  ENSG00000169397_0 (sequence is synthesized)
cccagaacaaccagctggatcagttctcacaggagccacagctcagagactgggaaacatggttccaaaactgttcacttcccaaatttgtctgcttcttctgttggggcttatgggtgt

SEQ ID NO: 559623 - DNA, 120 bp, Artificial Sequence
  ENSG00000169397_1 (sequence is synthesized)
ggagggctcactccatgccagacccccacagtttacgagggctcagtggtttgccatccagcacatcagtctgaacccccctcgatgcaccattgcaatgcgggcaattaacaattatcg

SEQ ID NO: 559624 - DNA, 120 bp, Artificial Sequence
  ENSG00000169397_2 (sequence is synthesized)
atggcgttgcaaaaaccaaaatacttttcttcgtacaacttttgctaatgtagttaatgtttgtggtaaccaaagtatacgctgccctcataacagaactctcaacaattgtcatcggag

SEQ ID NO: 559625 - DNA, 120 bp, Artificial Sequence
  ENSG00000169397_3 (sequence is synthesized)
tagattccgggtgcctttactccactgtgacctcataaatccaggtgcacagaatatttcaaactgcacgtatgcagacagaccaggaaggaggttctatgtagttgcatgtgacaacag

SEQ ID NO: 559626 - DNA, 120 bp, Artificial Sequence
  ENSG00000169397_4 (sequence is synthesized)
agatccacgggattctccacggtatcctgtggttccagttcacctggataccaccatctaagctcctgtatcagcagtcctcatcatcactcatctgccaagctcctcaatcatagccaa

SEQ ID NO: 559627 - DNA, 120 bp, Artificial Sequence
  ENSG00000169397_5 (sequence is synthesized)
gatcccatccctccatgtactctgggtatcagcaactgtcctcatcagtctccataccccttcagctttcctgagctgaagtcccttgtgaaccctgcaataaactgctttgcaaattca

SEQ ID NO: 559628 - DNA, 120 bp, Artificial Sequence
  ENSG00000169398_0 (sequence is synthesized)
gcgcggctgctgtcgcccagcgccgccccgtcgtcgtctgccttcgcttcacggcgccgagccgcggtccgaagtcttgctgtgtcacccaggctgccaggctggagtggagtggcatga

SEQ ID NO: 559629 - DNA, 120 bp, Artificial Sequence
  ENSG00000169398_1 (sequence is synthesized)
ggctgactgcaacctctgcctcccagaatatgacagatacctagcatctagcaaaataatggcagctgcttaccttgaccccaacttgaatcacacaccaaattcgagtactaagactca

SEQ ID NO: 559630 - DNA, 120 bp, Artificial Sequence
  ENSG00000169398_2 (sequence is synthesized)
ctcacctgggtactggtatggaacgttctcctggtgcaatggagcgagtattaaaggtctttcattattttgaaagcaatagtgagccaaccacctgggccagtattatcaggcatggag

SEQ ID NO: 559631 - DNA, 120 bp, Artificial Sequence
  ENSG00000169398_3 (sequence is synthesized)
atgctactgatgtcaggggcatcattcagaagatagtggacagtcacaaagtaaagcatgtggcctgctatggattccgcctcagtcacctgcggtcagaggaggttcactggcttcacg

SEQ ID NO: 559632 - DNA, 120 bp, Artificial Sequence
  ENSG00000169398_4 (sequence is synthesized)
tggatatgggcgtctccagtgtgagggagaagtatgagcttgctcacccaccagaggagtggaaatatgaattgagaattcgttatttgccaaaaggatttctaaaccagtttactgaag

SEQ ID NO: 559633 - DNA, 120 bp, Artificial Sequence
  ENSG00000169398_5 (sequence is synthesized)
ataagccaactttgaatttcttctatcaacaggtgaagagcgattatatgttagagatagctgatcaagtggaccaggaaattgctttgaagttgggttgtctagaaatacggcgatcat

SEQ ID NO: 559634 - DNA, 120 bp, Artificial Sequence
  ENSG00000169398_6 (sequence is synthesized)
actgggagatgcggggcaatgcactagaaaagaagtctaactatgaagtattagaaaaagatgttggtttaaagcgattttttcctaagagtttactggattctgtcaaggccaaaacac

SEQ ID NO: 559635 - DNA, 120 bp, Artificial Sequence
  ENSG00000169398_7 (sequence is synthesized)
taagaaaactgatccaacaaacatttagacaatttgccaaccttaatagagaagaaagtattctgaaattctttgagatcctgtctccagtctacagatttgataaggaatgcttcaagt

SEQ ID NO: 559636 - DNA, 120 bp, Artificial Sequence
  ENSG00000169398_8 (sequence is synthesized)
gtgctcttggttcaagctggattatttcagtggaactggcaatcggcccagaagaaggaatcagttacctaacggacaagggctgcaatcccacacatcttgctgacttcactcaagtgc

SEQ ID NO: 559637 - DNA, 120 bp, Artificial Sequence
  ENSG00000169398_9 (sequence is synthesized)
aaaccattcagtattcaaacagtgaagacaaggacagaaaaggaatgctacaactaaaaatagcaggtgcacccgagcctctgacagtgacggcaccatccctaaccattgcggagaata

SEQ ID NO: 559638 - DNA, 120 bp, Artificial Sequence
  ENSG00000169398_10 (sequence is synthesized)
tggctgacctaatagatgggtactgccggctggtgaatggaacctcgcagtcatttatcatcagacctcagaaagaaggtgaacgggctttgccatcaataccaaagttggccaacagcg

SEQ ID NO: 559639 - DNA, 120 bp, Artificial Sequence
  ENSG00000169398_11 (sequence is synthesized)
aaaagcaaggcatgcggacacacgccgtctctgtgtcagaaacagatgattatgctgagattatagatgaagaagatacttacaccatgccctcaaccagggattatgagattcaaagag

SEQ ID NO: 559640 - DNA, 120 bp, Artificial Sequence
  ENSG00000169398_12 (sequence is synthesized)
aaagaatagaacttggacgatgtattggagaaggccaatttggagatgtacatcaaggcatttatatgagtccagagaatccagctttggcggttgcaattaaaacatgtaaaaactgta

SEQ ID NO: 559641 - DNA, 120 bp, Artificial Sequence
  ENSG00000169398_13 (sequence is synthesized)
cttcggacagcgtgagagagaaatttcttcaagaagccttaacaatgcgtcagtttgaccatcctcatattgtgaagctgattggagtcatcacagagaatcctgtctggataatcatgg

SEQ ID NO: 559642 - DNA, 120 bp, Artificial Sequence
  ENSG00000169398_14 (sequence is synthesized)
agctgtgcacacttggagagctgaggtcatttttgcaagtaaggaaatacagtttggatctagcatctttgatcctgtatgcctatcagcttagtacagctcttgcatatctagagagca

SEQ ID NO: 559643 - DNA, 120 bp, Artificial Sequence
  ENSG00000169398_15 (sequence is synthesized)
aaagatttgtacacagggacattgctgctcggaatgttctggtgtcctcaaatgattgtgtaaaattaggagactttggattatcccgatatatggaagatagtacttactacaaagctt

SEQ ID NO: 559644 - DNA, 120 bp, Artificial Sequence
  ENSG00000169398_16 (sequence is synthesized)
ccaaaggaaaattgcctattaaatggatggctccagagtcaatcaattttcgacgttttacctcagctagtgacgtatggatgtttggtgtgtgtatgtgggagatactgatgcatggtg

SEQ ID NO: 559645 - DNA, 120 bp, Artificial Sequence
  ENSG00000169398_17 (sequence is synthesized)
tgaagccttttcaaggagtgaagaacaatgatgtaatcggtcgaattgaaaatggggaaagattaccaatgcctccaaattgtcctcctaccctctacagccttatgacgaaatgctggg

SEQ ID NO: 559646 - DNA, 120 bp, Artificial Sequence
  ENSG00000169398_18 (sequence is synthesized)
agagcgcatgaggatggagtccagaagacaggccacagtgtcctgggactccggagggtctgatgaagcaccgcccaagcccagcagaccgggttatcccagtccgaggtccagcgaagg

SEQ ID NO: 559647 - DNA, 120 bp, Artificial Sequence
  ENSG00000169398_19 (sequence is synthesized)
attttatcccagcccacagcacatggtacaaaccaatcattaccaggtttctggctaccctggttcacatggaatcacagccatggctggcagcatctatccaggtcaggcatctctttt

SEQ ID NO: 559648 - DNA, 120 bp, Artificial Sequence
  ENSG00000169398_20 (sequence is synthesized)
ggaccaaacagattcatggaatcatagacctcaggagatagcaatgtggcagcccaatgtggaggactctacagtattggacctgcgagggattgggcaagtgttgccaacccatctgat

SEQ ID NO: 559649 - DNA, 120 bp, Artificial Sequence
  ENSG00000169398_21 (sequence is synthesized)
ggaagagcgtctaatccgacagcaacaggaaatggaagaagatcagcgctggctggaaaaagaggaaagatttctgaaacctgatgtgagactctctcgaggcagtattgacagggagga

SEQ ID NO: 559650 - DNA, 120 bp, Artificial Sequence
  ENSG00000169398_22 (sequence is synthesized)
tggaagtcttcagggtccgattggaaaccaacatatatatcagcctgtgggtaaaccagatcctgcagctccaccaaagaaaccgcctcgccctggagctcccggtcatctgggaagcct

SEQ ID NO: 559651 - DNA, 120 bp, Artificial Sequence
  ENSG00000169398_23 (sequence is synthesized)
tgccagcctcagcagccctgctgacagctacaacgagggtgtcaagcttcagccccaggaaatcagcccccctcctactgccaacctggaccggtcgaatgataaggtgtacgagaatgt

SEQ ID NO: 559652 - DNA, 120 bp, Artificial Sequence
  ENSG00000169398_24 (sequence is synthesized)
gacgggcctggtgaaagctgtcatcgagatgtccagtaaaatccagccagccccaccagaggagtatgtccctatggtgaaggaagtcggcttggccctgaggacattattggccactgt

SEQ ID NO: 559653 - DNA, 120 bp, Artificial Sequence
  ENSG00000169398_25 (sequence is synthesized)
ggatgagaccattcccctcctaccagccagcacccaccgagagattgagatggcacagaagctattgaactctgacctgggtgagctcatcaacaagatgaaactggcccagcagtatgt

SEQ ID NO: 559654 - DNA, 120 bp, Artificial Sequence
  ENSG00000169398_26 (sequence is synthesized)
catgaccagcctccagcaagagtacaaaaagcaaatgctgactgctgctcacgccctggctgtggatgccaaaaacttactcgatgtcattgaccaagcaagactgaaaatgcttgggca

SEQ ID NO: 559655 - DNA, 120 bp, Artificial Sequence
  ENSG00000169398_27 (sequence is synthesized)
gacgagaccacactgagcctcccctaggagcacgtcttgctaccctcttttgaagatgttctctagccttccaccagcagcgaggaattaaccctgtgtcctcagtcgccagcacttaca

SEQ ID NO: 559656 - DNA, 120 bp, Artificial Sequence
  ENSG00000169398_28 (sequence is synthesized)
gctccaacttttttgaatgaccatctggttgaaaaatctttctcatataagtttaaccacactttgatttgggttcattttttgttttgtttttttcaatcatgatattcagaaaaatcc

SEQ ID NO: 559657 - DNA, 120 bp, Artificial Sequence
  ENSG00000169398_29 (sequence is synthesized)
aggatccaaaatgtggcgtttttctaagaatgaaaattatatgtaagcttttaagcatcatgaagaacaatttatgttcacattaagatacgttctaaagggggatggccaaggggtgac

SEQ ID NO: 559658 - DNA, 120 bp, Artificial Sequence
  ENSG00000169398_30 (sequence is synthesized)
atcttaattcctaaactaccttagctgcatagtggaagaggagagcatgaagcaaagaattccaggaaacccaagaggctgagaattcttttgtctaccatagaattattatccagactg

SEQ ID NO: 559659 - DNA, 120 bp, Artificial Sequence
  ENSG00000169398_31 (sequence is synthesized)
gaatttttgtttgttagaacacccttcagttgcaatatgctaatcccactttacaaagaatataaaagctatattttgaagacttgagttatttcagaaaaaactacagccctttttgtc

SEQ ID NO: 559660 - DNA, 120 bp, Artificial Sequence
  ENSG00000169398_32 (sequence is synthesized)
ttacctgccttttactttcgtgtggatatgtgaagcattgggtcgggaactagctgtagaacacaactaaaaactcatgtcttttttcacagaataatgtgccagttttttgtagcaatg

SEQ ID NO: 559661 - DNA, 120 bp, Artificial Sequence
  ENSG00000169398_33 (sequence is synthesized)
ttatttctcttggaagcagaaatgctttgtaccagagcacctccaaactgcattgaggagaagttccagaaccatcccctttttccatttttatataatttataaagaaagattaaagcc

SEQ ID NO: 559662 - DNA, 120 bp, Artificial Sequence
  ENSG00000169398_34 (sequence is synthesized)
atgttgactattttacagccactggagttaactaacccttccttgtatctgtcttcccaggagagaatgaagcaaaacaggaatttggttttcttttgatgtccagttacaccatccatt

SEQ ID NO: 559663 - DNA, 120 bp, Artificial Sequence
  ENSG00000169398_35 (sequence is synthesized)
ctgttaattttgaaaaaatataccctccctttagtttgttgggggatataaattattctcaggaagaatataatgaactgtacagttactttgacctattaaaaaggtgttaccagtaaa

SEQ ID NO: 559664 - DNA, 120 bp, Artificial Sequence
  ENSG00000169398_36 (sequence is synthesized)
gaccactgtgagcccgcggcgtgaggcgtgggaggaagcgcggctgctgtcgcccagcgccgccccgtcgtcgtctgccttcgcttcacggcgccgagccgcggtccgagcagaactggg

SEQ ID NO: 559665 - DNA, 120 bp, Artificial Sequence
  ENSG00000169398_37 (sequence is synthesized)
ttttggttctgtttcttcagatggcttttcaggtgacttgtcagataagataacatacaagagagttcccaataattatcaggaagcctctcactaattagtttctttttttttatttaa

SEQ ID NO: 559666 - DNA, 120 bp, Artificial Sequence
  ENSG00000169398_38 (sequence is synthesized)
tcttctaaacaagtcaaggatgttaccacagaagggtagcgtggcgtaagttaaccttttcattccatcgtcacctattaaatgcagagctcaggatggaagtagcaatggtcttcaatg

SEQ ID NO: 559667 - DNA, 120 bp, Artificial Sequence
  ENSG00000169398_39 (sequence is synthesized)
aaagaaccttcccctgcgcagggtctcactattccgctaactcggactcaaagcataattcacttgtcaaggaaattgttagcatttcccaggcccaccctagtcttgctagaatctctg

SEQ ID NO: 559668 - DNA, 120 bp, Artificial Sequence
  ENSG00000169398_40 (sequence is synthesized)
tgagccacagagcagggagcaaatagaactgagatctccagcactagggactcagactccaaagggagggatttgagtgaattttttccaggtaaatacatgctcttatgtgcaaaagca

SEQ ID NO: 559669 - DNA, 120 bp, Artificial Sequence
  ENSG00000169398_41 (sequence is synthesized)
taggaacacagagccatggggtcacattactaagctggtttcattctgttcagtagcttgatctagccaggatggtctgtgtttcagattgcggaagcatgagaagattctgtaactgag

SEQ ID NO: 559670 - DNA, 120 bp, Artificial Sequence
  ENSG00000169398_42 (sequence is synthesized)
aggcattcttcaagctgctggaaaatattacagaaggaacaccttccaaattttgcttcaagctctgaaaaaaggagcacacaggggaaccttagtcttgcttgtggatcgaagcaaata

SEQ ID NO: 559671 - DNA, 120 bp, Artificial Sequence
  ENSG00000169398_43 (sequence is synthesized)
ctatcacagcgaggaactgggactttgtgtgcagactcctggcttgatctttataggattgggtgtatgttgttggaactggcaggccaagaggccctgaaaccagcaggtgccatctat

SEQ ID NO: 559672 - DNA, 120 bp, Artificial Sequence
  ENSG00000169398_44 (sequence is synthesized)
tctctgactgcaatggaaagaggaaagagaaattagaagtatttttttaaattgtcatttgatttcttcagagttattgtgggcttctgaactattgcggaagcatgagaagattctgta

SEQ ID NO: 559673 - DNA, 120 bp, Artificial Sequence
  ENSG00000169398_45 (sequence is synthesized)
aatagtgttttaagaatatttcagcgtagtagaggatttaagcagatcgctttgcctactttaattatatgaaataccaggaggtcagatgtttaacctctttcaacatatctgtttctt

SEQ ID NO: 559674 - DNA, 120 bp, Artificial Sequence
  ENSG00000169398_46 (sequence is synthesized)
gaggccggtggccgtgaggaggttgggggccctcgcggaggccgagaggcttaaggaggcagaactggggctcccttgcatcttccagttacaaattcagtgccttctgcagtttcccca

SEQ ID NO: 559675 - DNA, 120 bp, Artificial Sequence
  ENSG00000169398_47 (sequence is synthesized)
tactgatgtcagggtaagtacgtttttccatgagacatctttaatgtttatttaggttaaaatgtaatggcatgtatgaaaaaagatagtgtaataatttttatttaacttatcggggac

SEQ ID NO: 559676 - DNA, 120 bp, Artificial Sequence
  ENSG00000169398_48 (sequence is synthesized)
ttttcatattacagaaatgctatttttaattataagatttattagttaatatgtgactgaccagcgttctaattgttgtaaagtttcttagaaaaataatgactgaatcatattttagtc

SEQ ID NO: 559677 - DNA, 120 bp, Artificial Sequence
  ENSG00000169398_49 (sequence is synthesized)
cctcaagaataacggaagggaggtatagtaatggttaagaaactttgcaaagaaagtgaataatgccagtactgtcaccttttggaacttgttggtatttcctgttgtctgtctttggaa

SEQ ID NO: 559678 - DNA, 120 bp, Artificial Sequence
  ENSG00000169398_50 (sequence is synthesized)
ttgctatatgcttctggagagctgagatgtgttttatcgatccagctttttgactctaaaatgagctttgagtacatgaatgagtgagcaaatgaatccgtaatgctagtagaggttttg

SEQ ID NO: 559679 - DNA, 120 bp, Artificial Sequence
  ENSG00000169398_51 (sequence is synthesized)
caacctgtgttttcaaagatcctcatcgccagtttttatgttaaggagtcagtcactgccaacataaagttaagaaagctaggcgctttctccctttggtcttctgttcccatgatcctc

SEQ ID NO: 559680 - DNA, 120 bp, Artificial Sequence
  ENSG00000169398_52 (sequence is synthesized)
ataaccaactagctcctcgctgaaactggctcacaccgcggaagcccgggtcggtgtcggggcgagccttccctccttttcctggagcccgtctcaggcagaactggggctcccttgcat

SEQ ID NO: 559681 - DNA, 120 bp, Artificial Sequence
  ENSG00000169398_53 (sequence is synthesized)
ctttgaagttgggttgtctagaaatacgaaaagatgttggtttaaagcgattttttcctaagagtttactggattctgtcaaggccaaaacactaagaaaactgatccaacaaacattta

SEQ ID NO: 559682 - DNA, 120 bp, Artificial Sequence
  ENSG00000169398_54 (sequence is synthesized)
atttctcagaggaattctgttctgctcaagataaactttggcatgcaaacatttcatcttggcccatccttcattttctgcaacctctttttcttaccagctgtctttttcttacctatg

SEQ ID NO: 559683 - DNA, 120 bp, Artificial Sequence
  ENSG00000169398_55 (sequence is synthesized)
gctgtgctttaaatggacttgcccatttggaccaaggctattctagaatcatttcgtggagagttagaaacctgatccttctttcccctgtgtataggatcctttattgttatcatctac

SEQ ID NO: 559684 - DNA, 120 bp, Artificial Sequence
  ENSG00000169398_56 (sequence is synthesized)
aacagcacattctagcctccagccaagcaggaatgtctttttaaacagttgagcaaattcccagattagaaagtctggtgcactgatgtcactctttcctgagtaatttttgggtggttg

SEQ ID NO: 559685 - DNA, 120 bp, Artificial Sequence
  ENSG00000169398_57 (sequence is synthesized)
tttactgcacactatctaccaggagcctagaaactttgaatgagtgtcattattagaactctagagttgtaggaatgtaggaagagctgtttgccacagttaggacgagggtttcaaact

SEQ ID NO: 559686 - DNA, 120 bp, Artificial Sequence
  ENSG00000169398_58 (sequence is synthesized)
gtctgctgagccctggggcatctgcgtggaatgggaaactagcaaagtctcgctttggctgcattctgaggggtttatgtgatggcaaacagccaagatgaagaagctgcctagcagtcg

SEQ ID NO: 559687 - DNA, 120 bp, Artificial Sequence
  ENSG00000169398_59 (sequence is synthesized)
ggcccaggtttactgaacttaaagctcagctcaggtaggagttggcgggagagagggcctgggggtgggggcagattatgctgcttctcctccttgcagtaatagcattttaaggtcatt

SEQ ID NO: 559688 - DNA, 120 bp, Artificial Sequence
  ENSG00000169398_60 (sequence is synthesized)
atatcagtatgtctaaggccgaactatttttcgttcaaatgcaattacttttaaaattgatttgcatttctttgtaccttgctagagtcttaagtaaattatatctttaaaattttaata

SEQ ID NO: 559689 - DNA, 120 bp, Artificial Sequence
  ENSG00000169398_61 (sequence is synthesized)
aaactccaggcacctaagcaagccccacgcagccgtctgcatttttcaatccctccaacctcgccttttgctatttcccccaccccacctacggcacgttccggtcataaccaactagct

SEQ ID NO: 559690 - DNA, 120 bp, Artificial Sequence
  ENSG00000169398_62 (sequence is synthesized)
cctcgctgaaactggctcacaccgcggaagcccgggtcggtgtcggggcgagccttccctccttttcctggagcccgtctcagagtcttgctgtgtcacccaggctgccaggctggagtg

SEQ ID NO: 559691 - DNA, 120 bp, Artificial Sequence
  ENSG00000169398_63 (sequence is synthesized)
ttacaggcctgagccaccgtgcccggcagtgcttggtcttattaaacgctttatgaaaggcagaactggggctcccttgcatcttccagttacaaattcagtgccttctgcagtttcccc

SEQ ID NO: 559692 - DNA, 120 bp, Artificial Sequence
  ENSG00000169398_64 (sequence is synthesized)
aaacagtttatatcttggattttcaggagagttctgatttaggatgtatgtcattatggttttggttcagagaatatgggtataaatatcttcatcattaaattcccaaagcatcccctt

SEQ ID NO: 559693 - DNA, 120 bp, Artificial Sequence
  ENSG00000169398_65 (sequence is synthesized)
atgcagtactggcagcaatatcttccccagccaagtactttatcaggattggtagccgcagatggccaaatgtttggttttattttttctctctggtgccattgcctaaaaaactagccc

SEQ ID NO: 559694 - DNA, 79 bp, Artificial Sequence
  ENSG00000169398_66 (sequence is synthesized)
tttaaagttcccctattgccagccttatgtcttaattgaattcatcttcagagaagctgaaagagttttcaaaagaata

SEQ ID NO: 559695 - DNA, 120 bp, Artificial Sequence
  ENSG00000169398_67 (sequence is synthesized)
aacatgatgtaatgcactgtcccactctgcagggcacgttccagggtcgtcggttgtctctgtagcacttttccgtcgcctgtgagagccagaccaggattacactttgcacgtggtgtt

SEQ ID NO: 559696 - DNA, 120 bp, Artificial Sequence
  ENSG00000169398_68 (sequence is synthesized)
gctttcttcagcctcctttcatctgaaacagctcctcagcctttttttatctttcatgacattgacatttttgacaaacataggctcagtgattttatagagtattcttaaagttggatt

SEQ ID NO: 559697 - DNA, 120 bp, Artificial Sequence
  ENSG00000169398_69 (sequence is synthesized)
caacataaataatgctgaatccttctcagcatcatacccagagacatacgatgtccaggggatgttccagttgaccaactggacattgacttctgaaggacggttggacacaactcctgt

SEQ ID NO: 559698 - DNA, 120 bp, Artificial Sequence
  ENSG00000169398_70 (sequence is synthesized)
tggtgattcctttgctcaagccgtcctcccacgtcagcctcctgagtagcttggaatacagattgagatggcacagaagctattgaactctgacctgggtgagctcatcaacaagatgaa

SEQ ID NO: 559699 - DNA, 120 bp, Artificial Sequence
  ENSG00000169398_71 (sequence is synthesized)
aaaaggaaggaatttaatacagaatctgtcaaaaattttcaaatcaaaaatgaaattgttttgattttgttttaatttcttcagaaacctgatgtgagactctctcgaggcagtattgac

SEQ ID NO: 559700 - DNA, 80 bp, Artificial Sequence
  ENSG00000169398_72 (sequence is synthesized)
aactccggactgagaccgggtcgggcgtgcgctgccgagagaggacgcgcgcctcagccggctgccgcgcacgcgcgcgg

SEQ ID NO: 559701 - DNA, 120 bp, Artificial Sequence
  ENSG00000169398_73 (sequence is synthesized)
ctcaagtcaatcatagtaagaaataaggcatgccaatagtcaaaataaaagcattgcaattttgtatctgtttttatagataagcctttaaatgtaacaaaagttgtcttttgtattgaa

SEQ ID NO: 559702 - DNA, 120 bp, Artificial Sequence
  ENSG00000169398_74 (sequence is synthesized)
aagaacattttaaatgggttatgaccactgtgtttgtggttccagagtgtcccatgcttgcttctctcacagccctttccacacatgctattggcatcatttgcttatttgcctgatccc

SEQ ID NO: 559703 - DNA, 120 bp, Artificial Sequence
  ENSG00000169398_75 (sequence is synthesized)
ccaccccaactgagaccttatgcagaaccctgttttgttcattttgatacactagaatctagcctagaagttcaagggggtggatagacagggtgggtgagagaggtcattgcccaagtg

SEQ ID NO: 559704 - DNA, 120 bp, Artificial Sequence
  ENSG00000169398_76 (sequence is synthesized)
agccactggaggatcttgagcagaggcgtgacgtaaattttaagaaacttgttgggatggttgtgttctaaagttaaggaatcaaggatgatgtcaaggcagaactggggctcccttgca

SEQ ID NO: 559705 - DNA, 120 bp, Artificial Sequence
  ENSG00000169398_77 (sequence is synthesized)
acagcgtgagagagaaatttcttcaagaagcctgccttaagctccctggggataaggaccatgtttgtttcgctcaccactccatactcagtgtcctgcacagtacttgacacctagaga

SEQ ID NO: 559706 - DNA, 120 bp, Artificial Sequence
  ENSG00000169398_78 (sequence is synthesized)
acacctggtagatgtttgtcattctggtgtccttcattatatgtgcatcaaatgaatgccttctgttttccattgtaataaataccacccaacagtccaataaattaataattcatagag

SEQ ID NO: 559707 - DNA, 120 bp, Artificial Sequence
  ENSG00000169398_79 (sequence is synthesized)
agaggatccagccttgcccagcagggaagtgctctgtttacaaagcagtttgaggaaggcatggtgtttgcatgggagaaggtgaacgggctttgccatcaataccaaagttggccaaca

SEQ ID NO: 559708 - DNA, 120 bp, Artificial Sequence
  ENSG00000169398_80 (sequence is synthesized)
taattgtgtttctgaaaggcttctttgactttttaagccctgttagagtctactatattgcaaattattgcaaaatgttatctttcaaagcaggagagttagttttacaactacttctta

SEQ ID NO: 559709 - DNA, 120 bp, Artificial Sequence
  ENSG00000169398_81 (sequence is synthesized)
atcaaaatagagctccttggaaatgatgcatcacaaagtcctgtccctgctttactgactcacaagaatggcccagcagttaaaatccttatacatggagcagctgaagattttcgtttt

SEQ ID NO: 559710 - DNA, 120 bp, Artificial Sequence
  ENSG00000169398_82 (sequence is synthesized)
tctagaaagagaaaaaagacaaggctgaagtgattttttcagtataggtgttaccacatgagtgactgttttcttcagatgggtatttttaaatttcccattaatatagtggtggacttt

SEQ ID NO: 559711 - DNA, 120 bp, Artificial Sequence
  ENSG00000169398_83 (sequence is synthesized)
aggctgggcctaatatctttaaactcagccccaagtcaggaatctttatgatagcattatggctagatgatgaagtggatctcaaggatattgaggggccgggctcaggaattgaggctg

SEQ ID NO: 559712 - DNA, 120 bp, Artificial Sequence
  ENSG00000169398_84 (sequence is synthesized)
ctgcagtttctcctgaatctatgagaattcagatgggcacttttcagtaattaaaaccatatgtcctcctcctcctttctttttgaagagctctcattctgttgaccttgcactgctgct

SEQ ID NO: 559713 - DNA, 120 bp, Artificial Sequence
  ENSG00000169398_85 (sequence is synthesized)
ggattgttcctcgggctttgcatgttccctgcatttgttttgtaactgagcatggtgcatggcagacctctctatgcagtatgctggggcagtgagcaggtggcacagtagccacaccct

SEQ ID NO: 559714 - DNA, 120 bp, Artificial Sequence
  ENSG00000169398_86 (sequence is synthesized)
ggcaacagtgagtgagagctggtgggcaggcttggaaactagctcctttttgttctgctcatgtgtttttatgggggatttgtcttatgcctttattaatattgtttttcttttttccct

SEQ ID NO: 559715 - DNA, 120 bp, Artificial Sequence
  ENSG00000169398_87 (sequence is synthesized)
ttctctgataaattcctttaacttttcctcaccttccgttcgacaatagccatggagggtaagcacatcgtgtctttgtgtgtctgtccagctctctctatcacacccggctctctgcat

SEQ ID NO: 559716 - DNA, 120 bp, Artificial Sequence
  ENSG00000169398_88 (sequence is synthesized)
gtaactttggactggaaagcaggaagcccaagtgggagggcacttcggcctgctttgtcacctctcatgactgacagatgccaaaagcagtgtttatatatgcaaaagaatgagacatgt

SEQ ID NO: 559717 - DNA, 120 bp, Artificial Sequence
  ENSG00000169398_89 (sequence is synthesized)
acatctttgcagtaaatgaattattcttgtgcttttctatctcatacccagacttttggaacaaccaagaattaatctgttccagattacttaggcaaaagcacccaagggttcagaaat

SEQ ID NO: 559718 - DNA, 120 bp, Artificial Sequence
  ENSG00000169398_90 (sequence is synthesized)
ccaagggttcagaaatgggaacttatatttagactgagcactggcatcaggttcatgattaaactatatgtactacaagttggtcttttttaaaaagtgtatatatatatatatatatat

SEQ ID NO: 559719 - DNA, 120 bp, Artificial Sequence
  ENSG00000169398_91 (sequence is synthesized)
ataccattttatgctggtgtaattctaaccagttggaatttttaaatactgctgaagatttcccaaaggccctcatgttattccaccatcagtactcaagttatcttagtaacatttgtt

SEQ ID NO: 559720 - DNA, 120 bp, Artificial Sequence
  ENSG00000169398_92 (sequence is synthesized)
gatgtctcttctgtgcccaggccctaggtagacattgttacatctttggcctcatcttccctgatcacagttgcccgggtgagagagctgaggctttataagcgtaggcccaggtgcttt

SEQ ID NO: 559721 - DNA, 120 bp, Artificial Sequence
  ENSG00000169398_93 (sequence is synthesized)
ccagcagtcagcacagagctggctgaaaccggggtcttgagcagagaggctcctagcgacaccactgctgctttgacttcagtcacgacctgcaaacagatgctatccccttaaagtgca

SEQ ID NO: 559722 - DNA, 120 bp, Artificial Sequence
  ENSG00000169398_94 (sequence is synthesized)
ttcatatgtcagctttttataattgtacaaagaacatgtttccattaggcggctgagggcagctaagctgagccataccgttttcactgcagaattcaaactaagtggaaatccttatag

SEQ ID NO: 559723 - DNA, 120 bp, Artificial Sequence
  ENSG00000169398_95 (sequence is synthesized)
tcttcatgtagaatgtttgactctttagccaaataggtaattttgtctaaaattcagtaaattcccagatggattattatcttgtggtaaatgattttggggtgaggggacattgaatca

SEQ ID NO: 559724 - DNA, 120 bp, Artificial Sequence
  ENSG00000169398_96 (sequence is synthesized)
aattactttactgtcattctcaatctgaactatatcccgcacacacaagaaaatcaatgaccttctgcaatctgctttgatctcttgtaaagaccctctctagcttgattgtggtgatct

SEQ ID NO: 559725 - DNA, 120 bp, Artificial Sequence
  ENSG00000169398_97 (sequence is synthesized)
ctccagtgtgagggagaagtatgagcttgctcacccaccagaggagtggaagtaagatacaaacctgctttggtgtgatgcacacttgatttcttttgctttttaaaaacatgcacaaga

SEQ ID NO: 559726 - DNA, 120 bp, Artificial Sequence
  ENSG00000169398_98 (sequence is synthesized)
taacaaatgtatatgtttaattttcacactgcttgtcattacaactctggtataaataaaattcgttagtaattattaacgaatgatctcttctagacctctagtctagcttttgggtat

SEQ ID NO: 559727 - DNA, 120 bp, Artificial Sequence
  ENSG00000169398_99 (sequence is synthesized)
tattaattatactttgagccatctgatttccgttttctgtgatggtcttttgctagctaatttctcatcagtgctactttgtttcaacctttgctcccaataaaactcaaatcatatata

SEQ ID NO: 559728 - DNA, 80 bp, Artificial Sequence
  ENSG00000169398_100 (sequence is synthesized)
ggcgggctccttctgtgcagcggtcgtgggctgggccgcggccctgagggcggaggggcagagcggggccgcccaaccag

SEQ ID NO: 559729 - DNA, 120 bp, Artificial Sequence
  ENSG00000169398_101 (sequence is synthesized)
atgtgggacttcagatagcttctgagtagtcaagcagtgataaagcactggttaagctgaacgataggaagattgtattgagcaatttagggagattattggccagattgctaattgatc

SEQ ID NO: 559730 - DNA, 120 bp, Artificial Sequence
  ENSG00000169398_102 (sequence is synthesized)
acgtaagtgctggcgtgatcacattaggtgtgaaaagaatctgtcctcagacatgtatatgcttgataaagtgctgcgtgggatttctcagaggaattctgttctgctcaagataaactt

SEQ ID NO: 559731 - DNA, 120 bp, Artificial Sequence
  ENSG00000169398_103 (sequence is synthesized)
ttcttcaagaagcctgccattacacatctttgcactggaattggtgcagatatataagtgatcctaatgttgatgctgcccagaccccaggaatgcagagtaacaatgcgtcagtttgac

SEQ ID NO: 559732 - DNA, 120 bp, Artificial Sequence
  ENSG00000169398_104 (sequence is synthesized)
cttgtaattgaactcatttgctactttggcaagacagctaaatccgtataagccatattctgtcagaaagccgcaagtaatgcctgatatttttatcctggggttgcgggtatctcagtg

SEQ ID NO: 559733 - DNA, 120 bp, Artificial Sequence
  ENSG00000169398_105 (sequence is synthesized)
aagaagaaagccatctgtgctacttggaatagaggtaaagtgcaggttctccagcactgggtgggccagtgcaggtaccagtctgtaaggtgtgcgtgtgtggagaggaatgcagttctt

SEQ ID NO: 559734 - DNA, 120 bp, Artificial Sequence
  ENSG00000169398_106 (sequence is synthesized)
aaatacaagtaggagttggccagagaaagaagagaaaggtgttccaggcaagagacacaacataaagaggcatgggagagcataatgacttcggagaacttgccaggacataaaggaaga

SEQ ID NO: 559735 - DNA, 120 bp, Artificial Sequence; identical to SEQ ID NO: 447436
  ENSG00000169402_0 (sequence is synthesized)

SEQ ID NO: 559736 - DNA, 120 bp, Artificial Sequence; identical to SEQ ID NO: 447437
  ENSG00000169402_1 (sequence is synthesized)

SEQ ID NO: 559737 - DNA, 120 bp, Artificial Sequence
  ENSG00000169402_2 (sequence is synthesized)
gctcaacgaagtgaaacccaaaaaagaccgccaaaacgttcagcagaacgaagatgccagccaatacgaagagtccattctgaccaaactcatagtggaaagctatgaaggggaaaaggt

SEQ ID NO: 559738 - DNA, 120 bp, Artificial Sequence; identical to SEQ ID NO: 447439
  ENSG00000169402_3 (sequence is synthesized)

SEQ ID NO: 559739 - DNA, 120 bp, Artificial Sequence; identical to SEQ ID NO: 447440
  ENSG00000169402_4 (sequence is synthesized)

SEQ ID NO: 559740 - DNA, 120 bp, Artificial Sequence; identical to SEQ ID NO: 447441
  ENSG00000169402_5 (sequence is synthesized)

SEQ ID NO: 559741 - DNA, 120 bp, Artificial Sequence; identical to SEQ ID NO: 447442
  ENSG00000169402_6 (sequence is synthesized)

SEQ ID NO: 559742 - DNA, 120 bp, Artificial Sequence; identical to SEQ ID NO: 447443
  ENSG00000169402_7 (sequence is synthesized)

SEQ ID NO: 559743 - DNA, 120 bp, Artificial Sequence; identical to SEQ ID NO: 447444
  ENSG00000169402_8 (sequence is synthesized)

SEQ ID NO: 559744 - DNA, 120 bp, Artificial Sequence; identical to SEQ ID NO: 447445
  ENSG00000169402_9 (sequence is synthesized)

SEQ ID NO: 559745 - DNA, 120 bp, Artificial Sequence; identical to SEQ ID NO: 447446
  ENSG00000169402_10 (sequence is synthesized)

SEQ ID NO: 559746 - DNA, 120 bp, Artificial Sequence; identical to SEQ ID NO: 447447
  ENSG00000169402_11 (sequence is synthesized)

SEQ ID NO: 559747 - DNA, 120 bp, Artificial Sequence; identical to SEQ ID NO: 447448
  ENSG00000169402_12 (sequence is synthesized)

SEQ ID NO: 559748 - DNA, 120 bp, Artificial Sequence
  ENSG00000169402_13 (sequence is synthesized)
catgaagaattccaaaagagaagcccatccctcttcttgtgttttacaaaactgatgaccgagaacattcgtccaaatgcctgccagataaaaggcaatttattccgtgagcaacagcgg

SEQ ID NO: 559749 - DNA, 120 bp, Artificial Sequence; identical to SEQ ID NO: 447450
  ENSG00000169402_14 (sequence is synthesized)

SEQ ID NO: 559750 - DNA, 120 bp, Artificial Sequence; identical to SEQ ID NO: 447451
  ENSG00000169402_15 (sequence is synthesized)

SEQ ID NO: 559751 - DNA, 120 bp, Artificial Sequence; identical to SEQ ID NO: 447452
  ENSG00000169402_16 (sequence is synthesized)

SEQ ID NO: 559752 - DNA, 120 bp, Artificial Sequence; identical to SEQ ID NO: 447453
  ENSG00000169402_17 (sequence is synthesized)

SEQ ID NO: 559753 - DNA, 120 bp, Artificial Sequence; identical to SEQ ID NO: 447454
  ENSG00000169402_18 (sequence is synthesized)

SEQ ID NO: 559754 - DNA, 120 bp, Artificial Sequence
  ENSG00000169402_19 (sequence is synthesized)
aaatatgagagacccaaggatgatcgagaggaagagttcaacacgtgggtcaataatacgtacgtcttctttgtgaacacgctctttcatgcgtataaacgtgaagaagctatcaaggag

SEQ ID NO: 559755 - DNA, 120 bp, Artificial Sequence
  ENSG00000169402_20 (sequence is synthesized)
aaaataagggcagacaggttacgtagcacagcacaggcccagcagcggaagatggaagatgacgaactggaagcaaggctgaacatctttatcttgagagaggaagaggccaagagacat

SEQ ID NO: 559756 - DNA, 120 bp, Artificial Sequence; identical to SEQ ID NO: 447457
  ENSG00000169402_21 (sequence is synthesized)

SEQ ID NO: 559757 - DNA, 120 bp, Artificial Sequence; identical to SEQ ID NO: 447458
  ENSG00000169402_22 (sequence is synthesized)

SEQ ID NO: 559758 - DNA, 85 bp, Artificial Sequence; identical to SEQ ID NO: 447459
  ENSG00000169402_23 (sequence is synthesized)

SEQ ID NO: 559759 - DNA, 120 bp, Artificial Sequence; identical to SEQ ID NO: 447460
  ENSG00000169402_24 (sequence is synthesized)

SEQ ID NO: 559760 - DNA, 120 bp, Artificial Sequence; identical to SEQ ID NO: 447461
  ENSG00000169402_25 (sequence is synthesized)

SEQ ID NO: 559761 - DNA, 120 bp, Artificial Sequence; identical to SEQ ID NO: 447463
  ENSG00000169402_26 (sequence is synthesized)

SEQ ID NO: 559762 - DNA, 120 bp, Artificial Sequence
  ENSG00000169402_27 (sequence is synthesized)
actggcggggcaaggaggatctccaagttccaggggagcctgaggattgggcccccaccttgggttcatgccagctcccttcccacgcgacatcccgccttctagccggtggctgacatg

SEQ ID NO: 559763 - DNA, 120 bp, Artificial Sequence
  ENSG00000169402_28 (sequence is synthesized)
gagagcccggcaacacctcagcccgagcccggcgaggtctctgggctcctggagcgaggtgagcgccccaggccgcggtcctgcctacgccgggacagccatggcgactgggtcctgctc

SEQ ID NO: 559764 - DNA, 120 bp, Artificial Sequence
  ENSG00000169402_29 (sequence is synthesized)
cttcccggccggactgacgcggcctcccaggacccgagcacgtgcgtgatgggcgaggagggcctaggccgggcagaccagtgcagggagccgattcttctcggctcaccgtagacacag

SEQ ID NO: 559765 - DNA, 120 bp, Artificial Sequence
  ENSG00000169402_30 (sequence is synthesized)
ggagaacagaggaaacattaggaaacgcactgagaaacgaaattggcttgatttgtagttcacttatttgtagatcactgacagaagaccgaaaagctcgtagtaaaggcccctctaaat

SEQ ID NO: 559766 - DNA, 73 bp, Artificial Sequence
  ENSG00000169402_31 (sequence is synthesized)
tgcattccagcctgggtcacggagctggtggccagtgtaatctataaataggcagcaggagagagactcaaca

SEQ ID NO: 559767 - DNA, 120 bp, Artificial Sequence
  ENSG00000169402_32 (sequence is synthesized)
agtgtaatctataaataggcagcaggagagagactcaacaccaaaccagaattttaaaaacttttaacaatttattagtcttattttccagtaaaatattcaaataatgtcaaaagaatg

SEQ ID NO: 559768 - DNA, 120 bp, Artificial Sequence
  ENSG00000169402_33 (sequence is synthesized)
aaatgatagcgatatagccaactacctttaattaattccacataaatatttaaaatctaaaaacctcagatcagcagaccgagtcgaaatctgattcttcaaagcaagtattgctttacc

SEQ ID NO: 559769 - DNA, 120 bp, Artificial Sequence
  ENSG00000169402_34 (sequence is synthesized)
cttgtcctgaatgcagtccgtcatatgaccactaacttgcatgtgaccaaatgtttgcagagtgttttttagatatgctctcggtgagccgtcatccgtcaatccaagaagaagatgttg

SEQ ID NO: 559770 - DNA, 120 bp, Artificial Sequence
  ENSG00000169402_35 (sequence is synthesized)
ttgaactgcgttgcacaaagtttcttgacctcttctgcaacaaggacacaacagtgaggaaggaagaggcagtcacttaaaaggttacataatatataattaaattcttcttgggtaaaa

SEQ ID NO: 559771 - DNA, 120 bp, Artificial Sequence
  ENSG00000169403_0 (sequence is synthesized)
cctcctgtgcactcattacctgcttcctgagctccccgagaagtcatccaggacctccccgagaagccgtccaggaaacatgctctcaggggacccccatctgcctcagcctctttgtca

SEQ ID NO: 559772 - DNA, 120 bp, Artificial Sequence
  ENSG00000169403_1 (sequence is synthesized)
ctgcctggaccattgtccctgctgtttctcaggcaccaccaggaccagctgatcattccagcccacagcaatggagccacatgactcctcccacatggactctgagttccgatacactct

SEQ ID NO: 559773 - DNA, 120 bp, Artificial Sequence
  ENSG00000169403_2 (sequence is synthesized)
cttcccgattgtttacagcatcatctttgtgctcggggtcattgctaatggctacgtgctgtgggtctttgcccgcctgtacccttgcaagaaattcaatgagataaagatcttcatggt

SEQ ID NO: 559774 - DNA, 120 bp, Artificial Sequence
  ENSG00000169403_3 (sequence is synthesized)
gaacctcaccatggcggacatgctcttcttgatcaccctgccactttggattgtctactaccaaaaccagggcaactggatactccccaaattcctgtgcaacgtggctggctgcctttt

SEQ ID NO: 559775 - DNA, 120 bp, Artificial Sequence
  ENSG00000169403_4 (sequence is synthesized)
cttcatcaacacctactgctctgtggccttcctgggcgtcatcacttataaccgcttccaggcagtaactcggcccatcaagactgctcaggccaacacccgcaagcgtggcatctcttt

SEQ ID NO: 559776 - DNA, 120 bp, Artificial Sequence
  ENSG00000169403_5 (sequence is synthesized)
gtccttggtcatctgggtggccattgtgggagctgcatcctacttcctcatcctggactccaccaacacagtgcccgacagtgctggctcaggcaacgtcactcgctgctttgagcatta

SEQ ID NO: 559777 - DNA, 120 bp, Artificial Sequence
  ENSG00000169403_6 (sequence is synthesized)
ccgtaccttgctcatgcagccggtgcagcagcagcgcaacgctgaagtcaagcgccgggcgctgtggatggtgtgcacggtcttggcggtgttcatcatctgcttcgtgccccaccacgt

SEQ ID NO: 559778 - DNA, 120 bp, Artificial Sequence
  ENSG00000169403_7 (sequence is synthesized)
ggtgcagctgccctggacccttgctgagctgggcttccaggacagcaaattccaccaggccattaatgatgcacatcaggtcaccctctgcctccttagcaccaactgtgtcttagaccc

SEQ ID NO: 559779 - DNA, 120 bp, Artificial Sequence
  ENSG00000169403_8 (sequence is synthesized)
tgttatctactgtttcctcaccaagaagttccgcaagcacctcaccgaaaagttctacagcatgcgcagtagccggaaatgctcccgggccaccacggatacggtcactgaagtggttgt

SEQ ID NO: 559780 - DNA, 120 bp, Artificial Sequence
  ENSG00000169403_9 (sequence is synthesized)
gccattcaaccagatccctggcaattccctcaaaaattagtccctgcttccaggcctgaagtcttctcctccatgaacatcatggactgagctgggggaagaagggatatctactgtggt

SEQ ID NO: 559781 - DNA, 120 bp, Artificial Sequence
  ENSG00000169403_10 (sequence is synthesized)
ctgggcaccacctctgtgggcactggtgggccattagatttggaggctacctcacctgggcagggatgatggcagagccaggctgttggaaaatccagaactcaaatgagccccttcatc

SEQ ID NO: 559782 - DNA, 120 bp, Artificial Sequence
  ENSG00000169403_11 (sequence is synthesized)
cgcctgtgggcgcatactacagtaactgtgactgatgactttatcctgagtcccttaatcttatggggccggaaggaatgtcagggccaggtgcagaccttgggggaagactttaaacca

SEQ ID NO: 559783 - DNA, 120 bp, Artificial Sequence
  ENSG00000169403_12 (sequence is synthesized)
acttctgcaattgccagacagcatagaggctgaggctggggccaggacccagacagagacacacggtcactgcagctgaagccgctgcccctgctacaggcaccaccaggaccagctgat

SEQ ID NO: 559784 - DNA, 120 bp, Artificial Sequence
  ENSG00000169403_13 (sequence is synthesized)
aaaaaaaaaaaaaaaaaaaaagctttgggcaactactctcaagtgatagaggtagactgggttaggaaaggacactgccctcactgtatggcactaccttggggcagacttttgagctaa

SEQ ID NO: 559785 - DNA, 120 bp, Artificial Sequence
  ENSG00000169403_14 (sequence is synthesized)
ccctccggcacaaggtctttgtgacctttctcaggggaaggggcttgatggaaccttctctgactcatctggcaacctgtccctaatggtgaccaaagaagataaaacatgaacagacca

SEQ ID NO: 559786 - DNA, 120 bp, Artificial Sequence
  ENSG00000169403_15 (sequence is synthesized)
aaagctaggacaagagcttgcttcccaagacagacgtgtctgtctgcaaaggccttgcctctagtccagtcagctctgggggagtgggaaggagatgcccacctcctctttctgtctcaa

SEQ ID NO: 559787 - DNA, 120 bp, Artificial Sequence
  ENSG00000169403_16 (sequence is synthesized)
cctctttctgtctcaacaatagtccctaattaagtaccttctgtggggcagccacccactgagggtgggcaaaggccccttgaaagcaaaattggggctgggctcagtggctcatgccta

SEQ ID NO: 559788 - DNA, 74 bp, Artificial Sequence
  ENSG00000169403_17 (sequence is synthesized)
agaccagcctggccaacgtggtgaaacgccatctccactaagaatacaaaaatcgatcatttgaagttaggagt

SEQ ID NO: 559789 - DNA, 120 bp, Artificial Sequence
  ENSG00000169403_18 (sequence is synthesized)
aacaaaaaaggcaaaattggagctgtccaggccaggacaccccgatgtccaggggcttccatacgaacaggcacatgggctgggaagtacatgaggcccctgggtagaagggtctgtcag

SEQ ID NO: 559790 - DNA, 120 bp, Artificial Sequence
  ENSG00000169403_19 (sequence is synthesized)
ttctctcctcccttgccctctgggagggtcctcctaacatagcttccaggaggtgggaggagcagttactgtcagcaggtgtcagccaggtgtcagcttctcctggggatctctagatgt

SEQ ID NO: 559791 - DNA, 120 bp, Artificial Sequence
  ENSG00000169403_20 (sequence is synthesized)
ctgcttgtgatttttggcaagtatatgcaaatgagcctcctctcctgccctgagacaagtatctgcagtgtgaacctggcagcctcagacccaaggggctcagaggaaacttctctggtt

SEQ ID NO: 559792 - DNA, 120 bp, Artificial Sequence
  ENSG00000169403_21 (sequence is synthesized)
tctagagctctgtgctccttcagagaagtcttccttccttccagtcagtgtccctgtgaagctgggatactcatttcctgtgtaccgggcaaacaccggattgctgattttgagaaatgc

SEQ ID NO: 559793 - DNA, 120 bp, Artificial Sequence
  ENSG00000169403_22 (sequence is synthesized)
ctctcgatggacctgtaacctgctggagtctgggatggtagctgtgggctggacttggctgatgggatgacccggtggctagtgcagcatcacacaagcctggttcaagtcttggctgtg

SEQ ID NO: 559794 - DNA, 120 bp, Artificial Sequence
  ENSG00000169403_23 (sequence is synthesized)
tcatttcctgctgagggaccaggcactgaatttcctacctcttagggtcattacctatgaggttaaagctacctcatgggattgttatacgccactaatgttgaggcagacacctcttgg

SEQ ID NO: 559795 - DNA, 120 bp, Artificial Sequence
  ENSG00000169403_24 (sequence is synthesized)
cagggtgactgctcatcttagaccctccccttttctgcgaatttgggccccttgatcctctgatgggagctgaaaggatgagaggtgggcatctagatttagggaggctgttcaggcttt

SEQ ID NO: 559796 - DNA, 120 bp, Artificial Sequence
  ENSG00000169403_25 (sequence is synthesized)
gcaggtcccttacctgaacacatagaaaccctggagctgtgactgtgtccatgtgtgtgtgtttgtctgtgtgtgttgcgggggatgggcacctgcatgaatgtggtagagaaaatggct

SEQ ID NO: 559797 - DNA, 120 bp, Artificial Sequence
  ENSG00000169403_26 (sequence is synthesized)
ctgctcagagggaagatacgcatagcaaggcagggaccagaggaatcacaggcgcctggagagcagccgggcaccgcctccagggacctgccggcttccctcagtcctccaggggcccag

SEQ ID NO: 559798 - DNA, 120 bp, Artificial Sequence
  ENSG00000169403_27 (sequence is synthesized)
cactcttcctttaggccctgtgagcgtcccttgtcaggatacattctctcattttgctgaagctgatttgattgggtgtctgtttctcgcagccaaaagagctctgaatgaggaaagtgc

SEQ ID NO: 559799 - DNA, 120 bp, Artificial Sequence
  ENSG00000169403_28 (sequence is synthesized)
ttctgtgctaactccccgcgtctcctgaatttcagtcattcatgtacccgcctcgaaatttttgcaatatctgtgtaccaactgtccatttacttaataaagaagttttctttaaattaa

SEQ ID NO: 559800 - DNA, 120 bp, Artificial Sequence
  ENSG00000169410_0 (sequence is synthesized)
gcgaggagcctggctgaggcagccgcgcaggtcgcagggccagcgtccgcgaggacggcccggctgggcggccccgagctctgtggcgctgtggaggagcgggagcgcggccgaggaagc

SEQ ID NO: 559801 - DNA, 120 bp, Artificial Sequence
  ENSG00000169410_1 (sequence is synthesized)
gggagcgcggccgaggaagcggggcgccgagggggtcggcggccttcgggaaatttccgccgacccttcgctcccggctctaaaagttcctgatttcctatttccttttaaatcccgagt

SEQ ID NO: 559802 - DNA, 120 bp, Artificial Sequence
  ENSG00000169410_2 (sequence is synthesized)
ggctgttagctcttcgcctgcactttttcttccccaggagataagggggagtgtgaggaacggagcgaataatataaaaaaggatttcctcccggaagagagcggcagttcggagagatt

SEQ ID NO: 559803 - DNA, 120 bp, Artificial Sequence
  ENSG00000169410_3 (sequence is synthesized)
tttcttaaggaagcagaagcggcgtttgcggccgctgcaggcgccgggccctgccggccacactatgcgcgagccggccccgggctgctgaggcgcggggacgcggaagcggaggccgag

SEQ ID NO: 559804 - DNA, 120 bp, Artificial Sequence
  ENSG00000169410_4 (sequence is synthesized)
gctcccgcgctcgcgagcgagttttgtccgcccggcggcggtggcggggggatggagcccgcgaccgcgccccggcccgacatggcgccggagctgaccccggaggaggagcaggctacc

SEQ ID NO: 559805 - DNA, 120 bp, Artificial Sequence
  ENSG00000169410_5 (sequence is synthesized)
aggctaccaagcagtttctcgaagagattaacaagtggacagttcagtacaatgtttccccgctgtcttggaatgtggctgtcaagttcctcatggcaaggaagtttgatgtgctccgtg

SEQ ID NO: 559806 - DNA, 120 bp, Artificial Sequence
  ENSG00000169410_6 (sequence is synthesized)
ccatagaattgttccactcctacagagaaactcgaaggaaggaaggcattgtaaagctgaaacctcatgaggaacctcttcgttctgagatcctcagtggaaaattcaccatcttaaatg

SEQ ID NO: 559807 - DNA, 120 bp, Artificial Sequence
  ENSG00000169410_7 (sequence is synthesized)
ttcgggacccaacaggagcctccattgccctctttactgccaggttgcatcatccccacaagtcagtccaacatgtggtacttcaggctctgttttacttgctagacagagctgtggata

SEQ ID NO: 559808 - DNA, 120 bp, Artificial Sequence
  ENSG00000169410_8 (sequence is synthesized)
gctttgaaactcagaggaatggactggtgtttatctatgacatgtgtggttctaattatgccaactttgagctggatcttggcaagaaagtcctaaacctgctgaagggagcatttccag

SEQ ID NO: 559809 - DNA, 120 bp, Artificial Sequence
  ENSG00000169410_9 (sequence is synthesized)
ctcgtttgaagaaggtgctgattgtgggggcacccatatggttccgagtgccctattccatcatcagtctcctcctgaaggacaaagtccgggagaggattcaaatattaaagacatctg

SEQ ID NO: 559810 - DNA, 120 bp, Artificial Sequence
  ENSG00000169410_10 (sequence is synthesized)
aggtcacgcagcatctgcccagggagtgtcttccagaaaacctgggtgggtacgtcaaaattgatctcgccacttggaatttccagttcctaccccaggtgaacggccacccagatccct

SEQ ID NO: 559811 - DNA, 120 bp, Artificial Sequence
  ENSG00000169410_11 (sequence is synthesized)
tcgatgagatcatcctgttctccctccctcctgccttagactgggactcagtacatgttccaggtccccatgctatgaccatccaagagttggtggactatgttaatgccaggcaaaagc

SEQ ID NO: 559812 - DNA, 120 bp, Artificial Sequence
  ENSG00000169410_12 (sequence is synthesized)
aaggaatctatgaggaatatgaagacattcgtcgtgagaaccctgttggcactttccactgttccatgtctccaggaaacctagagaaaaaccgttatggggatgtaccctgcctggacc

SEQ ID NO: 559813 - DNA, 120 bp, Artificial Sequence
  ENSG00000169410_13 (sequence is synthesized)
aaactagagtgaagctaacaaagcgaagtggccatactcagacagattacatcaatgccagtttcatggatggctacaagcagaagaatgcttacattggcacacaaggtcctttggaga

SEQ ID NO: 559814 - DNA, 120 bp, Artificial Sequence
  ENSG00000169410_14 (sequence is synthesized)
atacctatcgtgatttctggctcatggtatgggagcaaaaagtcttggtgattgtcatgaccacccgctttgaggaaggcggcaggagaaagtgtggccagtactggcctttagaaaaag

SEQ ID NO: 559815 - DNA, 120 bp, Artificial Sequence
  ENSG00000169410_15 (sequence is synthesized)
actctcggatccgatttggcttcctcacagtgaccaatctaggcgtggagaacatgaatcattataagaaaacaacgctagaaattcacaacacagaggaacggcagaaacgccaggtga

SEQ ID NO: 559816 - DNA, 120 bp, Artificial Sequence
  ENSG00000169410_16 (sequence is synthesized)
cccacttccagttcttgagctggccagactatggtgtcccttcctcagcagcttccctcattgacttcttgagagtggtcagaaaccagcagagtctggctgtgagcaacatgggagcac

SEQ ID NO: 559817 - DNA, 120 bp, Artificial Sequence
  ENSG00000169410_17 (sequence is synthesized)
gctccaaagggcagtgccctgagccacccattgtggtccattgcagtgcaggcattggcaggacaggtaccttctgctcactggacatctgcctggcacagctggaggagcttggcaccc

SEQ ID NO: 559818 - DNA, 120 bp, Artificial Sequence
  ENSG00000169410_18 (sequence is synthesized)
ttaatgtgttccagacggtgtcacgcatgaggacccagagggccttcagcatccagacccctgagcagtactatttttgctacaaggccatcctggagttcgcagagaaggagggcatgg

SEQ ID NO: 559819 - DNA, 120 bp, Artificial Sequence
  ENSG00000169410_19 (sequence is synthesized)
tatcctctggccaaaacctgctggccgtggagagtcagtaactctcctacgaacctcctacctgttggccagccttccttaaactaccctggacaccgctgagcctataggttgccatca

SEQ ID NO: 559820 - DNA, 120 bp, Artificial Sequence
  ENSG00000169410_20 (sequence is synthesized)
gttacgctgaagccatggatcaacttctttcttgtgtctcccagcacacgtgtgcacgcaaggcagcctttccctttggctagataaatgtggtgaaattgccactagaaagggccagta

SEQ ID NO: 559821 - DNA, 120 bp, Artificial Sequence
  ENSG00000169410_21 (sequence is synthesized)
gcaatgtgttcttaattcctagcatctgctatcaaactgtgccttattaaaaccaaattgtggctattgatttttgctagggtccccgaggtaagtggggaaggaacctccctcctcctt

SEQ ID NO: 559822 - DNA, 120 bp, Artificial Sequence
  ENSG00000169410_22 (sequence is synthesized)
tctcccgccattctttttctgaggtctcctgtctcccactccttccctttcctaggattttatggggaggtttgatgagcatttgcctttctccccagagagcttgaccaagttacatat

SEQ ID NO: 559823 - DNA, 120 bp, Artificial Sequence
  ENSG00000169410_23 (sequence is synthesized)
tctagagatcgtcctgagtgccaagcacgtttataagtagggcgtgtattccagtcctttctgtcattctgtgtgtgtgtgtgtgtgcacttatgtgtatgggtccatatgtacgtgtgt

SEQ ID NO: 559824 - DNA, 120 bp, Artificial Sequence
  ENSG00000169410_24 (sequence is synthesized)
atataatatatattgtatgtgataatatgatcgtattctataaatacatatacacacgatactcctttccagaagttcctggggctccgtgttgcagttcaggactccttgcttcttgga

SEQ ID NO: 559825 - DNA, 120 bp, Artificial Sequence
  ENSG00000169410_25 (sequence is synthesized)
ccctactatttatcctggactagcttgggttggtgatcatgtctcctcttgtcaggctacagagtggtggaagaggacacacacacatctcctccatgttcctgccacagggccccttcc

SEQ ID NO: 559826 - DNA, 120 bp, Artificial Sequence
  ENSG00000169410_26 (sequence is synthesized)
ttaagtaatgacttatctccttccagttgccacctgttggagccaagaatgtattagtttgtggtgacactgggttagctcagcatggatttcccttatccgatgatttttctacattta

SEQ ID NO: 559827 - DNA, 120 bp, Artificial Sequence
  ENSG00000169410_27 (sequence is synthesized)
cttggccaatttggggaacagacctccactgtgattccatactctctctttgctttcactatcccagggatgggaggcggagggtagagatgaactcactgagcagccagagccaaatgc

SEQ ID NO: 559828 - DNA, 120 bp, Artificial Sequence
  ENSG00000169410_28 (sequence is synthesized)
aatcggtacgaatcttagaaggaaggagggggagcccaggtatgagaaagaaaaaaccactaagaaaatacctccctgggaggatgagctggggccctttttcttttgctggatggttcc

SEQ ID NO: 559829 - DNA, 120 bp, Artificial Sequence
  ENSG00000169410_29 (sequence is synthesized)
tttatgcagcttggccctgtctaccgagatgcccatctcttcctgcctgctagcctgctagaccctcaaactgggtgggttctgtgtcaataaaaagcttcaccccctggctgagtgagg

SEQ ID NO: 559830 - DNA, 120 bp, Artificial Sequence
  ENSG00000169410_30 (sequence is synthesized)
tggtcccctgcaatcactgtttgtcccctacccacccaacctgtccctgcctgctcccagcccactcatccttatgtgctagggataaatcaagagtcctcagcactccacattcccaaa

SEQ ID NO: 559831 - DNA, 120 bp, Artificial Sequence
  ENSG00000169410_31 (sequence is synthesized)
aaatcccaggaactcctaaaccttcccctgtgacagaagatgaggttggcagctgatcagacctcaataattttatactgtaataagctctttgaatgtgtatattattattttttacaa

SEQ ID NO: 559832 - DNA, 120 bp, Artificial Sequence
  ENSG00000169410_32 (sequence is synthesized)
attcagaaaataattgtaatgttcatattcaatatcttacagtgatacagttttgtatttacatataaatataccgacatgatcaaaacccttttagcttcatcaatttagcagcctggg

SEQ ID NO: 559833 - DNA, 120 bp, Artificial Sequence
  ENSG00000169410_33 (sequence is synthesized)
acatgagggagggggtccaggagctggtctgggagggatgagggaggcagggagggacccaagccttcagtatctgagactttgagttctgacactatgagttcaccttgtctgtaggcc

SEQ ID NO: 559834 - DNA, 120 bp, Artificial Sequence
  ENSG00000169410_34 (sequence is synthesized)
atggccctatctctggacagagggaccagcaccagttcagtgcttgagatgtgctaagcactatgctaggtgcttttcccccaccctgcctcattcaaacctcacaacaattcagtgaga

SEQ ID NO: 559835 - DNA, 120 bp, Artificial Sequence
  ENSG00000169410_35 (sequence is synthesized)
tattatcttctctcccttctcctgtgcacccctttctcatttctatatagatgaggaaggtgaggtccagagggttacagtgatttgctctaaaacgagctcaagttggtctgcttacaa

SEQ ID NO: 559836 - DNA, 120 bp, Artificial Sequence
  ENSG00000169410_36 (sequence is synthesized)
agcctgtggtctcttcactgcatggaagatggagatcttgtgtttggagaacagaggtttgtttagctctcctttcagagtaaaaaaagttcttaaattccaggttgttgttcttgtgcc

SEQ ID NO: 559837 - DNA, 120 bp, Artificial Sequence
  ENSG00000169410_37 (sequence is synthesized)
catgcttcatgtagtagacgcgaagggtgacagggttggtgactgactgtcctagctaggacctcctgatgtagggtcctcatgtctgcagcgtaccaaaggggttatcattctccccag

SEQ ID NO: 559838 - DNA, 120 bp, Artificial Sequence
  ENSG00000169410_38 (sequence is synthesized)
gagactccatatctatgggtacatggtctttgtgagaagatcttgagtcatttgcatttatctcttagaaagaaaggaaccagaagctttgtacatggaagaccactccccatatcatac

SEQ ID NO: 559839 - DNA, 120 bp, Artificial Sequence
  ENSG00000169410_39 (sequence is synthesized)
ctgttggctgttgatggcctgcccagttggggcagttgtggctgggaaatattggggtgttcttaataatagtcatagcagccaatttactggatgctcactctattccaggcactgttc

SEQ ID NO: 559840 - DNA, 120 bp, Artificial Sequence
  ENSG00000169410_40 (sequence is synthesized)
agagtaatttctaggtatcatctcattcaccctcaacaaccttttgaggtaggtattgacagaagaaaaaaattgagagacaggaatgttaatttgctacagccaggatcccagaccatc

SEQ ID NO: 559841 - DNA, 120 bp, Artificial Sequence
  ENSG00000169410_41 (sequence is synthesized)
tgactccaaagtatcttctttcacctcttacactagacttcctctaaggatccatcttctgatctgccaataaatttttatcgagtttcttaccataatcaggagctcaagtgtagagca

SEQ ID NO: 559842 - DNA, 120 bp, Artificial Sequence
  ENSG00000169410_42 (sequence is synthesized)
gaagattaatctagttccttctccagatgagcctccattctcttgggagtgcacaaacataagaagtgaacagagattcttggaaatctgagaaaccagagaggtcaggggtttggtgga

SEQ ID NO: 559843 - DNA, 120 bp, Artificial Sequence
  ENSG00000169410_43 (sequence is synthesized)
acatgtaagaaatgggattaatgataaacggcctggaggaggtaactttaaattgtcatttatttgaagaggctgtaacccgactgccctgtgaatttaaggttatgcatgagttcctca

SEQ ID NO: 559844 - DNA, 120 bp, Artificial Sequence
  ENSG00000169410_44 (sequence is synthesized)
ttgcatatctgaagactggtgaggttatctatcacttcagctccataaaatgctgatttctgggcccatccagtaggttgttagtgagtgacaggattatccaggtttgggaaccataga

SEQ ID NO: 559845 - DNA, 120 bp, Artificial Sequence
  ENSG00000169410_45 (sequence is synthesized)
tttagttcatgtttctgaccctatagagagttaacaaattgatgtctcctaaattttcagtaaaactcagaggaactcctcccactgccattgtttgtagcttttaccagcgtgaaccta

SEQ ID NO: 559846 - DNA, 120 bp, Artificial Sequence
  ENSG00000169410_46 (sequence is synthesized)
cctgtgttaggtgttaaaggaggaggtaaaggaaagggaaggcagagacgcaacccagaatctgtttggcaagtcagggttctcatacaggagacttagtgaacaaagcaagagaaaatg

SEQ ID NO: 559847 - DNA, 68 bp, Artificial Sequence
  ENSG00000169410_47 (sequence is synthesized)
tctcatacaggagacttagtgaacaaagcaagagaaaatgctcagggtccaagtgcagtggctttatg

SEQ ID NO: 559848 - DNA, 120 bp, Artificial Sequence
  ENSG00000169410_48 (sequence is synthesized)
agagtaaaactccatctcaaaaaaaataaataaataaaaaagaaagacagtgttcaggaaagaagaaaacactgagctaaagcaggcttctgcttctgatttgatggctgtttgtttcac

SEQ ID NO: 559849 - DNA, 120 bp, Artificial Sequence
  ENSG00000169410_49 (sequence is synthesized)
tctgcttctgatttgatggctgtttgtttcacctttctctaacattcccatgctatataatttttcaaacatgagataatccctgtgtcctttttcccattgctcccttcatcttgccca

SEQ ID NO: 559850 - DNA, 120 bp, Artificial Sequence
  ENSG00000169410_50 (sequence is synthesized)
tcctcattggctaggatgggactcctgagacgaagggtgccccagcatcctcagcctcggaggcccacccttatcagtcttcatgtgacagtatgcaggtaaatgacagagtaggacttg

SEQ ID NO: 559851 - DNA, 120 bp, Artificial Sequence
  ENSG00000169410_51 (sequence is synthesized)
ttcttgggagaatggactatttagcatcatagccctagggaaatttggttccttccctgaaaggaatgcttcctgtctcttgggacagacagacacacatacaaaaacttttataaatca

SEQ ID NO: 559852 - DNA, 120 bp, Artificial Sequence
  ENSG00000169410_52 (sequence is synthesized)
gagacctagagggaattgggccaagaggcattggccaagtagaaaagcttctctagagtgacccagctcttttgtggttttgaggtcttaccactgaaccaaacccaagtcctaggttcc

SEQ ID NO: 559853 - DNA, 120 bp, Artificial Sequence
  ENSG00000169410_53 (sequence is synthesized)
ctctgtaaaagaaggggctacactagatgatcctaccatgggtcctctgactgtcagggtccagttctttgttagacagtgcaaacacccatagaggagctattaggcctttacttgggt

SEQ ID NO: 559854 - DNA, 120 bp, Artificial Sequence
  ENSG00000169410_54 (sequence is synthesized)
acttgggttgagttggctcccactagcactccccacttttcattttttttactttcagagacagagtctcactctgttgcctaggttagaggggagtggcatgatcatggctcactgcag

SEQ ID NO: 559855 - DNA, 82 bp, Artificial Sequence
  ENSG00000169410_55 (sequence is synthesized)
tggcatgatcatggctcactgcagtctcaacaactgggctcaagcaggaacccagctttttttttttttctctctctctctc

SEQ ID NO: 559856 - DNA, 120 bp, Artificial Sequence
  ENSG00000169410_56 (sequence is synthesized)
tacaggcatgggccaccacacccagcctctccagttttagtgtgttttcagagtctcttctttcaagctgctgctacttccctagcttccctcagttctcttcccccttggccttccaat

SEQ ID NO: 559857 - DNA, 120 bp, Artificial Sequence
  ENSG00000169410_57 (sequence is synthesized)
ttcccccttggccttccaattggaggaaaagcaggtcaggtctctgtcatctccaagaccagcctataggcctttaaagtttccctgtttcttaatgtggggtctacagggtttctcaga

SEQ ID NO: 559858 - DNA, 120 bp, Artificial Sequence
  ENSG00000169410_58 (sequence is synthesized)
ggcaaagcatgaacagaccaagggtcctatagctcccaacctagtccttagatttctctctggccttggttactcccacaaaccactgtgagcctaccaagggcaggaatggaaatgccc

SEQ ID NO: 559859 - DNA, 120 bp, Artificial Sequence
  ENSG00000169410_59 (sequence is synthesized)
atcagcctgggaaccatctttttctcttaggaggtatccgccctatagttacctttacacaacacttgtgaatatcaagtgttctagactgcactgttcataattgactacagagaagac

SEQ ID NO: 559860 - DNA, 120 bp, Artificial Sequence
  ENSG00000169410_60 (sequence is synthesized)
taggatcttctccacaaatagaaatatatcacttttacttggagatgttttcttgggggaaaaaaaatctagcaccttgaaacctgttacaatgtttaaatctcccttctttaccttggc

SEQ ID NO: 559861 - DNA, 120 bp, Artificial Sequence
  ENSG00000169410_61 (sequence is synthesized)
tgtcataaaatcctcctgtttgagctaaatgtggcctgctgaagtcttaaatgcccatatttttcaggctaaggccatggtggacatagctaactccactagaatcctagctgggggtgt

SEQ ID NO: 559862 - DNA, 120 bp, Artificial Sequence
  ENSG00000169410_62 (sequence is synthesized)
tggaaaaaacggtacagtgcccctctcagactccaggctcacgtccgtctcccctccccgcacattataatctactacttctctaatgctgctgcgtagtttgtcttaaagcctcaagac

SEQ ID NO: 559863 - DNA, 120 bp, Artificial Sequence
  ENSG00000169410_63 (sequence is synthesized)
tggccagatgtgcacctgagtaaaggtcagccatttcatctgggggctctttcttgacttttaatgaattttcttctgtgaaaaaatgtatttttaataaaaaattttctgtggccagca

SEQ ID NO: 559864 - DNA, 120 bp, Artificial Sequence
  ENSG00000169410_64 (sequence is synthesized)
atatcaggtctttggggaagccaggttactgctgtggagaggaacgatggaaggcttaccttgctctgtgtgtcttcagctttgaggaaggcggcaggagaaagtgtggccagtactggc

SEQ ID NO: 559865 - DNA, 120 bp, Artificial Sequence
  ENSG00000169410_65 (sequence is synthesized)
taaactgaattcacagtcctatccaggacccttggagaagattttcctgcaggagcatttgagctaagagactggctggctggagggtaaattcatcagtactgctgagatcatcatcgt

SEQ ID NO: 559866 - DNA, 120 bp, Artificial Sequence
  ENSG00000169410_66 (sequence is synthesized)
cctgaaggagtggagtacagtggttgagttggggctctggagtcagagatacctgtatttatccattttgttgacttccctgtctccagtacctagaacagtgcctgccacatatcagac

SEQ ID NO: 559867 - DNA, 120 bp, Artificial Sequence
  ENSG00000169410_67 (sequence is synthesized)
actcaggacatatttgtgaatgagtgaatcttagtgtactgggagattcttctaatcatcctgtggttaatatgaagatcattgtctgatttgtagtccctctccttactgaaacattag

SEQ ID NO: 559868 - DNA, 120 bp, Artificial Sequence
  ENSG00000169410_68 (sequence is synthesized)
cggaggctttatttttatagtaaatggagtatttaggctttttttttattttattttgattttagtttttagtttttttgacattatttactttgcgggccgaaagcaaaaaaaaaaaaa

SEQ ID NO: 559869 - DNA, 120 bp, Artificial Sequence
  ENSG00000169410_69 (sequence is synthesized)
tagttctactgatttggagaaaccccagcactcctctatggagaatatacagcatctagaacaaacttctccaaaggcctcttcactgaagtgtgataaactactttcatcttttccttc

SEQ ID NO: 559870 - DNA, 120 bp, Artificial Sequence
  ENSG00000169410_70 (sequence is synthesized)
aaagatgcaacaatttatttcaggacctaaatgtccaaggtccttttaccagcaaatcaaaaaccattctaggaaaacacctgttatttccacaaaatgataaataaaaagtagaagcta

SEQ ID NO: 559871 - DNA, 120 bp, Artificial Sequence
  ENSG00000169413_0 (sequence is synthesized)
agacaacagcttctgagctttggactaatcacagcctctgttctcagcaggagccccaacactgagaccagaaaagatggtgctatgctttcctcttcttttactgctgctggttctatg

SEQ ID NO: 559872 - DNA, 120 bp, Artificial Sequence
  ENSG00000169413_1 (sequence is synthesized)
gggaccagtgtgtccacttcatgcttggcctaagcgtctcaccaaggctcactggtttgaaattcagcatatacagccaagtcctctccaatgcaacagggcaatgagtggcatcaacaa

SEQ ID NO: 559873 - DNA, 120 bp, Artificial Sequence
  ENSG00000169413_2 (sequence is synthesized)
ttatacccagcactgtaagcatcaaaatacctttctgcatgactctttccagaatgtggctgctgtctgtgatttgctcagcattgtctgcaaaaatcgtcggcacaactgccaccagag

SEQ ID NO: 559874 - DNA, 120 bp, Artificial Sequence
  ENSG00000169413_3 (sequence is synthesized)
aagcctgtcaacatgactgactgcagactcacttcaggaaagtatccccagtgccgctatagtgctgctgcccagtacaaattcttcattgttgcctgtgacccccctcagaagagcgat

SEQ ID NO: 559875 - DNA, 120 bp, Artificial Sequence
  ENSG00000169413_4 (sequence is synthesized)
cccccctacaagttggttcctgtacacttagatagtattctctaaggcatccactgcatttcctttcatttgacatagcttctgttacaattgcatccatgttttcttttcttttgttga

SEQ ID NO: 559876 - DNA, 120 bp, Artificial Sequence
  ENSG00000169413_5 (sequence is synthesized)
ttttcttgttcccgtagaagaaagaagaaaggtgtttggagaattcgagtgcctaggatgccagaccagagttgagacaaaaagaaataagattattttctgctttgtagttctgtactt

SEQ ID NO: 559877 - DNA, 120 bp, Artificial Sequence
  ENSG00000169413_6 (sequence is synthesized)
ttcgagagaagggaatagggaagacagcaaagaaagattcagatttctaaccctgcaacttttgccaagctttattgccctgtgttcacagcaataaaaccacttcctgctgcattctaa

SEQ ID NO: 559878 - DNA, 120 bp, Artificial Sequence
  ENSG00000169418_0 (sequence is synthesized)
acactccctggggcaggcgctcacgcacgctacaaacacacactcctctttcctccctcgcgcgccctctctcatccttcttcacgaagcgctcactcgcaccctttctctctctctctc

SEQ ID NO: 559879 - DNA, 120 bp, Artificial Sequence
  ENSG00000169418_1 (sequence is synthesized)
tctctctctaacacgcacgcacactcccagttgttcacactcgggtcctctccagcccgacgttctcctggcacccacctgctccgcggcgccctgcgcgcccccctcggtcgcgcccct

SEQ ID NO: 559880 - DNA, 120 bp, Artificial Sequence
  ENSG00000169418_2 (sequence is synthesized)
tgcgctctcggcccagaccgtcgcagctacagggggcctcgagccccggggtgagcgtccccgtcccgctcctgctccttcccatagggacgcgcctgatgcctgggaccggccgctgag

SEQ ID NO: 559881 - DNA, 120 bp, Artificial Sequence
  ENSG00000169418_3 (sequence is synthesized)
cccaaggggaccgaggaggccatggtaggagcgctcgcctgctgcggtgcccgctgaggccatgccggggccccggcgccccgctggctcccgcctgcgcctgctcctgctcctgctgct

SEQ ID NO: 559882 - DNA, 120 bp, Artificial Sequence
  ENSG00000169418_4 (sequence is synthesized)
gccgccgctgctgctgctgctccggggcagccacgcgggcaacctgacggtagccgtggtactgccgctggccaatacctcgtacccctggtcgtgggcgcgcgtgggacccgccgtgga

SEQ ID NO: 559883 - DNA, 120 bp, Artificial Sequence
  ENSG00000169418_5 (sequence is synthesized)
gctggccctggcccaggtgaaggcgcgccccgacttgctgccgggctggacggtccgcacggtgctgggcagcagcgaaaacgcgctgggcgtctgctccgacaccgcagcgcccctggc

SEQ ID NO: 559884 - DNA, 120 bp, Artificial Sequence
  ENSG00000169418_6 (sequence is synthesized)
cgcggtggacctcaagtgggagcacaaccccgctgtgttcctgggccccggctgcgtgtacgccgccgccccagtggggcgcttcaccgcgcactggcgggtcccgctgctgaccgccgg

SEQ ID NO: 559885 - DNA, 120 bp, Artificial Sequence
  ENSG00000169418_7 (sequence is synthesized)
cgccccggcgctgggcttcggtgtcaaggacgagtatgcgctgaccacccgcgcggggcccagctacgccaagctgggggacttcgtggcggcgctgcaccgacggctgggctgggagcg

SEQ ID NO: 559886 - DNA, 120 bp, Artificial Sequence
  ENSG00000169418_8 (sequence is synthesized)
ccaagcgctcatgctctacgcctaccggccgggtgacgaagagcactgcttcttcctcgtggaggggctgttcatgcgggtccgcgaccgcctcaatattacggtggaccacctggagtt

SEQ ID NO: 559887 - DNA, 120 bp, Artificial Sequence
  ENSG00000169418_9 (sequence is synthesized)
cgccgaggacgacctcagccactacaccaggctgctgcggaccatgccgcgcaaaggccgagttatctacatctgcagctcccctgatgccttcagaaccctcatgctcctggccctgga

SEQ ID NO: 559888 - DNA, 120 bp, Artificial Sequence
  ENSG00000169418_10 (sequence is synthesized)
agctggcttgtgtggggaggactacgttttcttccacctggatatctttgggcaaagcctgcaaggtggacagggccctgctccccgcaggccctgggagagaggggatgggcaggatgt

SEQ ID NO: 559889 - DNA, 120 bp, Artificial Sequence
  ENSG00000169418_11 (sequence is synthesized)
cagtgcccgccaggcctttcaggctgccaaaatcattacatataaagacccagataatcccgagtacttggaattcctgaagcagttaaaacacctggcctatgagcagttcaacttcac

SEQ ID NO: 559890 - DNA, 120 bp, Artificial Sequence
  ENSG00000169418_12 (sequence is synthesized)
catggaggatggcctggtgaacaccatcccagcatccttccacgacgggctcctgctctatatccaggcagtgacggagactctggcacatgggggaactgttactgatggggagaacat

SEQ ID NO: 559891 - DNA, 120 bp, Artificial Sequence
  ENSG00000169418_13 (sequence is synthesized)
cactcagcggatgtggaaccgaagctttcaaggtgtgacaggatacctgaaaattgatagcagtggcgatcgggaaacagacttctccctctgggatatggatcccgagaatggtgcctt

SEQ ID NO: 559892 - DNA, 120 bp, Artificial Sequence
  ENSG00000169418_14 (sequence is synthesized)
cagggttgtactgaactacaatgggacttcccaagagctggtggctgtgtcggggcgcaaactgaactggcccctggggtaccctcctcctgacatccccaaatgtggctttgacaacga

SEQ ID NO: 559893 - DNA, 120 bp, Artificial Sequence
  ENSG00000169418_15 (sequence is synthesized)
agacccagcatgcaaccaagatcacctttccaccctggaggtgctggctttggtgggcagcctctccttgctcggcattctgattgtctccttcttcatatacaggaagatgcagctgga

SEQ ID NO: 559894 - DNA, 120 bp, Artificial Sequence
  ENSG00000169418_16 (sequence is synthesized)
gaaggaactggcctcggagctgtggcgggtgcgctgggaggacgttgagcccagtagccttgagaggcacctgcggagtgcaggcagccggctgaccctgagcgggagaggctccaatta

SEQ ID NO: 559895 - DNA, 120 bp, Artificial Sequence
  ENSG00000169418_17 (sequence is synthesized)
gctgacacgaaaagtcctgtttgaactgaagcatatgcgggatgtgcagaatgaacacctgaccaggtttgtgggagcctgcaccgacccccccaatatctgcatcctcacagagtactg

SEQ ID NO: 559896 - DNA, 120 bp, Artificial Sequence
  ENSG00000169418_18 (sequence is synthesized)
tccccgtgggagcctgcaggacattctggagaatgagagcatcaccctggactggatgttccggtactcactcaccaatgacatcgtcaagggcatgctgtttctacacaatggggctat

SEQ ID NO: 559897 - DNA, 120 bp, Artificial Sequence
  ENSG00000169418_19 (sequence is synthesized)
ctgttcccatgggaacctcaagtcatccaactgcgtggtagatgggcgctttgtgctcaagatcaccgactatgggctggagagcttcagggacctggacccagagcaaggacacaccgt

SEQ ID NO: 559898 - DNA, 120 bp, Artificial Sequence
  ENSG00000169418_20 (sequence is synthesized)
ttatgccaaaaagctgtggacggcccctgagctcctgcgaatggcttcaccccctgtgcggggctcccaggctggtgacgtatacagctttgggatcatccttcaggagattgccctgag

SEQ ID NO: 559899 - DNA, 120 bp, Artificial Sequence
  ENSG00000169418_21 (sequence is synthesized)
gagtggggtcttccacgtggaaggtttggacctgagccccaaagagatcatcgagcgggtgactcggggtgagcagccccccttccggccctccctggccctgcagagtcacctggagga

SEQ ID NO: 559900 - DNA, 120 bp, Artificial Sequence
  ENSG00000169418_22 (sequence is synthesized)
gttggggctgctcatgcagcggtgctgggctgaggacccacaggagaggccaccattccagcagatccgcctgacgttgcgcaaatttaacagggagaacagcagcaacatcctggacaa

SEQ ID NO: 559901 - DNA, 120 bp, Artificial Sequence
  ENSG00000169418_23 (sequence is synthesized)
cctgctgtcccgcatggagcagtacgcgaacaatctggaggaactggtggaggagcggacccaggcatacctggaggagaagcgcaaggctgaggccctgctctaccagatcctgcctca

SEQ ID NO: 559902 - DNA, 120 bp, Artificial Sequence
  ENSG00000169418_24 (sequence is synthesized)
ctcagtggctgagcagctgaagcgtggggagacggtgcaggccgaagcctttgacagtgttaccatctacttcagtgacattgtgggtttcacagcgctgtcggcggagagcacacccat

SEQ ID NO: 559903 - DNA, 120 bp, Artificial Sequence
  ENSG00000169418_25 (sequence is synthesized)
gcaggtggtgaccctgctcaatgacctgtacacttgctttgatgctgtcatagacaactttgatgtgtacaaggtggagacaattggcgatgcctacatggtggtgtcagggctccctgt

SEQ ID NO: 559904 - DNA, 120 bp, Artificial Sequence
  ENSG00000169418_26 (sequence is synthesized)
gcggaacgggcggctacacgcctgcgaggtagcccgcatggccctggcactgctggatgctgtgcgctccttccgaatccgccaccggccccaggagcagctgcgcttgcgcattggcat

SEQ ID NO: 559905 - DNA, 120 bp, Artificial Sequence
  ENSG00000169418_27 (sequence is synthesized)
ccacacaggacctgtgtgtgctggagtggtgggactgaagatgccccgttactgtctctttggggatacagtcaacacagcctcaagaatggagtctaatggggaagccctgaagatcca

SEQ ID NO: 559906 - DNA, 120 bp, Artificial Sequence
  ENSG00000169418_28 (sequence is synthesized)
cttgtcttctgagaccaaggctgtcctggaggagtttggtggtttcgagctggagcttcgaggggatgtagaaatgaagggcaaaggcaaggttcggacctactggctccttggggagag

SEQ ID NO: 559907 - DNA, 120 bp, Artificial Sequence
  ENSG00000169418_29 (sequence is synthesized)
ggggagtagcacccgaggctgacctgcctcctctcctatccctccacacctccctaccctgtgccagaagcaacagaggtgccaggcctcagcctcacccacagcagccccatcgccaaa

SEQ ID NO: 559908 - DNA, 120 bp, Artificial Sequence
  ENSG00000169418_30 (sequence is synthesized)
ggatggaagtaatttgaatagctcaggtgtgctgaccccagtgaagacaccagataggacctctgagaggggactggcatggggggatctcagagcttacaggctgagccaagcccacgg

SEQ ID NO: 559909 - DNA, 120 bp, Artificial Sequence
  ENSG00000169418_31 (sequence is synthesized)
ccatgcacagggacactcacacaggcacacgcacctgctctccacctggactcaggccgggctgggctgtggattcctgatcccctcccctccccatgctctcctccctcagccttgcta

SEQ ID NO: 559910 - DNA, 120 bp, Artificial Sequence
  ENSG00000169418_32 (sequence is synthesized)
ccctgtgacttactgggaggagaaagagtcacctgaaggggaacatgaaaagagactaggtgaagagagggcaggggagcccacatctggggctggcccacaatacctgctcccccgacc

SEQ ID NO: 559911 - DNA, 120 bp, Artificial Sequence
  ENSG00000169418_33 (sequence is synthesized)
ccctccacccagcagtagacacagtgcacaggggagaagaggggtggcgcagaagggttgggggcctgtatgccttgcttctaccatgagcagagacaattaaaatctttattccagtga

SEQ ID NO: 559912 - DNA, 120 bp, Artificial Sequence
  ENSG00000169418_34 (sequence is synthesized)
aaaatgtccatatgtctgaagcttcatacttgaccttggggtctcagaaaagaattgaactttcttccttctgttttcccctgctccccggtatcctgctatgccctcaaccctgagcgt

SEQ ID NO: 559913 - DNA, 120 bp, Artificial Sequence
  ENSG00000169418_35 (sequence is synthesized)
ctctagagacctcactgcagtctggagggggaagtgcctaggggcgggcgctcacggtaggctgtgctgctcctctcttaccacccccaccgccaccctctgcccccagggagaacagca

SEQ ID NO: 559914 - DNA, 120 bp, Artificial Sequence
  ENSG00000169418_36 (sequence is synthesized)
tacccttctcaagcagccaatgccactcccatccctaaggctctcatctgactggggaaagggcatgtgccactccccagcccatcctcttttttccctccagggcaaaggcaaggttcg

SEQ ID NO: 559915 - DNA, 120 bp, Artificial Sequence
  ENSG00000169418_37 (sequence is synthesized)
tttgtctgtttgtttctttatgcactcctggtaactcacagaacagaaaagaggttggtgatgctcactgggaattaggcaatgaagggcaggggactgcccaggggcgcttcgccacca

SEQ ID NO: 559916 - DNA, 120 bp, Artificial Sequence
  ENSG00000169418_38 (sequence is synthesized)
cgtttaaatagtaaaatctccctgtgatataggggtgttattttctcccatcctcttccaaaatcccagtgcctcttgttcccttccccacagctcccacctccatgcccttcatatgcc

SEQ ID NO: 559917 - DNA, 120 bp, Artificial Sequence
  ENSG00000169418_39 (sequence is synthesized)
caccccagccgacctctgtttgcccctacaggtgaacaccatcccagcatccttccacgacgggctcctgctctatatccaggcagtgacggagactctggcacatgggggaactgttac

SEQ ID NO: 559918 - DNA, 120 bp, Artificial Sequence
  ENSG00000169427_0 (sequence is synthesized)
gcggccatgaagaggcagaacgtgcggactctgtccctcatcgtctgcaccttcacctacctgctggtgggcgccgccgtgttcgacgccctcgagtcggaccacgagatgcgcgaggag

SEQ ID NO: 559919 - DNA, 120 bp, Artificial Sequence
  ENSG00000169427_1 (sequence is synthesized)
gagaaactcaaagccgaggagatccggatcaaggggaagtacaacatcagcagcgaggactaccggcagctggagctggtgatcctgcagtcggaaccgcaccgcgccggcgtccagtgg

SEQ ID NO: 559920 - DNA, 120 bp, Artificial Sequence
  ENSG00000169427_2 (sequence is synthesized)
aaattcgccggctccttctactttgcgatcacggtcatcaccaccataggttatgggcacgctgcacctggcaccgatgcgggcaaggccttctgcatgttctacgccgtgctgggcatc

SEQ ID NO: 559921 - DNA, 120 bp, Artificial Sequence
  ENSG00000169427_3 (sequence is synthesized)
ccgctgacactggtcatgttccagagcctgggcgagcgcatgaacaccttcgtgcgctacctgctgaagcgcattaagaagtgctgtggcatgcgcaacactgacgtgtctatggagaac

SEQ ID NO: 559922 - DNA, 120 bp, Artificial Sequence
  ENSG00000169427_4 (sequence is synthesized)
atggtgactgtgggcttcttctcctgcatggggacgctgtgcatcggggcggccgccttctcccagtgtgaggagtggagcttcttccacgcctactactactgcttcatcacgttgact

SEQ ID NO: 559923 - DNA, 120 bp, Artificial Sequence
  ENSG00000169427_5 (sequence is synthesized)
ctgcagaagaagccgctctacgtggcctttagctttatgtatatcctggtggggctgacggtcatcggggccttcctcaacctggtcgtcctcaggttcttgaccatgaacagtgaggat

SEQ ID NO: 559924 - DNA, 120 bp, Artificial Sequence
  ENSG00000169427_6 (sequence is synthesized)
gagcggcgggatgctgaagagagggcatccctcgccggaaaccgcaacagcatggtcattcacatccctgaggagccgcggcccagccggcccaggtacaaggcggacgtcccggacctg

SEQ ID NO: 559925 - DNA, 120 bp, Artificial Sequence
  ENSG00000169427_7 (sequence is synthesized)
cagtctgtgtgctcctgcacctgctaccgctcgcaggactatggcggccgctcggtggcaccgcagaactccttcagcgccaagcttgccccccactacttccactccatctcttacaag

SEQ ID NO: 559926 - DNA, 120 bp, Artificial Sequence
  ENSG00000169427_8 (sequence is synthesized)
atcgaggagatctcaccaagcacattaaaaaacagcctcttcccatcgcctattagctccatctctcctgggttacacagctttaccgaccaccagaggctgatgaaacgccggaagtcc

SEQ ID NO: 559927 - DNA, 120 bp, Artificial Sequence
  ENSG00000169427_9 (sequence is synthesized)
gtttaggggaactaactgcacattcaagagaggcgtccgtggatgctgggtctcactgccaaagccgaacacggcttcgggatttctgccttctcaagtggacctctgctgtgctgggcg

SEQ ID NO: 559928 - DNA, 120 bp, Artificial Sequence
  ENSG00000169427_10 (sequence is synthesized)
ggaggaggaggcggcggcggccgccgggcgctgcagtgggacgcgcgcggctgtgagcctgcgggacatgccccccgcgccggctccttgctggcggccatgaagaggcagaacgtgcgg

SEQ ID NO: 559929 - DNA, 120 bp, Artificial Sequence
  ENSG00000169427_11 (sequence is synthesized)
ttggtccaactcgtcttttcttatttatttattattattattgtcatcattattactttctctccttcctcctttcttggtctcttggtctcattttcccccacctttccagccagacag

SEQ ID NO: 559930 - DNA, 120 bp, Artificial Sequence
  ENSG00000169427_12 (sequence is synthesized)
agcaggccaaagggaaatacaggcccatcctcctctgaaactcacatctgagcatgaagcatggatctcctccttccttcccagcagactatgccttacatttctcaccccacccacccc

SEQ ID NO: 559931 - DNA, 120 bp, Artificial Sequence
  ENSG00000169427_13 (sequence is synthesized)
atcatctctgcagtggttttcccgggacagatgtgagaccaagaccacggagacagagctgagaggatacccaccccaaagctgcacatcacgctcagccttcaatcgcctacccttagt

SEQ ID NO: 559932 - DNA, 120 bp, Artificial Sequence
  ENSG00000169427_14 (sequence is synthesized)
ggtgtctctgacctaactcctttctcttttcctaaggactgagtgactgtgtgtgtgttgtgtgtgtgcttctgtgtgcacgtgtgtcgtgacaaaacgggaagtattaggtattccgtt

SEQ ID NO: 559933 - DNA, 120 bp, Artificial Sequence
  ENSG00000169427_15 (sequence is synthesized)
ttctttcccatcacacatcatagcctgcttttggctgcttccaaacaaaacgggaagacaaaacccacaaggtttttgatttatcgtattttgccaaatcaagcatgtttcattaagcag

SEQ ID NO: 559934 - DNA, 120 bp, Artificial Sequence
  ENSG00000169427_16 (sequence is synthesized)
ttcttatccctgatgtgtcatggccatattttctaaatgctaggttctaaattatattaatgttttttaggggcgggtgggcaagacgacccaaaccatcttagcttgccagttcagaca

SEQ ID NO: 559935 - DNA, 120 bp, Artificial Sequence
  ENSG00000169427_17 (sequence is synthesized)
ttttttaaaaagcatgcactttgttaaactggtatgcgctatcaacaaaaaaactagaaatggaataatccaaagccaataacattaacttataaaagacatttttaattttgtcacctc

SEQ ID NO: 559936 - DNA, 120 bp, Artificial Sequence
  ENSG00000169427_18 (sequence is synthesized)
cagttccaacaatttaccatgcaactggaattgtcaggggaaacgggaaaattgttggaaccccagagtatctatttccctcttattgatgattttgtgcagcacctaccctgcataaat

SEQ ID NO: 559937 - DNA, 120 bp, Artificial Sequence
  ENSG00000169427_19 (sequence is synthesized)
aagaattatagtgttggaatgcttgggtgagaatgggtattagtatgtggctgtggttccttttcctcatgaaaattgacagggcattcctcattaaaaatacatatctatttcaagaaa

SEQ ID NO: 559938 - DNA, 80 bp, Artificial Sequence
  ENSG00000169427_20 (sequence is synthesized)
acacacacattcgggctcccaacggcgcgcacgcacgtagcgcccggggcagaccagcgcggcggccgcctcccgggacg

SEQ ID NO: 559939 - DNA, 80 bp, Artificial Sequence
  ENSG00000169427_21 (sequence is synthesized)
ccgaagccgctccatcgcggtccctgccgtcctggggccgcgccccgctcccgcgccttgggggttgagccgagcaaact

SEQ ID NO: 559940 - DNA, 120 bp, Artificial Sequence
  ENSG00000169427_22 (sequence is synthesized)
cgcgcccgggtgggcgctgggcgcgcggacctttggggagcgggctgcccctcccgctgcacctgctcggccccctccccgcttgcaggggactccagagacaccgccacttcgcaaact

SEQ ID NO: 559941 - DNA, 120 bp, Artificial Sequence
  ENSG00000169427_23 (sequence is synthesized)
aacttttcctccccaccaccgagagggggcgaggaggggtaaaaggggaagcaggttccgctgggcgcgcggacctgcaggctccttgctgggcaccgccacccgcgagctggacccaca

SEQ ID NO: 559942 - DNA, 120 bp, Artificial Sequence
  ENSG00000169427_24 (sequence is synthesized)
gctccttgctgggcaccgccacccgcgagctggacccacaggggtaccgggccccgcggccgccctccggccgctttctggctccggttcccgtccctgcgtttcccgcgggagcggggg

SEQ ID NO: 559943 - DNA, 120 bp, Artificial Sequence
  ENSG00000169427_25 (sequence is synthesized)
ccgccctgcatggccctgcgcagtggggcgggctgcttcggccgggtctggcgcagggtgtcggggttcccggacgcctggccccggcgctcgagcagcctcctgtgcctgtccgccttc

SEQ ID NO: 559944 - DNA, 80 bp, Artificial Sequence
  ENSG00000169427_26 (sequence is synthesized)
gtgcctgtccgccttctcggctgagcccgggcccgcgccgcccctgccccgccagccgcctcgcggtggcggtggctgtg

SEQ ID NO: 559945 - DNA, 120 bp, Artificial Sequence
  ENSG00000169427_27 (sequence is synthesized)
gacggggacagctctctccttctgtaagtgaggcagcctcatccttccctggatcctcagcatctcttaaccagcagtggcagaggttgaattagaatggcaccagcttcggataaaaat

SEQ ID NO: 559946 - DNA, 120 bp, Artificial Sequence
  ENSG00000169427_28 (sequence is synthesized)
ccagatctcgcttttcaaaatgtgtctagagctggtggctgtaaggaaccagtcaagcctcagctgtgactctaatcctgccaagtccacctgagagccgactcattcatccaaagagag

SEQ ID NO: 559947 - DNA, 120 bp, Artificial Sequence
  ENSG00000169427_29 (sequence is synthesized)
aacggtttggatggagctcaaggtgcctggctcgctggcatagcccagacaacctcttaaaggccgggccacagagctagaaggtctgtcactactcagttggggaaatcgtctgagaag

SEQ ID NO: 559948 - DNA, 120 bp, Artificial Sequence
  ENSG00000169427_30 (sequence is synthesized)
ttcaagtccactgcctcgcaactcaaatgagtcagcctcaccaaccaagaatcgcgttcataaacagactcagagcctgcgtgccgtggggtttccccgtctgcaactctctcacctggc

SEQ ID NO: 559949 - DNA, 120 bp, Artificial Sequence
  ENSG00000169427_31 (sequence is synthesized)
gaccaggcagagccatccccagatgaagggggctgaacgctgcaggtcaccagggcacccagcgatctggcagcttgtgttttccatatgaggacacaaacccatggaggtcacagcagt

SEQ ID NO: 559950 - DNA, 120 bp, Artificial Sequence
  ENSG00000169427_32 (sequence is synthesized)
ttagaggcaaggagctatgtcttggcctactgggaacttgccaatctcaggggaaaattttgtctgagtagtgtagaaattcctccctactctcaataggggatgaccccaaagggaaga

SEQ ID NO: 559951 - DNA, 120 bp, Artificial Sequence
  ENSG00000169427_33 (sequence is synthesized)
cctgctatcctcttgggggaggtggtggggtagttcaggctgtagaatatggcacagtggaggctcttacagtaacaggcttaaaggacagtttgacctccagattcactgaggggactt

SEQ ID NO: 559952 - DNA, 120 bp, Artificial Sequence
  ENSG00000169427_34 (sequence is synthesized)
cctcattaccatccctgccattttctaaaaatcacccattcatccatcctcccattcctcttttgtaaatgaagttcatggctcttgcatggaaatggaccttggctatactcagaagga

SEQ ID NO: 559953 - DNA, 120 bp, Artificial Sequence
  ENSG00000169427_35 (sequence is synthesized)
acacggtttactggcctgtctcaaggccccaacgagatctcccagaaaggaggctttgctccctagaaagagtagacctacaggatttcttaaaggagacaacacctgaatgccaccagt

SEQ ID NO: 559954 - DNA, 120 bp, Artificial Sequence
  ENSG00000169427_36 (sequence is synthesized)
cccaagcatttgggccaatgggctgaaacactggagcattcaagactcctctgaaaaggctgtgcatgtactttaatgctacatcccatgttgaaatttccccttcgtccaggacacagg

SEQ ID NO: 559955 - DNA, 120 bp, Artificial Sequence
  ENSG00000169427_37 (sequence is synthesized)
cccagagaaacgctcgatgtgagggtccccgcaagcccgtcgggctctttcggcacctggcccccccaaagctcctcaacgaggagtagagactgccaagcccttccactcattcatcat

SEQ ID NO: 559956 - DNA, 120 bp, Artificial Sequence
  ENSG00000169427_38 (sequence is synthesized)
cataaaaatgtaacttgctatggcagcctcttggccattaagggctatactttgtgacctctgtccttgagatctttgctctgacaagttctatagccttctcagtgctgctatcgtgac

SEQ ID NO: 559957 - DNA, 120 bp, Artificial Sequence
  ENSG00000169427_39 (sequence is synthesized)
gcagtgtccctgctgtggctaagtaacctttcgttttgatcaagatttgtccacgcagactcctacctctgcgcctttgcccgtgccgttcccactacctggaaggtctccccgttgctc

SEQ ID NO: 559958 - DNA, 120 bp, Artificial Sequence
  ENSG00000169427_40 (sequence is synthesized)
tccagctttgaggtggagacagagcatctcacacttccttttggtgtctcctgacccttttgctccctgctggacttggcgatgtcctcttctgggctcccctagtccttgttttggttg

SEQ ID NO: 559959 - DNA, 120 bp, Artificial Sequence
  ENSG00000169427_41 (sequence is synthesized)
tgagcgaccgcaccagggagcaaaccttctatggccccggccacaggagcagcaagcactgggcagtgccccagacggaaggaccatcgcgagaataaaggcactgagatgtctggcatc

SEQ ID NO: 559960 - DNA, 120 bp, Artificial Sequence
  ENSG00000169427_42 (sequence is synthesized)
ttgcccaaatggccacttatcaccgtgattgaggcacgtcttaacttgctgaagtggaaacagggtaactcaatgcacgcctctgcaccatccctggaaaccaatccagatctatgagaa

SEQ ID NO: 559961 - DNA, 120 bp, Artificial Sequence
  ENSG00000169427_43 (sequence is synthesized)
gaaaactggtcatcatagcactggtgattcaacggcacctgcctggcagggtggagtgtgccccatacaacagggctggaagctgccacgccaggtatttctcataaggccggtacaggg

SEQ ID NO: 559962 - DNA, 120 bp, Artificial Sequence
  ENSG00000169427_44 (sequence is synthesized)
atggcaccagactatgggagcatacttgtgatgtcactctgaagaagttgggccccgtgatgggaatgtcatcaggaaactgggtccacactgttttcttgtggcaacacttctggtgga

SEQ ID NO: 559963 - DNA, 120 bp, Artificial Sequence
  ENSG00000169427_45 (sequence is synthesized)
ggctgcgaggggatggggacatgcaccatgagtgactcaggaacccccagcctctgtggcctggctcctgcccacccctagctctggggccttgagagaggcaagcacacgctcttctcg

SEQ ID NO: 559964 - DNA, 120 bp, Artificial Sequence
  ENSG00000169427_46 (sequence is synthesized)
cccggcggggactggggagggtcagtgctccctggggcggggactgggtctgtttccaggctcagtgcctctgagtcatacagatgccaggtggtcctgctgcttaccctcgctgaacct

SEQ ID NO: 559965 - DNA, 120 bp, Artificial Sequence
  ENSG00000169427_47 (sequence is synthesized)
caggcttctcgtgtaaacagggcgcttttgaggaattattattaacatctccctgtgagtcaaagcacctactgagataatgtatgtgatgcttgtaataaatgcagctacatgccaggc

SEQ ID NO: 559966 - DNA, 120 bp, Artificial Sequence
  ENSG00000169427_48 (sequence is synthesized)
ggtgtctcagtctggagcccaggagagtccaaggagctgacttcacaccaccatgtcctaactcagccctcggaggagggcgcctgcctttttccccactgggggcatgcagcaggccct

SEQ ID NO: 559967 - DNA, 120 bp, Artificial Sequence
  ENSG00000169427_49 (sequence is synthesized)
cattccccttgctttgtgtgtcgtcgtcttcacgctcgcagcaggcctcgggggaaggccctgtgtggtgttggttgtctaggatgggagaccaggacacaaggtactgaggctgcacag

SEQ ID NO: 559968 - DNA, 120 bp, Artificial Sequence
  ENSG00000169427_50 (sequence is synthesized)
gttcagcagctctgctctctgaccaggcagagccatccccagatgaagggggctgaacgctgcaggtcaccagggcacccagcgatctggcagcttgtgttttccatgttatgggcacgc

SEQ ID NO: 559969 - DNA, 120 bp, Artificial Sequence
  ENSG00000169429_0 (sequence is synthesized)
acaaactttcagagacagcagagcacacaagcttctaggacaagagccaggaagaaaccaccggaaggaaccatctcactgtgtgtaaacatgacttccaagctggccgtggctctcttg

SEQ ID NO: 559970 - DNA, 120 bp, Artificial Sequence
  ENSG00000169429_1 (sequence is synthesized)
gcagccttcctgatttctgcagctctgtgtgaaggtgcagttttgccaaggagtgctaaagaacttagatgtcagtgcataaagacatactccaaacctttccaccccaaatttatcaaa

SEQ ID NO: 559971 - DNA, 120 bp, Artificial Sequence
  ENSG00000169429_2 (sequence is synthesized)
gaactgagagtgattgagagtggaccacactgcgccaacacagaaattattgtaaagctttctgatggaagagagctctgtctggaccccaaggaaaactgggtgcagagggttgtggag

SEQ ID NO: 559972 - DNA, 120 bp, Artificial Sequence
  ENSG00000169429_3 (sequence is synthesized)
aagtttttgaagagggctgagaattcataaaaaaattcattctctgtggtatccaagaatcagtgaagatgccagtgaaacttcaagcaaatctacttcaacacttcatgtattgtgtgg

SEQ ID NO: 559973 - DNA, 120 bp, Artificial Sequence
  ENSG00000169429_4 (sequence is synthesized)
gtctgttgtagggttgccagatgcaatacaagattcctggttaaatttgaatttcagtaaacaatgaatagtttttcattgtaccatgaaatatccagaacatacttatatgtaaagtat

SEQ ID NO: 559974 - DNA, 120 bp, Artificial Sequence
  ENSG00000169429_5 (sequence is synthesized)
tatttatttgaatctacaaaaaacaacaaataatttttaaatataaggattttcctagatattgcacgggagaatatacaaatagcaaaattgaggccaagggccaagagaatatccgaa

SEQ ID NO: 559975 - DNA, 120 bp, Artificial Sequence
  ENSG00000169429_6 (sequence is synthesized)
cataaagtcaaatttagctggaaatcctggatttttttctgttaaatctggcaaccctagtctgctagccaggatccacaagtccttgttccactgtgccttggtttctcctttatttct

SEQ ID NO: 559976 - DNA, 120 bp, Artificial Sequence
  ENSG00000169429_7 (sequence is synthesized)
aagtggaaaaagtattagccaccatcttacctcacagtgatgttgtgaggacatgtggaagcactttaagttttttcatcataacataaattattttcaagtgtaacttattaacctatt

SEQ ID NO: 559977 - DNA, 120 bp, Artificial Sequence
  ENSG00000169429_8 (sequence is synthesized)
attttcaagtgtaacttattaacctatttattatttatgtatttatttaagcatcaaatatttgtgcaagaatttggaaaaatagaagatgaatcattgattgaatagttataaagatgt

SEQ ID NO: 559978 - DNA, 120 bp, Artificial Sequence
  ENSG00000169429_9 (sequence is synthesized)
taaatgatgttttattagataaatttcaatcagggtttttagattaaacaaacaaacaattgggtacccagttaaattttcatttcagataaacaacaaataattttttagtataagtac

SEQ ID NO: 559979 - DNA, 120 bp, Artificial Sequence
  ENSG00000169429_10 (sequence is synthesized)
attattgtttatctgaaattttaattgaactaacaatcctagtttgatactcccagtcttgtcattgccagctgtgttggtagtgctgtgttgaattacggaataatgagttagaactat

SEQ ID NO: 559980 - DNA, 120 bp, Artificial Sequence
  ENSG00000169429_11 (sequence is synthesized)
taaaacagccaaaactccacagtcaatattagtaatttcttgctggttgaaacttgtttattatgtacaaatagattcttataatattatttaaatgactgcatttttaaatacaaggct

SEQ ID NO: 559981 - DNA, 120 bp, Artificial Sequence
  ENSG00000169429_12 (sequence is synthesized)
ggctttatatttttaactttaagatgtttttatgtgctctccaaattttttttactgtttctgattgtatggaaatataaaagtaaatatgaaacatttaaaatataatttgttgtcaaa

SEQ ID NO: 559982 - DNA, 120 bp, Artificial Sequence
  ENSG00000169429_13 (sequence is synthesized)
gtcagcctataaatttctttctgttgctaaaaatcgtcattaggtatctgcctttttggttaaaaaaaaaaggaatagcatcaatagtgagtttgttgtactcatgaccagaaagaccat

SEQ ID NO: 559983 - DNA, 120 bp, Artificial Sequence
  ENSG00000169429_14 (sequence is synthesized)
acatagtttgcccaggaaattctgggtttaagcttgtgtcctatactcttagtaaagttctttgtcactcccagtagtgtcctattttagatgataatttctttgatctccctatttata

SEQ ID NO: 559984 - DNA, 120 bp, Artificial Sequence
  ENSG00000169429_15 (sequence is synthesized)
aggaaagttccaggtgttaggattacagtagtaaatgaaacaaaacaaaataaaaatatttgtctacatgacatttaaatatggtagcttccacaactactataaatgttattttggact

SEQ ID NO: 559985 - DNA, 120 bp, Artificial Sequence
  ENSG00000169429_16 (sequence is synthesized)
tagactttatgcctgacttaaggaatcatgatttgaatgcaaaaactaaatattaatctgaaccatttctttcttatttcagtgtaaagctttctgatggaagagagctctgtctggacc

SEQ ID NO: 559986 - DNA, 120 bp, Artificial Sequence
  ENSG00000169432_0 (sequence is synthesized)
gggaggcggggctgctacctccacgggcgcgccctggcaggaggggcgcagtctgcttgcaggcggtcgccagcgctccagcggcggctgtcggctttccaattccgccagctcggctga

SEQ ID NO: 559987 - DNA, 120 bp, Artificial Sequence
  ENSG00000169432_1 (sequence is synthesized)
ggctgggctagcctgggtgccagtggctgctagcggcaggcgtcccctgagcaacaggagcccagagaaaaagaagcagccctgagagagcgccggggaaggagaggcccgcgccctctc

SEQ ID NO: 559988 - DNA, 120 bp, Artificial Sequence
  ENSG00000169432_2 (sequence is synthesized)
ctggagccagattctgcaggtgcactgggtggggatgatcggcgggctaggttgcaagcctcttatgtgaggagctgaagaggaattaaaatatacaggatgaaaagatggcaatgttgc

SEQ ID NO: 559989 - DNA, 120 bp, Artificial Sequence
  ENSG00000169432_3 (sequence is synthesized)
ctcccccaggacctcagagctttgtccatttcacaaaacagtctcttgccctcattgaacaacgcattgctgaaagaaaatcaaaggaacccaaagaagaaaagaaagatgatgatgaag

SEQ ID NO: 559990 - DNA, 120 bp, Artificial Sequence
  ENSG00000169432_4 (sequence is synthesized)
aagccccaaagccaagcagtgacttggaagctggcaaacagctgcccttcatctatggggacattcctcccggcatggtgtcagagcccctggaggacttggacccctactatgcagaca

SEQ ID NO: 559991 - DNA, 120 bp, Artificial Sequence
  ENSG00000169432_5 (sequence is synthesized)
aaaagactttcatagtattgaacaaagggaaaacaatcttccgtttcaatgccacacctgctttatatatgctttctcctttcagtcctctaagaagaatatctattaagattttagtac

SEQ ID NO: 559992 - DNA, 120 bp, Artificial Sequence
  ENSG00000169432_6 (sequence is synthesized)
actccttattcagcatgctcatcatgtgcactattctgacaaactgcatatttatgaccatgaataacccaccggactggaccaaaaatgtcgagtacacttttactggaatatatactt

SEQ ID NO: 559993 - DNA, 120 bp, Artificial Sequence
  ENSG00000169432_7 (sequence is synthesized)
ttgaatcacttgtaaaaatccttgcaagaggcttctgtgtaggagaattcacttttcttcgtgacccgtggaactggctggattttgtcgtcattgtttttgcgtatttaacagaatttg

SEQ ID NO: 559994 - DNA, 120 bp, Artificial Sequence
  ENSG00000169432_8 (sequence is synthesized)
taaacctaggcaatgtttcagctcttcgaactttcagagtattgagagctttgaaaactatttctgtaatcccaggcctgaagacaattgtaggggctttgatccagtcagtgaagaagc

SEQ ID NO: 559995 - DNA, 120 bp, Artificial Sequence
  ENSG00000169432_9 (sequence is synthesized)
tttctgatgtcatgatcctgactgtgttctgtctgagtgtgtttgcactaattggactacagctgttcatgggaaacctgaagcataaatgttttcgaaattcacttgaaaataatgaaa

SEQ ID NO: 559996 - DNA, 120 bp, Artificial Sequence
  ENSG00000169432_10 (sequence is synthesized)
cattagaaagcataatgaataccctagagagtgaagaagactttagaaaatatttttattacttggaaggatccaaagatgctctcctttgtggtttcagcacagattcaggtcagtgtc

SEQ ID NO: 559997 - DNA, 120 bp, Artificial Sequence
  ENSG00000169432_11 (sequence is synthesized)
cagaggggtacacctgtgtgaaaattggcagaaaccctgattatggctacacgagctttgacactttcagctgggccttcttagccttgtttaggctaatgacccaagattactgggaaa

SEQ ID NO: 559998 - DNA, 120 bp, Artificial Sequence
  ENSG00000169432_12 (sequence is synthesized)
acctttaccaacagacgctgcgtgctgctggcaaaacctacatgatcttctttgtcgtagtgattttcctgggctccttttatctaataaacttgatcctggctgtggttgccatggcat

SEQ ID NO: 559999 - DNA, 120 bp, Artificial Sequence
  ENSG00000169432_13 (sequence is synthesized)
atgaagaacagaaccaggcaaacattgaagaagctaaacagaaagaattagaatttcaacagatgttagaccgtcttaaaaaagagcaagaagaagctgaggcaattgcagcggcagcgg

SEQ ID NO: 560000 - DNA, 120 bp, Artificial Sequence
  ENSG00000169432_14 (sequence is synthesized)
ctgaatatacaagtattaggagaagcagaattatgggcctctcagagagttcttctgaaacatccaaactgagctctaaaagtgctaaagaaagaagaaacagaagaaagaaaaagaatc

SEQ ID NO: 560001 - DNA, 120 bp, Artificial Sequence
  ENSG00000169432_15 (sequence is synthesized)
aaaagaagctctccagtggagaggaaaagggagatgctgagaaattgtcgaaatcagaatcagaggacagcatcagaagaaaaagtttccaccttggtgtcgaagggcataggcgagcac

SEQ ID NO: 560002 - DNA, 120 bp, Artificial Sequence
  ENSG00000169432_16 (sequence is synthesized)
atgaaaagaggttgtctacccccaatcagtcaccactcagcattcgtggctccttgttttctgcaaggcgaagcagcagaacaagtctttttagtttcaaaggcagaggaagagatatag

SEQ ID NO: 560003 - DNA, 120 bp, Artificial Sequence
  ENSG00000169432_17 (sequence is synthesized)
gatctgagactgaatttgccgatgatgagcacagcatttttggagacaatgagagcagaaggggctcactgtttgtgccccacagaccccaggagcgacgcagcagtaacatcagccaag

SEQ ID NO: 560004 - DNA, 120 bp, Artificial Sequence
  ENSG00000169432_18 (sequence is synthesized)
ccagtaggtccccaccaatgctgccggtgaacgggaaaatgcacagtgctgtggactgcaacggtgtggtctccctggttgatggacgctcagccctcatgctccccaatggacagcttc

SEQ ID NO: 560005 - DNA, 120 bp, Artificial Sequence
  ENSG00000169432_19 (sequence is synthesized)
tgccagagggcacgaccaatcaaatacacaagaaaaggcgttgtagttcctatctcctttcagaggatatgctgaatgatcccaacctcagacagagagcaatgagtagagcaagcatat

SEQ ID NO: 560006 - DNA, 120 bp, Artificial Sequence
  ENSG00000169432_20 (sequence is synthesized)
taacaaacactgtggaagaacttgaagagtccagacaaaaatgtccaccttggtggtacagatttgcacacaaattcttgatctggaattgctctccatattggataaaattcaaaaagt

SEQ ID NO: 560007 - DNA, 120 bp, Artificial Sequence
  ENSG00000169432_21 (sequence is synthesized)
gtatctattttattgtaatggatccttttgtagatcttgcaattaccatttgcatagttttaaacacattatttatggctatggaacaccacccaatgactgaggaattcaaaaatgtac

SEQ ID NO: 560008 - DNA, 120 bp, Artificial Sequence
  ENSG00000169432_22 (sequence is synthesized)
ttgctataggaaatttggtctttactggaatctttgcagctgaaatggtattaaaactgattgccatggatccatatgagtatttccaagtaggctggaatatttttgacagccttattg

SEQ ID NO: 560009 - DNA, 120 bp, Artificial Sequence
  ENSG00000169432_23 (sequence is synthesized)
tgactttaagtttagtggagctctttctagcagatgtggaaggattgtcagttctgcgatcattcagactgctccgagtcttcaagttggcaaaatcctggccaacattgaacatgctga

SEQ ID NO: 560010 - DNA, 120 bp, Artificial Sequence
  ENSG00000169432_24 (sequence is synthesized)
ttaagatcattggtaactcagtaggggctctaggtaacctcaccttagtgttggccatcatcgtcttcatttttgctgtggtcggcatgcagctctttggtaagagctacaaagaatgtg

SEQ ID NO: 560011 - DNA, 120 bp, Artificial Sequence
  ENSG00000169432_25 (sequence is synthesized)
tctgcaagatcaatgatgactgtacgctcccacggtggcacatgaacgacttcttccactccttcctgattgtgttccgcgtgctgtgtggagagtggatagagaccatgtgggactgta

SEQ ID NO: 560012 - DNA, 120 bp, Artificial Sequence
  ENSG00000169432_26 (sequence is synthesized)
tggaggtcgctggtcaagctatgtgccttattgtttacatgatggtcatggtcattggaaacctggtggtcctaaacctatttctggccttattattgagctcatttagttcagacaatc

SEQ ID NO: 560013 - DNA, 120 bp, Artificial Sequence
  ENSG00000169432_27 (sequence is synthesized)
ttacagcaattgaagaagaccctgatgcaaacaacctccagattgcagtgactagaattaaaaagggaataaattatgtgaaacaaaccttacgtgaatttattctaaaagcattttcca

SEQ ID NO: 560014 - DNA, 120 bp, Artificial Sequence
  ENSG00000169432_28 (sequence is synthesized)
aaaagccaaagatttccagggagataagacaagcagaagatctgaatactaagaaggaaaactatatttctaaccatacacttgctgaaatgagcaaaggtcacaatttcctcaaggaaa

SEQ ID NO: 560015 - DNA, 120 bp, Artificial Sequence
  ENSG00000169432_29 (sequence is synthesized)
aagataaaatcagtggttttggaagcagcgtggacaaacacttgatggaagacagtgatggtcaatcatttattcacaatcccagcctcacagtgacagtgccaattgcacctggggaat

SEQ ID NO: 560016 - DNA, 120 bp, Artificial Sequence
  ENSG00000169432_30 (sequence is synthesized)
ccgatttggaaaatatgaatgctgaggaacttagcagtgattcggatagtgaatacagcaaagtgagattaaaccggtcaagctcctcagagtgcagcacagttgataaccctttgcctg

SEQ ID NO: 560017 - DNA, 120 bp, Artificial Sequence
  ENSG00000169432_31 (sequence is synthesized)
gagaaggagaagaagcagaggctgaacctatgaattccgatgagccagaggcctgtttcacagatggttgtgtatggaggttctcatgctgccaagttaacatagagtcagggaaaggaa

SEQ ID NO: 560018 - DNA, 120 bp, Artificial Sequence
  ENSG00000169432_32 (sequence is synthesized)
aaatctggtggaacatcaggaaaacctgctacaagattgttgaacacagttggtttgaaagcttcattgtcctcatgatcctgctcagcagtggtgccctggcttttgaagatatttata

SEQ ID NO: 560019 - DNA, 120 bp, Artificial Sequence
  ENSG00000169432_33 (sequence is synthesized)
ttgaaaggaaaaagaccattaagattatcctggagtatgcagacaagatcttcacttacatcttcattctggaaatgcttctaaaatggatagcatatggttataaaacatatttcacca

SEQ ID NO: 560020 - DNA, 120 bp, Artificial Sequence
  ENSG00000169432_34 (sequence is synthesized)
atgcctggtgttggctggatttcctaattgttgatgtttctttggttactttagtggcaaacactcttggctactcagatcttggccccattaaatcccttcggacactgagagctttaa

SEQ ID NO: 560021 - DNA, 120 bp, Artificial Sequence
  ENSG00000169432_35 (sequence is synthesized)
gacctctaagagccttatctagatttgaaggaatgagggtcgttgtgaatgcactcataggagcaattccttccatcatgaatgtgctacttgtgtgtcttatattctggctgatattca

SEQ ID NO: 560022 - DNA, 120 bp, Artificial Sequence
  ENSG00000169432_36 (sequence is synthesized)
gcatcatgggagtaaatttgtttgctggcaagttctatgagtgtattaacaccacagatgggtcacggtttcctgcaagtcaagttccaaatcgttccgaatgttttgcccttatgaatg

SEQ ID NO: 560023 - DNA, 120 bp, Artificial Sequence
  ENSG00000169432_37 (sequence is synthesized)
ttagtcaaaatgtgcgatggaaaaacctgaaagtgaactttgataatgtcggacttggttacctatctctgcttcaagttgcaacttttaagggatggacgattattatgtatgcagcag

SEQ ID NO: 560024 - DNA, 120 bp, Artificial Sequence
  ENSG00000169432_38 (sequence is synthesized)
tggattctgttaatgtagacaagcagcccaaatatgaatatagcctctacatgtatatttattttgtcgtctttatcatctttgggtcattcttcactttgaacttgttcattggtgtca

SEQ ID NO: 560025 - DNA, 120 bp, Artificial Sequence
  ENSG00000169432_39 (sequence is synthesized)
tcatagataatttcaaccaacagaaaaagaagcttggaggtcaagacatctttatgacagaagaacagaagaaatactataatgcaatgaaaaagctggggtccaagaagccacaaaagc

SEQ ID NO: 560026 - DNA, 120 bp, Artificial Sequence
  ENSG00000169432_40 (sequence is synthesized)
tgacaaatcaagcctttgatattagtatcatggttcttatctgtctcaacatggtaaccatgatggtagaaaaggagggtcaaagtcaacatatgactgaagttttatattggataaatg

SEQ ID NO: 560027 - DNA, 120 bp, Artificial Sequence
  ENSG00000169432_41 (sequence is synthesized)
tggtttttataatccttttcactggagaatgtgtgctaaaactgatctccctcagacactactacttcactgtaggatggaatatttttgattttgtggttgtgattatctccattgtag

SEQ ID NO: 560028 - DNA, 120 bp, Artificial Sequence
  ENSG00000169432_42 (sequence is synthesized)
gtatgtttctagctgatttgattgaaacgtattttgtgtcccctaccctgttccgagtgatccgtcttgccaggattggccgaatcctacgtctagtcaaaggagcaaaggggatccgca

SEQ ID NO: 560029 - DNA, 120 bp, Artificial Sequence
  ENSG00000169432_43 (sequence is synthesized)
cgctgctctttgctttgatgatgtcccttcctgcgttgtttaacatcggcctcctgctcttcctggtcatgttcatctacgccatctttggaatgtccaactttgcctatgttaaaaagg

SEQ ID NO: 560030 - DNA, 120 bp, Artificial Sequence
  ENSG00000169432_44 (sequence is synthesized)
aagatggaattaatgacatgttcaattttgagacctttggcaacagtatgatttgcctgttccaaattacaacctctgctggctgggatggattgctagcacctattcttaacagtaagc

SEQ ID NO: 560031 - DNA, 120 bp, Artificial Sequence
  ENSG00000169432_45 (sequence is synthesized)
cacccgactgtgacccaaaaaaagttcatcctggaagttcagttgaaggagactgtggtaacccatctgttggaatattctactttgttagttatatcatcatatccttcctggttgtgg

SEQ ID NO: 560032 - DNA, 120 bp, Artificial Sequence
  ENSG00000169432_46 (sequence is synthesized)
tgaacatgtacattgcagtcatactggagaattttagtgttgccactgaagaaagtactgaacctctgagtgaggatgactttgagatgttctatgaggtttgggagaagtttgatcccg

SEQ ID NO: 560033 - DNA, 120 bp, Artificial Sequence
  ENSG00000169432_47 (sequence is synthesized)
atgcgacccagtttatagagttctctaaactctctgattttgcagctgccctggatcctcctcttctcatagcaaaacccaacaaagtccagctcattgccatggatctgcccatggtta

SEQ ID NO: 560034 - DNA, 120 bp, Artificial Sequence
  ENSG00000169432_48 (sequence is synthesized)
gtggtgaccggatccattgtcttgacatcttatttgcttttacaaagcgtgttttgggtgagagtggggagatggattctcttcgttcacagatggaagaaaggttcatgtctgcaaatc

SEQ ID NO: 560035 - DNA, 120 bp, Artificial Sequence
  ENSG00000169432_49 (sequence is synthesized)
cttccaaagtgtcctatgaacccatcacaaccacactaaaacggaaacaagaggatgtgtctgctactgtcattcagcgtgcttatagacgttaccgcttaaggcaaaatgtcaaaaata

SEQ ID NO: 560036 - DNA, 120 bp, Artificial Sequence
  ENSG00000169432_50 (sequence is synthesized)
tatcaagtatatacataaaagatggagacagagatgatgatttactcaataaaaaagatatggcttttgataatgttaatgagaactcaagtccagaaaaaacagatgccacttcatcca

SEQ ID NO: 560037 - DNA, 120 bp, Artificial Sequence
  ENSG00000169432_51 (sequence is synthesized)
ccacctctccaccttcatatgatagtgtaacaaagccagacaaagagaaatatgaacaagacagaacagaaaaggaagacaaagggaaagacagcaaggaaagcaaaaaatagagcttca

SEQ ID NO: 560038 - DNA, 120 bp, Artificial Sequence
  ENSG00000169432_52 (sequence is synthesized)
tttttgatatattgtttacagcctgtgaaagtgatttatttgtgttaataaaactcttttgaggaagtctatgccaaaatcctttttatcaaaatattctcgaaggcagtgcagtcacta

SEQ ID NO: 560039 - DNA, 120 bp, Artificial Sequence
  ENSG00000169432_53 (sequence is synthesized)
actctgatttcctaagaaaggtgggcagcattagcagatggttatttttgcactgatgattctttaagaatcgtaagagaactctgtaggaattattgattatagcatacaaaagtgatt

SEQ ID NO: 560040 - DNA, 120 bp, Artificial Sequence
  ENSG00000169432_54 (sequence is synthesized)
cagttttttggtttttaataaatcagaagaccatgtagaaaacttttacatctgccttgtcatcttttcacaggattgtaattagtcttgtttcccatgtaaataaacaacacacgcata

SEQ ID NO: 560041 - DNA, 120 bp, Artificial Sequence
  ENSG00000169432_55 (sequence is synthesized)
cagaaaaatctattatttatctattatttggaaatcaacaaaagtatttgccttggctttgcaatgaaatgcttgatagaagtaatggacattagttatgaatgtttagttaaaatgcat

SEQ ID NO: 560042 - DNA, 120 bp, Artificial Sequence
  ENSG00000169432_56 (sequence is synthesized)
tattagggagcttgactttttatcaatgtacagaggttattctatattttgaggtgcttaaatttattctacattgcatcagaaccaatttatatgtgcctataaaatgccatgggatta

SEQ ID NO: 560043 - DNA, 120 bp, Artificial Sequence
  ENSG00000169432_57 (sequence is synthesized)
aaaatatatgtaggctattcatttctacaaatgtttttcattcatcttgactcacatgccaacaaggataagacttacctttagagtattgtgtttcatagcctttcttctttcatatcc

SEQ ID NO: 560044 - DNA, 120 bp, Artificial Sequence
  ENSG00000169432_58 (sequence is synthesized)
ctttttgttcatagaataaccacagaacttgaaaaattattctaagtacatattacactcctcaaaaaaaacaaagataactgagaaaaaagttattgacagaagttctatttgctatta

SEQ ID NO: 560045 - DNA, 120 bp, Artificial Sequence
  ENSG00000169432_59 (sequence is synthesized)
tttacatagcctaacatttgactgtgctgcccaaaatactgataatagtctcttaaactcttttgtcaaattttcctgctttcttatgcagtattgtttagtcatcctttcgctgtaagc

SEQ ID NO: 560046 - DNA, 120 bp, Artificial Sequence
  ENSG00000169432_60 (sequence is synthesized)
aaagttgatgaaatccttcctgatatgcagttagttgtttgaccacggtacatacttgagcagataataacttgggcacagtatttattgcatcacttgtatacaatcccgtgtttggca

SEQ ID NO: 560047 - DNA, 120 bp, Artificial Sequence
  ENSG00000169432_61 (sequence is synthesized)
agctttcaaatcatgtaatatgacagactttacacagatatgtgtttagtatgaataaaaaagcattgaaatagggattcttgccaacttgctctcttgccaccaacttactttcctaaa

SEQ ID NO: 560048 - DNA, 120 bp, Artificial Sequence
  ENSG00000169432_62 (sequence is synthesized)
ttatggaagtaatcttttttggatatacttcaatgtatacaatgaggaagatgtcaccttctccttaaaattctatgatgtgaaatatattttgcctcaatcaacacagtaccatgggct

SEQ ID NO: 560049 - DNA, 120 bp, Artificial Sequence
  ENSG00000169432_63 (sequence is synthesized)
tctaatttatcaagcacatattcattttgcattagctgtagacatctagttttttgaaaacacctattaatagtaatttgaaaagaaataaccataatgctttttttcgtgagtttattt

SEQ ID NO: 560050 - DNA, 120 bp, Artificial Sequence
  ENSG00000169432_64 (sequence is synthesized)
caggaatatgagatctttcttctataaagttattcatgcacaggcaaaaattgagctacacaggtagaatgtagttttacttagaagatttttgtgggaggttttgaagcaaatatataa

SEQ ID NO: 560051 - DNA, 120 bp, Artificial Sequence
  ENSG00000169432_65 (sequence is synthesized)
aacaactttcactaatttgctttccatatttaaaaaataataaattacatttatataataaatgtttaaagcacatattttttgttgttctggcaatttaaaaagaaagaggatttaaac

SEQ ID NO: 560052 - DNA, 120 bp, Artificial Sequence
  ENSG00000169432_66 (sequence is synthesized)
gtacctatagaaacaaagatttatggttaaagaatgagatcagaagtctagaatgtttttaaattgtgatatattttacaacatccgttattactttgagacatttgtcctaatctacgt

SEQ ID NO: 560053 - DNA, 120 bp, Artificial Sequence
  ENSG00000169432_67 (sequence is synthesized)
ataaaactcaatctagggctaaagattctttataccatcttaggttcattcatcttaggctatttgaaccactttttaatttaatatgaaagacaccatgcagtgttttccgagactaca

SEQ ID NO: 560054 - DNA, 120 bp, Artificial Sequence
  ENSG00000169432_68 (sequence is synthesized)
tagatcattttatcacatacctaccaagcctgttggaaataggttttgataatttaagtagggacctatacaaaatatattacatttatcagatttttaaatacattcaattaagaattt

SEQ ID NO: 560055 - DNA, 120 bp, Artificial Sequence
  ENSG00000169432_69 (sequence is synthesized)
aacatcaccttaaatttgaattcaatctaccgttatttcaaactcacaaatataactgcattatgaatacttacataatgtagtaagacaagatgtttgacaggttcgtgtgtaattttc

SEQ ID NO: 560056 - DNA, 120 bp, Artificial Sequence
  ENSG00000169432_70 (sequence is synthesized)
tattaatgtttttacattgccttgtttttatgtaaaataaaaaatatgggcaactggtttgttaacaacacaatttcttcttagcatttcaaaaatatatataaagttgttctttttcct

SEQ ID NO: 560057 - DNA, 120 bp, Artificial Sequence
  ENSG00000169432_71 (sequence is synthesized)
atttcatgaactatgtttttttttaaaataacatggttaagttttatatatatttacgtttgtttcaggaatgtctacttgtgactttttatcaattaaaaataatatttggaagaaaga

SEQ ID NO: 560058 - DNA, 120 bp, Artificial Sequence
  ENSG00000169432_72 (sequence is synthesized)
gcttattaagtataagcttgaagtaaaattagacctctctttccatgtagattactgtttgtactgatggtttcacccttcagaaggcactgtcatattaatatttaaattttataatcg

SEQ ID NO: 560059 - DNA, 120 bp, Artificial Sequence
  ENSG00000169432_73 (sequence is synthesized)
ctgaacttattacacccaacaatacagaaaggcagttacactgaagaacttaacttagaataaaatggaagcaaacaggttttctaaaaacttttttaagtgaccaggtctcgctctgtc

SEQ ID NO: 560060 - DNA, 90 bp, Artificial Sequence
  ENSG00000169432_74 (sequence is synthesized)
acccaggctagagtgcaatggcatgatcatagctctctgcagcctcaactctgggctcaagcaaccctacaggtacatgccaccatgcct

SEQ ID NO: 560061 - DNA, 120 bp, Artificial Sequence
  ENSG00000169432_75 (sequence is synthesized)
gttgcccaggctagtctcaaactcctggcttcaagtgttcctactgtcatgacctgccaacatgctggggttacaggcatgagccaccatgccccaaacaggtttgaacacaaatctttc

SEQ ID NO: 560062 - DNA, 120 bp, Artificial Sequence
  ENSG00000169432_76 (sequence is synthesized)
gagccaccatgccccaaacaggtttgaacacaaatctttcggatgaaaattagagaacctaattttagctttttgatagttacctagtttgcaaaagatttgggtgacttgtgagctgtt

SEQ ID NO: 560063 - DNA, 120 bp, Artificial Sequence
  ENSG00000169432_77 (sequence is synthesized)
tttaaatgctgattgttgaacatcacaacccaaaatacttagcatgattttatagagttttgatagctttattaaaaagagtgaaaataaaatgcatatgtaaataaagcagttctaaat

SEQ ID NO: 560064 - DNA, 120 bp, Artificial Sequence
  ENSG00000169432_78 (sequence is synthesized)
agctatttcagagaaatgttaatagaagtgctgaaagaagggccaactaaattaggatggccagggaattggcctgggtttaggacctatgtatgaaggccaccaattttttaaaaatat

SEQ ID NO: 560065 - DNA, 120 bp, Artificial Sequence
  ENSG00000169432_79 (sequence is synthesized)
ctgtggtttattatgttattatcttcttgaggaaaacaatcaagaattgcttcatgaaaataaataaatagccatgaatatcataaagctgtttacataggattctttacaaatttcata

SEQ ID NO: 560066 - DNA, 120 bp, Artificial Sequence
  ENSG00000169432_80 (sequence is synthesized)
gatctatgaatgctcaaaatgtttgagtttgccataaattatattgtagttatattgtagttatacttgagactgacacattgtaatataatctaagaataaaagttatacaaaataaaa

SEQ ID NO: 560067 - DNA, 120 bp, Artificial Sequence
  ENSG00000169432_81 (sequence is synthesized)
gtgacagagtttgtggacctgggcaatgtctcagcattgagaacattcagagttctccgagcattgaaaacaatttcagtcattccaggcctgaagacaattgtaggggctttgatccag

SEQ ID NO: 560068 - DNA, 120 bp, Artificial Sequence
  ENSG00000169432_82 (sequence is synthesized)
agcctctactgatctctctttctcaagaaataagccaggttgtgtatggaggttctcatgctgccaagttaacatagagtcagggaaaggaaaaatctggtggaacatcaggaaaacctg

SEQ ID NO: 560069 - DNA, 120 bp, Artificial Sequence
  ENSG00000169432_83 (sequence is synthesized)
atttttaaaaacttttgggaatttgaatcaaaaggcaagattatatcttgatatctagtaaaataaaatccattcattgacaaatgcacttaaagaactaaaaccacatgaatattttta

SEQ ID NO: 560070 - DNA, 120 bp, Artificial Sequence
  ENSG00000169432_84 (sequence is synthesized)
caatttttgaagacatgctcaattctaatttgaagtacacgctaatataatataaatattttctattaatatagtacaataatttatttcagagtaagaagcttgtggcttacagaattt

SEQ ID NO: 560071 - DNA, 120 bp, Artificial Sequence
  ENSG00000169432_85 (sequence is synthesized)
caatgattatatgttcataactttatgaatttggtaattaaagatcaaattgttatcccccaaaacaattgttgtctgatcttaacaatataaaaacaaataaagactttttaaagcaca

SEQ ID NO: 560072 - DNA, 120 bp, Artificial Sequence
  ENSG00000169432_86 (sequence is synthesized)
ttcttcaatataacactgccatgtagaaagcttattcagcatgctcatcatgtgcactattctgacaaactgcatatttatgaccatgaataacccaccggactggaccaaaaatgtcga

SEQ ID NO: 560073 - DNA, 120 bp, Artificial Sequence
  ENSG00000169432_87 (sequence is synthesized)
ccctattctttataaaagttctaaatatttgccaaatcatcaaagaagatattcattacttttaattcttacaaattttcttagcaataaaagtcacagtaagacagctagcagataaaa

SEQ ID NO: 560074 - DNA, 120 bp, Artificial Sequence
  ENSG00000169432_88 (sequence is synthesized)
aagataaaagtacatagtttaaaacaacactgattagcacaccaaaagaatattgagccaatccttattatatgtaatacaaatatttatatatgcacatttaactgtgtttggagaccc

SEQ ID NO: 560075 - DNA, 120 bp, Artificial Sequence
  ENSG00000169432_89 (sequence is synthesized)
ttaactgtgtttggagacccatgtttctacacatatgtaattatttaagatatattttatgtatagctatcatgaacataataaaatacattttatttctatattaacacattttaacct

SEQ ID NO: 560076 - DNA, 120 bp, Artificial Sequence
  ENSG00000169432_90 (sequence is synthesized)
ttacatgatggtcatggtcattggaaacctggtggtatgtaaccagatgttcatgcattttaatttctctgtggaaattattttgtgatgatgtgatctattatttttataattttataa

SEQ ID NO: 560077 - DNA, 120 bp, Artificial Sequence
  ENSG00000169432_91 (sequence is synthesized)
ttaattatatctacaattattaattgcaaaagaatagtgataattttaatacaagaaagaacaggaaagagaacgaaattttgtattagttttcctagccaaataacccatatttatatt

SEQ ID NO: 560078 - DNA, 120 bp, Artificial Sequence
  ENSG00000169432_92 (sequence is synthesized)
tttcaaaatcactgcctattcattttaaggcaaaggtttctatctttttctctaattttgaaagtgatggcatatgctctcttgaagctatactagtaaataaaatataattaagttaat

SEQ ID NO: 560079 - DNA, 120 bp, Artificial Sequence
  ENSG00000169432_93 (sequence is synthesized)
aataacaaaaatgaagttaataatggaccaaggcaaatgaaaggactggtcccgcaccttatagccatgtgtaagactagcctctatagcaaggatcagcacctatgccccacagaccaa

SEQ ID NO: 560080 - DNA, 120 bp, Artificial Sequence
  ENSG00000169432_94 (sequence is synthesized)
agccagtccaatgcctgttattgtgtggccctgggagctaagaatgatttttacatttttaagtggttaaaataatcaaaagaagaataaatgacacatgcacattatatgaaatgcaaa

SEQ ID NO: 560081 - DNA, 120 bp, Artificial Sequence
  ENSG00000169432_95 (sequence is synthesized)
gaaatgttgctttcattttaatcatttcaaagctattcaaatatatagaaagctgctacagtgtgaatttgggtcatgttatatatgattttcataaatcatcctggttctaagctatct

SEQ ID NO: 560082 - DNA, 120 bp, Artificial Sequence
  ENSG00000169432_96 (sequence is synthesized)
agcagtactggcaaaaggaacacaggatagttccataattcctaatttctatatcataaaaaagaattattttctctagagaaataaatgtagccttgaattaataacattaaccattac

SEQ ID NO: 560083 - DNA, 120 bp, Artificial Sequence
  ENSG00000169432_97 (sequence is synthesized)
taatcatatataatgataatattaattatcaaatataaagatagtatctgtatcttgatagtattcctaaagatttgtacaaagcaaaatcatttgctcagctttatcaacatccacttt

SEQ ID NO: 560084 - DNA, 120 bp, Artificial Sequence
  ENSG00000169432_98 (sequence is synthesized)
tttgctcagctttatcaacatccactttgtaaccaatgacgagtttcatagctgtttttaatggcttccttcaatataggctgatggcaagatatcaaagtttagttcagtagaattatt

SEQ ID NO: 560085 - DNA, 120 bp, Artificial Sequence
  ENSG00000169432_99 (sequence is synthesized)
tctgtaggtaccacatgagatcatctgtatgcactctcagaagtctgcttaattcagaagtatcaattagagtttcttacataaagcatgaattgaatgttctctaaacaattatcccct

SEQ ID NO: 560086 - DNA, 120 bp, Artificial Sequence
  ENSG00000169432_100 (sequence is synthesized)
agcatggtgtctctcactggaacggttgatgaatattggatgaagatatgatcaagattgtactttctgtctgacacctggaatgtatctatctgatggtgcccacgtgaatacataaat

SEQ ID NO: 560087 - DNA, 120 bp, Artificial Sequence
  ENSG00000169432_101 (sequence is synthesized)
cttaatagataatttgacccaggtgtggtatggaagtcacgaaacctttcaaatatatgtgctgttgccaaaaggaaatgagggaggaaaggtcaggattctccttagataataaaaagt

SEQ ID NO: 560088 - DNA, 120 bp, Artificial Sequence
  ENSG00000169432_102 (sequence is synthesized)
agtggggtaatatcaaactggatcagtcaaggatgcagctctgtgcttttaaccaggcagagacatatgtcaccacttttacacagagattaaaccggtcaagctcctcagagtgcagca

SEQ ID NO: 560089 - DNA, 120 bp, Artificial Sequence
  ENSG00000169432_103 (sequence is synthesized)
gtgataaataaaatcaaataacacctagcccacatggtaaaagactataaataaaatgacagaaaaaaatagaagccttaacaagaaaactgaaagttttgaagtaaaatgtttagcata

SEQ ID NO: 560090 - DNA, 120 bp, Artificial Sequence
  ENSG00000169432_104 (sequence is synthesized)
tatatttttactaccaccatttgatgaggaatttagcatattttccccttctttttatatttaccctcttttccagtttctgattgttacaaacatgatttgaaacttatttccaatgga

SEQ ID NO: 560091 - DNA, 120 bp, Artificial Sequence
  ENSG00000169432_105 (sequence is synthesized)
tggagaattttatttcttaatttatatgctgtaaaattaatatatctgatgagtaacttacatttaatattgtagattattttaccacacttatttaaacttaagttttctcactgggat

SEQ ID NO: 560092 - DNA, 120 bp, Artificial Sequence
  ENSG00000169432_106 (sequence is synthesized)
ctgtccttttattctgagtcttgctcctatttctgagtttatactgtgaatggttttcttaacctttgttaaaagaaaaattttcaacaaattaaatttagcagcttatttcagcaatga

SEQ ID NO: 560093 - DNA, 120 bp, Artificial Sequence
  ENSG00000169432_107 (sequence is synthesized)
aatagtatttattgctgaaataagataataataataatgatttaggcagcactcagaaccaagagaagttcggagagctcaactcagcaacatgagcaggagtatttatagacagaaaaa

SEQ ID NO: 560094 - DNA, 120 bp, Artificial Sequence
  ENSG00000169432_108 (sequence is synthesized)
gggagtgacgcacaaaaacagcttgattgcttatagcttgacatttgccttatgtggacattgtctgataaatcagcaggctgtggttggctgaagctcagctgctgtgattggctgaga

SEQ ID NO: 560095 - DNA, 120 bp, Artificial Sequence
  ENSG00000169432_109 (sequence is synthesized)
cagctacttgttacaagaatatactaatagattagaatgcaatttgtttacatatgaagttagattgcaattctctatgtacacagacagcctttaatcaaatttaatttaattcatcgc

SEQ ID NO: 560096 - DNA, 120 bp, Artificial Sequence
  ENSG00000169435_0 (sequence is synthesized)
gagtgactcgcggagtcccagcccggcagagacagggcactggtttccctctaccagagttcctgacccagccgagaacaaaccgcgaagcaagttcagccgaacaacgatggtgaaaag

SEQ ID NO: 560097 - DNA, 120 bp, Artificial Sequence
  ENSG00000169435_1 (sequence is synthesized)
ggtcctcctgctcacagtgtgaataacaggatatcctcagaccatctcaaaaaggaggaaaagatgactatgatggctcaccagtacccctcttggatcttcattaatgagaagacattc

SEQ ID NO: 560098 - DNA, 120 bp, Artificial Sequence
  ENSG00000169435_2 (sequence is synthesized)
ataaccagggaacaacttaattctttattgaagacctataacattttttatgagaaccagaaaaatctgcatattttatatggagagactgaagatggcaaactaattgttgaaggaatg

SEQ ID NO: 560099 - DNA, 120 bp, Artificial Sequence
  ENSG00000169435_3 (sequence is synthesized)
ctggacattttctggggagtaaaacgacctatacagctaaaaatacaagatgagaagccattctcttcttttactagtatgaagtcatcagacgtcttctccagcaaaggaatgacacgc

SEQ ID NO: 560100 - DNA, 120 bp, Artificial Sequence
  ENSG00000169435_4 (sequence is synthesized)
tggggggaatttgacgatctctatcgtattagtgagctggacaggacccagattcctatgtctgaaaaaaggaattcccaggaagactatttatcttatcacagcaacaccctgaagcca

SEQ ID NO: 560101 - DNA, 120 bp, Artificial Sequence
  ENSG00000169435_5 (sequence is synthesized)
catgcaaaggatgaaccagactccccagtgctctatagaaccatgagtgaagcagctctggtgagaaaaaggatgaagcctctgatgatggacagaaaagaaagacagaaaaatagagcc

SEQ ID NO: 560102 - DNA, 120 bp, Artificial Sequence
  ENSG00000169435_6 (sequence is synthesized)
tctattaatggacacttctataaccatgaaacatcaattttcattccagcctttgaatcagaaactaaggtcagagtaaacagtaacatgagaactgaagaagtaataaagcaacttctc

SEQ ID NO: 560103 - DNA, 120 bp, Artificial Sequence
  ENSG00000169435_7 (sequence is synthesized)
caaaaatttaagattgaaaatagtccccaggattttgctcttcacattatttttgcaacaggagaacaaagacgactaaagaagacagacattccgctactgcagaggctcctacaggga

SEQ ID NO: 560104 - DNA, 120 bp, Artificial Sequence
  ENSG00000169435_8 (sequence is synthesized)
ccttctgaaaagaatgctcgcattttcctcatggataaagatgcagaagaaattagcagtgatgtggctcagtacattaactttcacttttctctcttggaatccattcttcaaagatta

SEQ ID NO: 560105 - DNA, 120 bp, Artificial Sequence
  ENSG00000169435_9 (sequence is synthesized)
aatgaagaagagaaaagagagattcaaagaatagtaacaaaattcaataaagaaaaggcgattatactgaaatgtcttcaaaataaactagtaataaaaacagagacaacagtttagcag

SEQ ID NO: 560106 - DNA, 120 bp, Artificial Sequence
  ENSG00000169435_10 (sequence is synthesized)
tacaagcttctattgctaaaacatttcaaaaaactcagagatattactctttgatgaatgcataagttctgtacttgcatttatacgaacatatatgagacttgaatcgtagaaaattga

SEQ ID NO: 560107 - DNA, 120 bp, Artificial Sequence
  ENSG00000169435_11 (sequence is synthesized)
atgtcaaaaaaagctcatttctttttgaagtgatgaggttaattagggttcacagttggacaaaatgagtttgagtttagtttcagtaactgaaataagcttgaatactgcatatgccaa

SEQ ID NO: 560108 - DNA, 120 bp, Artificial Sequence
  ENSG00000169435_12 (sequence is synthesized)
atagcttttatagtaaaccatgtaatgaactcaaatttaaatggtgtcttcagataagcagtttaaacttcatttagcttggactctcaagagaactgaaacataatcaatggattcaga

SEQ ID NO: 560109 - DNA, 120 bp, Artificial Sequence
  ENSG00000169435_13 (sequence is synthesized)
aatgactcagaaaaaagaagctgccagttcttggaatgaaaaagaaatacagtcttacaccatcaaggaatctacctgatagtgacagtagcttcttgaaaactctggcattttcataaa

SEQ ID NO: 560110 - DNA, 120 bp, Artificial Sequence
  ENSG00000169435_14 (sequence is synthesized)
atctaggactatcttaaatggcctgttgacttctgactatctgtaacatcagagctgtctggcctttggaaaggaaaaattatggactctgttaagaaatcctaattgaaattttctgaa

SEQ ID NO: 560111 - DNA, 120 bp, Artificial Sequence
  ENSG00000169435_15 (sequence is synthesized)
cctccccccagcccttttattctctctcttctgctgatgaaagacctttcatcagttcaaagcttttcttaagctcttttttaagttaattgaactttttctttatttatttttcaaaaa

SEQ ID NO: 560112 - DNA, 120 bp, Artificial Sequence
  ENSG00000169435_16 (sequence is synthesized)
aatgtttatatcacatagacatattacatcggctaaagtaagacttggcccacaaatacctatttgttgctgaatgaatacaatggataaagcaaggctgttgtagctgaagttacatag

SEQ ID NO: 560113 - DNA, 120 bp, Artificial Sequence
  ENSG00000169435_17 (sequence is synthesized)
ggaatcccaaactctgccctcttagcatcttattctacatgacaactctcaaggtactcacagatctgtttaacccacttgaaaaaaaaacactaaaaatgaagaaatgctataagtata

SEQ ID NO: 560114 - DNA, 120 bp, Artificial Sequence
  ENSG00000169435_18 (sequence is synthesized)
aactatgattttatttataaattctgtattaaaatggaattatatgcaacattctttcattctgtaaactaattccatttgcattcctcataagcattgtagtaaattgatcatattaca

SEQ ID NO: 560115 - DNA, 120 bp, Artificial Sequence
  ENSG00000169435_19 (sequence is synthesized)
tgtactaaggaatgagattatatgcagtaaacccaactggaagattaacaatattaaaatatgaaacatttttaagacaaaggcattacttctcagtattaccaaacctaaactggttga

SEQ ID NO: 560116 - DNA, 120 bp, Artificial Sequence
  ENSG00000169435_20 (sequence is synthesized)
aggtgaaagtgtgctatggccttttcaagcctaagaagtctctcttactgagtaaaccagaggcttgcatcgctattctttcacctgtcaatattaataagaaaatagtctcatctcact

SEQ ID NO: 560117 - DNA, 120 bp, Artificial Sequence
  ENSG00000169435_21 (sequence is synthesized)
taaatgaggcaaatgtaatagttaaaattcaacatacttataaaaaactagtgtcatgtacctgccatgaacatgacaaaaggttagtcttcaatagactgaaatgtataagagaagaac

SEQ ID NO: 560118 - DNA, 120 bp, Artificial Sequence
  ENSG00000169435_22 (sequence is synthesized)
caagtcttacatagaaaaaaaaggtagatatgaaaagaaaaatcacagaagagagaatgcaaatggccactaagtatatgaaaaaagtcgtatcttaacagtgaacaactgtgttagtct

SEQ ID NO: 560119 - DNA, 120 bp, Artificial Sequence
  ENSG00000169435_23 (sequence is synthesized)
gtatcaatcagaagacagaaacaaggtagtaatttaaacagggaaagtttaatataaataataattaagctatgataggagaataataataaagatgaaaagagaaggtaccctaaggct

SEQ ID NO: 560120 - DNA, 120 bp, Artificial Sequence
  ENSG00000169435_24 (sequence is synthesized)
gggaaagaatcctaacaaggaaaggcaggaatgagggtttcagaattcactggagaaggtgtggttgcagcccactggagagaagtttgctggcttgcccaggccagagcaggaccacag

SEQ ID NO: 560121 - DNA, 120 bp, Artificial Sequence
  ENSG00000169435_25 (sequence is synthesized)
atactggacaagctggtacagccaaccccctaggtgtggaccagctgaggcaggtgggcagatatgcagagggacttggggctttgccaaagggtaagcacaaagaaggagtcacgggtt

SEQ ID NO: 560122 - DNA, 120 bp, Artificial Sequence
  ENSG00000169435_26 (sequence is synthesized)
ctgttcgaggcactgttgggattaggagccggagggacctactttgcaggaacctagcataactttgtgtgacgagactgcacaagacaaagctcaggcaagtggctcagtagttggcca

SEQ ID NO: 560123 - DNA, 120 bp, Artificial Sequence
  ENSG00000169435_27 (sequence is synthesized)
gcccagcagggtcctctgtatgagtgtgcacccagctgaagagaagaaatggagagcagcaattggagcttcaggaccggcttgcactgtggctccaggttataccaccactgcccaaag

SEQ ID NO: 560124 - DNA, 120 bp, Artificial Sequence
  ENSG00000169435_28 (sequence is synthesized)
caaaagctagagaagcaagtggagaaatgctggagaaagctgcaccctacaggcaaccagcactgcagaaaccactccaggcaaagtagtgaaggaaaaaagcctgctctccagtagcct

SEQ ID NO: 560125 - DNA, 120 bp, Artificial Sequence
  ENSG00000169435_29 (sequence is synthesized)
ggcctgtcagcctggaggaatcaggaaagaccccttcctcttgcagtgtgtctccagcgccctctactgacaaagtatgccatcatgcaagctgcaaaggaaacatttcaagagtctata

SEQ ID NO: 560126 - DNA, 120 bp, Artificial Sequence
  ENSG00000169435_30 (sequence is synthesized)
tctattttcacggagcgggcaaccaacagtgaatgtggagctgagagacagtaaaataataactgacatgccaccgaagtacaaagtaaaataaataaataaatacacattttggcctat

SEQ ID NO: 560127 - DNA, 120 bp, Artificial Sequence
  ENSG00000169435_31 (sequence is synthesized)
tagcaaagattaagaaatgataacattaaatactcaataaatcaccatgagatggggactcaaacttctggtaaaaatacaaatagatataatttttcttgaaggcaatttagtagtctg

SEQ ID NO: 560128 - DNA, 120 bp, Artificial Sequence
  ENSG00000169435_32 (sequence is synthesized)
tttatcctataattctacttgtaagatcctatcatatgaaaataaccagagatacaaagacattctgcaaagatatgttttatattgttatttattgtgacaaaaggaaataaaaagcct

SEQ ID NO: 560129 - DNA, 88 bp, Artificial Sequence
  ENSG00000169435_33 (sequence is synthesized)
tatattgttatttattgtgacaaaaggaaataaaaagcctaaatgttcagaaaattattttaaaagatgaaagagggaaataggccat

SEQ ID NO: 560130 - DNA, 86 bp, Artificial Sequence
  ENSG00000169435_34 (sequence is synthesized)
cgccactgcttaaaaaaaaaaaaagagggaaataaacatttatttgtatattgttatgtagccattaaaattctgtttccaagtaa

SEQ ID NO: 560131 - DNA, 120 bp, Artificial Sequence
  ENSG00000169435_35 (sequence is synthesized)
tatattgttatgtagccattaaaattctgtttccaagtaattttaattacaggggtaaattcttatatatctaaataagaatatacacatacacatgttccaaaatatttattatgtact

SEQ ID NO: 560132 - DNA, 120 bp, Artificial Sequence
  ENSG00000169435_36 (sequence is synthesized)
tacttaaggcatatatattatatatgtatgtgtgtgtatatatatatgtatttgtgtgtgtgaacactaatatttgcatatatatacacacaagaaataaaaacatgttaaaaatggcta

SEQ ID NO: 560133 - DNA, 120 bp, Artificial Sequence
  ENSG00000169435_37 (sequence is synthesized)
tgcattgtagaattatgagtgattcatgtttttctaacttccctatctgtattaagtgttctatagtttatatttgttactttttacatcaggaaatagtaaagttattatttaaaactt

SEQ ID NO: 560134 - DNA, 120 bp, Artificial Sequence
  ENSG00000169435_38 (sequence is synthesized)
atgaacaaaaaagtaacaagcacatgcaagcacagagttctaccaaatgcaaaaaatttcaaatcaattattcaaatgagacattaacatcacttctgtggtagttttatatccataaag

SEQ ID NO: 560135 - DNA, 120 bp, Artificial Sequence
  ENSG00000169435_39 (sequence is synthesized)
tctgattcttctcctttgaagagatgaagcttaatcttcctcatcctgaaaatgggctggacttagtgacttacgtctttttattttatttttaattgacaaataataattgtatgtatt

SEQ ID NO: 560136 - DNA, 120 bp, Artificial Sequence
  ENSG00000169435_40 (sequence is synthesized)
atattattatatatgtatacattatggaattattaaatcaagctaattaacatatccataacctcttataatttctttgtggtgagaacatttaaaaatgtactcttttagcaattaggg

SEQ ID NO: 560137 - DNA, 120 bp, Artificial Sequence
  ENSG00000169435_41 (sequence is synthesized)
cttttagcaattagggacttacttttaatacaggaaaatggaagagactgtgagactttgaagtaggtcataaaagtcactgtggcttcctccttgctctctcttggaccacttgctctg

SEQ ID NO: 560138 - DNA, 120 bp, Artificial Sequence
  ENSG00000169435_42 (sequence is synthesized)
ggggaagtcaactgccatgtcctgagcagccctggaaagacctacatgatgaagaactgagaccttctatcaaatgccagcagggaattgaggcctcctgtcaacagccattttagaagt

SEQ ID NO: 560139 - DNA, 120 bp, Artificial Sequence
  ENSG00000169435_43 (sequence is synthesized)
agatcttccagcctcagtcaagccttcagatgactgcagccctgtctaatagcttgaccgtaatttcatgagagaccttcagccagaaaacccaaggaaaccattctggattcctcatcc

SEQ ID NO: 560140 - DNA, 120 bp, Artificial Sequence
  ENSG00000169435_44 (sequence is synthesized)
tcagaaactgtatgagataagaagtgtttgttgtagtacgccgctaaatttggggcaatttgttacatagcaatgtatagctcatacaatttctgggaaaaaaatagtttattttcgaat

SEQ ID NO: 560141 - DNA, 120 bp, Artificial Sequence
  ENSG00000169435_45 (sequence is synthesized)
catttttgcataatgcaagaatataaacttgtcacagaataatttatccttgttttaggtggtccaaatatttcattgtcagttatatattagctcaaattaaattttagataatatata

SEQ ID NO: 560142 - DNA, 120 bp, Artificial Sequence
  ENSG00000169435_46 (sequence is synthesized)
ttattattaatggtaaagaatgtgtcacatttatctttatagcttttctgtacctaatattgtgtcttgtgcgtaggatgtgctcaataaaaattgattgaataaataagtgaatgaaag

SEQ ID NO: 560143 - DNA, 120 bp, Artificial Sequence
  ENSG00000169435_47 (sequence is synthesized)
aaagaataaatgaatgagtgaaggaattatctgaaatatttttataaaattccccatatgtatgtattacttattacaagtctggtcccatagctgaaaaaatattaaacattatatata

SEQ ID NO: 560144 - DNA, 120 bp, Artificial Sequence
  ENSG00000169435_48 (sequence is synthesized)
cataaccagtttttcacctgctgaagtctgtttcaaatattcttggttcctgctcttaaacatggcaacacacacagtggaatggttgttttgctttgttttgttttgttttgttttgtt

SEQ ID NO: 560145 - DNA, 120 bp, Artificial Sequence
  ENSG00000169435_49 (sequence is synthesized)
ttgtcactaagcagctcagtggctgcttaattggaaccatgaacatttttcagcaagtctccaagaagcagaagtaatacaaactcaggaagcacagccaggggataaacatgcctttgg

SEQ ID NO: 560146 - DNA, 120 bp, Artificial Sequence
  ENSG00000169435_50 (sequence is synthesized)
actgaggcacagggagtggctcaggtttcttgacacttccctgctgtggcgaaaaggagaaataattaacagctcctggggctccaggatcgctgatcgcgtcgggggcactgcaagcgc

SEQ ID NO: 560147 - DNA, 120 bp, Artificial Sequence
  ENSG00000169435_51 (sequence is synthesized)
atgctctgggaggagacaggcgccgcccctgcgcccgcgcgggcctcggacctcccctacagaattcacttcctgtcctctggcctcattctggtcacaaggcaactgactgaagatggc

SEQ ID NO: 560148 - DNA, 120 bp, Artificial Sequence
  ENSG00000169436_0 (sequence is synthesized)
agcttgcccctggggaggctccagacagctttgttcctgggcagtggcggggctggccgaggctgcggcgtttctccccaaggaagtgtcttctccgctttccctgttcttctgtttctc

SEQ ID NO: 560149 - DNA, 120 bp, Artificial Sequence
  ENSG00000169436_1 (sequence is synthesized)
acacactttctatctcattctgtaactttcaagcctttccttctaactgtatgtatttagttacttgttttcaagctggttccctctctggccccctggcctggggaaagcctccacact

SEQ ID NO: 560150 - DNA, 120 bp, Artificial Sequence
  ENSG00000169436_2 (sequence is synthesized)
tactgcgggtcttgtttagagtctgagtttgtgagattatttgggggagagtgggcgagtggctgacaggtgacccccaggaggaggattcctggggctggtgtcttctcccagctgctg

SEQ ID NO: 560151 - DNA, 120 bp, Artificial Sequence
  ENSG00000169436_3 (sequence is synthesized)
cttccagtgggcctgggcccaggactggacctccgctggcacccctgagtgcctccctgccaggccatgctgctgtagaccctaacagcgtctcttcctggccaagagaagcctgtcccc

SEQ ID NO: 560152 - DNA, 120 bp, Artificial Sequence
  ENSG00000169436_4 (sequence is synthesized)
aagaacaggagagccatggccggcctccgagggaacgctgtggctggcctcctctggatgctgctgctgtggagtgggggcggcggctgccaggctcagcgggcaggttgcaaaagtgtc

SEQ ID NO: 560153 - DNA, 120 bp, Artificial Sequence
  ENSG00000169436_5 (sequence is synthesized)
cactacgatctggtcttcctcctggacacctcctccagcgtgggcaaggaggactttgagaaggtccggcagtgggtggccaacctggtggacaccttcgaggtgggccccgaccgcacc

SEQ ID NO: 560154 - DNA, 120 bp, Artificial Sequence
  ENSG00000169436_6 (sequence is synthesized)
cgtgtgggggtcgtgcgctacagcgaccggcccaccacggccttcgagttgggactctttggctcgcaggaggaggtcaaggcggctgcccggcgtctcgcctaccacgggggcaacacc

SEQ ID NO: 560155 - DNA, 120 bp, Artificial Sequence
  ENSG00000169436_7 (sequence is synthesized)
aacacgggagacgcgctccgctacatcacggcccgcagcttctccccacacgccggcggccgccccagggaccgcgcctacaagcaggtggccatcctgctcaccgacggccgcagccag

SEQ ID NO: 560156 - DNA, 120 bp, Artificial Sequence
  ENSG00000169436_8 (sequence is synthesized)
gacctggtgctggacgccgcggcggcagcccaccgcgctggcatccgcatctttgccgtgggcgtgggcgaggcactcaaggaggagctggaggagatcgcctcagagcccaagtccgcc

SEQ ID NO: 560157 - DNA, 120 bp, Artificial Sequence
  ENSG00000169436_9 (sequence is synthesized)
cacgtcttccacgtgtccgacttcaatgccatcgacaagatccggggcaagctgcggcgccgtctttgtgaaaatgtgctctgtcctagcgttcgtgtagaaggagatcgctttaagcac

SEQ ID NO: 560158 - DNA, 120 bp, Artificial Sequence
  ENSG00000169436_10 (sequence is synthesized)
accaatggaggaaccaaggaaatcacaggttttgacctgatggatttgttcagtgtgaaggaaatcttggggaagagagagaatggagctcagagttcctatgtacggatgggatccttc

SEQ ID NO: 560159 - DNA, 120 bp, Artificial Sequence
  ENSG00000169436_11 (sequence is synthesized)
cctgtggtgcaaagtactgaggatgtgttcccccaaggtttacctgatgagtacgcctttgtcacaaccttccggttcaggaaaacctctcggaaggaagactggtatatctggcaggtc

SEQ ID NO: 560160 - DNA, 120 bp, Artificial Sequence
  ENSG00000169436_12 (sequence is synthesized)
atcgaccagtacagcatcccacaggtctccatccggctggatggtgaaaacaaggcagtcgagtacaacgctgtgggtgccatgaaagatgctgtcagggtggtcttccgaggttctcgg

SEQ ID NO: 560161 - DNA, 120 bp, Artificial Sequence
  ENSG00000169436_13 (sequence is synthesized)
gtcaatgacctctttgaccgggactggcacaagatggccctgagcatccaggcccagaacgtctccctgcacattgactgtgcgctggtgcagacactacccatcgaggaacgggagaac

SEQ ID NO: 560162 - DNA, 120 bp, Artificial Sequence
  ENSG00000169436_14 (sequence is synthesized)
attgacatccagggcaagactgtgattggcaagcgcctctacgacagtgtgcccattgactttgacctacagcggattgtgatctattgtgactcgagacacgcagaattggagacttgt

SEQ ID NO: 560163 - DNA, 120 bp, Artificial Sequence
  ENSG00000169436_15 (sequence is synthesized)
tgtgatatcccctcgggtccgtgccaggtgaccgtggtgacagagcctccacctccacccccaccccagcggcctcccaccccaggcagtgaacagattgggtttttgaagaccatcaac

SEQ ID NO: 560164 - DNA, 120 bp, Artificial Sequence
  ENSG00000169436_16 (sequence is synthesized)
tgctcctgcccagctggagagaagggtgaaatgggagttgctggccccatggggctccctggtccaaagggagacataggagccattgggccggttggcgctcctggacctaagggagag

SEQ ID NO: 560165 - DNA, 120 bp, Artificial Sequence
  ENSG00000169436_17 (sequence is synthesized)
aaaggtgatgtgggcataggaccttttggccaaggggaaaagggtgaaaagggttccctgggcctgcccggcccccctgggagagacggcagcaaaggcatgagaggggagccaggagag

SEQ ID NO: 560166 - DNA, 120 bp, Artificial Sequence
  ENSG00000169436_18 (sequence is synthesized)
ctgggagagccggggctgccgggtgaggtcggcatgcgggggccccaaggaccacctggactccccggacctcctggacgtgtcggagctcctggtctccaaggagaacgaggtgaaaag

SEQ ID NO: 560167 - DNA, 120 bp, Artificial Sequence
  ENSG00000169436_19 (sequence is synthesized)
ggaactcgaggagaaaagggagagcgaggcctggatggattccctgggaagcctggggacacaggacagcagggcaggcccggcccttctggtgtggcaggaccccagggagaaaagggt

SEQ ID NO: 560168 - DNA, 120 bp, Artificial Sequence
  ENSG00000169436_20 (sequence is synthesized)
gacgtgggacctgcggggccacctggtgtaccaggctcagtggtgcagcaagagggcttgaaaggggaacagggagctccaggacccagaggtcaccaaggcgcccccggtcctccagga

SEQ ID NO: 560169 - DNA, 120 bp, Artificial Sequence
  ENSG00000169436_21 (sequence is synthesized)
gctcggggtccaataggcccagaaggcagggatggacctcctggtttgcaaggtctccgagggaagaaaggtgacatgggaccacctggaatccctggattgctggggctgcagggccct

SEQ ID NO: 560170 - DNA, 120 bp, Artificial Sequence
  ENSG00000169436_22 (sequence is synthesized)
ccaggaccccctggtgtcccaggcccccctggaccgggaggttctccgggtttgcctggagagatcggcttcccgggaaagcctggacctcctgggcccacgggaccccctggaaaggac

SEQ ID NO: 560171 - DNA, 120 bp, Artificial Sequence
  ENSG00000169436_23 (sequence is synthesized)
gggccaaatggaccaccaggtccgccaggaaccaagggagaaccaggagaaagaggggaagatggtctgcctggaaaaccaggccttcggggagaaattggggagcagggcctggcaggc

SEQ ID NO: 560172 - DNA, 120 bp, Artificial Sequence
  ENSG00000169436_24 (sequence is synthesized)
cgacctggagagaagggagaagcaggcctcccaggggctccaggcttcccaggtgtgagaggagagaaaggagaccagggagaaaaaggtgaactgggacttccaggactgaaaggtgac

SEQ ID NO: 560173 - DNA, 120 bp, Artificial Sequence
  ENSG00000169436_25 (sequence is synthesized)
cgaggtgaaaagggtgaagctggtcctgcaggccctcccgggttacctggaactacatccctgttcacaccacatccacggatgcccggagaacaagggcccaaaggagagaagggcgat

SEQ ID NO: 560174 - DNA, 120 bp, Artificial Sequence
  ENSG00000169436_26 (sequence is synthesized)
gtcctggagaattggggcctcagggacccactggaccaccgggtgccaagggacaggaaggtgcacatggggctcctggagcagctggaaaccccggtgctcccggacatgtcggtgccc

SEQ ID NO: 560175 - DNA, 120 bp, Artificial Sequence
  ENSG00000169436_27 (sequence is synthesized)
ccggtcccagtggccctccaggaagtgtgggtgctcccggcctcagaggcaccccagggaaagatggggagcgtggtgagaagggtgcagcgggggaagaaggcagcccagggccagttg

SEQ ID NO: 560176 - DNA, 120 bp, Artificial Sequence
  ENSG00000169436_28 (sequence is synthesized)
gtcccaggggagatcctggtgctcctgggctccctgggccacccggaaaagggaaggatggagagccgggactccgtggatcacctggactccctggacccctaggaaccaaggctgctt

SEQ ID NO: 560177 - DNA, 120 bp, Artificial Sequence
  ENSG00000169436_29 (sequence is synthesized)
gcggaaaagtcagagggtcagaaaactgtgcactgggagggcaatgtgttaagggggatcgaggagctcctgggatccctggttctcctggcagccgtggtgacccaggcattggggttg

SEQ ID NO: 560178 - DNA, 120 bp, Artificial Sequence
  ENSG00000169436_30 (sequence is synthesized)
ctggccctcctggcccttccggaccaccaggagacaaaggatccccgggatcacgaggcttacctggattccctggcccccagggcccagccggccgggacggtgcaccaggaaatccag

SEQ ID NO: 560179 - DNA, 120 bp, Artificial Sequence
  ENSG00000169436_31 (sequence is synthesized)
gagaaagagggcctcctggcaagccgggcctctcttcactactgtctccaggggacataaatctcttggctaaggatgtgtgcaatgactgccctcctggccccccaggcctccctggtc

SEQ ID NO: 560180 - DNA, 120 bp, Artificial Sequence
  ENSG00000169436_32 (sequence is synthesized)
taccaggttttaaaggggacaaaggtgtcccaggaaagccagggagagaaggcacagaagggaaaaagggagaggctgggcctccaggcctaccagggcccccaggaatagctggaccac

SEQ ID NO: 560181 - DNA, 120 bp, Artificial Sequence
  ENSG00000169436_33 (sequence is synthesized)
agggaagtcaaggagaacgtggtgcagatggtgaggttgggcagaaaggtgatcagggtcatcctggagttccaggtttcatggggcccccagggaaccctgggccaccaggggcagatg

SEQ ID NO: 560182 - DNA, 120 bp, Artificial Sequence
  ENSG00000169436_34 (sequence is synthesized)
gaattgcaggagctgctggaccaccaggaatccaagggtcacctgggaaagaaggccctcctggcccccaaggcccatctggattacccggaatcccaggagaagaaggcaaagagggca

SEQ ID NO: 560183 - DNA, 120 bp, Artificial Sequence
  ENSG00000169436_35 (sequence is synthesized)
gagatggaaagccgggtccccctggagagccgggcaaagcaggagagccaggtctaccaggaccagagggtgcccgaggcccacctggcttcaagggacacacaggcgattctggtgcac

SEQ ID NO: 560184 - DNA, 120 bp, Artificial Sequence
  ENSG00000169436_36 (sequence is synthesized)
ccggtccccggggagagtctggtgccatggggcttcctggtcaggaagggttaccaggaaaagatggtgacactggacccactgggccacagggtccccaaggaccaaggggcccaccgg

SEQ ID NO: 560185 - DNA, 120 bp, Artificial Sequence
  ENSG00000169436_37 (sequence is synthesized)
gcaagaatggatcaccgggatctccaggagagcctggcccttcaggaacccctggccagaaaggaagcaaaggggaaaatggcagcccaggacttcctggcttcctgggtccccgtgggc

SEQ ID NO: 560186 - DNA, 120 bp, Artificial Sequence
  ENSG00000169436_38 (sequence is synthesized)
ctccgggagaaccaggagagaaaggagtcccaggcaaggagggggtccctgggaagcctggagagcctggattcaaaggagaaaggggagatcctgggatcaaaggtgacaaaggacctc

SEQ ID NO: 560187 - DNA, 120 bp, Artificial Sequence
  ENSG00000169436_39 (sequence is synthesized)
ctggtggaaaaggccagcctggggaccctggaatcccaggccacaaaggccacacaggcctgatgggtccccaaggactacctggggagaatggaccagttggacccccagggcctccag

SEQ ID NO: 560188 - DNA, 120 bp, Artificial Sequence
  ENSG00000169436_40 (sequence is synthesized)
gccagccgggatttccaggactgaggggggagtctccatccatggaaaccctgcgtcggcttattcaagaagagctggggaagcagcttgaaaccagactcgcctacctcctggcccaga

SEQ ID NO: 560189 - DNA, 120 bp, Artificial Sequence
  ENSG00000169436_41 (sequence is synthesized)
tgcccccggcgtacatgaagtcatctcaaggcagacctgggcccccagggccccctggaaaagatgggcttccaggccgggccggccccatgggggagccaggtcgtcctgggcaggggg

SEQ ID NO: 560190 - DNA, 120 bp, Artificial Sequence
  ENSG00000169436_42 (sequence is synthesized)
gtctggaaggaccctctggacccataggtcccaaaggtgagcgaggagccaaaggtgacccaggtgcacctggagttggcctccgaggcgagatgggaccccctggaatcccaggtcaac

SEQ ID NO: 560191 - DNA, 120 bp, Artificial Sequence
  ENSG00000169436_43 (sequence is synthesized)
ccggggaacctggctatgctaaagatggacttcctgggatccctggccctcaaggggagacaggaccagctggacatcctggcctcccaggacctcccggtcccccaggccaatgtgacc

SEQ ID NO: 560192 - DNA, 120 bp, Artificial Sequence
  ENSG00000169436_44 (sequence is synthesized)
cttcccagtgtgcctacttcgccagccttgctgcccggccgggtaatgtgaagggtccctaaaggactctggaaagccagaagactgcagtggatttctgaaacttgaactcagagccca

SEQ ID NO: 560193 - DNA, 120 bp, Artificial Sequence
  ENSG00000169436_45 (sequence is synthesized)
gtgggaagccagaggtcttgaaagacttcagccatgtgttccttttttttttctttcttttatcgtttgctttttgttttattttcttgagagacctcaaaattattaaatccaacagac

SEQ ID NO: 560194 - DNA, 120 bp, Artificial Sequence
  ENSG00000169436_46 (sequence is synthesized)
gctgccggtcggtcagattattattaatattattgttgttgttaattattattattatttcatatgctgatgctttgtgagttcttttccactcctttaaagttgggaaaacttgattcg

SEQ ID NO: 560195 - DNA, 120 bp, Artificial Sequence
  ENSG00000169436_47 (sequence is synthesized)
tggggcaggagattgtttcttcattcttctgacagcccccatctgacgcgtaactgcccattttaaggaaactcttggtgctacaaaaccctgaccagacacttggcaaatttacctctt

SEQ ID NO: 560196 - DNA, 120 bp, Artificial Sequence
  ENSG00000169436_48 (sequence is synthesized)
tcttcaaaagaaaaactttaagaaaatgagccaatgggcttcattctcagtcatgcccggagatcacccaggagaaataatacaaacaccaccactgtccagagagagtaaagaagcaga

SEQ ID NO: 560197 - DNA, 120 bp, Artificial Sequence
  ENSG00000169436_49 (sequence is synthesized)
aagagaaagaatttgcaaccatgaggaatgttcccacctcccgacgggacgtgcatttggaaaacacagaatcagccctcagggtgcactccagccacctcagtgctctaagctcacaga

SEQ ID NO: 560198 - DNA, 120 bp, Artificial Sequence
  ENSG00000169436_50 (sequence is synthesized)
agtgaaataatgtctgtgggttggcaatggctttgtgggatcatatgtcttggccaaagatgggaaaacctatgttgaagaggcagcccttgagtgttaatttgtcttctaaactgtgta

SEQ ID NO: 560199 - DNA, 120 bp, Artificial Sequence
  ENSG00000169436_51 (sequence is synthesized)
aggccccttcaagttcctcttgttggtttcaattatattaattataaaacaagtggatgtggtgaccatccacttgtgtttccctaatgatgggcagttggccagggcactgaccagagc

SEQ ID NO: 560200 - DNA, 120 bp, Artificial Sequence
  ENSG00000169436_52 (sequence is synthesized)
tgggaaatttgtatctccaaggcggctctgtctctgaaataaatggcatcaagtgcatgtgtgtatgcgacatgccctgcctgaacaggtgctcaataaatccaagtttccttctcttga

SEQ ID NO: 560201 - DNA, 120 bp, Artificial Sequence
  ENSG00000169436_53 (sequence is synthesized)
gatttgtcagtgtttcctcaccagggacctcacgaggaaaacatggggaggatggagagctggaagacagggcacaaatcccattcgtgagctttctgccctcaagacctaatcacccgc

SEQ ID NO: 560202 - DNA, 120 bp, Artificial Sequence
  ENSG00000169436_54 (sequence is synthesized)
caccaaaaccccatctgctgttaccatcaccttggtgtgaagatttcaacatatggatttaggaagacagcaacattcagaccatggcatcctggcatctgggacagggcaccaagcagg

SEQ ID NO: 560203 - DNA, 120 bp, Artificial Sequence
  ENSG00000169436_55 (sequence is synthesized)
aggaaagagaaatctgaaattcaaagccatcaacaccatctgttggtttgagataaaagcaacactactatttgttctctgccaaatccaaatccccttgttctcaagtcatagacaaac

SEQ ID NO: 560204 - DNA, 120 bp, Artificial Sequence
  ENSG00000169436_56 (sequence is synthesized)
cgtttctttctcctctcctagtaaaatgaactggatgaagatattactcacttttcagctgggagatactgactaaactttcactgggggctaaaataaaataaaagcatgctcaagcaa

SEQ ID NO: 560205 - DNA, 120 bp, Artificial Sequence
  ENSG00000169436_57 (sequence is synthesized)
ggccatcacagttgactctgaggcaggagccaggctatgtacaccctctatcacaaagacctacaagggaggactgtcccaaatttacagatccagagatccggagaaaggaaatggcac

SEQ ID NO: 560206 - DNA, 120 bp, Artificial Sequence
  ENSG00000169436_58 (sequence is synthesized)
tttaagatcacacagctaaactaagaaacagacaaacctggaagtcagggctttaggccccacccttctttctatagttttttttttttttctaaatccaaggatgttcctttctctccc

SEQ ID NO: 560207 - DNA, 120 bp, Artificial Sequence
  ENSG00000169436_59 (sequence is synthesized)
ggcagtaaagaattttaaatagcaagagtgtcctgacaagctcttttaagatgatggggtgaggaaaaggctgtgtacgtcacaggtcgccctgccagtagggcaaagcaggagagccag

SEQ ID NO: 560208 - DNA, 120 bp, Artificial Sequence
  ENSG00000169436_60 (sequence is synthesized)
ggggagccaggagagctgggagagccggggctgccgggtgaggtcggcatgcgggggccccaaggaccacctggactccccggacctcctggacgtgtcggagctcctgtaagtgaaggc

SEQ ID NO: 560209 - DNA, 120 bp, Artificial Sequence
  ENSG00000169436_61 (sequence is synthesized)
acttgtctgggcaggggttctaccccttctccaggaatcaaaaaccaggttctagcaagttcctccacctgcatctagacagtaatgctgttttgccttactgatgccaatgaagtgttg

SEQ ID NO: 560210 - DNA, 120 bp, Artificial Sequence
  ENSG00000169436_62 (sequence is synthesized)
catattcctgggacccctttctcacatcaagaagcagggtagatcccaggaatctgcatttttaaccagcaccacaggatttttgacacttgatctaaagaattcattttccccagcctg

SEQ ID NO: 560211 - DNA, 120 bp, Artificial Sequence
  ENSG00000169436_63 (sequence is synthesized)
tcctgtactgtactcttgtaagaagggtggagtctactgaattcttagcccctggaacagtgccagactgtccagtatggtgttcagtatgtccagtgaataaagagatgaacaaacaga

SEQ ID NO: 560212 - DNA, 120 bp, Artificial Sequence
  ENSG00000169439_0 (sequence is synthesized)
agatacccccggagctccagccgcgcggatcgcgcgctcccgccgctctgcccctaaacttctgccgtagctccctttcaagccagcgaatttattccttaaaaccagaaactgaacctc

SEQ ID NO: 560213 - DNA, 120 bp, Artificial Sequence
  ENSG00000169439_1 (sequence is synthesized)
ggcacgggaaaggagtccgcggaggagcaaaaccacagcagagcaagaagagcttcagagagcagccttcccggagcaccaactccgtgtcgggagtgcagaaaccaacaagtgagaggg

SEQ ID NO: 560214 - DNA, 120 bp, Artificial Sequence
  ENSG00000169439_2 (sequence is synthesized)
cgccgcgttcccggggcgcagctgcgggcggcgggagcaggcgcaggaggaggaagcgagcgcccccgagccccgagcccgagtccccgagcctgagccgcaatcgctgcggtactctgc

SEQ ID NO: 560215 - DNA, 120 bp, Artificial Sequence
  ENSG00000169439_3 (sequence is synthesized)
tccggattcgtgtgcgcgggctgcgccgagcgctgggcaggaggcttcgttttgccctggttgcaagcagcggctgggagcagccggtccctggggaatatgcggcgcgcgtggatcctg

SEQ ID NO: 560216 - DNA, 120 bp, Artificial Sequence
  ENSG00000169439_4 (sequence is synthesized)
ctcaccttgggcttggtggcctgcgtgtcggcggagtcgagagcagagctgacatctgataaagacatgtaccttgacaacagctccattgaagaagcttcaggagtgtatcctattgat

SEQ ID NO: 560217 - DNA, 120 bp, Artificial Sequence
  ENSG00000169439_5 (sequence is synthesized)
gacgatgactacgcttctgcgtctggctcgggagctgatgaggatgtagagagtccagagctgacaacatctcgaccacttccaaagatactgttgactagtgctgctccaaaagtggaa

SEQ ID NO: 560218 - DNA, 120 bp, Artificial Sequence
  ENSG00000169439_6 (sequence is synthesized)
accacgacgctgaatatacagaacaagatacctgctcagacaaagtcacctgaagaaactgataaagagaaagttcacctctctgactcagaaaggaaaatggacccagccgaagaggat

SEQ ID NO: 560219 - DNA, 120 bp, Artificial Sequence
  ENSG00000169439_7 (sequence is synthesized)
acaaatgtgtatactgagaaacactcagacagtctgtttaaacggacagaagtcctagcagctgtcattgctggtggagttattggctttctctttgcaatttttcttatcctgctgttg

SEQ ID NO: 560220 - DNA, 120 bp, Artificial Sequence
  ENSG00000169439_8 (sequence is synthesized)
gtgtatcgcatgagaaagaaggatgaaggaagctatgaccttggagaacgcaaaccatccagtgctgcttatcagaaggcacctactaaggagttttatgcgtaaaactccaacttagtg

SEQ ID NO: 560221 - DNA, 120 bp, Artificial Sequence
  ENSG00000169439_9 (sequence is synthesized)
tctctatttatgagatcactgaacttttcaaaataaagcttttgcatagaataatgaagatctttgttttttgttttcattaaagagccattctggcactttaatgataaaatcccattg

SEQ ID NO: 560222 - DNA, 120 bp, Artificial Sequence
  ENSG00000169439_10 (sequence is synthesized)
tatttaaaacatttcatgtatttctttagaacaacataaaattaaaatttaacatctgcagtgttctgtgaatagcagtggcaaaatattatgttatgaaaaccctcgatgttcatggaa

SEQ ID NO: 560223 - DNA, 120 bp, Artificial Sequence
  ENSG00000169439_11 (sequence is synthesized)
ttggtttaaacttttatgcgcaaatacaaaatgattgtctttttcctatgactcaaagatgaaagctgtttcatttgtgtcagcatgtctcagattgaccttaccaagttggtcttactt

SEQ ID NO: 560224 - DNA, 120 bp, Artificial Sequence
  ENSG00000169439_12 (sequence is synthesized)
tgttaatttatctgttgtccccttcctctcctctgccctcccttcttgtgcccttaaaaccaaaccctatgccttttgtagctgtcatggtgcaatttgtctttggaaaattcagataat

SEQ ID NO: 560225 - DNA, 120 bp, Artificial Sequence
  ENSG00000169439_13 (sequence is synthesized)
gtgtcagactatccattttacacttgctttatttttcattacctgtagctttgggcagatttgcaacagcaaattaatgtgtaaaattggattattactacaaaaccgtttagtcatatc

SEQ ID NO: 560226 - DNA, 120 bp, Artificial Sequence
  ENSG00000169439_14 (sequence is synthesized)
tatctaatcagatcttcttttgggaggatttgatgtaagttactgacaagcctcagcaaacccaaagatgttaacagtattttaagaagttgctgcagattcctttggccactgtatttg

SEQ ID NO: 560227 - DNA, 120 bp, Artificial Sequence
  ENSG00000169439_15 (sequence is synthesized)
ttaatttcttgcaatttgaaggtacgagtagaggtttaaagaaaaatcagtttttgttcttaaaaatgcatttaagttgtaaacgtctttttaagcctttgaagtgcctctgattctatg

SEQ ID NO: 560228 - DNA, 120 bp, Artificial Sequence
  ENSG00000169439_16 (sequence is synthesized)
taacttgttgcagactggtgttaatgagtatatgtaacagtttaaaaaaaaagttggtattttataagcacagacaattctaatggtaacttttgtagtcttatgaatagacataaattg

SEQ ID NO: 560229 - DNA, 120 bp, Artificial Sequence
  ENSG00000169439_17 (sequence is synthesized)
taatttgggaacataaaaactactgaataaatcatgtggcctaatattgaaaatgtcactgttataaattttgtacatttttgatcaaatgtacatctcccctttgctaacggccgtctg

SEQ ID NO: 560230 - DNA, 120 bp, Artificial Sequence
  ENSG00000169439_18 (sequence is synthesized)
ctctcaaggatgacgtgggtttgatttctaagtgtttcacagtgtctgtaaatcaagaccaaagagcctgtcgatgagactgtttattaccagattcacttctgaattggccagaggaaa

SEQ ID NO: 560231 - DNA, 120 bp, Artificial Sequence
  ENSG00000169439_19 (sequence is synthesized)
tctgaatgtattatcctgtgtgtgtctaggtagagatattggaaggctgccaggggatttcgaagtttgcaacctttataggataactgatggcaatattaagacagacgcctgcttttg

SEQ ID NO: 560232 - DNA, 120 bp, Artificial Sequence
  ENSG00000169439_20 (sequence is synthesized)
caaataacttacaagactgtaaattccaaagatctgaatggggctttcctgatgttggtatctaaggcttaggcctatagattgatttacctttggaattgtgctccaaatgtctactga

SEQ ID NO: 560233 - DNA, 120 bp, Artificial Sequence
  ENSG00000169439_21 (sequence is synthesized)
agcttaaccgaagaactaataaatggactacagtagctcacgttacagggaaggagggtaggcagggaggctctgtgtgttaaaatgagggtctcactgctttaggattgaagtggctgg

SEQ ID NO: 560234 - DNA, 120 bp, Artificial Sequence
  ENSG00000169439_22 (sequence is synthesized)
aaagagtgatgcctggggaaggagatggagttatgagggtactgtggctggtactttctgtactaaacatttcctttttctattttaccactaattttgttttaaactgtgagccgtcca

SEQ ID NO: 560235 - DNA, 120 bp, Artificial Sequence
  ENSG00000169439_23 (sequence is synthesized)
agtcagaagaagacagcaaaaaaagcaacttttccaacatacaatttacttttaataaagtatgaatatttcattttgagaacattccctggaattgccacataattcattaaaaacatt

SEQ ID NO: 560236 - DNA, 120 bp, Artificial Sequence
  ENSG00000169439_24 (sequence is synthesized)
tttttaagcaacacttggaacagtgtttactttaaatccttaatggccttaattaattctcagattcctgccccatcacttacagaaccaattcactttagagtgactaaaaggaaacga

SEQ ID NO: 560237 - DNA, 120 bp, Artificial Sequence
  ENSG00000169439_25 (sequence is synthesized)
tagcctagctttctaaagccacgctgtgtccctcaattacagagggtaggaatgggtatacctctaactgtgcaaagcagagtgaaattcaattcatagaataacaactgctgggaatat

SEQ ID NO: 560238 - DNA, 120 bp, Artificial Sequence
  ENSG00000169439_26 (sequence is synthesized)
ccgtgccaggaaaagaaaaatttctggcaaatattttgtcactgctgtaaagcaaaatatttgtgaaagtgccaaaataaagtctgtcatgccaaaagtaaatcattgtatagactgaca

SEQ ID NO: 560239 - DNA, 120 bp, Artificial Sequence
  ENSG00000169439_27 (sequence is synthesized)
agaacacaacggcggtcaagggagaggacgcagaaagatcaggctcaggcctgggtcttgggcatcttcaaggaactcgctttctcagtggtataagaagagccccactctataagaggc

SEQ ID NO: 560240 - DNA, 120 bp, Artificial Sequence
  ENSG00000169439_28 (sequence is synthesized)
aaaaaaccccactctgattctaaaacccgctggaatttgaactgttgcctgtgttctgaaagtgtcttgaattgcttgggatcccaagcctgaagtttacagcatctcatggtgtccaga

SEQ ID NO: 560241 - DNA, 120 bp, Artificial Sequence
  ENSG00000169439_29 (sequence is synthesized)
aggatattctttgctgagctgtgaatgcagtattaagaattcaatcaaatcttcagaatgtgaagagcaattgctaaagaaaatcattagccctgtgcacagttagaccaaacagctggc

SEQ ID NO: 560242 - DNA, 120 bp, Artificial Sequence
  ENSG00000169439_30 (sequence is synthesized)
gtctttgttccagagcatttgccaaagccaggtatgtccagtcaaagggataatgcaaccgatagctcccaagcctccatatcctcagctgttgcttgttgccactgaggggtggacatg

SEQ ID NO: 560243 - DNA, 120 bp, Artificial Sequence
  ENSG00000169439_31 (sequence is synthesized)
ttttcatttggcatcttacatgtgagcatcatgactacagactcatcttataccaattaaataataaactccactctgtgggcagaggttctgtctggagagagcagagctgacatctga

SEQ ID NO: 560244 - DNA, 120 bp, Artificial Sequence
  ENSG00000169442_0 (sequence is synthesized)
agacagccctgagatcacctaaaaagctgctaccaagacagccacgaagatcctaccaaaatgaagcgcttcctcttcctcctactcaccatcagcctcctggttatggtacagatacaa

SEQ ID NO: 560245 - DNA, 120 bp, Artificial Sequence
  ENSG00000169442_1 (sequence is synthesized)
cctcttctgcttcagttgaggtgacacgtctcagccttagccctgtgccccctgaaacagctgccaccatcactcgcaagagaatcccctccatctttgggaggggttgatgccagacat

SEQ ID NO: 560246 - DNA, 120 bp, Artificial Sequence
  ENSG00000169442_2 (sequence is synthesized)
caccaggttgtagaagttgacaggcagtgccatgggggcaacagccaaaataggggggtaatgatgtaggggccaagcagtgcccagctgggggtcaataaagttacccttgtacttgca

SEQ ID NO: 560247 - DNA, 120 bp, Artificial Sequence
  ENSG00000169442_3 (sequence is synthesized)
agacagccctgagatcacctaaaaagctgctaccaagacagccacgaagatcctaccaaaatgaagcgcttcctcttcctcctactcaccatcagcctcctggttatggtacagagagaa

SEQ ID NO: 560248 - DNA, 120 bp, Artificial Sequence
  ENSG00000169442_4 (sequence is synthesized)
aagaagacaggactctcccatttcagaaacaactggagtctcaaaagcgactgctattccaggaggcagctttggtagcatcccagatacaaactggactctcaggacaaaacgacacca

SEQ ID NO: 560249 - DNA, 120 bp, Artificial Sequence
  ENSG00000169442_5 (sequence is synthesized)
tccatcaagcattaaggacagctcgatcaccatctggccacttccccaccccacatccagccacccacgctttgccaagtgctttctcactcagccctggctcatgtgaccttcacaact

SEQ ID NO: 560250 - DNA, 120 bp, Artificial Sequence
  ENSG00000169442_6 (sequence is synthesized)
gtgatgaacttctccccactcagaagatgaaactgaggctcagggaagctaagccctttgccaggctaggaaggtcaagggccagggctcccctgtctccctctatgccagaagggctgg

SEQ ID NO: 560251 - DNA, 120 bp, Artificial Sequence
  ENSG00000169446_0 (sequence is synthesized)
ctctacgcaggcccccgtccctctgccccaccctgttctcgccactggccctgcccccatttgccggcgcccttcctcttcgcttccccgtagctcccgctttcgcctcttcgtttatga

SEQ ID NO: 560252 - DNA, 120 bp, Artificial Sequence
  ENSG00000169446_1 (sequence is synthesized)
ctccgttgggctccggccctcctagagaggcctccatagcgcaggttcgtgggttctcgcggacctttttccgtgtagctttctgcttcttcccggcattcctgtttccgttttctcaca

SEQ ID NO: 560253 - DNA, 120 bp, Artificial Sequence
  ENSG00000169446_2 (sequence is synthesized)
gccctctggcttttccaccactgagacactttgcgctcaggacttcagtgacgtcatctttctgcggcgcgcggacacccgccggtggaagaagaaacagctccgccgtccttcgcttct

SEQ ID NO: 560254 - DNA, 120 bp, Artificial Sequence
  ENSG00000169446_3 (sequence is synthesized)
tttgctgggctgctgctccttcggcatcatggcgccgtcgctgtggaaggggctggtgggcatcggtctctttgccctagcccacgccgccttttccgctgcgcagcatcgttcttatat

SEQ ID NO: 560255 - DNA, 120 bp, Artificial Sequence
  ENSG00000169446_4 (sequence is synthesized)
gcgattaacagaaaaagaagatgaatcactgccaatagatatagttcttcagacacttctggcctttgcagttacctgttacggtatagttcatattgcaggagagtttaaagacatgga

SEQ ID NO: 560256 - DNA, 120 bp, Artificial Sequence
  ENSG00000169446_5 (sequence is synthesized)
tgccacttcagaactgaaaaataagacatttgatacgttaaggaatcacccatccttttatgtatttaatcatcgtggtcgagtacttttccggccttcggatacagcaaattcttcaaa

SEQ ID NO: 560257 - DNA, 120 bp, Artificial Sequence
  ENSG00000169446_6 (sequence is synthesized)
ccaagatgcattgtcctctaacacatcattgaagttacgaaaactcgaatcactgcgtcgttaagatttttacaaattataataataggacaggacacagagctggaatattggagtttg

SEQ ID NO: 560258 - DNA, 120 bp, Artificial Sequence
  ENSG00000169446_7 (sequence is synthesized)
gggtataaaacactcctccctgcccccattagtatttatattgatctttcagacctactttagtaaaaaaaaccatggcccttgtttatatactgttaatccaatcattaatgcagtgta

SEQ ID NO: 560259 - DNA, 120 bp, Artificial Sequence
  ENSG00000169446_8 (sequence is synthesized)
agttatatgtgaaatgagtctttggtatttcatataggaattattttttttttcatttaaaacaaatccacatcttttgtaaaagccactgttttgaacacatttccttgaaaaatgttg

SEQ ID NO: 560260 - DNA, 120 bp, Artificial Sequence
  ENSG00000169446_9 (sequence is synthesized)
gtggtttttgtgattatttatttttttagatttcttttcttttgcactacaatttttggaatccttttggaaatactgtgtgactgctgtgttttgcagcatgaattatagtaaaatggt

SEQ ID NO: 560261 - DNA, 120 bp, Artificial Sequence
  ENSG00000169446_10 (sequence is synthesized)
cttcaattcttaacaaatggacttccctgatgagaccaaaatggtgatttaacagtttttcttgtgtcccctaaaaagtggctctgcttcagaagtacttgccagtttttaatttatttg

SEQ ID NO: 560262 - DNA, 120 bp, Artificial Sequence
  ENSG00000169446_11 (sequence is synthesized)
tgacttttcaccctaccctgctcccatataccttctaccatcagctgtcttgtttcatcatttctctgagattctgtgtgcagtgagcaatttttgtgtcagaaattctttgtcagaaca

SEQ ID NO: 560263 - DNA, 120 bp, Artificial Sequence
  ENSG00000169446_12 (sequence is synthesized)
aatatatgtaacaggctcaacttactgtaaagctacttgtgttctcttcatttgtctgtaaaaatttccctaattgattatatagtgtaagaatagttgaagactagttgaagacctttt

SEQ ID NO: 560264 - DNA, 120 bp, Artificial Sequence
  ENSG00000169446_13 (sequence is synthesized)
gtgatttcattatcatgcctatgcagaagaaaaatcattgaggaaaattgtcattagccagtttaactgattcaaactctgtttatttcatactaaactagtgaataagtgaaataaagg

SEQ ID NO: 560265 - DNA, 120 bp, Artificial Sequence
  ENSG00000169446_14 (sequence is synthesized)
aaactcgtcattaatctaaagacagagttcaaaggaattgggccaaatatattctcagtatttggaactaatgtttttaaggtttttaggaaaatcaggtcatttaagaaattgttttgt

SEQ ID NO: 560266 - DNA, 120 bp, Artificial Sequence
  ENSG00000169446_15 (sequence is synthesized)
gtcttcaagttttccatcttcactgtatgttgctgaaagtgaggatgaggatacagagttgatatttttagaaacagtaattttacttttaaggaaattggctagctctttgagctagag

SEQ ID NO: 560267 - DNA, 120 bp, Artificial Sequence
  ENSG00000169446_16 (sequence is synthesized)
agctgtaggaagctcaacatttctttgtagagaacgttgctttttttggattgtacaggtataaaaacattgcttttgttgaattgtataggtgtaaaaagggaataactgtatgcaggt

SEQ ID NO: 560268 - DNA, 120 bp, Artificial Sequence
  ENSG00000169446_17 (sequence is synthesized)
ttgaaaaggaaatgtgctttaggcatgagtcataagatgccattgtacttgtaggcattttattttcctttagaaatggacatcagctcttctcttctgactggtaacacatagccccaa

SEQ ID NO: 560269 - DNA, 120 bp, Artificial Sequence
  ENSG00000169446_18 (sequence is synthesized)
agcatgagattatttttcattgggtttttattgttgtttagttttggtttgttacgccagcccagtctgtctgcggaacactgactctgctctctaatgagaacaaagttagaaatctgc

SEQ ID NO: 560270 - DNA, 120 bp, Artificial Sequence
  ENSG00000169446_19 (sequence is synthesized)
cgataacctaaaataatttagaaatgaattaaaaatgtgaaatcgggttaaagtgatgatgataaaatagcatgcaagaaacaagctccttccatcagacttggctactgttttcttctg

SEQ ID NO: 560271 - DNA, 120 bp, Artificial Sequence
  ENSG00000169446_20 (sequence is synthesized)
gtacgatttggtttggaagagcctcttgtttccttctctttggggtatgtcttcgtttcttaatatgtttgtaacattattgagatataattcacataccttacaattcacttattttaa

SEQ ID NO: 560272 - DNA, 120 bp, Artificial Sequence
  ENSG00000169446_21 (sequence is synthesized)
gggtacaatttagtggtttttagtgtattcacaaagttgtgtaaccgtgaccacagtcaattttagaacatttcgttaccccaaaaagaaaccctgtacccttgagcagtcacctctcat

SEQ ID NO: 560273 - DNA, 120 bp, Artificial Sequence
  ENSG00000169446_22 (sequence is synthesized)
tttctcccagtgcccaccccatccccgagcccctggcaaccactaatctatttctctctctgtagatttgcttattctggtcatttcatataaatggaattctacaatattcggtctttt

SEQ ID NO: 560274 - DNA, 120 bp, Artificial Sequence
  ENSG00000169446_23 (sequence is synthesized)
gggactggcttcccaaatatgattttctatatggagtgagaaaattcttctcatcttgagaactcttattgctgtgaaagggagtggttggtaaaatcaatagatttcaggcaagagggc

SEQ ID NO: 560275 - DNA, 120 bp, Artificial Sequence
  ENSG00000169446_24 (sequence is synthesized)
cagatacctaacaggtttttctccgtgaatcttatgctgagtagtttttcctcataaccaagcatttatgatatattactacttataatactgtggctagtctctagaatggatgttgaa

SEQ ID NO: 560276 - DNA, 120 bp, Artificial Sequence
  ENSG00000169446_25 (sequence is synthesized)
atctttgcctcctcagtcgggaagagtcctgctaaaaatcaggctaaaaatcaggccaaaaatcaggccaaatgacttggcaaataattgacaaagtggttttcacgtgtgtctatcttt

SEQ ID NO: 560277 - DNA, 120 bp, Artificial Sequence
  ENSG00000169446_26 (sequence is synthesized)
gctagcagcttgtatacctcaggccaggtgagctccccaaatttcttttttcatttactccagtgagtttctgctgtctttttcaagtatgtaccataggacttaaaggtgatttggatg

SEQ ID NO: 560278 - DNA, 120 bp, Artificial Sequence
  ENSG00000169446_27 (sequence is synthesized)
cgttgtaacactgctaaatatgctaagtacagaattttatctacagtactgtgagacagtcaattattgcctagggtagttcaaaaatatgatgtgagctagttaagcctttgcttgact

SEQ ID NO: 560279 - DNA, 120 bp, Artificial Sequence
  ENSG00000169446_28 (sequence is synthesized)
gatttcagtgatattcagaagtgtgtaccaatcaaggctctttaaaatacggaacgactcacttaataaccagggaaccagccaaatactgtgcagccgcagaatatgcatatcaatgag

SEQ ID NO: 560280 - DNA, 120 bp, Artificial Sequence
  ENSG00000169446_29 (sequence is synthesized)
ttggaggtgattattctctgtaactccctaatgattgttttctaagcattgtggcttctcagtggcttgacagcatcttcctggttgtatgtggcctgtttacatgatgtattgaataat

SEQ ID NO: 560281 - DNA, 120 bp, Artificial Sequence
  ENSG00000169446_30 (sequence is synthesized)
gttgtttgttgtgagcatcaatgcctgtaacaccaaactaaacacgtgtttttgggatatgtttccaatctttaaatgaccttgccctgtccaataaataaatgattgtctcaccctgtt

SEQ ID NO: 560282 - DNA, 120 bp, Artificial Sequence
  ENSG00000169469_0 (sequence is synthesized)
accagttctaagggaccatacagagtattcctctcttcacaccaggaccagtcactgttgcagcatgagttcccagcagcagaagcagccttgcaccccaccccctcagcttcagcagca

SEQ ID NO: 560283 - DNA, 120 bp, Artificial Sequence
  ENSG00000169469_1 (sequence is synthesized)
gcaggtgaaacagccttgccagcctccacctcaggaaccatgcatccccaaaaccaaggagccctgccaccccaaggtgcctgagccctgccaccccaaagtgcccgagccctgccagcc

SEQ ID NO: 560284 - DNA, 120 bp, Artificial Sequence
  ENSG00000169469_2 (sequence is synthesized)
caccccaaggtgcctgagccctgcccttcaatagtcactccagcaccagcccagcagaagaccaagcagaagtaatgtggtccacagccatgcccttgaggagccggccaccagatgctg

SEQ ID NO: 560285 - DNA, 120 bp, Artificial Sequence
  ENSG00000169469_3 (sequence is synthesized)
aatcccctatcccattctgcgtatgagtcccatttgccttgcaattagcattctgtctcccccaaaaaagaatgtgctatgaagctttctttcctacacactctgagtctctgaatgaag

SEQ ID NO: 560286 - DNA, 120 bp, Artificial Sequence
  ENSG00000169469_4 (sequence is synthesized)
ctgaaggtcttagtaccagagctagttttcagctgctcagaattcatctgaagagagacttaagatgaaagcaaatgattcagctcccttatacccccattaaattcactttcaattcca

SEQ ID NO: 560287 - DNA, 120 bp, Artificial Sequence
  ENSG00000169474_0 (sequence is synthesized)
atgaattctcagcagcagaagcagccttgcaccccaccccctcagcctcagcagcagcaggtgaaacaaccttgccagcctccaccccaggaaccatgcatccccaaaaccaaggagccc

SEQ ID NO: 560288 - DNA, 120 bp, Artificial Sequence
  ENSG00000169474_1 (sequence is synthesized)
cccaaagtgcctgagccctgccagcccaaggttccagagccctgccagcccaaggtgcctgagccctgcccttcaacggtcactccagcaccagcccagcagaagaccaagcagaagtaa

SEQ ID NO: 560289 - DNA, 120 bp, Artificial Sequence
  ENSG00000169484_0 (sequence is synthesized)
atggacccacagaactattccttggtgtcagaatttgtgttgcatggactctgcacttcacgacatcttcaaaattttttctttatatttttctttggggtctatgtggccattatgctg

SEQ ID NO: 560290 - DNA, 120 bp, Artificial Sequence
  ENSG00000169484_1 (sequence is synthesized)
ggtaaccttctcattttggtcactgtaatttctgatccctgcctgcactcctcccctatgtacttcctgctggggaacctagctttcctggacatgtggctggcctcatttgccactccc

SEQ ID NO: 560291 - DNA, 120 bp, Artificial Sequence
  ENSG00000169484_2 (sequence is synthesized)
aagatgatcagggatttccttagtgatcaaaaactcatctcctttggaggatgtatggctcaaatcttcttcttgcactttactggtggggctgagatggtgctcctggtttccatggcc

SEQ ID NO: 560292 - DNA, 120 bp, Artificial Sequence
  ENSG00000169484_3 (sequence is synthesized)
gttggatttgtgcactccatcagtcaagtggctttcactgtaaatttgccttactgtggccccaatgaggtagacagcttcttctgtgacctccctctggtgatcaaacttgcctgcatg

SEQ ID NO: 560293 - DNA, 120 bp, Artificial Sequence
  ENSG00000169484_4 (sequence is synthesized)
gacacctatgtcttgggtataattatgatctcagacagtgggttgctttccttgagctgttttctgctcctcctgatctcctacaccgtgatcctcctcgctatcagacagcgtgctgcc

SEQ ID NO: 560294 - DNA, 120 bp, Artificial Sequence
  ENSG00000169484_5 (sequence is synthesized)
ggtagcacatccaaagcactctccacttgctctgcacatatcatggtagtgacgctgttctttggcccttgcatttttgtttatgtgcggcctttcagtaggttctctgtggacaagctg

SEQ ID NO: 560295 - DNA, 120 bp, Artificial Sequence
  ENSG00000169484_6 (sequence is synthesized)
ctgtctgtgttttataccatttttactccactcctgaaccccattatctacacattgagaaatgaggagatgaaagcagctatgaagaaactgcaaaaccgacgggtgacttttcaatga

SEQ ID NO: 560296 - DNA, 120 bp, Artificial Sequence
  ENSG00000169484_7 (sequence is synthesized)
actttaaaataatgcttttcctgaattgtttttaagatgcagaagaagatgattaaatcatctctgggataaaatatgtgttttcaatagctccattcaagtataatagatgtaaaatat

SEQ ID NO: 560297 - DNA, 120 bp, Artificial Sequence
  ENSG00000169488_0 (sequence is synthesized)
tgaaaacccagacacatacatagcaataggaattggaattctgaaaagtttaagtgtaattggaaaatcaaacccatgctcacttcattaactgatctctgtttctctcctattcaggta

SEQ ID NO: 560298 - DNA, 120 bp, Artificial Sequence
  ENSG00000169488_1 (sequence is synthesized)
gctgaaattaagtcccttccaaaatcgatgaatgagacaaatcattctcgggtgacagaatttgtgttgctgggactgtctagttcaagggagctccaacctttcttgtttcttacattt

SEQ ID NO: 560299 - DNA, 120 bp, Artificial Sequence
  ENSG00000169488_2 (sequence is synthesized)
tcactactttatctagcaattctgttgggcaactttctcatcatcctcactgtgacctcagattcccgccttcacacccccatgtactttctgcttgcaaacctgtcatttatagacgta

SEQ ID NO: 560300 - DNA, 120 bp, Artificial Sequence
  ENSG00000169488_3 (sequence is synthesized)
tgtgttgcctcttttgctacccctaaaatgattgcagactttctggttgagcgcaagactatttcttttgatgcctgcctggcccagattttctttgttcatctcttcactggcagtgaa

SEQ ID NO: 560301 - DNA, 120 bp, Artificial Sequence
  ENSG00000169488_4 (sequence is synthesized)
atggtgctcctagtttccatggcctatgaccgttatgttgctatatgcaaacctctccactacatgacagtcatgagccgtcgtgtatgtgttgtgctcgtcctcatttcatggtttgtg

SEQ ID NO: 560302 - DNA, 120 bp, Artificial Sequence
  ENSG00000169488_5 (sequence is synthesized)
ccagccagttggcattcactgttaatctgccattttgtggtcctaataaggtagacagttttttctgtgaccttcctctagtgaccaagttagcctgcatagacacttatgttgtcagct

SEQ ID NO: 560303 - DNA, 120 bp, Artificial Sequence
  ENSG00000169488_6 (sequence is synthesized)
tactaatagttgcagatagtggctttctttctctgagttcctttctcctcttggttgtctcctacactgtaatacttgttacagttaggaatcgctcctctgcaagcatggcgaaggccc

SEQ ID NO: 560304 - DNA, 120 bp, Artificial Sequence
  ENSG00000169488_7 (sequence is synthesized)
gctccacattgactgctcacatcactgtggtcactttattctttggaccatgcattttcatctatgtgtggcccttcagcagttactcagttgacaaagtccttgctgtattctacacca

SEQ ID NO: 560305 - DNA, 120 bp, Artificial Sequence
  ENSG00000169488_8 (sequence is synthesized)
tcttcacgcttattttaaaccctgtaatctacacgctaagaaacaaagaagtgaaggcagctatgtcaaaactgaagagtcggtatctgaagcctagtcaggtttctgtagtcataagaa

SEQ ID NO: 560306 - DNA, 120 bp, Artificial Sequence
  ENSG00000169488_9 (sequence is synthesized)
atgttcttttcctagaaacaaagtaaacttatgagactgttaccactttagccctgtctccatacacttacaagtggattcactgtaatcttaaagcaaatcaacttggcctgtgggaaa

SEQ ID NO: 560307 - DNA, 120 bp, Artificial Sequence
  ENSG00000169490_0 (sequence is synthesized)
agttcttgggtctgtgctgctggcctggggttgtggttgaggccgggtctccgctcctgtgcccgggaagatggtgctaggtggttgcccggttagttacttacttctgtgcggccaggc

SEQ ID NO: 560308 - DNA, 120 bp, Artificial Sequence
  ENSG00000169490_1 (sequence is synthesized)
ggctttgctgctggggaatttacttctgctgcattgtgtgtctcggagccactcgcaaaatgcgaccgctgagcctgagctcacatccgctggcgccgcccagccggagggccccggggg

SEQ ID NO: 560309 - DNA, 120 bp, Artificial Sequence
  ENSG00000169490_2 (sequence is synthesized)
tgctgcgagctgggaatatggcgacccccactctccggtcatcctctgctcttacctacctgatgaatttatagaatgtgaagacccagtggatcatgttggaaatgcaactgcatccca

SEQ ID NO: 560310 - DNA, 120 bp, Artificial Sequence
  ENSG00000169490_3 (sequence is synthesized)
ggaacttggttatggttgtctcaagttcggcggtcaggcctacagcgacgtggaacacacttcagtccagtgccatgccttagatggaattgagtgtgccagtcctaggacctttctacg

SEQ ID NO: 560311 - DNA, 120 bp, Artificial Sequence
  ENSG00000169490_4 (sequence is synthesized)
agaaaataaaccttgtataaagtataccggacactacttcataaccactttactctactccttcttcctgggatgttttggtgtggatcgattctgtttgggacacactggcactgcagt

SEQ ID NO: 560312 - DNA, 120 bp, Artificial Sequence
  ENSG00000169490_5 (sequence is synthesized)
agggaagctgttgacgcttggaggacttgggatttggtggtttgttgaccttattttgctaattactggagggctgatgccaagtgatggcagcaactggtgcactgtttactaagaaga

SEQ ID NO: 560313 - DNA, 120 bp, Artificial Sequence
  ENSG00000169490_6 (sequence is synthesized)
gctgccatcatggcccagggaggcgggtgaaagctccgtcttctgaattcatctctacaggctcaaaactcctctttgatatcagacctgatgttattttccttcttttggagggcattt

SEQ ID NO: 560314 - DNA, 120 bp, Artificial Sequence
  ENSG00000169490_7 (sequence is synthesized)
gtttggttaagaaggcttctttggactttggaatttcaacccagattttaccttgcagacggaatgacaagcaaaaagtgttgtggggaatcaaatttgttcctttcctcatgcacaaaa

SEQ ID NO: 560315 - DNA, 120 bp, Artificial Sequence
  ENSG00000169490_8 (sequence is synthesized)
cataaaggatagtggcgagtttacaagctgtggatgggtttccatagtcttcctttctgtacattgctatatcttcagtcctttggagcaagtggacctaacaagttgagcaaaatgaat

SEQ ID NO: 560316 - DNA, 120 bp, Artificial Sequence
  ENSG00000169490_9 (sequence is synthesized)
atttggatccatgttcctcttgtgaccctgagtcttcatgcaaggagatctgaagctgaacaatgaaaatcttcagcagaaatagaaatggccgtggattgtaatacacactgaaattct

SEQ ID NO: 560317 - DNA, 120 bp, Artificial Sequence
  ENSG00000169490_10 (sequence is synthesized)
gactttctgaatttaaatgtagaataaattttaccaacttggagtactgtatgagtattttcagtagggggaataaactcaaaattatatttgttttgcagaaacctagtcatttgaaat

SEQ ID NO: 560318 - DNA, 120 bp, Artificial Sequence
  ENSG00000169490_11 (sequence is synthesized)
gagccatcctattaagccctcttttgtctccattatgttccagaggcagtatatgcagtgcaataattttttcattccacttatgttttgaaagccagcggcatcagatgtgtgagttga

SEQ ID NO: 560319 - DNA, 120 bp, Artificial Sequence
  ENSG00000169490_12 (sequence is synthesized)
gctattcctcctggcagaattgtccaatctaaaaatcagcgtttaccagcccatgctaataaaattaagatttcatacaagtttctgtaaaactattcttcatgattagctctccctgtg

SEQ ID NO: 560320 - DNA, 120 bp, Artificial Sequence
  ENSG00000169490_13 (sequence is synthesized)
ctaagttgaaagaactattaaatataaaatcaaaggtgggcaatgtggccaagtcaatggaagaggctttactcagaataacttacaaattctagaaacaaggtagaactcactcagttt

SEQ ID NO: 560321 - DNA, 120 bp, Artificial Sequence
  ENSG00000169490_14 (sequence is synthesized)
acctaataataattgaatttaagaccaaatatcacagttgaaataacttccctggatacattctatcattttgtagctttcctaagaatttcttgctttatcattcctgattaatcactg

SEQ ID NO: 560322 - DNA, 120 bp, Artificial Sequence
  ENSG00000169490_15 (sequence is synthesized)
tttttacattattaaaggtggcaattttctgtaaaaaatttaaaacagatgatcctattctgtcttgaaagttctgtaccacactgaccttaaccttgcttataacataacaattggtaa

SEQ ID NO: 560323 - DNA, 120 bp, Artificial Sequence
  ENSG00000169490_16 (sequence is synthesized)
acttttaattcataatctttataccctaagatagtatttattaaatttttatgggtcatgaagaaactagaccctctccccagaaaaatctacatacacagaatttacatagaacttggg

SEQ ID NO: 560324 - DNA, 120 bp, Artificial Sequence
  ENSG00000169490_17 (sequence is synthesized)
ttcatctacacaatttatgcatgaaataaaattgtactggtaccctataaatttatacaaataaaagagtttaagggagttcaaggatgccatatgtatattttaaaaaaatttctaagg

SEQ ID NO: 560325 - DNA, 120 bp, Artificial Sequence
  ENSG00000169490_18 (sequence is synthesized)
gaagtctaaaaaacataaattataatattacccaaaataagatgctacttttcacctaaccaagtcctgcctcatttcacactttaacctcctaagtatattcataaccctaccaaaagt

SEQ ID NO: 560326 - DNA, 88 bp, Artificial Sequence
  ENSG00000169490_19 (sequence is synthesized)
actttaacctcctaagtatattcataaccctaccaaaagttgttttctttaaaaaataagaaactttagggccagcgcaatggtgcaa

SEQ ID NO: 560327 - DNA, 78 bp, Artificial Sequence
  ENSG00000169490_20 (sequence is synthesized)
atcccaaaaaagaaattttgcagctccaaggcttgaagtcatttatgttgccaggggtaagagcttggttgaagggct

SEQ ID NO: 560328 - DNA, 120 bp, Artificial Sequence
  ENSG00000169490_21 (sequence is synthesized)
tcatttatgttgccaggggtaagagcttggttgaagggctaaaagactagaaactactgaagatgcccttcttactgtcagtaaagctgctggagacaaaagaagttgttctcgctgcta

SEQ ID NO: 560329 - DNA, 120 bp, Artificial Sequence
  ENSG00000169490_22 (sequence is synthesized)
gagtggtaatttgagaatcatcagtattcctatgtgacaatccaaaattactggttttcatttgacttgtaaatgacacccatcatccatctgcccacaaacctggccaaatgtgataca

SEQ ID NO: 560330 - DNA, 120 bp, Artificial Sequence
  ENSG00000169490_23 (sequence is synthesized)
acctgaaaacctgatggactaaaggagtactatttaacaattgattgcctttgcactttattcaggttgtttcttaaattttggtagacagatccatttgtatatgtgtgtgttatatct

SEQ ID NO: 560331 - DNA, 120 bp, Artificial Sequence
  ENSG00000169490_24 (sequence is synthesized)
agtttatggctatagagaaggtttaaaatactacagtgtccttccctcaaggttaaattagaagctgcctgccttttagttgtttcttgcctttaataaaatgttatcagttcccccaga

SEQ ID NO: 560332 - DNA, 120 bp, Artificial Sequence
  ENSG00000169490_25 (sequence is synthesized)
ggatttctaaaccggcggtggcaaccagcactagtcggcccgccagtcatatccgccccgccccgtcggctgccgggcacgcccacctaggggggtcgacggatccgattggagaacgca

SEQ ID NO: 560333 - DNA, 120 bp, Artificial Sequence
  ENSG00000169490_26 (sequence is synthesized)
ttcggcgcaaaagaaggaggagcatgagacccagaagaggaatcgagaagcagaagcagagggcggagtagccccgcccgtctgctcgaccttttctagttggttggcggagaatcacgc

SEQ ID NO: 560334 - DNA, 120 bp, Artificial Sequence
  ENSG00000169490_27 (sequence is synthesized)
cattttttaacatctctttttgatcaaacaagaaaaggcatttgggaaatgcaaagaggactgagaatactttggcttaaattttgcccccagaatcttgttgtttgcctactgaagaga

SEQ ID NO: 560335 - DNA, 120 bp, Artificial Sequence
  ENSG00000169490_28 (sequence is synthesized)
acacctcccttctccaacaaaaggttcattttggtggctgtccgtttgacctgctgtgcttcagtttaattggcttggaaaggggtcagcagggtgaaaccgaaccccagaaaacttgat

SEQ ID NO: 560336 - DNA, 120 bp, Artificial Sequence
  ENSG00000169490_29 (sequence is synthesized)
gaagaaatgtcttttgcccgttttgattacgtgcatgcaaacagcgatttgcaaagaccgtatgatgatgatcatgatcttactggtgaattacagacctgatgaatttatagaatgtga

SEQ ID NO: 560337 - DNA, 120 bp, Artificial Sequence
  ENSG00000169490_30 (sequence is synthesized)
ggggttgtggttgaggccgggtctccgctcctgtgcccgggaagatggtgctaggtggttgcccgaatcttgttgtttgcctactgaagagatgaaaccatggcagaagtagaatcctta

SEQ ID NO: 560338 - DNA, 120 bp, Artificial Sequence
  ENSG00000169490_31 (sequence is synthesized)
tatgtataagcttatacatataaatatgtataagcatatacatatgcttataagtaaagataagtaaagcattgtgttcatctcttctaaatggcctttaatgacactgagtgtgtttgg

SEQ ID NO: 560339 - DNA, 120 bp, Artificial Sequence
  ENSG00000169490_32 (sequence is synthesized)
gggttttttttactatattattgaagaagccagtcatgaagaagaaagcaggagtttatttaagacagtgtacctttaagatggactcagaagtgtgtcactaaattccttgcccttgag

SEQ ID NO: 560340 - DNA, 120 bp, Artificial Sequence
  ENSG00000169490_33 (sequence is synthesized)
agttcttgggtctgtgctgctggcctggggttgtggttgaggccgggtctccgctcctgtgcccgggaagatggtgctaggtggttgcccgacctgatgaatttatagaatgtgaagacc

SEQ ID NO: 560341 - DNA, 120 bp, Artificial Sequence
  ENSG00000169490_34 (sequence is synthesized)
agaggtacaaagttttttgaagaatttcctcagaaagaccgttactggaaatttccagtatggccagggtcagtgactgaacaagatatttggtttccttatgaaggagcaatctctgtg

SEQ ID NO: 560342 - DNA, 120 bp, Artificial Sequence
  ENSG00000169495_0 (sequence is synthesized)
aaagtcactgaagagtggaagcgaggaaggaacaggatgattagacctcagctgcggaccgcggggctgggacgatgcctcctgccggggctgctgctgctcctggtgcccgtcctctgg

SEQ ID NO: 560343 - DNA, 120 bp, Artificial Sequence
  ENSG00000169495_1 (sequence is synthesized)
gccggggctgaaaagctacatacccagccctcctgccccgcggtctgccagcccacgcgctgccccgcgctgcccacctgcgcgctggggaccacgccggtgttcgacctgtgccgctgt

SEQ ID NO: 560344 - DNA, 120 bp, Artificial Sequence
  ENSG00000169495_2 (sequence is synthesized)
cacgccggtgttcgacctgtgccgctgttgccgcgtctgccccgcggccgagcgtgaagtctgcggcggggcgcagggccaaccgtgcgccccggggctgcagtgcctccagccgctgcg

SEQ ID NO: 560345 - DNA, 120 bp, Artificial Sequence
  ENSG00000169495_3 (sequence is synthesized)
ccgacgctgggaggggccgtgtgcggcagcgacaggcgcacctaccccagcatgtgcgcgctccgggccgaaaaccgcgccgcgcgccgcctgggcaaggtcccggccgtgcctgtgcag

SEQ ID NO: 560346 - DNA, 120 bp, Artificial Sequence
  ENSG00000169495_4 (sequence is synthesized)
tgggggaactgcggggatacagggaccagaagcgcaggcccgctcaggaggaattacaacttcatcgccgcggtggtggagaaggtggcgccatcggtggttcacgtgcagctgtggggc

SEQ ID NO: 560347 - DNA, 120 bp, Artificial Sequence
  ENSG00000169495_5 (sequence is synthesized)
aggttacttcacggcagcaggcttgttcctgtgtacagtggctctgggttcatagtgtctgaggacgggctcattattaccaatgcccatgttgtcaggaaccagcagtggattgaggtg

SEQ ID NO: 560348 - DNA, 120 bp, Artificial Sequence
  ENSG00000169495_6 (sequence is synthesized)
gtgctccagaatggggcccgttatgaagctgttgtcaaggatattgaccttaaattggatcttgcggtgattaagattgaatcaaatgctgaacttcctgtactgatgctgggaagatca

SEQ ID NO: 560349 - DNA, 120 bp, Artificial Sequence
  ENSG00000169495_7 (sequence is synthesized)
tctgaccttcgggctggagagtttgtggtggctttgggcagcccattttctctgcagaacacagctactgcaggaattgtcagcaccaaacagcgagggggcaaagaactggggatgaag

SEQ ID NO: 560350 - DNA, 120 bp, Artificial Sequence
  ENSG00000169495_8 (sequence is synthesized)
ctgatggaatctcctttgcaattccttcagatcgagttaggcagttcttggcagaataccatgagcaccagatgaaaggaaaggcgttttcaaataagaaatatctgggtctgcaaatgc

SEQ ID NO: 560351 - DNA, 120 bp, Artificial Sequence
  ENSG00000169495_9 (sequence is synthesized)
tgtccctcactgtgccccttagtgaagaattgaaaatgcattatccagatttccctgatgtgagttctggggtttatgtatgtaaagtggttgaaggaacagctgctcaaagctctggat

SEQ ID NO: 560352 - DNA, 120 bp, Artificial Sequence
  ENSG00000169495_10 (sequence is synthesized)
tgagagatcacgatgtaattgtcaacataaatgggaaacctattactactacaactgatgttgttaaagctcttgacagtgattccctttccatggctgttcttcggggaaaagataatt

SEQ ID NO: 560353 - DNA, 120 bp, Artificial Sequence
  ENSG00000169495_11 (sequence is synthesized)
tgctcctgacagtcatacctgaaacaatcaattaaatatcttgttttaaagtgggattatctaaaaaaaaaaaaaccagttatatcacgtggtttgtattggagatgtgccaaacatggc

SEQ ID NO: 560354 - DNA, 86 bp, Artificial Sequence
  ENSG00000169495_12 (sequence is synthesized)
tatatcacgtggtttgtattggagatgtgccaaacatggcaagaagtttttggatctttttcttacaaagaaaaatggatggttat

SEQ ID NO: 560355 - DNA, 120 bp, Artificial Sequence
  ENSG00000169495_13 (sequence is synthesized)
gaggggaacaacacacactggggcctggcagtgggtagggtagagggagggagagcattagcaaaaatagctaatgcatgctgggcttaacacccaggtgatgggttgattgataggtgc

SEQ ID NO: 560356 - DNA, 120 bp, Artificial Sequence
  ENSG00000169495_14 (sequence is synthesized)
ggtgatgggttgattgataggtgcagcaaaccatcatggcacacatttacctatgaaacaaacctgcacatcctgcatatgtacctcagaacttaaaaataaaaataaaaagaaaaatgg

SEQ ID NO: 560357 - DNA, 120 bp, Artificial Sequence
  ENSG00000169499_0 (sequence is synthesized)
ccagaaatccctggagcgcggcggacccggcggccggaggggcgaccccgcccgatgtaacgcgccccgcccgagccccggcccctgcacggggggggtgatgtgagcagagcccaggaa

SEQ ID NO: 560358 - DNA, 120 bp, Artificial Sequence
  ENSG00000169499_1 (sequence is synthesized)
ggaatgccttatgtggatcggcagaaccgaatctgtgggtttctggacatcgaggagcatgagaacagcggcaagtttctgcggaggtacttcattctggacacccaggctaactgcctc

SEQ ID NO: 560359 - DNA, 120 bp, Artificial Sequence
  ENSG00000169499_2 (sequence is synthesized)
ctctggtatatggacaacccccagaatctggcaatgggggcaggagctgttggagctttgcagctgacctacatctcgaaggtgagcatagctaccccaaaacagaaaccaaaaactcca

SEQ ID NO: 560360 - DNA, 120 bp, Artificial Sequence
  ENSG00000169499_3 (sequence is synthesized)
ttttgctttgttatcaatgccctgtctcagagatatttccttcaagccaatgatcagaaagatatgaaggactgggttgaagccctgaaccaagccagcaagatcaccgttcccaaaggt

SEQ ID NO: 560361 - DNA, 120 bp, Artificial Sequence
  ENSG00000169499_4 (sequence is synthesized)
gggggcctacccatgaccactgaagttctcaagagcttagcagctcctccagccctggagaagaagccacaggtggcctacaagacggagatcattggaggggtggtggtccacacaccc

SEQ ID NO: 560362 - DNA, 120 bp, Artificial Sequence
  ENSG00000169499_5 (sequence is synthesized)
atcagccagaacggtggggatgggcaggaagggagtgagcccgggtcccacaccatccttcgaaggtctcagagttacatccccacgtcaggctgccgtgcttccactgggcctcccctc

SEQ ID NO: 560363 - DNA, 120 bp, Artificial Sequence
  ENSG00000169499_6 (sequence is synthesized)
attaagagtggttactgcgtgaagcaagggaatgtgcggaagagctggaaacgtcgcttctttgcacttgatgactttaccatctgctacttcaagtgtgagcaggaccgagaaccactg

SEQ ID NO: 560364 - DNA, 120 bp, Artificial Sequence
  ENSG00000169499_7 (sequence is synthesized)
cgcaccatatttcttaaggatgttctgaagacccatgaatgtctggtcaagtctggtgatctcttaatgagggacaacctgtttgaaataataacaagctccaggaccttctacgtacag

SEQ ID NO: 560365 - DNA, 120 bp, Artificial Sequence
  ENSG00000169499_8 (sequence is synthesized)
gcagacagtccagaagacatgcacagctggattaaggagattggcgcagctgtccaggccctcaagtgccaccccagagaaacgtccttttctagatccatttctttgacccgacctgga

SEQ ID NO: 560366 - DNA, 120 bp, Artificial Sequence
  ENSG00000169499_9 (sequence is synthesized)
agctccagcctttcaagtgggcccaactctatcctgtgcagggggcggccacctttggaggaaaagaaagccctctgcaaagccccctctgtggcctcctcctggcagccctggacacct

SEQ ID NO: 560367 - DNA, 120 bp, Artificial Sequence
  ENSG00000169499_10 (sequence is synthesized)
gtcccccaggctggggagaagctgcttccacctggagacacttcagaggactccttgttcacgcctcgtcctggggagggcagcgctcctggggtgctgcccagctcccggataaggcac

SEQ ID NO: 560368 - DNA, 120 bp, Artificial Sequence
  ENSG00000169499_11 (sequence is synthesized)
agatcggagccccagcaccccaaggagaagccgtttatgttcaaccttgatgatgaaaacatacggacctctgatgtgtgatggagcacagtgccatgggagggagggagggagggagga

SEQ ID NO: 560369 - DNA, 120 bp, Artificial Sequence
  ENSG00000169499_12 (sequence is synthesized)
cttgagagaaggaggctgtgactcagtttctctaccttgttggagggtagtcagaggcctttatgtcactcatattcctgtggatgctctttgggagggaggggcccatccagctgggct

SEQ ID NO: 560370 - DNA, 120 bp, Artificial Sequence
  ENSG00000169499_13 (sequence is synthesized)
gtgtgtgtgtgtgtgtgtgtgtgtaatatcaacgcagtgtatttaatttggggaagtcactaggttagaactgtaggcatactcagtggagaggaagctacctattctattctaactatt

SEQ ID NO: 560371 - DNA, 120 bp, Artificial Sequence
  ENSG00000169499_14 (sequence is synthesized)
attctaactattctgaggtcttcctggagagggattgttttagcagctcctctccagagggggctggaagtccagtttcaccaatgaccaagttttatttccttgtccttgttttagttt

SEQ ID NO: 560372 - DNA, 120 bp, Artificial Sequence
  ENSG00000169499_15 (sequence is synthesized)
tttcattttgttttcagtccaggtgcctcgcagctcttttggaatgggccagcattagtctaattttaagcgctatgtgttttgtacccttgcaaacttgctttctctttcttcttgctg

SEQ ID NO: 560373 - DNA, 120 bp, Artificial Sequence
  ENSG00000169499_16 (sequence is synthesized)
ttgccctttgaatgaagccttgtgtgcttgcatgatcagaccctgtaataggatgaatttccatgcacttaacatgaagagatacaaaaagaatctagagagagatatatatttttaatg

SEQ ID NO: 560374 - DNA, 120 bp, Artificial Sequence
  ENSG00000169499_17 (sequence is synthesized)
aaatagaagcttggcatagaaacattgatttagatgttatgagttgctggccagagattcctcagataaaagagcctagaaaattgagttttgagcgggcatggtggctcacgcctgtaa

SEQ ID NO: 560375 - DNA, 120 bp, Artificial Sequence
  ENSG00000169499_18 (sequence is synthesized)
agtgaaactccgtctcaaaatataaaagaaaattgagtgtcccacccaaattttagggcgtacctccttccatttgataagaagatgctatttccagtgtccctgggagaattcttccat

SEQ ID NO: 560376 - DNA, 120 bp, Artificial Sequence
  ENSG00000169499_19 (sequence is synthesized)
ccagtttatatggtgaattgccaccagcgttccctaaaggaagagagaacttagcttatttctgtctgtgacttttatcagctagatcagttaattgtatttttaaattaaaaattagta

SEQ ID NO: 560377 - DNA, 120 bp, Artificial Sequence
  ENSG00000169499_20 (sequence is synthesized)
actagaggaagagactaagagaactatttttacctgagtaaatgctctcctcttcttgtgtccaaatctaatgcagaggtgaaaacacttgatgagaaaatcctttgtggcttgagggga

SEQ ID NO: 560378 - DNA, 120 bp, Artificial Sequence
  ENSG00000169499_21 (sequence is synthesized)
tttcaggacgtgttgtttccctgaagtctatgtcacactgagaactttttctgactgcactgctttggagctattcatttaaattgagtttggcctagttttcctggtataaaacaggaa

SEQ ID NO: 560379 - DNA, 120 bp, Artificial Sequence
  ENSG00000169499_22 (sequence is synthesized)
atctacattgttccctctttctctcccttccatcccttcccctgcctttcctatacacgctggtgtgcttttgccctcagaaattcttggtttgggagttatgtatttttgagtgatcga

SEQ ID NO: 560380 - DNA, 120 bp, Artificial Sequence
  ENSG00000169499_23 (sequence is synthesized)
ggttatgacatacttggagcggcatgatttcaagaagccattccaaattcttatagctccttagctctggttttactctcgtattttccccaagaaaattttttggctattcaaagaaag

SEQ ID NO: 560381 - DNA, 120 bp, Artificial Sequence
  ENSG00000169499_24 (sequence is synthesized)
cacaaaatatgtgatgtggaactcatgaaaatagggacttttgatatctctttaaatattccctgactcacggaaaagatgtcctcttttggtgtatacattgtgaaaatctacccattt

SEQ ID NO: 560382 - DNA, 86 bp, Artificial Sequence
  ENSG00000169499_25 (sequence is synthesized)
gtcctcttttggtgtatacattgtgaaaatctacccatttatctctctctctctcttttcttttaaataaattatctgataaggcc

SEQ ID NO: 560383 - DNA, 75 bp, Artificial Sequence
  ENSG00000169499_26 (sequence is synthesized)
tatctgataggttactattgctaaattaattggccattataataagctgatttgtttcttattcagcaagatctc

SEQ ID NO: 560384 - DNA, 120 bp, Artificial Sequence
  ENSG00000169499_27 (sequence is synthesized)
attataataagctgatttgtttcttattcagcaagatctcttttgagaatgtgacaaattaaacatacatagaatccatatggtattatcctgataaagggaaacgaggacactaagact

SEQ ID NO: 560385 - DNA, 120 bp, Artificial Sequence
  ENSG00000169499_28 (sequence is synthesized)
gtcaaatggaaatcttcttgtcaattggcaaacacttgggaattccacattagagcattgcttgtttttaattttttttttttaatttttaaaagacagggtctcactctcttacccagg

SEQ ID NO: 560386 - DNA, 120 bp, Artificial Sequence
  ENSG00000169499_29 (sequence is synthesized)
ctagagtgcagtggtgtgatcatagttcatcataactttgaatctctgggcttaagcaatcctcccatgttagcttcccaagtagctaggactacagggttgtgctaccacgcctggcta

SEQ ID NO: 560387 - DNA, 120 bp, Artificial Sequence
  ENSG00000169499_30 (sequence is synthesized)
tacagggttgtgctaccacgcctggctaatttttaatttttttttatctacagagcctggctatgttgcccaggctctctcaaactcctggcccaagtgatcctcctgccttggcctcct

SEQ ID NO: 560388 - DNA, 120 bp, Artificial Sequence
  ENSG00000169499_31 (sequence is synthesized)
ctgcacctagccagaacatcgttaatgtagttcaatatgagataaattattatcttcaatgaaacaagctctaaaagcattccattcctaaattgtatttcaaacttcctattttgttga

SEQ ID NO: 560389 - DNA, 120 bp, Artificial Sequence
  ENSG00000169499_32 (sequence is synthesized)
tatttcttaacttctggccagttttggaccataatcttttaatgtgaaccaaagatggtacgtatttgaccaaagcagttagttttaaatgtataaaattgaaccaaatggaaaaaatag

SEQ ID NO: 560390 - DNA, 120 bp, Artificial Sequence
  ENSG00000169499_33 (sequence is synthesized)
gttggggatgcagtatagattagtgactaagtgcataggctctggagtaaatctgagtttttttttttttaaaggaactaaaaaatgtactgcattttctttgtggaataaaagccttgc

SEQ ID NO: 560391 - DNA, 120 bp, Artificial Sequence
  ENSG00000169499_34 (sequence is synthesized)
ctgagttgtgctattttcataaggcttttgaagtggtcttgacccactgtgtgtaacagtatttcaggtggtcctccccatggctgaataatgccatccattattctttaatttttattt

SEQ ID NO: 560392 - DNA, 62 bp, Artificial Sequence
  ENSG00000169499_35 (sequence is synthesized)
tggctgaataatgccatccattattctttaatttttatttttagaaacagtggacctcctgg

SEQ ID NO: 560393 - DNA, 120 bp, Artificial Sequence
  ENSG00000169499_36 (sequence is synthesized)
ttataggtgtgagccaccacgcctggccaccatctattacttttgaaatcttcaaaagacttgcttactcaatgtcagctgatggttggtaaaaataatttggcctttagtgttaagtga

SEQ ID NO: 560394 - DNA, 120 bp, Artificial Sequence
  ENSG00000169499_37 (sequence is synthesized)
gtgagacatcataagggtattgaggtatacattatggagattgatgtcaggtcagaatattggagttatacatctatttctgagttgaatactcagctcccacgagaaagaaagtagttt

SEQ ID NO: 560395 - DNA, 120 bp, Artificial Sequence
  ENSG00000169499_38 (sequence is synthesized)
taaggtccagcttcttagtctacttgaagcaaattttttttcttttatatttctgaatataaatatactcttatatgggctaaaaagaccccatgaataaatagcaggttcagtagttga

SEQ ID NO: 560396 - DNA, 120 bp, Artificial Sequence
  ENSG00000169499_39 (sequence is synthesized)
ggagtggagtttagtaggtttgttttcagtataaattagataacatgtggaggtcacagcattttggaaattgagtgtccccaagtgagctttgtttataaactttcaaaatgtcggaag

SEQ ID NO: 560397 - DNA, 120 bp, Artificial Sequence
  ENSG00000169499_40 (sequence is synthesized)
tggacaggtttgttaaatcttgtctgccagcacccttttcttcctttgttccttttcctctctgtgttattgcctgcggcagccagtccttcatactagatagagttcagataaagcaaa

SEQ ID NO: 560398 - DNA, 120 bp, Artificial Sequence
  ENSG00000169499_41 (sequence is synthesized)
cgtttggcaaaaacatactgtttgacctcctccccctctgcttatgaaggggtagcatgattctgtgttttaaagcagtgatgtttcagctgtgaaatgcactcgctgtaagctctaggc

SEQ ID NO: 560399 - DNA, 120 bp, Artificial Sequence
  ENSG00000169499_42 (sequence is synthesized)
tgagtgcatggaaactgttacgcttctcattttatgtgatctcctaattggtatgtagcaaaaattttctaaaactgttttgtggcttgttttgtaataaaaccatgtgaaatactgaaa

SEQ ID NO: 560400 - DNA, 120 bp, Artificial Sequence
  ENSG00000169499_43 (sequence is synthesized)
aaacttctctgcgggttctggcgctggggcaccgaccccgcaacgactgcccgggctgcgggaggggaggagagcagagaacgtccccaggcaagtcccttgggtacggattgggccatg

SEQ ID NO: 560401 - DNA, 120 bp, Artificial Sequence
  ENSG00000169499_44 (sequence is synthesized)
gagactcctctttcactcccccgactaccttattaaatgacaggcctagaaggctcccctagggactcctgtcctttcctctgggtgcagcctggacttcgggcttctggaactccagac

SEQ ID NO: 560402 - DNA, 120 bp, Artificial Sequence
  ENSG00000169499_45 (sequence is synthesized)
gcagacccagaaatccctggagcgcggcggacccggcggccggaggggcgaccccgcccgatgtaacgcgccccgcccgagccccggcccctgcacggggggcagcgaaacttctctgcg

SEQ ID NO: 560403 - DNA, 120 bp, Artificial Sequence
  ENSG00000169499_46 (sequence is synthesized)
gggacccacgtgtgtttcgcttgacactttatctttggtttctagccagggaagggctggctcataagtaggcgctcaagaaattcctggagtcagtttgtatctgtgtagggggagggc

SEQ ID NO: 560404 - DNA, 120 bp, Artificial Sequence
  ENSG00000169499_47 (sequence is synthesized)
gttgctggttgagatgctcatattcagatttggactgtggaaggcttggggaggacacgcaagtctgactgtaatttggcacatgagcttttctcacggcagccccattctgttttgggc

SEQ ID NO: 560405 - DNA, 120 bp, Artificial Sequence
  ENSG00000169504_0 (sequence is synthesized)
agtccagcgagcagcacggcgggaaccggcagccggagcagtcccggagcagaagcagcagcagcagcagcagccctcgccgttcgcggagcgcagccgagccggccatggcgttgtcga

SEQ ID NO: 560406 - DNA, 120 bp, Artificial Sequence
  ENSG00000169504_1 (sequence is synthesized)
tgccgctgaatgggctgaaggaggaggacaaagagcccctcatcgagctcttcgtcaaggctggcagtgatggtgaaagcataggaaactgccccttttcccagaggctcttcatgattc

SEQ ID NO: 560407 - DNA, 120 bp, Artificial Sequence
  ENSG00000169504_2 (sequence is synthesized)
tttggctcaaaggagttgtatttagtgtgacgactgttgacctgaaaaggaagccagcagacctgcagaacttggctcccgggacccacccaccatttataactttcaacagtgaagtca

SEQ ID NO: 560408 - DNA, 120 bp, Artificial Sequence
  ENSG00000169504_3 (sequence is synthesized)
aaacggatgtaaataagattgaggaatttcttgaagaagtcttatgccctcccaagtacttaaagctttcaccaaaacacccagaatcaaatactgctggaatggacatctttgccaaat

SEQ ID NO: 560409 - DNA, 120 bp, Artificial Sequence
  ENSG00000169504_4 (sequence is synthesized)
tctctgcatatatcaagaattcaaggccagaggctaatgaagcactggagaggggtctcctgaaaaccctgcagaaactggatgaatatctgaattctcctctccctgatgaaattgatg

SEQ ID NO: 560410 - DNA, 120 bp, Artificial Sequence
  ENSG00000169504_5 (sequence is synthesized)
aaaatagtatggaggacataaagttttctacacgtaaatttctggatggcaatgaaatgacattagctgattgcaacctgctgcccaaactgcatattgtcaaggtggtggccaaaaaat

SEQ ID NO: 560411 - DNA, 120 bp, Artificial Sequence
  ENSG00000169504_6 (sequence is synthesized)
atcgcaactttgatattccaaaagaaatgactggcatctggagatacctaactaatgcatacagtagggacgagttcaccaatacctgtcccagtgataaggaggttgaaatagcatata

SEQ ID NO: 560412 - DNA, 120 bp, Artificial Sequence
  ENSG00000169504_7 (sequence is synthesized)
gtgatgtagccaaaagactcaccaagtaaaatcgcgtttgtaaaagagatgtcttcatgtcttcccctaagaatacgcttttcctaacaggctactccttcctgtagagcagaaattgta

SEQ ID NO: 560413 - DNA, 120 bp, Artificial Sequence
  ENSG00000169504_8 (sequence is synthesized)
ttttgcacgaacatgcagttattgaagattaggatcaaggatagacaaggtatagtagttatcttaaaatatacactcctaagcagtattattttaaaatcctttaccctggctacctcc

SEQ ID NO: 560414 - DNA, 120 bp, Artificial Sequence
  ENSG00000169504_9 (sequence is synthesized)
cctacccgggttcccctctctttaatttggagacactccaccacaaacttttcactttagaggtagcttgccatctctcaggagccctcaccattgtgtccattcactgtgtatagatgg

SEQ ID NO: 560415 - DNA, 120 bp, Artificial Sequence
  ENSG00000169504_10 (sequence is synthesized)
cagaacttttgaggtgcaatgtttaattgttaaaaatagtagccacgactttatcaggcagccccaaactggtgcataatgcatggtacaagaaatatttatgtattttttggaattttg

SEQ ID NO: 560416 - DNA, 120 bp, Artificial Sequence
  ENSG00000169504_11 (sequence is synthesized)
taatatttagtaagagtatatgaaaggattgctactgtatcagaaatattgtttcaatttagtctatcctggatatgtactaacgaatattaccaccagagaagagagctttctacaaaa

SEQ ID NO: 560417 - DNA, 120 bp, Artificial Sequence
  ENSG00000169504_12 (sequence is synthesized)
gtcactacagattttgctatattgctttgtagatagatttttacttttgcctaaaagcatttatccttcataccaattgtaacatctgacaccatgtagaagctaaaagtttagagggag

SEQ ID NO: 560418 - DNA, 120 bp, Artificial Sequence
  ENSG00000169504_13 (sequence is synthesized)
tgagggttttctcaagaccttcctcaagcattttatctttagaagagaaactgatgggcacctgatactctgtctaaatacgtttgttatatgtgttttgccctgtgccattcatttgga

SEQ ID NO: 560419 - DNA, 120 bp, Artificial Sequence
  ENSG00000169504_14 (sequence is synthesized)
actttattgcattctttattttaaaaagcttgtttttacgtaatcatagagcttgctatttgtacatctgttgagcaacactacataactgatttttagttgacttagctatagcagtac

SEQ ID NO: 560420 - DNA, 120 bp, Artificial Sequence
  ENSG00000169504_15 (sequence is synthesized)
aatgattagtaatgtaaaaattaacacagaaattaacctaaggaatgaagggtgggtttgtcaaaatatcaagtaaatttttgtttctaaagtacatttaatgtagatgacctaaagaat

SEQ ID NO: 560421 - DNA, 120 bp, Artificial Sequence
  ENSG00000169504_16 (sequence is synthesized)
gcgttatccatcctatataaaagaaagataaaacacaggtcaccaattttctcatttcaccccatttaccttgtatagaggattgttcattcctttgggactaagttatagttatggtga

SEQ ID NO: 560422 - DNA, 120 bp, Artificial Sequence
  ENSG00000169504_17 (sequence is synthesized)
aaattttccaacagccatgttgaggaatagcactctgcatgtttttgttttgtttttcggggttttttttaattgaagccctaaaccaggaattatttgtgttctaacaggaggatgaac

SEQ ID NO: 560423 - DNA, 120 bp, Artificial Sequence
  ENSG00000169504_18 (sequence is synthesized)
ttgctgaaaataaaactttgctatgtatttactcttttttaaaagacaaaagcaaaaccagactttctacgtactactccaaagactgtgattgtgactataatacatttttggtaattt

SEQ ID NO: 560424 - DNA, 120 bp, Artificial Sequence
  ENSG00000169504_19 (sequence is synthesized)
ttttatacctaatttgtataggaagtgctatttctcataggctgtttcttgaaattttaagtttattgctttaaaatggcagtgtttctcccactttgatatgctaacatttagtaagca

SEQ ID NO: 560425 - DNA, 120 bp, Artificial Sequence
  ENSG00000169504_20 (sequence is synthesized)
ctggctttatgaaagcggctttttataagtatactgcattttttgagcctatcattaattagcttagtatgaaagataagaaaatctccatgttgtatccatttggctcaggaagattct

SEQ ID NO: 560426 - DNA, 120 bp, Artificial Sequence
  ENSG00000169504_21 (sequence is synthesized)
ttgccttacctttcttagaactctttattgcttatcaaaagtttgagtacccgcttggtttttttttggtaattaaatattgtatgatttatctggttcaaggaagatgcactattcagt

SEQ ID NO: 560427 - DNA, 120 bp, Artificial Sequence
  ENSG00000169504_22 (sequence is synthesized)
tatctattgagaaattattttgcagtggttttagtgggtgaaaatgtcccatctgcaccagtacacaggcaggcattatcattcttcacctactttttaaatagtggcaacttgggattc

SEQ ID NO: 560428 - DNA, 120 bp, Artificial Sequence
  ENSG00000169504_23 (sequence is synthesized)
attctggtgattctgaaccttgcctcatagcttaaagtataaaaaagattcaagagcagtgaggtttgttctttccagtgaatggtggactgagtggtgcgaggtggagggctaacaaga

SEQ ID NO: 560429 - DNA, 120 bp, Artificial Sequence
  ENSG00000169504_24 (sequence is synthesized)
ggaaagaactacattcttcagaatacagtgatgaaaattcattttgaaactcaaatattttcattttggatattctcctgtttttattaaaccagtgattacacctggccatccctctaa

SEQ ID NO: 560430 - DNA, 120 bp, Artificial Sequence
  ENSG00000169504_25 (sequence is synthesized)
atgttctaggaaggcatgtctattgtgattttgatgaagacagaattatttttctctgtagaaacacagataccactttatcagggaagttagtcaaatgaaatggaaattggtaaatgg

SEQ ID NO: 560431 - DNA, 120 bp, Artificial Sequence
  ENSG00000169504_26 (sequence is synthesized)
acaaaagctagctagtaaaaaggacgacccagcaacatgctttaaccccattgtatgtttgtggaaagagcatagtttaacatcttgagaaatttgggacataaagttttcatggtagac

SEQ ID NO: 560432 - DNA, 120 bp, Artificial Sequence
  ENSG00000169504_27 (sequence is synthesized)
agttcatgcagtatatgaattgccataatggaaataatctgattttatttttacaactaacatccattccccttcatttaaacaccttttgtgttttacttcagtgaggagattggagtc

SEQ ID NO: 560433 - DNA, 120 bp, Artificial Sequence
  ENSG00000169504_28 (sequence is synthesized)
tgaatggatctgttttccaagagattctgagaaatttttgtattcagcagttggaaagctctctattctagttgataaaacttcccttttttgatgtagatgcagatattctatacagtt

SEQ ID NO: 560434 - DNA, 120 bp, Artificial Sequence
  ENSG00000169504_29 (sequence is synthesized)
ctgttgtcttttactaggactgtaaacttttgtgataaaattcaaataagattttatttcttggtaattttggctttcacaatttatctttaaatccttgagcaatctgtatacaattaa

SEQ ID NO: 560435 - DNA, 120 bp, Artificial Sequence
  ENSG00000169504_30 (sequence is synthesized)
gagatttctgacatttattcttacactaaatggatcaactctaggatttaggcatgttaacttctgttgtgttttgaatctctccagagttgcatgtagatagcatttatttctgtgccc

SEQ ID NO: 560436 - DNA, 120 bp, Artificial Sequence
  ENSG00000169504_31 (sequence is synthesized)
ttaaacccatttagaaaataactacaaagtaaaaatgtagaggaaatagaaatgtattttttcatgaacattttgatacaaatttcatcatttaatgattcaccaatttcttgcattaat

SEQ ID NO: 560437 - DNA, 120 bp, Artificial Sequence
  ENSG00000169504_32 (sequence is synthesized)
ttgaatttaagcatttaattcaaagagaggggagcatccattattgatacatgtgggcttttaaaaactccatcctttataaatagtcaaggtttgggccacacaaagtatatttttatc

SEQ ID NO: 560438 - DNA, 120 bp, Artificial Sequence
  ENSG00000169504_33 (sequence is synthesized)
atggaaaaatttcaactcctcaagccgtaatgttgaacagaattggagtattttctttataatttcttgaacaggcaaatgaaagcttattatagaatgcatgtattttcttttatcttt

SEQ ID NO: 560439 - DNA, 120 bp, Artificial Sequence
  ENSG00000169504_34 (sequence is synthesized)
ggaacatcagcaccagtatattgctggcagctattgtattaaaaaataaagtatattttcactatcataaaggattcttttttcccccctcatgaaaataaacaacaacttggggtaaaa

SEQ ID NO: 560440 - DNA, 120 bp, Artificial Sequence
  ENSG00000169504_35 (sequence is synthesized)
ctgaaaaggtaagacatggtcgcagtttgcaatcaacttaagctgaactatcttttcagtttgatcctattttcaccttgatggcacatattctctaaaggaaatatattgtattaaagt

SEQ ID NO: 560441 - DNA, 120 bp, Artificial Sequence
  ENSG00000169507_0 (sequence is synthesized)
acatttgtctgggcgaactccggtggaaaagcgccccaggctgccacagcctagagatcttggggctgcagccctcgcggcctgccgagggagcagggggcgcccgtggaactggctccc

SEQ ID NO: 560442 - DNA, 120 bp, Artificial Sequence
  ENSG00000169507_1 (sequence is synthesized)
tgcagctctgcggctacacgcggacctcggctgtgtgcgaggtggcggaggaggctggccgggtgcgaatccgtacccagccccagcatcttccacctgctgaggaccaccgctcagcca

SEQ ID NO: 560443 - DNA, 120 bp, Artificial Sequence
  ENSG00000169507_2 (sequence is synthesized)
tgggctaccagaggcaggagcctgtcatcccgccgcaggattgccttattcaatgaagcaagctgggtttcctttgggaatattgcttttattctgggtttcatatgttacagacttttc

SEQ ID NO: 560444 - DNA, 120 bp, Artificial Sequence
  ENSG00000169507_3 (sequence is synthesized)
ccttgttttattgataaaaggaggggccctctctggaacagatacctaccagtctttggtcaataaaactttcggctttccagggtatctgctcctctctgttcttcagtttttgtatcc

SEQ ID NO: 560445 - DNA, 120 bp, Artificial Sequence
  ENSG00000169507_4 (sequence is synthesized)
ttttatagcaatgataagttacaatataatagctggagatactttgagcaaagtttttcaaagaatcccaggagttgatcctgaaaacgtgtttattggtcgccacttcattattggact

SEQ ID NO: 560446 - DNA, 120 bp, Artificial Sequence
  ENSG00000169507_5 (sequence is synthesized)
ttccacagttacctttactctgcctttatccttgtaccgaaatatagcaaagcttggaaaggtctccctcatctctacaggtttaacaactctgattcttggaattgtaatggcaagggc

SEQ ID NO: 560447 - DNA, 120 bp, Artificial Sequence
  ENSG00000169507_6 (sequence is synthesized)
gccattcaagcggtcggggttatgtcttttgcatttatttgccaccataactccttcttagtttacagttctctagaagaacccacagtagctaagtggtcccgccttatccatatgtcc

SEQ ID NO: 560448 - DNA, 120 bp, Artificial Sequence
  ENSG00000169507_7 (sequence is synthesized)
atcgtgatttctgtatttatctgtatattctttgctacatgtggatacttgacatttactggcttcacccaaggggacttatttgaaaattactgcagaaatgatgacctggtaacattt

SEQ ID NO: 560449 - DNA, 120 bp, Artificial Sequence
  ENSG00000169507_8 (sequence is synthesized)
ggaagattttgttatggtgtcactgtcattttgacataccctatggaatgctttgtgacaagagaggtaattgccaatgtgttttttggtgggaatctttcatcggttttccacattgtt

SEQ ID NO: 560450 - DNA, 120 bp, Artificial Sequence
  ENSG00000169507_9 (sequence is synthesized)
gtaacagtgatggtcatcactgtagccacgcttgtgtcattgctgattgattgcctcgggatagttctagaactcaatggtgtgctctgtgcaactcccctcatttttatcattccatca

SEQ ID NO: 560451 - DNA, 120 bp, Artificial Sequence
  ENSG00000169507_10 (sequence is synthesized)
gcctgttatctgaaactgtctgaagaaccaaggacacactccgataagattatgtcttgtgtcatgcttcccattggtgctgtggtgatggtttttggattcgtcatggctattacaaat

SEQ ID NO: 560452 - DNA, 120 bp, Artificial Sequence
  ENSG00000169507_11 (sequence is synthesized)
actcaagactgcacccatgggcaggaaatgttctactgctttcctgacaatttctctctcacaaatacctcagagtctcatgttcagcagacaacacaactttctactttaaatattagt

SEQ ID NO: 560453 - DNA, 120 bp, Artificial Sequence
  ENSG00000169507_12 (sequence is synthesized)
atctttcaatgagttgactgctttaaaaatatgtatgttttcatagactttaaaacacataacatttacgcttgctttagtctgtatttatgttatataaaattattattttggctttta

SEQ ID NO: 560454 - DNA, 120 bp, Artificial Sequence
  ENSG00000169507_13 (sequence is synthesized)
tgggctaccagaggcaggagcctgtcatcccgccgcagagagatttagatgacagagaaacccttgtttctgaacatgagtataaagagaaaacctgtcagtctgctgctctttttaatg

SEQ ID NO: 560455 - DNA, 120 bp, Artificial Sequence
  ENSG00000169507_14 (sequence is synthesized)
ttgtcaactcgattataggatctggtataatagtagccccattttgactccagagtctgtctttcttaatattccataacccttctgtgctccttattatcctctctgctttcttggcta

SEQ ID NO: 560456 - DNA, 120 bp, Artificial Sequence
  ENSG00000169507_15 (sequence is synthesized)
aaaatttttaaagccatgttgcatggtgatgacagtcatgtataatacttgctcacctacttggggtgggtgcggggaaccaagactgatctgataagaagttacctgcctgagattatc

SEQ ID NO: 560457 - DNA, 120 bp, Artificial Sequence
  ENSG00000169507_16 (sequence is synthesized)
ggcaactgtagcagaatggaaagtatttatgtatctaaacatagaaaaatatatagtaaaaatacagcattgtaatcatatatgtgggccattaggtgatgcataactgtaatatctaat

SEQ ID NO: 560458 - DNA, 120 bp, Artificial Sequence
  ENSG00000169507_17 (sequence is synthesized)
cactgccatcaaccaaatagaagtcctcataatatcacagttgaattaatcccagctctgtttcaactatcatgtatttaagttctgctttcagtttatcggcattttcctaccagaggt

SEQ ID NO: 560459 - DNA, 120 bp, Artificial Sequence
  ENSG00000169507_18 (sequence is synthesized)
ataaaaaatactttcgccttctcatttttctctcatttttttcctacatagtagccccattttgactccagagtctgtctttcttaatattccataacccttctgtgctccttattatcc

SEQ ID NO: 560460 - DNA, 120 bp, Artificial Sequence
  ENSG00000169507_19 (sequence is synthesized)
tctctgctttcttggctagcaggtaaggaaggatttgaggtaatgactttccacatattgcagggctatgtcactcttaccctgaagtaaacgttatttgtgtgaactggcatttgtttt

SEQ ID NO: 560461 - DNA, 120 bp, Artificial Sequence
  ENSG00000169507_20 (sequence is synthesized)
tcatttgctgctttctaattcttattccgtcacctcagaaacttgctctcttaacttgtccctaagctaataacattttattctgaaataagtattaatacctaacatttaatattaatt

SEQ ID NO: 560462 - DNA, 120 bp, Artificial Sequence
  ENSG00000169507_21 (sequence is synthesized)
ctgggtccacacataccaaaaacagaagacgcttgggtatttgcaaagcccaatgccattcaagcggtcggggttatgtcttttggtgagtatttggtttcaaaggccctttctcaatgt

SEQ ID NO: 560463 - DNA, 120 bp, Artificial Sequence
  ENSG00000169507_22 (sequence is synthesized)
gcagcatatgatctagtttgtgccaatataaaattaggctcaaacttttctcactcatcactaaaatttgcttcaatttggagaaatctatttctcatgcagaaactcattacagtcatc

SEQ ID NO: 560464 - DNA, 120 bp, Artificial Sequence
  ENSG00000169507_23 (sequence is synthesized)
ttgtttcttaacttggaaggctagcaagtgttatggacttcttcaaaccctttattatgtcccaaatggcaaaggaagccacaggatgaaaacgatgggaaaaagatttccttcagatgg

SEQ ID NO: 560465 - DNA, 120 bp, Artificial Sequence
  ENSG00000169507_24 (sequence is synthesized)
gaagggtcattaggaaaaggaaaatgagagagaatgttggactggcctggtttatatcaagagtaacatgaaaagaccacataagcctgatgtgaatgaatggtctcatttctagaacta

SEQ ID NO: 560466 - DNA, 120 bp, Artificial Sequence
  ENSG00000169507_25 (sequence is synthesized)
aagggttttgttctaatgactgcactacactaatgctaattgaagaagggagagttaagcctttagcattttctgccatcccccttttatttaatatgcaaaccagtatattgtgctcca

SEQ ID NO: 560467 - DNA, 120 bp, Artificial Sequence
  ENSG00000169507_26 (sequence is synthesized)
tgggttggaattttgtgtagatgtcttttggtgggggggtgtggggggtgggcattttctttgtccttaaaagtctgtggaactgaagagaagggaaacccaaaacgattgaaaagaaga

SEQ ID NO: 560468 - DNA, 120 bp, Artificial Sequence
  ENSG00000169507_27 (sequence is synthesized)
catatcccaagaacaaagaggagctctccgttataatttcagcagcatcctttgtttaaagggaaatggatccctggagaaatgagcaaagacctctccatgtgaggaatcctgaatcat

SEQ ID NO: 560469 - DNA, 120 bp, Artificial Sequence
  ENSG00000169507_28 (sequence is synthesized)
agactggctgtgaggagcaaggtgtgtaaagaatcaaaatcacctcccatcttctgatgctgtgggaatacaatggtagcaccattctaaaacagaaaaacaaacaaacaaacaaaaaaa

SEQ ID NO: 560470 - DNA, 120 bp, Artificial Sequence
  ENSG00000169507_29 (sequence is synthesized)
acaaaaacaaaaaacagttgttctgtggcaagaacctaagagattggtgatatggacctgttggatttttagtgctgtcaggaatgtacaactggaagctgaactttgaaactagaaacg

SEQ ID NO: 560471 - DNA, 120 bp, Artificial Sequence
  ENSG00000169507_30 (sequence is synthesized)
tgtaagaagaatcagggctacagaagaagctttctcagtccactgggggttcctcagagagatttctgggagctcttgttgactgggtctttgggagcagatagtgagatggagtttatc

SEQ ID NO: 560472 - DNA, 120 bp, Artificial Sequence
  ENSG00000169507_31 (sequence is synthesized)
ataactaatgggagagaggggaaagcaggattgttagggagaggtagaactgcagtgcaggctgacctcagccaaatccacagggaagctggtgcatacatgacccatcagagttgtccc

SEQ ID NO: 560473 - DNA, 120 bp, Artificial Sequence
  ENSG00000169507_32 (sequence is synthesized)
tgttcaagggtaatagcccagttttgatactgctgcctccatcagtcatttaatgtgagcatctggagaaggatgagttcttgggctaggcagctctttgcagcagagcaaaccctaaag

SEQ ID NO: 560474 - DNA, 120 bp, Artificial Sequence
  ENSG00000169507_33 (sequence is synthesized)
gaactgagagctcgaggtggtctactgatagctttgtcaccacatgcttccttacaggggtatctgggagacacagctgtgcccaccacagatgccctcggtttactgaggatttttaaa

SEQ ID NO: 560475 - DNA, 120 bp, Artificial Sequence
  ENSG00000169507_34 (sequence is synthesized)
tgattttttaatgaggactttgtgtctttgtatgtatgacaatcttcaaaaagtaacatgaaaatctggggccatctggatggcttccttatatcaagtatcacctaagattttcatttc

SEQ ID NO: 560476 - DNA, 120 bp, Artificial Sequence
  ENSG00000169507_35 (sequence is synthesized)
atttgtattccaatcaggttgtccatctgtggcactatattaattgttgccaaataacgagaaactatcacaagcagagttaatacatatatgatgagtttgtacaaatcaaatgcaaaa

SEQ ID NO: 560477 - DNA, 120 bp, Artificial Sequence
  ENSG00000169507_36 (sequence is synthesized)
agaaatcctacaggaagtgtataaagggtaggttcacagtagtttgaataaagtggcaagagctgagtcactgtgtgactcatagtgagaaaggcctattgaacataaaggaagatgcat

SEQ ID NO: 560478 - DNA, 120 bp, Artificial Sequence
  ENSG00000169507_37 (sequence is synthesized)
tttagcaggtagaaccatgctcagggttttagtggtgatttattttttcaataaaatattatccttaccattaaattaatttaaattctgttgggtaacttttctgtatttaacttataa

SEQ ID NO: 560479 - DNA, 120 bp, Artificial Sequence
  ENSG00000169507_38 (sequence is synthesized)
atttgtttttttatagttaagggtcataggctaagcagtttgtgcctgtttttagattggtacatgtttaggtaaaatataataaaaatgctttcattccatgtaagaaatgaggaaatg

SEQ ID NO: 560480 - DNA, 120 bp, Artificial Sequence
  ENSG00000169507_39 (sequence is synthesized)
taagaaatttttgccacagtctgtcattacattgctcaagactgagaaacactgacctacataattattaaataaagtcatgagggatgagatctctaagcatgtacaaagaaaagtatg

SEQ ID NO: 560481 - DNA, 120 bp, Artificial Sequence
  ENSG00000169507_40 (sequence is synthesized)
tcaaggataacataatttagcacgtaaccatctcttatcttgtactttggtgttgcttcatactcttcaagtagatgaaagctcctggtaggaactgagcgcagcattagtgcctaataa

SEQ ID NO: 560482 - DNA, 120 bp, Artificial Sequence
  ENSG00000169507_41 (sequence is synthesized)
acatgtattggtttatttatttttaatcagctgtagaacaagactgcttatgacccagttattagctgcacggattaccgacatctttcaaattataatttaataaatcttaggaactca

SEQ ID NO: 560483 - DNA, 120 bp, Artificial Sequence
  ENSG00000169507_42 (sequence is synthesized)
aggtgatttcctcattgtgcaaacatcacagagtatacgtacacaaatctagatggtagcacctattacacacctaggctatatgctatagcttattgctcctaggctataaacctctac

SEQ ID NO: 560484 - DNA, 120 bp, Artificial Sequence
  ENSG00000169508_0 (sequence is synthesized)
acttcagtttggacaactactcacagctactacacagagacccgaacgagtcactgatatacacctggaccaccaccaatggatatacaaatggcaaacaattttactccgccctctgca

SEQ ID NO: 560485 - DNA, 120 bp, Artificial Sequence
  ENSG00000169508_1 (sequence is synthesized)
actcctcagggaaatgactgtgacctctatgcacatcacagcacggccaggatagtaatgcctctgcattacagcctcgtcttcatcattgggctcgtgggaaacttactagccttggtc

SEQ ID NO: 560486 - DNA, 120 bp, Artificial Sequence
  ENSG00000169508_2 (sequence is synthesized)
gtcattgttcaaaacaggaaaaaaatcaactctaccaccctctattcaacaaatttggtgatttctgatatactttttaccaccgctttgcctacacgaatagcctactatgcaatgggc

SEQ ID NO: 560487 - DNA, 120 bp, Artificial Sequence
  ENSG00000169508_3 (sequence is synthesized)
tttgactggagaatcggagatgccttgtgtaggataactgcgctagtgttttacatcaacacatatgcaggtgtgaactttatgacctgcctgagtattgaccgcttcattgctgtggtg

SEQ ID NO: 560488 - DNA, 120 bp, Artificial Sequence
  ENSG00000169508_4 (sequence is synthesized)
caccctctacgctacaacaagataaaaaggattgaacatgcaaaaggcgtgtgcatatttgtctggattctagtatttgctcagacactcccactcctcatcaaccctatgtcaaagcag

SEQ ID NO: 560489 - DNA, 120 bp, Artificial Sequence
  ENSG00000169508_5 (sequence is synthesized)
gaggctgaaaggattacatgcatggagtatccaaactttgaagaaactaaatctcttccctggattctgcttggggcatgtttcataggatatgtacttccacttataatcattctcatc

SEQ ID NO: 560490 - DNA, 120 bp, Artificial Sequence
  ENSG00000169508_6 (sequence is synthesized)
tgctattctcagatctgctgcaaactcttcagaactgccaaacaaaacccactcactgagaaatctggtgtaaacaaaaaggctctcaacacaattattcttattattgttgtgtttgtt

SEQ ID NO: 560491 - DNA, 120 bp, Artificial Sequence
  ENSG00000169508_7 (sequence is synthesized)
tttcacaccttaccatgttgcaattattcaacatatgattaagaagcttcgtttctctaatttcctggaatgtagccaaagacattcgttccagatttctctgcactttacagtatgcct

SEQ ID NO: 560492 - DNA, 120 bp, Artificial Sequence
  ENSG00000169508_8 (sequence is synthesized)
gatgaacttcaattgctgcatggacccttttatctacttctttgcatgtaaagggtataagagaaaggttatgaggatgctgaaacggcaagtcagtgtatcgatttctagtgctgtgaa

SEQ ID NO: 560493 - DNA, 120 bp, Artificial Sequence
  ENSG00000169508_9 (sequence is synthesized)
gtcagcccctgaagaaaattcacgtgaaatgacagaaacgcagatgatgatacattccaagtcttcaaatggaaagtgaaatggattgtattttggtttatagtgacgtaaactgtatga

SEQ ID NO: 560494 - DNA, 120 bp, Artificial Sequence
  ENSG00000169508_10 (sequence is synthesized)
caaactttgcaggacttcccttataaagcaaaataattgttcagcttccaattagtattcttttatatttctttcattgggcactttcccatctccaactcggaagtaagcccaagagaa

SEQ ID NO: 560495 - DNA, 120 bp, Artificial Sequence
  ENSG00000169508_11 (sequence is synthesized)
caacataaagcaaacaacataaagcacaataaaaatgcaaataaatatttcatttttatttgtaaacgaatacaccaaaaggaggcgctcttaataactcccaatgtaaaaagttttgtt

SEQ ID NO: 560496 - DNA, 120 bp, Artificial Sequence
  ENSG00000169508_12 (sequence is synthesized)
ttaataaaaaatttaattattatttcttgccaacaaatggctagaaaggactgaatagattatatattgccagatgttaatactgtaacatactttttaaataacatatttcttaaatcc

SEQ ID NO: 560497 - DNA, 120 bp, Artificial Sequence
  ENSG00000169508_13 (sequence is synthesized)
aaatttctctcaatgttagatttaattccctcaataacaccaatgttttgttttgtttcgttctgggtcataaaactttgttaaggaactcttttggaataaagagcaggatgctgcaaa

SEQ ID NO: 560498 - DNA, 120 bp, Artificial Sequence
  ENSG00000169509_0 (sequence is synthesized)
aatccactgcctagcaggtggcccattccagttggagaacgtagtgagtctttcagtggagccagggtctggtttgtcgtgaggagctccgcgatgtcctctcaacagagcgccgtttcc

SEQ ID NO: 560499 - DNA, 120 bp, Artificial Sequence
  ENSG00000169509_1 (sequence is synthesized)
aaggcttttccaaggggtcgtcccagggccccgctccgtgtcccgccccggcgcccaccccggcgcccgcctcctcctcctcctgctgcggctccggcaggggctgctgcggcgactcag

SEQ ID NO: 560500 - DNA, 120 bp, Artificial Sequence
  ENSG00000169509_2 (sequence is synthesized)
acaaccggagctcaggatgctgctccggctgctgagaggcccgcaacccccagcgctgcgctagagaaacccgcccagcccagagcgggcccgccccgctgcggctcccacgcggggctg

SEQ ID NO: 560501 - DNA, 120 bp, Artificial Sequence
  ENSG00000169509_3 (sequence is synthesized)
ggcctcggagtttgccccgtaaagcgaattgcactttgatgttcagaaacccactttgttctcagccacgcaaaactccctgaccccgatgtgatttttctccccggggattcgagagcc

SEQ ID NO: 560502 - DNA, 120 bp, Artificial Sequence
  ENSG00000169509_4 (sequence is synthesized)
atgcgtgggacactggaccctactgtctacacgggcttgcacacagcaggtgctcagcaaatgtctattgatttgattgtcttttgaagatgtcataataaagcttctacctcctgagaa

SEQ ID NO: 560503 - DNA, 120 bp, Artificial Sequence
  ENSG00000169515_0 (sequence is synthesized)
gcagagctctaagcgcgcgggctggcaggctgcggcgcgtcaaggtcagcctggagctgggtggcggcctgcctgggggcgggggaccctactggaggcccgggctggggcctcccagcg

SEQ ID NO: 560504 - DNA, 120 bp, Artificial Sequence
  ENSG00000169515_1 (sequence is synthesized)
cctcggccatattgaatagcttcgactggaccgtctttgtctgcgaagtcctgtcccaagttccagccgcgtccctggggcctggggcaggaagagtcgctggcagcccgcgcgccccaa

SEQ ID NO: 560505 - DNA, 120 bp, Artificial Sequence
  ENSG00000169515_2 (sequence is synthesized)
cttggagctgggacaccacgtttccagcttggagtgggccttgagccttgggactgacctcgcccccggctcacgtaggcatcctggaaattgattcccccaagtccttggtgggggagc

SEQ ID NO: 560506 - DNA, 120 bp, Artificial Sequence
  ENSG00000169515_3 (sequence is synthesized)
cggacttggtcaagactgtacttgttgcaggcgaagagattggaggcgtttggctcgtccctggctagggaggtgagactctccggtcagcgttgctggaactccccccatccagtccct

SEQ ID NO: 560507 - DNA, 120 bp, Artificial Sequence
  ENSG00000169515_4 (sequence is synthesized)
ccctcaagactaagggctacagtagtttgttggggctcattgccccctcaccccagatatcaccctggagatcttaaagactctcgagaaaagccacgtggggggctggttcccctgggg

SEQ ID NO: 560508 - DNA, 120 bp, Artificial Sequence
  ENSG00000169515_5 (sequence is synthesized)
cttcctgccgtcccccgactgcctcattctttggagcgtccccgatgtctgcaaagatgtggatttggacgtcctcgtggaagccctaaagcccgtggggacatttaagaagatcggcaa

SEQ ID NO: 560509 - DNA, 120 bp, Artificial Sequence
  ENSG00000169515_6 (sequence is synthesized)
ggtgttccgcaaggaggaggactccacggtggggatgctgcagatcggggaggacgtcgactatttgctcatcccccgggaggtcaggctggctgggggcgtctggagagtcatctctaa

SEQ ID NO: 560510 - DNA, 120 bp, Artificial Sequence
  ENSG00000169515_7 (sequence is synthesized)
gcccgccaccaaggaagcagaatttcgggagcggctgacccagttcctggaagaagagggccgcaccctggaggacgtggcccgcatcatggagaagagcaccccgcacccgccccagcc

SEQ ID NO: 560511 - DNA, 120 bp, Artificial Sequence
  ENSG00000169515_8 (sequence is synthesized)
ccccaaaaagcccaaggagccccgagtgaggaggagagtgcagcagatggtgactcctccgccccggctggtcgtgggcacgtacgacagcagcaacgccagcgacagcgagttcagcga

SEQ ID NO: 560512 - DNA, 120 bp, Artificial Sequence
  ENSG00000169515_9 (sequence is synthesized)
cttcgagacctccagagacaagagccgccagggcccgcggcggggcaagaaggtgcgcaaaatgcccgtcagctacctgggcagcaagttcctgggaagcgacctggagagtgaggatga

SEQ ID NO: 560513 - DNA, 120 bp, Artificial Sequence
  ENSG00000169515_10 (sequence is synthesized)
tgaggaactggtcgaggccttcctccggcgacaggagaagcagcccagcgcgccgcctgcccgccgccgcgtcaacctgccagtgcccatgtttgaggacaacctggggcctcagctgtc

SEQ ID NO: 560514 - DNA, 120 bp, Artificial Sequence
  ENSG00000169515_11 (sequence is synthesized)
caaagcggacaggtggcgggagtatgtcagccaggtgtcctgggggaagctgaagcggagggtgaagggttgggcgccgagggcgggccccggggtgggcgaggcccggctggcctccac

SEQ ID NO: 560515 - DNA, 120 bp, Artificial Sequence
  ENSG00000169515_12 (sequence is synthesized)
cgcagtggagagcgcaggggtatcatcggcgccagagggcaccagcccgggggatcgcttgggaaacgcgggagatgtttgtgtgccccaggcttcccctaggcgatggaggcccaagat

SEQ ID NO: 560516 - DNA, 120 bp, Artificial Sequence
  ENSG00000169515_13 (sequence is synthesized)
tagctgaccagcgggaaggggctgcaggtaatcagagggcaggggccccagctgaccagggggcagaggctgcagataatcagagggaagaggctgcagataatcagagggcaggggccc

SEQ ID NO: 560517 - DNA, 120 bp, Artificial Sequence
  ENSG00000169515_14 (sequence is synthesized)
cagctgaggagggggcagaggctgcagataaccagagggaagaggctgcagataatcagagggcagaggccccagctgaccagaggtcacagggcacagataaccacagggaagaggctg

SEQ ID NO: 560518 - DNA, 120 bp, Artificial Sequence
  ENSG00000169515_15 (sequence is synthesized)
cagataatcagagggcggaggccccagctgaccaggggtcagaggttacagataatcaaagggaagaggccgtacatgaccagagggaaagggccccagctgtccagggtgcagataatc

SEQ ID NO: 560519 - DNA, 120 bp, Artificial Sequence
  ENSG00000169515_16 (sequence is synthesized)
agagggcacaggcccgggctggccagagggcagaggctgcacataatcagagggcaggggccccaggtatccaggaagctgaagtctcagctgcccaagggaccacaggaacagctccag

SEQ ID NO: 560520 - DNA, 120 bp, Artificial Sequence
  ENSG00000169515_17 (sequence is synthesized)
gagccagggcccggaaacaggtcaagacagtgaggttccagacccctggacgcttttcgtggttttgcaagcgccggagagccttctggcacactccccggttgccaaccctgcccaaga

SEQ ID NO: 560521 - DNA, 120 bp, Artificial Sequence
  ENSG00000169515_18 (sequence is synthesized)
gagtccccagggcaggagaggccaggaacctcagggtgctgagggccgaggccagagcagaagctgagcagggagagcaagaagaccagctgtgaggtgagggctagagacagcccacgg

SEQ ID NO: 560522 - DNA, 120 bp, Artificial Sequence
  ENSG00000169515_19 (sequence is synthesized)
gccctccctccaagtgtgggagggagagatgctctgcctctgaacttcaaagtggaggtggagtgctggccacgtctccacctaacaaccctctttattctcttgttaaagttttgttca

SEQ ID NO: 560523 - DNA, 120 bp, Artificial Sequence
  ENSG00000169515_20 (sequence is synthesized)
ctgggattacagatgtgagccaccacacacaccatctgattaaaaaaaaaaaatactgattccttgtagcaacccaaaaaatgtaaagaaagaattcgacacaatggggttgcgtcacct

SEQ ID NO: 560524 - DNA, 120 bp, Artificial Sequence
  ENSG00000169515_21 (sequence is synthesized)
acaatggggttgcgtcacctatagttttcatttcctcaaatgcaactcaaggtgctcagcttgataaagggagagagggagggcaggggagaaactgactcctttttccatctctttttt

SEQ ID NO: 560525 - DNA, 120 bp, Artificial Sequence
  ENSG00000169515_22 (sequence is synthesized)
gcctgcacacttaatgtggactgcctccttggacttaaaaagagttgagccaacatgcaaatcaaaaaacatttatgaactgatttcttagctttggacttgacaactgacgaatgctct

SEQ ID NO: 560526 - DNA, 120 bp, Artificial Sequence
  ENSG00000169515_23 (sequence is synthesized)
gggggtgacctggcccttgctgtccgttccactcccatccttgatgatggagacacctgtgtttatgttgtcacttcgcttgccatcctcatgccccgggctctgctggtttggagggga

SEQ ID NO: 560527 - DNA, 120 bp, Artificial Sequence
  ENSG00000169515_24 (sequence is synthesized)
cagggcccttggtttgcacacctcacccgatcttggttataaggtacagtaaaagcgtctgaaaaatgcattcaaaacacagattctggggccctcggcaccagaggtgtggatttgcta

SEQ ID NO: 560528 - DNA, 120 bp, Artificial Sequence
  ENSG00000169519_0 (sequence is synthesized)
ctagacgcgcggcgcattcaggttctcctggaccgtagtggtagtcgctggcccgagttagaggccagctgagaagtcttcgtgcttcagatttgtttacctacaaaatgcttcggtatc

SEQ ID NO: 560529 - DNA, 120 bp, Artificial Sequence
  ENSG00000169519_1 (sequence is synthesized)
catatttttgtagaatgtataaagaatgcctttcatgttggttggaatctggcatacctaatttaggtgtctggccaaacagaatacatactacagcagaaaaatatagagaatatgaag

SEQ ID NO: 560530 - DNA, 120 bp, Artificial Sequence
  ENSG00000169519_2 (sequence is synthesized)
cccgggagcaaacagatcaaactcaagcccaggagttacacagatctcaagatagagattttgaaactatggctaaattacatattccagtaatggtggatgaagttgttcattgtttgt

SEQ ID NO: 560531 - DNA, 120 bp, Artificial Sequence
  ENSG00000169519_3 (sequence is synthesized)
caccacaaaaaggacagatttttctagatatgacatttggttcgggagggcacacaaaagccattctgcagaaggagtcagatattgttctctatgccttggacagagacccaacagctt

SEQ ID NO: 560532 - DNA, 120 bp, Artificial Sequence
  ENSG00000169519_4 (sequence is synthesized)
atgcattagctgaacatctttcagagttgtatcctaaacaaatccgagctatgctgggccagttcagccaggcagaagccttattaatgaaagctggagtgcagccaggaacttttgatg

SEQ ID NO: 560533 - DNA, 120 bp, Artificial Sequence
  ENSG00000169519_5 (sequence is synthesized)
gagttcttatggatcttgggtgttcctccatgcaacttgatactcctgaaagaggtttttcccttcggaaagatggccctttggacatgagaatggatggtggcaggtaccctgacatgc

SEQ ID NO: 560534 - DNA, 120 bp, Artificial Sequence
  ENSG00000169519_6 (sequence is synthesized)
ccactgctgctgatgttgtgaatgctttagatcaacaggcacttgcatctatcctaagaacatacggggaggagaagcatgccaagaaaatcgcttcagcaattgttcaggcacgcagca

SEQ ID NO: 560535 - DNA, 120 bp, Artificial Sequence
  ENSG00000169519_7 (sequence is synthesized)
tctaccccatcaccagaacccagcagcttgccagcatcgttgcagaatactctgaaacatatttcccagtggcccaaactctttattaggaaaatggacgaattgaatagcaaatggagc

SEQ ID NO: 560536 - DNA, 120 bp, Artificial Sequence
  ENSG00000169519_8 (sequence is synthesized)
atttcctccctctgctatttatacacggaaagacttactacagcgatctacccatattgccaccaagactttccaggctcttcgcatatttgtgaacaatgagctcaatgaactctacac

SEQ ID NO: 560537 - DNA, 120 bp, Artificial Sequence
  ENSG00000169519_9 (sequence is synthesized)
gggactgaagacagctcagaagtttctgagacctggtggtcgtcttgttgccctctccttccattcactagaggatcgcatcgtcaaaagatttttgcttggaataagcatgacagaaag

SEQ ID NO: 560538 - DNA, 120 bp, Artificial Sequence
  ENSG00000169519_10 (sequence is synthesized)
atttaacctaagtgttagacaacaagtgatgaaaacatctcaattgggttcagatcacgaaaacacggaagaagtctctatgagaagagctcctttaatgtgggaattgatacacaagaa

SEQ ID NO: 560539 - DNA, 120 bp, Artificial Sequence
  ENSG00000169519_11 (sequence is synthesized)
ggtacttagtccacaagatcaggatgtacaagataaccccagagggcgctcagccaagcttagagcagctatcaaattataagttatcatcatcttattcttcaaatttttttctcacaa

SEQ ID NO: 560540 - DNA, 120 bp, Artificial Sequence
  ENSG00000169519_12 (sequence is synthesized)
tttctctaatctttactcatgttatgtccctgaatgtcttggtataggtttaagtgtgggacagtctgaaaattgatagcatttagcatttcttttttctcaaaaagaaactgtaggaaa

SEQ ID NO: 560541 - DNA, 120 bp, Artificial Sequence
  ENSG00000169519_13 (sequence is synthesized)
tacatgacagagaaagttacactcagggagcagcagcacctccagactggaaaaatatgttaatctttgcatcatattggactcttgaaggcaatccttcctctggccaggaaatttttt

SEQ ID NO: 560542 - DNA, 120 bp, Artificial Sequence
  ENSG00000169519_14 (sequence is synthesized)
aaaaaataatactgtgttgtgtttatctaaatacgtaaactcaagctaccaaagagaaagatgttgtaatcatatctgcatgtcctaaattttgaatttagatattccaatttgcatcag

SEQ ID NO: 560543 - DNA, 120 bp, Artificial Sequence
  ENSG00000169519_15 (sequence is synthesized)
tctttctgtggctcaaataatgatgattatggaatgaattttaatgtccctacttgtgaataattagctttctcaaatgtaggctttttacaaattttaaattttaaaatattagtttaa

SEQ ID NO: 560544 - DNA, 120 bp, Artificial Sequence
  ENSG00000169519_16 (sequence is synthesized)
tgtaaaatccttacagagaattgtttcacaaaacttatatttcatgtcaattgtatttattttaataatagctcacaatgcctttagtaagtaataaagtctcttattagaatcttgtat

SEQ ID NO: 560545 - DNA, 120 bp, Artificial Sequence
  ENSG00000169519_17 (sequence is synthesized)
tttttaattgagctaatcaaaataattcagccaagtctatttgaaatagaaaactgtctatttaatatagtaaaatcaatgctcccttaatgttgttacaaagatatggtaactgtaata

SEQ ID NO: 560546 - DNA, 120 bp, Artificial Sequence
  ENSG00000169519_18 (sequence is synthesized)
tgggtaaaagtttattcaagaaaagagtacttggtagaagattctttaacaaattgaggagattgattcataattcacatgtcaattttttatagtaatatgtacttctaatttattatt

SEQ ID NO: 560547 - DNA, 120 bp, Artificial Sequence
  ENSG00000169519_19 (sequence is synthesized)
tatacttaaattgtgacctgaaagatgagttggagataattagtcaaagggcacatggagtatggaagggggcatgttgattaaccatacatagaaataaatattctcttagttatcctt

SEQ ID NO: 560548 - DNA, 120 bp, Artificial Sequence
  ENSG00000169519_20 (sequence is synthesized)
gaaatcatatttatactattaatttgctcagtgcacttttttcaaatacagaaaaaagattctccattatagttacaaattttaggttggtgaatccaagtgaatgaaatatcagcataa

SEQ ID NO: 560549 - DNA, 120 bp, Artificial Sequence
  ENSG00000169519_21 (sequence is synthesized)
ctatgtgggcaaaatagatagaattaaatgcatgaattttcctcagacttattttatctgcctctgtaatatttaactttagtacccaggcttgttcactacttctgctttacaggcttt

SEQ ID NO: 560550 - DNA, 120 bp, Artificial Sequence
  ENSG00000169519_22 (sequence is synthesized)
atttaaatctgaacaatcctacagggaaatcagaattaggaaaaaaatctggagaacaatatggttgaaatagaaacaagagaatgcacctaggttaattccctgaatcctacttgaaca

SEQ ID NO: 560551 - DNA, 120 bp, Artificial Sequence
  ENSG00000169519_23 (sequence is synthesized)
ttgtataaatttctctttgcatataatacatatttgtgaatgagacatattcccaaaaaattcttatctctgtatgtgattggaaaagaaaagatcacatttgtatattcaacaatcttt

SEQ ID NO: 560552 - DNA, 120 bp, Artificial Sequence
  ENSG00000169519_24 (sequence is synthesized)
cacctatttcataagtcattttttcaccctgtatagtatgggaattattttttatgttaaatagaaactgaatgtactgggttgaatggtgtcctctccaaaattcatgtacttcctgga

SEQ ID NO: 560553 - DNA, 120 bp, Artificial Sequence
  ENSG00000169519_25 (sequence is synthesized)
gcctcagtatgtgaccttatttggaaatactgtggttgtggttgtaagtagctaagatgaggtcatactggagcagggcaggcccttaatccaatatgactggtgttccttataagagaa

SEQ ID NO: 560554 - DNA, 70 bp, Artificial Sequence
  ENSG00000169519_26 (sequence is synthesized)
gttccttataagagaagatagccaggcaaatcgcttgaggctgaggagttcaagaccagcctggccaaca

SEQ ID NO: 560555 - DNA, 120 bp, Artificial Sequence
  ENSG00000169519_27 (sequence is synthesized)
ctactaaaaataaaattagccatgcgtggtgcttgtaatgtcagctacccaggagtctgaggcacaagaatcactcgaacctgggaggtggaggttgcgagatcacaccactgcactcca

SEQ ID NO: 560556 - DNA, 120 bp, Artificial Sequence
  ENSG00000169519_28 (sequence is synthesized)
aaaaaaaaaaaaaaggaagaaagagaagatagagacacaggggagaatgccacatgaagctggaggcagagattggagtgatacattgtgggaaccctcagaagataggaaaaaagcatg

SEQ ID NO: 560557 - DNA, 120 bp, Artificial Sequence
  ENSG00000169519_29 (sequence is synthesized)
tgggaaccctcagaagataggaaaaaagcatggaatagattctccctcagagttccagtagttgccaaccctgctaacatggttttgcacatctagcatccagaacagtgagaatgtatt

SEQ ID NO: 560558 - DNA, 120 bp, Artificial Sequence
  ENSG00000169519_30 (sequence is synthesized)
tctgctgttttaaggtacccagttcatggtaatttgttacagcaatcctaggaagctaatactctgacagaaaaaaatcttggataatatgcatgagaaaaatccttcaataaacacaaa

SEQ ID NO: 560559 - DNA, 120 bp, Artificial Sequence
  ENSG00000169519_31 (sequence is synthesized)
attggtttcaaaatgttttcatgtaaaaataaattaacttttctgtaattagattgtgttttatagtaattcttgcctgcttcttagtctttgttgtaggatgcataataaaatacatga

SEQ ID NO: 560560 - DNA, 120 bp, Artificial Sequence
  ENSG00000169519_32 (sequence is synthesized)
atgagttttaaatggttagctttggagaatggttttgggaagttcctacagtacacagaaataaaagctaatgttactatgaatgcgcattacttttctaataaaatgtttctgaatctc

SEQ ID NO: 560561 - DNA, 120 bp, Artificial Sequence
  ENSG00000169519_33 (sequence is synthesized)
ggcagcttggcgccaagaagctcagcctggctgcgcaggggaagctctttgcttgctcgtcaccgtggcaacgcgcgcggccgtttccggaggcggtggccaaagtgggcggggctaggc

SEQ ID NO: 560562 - DNA, 120 bp, Artificial Sequence
  ENSG00000169519_34 (sequence is synthesized)
cggagctgctggtgggaggcagccacttgagatcaccaggcctcctgtagaccggcgggtgcagggcccggtcccagagttaagggaaagtcgtttggaaaccccaggccaacaggaccc

SEQ ID NO: 560563 - DNA, 120 bp, Artificial Sequence
  ENSG00000169519_35 (sequence is synthesized)
atatttaatatattcataaagatggagaatttcccacttgagtgtattctattctgaattttggaaccaagctagctgattttacacgtttgattttatgattacatatggaaaaaaatc

SEQ ID NO: 560564 - DNA, 120 bp, Artificial Sequence
  ENSG00000169519_36 (sequence is synthesized)
accacaaaaaggacagcaactgctgttgcgaaaaagtggacgaagacctctcttaactgcttcctgctgacaggaggcgctgttttggaaaagcggcagttaggactcctcctgagactc

SEQ ID NO: 560565 - DNA, 120 bp, Artificial Sequence
  ENSG00000169519_37 (sequence is synthesized)
tccaggatgttagaactggctttggcctgtggaacacctcgtcttgtgcattctatttcctgaataaagggtcttctttgttttccctgcaacgagtggtcttttgctcctcatttctgt

SEQ ID NO: 560566 - DNA, 120 bp, Artificial Sequence
  ENSG00000169519_38 (sequence is synthesized)
ggtcctttacccattctcccaacccaatggcatttcaaaactatttaaaatttaaaaaaattattaatataattgcttacattattactctgtgatttaataaactgagttagataaact

SEQ ID NO: 560567 - DNA, 120 bp, Artificial Sequence
  ENSG00000169519_39 (sequence is synthesized)
ttcatctcagtgtcagcttcctagaagacccaaacaacgtggatggccttcaaagaaaaatggaggctgcacatgttcttcggaaaaagatctaaaagcatcaccttttgctttgtctgc

SEQ ID NO: 560568 - DNA, 120 bp, Artificial Sequence
  ENSG00000169519_40 (sequence is synthesized)
tggtgcttaagtttgaatatgtcatcccactgcctttggccttcatagcttctggcccaggaaagggaagaattacatgaagacacatggagaggggagccaaggggagaggttcagaag

SEQ ID NO: 560569 - DNA, 120 bp, Artificial Sequence
  ENSG00000169519_41 (sequence is synthesized)
aaacaaagcctgctgatatcttgatcttggggtctaacctccagaacggtgatgaaatgtctgttatttaagccattcggtctgtggtattggtgacaacagtctaagcagactaatgca

SEQ ID NO: 560570 - DNA, 120 bp, Artificial Sequence
  ENSG00000169519_42 (sequence is synthesized)
agccctgacacagactttatgcaatttaattctcttttctcagtcatgattttctcctctgtaataagctctaattatcagtgatgaaaattaaatgtgtaaatgtgtacattattgttt

SEQ ID NO: 560571 - DNA, 120 bp, Artificial Sequence
  ENSG00000169519_43 (sequence is synthesized)
aaagacaagtaaagaaaaccaacacccttgtttttgtttaacggatctacctatttttaggaaatgtttaagcagatgtggattttttttttaacacaataaaatactatccttttctca

SEQ ID NO: 560572 - DNA, 120 bp, Artificial Sequence
  ENSG00000169519_44 (sequence is synthesized)
acttctgtaataaagggaattagaataatttattggttaaataaggtaactataaaccaatttttaacaaatttgattttgagttacgatgattgcgtattccaggtacaacttaaattg

SEQ ID NO: 560573 - DNA, 120 bp, Artificial Sequence
  ENSG00000169519_45 (sequence is synthesized)
ctgtaactgttttgttaagttcttttttggataaaaaatcttctaaaatcttatttttctgaaatgtaaacttaccttatagtatatgcatcttaattaaactgttcttgatcgacttaa

SEQ ID NO: 560574 - DNA, 120 bp, Artificial Sequence
  ENSG00000169519_46 (sequence is synthesized)
aaatggaaagcttttccactaagatcagatacaagacagggatgcctgctttcaccacttccattcaacatagtactggaaatactggcaagaaaaattacacaagaaaaagaaataaaa

SEQ ID NO: 560575 - DNA, 120 bp, Artificial Sequence
  ENSG00000169519_47 (sequence is synthesized)
cacaaaaaggacagaattctgtcaggcttcatggtctttttcccatgtgctcatctttctgcacctgttaccagaacttcattctacagcagccctgcttttgctgtcatttgaaatcgg

SEQ ID NO: 560576 - DNA, 120 bp, Artificial Sequence
  ENSG00000169519_48 (sequence is synthesized)
ctctctctctctgtgtgtgtgtgtgtgtttgtctggagaatacacaatcaaatgtatttcctcaccttcaatgacttaggtaaaataatgttatctatttaattttcccccagaatcaat

SEQ ID NO: 560577 - DNA, 120 bp, Artificial Sequence
  ENSG00000169519_49 (sequence is synthesized)
caattgccccaaaatggcttataccctgagaacttaatatacttttttttaaatatctttaactaaaatttagtgagctatttttattgttgttaattttttaagtcctttttttctgta

SEQ ID NO: 560578 - DNA, 120 bp, Artificial Sequence
  ENSG00000169519_50 (sequence is synthesized)
gcctggaagctttttctttgatcattaaagtaggaacctcaatttgaaaacttgccacaactgaacatatgtcccctcttgtattagaaagagttataattttaatacatttttcaaatt

SEQ ID NO: 560579 - DNA, 120 bp, Artificial Sequence
  ENSG00000169519_51 (sequence is synthesized)
atgatttatgtctctttaggagagattctgtttgttttttaaagagccaagccaaaattttttcttactttataattaatgggattacatttatgttttaacttaaatctgaattttaga

SEQ ID NO: 560580 - DNA, 120 bp, Artificial Sequence
  ENSG00000169519_52 (sequence is synthesized)
ggtaattgtaattcagaagaaaatgcaaacatcaaaatatcacatgtatagctctttaaatatgaacattaattatctttggagattgattattgccaaaataaaatcactatatctctt

SEQ ID NO: 560581 - DNA, 120 bp, Artificial Sequence
  ENSG00000169519_53 (sequence is synthesized)
catcaaatgaaaggaattaggaatctcatcgtttgacagctagctaactaaatgaattataaattatgtccatccttctgccacaggaaggtgctattttagctagtaagccaaaatgtc

SEQ ID NO: 560582 - DNA, 120 bp, Artificial Sequence
  ENSG00000169519_54 (sequence is synthesized)
taacaaactttaatgtcaaataaaccaatgctgttgtttatattagaactacatggttatttcagatactattttgttatttttttggttttgttatgaaacattccattttcattaatt

SEQ ID NO: 560583 - DNA, 120 bp, Artificial Sequence
  ENSG00000169519_55 (sequence is synthesized)
ttacaaaacacatttactgaaaatagtatgcaaacatttattgagctttctgcctttctattttatgaattaagagattctgcattaaaatgtcaataaagttaagcagttatgttgaac

SEQ ID NO: 560584 - DNA, 90 bp, Artificial Sequence
  ENSG00000169519_56 (sequence is synthesized)
gaaaaacattccatgctcatgtatagaaagaatcaatattgtgaaaatggacatactgcccaagtaatttatagattcagtgctattccc

SEQ ID NO: 560585 - DNA, 120 bp, Artificial Sequence
  ENSG00000169548_0 (sequence is synthesized)
agaaaggactttgaagagcaagcggcgttgttcgcctgcggaagcagtgctgccggtctctggacaaatttctccgggaggtggagacaaggaagctccagcttcgctttcccttgcggc

SEQ ID NO: 560586 - DNA, 120 bp, Artificial Sequence
  ENSG00000169548_1 (sequence is synthesized)
ccagagtggaacatactgagctgcactgaatcatctggatgcactcgcaactttaggaactggtggcaatttgtaaaaagacagctctggaagttgaagagaccagtggcttcaagcaaa

SEQ ID NO: 560587 - DNA, 120 bp, Artificial Sequence
  ENSG00000169548_2 (sequence is synthesized)
aagtaaattgaaaatgggagatatctttttgtgtaagaaagtggaatcaccaaagaagaatttgagagaatccaaacaaagggaggaggatgatgaagatccagatctgatctatgttgg

SEQ ID NO: 560588 - DNA, 120 bp, Artificial Sequence
  ENSG00000169548_3 (sequence is synthesized)
ggtggagcatgtacatagagatgctgaagttctctttgtcgggatgatttcaaattcaaaaccagtcgtttcaaacattttgaacagagtcaccccaggctcaaattcaagaagaaagaa

SEQ ID NO: 560589 - DNA, 120 bp, Artificial Sequence
  ENSG00000169548_4 (sequence is synthesized)
aggccacttccgtcaatatcctgctcacgtgtcgcagcctgcaaatcatgtgacctctatggcaaaagccatcatgccggtttctctgtctgaggggcgatcgacagatagtcctgtcac

SEQ ID NO: 560590 - DNA, 120 bp, Artificial Sequence
  ENSG00000169548_5 (sequence is synthesized)
tatgaagtcttcatctgaacctggttataaaatgagctcaccacaagttgtttctcccagttcctcagactcgctccccccagggactcagtgtctagttggagctatggtctctggagg

SEQ ID NO: 560591 - DNA, 120 bp, Artificial Sequence
  ENSG00000169548_6 (sequence is synthesized)
aggcagaaatgagagttctcctgattcaaagcgactttccacttcagatataaacagcagagattccaaaagggttaaactcagggatggaatcccaggggtaccttctttagctgtggt

SEQ ID NO: 560592 - DNA, 120 bp, Artificial Sequence
  ENSG00000169548_7 (sequence is synthesized)
cccttcagatatgtcttctacaataagcacaaatacaccctcacaggggatctgcaactcatcaaaccatgttcagaatggagtaacatttccttggcctgatgctaatggaaaggcaca

SEQ ID NO: 560593 - DNA, 120 bp, Artificial Sequence
  ENSG00000169548_8 (sequence is synthesized)
catcgtgttacttagcgacttttactatggacagcataaaggagatgggcagccggaacagaagactcacaccacctttaaatgcctcagctgcgtgaaagttctaaaaaatattaagtt

SEQ ID NO: 560594 - DNA, 120 bp, Artificial Sequence
  ENSG00000169548_9 (sequence is synthesized)
tatgaatcacatgaagcatcatttggaatttgagaagcagaggaacgacagctgggaagaccacaccacctgccagcactgccaccggcagtttcccactcccttccagctacagtgtca

SEQ ID NO: 560595 - DNA, 120 bp, Artificial Sequence
  ENSG00000169548_10 (sequence is synthesized)
cattgatagtgtacacatcgccatggggccctctgctgtctgtaaaatctgtgaattgtcatttgaaacagatcaggtcctcttacaacacatgaaggaccatcataagcctggcgaaat

SEQ ID NO: 560596 - DNA, 120 bp, Artificial Sequence
  ENSG00000169548_11 (sequence is synthesized)
gccttatgtgtgccaggtttgccattacagatcgtcggtctttgctgatgtggaaacacattttagaacgtgccatgaaaacacaaagaatttgctttgtctgttttgtctcaaactttt

SEQ ID NO: 560597 - DNA, 120 bp, Artificial Sequence
  ENSG00000169548_12 (sequence is synthesized)
caaaactgcaataccatacatgaatcattgttggaggcacagcagaaggagggtccttcagtgttccaagtgccggctacagtttttgacgttgaaggaggaaatagagcacaaaaccaa

SEQ ID NO: 560598 - DNA, 120 bp, Artificial Sequence
  ENSG00000169548_13 (sequence is synthesized)
ggaccatcaaacatttaaaaagccggagcaactgcaagggttgcctagtgaaacaaaagttattattcaaacttcagttcagccaggatcaagtggtatggcttccgttattgttagcaa

SEQ ID NO: 560599 - DNA, 120 bp, Artificial Sequence
  ENSG00000169548_14 (sequence is synthesized)
cactgaccctcagtcttctcctgtaaaaactaaaaagaagacggctatgaacactagagattccagactcccttgcagcaaggattctagctgaaaatatgttcgactgacttccaggag

SEQ ID NO: 560600 - DNA, 120 bp, Artificial Sequence
  ENSG00000169548_15 (sequence is synthesized)
ttccgaaaggcagaagtgaggctaggccatatgtgcattgtggctgtagatgctagcaagcaatgtcatcaactgtcaggttgttttttacagtgacatctcatcagctccctattgtca

SEQ ID NO: 560601 - DNA, 120 bp, Artificial Sequence
  ENSG00000169548_16 (sequence is synthesized)
agaagtagctccaaagtctttgagccctttcccagtcaaatgctcccaacagggcatcccttattctgacctcagaggtttttcttgttcatgaactttaaataaatggaatcacacaaa

SEQ ID NO: 560602 - DNA, 120 bp, Artificial Sequence
  ENSG00000169550_0 (sequence is synthesized)
tctaatgcacgacagattcctttcagacaggacaactgtgatatttcagttcctgattgtaaatacctcctaagcctgaagattcctttaaaaaaaaaccaataccaaagaagcctacaa

SEQ ID NO: 560603 - DNA, 120 bp, Artificial Sequence
  ENSG00000169550_1 (sequence is synthesized)
tgttggccttagccaaaattctgttgatttcaacgttgttttattcacttctatcggggagccatggaaaagaaaatcaagacataaacacaacacagaacattgcagaagtttttaaaa

SEQ ID NO: 560604 - DNA, 120 bp, Artificial Sequence
  ENSG00000169550_2 (sequence is synthesized)
caatggaaaataaacctatttctttggaaagtgaagcaaacttaaactcagataaagaaaatataaccacctcaaatctcaaggcgagtcattcccctcctttgaatctacccaacaaca

SEQ ID NO: 560605 - DNA, 120 bp, Artificial Sequence
  ENSG00000169550_3 (sequence is synthesized)
gccacggaataacagatttctccagtaactcatcagcagagcattctttgggcagtctaaaacccacatctaccatttccacaagccctcccttgatccatagctttgtttctaaagtgc

SEQ ID NO: 560606 - DNA, 120 bp, Artificial Sequence
  ENSG00000169550_4 (sequence is synthesized)
cttggaatgcacctatagcagatgaagatcttttgcccatctcagcacatcccaatgctacacctgctctgtcttcagaaaacttcacttggtctttggtcaatgacaccgtgaaaactc

SEQ ID NO: 560607 - DNA, 120 bp, Artificial Sequence
  ENSG00000169550_5 (sequence is synthesized)
ctgataacagttccattacagttagcatcctctcttcagaaccaacttctccatctgtgacccccttgatagtggaaccaagtggatggcttaccacaaacagtgatagcttcactgggt

SEQ ID NO: 560608 - DNA, 120 bp, Artificial Sequence
  ENSG00000169550_6 (sequence is synthesized)
ttaccccttatcaagaaaaaacaactctacagcctaccttaaaattcaccaataattcaaaactctttccaaatacgtcagatccccaaaaagaaaatagaaatacaggaatagtattcg

SEQ ID NO: 560609 - DNA, 120 bp, Artificial Sequence
  ENSG00000169550_7 (sequence is synthesized)
gggccattttaggtgctattctgggtgtctcattgcttactcttgtgggctacttgttgtgtggaaaaaggaaaacggattcattttcccatcggcgactttatgacgacagaaatgaac

SEQ ID NO: 560610 - DNA, 120 bp, Artificial Sequence
  ENSG00000169550_8 (sequence is synthesized)
cagttctgcgattagacaatgcaccggaaccttatgatgtgagttttgggaattctagctactacaatccaactttgaatgattcagccatgccagaaagtgaagaaaatgcacgtgatg

SEQ ID NO: 560611 - DNA, 120 bp, Artificial Sequence
  ENSG00000169550_9 (sequence is synthesized)
gcattcctatggatgacatacctccacttcgtacttctgtatagaactaacagcaaaaaggcgttaaacagcaagtgtcatctacatcctagccttttgacaaattcatctttcaaaagg

SEQ ID NO: 560612 - DNA, 120 bp, Artificial Sequence
  ENSG00000169550_10 (sequence is synthesized)
ttacacaaaattactgtcacgtggattttgtcaaggagaatcataaaagcaggagaccagtagcagaaatgtagacaggatgtatcatccaaaggttttctttcttacaatttttggcca

SEQ ID NO: 560613 - DNA, 120 bp, Artificial Sequence
  ENSG00000169550_11 (sequence is synthesized)
tcctgaggcatttactaagtagccttaatttgtattttagtagtattttcttagtagaaaatatttgtggaatcagataaaactaaaagatttcaccattacagccctgcctcataacta

SEQ ID NO: 560614 - DNA, 120 bp, Artificial Sequence
  ENSG00000169550_12 (sequence is synthesized)
aataataaaaattattccaccaaaaaattctaaaacaatgaagatgactctttactgctctgcctgaagccctagtaccataattcaagattgcattttcttaaatgaaaattgaaaggg

SEQ ID NO: 560615 - DNA, 120 bp, Artificial Sequence
  ENSG00000169550_13 (sequence is synthesized)
aggacatagcccagagtttctgttattgggaaattgaggcaatagaaatgacagacctgtattctagtacgttataattttctagatcagcacacacatgatcagcccactgagttatga

SEQ ID NO: 560616 - DNA, 120 bp, Artificial Sequence
  ENSG00000169550_14 (sequence is synthesized)
agctgacaatgactgcattcaacggggccatggcaggaaagctgaccctacccaggaaagtaatagcttctttaaaagtcttcaaaggttttgggaattttaacttgtcttaatatatct

SEQ ID NO: 560617 - DNA, 120 bp, Artificial Sequence
  ENSG00000169550_15 (sequence is synthesized)
taggcttcaattatttgggtgccttaaaaactcaatgagaatcatggtaaaaaaaaaaagttaaccaaagaatatacctgtacataatttgtacagttttaagttgttagataggaactg

SEQ ID NO: 560618 - DNA, 120 bp, Artificial Sequence
  ENSG00000169550_16 (sequence is synthesized)
gatttcttatgtattagacattattgctcaatcataatggaatagattctgcatccctaaatgtatgaaccataaggttaaaaaagatgaatggaaatatcaaacaactttttactgagc

SEQ ID NO: 560619 - DNA, 120 bp, Artificial Sequence
  ENSG00000169550_17 (sequence is synthesized)
atcagtttcataatcaataatataagaagattaatttggattctagtatgtttcagtttgtttttaattaccaccttcctttggtagaaaaaatatgttccttgatgtaggaaagtctag

SEQ ID NO: 560620 - DNA, 120 bp, Artificial Sequence
  ENSG00000169550_18 (sequence is synthesized)
gttttagagattagaggatgagatcaagagttaaattcctaaagaagcactgaatatatgaagagagcaaacaaatcaagtaccaacctagaggctttatttttgaattgattcatggtg

SEQ ID NO: 560621 - DNA, 120 bp, Artificial Sequence
  ENSG00000169550_19 (sequence is synthesized)
tgtgtgtgtgtgtgtgtgtgtgtgtaacacagaaacagcttcagaaaataagggatagaaagtaatgaagaaagtacttaccccatattgccataaaaatagcaaagaagactgtccctc

SEQ ID NO: 560622 - DNA, 120 bp, Artificial Sequence
  ENSG00000169550_20 (sequence is synthesized)
agactgtccctccattatcgaacaaatatgtcacctgagtagaaaacaaacagaaatattagtcatgcaaattgattataataagccagtgaatactgtttgcactcaggtactatgatt

SEQ ID NO: 560623 - DNA, 120 bp, Artificial Sequence
  ENSG00000169550_21 (sequence is synthesized)
ttttctcaaatagaatcatattattttatagtacagaaatattatatatgaattcctttcatgggtcttgcaacaatttcacatgatttttctcatggggagaggtgaagaaacaacatt

SEQ ID NO: 560624 - DNA, 120 bp, Artificial Sequence
  ENSG00000169550_22 (sequence is synthesized)
agccctcttctctcctctcttgattccctttataccccaccatcatttctgattataaataattctaccattctatggaagtatttgtgggtcacagattgtcaaactacttaatgaaag

SEQ ID NO: 560625 - DNA, 120 bp, Artificial Sequence
  ENSG00000169550_23 (sequence is synthesized)
ttgtatgaaattagtttttcaggtgaggcattcctagttgcaattcctgttagcaaaacttctaggagtggggaagttggaaaatgcaggattcttccagtgagccagcatttcccatag

SEQ ID NO: 560626 - DNA, 120 bp, Artificial Sequence
  ENSG00000169550_24 (sequence is synthesized)
ctaaccctattctcttagtctttcaaaatgtagaatgggtccaataatggctataagatgtaataaatcccatcttaatttgttttaaaagtttcataaatcactgaacacttatgaaac

SEQ ID NO: 560627 - DNA, 120 bp, Artificial Sequence
  ENSG00000169550_25 (sequence is synthesized)
aaagtgttttttaatcagatatcaactgaaacttcataaaggatgcatagttttataatgttattgaatcaaattttaaggcttgtattgtttgattttaataaagtataaattcaattt

SEQ ID NO: 560628 - DNA, 120 bp, Artificial Sequence
  ENSG00000169550_26 (sequence is synthesized)
aatgcttacagctgagaagcaggtcagtcaggttcctgggcgctctgttacacaagcaagatacagccagccccacctaattttgtttccctggcaccctcctgctcagtgcgacattgt

SEQ ID NO: 560629 - DNA, 120 bp, Artificial Sequence
  ENSG00000169550_27 (sequence is synthesized)
cacacttaacccatctgttttctctaatgcacgacagattcctttcagacaggacaactgtgatatttcagttcctgattgtaaatacctcctaagcctgaagcttctgttactagccat

SEQ ID NO: 560630 - DNA, 120 bp, Artificial Sequence
  ENSG00000169550_28 (sequence is synthesized)
catttgttgccctctggagttgctgtcccacctccattaggcttctgtcacttgcaatgtgctttgttcagttggcatgaggtcaaacttcggccaaatctcctggaccttactccagca

SEQ ID NO: 560631 - DNA, 120 bp, Artificial Sequence
  ENSG00000169550_29 (sequence is synthesized)
aaatttcatggtggggttctgaataacggatgacttcaattcctggctgcttctacgactttaagatgaaaggaacctgacttctgttactagccattgtgagcttcagtttcttcatct

SEQ ID NO: 560632 - DNA, 120 bp, Artificial Sequence
  ENSG00000169551_0 (sequence is synthesized)
agagggagaagtcagcggagaagctgggagctcctttggaggctgcggtgtccctgactctcctgaggggggctcactaacgggtgggtcccatgccacagtgtctgaggagaagcagga

SEQ ID NO: 560633 - DNA, 120 bp, Artificial Sequence
  ENSG00000169551_1 (sequence is synthesized)
agtgagtccctgaggagacgccgtgacctgagggcttcccttactgaggaggcctcgtgcttcatctgccacaagcggtgcccaggccggtggtgacaactgggacgatgctcaggcttc

SEQ ID NO: 560634 - DNA, 120 bp, Artificial Sequence
  ENSG00000169551_2 (sequence is synthesized)
tgagacttgctttggccttctacgggaggacggccgaccctgcagagcgacagggcccacagcagcagggcctcccacaaggtgacacccagttgacaactgtgcagggagttgtcacaa

SEQ ID NO: 560635 - DNA, 120 bp, Artificial Sequence
  ENSG00000169551_3 (sequence is synthesized)
gtttctgtggtgattatggcatgattgatgagtcgatctacttcagtagtgatgttgtgactggcaacgtgcctctaaaagttggacaaaaagttaatgtggttgtggaagaagataaac

SEQ ID NO: 560636 - DNA, 120 bp, Artificial Sequence
  ENSG00000169551_4 (sequence is synthesized)
cacattatggattgagagcaatcaaggtggatgttgtgcctcgccatctttatggtgctggaccctcagactcaggaaccagagttttaattggatgtgttacttctataaatgaagata

SEQ ID NO: 560637 - DNA, 120 bp, Artificial Sequence
  ENSG00000169551_5 (sequence is synthesized)
atatttatattagtaacagcatttatttttccatagccattgtttctgaagattttgtgccttataagggtgacttgttagaagttgaatattccactgagccaggcatctcaaacatca

SEQ ID NO: 560638 - DNA, 120 bp, Artificial Sequence
  ENSG00000169551_6 (sequence is synthesized)
aggcaacttctgtgaagcccatccgttgtattcatacggaagaggtctgcattactagcgtacatggaagaaatggggtgatagattatactatttttttcaccttggattctgtgaaac

SEQ ID NO: 560639 - DNA, 120 bp, Artificial Sequence
  ENSG00000169551_7 (sequence is synthesized)
tggtggagagcattcagttctgctttatttggagagcgatttctatcaccccagtgcataaatcgtaatgacaaagcatttttattctgtttatctttccttttatgagcagtaaagggg

SEQ ID NO: 560640 - DNA, 120 bp, Artificial Sequence
  ENSG00000169551_8 (sequence is synthesized)
ctggtttaacttaaaaggttagcttagtaagcctaaatagtattttatatatgacttttctggcaaatctaattgagacactggccagtccaactggaccaggaacccagcttagggaaa

SEQ ID NO: 560641 - DNA, 120 bp, Artificial Sequence
  ENSG00000169551_9 (sequence is synthesized)
taacttattaattaaaaagcatgctaaattagcttgctagtcactggaggaaaggagttcttaattaaaatgaacacggccattaaatttgaattccatatttcccattagcagcagcgg

SEQ ID NO: 560642 - DNA, 120 bp, Artificial Sequence
  ENSG00000169551_10 (sequence is synthesized)
attccaggatgacggaggcctgggacggcccaaaagggaacgtcggagccaaagcatttaactgaaaaggcatcagggacagcatgttaaaggcatgatttaaagttacaatttgacttc

SEQ ID NO: 560643 - DNA, 120 bp, Artificial Sequence
  ENSG00000169551_11 (sequence is synthesized)
agttttgagccccgttatgctgcctgtacaacctgtattgttccatagcctctttcatcttctgtcacccacataacttgcggtgtttgttgttttacttgttccttcttccccatgcta

SEQ ID NO: 560644 - DNA, 81 bp, Artificial Sequence
  ENSG00000169551_12 (sequence is synthesized)
gtcattaaagcatcaccaagcacttagaagagtgcctggcagactcaatgagcagataaaatgttattaagttcaatgact

SEQ ID NO: 560645 - DNA, 120 bp, Artificial Sequence
  ENSG00000169551_13 (sequence is synthesized)
gactcaatgagcagataaaatgttattaagttcaatgactgaatgactgggccagcaatgatacttacctgtggttcattcatcactggttccttaggaataaaattgttgagcaatgca

SEQ ID NO: 560646 - DNA, 120 bp, Artificial Sequence
  ENSG00000169554_0 (sequence is synthesized)
agaaaagatgagaacgaaaagaaaacctcgcctcaccccaagttcccgagccgggggctgaggacttttcgaaggaaagggtccgcctagccctgagtcaagcggtcttactgtaccgcc

SEQ ID NO: 560647 - DNA, 120 bp, Artificial Sequence
  ENSG00000169554_1 (sequence is synthesized)
gtgtgcattccctcatacggtcaggagttatgactcattttgaagatgtaattcttgtctctctgatcccctcgcgggtgcaacacaccaaacaatcgagcctgcgtgctgccgaagcag

SEQ ID NO: 560648 - DNA, 120 bp, Artificial Sequence
  ENSG00000169554_2 (sequence is synthesized)
ggcgccgagtccatgcgaactgccatctgatccgctcttatcaatgaagcagccgatcatggcggatggcccccggtgcaagaggcgcaaacaagccaatcccaggaggaaaaacgtggt

SEQ ID NO: 560649 - DNA, 120 bp, Artificial Sequence
  ENSG00000169554_3 (sequence is synthesized)
gaactatgacaatgtagtggacacaggttctgaaacagatgaggaagacaagcttcatattgctgaggatgacggtattgccaaccctctggaccaggagacgagtccagctagtgtgcc

SEQ ID NO: 560650 - DNA, 120 bp, Artificial Sequence
  ENSG00000169554_4 (sequence is synthesized)
caaccatgagtcctccccacacgtgagccaagctctgttgccaagagaggaagaggaagatgaaataagggagggtggagtggaacacccctggcacaacaacgagattctacaagcctc

SEQ ID NO: 560651 - DNA, 120 bp, Artificial Sequence
  ENSG00000169554_5 (sequence is synthesized)
tgtagatggtccagaagaaatgaaggaagactatgacactatggggccagaagccacgatccagaccgcaattaacaatggtacagtgaagaatgcaaattgcacatcagattttgagga

SEQ ID NO: 560652 - DNA, 120 bp, Artificial Sequence
  ENSG00000169554_6 (sequence is synthesized)
atactttgccaaaagaaaactggaggaacgcgatggtcatgcagtcagcatcgaggagtaccttcagcgcagtgacacagccattatttacccagaagcccctgaggagctgtctcgcct

SEQ ID NO: 560653 - DNA, 120 bp, Artificial Sequence
  ENSG00000169554_7 (sequence is synthesized)
tggcacgccagaggccaatgggcaagaagaaaatgacctgccacctggaactccagatgcttttgcccaactgctgacctgcccctactgcgaccggggctacaagcgcttgacatcact

SEQ ID NO: 560654 - DNA, 120 bp, Artificial Sequence
  ENSG00000169554_8 (sequence is synthesized)
gaaggagcacatcaagtaccgccacgagaagaatgaagagaacttttcctgccctctctgtagctacacgtttgcctaccgcacccagctcgagcggcatatggtgacacacaagccagg

SEQ ID NO: 560655 - DNA, 120 bp, Artificial Sequence
  ENSG00000169554_9 (sequence is synthesized)
gacagatcagcaccaaatgctaacccaaggagcaggtaatcgcaagttcaaatgcacagagtgtggcaaggccttcaaatataaacaccatctgaaagaacacctgcgaattcacagtgg

SEQ ID NO: 560656 - DNA, 120 bp, Artificial Sequence
  ENSG00000169554_10 (sequence is synthesized)
tgaaaaaccttacgagtgcccaaactgcaagaaacgtttctcccattctggttcctacagttcgcacatcagcagcaagaaatgtattggtttaatctctgtaaatggccgaatgagaaa

SEQ ID NO: 560657 - DNA, 120 bp, Artificial Sequence
  ENSG00000169554_11 (sequence is synthesized)
caatatcaagacgggttcttcccctaattctgtttcttcttctcctactaattcagccattacccagttaagaaacaagttggagaatggaaaaccacttagtatgtctgaacagacagg

SEQ ID NO: 560658 - DNA, 120 bp, Artificial Sequence
  ENSG00000169554_12 (sequence is synthesized)
cttacttaaaattaaaacagaaccactagacttcaatgactataaagttcttatggctacacacgggtttagtggcactagtccctttatgaatggtgggcttggagccaccagcccttt

SEQ ID NO: 560659 - DNA, 120 bp, Artificial Sequence
  ENSG00000169554_13 (sequence is synthesized)
aggagttcatccatctgctcagagtccaatgcagcacttaggtgtagggatggaagcccctttacttgggtttcccaccatgaatagtaatttaagtgaggtacaaaaggttctacagat

SEQ ID NO: 560660 - DNA, 120 bp, Artificial Sequence
  ENSG00000169554_14 (sequence is synthesized)
tgtggacaatactgtttccaggcaaaaaatggactgcaaggctgaagaaatttcaaagttgaaaggttatcacatgaaggatccatgctctcaacctgaggaacaaggagttacttctcc

SEQ ID NO: 560661 - DNA, 120 bp, Artificial Sequence
  ENSG00000169554_15 (sequence is synthesized)
taatattccgcctgtcggtcttccggtagtgagtcataatggtgccactaaaagtattattgactatacgttggaaaaagtcaatgaagccaaagcttgcctccagagcttgactactga

SEQ ID NO: 560662 - DNA, 120 bp, Artificial Sequence
  ENSG00000169554_16 (sequence is synthesized)
ctcaaggagacagatcagtaatataaagaaagagaagctacgtactttaatagatttggtcactgatgacaaaatgattgagaaccacaacatatccactccattttcatgccagttctg

SEQ ID NO: 560663 - DNA, 120 bp, Artificial Sequence
  ENSG00000169554_17 (sequence is synthesized)
taaagaaagttttcctggccccatccctttgcatcagcatgaacgttacctttgtaagatgaatgaagagatcaaggcggtcctgcagcctcatgaaaacatagtccccaacaaagccgg

SEQ ID NO: 560664 - DNA, 120 bp, Artificial Sequence
  ENSG00000169554_18 (sequence is synthesized)
agtttttgttgataataaagccctcctcttgtcatctgtactttctgagaaaggaatgacaagccccatcaacccatacaaggaccacatgtctgtactcaaagcatactatgctatgaa

SEQ ID NO: 560665 - DNA, 120 bp, Artificial Sequence
  ENSG00000169554_19 (sequence is synthesized)
catggagcccaactccgatgaactgctgaaaatttccattgctgtgggccttcctcaggaatttgtgaaggaatggtttgaacaacgaaaagtctaccagtactcaaattccaggtcccc

SEQ ID NO: 560666 - DNA, 120 bp, Artificial Sequence
  ENSG00000169554_20 (sequence is synthesized)
atccctggaaagaagctccaagccgttagctcccaacagtaaccctcccacaaaagactctttattacccaggtctcctgtaaaacctatggactccataacatcaccatctatagcaga

SEQ ID NO: 560667 - DNA, 120 bp, Artificial Sequence
  ENSG00000169554_21 (sequence is synthesized)
actccacaacagtgttacgaattgtgatcctcctctcaggctaacaaaaccttcccattttaccaatattaaaccagttgaaaaattggaccactccaggagtaatactccttctccctt

SEQ ID NO: 560668 - DNA, 120 bp, Artificial Sequence
  ENSG00000169554_22 (sequence is synthesized)
tgagcctttagacttgtcattaccaaaacaaatgaaagaacccaaaagtattatagccacaaagaacaaaacaaaagctagtagcatcagtttagatcataacagtgtttcttcctcatc

SEQ ID NO: 560669 - DNA, 120 bp, Artificial Sequence
  ENSG00000169554_23 (sequence is synthesized)
tgaaaactcagatgagcctctgaacttgacttttatcaagaaggaattttcaaattcaaataatctggacaacaaaagcactaacccagtgttcagcatgaacccatttagtgccaaacc

SEQ ID NO: 560670 - DNA, 120 bp, Artificial Sequence
  ENSG00000169554_24 (sequence is synthesized)
tttatacacagctcttccacctcaaagcgcatttccccctgctactttcatgccaccagtccagaccagtattcctgggctacgaccatacccaggactggatcagatgagcttcctacc

SEQ ID NO: 560671 - DNA, 120 bp, Artificial Sequence
  ENSG00000169554_25 (sequence is synthesized)
acatatggcctacacctacccaactggagcagctacttttgctgatatgcagcaaaggagaaagtaccagcggaaacaaggatttcagggagaattgcttgatggagcacaagactacat

SEQ ID NO: 560672 - DNA, 120 bp, Artificial Sequence
  ENSG00000169554_26 (sequence is synthesized)
gtcaggcctagatgatatgacagactccgactcctgtctgtctcgcaaaaagatcaagaagacagagagtggcatgtatgcatgtgacttatgtgacaagacattccagaaaagcagttc

SEQ ID NO: 560673 - DNA, 120 bp, Artificial Sequence
  ENSG00000169554_27 (sequence is synthesized)
ccttctgcgacataaatacgaacacacaggaaaaagaccacatcagtgtcagatttgtaagaaagcgtttaaacacaagcaccaccttatcgagcactcaaggcttcactcgggcgagaa

SEQ ID NO: 560674 - DNA, 120 bp, Artificial Sequence
  ENSG00000169554_28 (sequence is synthesized)
gccctatcagtgtgataaatgtggcaagcgcttctcacactcgggctcgtactcgcagcacatgaatcacaggtattcctactgcaagcgggaggcggaggagcgggaagcggcggagcg

SEQ ID NO: 560675 - DNA, 120 bp, Artificial Sequence
  ENSG00000169554_29 (sequence is synthesized)
cgaggcgcgcgagaaagggcacttggaacccaccgagctgctgatgaaccgggcttacttgcagagcattacccctcaggggtactctgactcggaggagagggagagtatgccgaggga

SEQ ID NO: 560676 - DNA, 120 bp, Artificial Sequence
  ENSG00000169554_30 (sequence is synthesized)
tggcgagagcgagaaggagcacgagaaagaaggcgaggatggctacgggaagctgggcagacaggatggcgacgaggagttcgaggaggaagaggaagaaagtgaaaataaaagtatgga

SEQ ID NO: 560677 - DNA, 120 bp, Artificial Sequence
  ENSG00000169554_31 (sequence is synthesized)
tacggatcccgaaacgatacgagatgaagaagagactggagatcactccatggacgatagttcggaggatgggaaaatggaaaccaaatcagaccacgaggaagacaatatggaagatgg

SEQ ID NO: 560678 - DNA, 120 bp, Artificial Sequence
  ENSG00000169554_32 (sequence is synthesized)
catgtaataaactactgcattttaagcttcctatttttttttccagtagtattgttacctgcttgaaaacactgctgtgttaagctgttcatgcacgtgcctgacgcttccaggaagctg

SEQ ID NO: 560679 - DNA, 120 bp, Artificial Sequence
  ENSG00000169554_33 (sequence is synthesized)
tagagagggacagaaggggcggttcagccaagacagatgtagacggagttggagctgggtattgttaaaaactgcattatgcaaaaattttgtacagtgttaaggcctaaaaactgtgtg

SEQ ID NO: 560680 - DNA, 120 bp, Artificial Sequence
  ENSG00000169554_34 (sequence is synthesized)
gttcagagactaattcctgtgtttaatagcatttatactttaagcacaactagaaaattgtaagaattgcactctacttatgtatcactacaaactttaaaaaactatgtctaatttata

SEQ ID NO: 560681 - DNA, 120 bp, Artificial Sequence
  ENSG00000169554_35 (sequence is synthesized)
ttaatacattttaaaaaggtgcccgcactaccatacatcagtatttttattattattattgttattcctttttaatttaatgtgctcgcactacaatgcatcagtattatgattcctctg

SEQ ID NO: 560682 - DNA, 120 bp, Artificial Sequence
  ENSG00000169554_36 (sequence is synthesized)
tactttcctttcgctattcatcaatttcccattttttttttcagcttaagtaaccacacaattttaggcctcaatttttttttttttctgtgaaggaacttgaagtgatgcatgtgtgaa

SEQ ID NO: 560683 - DNA, 120 bp, Artificial Sequence
  ENSG00000169554_37 (sequence is synthesized)
tttaagataccgaagtcttaaagtgacctggacgtgaaggaaaaagtaagatgagaaataaagaaagcctttgtaaggtggttttaaaagccttatatgcaaaccttttaatctgtgttt

SEQ ID NO: 560684 - DNA, 120 bp, Artificial Sequence
  ENSG00000169554_38 (sequence is synthesized)
ctgcaagtgccatccttgtacagtgttaagagggtaacatgggttacctttgcaccagcttcagtgttaagctcaccctgttctttgaagcacccatgtcagtattagaagaataggcag

SEQ ID NO: 560685 - DNA, 120 bp, Artificial Sequence
  ENSG00000169554_39 (sequence is synthesized)
cagttccttagtttacatatgtttgtgcaattattttctgtacttttttgttcattaattttgtcagtattacaccaaactgtttttgcaacaaaaaaattttttttgcattcatttaat

SEQ ID NO: 560686 - DNA, 120 bp, Artificial Sequence
  ENSG00000169554_40 (sequence is synthesized)
atttatgtggctcattttatatttcctaattttatttatttcatactgtagtgtacagtattatagttcttcaatatatagatatattttagtaaaaaaggaacatgacgttgatcattt

SEQ ID NO: 560687 - DNA, 120 bp, Artificial Sequence
  ENSG00000169554_41 (sequence is synthesized)
gaacatgacgttgatcatttgggcaaattttacgtaaagagaagagcatttattgtgttttggaacattaattgtgagatgggatttttcaattttattattttatttttgtttttttcc

SEQ ID NO: 560688 - DNA, 120 bp, Artificial Sequence
  ENSG00000169554_42 (sequence is synthesized)
aattactggaaattccaaatttgggaacttttgatacgatcttgtgaaaacactgtattttcgactgaaaattccactttcttcatcttgttttttagctaaaaagagggactgttaaat

SEQ ID NO: 560689 - DNA, 120 bp, Artificial Sequence
  ENSG00000169554_43 (sequence is synthesized)
acaatgtatgataccatgacaaaaatctttcctgaattgtctttgtaaaagtattattgaattttcaatttgtaatttcttttgaaaatgaccatgctcgaataaaaatgtagccaaact

SEQ ID NO: 560690 - DNA, 120 bp, Artificial Sequence
  ENSG00000169554_44 (sequence is synthesized)
cgaagtttcgctttggcgttggggggcgcggatgggtgctcgccggggccctggcccggctcccctgggcggcccgcgcgcgtttcaatgggcgcgggcgatgcccacattgtcgctgtg

SEQ ID NO: 560691 - DNA, 120 bp, Artificial Sequence
  ENSG00000169554_45 (sequence is synthesized)
agttctaacctgctctgcaggaataacggtcctgcctcccgacactcttggcgaggtttttgtacagtttgctccgggagctgtttcttcgcttccacctttttctcccccacacttcgc

SEQ ID NO: 560692 - DNA, 120 bp, Artificial Sequence
  ENSG00000169554_46 (sequence is synthesized)
ttttttcatataattttagtttagcaataattttgactggtaccaataactgttttttaaaattccatacctatgtacagcaattttacagcttttctcaactgatcctgattccagatt

SEQ ID NO: 560693 - DNA, 120 bp, Artificial Sequence
  ENSG00000169554_47 (sequence is synthesized)
gtgtatttttatgtgaggttatattattcaaatttagtctatttactttacagacatttctacttttgcattacgagtatttagagattatgtgttaaaaattcacttctctgtccaagg

SEQ ID NO: 560694 - DNA, 120 bp, Artificial Sequence
  ENSG00000169554_48 (sequence is synthesized)
ggtctttgtgatttattcaaaaaaaagtctaatttcaaaaagacagctattattcagtgttatttataatatgtaaccttttttaaaggattgggatagtttatctcactttttgaaatg

SEQ ID NO: 560695 - DNA, 120 bp, Artificial Sequence
  ENSG00000169554_49 (sequence is synthesized)
cagacagtagtttaccgtttatctgaaactagaaggcgtgggtgggagaggaaaagctaaaagcaaatgctaacaaaaataaccgtgattttctaagacagtttttcagtttttacaaga

SEQ ID NO: 560696 - DNA, 120 bp, Artificial Sequence
  ENSG00000169554_50 (sequence is synthesized)
tgaccctaatattcagaatatgaatgtattcgtaggttttacataatgacttttatcaagaaactagattctgcttcttaaatctaattgccaagtgaagaataacagaaaaaacagatt

SEQ ID NO: 560697 - DNA, 120 bp, Artificial Sequence
  ENSG00000169554_51 (sequence is synthesized)
accttatcaaatttacagctcttgaatatacagaactataatatagtagctgtccatgtattttttctactttagaatcaaagaagaaaagcatcattttgctattaaatttgctaaaat

SEQ ID NO: 560698 - DNA, 120 bp, Artificial Sequence
  ENSG00000169554_52 (sequence is synthesized)
tttgagtatgatatttccagttggcaagaacaacatatttatatttattccttagccataataccactttcctaaatttcacaaaagtcattctttgcaacttgaaactcaatagaaagt

SEQ ID NO: 560699 - DNA, 120 bp, Artificial Sequence
  ENSG00000169554_53 (sequence is synthesized)
atatatatatacacacacacacatacacagaaaggatgtaatgaagatacagtaatagttgagcagacctttttagaaaaacatgtttttagctctatcttcaaactttctggcagaggg

SEQ ID NO: 560700 - DNA, 120 bp, Artificial Sequence
  ENSG00000169554_54 (sequence is synthesized)
atcttcaaactttctggcagagggggtggggggggcagggggaggagtggcatcaaaatgctatgcctcctgttatccacagcctagagtttttatatttggaaagtttagaaaattcta

SEQ ID NO: 560701 - DNA, 120 bp, Artificial Sequence
  ENSG00000169554_55 (sequence is synthesized)
tcctcgtttctccttctttgaatggcacaaataaatacactacataaatttttctggtttgaaaggctctaggcgataactttattaattcaacctgaaaatatcaagccattaaatttt

SEQ ID NO: 560702 - DNA, 120 bp, Artificial Sequence
  ENSG00000169554_56 (sequence is synthesized)
gtccgggtagaataaatccctgtggcctcttttaaagcaatgtaggtctctgttgcccatggggcatatctgtgtcccaatccacaagagataggaccaacaaacaatgaatgtgcaacc

SEQ ID NO: 560703 - DNA, 120 bp, Artificial Sequence
  ENSG00000169554_57 (sequence is synthesized)
taactctttctccttggaaagaagaaagtgtgcacgaagtagaggagggtgggcagaccctgccttgcccctcctgttacccccttctctgtcatttgttcctaactccatttcataggc

SEQ ID NO: 560704 - DNA, 120 bp, Artificial Sequence
  ENSG00000169554_58 (sequence is synthesized)
aggctcagaatacctgagtctgaaaatatcaggataacacttgtgaattgtgacaatcactacaatgtcccatatctgaggagttttttttaatgctatttatccgctggacacgattgc

SEQ ID NO: 560705 - DNA, 120 bp, Artificial Sequence
  ENSG00000169554_59 (sequence is synthesized)
acattagggctgcataatcctctaactctagggaaaaataaaaacttttgatttgtcttaagattcttctccaaggtcgcaaacaagaaattcccctccacaaccaagagatgtgcattt

SEQ ID NO: 560706 - DNA, 120 bp, Artificial Sequence
  ENSG00000169554_60 (sequence is synthesized)
tagtaacatcagatgtgttcttctgttttatcaactacttactcttcccacacgcttagttctaaatctaacctttcccccctcgaatagggggcaggggaggatgaggaaacactggaa

SEQ ID NO: 560707 - DNA, 120 bp, Artificial Sequence
  ENSG00000169554_61 (sequence is synthesized)
caactgaacacccctgcccattttctccaagagccttttgtattctagcatatctgtgcaatcttttcttttttcttcacatgacactgtaagcttaggcctgaaataactgggaagaga

SEQ ID NO: 560708 - DNA, 120 bp, Artificial Sequence
  ENSG00000169554_62 (sequence is synthesized)
gatgcgtatcagaatttctccgcaagagctaaacaaaacatacatcttccttagcatgaattggactgggggcggagtgggagggcttggaggaaaggggaaagaagggactatatttga

SEQ ID NO: 560709 - DNA, 120 bp, Artificial Sequence
  ENSG00000169554_63 (sequence is synthesized)
ataaatatgaataaatgtattagatacttttcacaatcagataacttttaaaaaggtcattttttatctttctaataatgtaagccttaataaaagcaaatcttagtcacaaatttgagg

SEQ ID NO: 560710 - DNA, 120 bp, Artificial Sequence
  ENSG00000169554_64 (sequence is synthesized)
agactgcccaataataagtttacatgtatttgaactgaaaaattgttaaccatgcttttgctccaagatgtgtgaggccattcaggggctgtagggccctggatatacacacaaacaagt

SEQ ID NO: 560711 - DNA, 120 bp, Artificial Sequence
  ENSG00000169554_65 (sequence is synthesized)
gtgtgtatatctggagccccacacattgtaataaacacagctgcatttatttgactatgtgatcccatgtacatgtaaaaacattcaaacaaacacactcagcggatttatttattgtgc

SEQ ID NO: 560712 - DNA, 120 bp, Artificial Sequence
  ENSG00000169554_66 (sequence is synthesized)
aatggggcaattattcaaataaacatgctcaatgcaattatttgaatctcacattgcatgttcatcaatcatagcactaaaaaaagagggggaaaaaacaccaaagaattcacatgggga

SEQ ID NO: 560713 - DNA, 120 bp, Artificial Sequence
  ENSG00000169554_67 (sequence is synthesized)
aaaaatatatatatgaaaaccaccttattatagattttatagggcagctgaggttatggctcccttcttaactgtaactcaactattctgtattcaatgacatttgtttctaatgattaa

SEQ ID NO: 560714 - DNA, 120 bp, Artificial Sequence
  ENSG00000169554_68 (sequence is synthesized)
ttggttcactcacttgatcatataatagcaaactttataaacctgtattgtgtagagatgtgaaatctctatatttcaagagcagaagagttctttctagacaccttacatcaagggaca

SEQ ID NO: 560715 - DNA, 120 bp, Artificial Sequence
  ENSG00000169554_69 (sequence is synthesized)
ctggtccaattattatcgcttatataagcactcctataaattctgaaaaattttatacatgcaacaaaacattcctacatttgaagacattaagaaaaatcacaggtgactcatctgatc

SEQ ID NO: 560716 - DNA, 120 bp, Artificial Sequence
  ENSG00000169554_70 (sequence is synthesized)
attctatatattaataaatattatgacatatatgtgaacacatcacaaatcatattggtgtaccaagaggcaatttatgcctctcttaagtatgtactgacataacctaatatactaaaa

SEQ ID NO: 560717 - DNA, 120 bp, Artificial Sequence
  ENSG00000169554_71 (sequence is synthesized)
tgggaaggggcttttagtcactgaaatatgcatcgtgtaacaaagatgaagaaaatacatggcttgtgcccatcataaaaaaagattcagactgaaggcttagctttggttttttcaatt

SEQ ID NO: 560718 - DNA, 120 bp, Artificial Sequence
  ENSG00000169554_72 (sequence is synthesized)
aaattgttaaactgtgcacagtgatttttttttagaacttgagacatttgtgatgttggctgtttaaatctttgttaccttcgctgtgaattgaaattgtacatatttagtaaatcatgc

SEQ ID NO: 560719 - DNA, 120 bp, Artificial Sequence
  ENSG00000169554_73 (sequence is synthesized)
agacaaaacaaactttttagacaatatttttattggagagttttcttttcctgtatccatgttaaaaaaaaaaaagacctcctttcccaaaataaaaatgtcaatactaaatttaaagaa

SEQ ID NO: 560720 - DNA, 120 bp, Artificial Sequence
  ENSG00000169554_74 (sequence is synthesized)
gtataaaggaatgattgcttcctttagagcaaaatatttaaataaacatggagataattggcaacatgttctttttgggctagtaggctgtgtccaattttttgggtctgatgtttcaga

SEQ ID NO: 560721 - DNA, 120 bp, Artificial Sequence
  ENSG00000169554_75 (sequence is synthesized)
gggcctctgtttcagggttgaagatgatatattaatctcggaattaaacaaatgctattaaataacagaaataaatccttcagtcttcatttgtatctgaaatgtggaattagtcagaga

SEQ ID NO: 560722 - DNA, 120 bp, Artificial Sequence
  ENSG00000169554_76 (sequence is synthesized)
aatggcaccgagataatatgatgctgaatatgccacaagctaaaactttctctattaaacgagtcgcctactacctataatctagcatgacatgttaaaatgctccaaaatactgaaaat

SEQ ID NO: 560723 - DNA, 120 bp, Artificial Sequence
  ENSG00000169554_77 (sequence is synthesized)
agaaaatgaacactactgttccgatttggtcttgagattaatatgacaaagattctaataattttagtcaaagaaaatgatgagtaaaaaatacatgaagattaaagtgatgacaaatga

SEQ ID NO: 560724 - DNA, 120 bp, Artificial Sequence
  ENSG00000169554_78 (sequence is synthesized)
aggtggaatttcatttcttccactaaagcgtttgcggagacttcaaggtataatctatcccagatcctttcccagagagaaacttggcgatcacgttttcacatgatgctcacgctcagg

SEQ ID NO: 560725 - DNA, 120 bp, Artificial Sequence
  ENSG00000169554_79 (sequence is synthesized)
gcgcttcaattatccctccccacaaagataggtggcgcgtgtttcagggtctctcgtctctctcctacagaaaagaaaaagaaaaaaatgtcattagaagaggcgtaacacgtcagtccg

SEQ ID NO: 560726 - DNA, 120 bp, Artificial Sequence
  ENSG00000169554_80 (sequence is synthesized)
agagcagaatgtaatttctagcaatctgacagacctgcggattgaagcggcaggttttcccttccgatttcagggaattgcttcttactgtgacaaatgattagctgttatctctgactg

SEQ ID NO: 560727 - DNA, 120 bp, Artificial Sequence
  ENSG00000169554_81 (sequence is synthesized)
aaacaagcgaacgagcgccagcccagactcggaaaggaaacttctcgctcccctcgctctcagcccgatcacccggcgcggggccgcgtagacgctcccgaggcaggcgctgggacgcag

SEQ ID NO: 560728 - DNA, 120 bp, Artificial Sequence
  ENSG00000169554_82 (sequence is synthesized)
actctaatctttcttgtctggtggtaaagtggacaatttatgtactagcatgtaggccgagagcctgtgagggctgactaattcagaaacagccaccttcaattgagttcacagacctta

SEQ ID NO: 560729 - DNA, 120 bp, Artificial Sequence
  ENSG00000169554_83 (sequence is synthesized)
ctgtctattttaagaaaagctactgagcattgctgggactgagggctgcaaaagcagcccgccggttcttgtgagttattttaacatttgtgttggtcttgcctgtgtcactttgaaatc

SEQ ID NO: 560730 - DNA, 120 bp, Artificial Sequence
  ENSG00000169554_84 (sequence is synthesized)
ttctgtaattatgacactatgaagacatctcaatagtagtattaatggcccagaagatatggcttttcctcattttctgcttaaaagattaggatataaatggccttagcacatgacggt

SEQ ID NO: 560731 - DNA, 74 bp, Artificial Sequence
  ENSG00000169554_85 (sequence is synthesized)
aaaaccacttagtatgtctgaacagacaggcttacttaaaaactcaaggagggtggatcaggtcaggagtttga

SEQ ID NO: 560732 - DNA, 120 bp, Artificial Sequence
  ENSG00000169554_86 (sequence is synthesized)
agtaacggtccgcgggcagcggggcccggcccatcgcgcccagaccccggggtgggagggagtcggccggccccgcgcggggtccggtggggtcgatgatggctcggggacggatgactc

SEQ ID NO: 560733 - DNA, 120 bp, Artificial Sequence
  ENSG00000169554_87 (sequence is synthesized)
cggggacggatgactcctctccagcaggctctgcccccaggccggggactgaaggagtcgcagggcgcagcgagacttttcccggcagtttctacatggtctggaggagcccgttatcca

SEQ ID NO: 560734 - DNA, 120 bp, Artificial Sequence
  ENSG00000169554_88 (sequence is synthesized)
tgagcactcggagcgggagatgccctgctgctgcttgccaccggtgcggcccgtttgtaacttgcaaagtttgttgcttttgcccctgattcgggcagcgggtcctgggatgctcctgct

SEQ ID NO: 560735 - DNA, 120 bp, Artificial Sequence
  ENSG00000169554_89 (sequence is synthesized)
tccctcctgcctcccacggagcccgggaagagggtctgcctccccatcccgccaccttccagcatcagcctctgaaaaatctcacagagacatgcacgttgtagcaaaaatcaaatccgg

SEQ ID NO: 560736 - DNA, 120 bp, Artificial Sequence
  ENSG00000169554_90 (sequence is synthesized)
aaactgcttgtttcagagaaagaaatgaagttgtcttttaaagaaaaactgaattaggaggagagaaaagggaaataggagaagaaaggaaaagttaaatttgatttttctccagagttt

SEQ ID NO: 560737 - DNA, 120 bp, Artificial Sequence
  ENSG00000169554_91 (sequence is synthesized)
gaggcacagcatcttcccaacctccaccgagttttcaggattctcctcctctcctgcctgcctccgaggtcccccttctccaagttttgacagtttcaactgaaaaaatgcagcgcctct

SEQ ID NO: 560738 - DNA, 120 bp, Artificial Sequence
  ENSG00000169554_92 (sequence is synthesized)
tatctttaatgtttatggatcttagaatgcagttgttggctttttaaaaaaaatttatgaaaaacattttaaatttctttcattctttgtatatacagactaatattccaggaagaaaaa

SEQ ID NO: 560739 - DNA, 120 bp, Artificial Sequence
  ENSG00000169554_93 (sequence is synthesized)
ataaaataaaatgtgcttatttaacttgaaggaaagtgcccgccttcttgcatatattgcaagaataagcattcagtcaataatcggtcatcttcaacacttcttacaaataaactaggt

SEQ ID NO: 560740 - DNA, 120 bp, Artificial Sequence
  ENSG00000169554_94 (sequence is synthesized)
ccattaatttgggatataagtgtctgaaatttcctcaaaacatttacgccaaggaataccaacaagacaatatcaagcagctctccctaaggatagagaggcatgttaaaactgtataac

SEQ ID NO: 560741 - DNA, 120 bp, Artificial Sequence
  ENSG00000169554_95 (sequence is synthesized)
gaaccatttaaaaggaagaaaaacatcacccaagttccgtgtctgaatgaaggctgtcttctcaaatgctcctcattactccagagcagttatatttggattataattaaaacgaggctt

SEQ ID NO: 560742 - DNA, 120 bp, Artificial Sequence
  ENSG00000169554_96 (sequence is synthesized)
cttttttttcttttattcttcttttttcccagaatgcctcaagtgaagtattcctcccaaagttattgcacctctttactaacaagtgctgggattttaataagcctgtcccccctcctt

SEQ ID NO: 560743 - DNA, 120 bp, Artificial Sequence
  ENSG00000169554_97 (sequence is synthesized)
accctgtacagaggaaaggatggcaaagagtggctgtggtacaaaggttacatattcagtgatattttctgcttttattggtaaaaatggggaggtgggtggaggatttcctttaattat

SEQ ID NO: 560744 - DNA, 120 bp, Artificial Sequence
  ENSG00000169554_98 (sequence is synthesized)
gaaataagtgtgatgttagtagttatttctgtaacctggtgaaaatgctgcatatttcaggcctaatttttagcatatgttaccacgtgtgtaataaaacggtgatctgcgctctccgaa

SEQ ID NO: 560745 - DNA, 120 bp, Artificial Sequence
  ENSG00000169554_99 (sequence is synthesized)
tattgtcccctgtggaggattcaacaggtcagctaattgtctgtaaggaatgggatgttattcagcagaatttcagggagaggaagagatgcagagtctcataagaaaaaagacagagta

SEQ ID NO: 560746 - DNA, 120 bp, Artificial Sequence
  ENSG00000169554_100 (sequence is synthesized)
aaaaaacagatgtctctttccagagtgtcaggaggggcaggcccacctgggaagtatgatgtatgaggatgcattgtgagaaagaggtggacctaagatagcaaaacagtgagggagcta

SEQ ID NO: 560747 - DNA, 120 bp, Artificial Sequence
  ENSG00000169554_101 (sequence is synthesized)
tatggtggagaaatgggagagacacgattccagcaggggaaattttagggagaaacagagaagcctaaatattgttcagaagctttctgtgtggtacatgttacaaaacccctgtttcac

SEQ ID NO: 560748 - DNA, 120 bp, Artificial Sequence
  ENSG00000169554_102 (sequence is synthesized)
gggaggaggggttacacatcactgaagtagttagataaatagaaacaatatataaggaaagacaatattagtagataaggccccaatccccaaccccatcagtttctgcctgcagcctgt

SEQ ID NO: 560749 - DNA, 120 bp, Artificial Sequence
  ENSG00000169554_103 (sequence is synthesized)
ctgaaccctcactattgcctccaagagtgtcattgtgaaaaaatatagagctttcagagaaatgctgggctcagaagtagagaaaagaagacattttgaaaaccataataaaaggttttt

SEQ ID NO: 560750 - DNA, 120 bp, Artificial Sequence
  ENSG00000169554_104 (sequence is synthesized)
aaaaagtaaatatagtacagaggattagcttgtgttcaaaagggcagaaggattagtgtgccatttggtattcctctccttaaaaattttctttcttagaaagaaggaaaggccaggacc

SEQ ID NO: 560751 - DNA, 120 bp, Artificial Sequence
  ENSG00000169554_105 (sequence is synthesized)
ggtggctcacacctgtaaccccagcacactgggaggctgaggcaggtagactgcctgaacccaggagttcaaggccagcctgggtaacacggcaaaaccctgcctctacaaaaaatgaaa

SEQ ID NO: 560752 - DNA, 120 bp, Artificial Sequence
  ENSG00000169554_106 (sequence is synthesized)
aaattagctgggtgtggtggcgcacgtctgtagtcccagccactcaggatcctttggtgggaggatcacctgagcctgggaaggtcaaggctgtagtggagttgtagttatgttcaggcc

SEQ ID NO: 560753 - DNA, 120 bp, Artificial Sequence
  ENSG00000169554_107 (sequence is synthesized)
ttcaggccaccaccatgctccaacctgggcaacagagtgagaccccgtgtcaagaaagaaagagagaaagagagagggagggagagaggaaggaaaggaagaaggaaggaaggaaggaag

SEQ ID NO: 560754 - DNA, 120 bp, Artificial Sequence
  ENSG00000169554_108 (sequence is synthesized)
cttcaactaatctgttccacctagcagatcgcccacaaccaaataattaaaatatttctttccattgagcccttgcagaatagagataccaaagctggtgacagattatgaagtgatagt

SEQ ID NO: 560755 - DNA, 120 bp, Artificial Sequence
  ENSG00000169554_109 (sequence is synthesized)
atcgagctacaaggttctagactaagtaagtgttttgtatacatattagctccatattacctccatgacctctttccccatgaagccttccctgagcctcagtatccactctttcctgta

SEQ ID NO: 560756 - DNA, 120 bp, Artificial Sequence
  ENSG00000169554_110 (sequence is synthesized)
ttcctgtaccatgaatccatttttcttttactttttcttttctttctttcttttctctctctctcgcttgctctttctttctttctctctctgtctttctttttttgttttttgtttttt

SEQ ID NO: 560757 - DNA, 84 bp, Artificial Sequence
  ENSG00000169554_111 (sequence is synthesized)
tgacctcacaggctcaaaccatcctcctgcattagcctcccaagtagcttggaccacaggcatgcaccaccatgcccagataat

SEQ ID NO: 560758 - DNA, 120 bp, Artificial Sequence
  ENSG00000169554_112 (sequence is synthesized)
ttacaagtgtgagccactgcacccagcccatgttttcaataaagatggtgctatttgaaactatggcatgtcacgtgtatattattttatttcaccatgtgtttaaatgagataaccagg

SEQ ID NO: 560759 - DNA, 120 bp, Artificial Sequence
  ENSG00000169554_113 (sequence is synthesized)
atgtgtttaaatgagataaccaggtgccaagaaagcttcaatatttgcttaaatagccaatgtgacggagaataggtaacctcttttctttttttttcttatgatttgctttggctatta

SEQ ID NO: 560760 - DNA, 120 bp, Artificial Sequence
  ENSG00000169554_114 (sequence is synthesized)
gttttgaaacatacatgttatattcccaattagatctcgttacatccttcacaggctgtccaaaaatttccatacttctaacaagaacttcggttgactgagtttatattatatagtttt

SEQ ID NO: 560761 - DNA, 120 bp, Artificial Sequence
  ENSG00000169554_115 (sequence is synthesized)
tctgtcctttgccctatttctttcaaggcctttgagtcagaagcattcagcaccacggcgtacgatagccaccatttgctttgcccttttaactttgggggttacttctgaccatagtcc

SEQ ID NO: 560762 - DNA, 120 bp, Artificial Sequence
  ENSG00000169554_116 (sequence is synthesized)
aactgctcagaagggctttttcacaaattgtttaccgtggcagttgctaccctattggggtttgcattcagaacccataagcagagagcaatggtgtcagtataacaaataatgtgtaca

SEQ ID NO: 560763 - DNA, 120 bp, Artificial Sequence
  ENSG00000169554_117 (sequence is synthesized)
attttttaaaatgctgaatttaccaaatccccatattatgttttcacactgctctttcagaaactgtgctaatacaatactcctataaactgatcttggtcctggcaggccctgttggaa

SEQ ID NO: 560764 - DNA, 120 bp, Artificial Sequence
  ENSG00000169554_118 (sequence is synthesized)
ctaatggggcctgacagttcttcagttaaaaattatacatgagggccactttcccttaaattatctattgtatgccagctgttcacaactgcactgcttcactttctttgcagtgctaga

SEQ ID NO: 560765 - DNA, 120 bp, Artificial Sequence
  ENSG00000169554_119 (sequence is synthesized)
aatgtctaattttctcataatatccatagcaactattctcatggagggcattgaagttagtaagacttcaaacacaccttcacagaaatcatgctagagttgcagtttccattttcttta

SEQ ID NO: 560766 - DNA, 120 bp, Artificial Sequence
  ENSG00000169554_120 (sequence is synthesized)
tgcacaactttattctatttttatgctcctaaatgacgcagctctaagtacccgtgagtggcacttccgtgctgtgagtgctatcaaaggcaacctcagatggataaaactcctggtttt

SEQ ID NO: 560767 - DNA, 120 bp, Artificial Sequence
  ENSG00000169554_121 (sequence is synthesized)
cttttggctgttaaggagcactctgattataactagttgctgtagaaacctggtcatccagatgcttatcaagaatgcattattattttttaaaccttggtggagaagccacagactgca

SEQ ID NO: 560768 - DNA, 120 bp, Artificial Sequence
  ENSG00000169554_122 (sequence is synthesized)
gcagttggacaaggtcacatatcgatggaagtgacatgtctttcctctttccattgtgtgatcgtccagggcctgggggcattaatatgcaacggttctgtttttctttcagaaggactt

SEQ ID NO: 560769 - DNA, 120 bp, Artificial Sequence
  ENSG00000169554_123 (sequence is synthesized)
gtaaactctttaaacagaggcacacagttgcaattgttgcggtactgagtgggtgtatagaagctagggctgcagccttgtccagttgcagatagaataaaactgacaatgatgcaatgg

SEQ ID NO: 560770 - DNA, 120 bp, Artificial Sequence
  ENSG00000169554_124 (sequence is synthesized)
gcctggcatgtagacaactctgtgggatggatgaatggtgcggctctcgctgtccctccggtggtggtaggccctgtaatagctagcgtaggaagggtggtgaaaattgatatgcactat

SEQ ID NO: 560771 - DNA, 120 bp, Artificial Sequence
  ENSG00000169554_125 (sequence is synthesized)
tactacacgtataaaacttaacactggggccattgcacaggtggggggttcctgtttattgatttttatgagtttgttagaacatgcgcttaatgcttttatactccgggagctctggga

SEQ ID NO: 560772 - DNA, 120 bp, Artificial Sequence
  ENSG00000169554_126 (sequence is synthesized)
gggctcaccttaggtaataaacctttccgtactttgcaatcgctcacaatttacatggggactcacattatccagtacaaagcccagcattccccttctacttggttttaggagtgtgat

SEQ ID NO: 560773 - DNA, 120 bp, Artificial Sequence
  ENSG00000169554_127 (sequence is synthesized)
gaaggaaagggtccgcctagccctgagtcaagcggtcttactgtaccgccgtgtgcattccctcatacggtcaggagttatgactcattttgaagatatcgagcctgcgtgctgccgaag

SEQ ID NO: 560774 - DNA, 120 bp, Artificial Sequence
  ENSG00000169554_128 (sequence is synthesized)
agggctttggatcctagaggagaaacaatcagaagagcagaaatggttatccctgtttaaaataagccctcactctttaccacttccttaaaggagtggaggtgctggtagtgatggtta

SEQ ID NO: 560775 - DNA, 120 bp, Artificial Sequence
  ENSG00000169554_129 (sequence is synthesized)
gaggcaatgagggacggagaagttgctcccgtttcagagatgcttaaatgaaaaggaaagaaaatgcagtcaaccccttctccaggaggtgcctcctagctctcctccctgagaggtgaa

SEQ ID NO: 560776 - DNA, 120 bp, Artificial Sequence
  ENSG00000169554_130 (sequence is synthesized)
gttgggatggggcaacgagagtcatacacacttagacaaggaagtttccttcggatcactgtcagtccagacttggttatctttgcaaagtgtggaaatctttggcaagtagctttcttc

SEQ ID NO: 560777 - DNA, 120 bp, Artificial Sequence
  ENSG00000169554_131 (sequence is synthesized)
gtaaagttgatgagcttctagggagcctgttttgctgactttcaaagcactggggcaggttgtgtggcaggtaccagttctgagggcgctccaaagatatccatctccatccttttttct

SEQ ID NO: 560778 - DNA, 120 bp, Artificial Sequence
  ENSG00000169554_132 (sequence is synthesized)
ctgtggagatcttctgcaagttttgtcacgctgcacacacacaaggctgggggctatgtatctaggctgatctatttgttttattttggtctggaaaaactaagccaattggggtagaaa

SEQ ID NO: 560779 - DNA, 120 bp, Artificial Sequence
  ENSG00000169554_133 (sequence is synthesized)
ccttcgtagcagagccagtaggctgctggtgtccatagagtgacagtccaccaggactaagggtgggctgaggattttaaactttacattgtttctctgttaccagatacaaataaattc

SEQ ID NO: 560780 - DNA, 120 bp, Artificial Sequence
  ENSG00000169554_134 (sequence is synthesized)
acgtcttccaccatttgttttcaaatagggtaaaaccaagattaaagttccctgctcaactgctatgtcataggtttcagtgtttcccttccttcttaatttgcttaaagaaaattccaa

SEQ ID NO: 560781 - DNA, 120 bp, Artificial Sequence
  ENSG00000169554_135 (sequence is synthesized)
gaggttattaaagaccttgatgccatattaagaatatttcctgggaaaaatgtatgtctaccctgaaggtaggaaaggagggcgttgctagcctctagcagtgccgcgtttattctaaga

SEQ ID NO: 560782 - DNA, 120 bp, Artificial Sequence
  ENSG00000169554_136 (sequence is synthesized)
tgtgggagattcttttccttgcaacagtttttgtcatctgcattcttccaaggcttttaaggtgcattttcttctgtgtgaaaggaaattctttgtccttttcctctcagcaccgtggct

SEQ ID NO: 560783 - DNA, 120 bp, Artificial Sequence
  ENSG00000169554_137 (sequence is synthesized)
tcccaaggtagacactattttgtgcctgtcacagagagagggagtgcaggtttgcaatgctcacagacaattgattgtctgccctaatgtgtttcatttacatgtttataacgtcaatgg

SEQ ID NO: 560784 - DNA, 120 bp, Artificial Sequence
  ENSG00000169554_138 (sequence is synthesized)
tgctggggtgtccactgtaccattcattcccgcattcccacaagggggcaattgtctgaatggccaagtcagacacctttttgattgctctttggttgtcttttcagagcaaagagataa

SEQ ID NO: 560785 - DNA, 120 bp, Artificial Sequence
  ENSG00000169554_139 (sequence is synthesized)
aggaggaaaatctgtgatgcagaaacactagttgaaaatatacagaattaaatgtcaccacaaaagcagatgttaacataagcccaaatatgctttttagccaagatgtgaaggttgaaa

SEQ ID NO: 560786 - DNA, 120 bp, Artificial Sequence
  ENSG00000169554_140 (sequence is synthesized)
aaaataattcagagcagagggaaggatgatttaaaccaataaatatagccctattccccctctttacttcttttctgtctttagcaatcagaagatgaaatgtaattttccttttcattt

SEQ ID NO: 560787 - DNA, 120 bp, Artificial Sequence
  ENSG00000169554_141 (sequence is synthesized)
ttaagccttgaaacatccaggcacctcctcattatttgtatgtttgctgtgatttgtgaattttgtatatatttacatagctctgtttatgccaacagcatcagcttaccacttggaaaa

SEQ ID NO: 560788 - DNA, 120 bp, Artificial Sequence
  ENSG00000169554_142 (sequence is synthesized)
tctattgaatgactatttgggctgtggggagggtaaacttttaaaaagtaagatccaagtatttcttcatcaagcagtttttaaaaggaaaacgataataatcagtaggctccatggaag

SEQ ID NO: 560789 - DNA, 120 bp, Artificial Sequence
  ENSG00000169554_143 (sequence is synthesized)
cctttgccttaatagctatgtgccaaatacttttatcttgtgtgacagtcatgtcagagtgaaatctctcaggaaaagtgtaactagtagttacaaagtaaataaaggatttcattttaa

SEQ ID NO: 560790 - DNA, 120 bp, Artificial Sequence
  ENSG00000169554_144 (sequence is synthesized)
atcatttagtagagcttaaaagtattgccgtagtggttggactttctctttcctttcttaagggaaaaaaaaaattctactggaactatttaagggaaccagtgtgggggagcatgtgtg

SEQ ID NO: 560791 - DNA, 120 bp, Artificial Sequence
  ENSG00000169554_145 (sequence is synthesized)
gcgagggtggggggaggaagagacagtgcctcgataaactccaaaaggggaggggagggggcgctgggcgagtgggcttcctataattactattatcaatttgcccgagtgtgcttcatc

SEQ ID NO: 560792 - DNA, 120 bp, Artificial Sequence
  ENSG00000169554_146 (sequence is synthesized)
tggtgcaaaatcgacttgacataactgttcatcagtttcagggttttccctggaggtatttgcatcaaatcagcccagtcaagcttcaagttgaaattggcaggccagaaactcacaggg

SEQ ID NO: 560793 - DNA, 120 bp, Artificial Sequence
  ENSG00000169554_147 (sequence is synthesized)
aaatctcagctcctcctgtactgatctcagcagcaccatatcctgaaggagcttgaaaggttgagattcagaacaccttcagctaattcttaccactagggctcaccagccttgctccgg

SEQ ID NO: 560794 - DNA, 120 bp, Artificial Sequence
  ENSG00000169554_148 (sequence is synthesized)
gggtttgctctcacttaatctgattggatgcctaaagaggagtgggcacacttaattaaacggaaggaaagttctgaggcacctccccagcacttattaaagcttgaaagccaaatctca

SEQ ID NO: 560795 - DNA, 120 bp, Artificial Sequence
  ENSG00000169554_149 (sequence is synthesized)
tttgttgtttttttttttttttctaattgttaacttgtaggaaagtgaacaatccctctctttaccaggtttgttttcttgggggttctcttctgagtagattaaatgttcacagagact

SEQ ID NO: 560796 - DNA, 120 bp, Artificial Sequence
  ENSG00000169554_150 (sequence is synthesized)
gggggttctcttctgagtagattaaatgttcacagagactagagctcaggggactgtccattcaaaagctaatgcattttggctaacaaaaagccagtacaagtagcaaaaattatattt

SEQ ID NO: 560797 - DNA, 120 bp, Artificial Sequence
  ENSG00000169554_151 (sequence is synthesized)
gaagagatactcctttgaatgacatgggtttgcaagttctctgtcaaataatgccctactatcctggtaatatgagaacacgtattaagttgtttaaaaggtcaaaaaacatggcaaaac

SEQ ID NO: 560798 - DNA, 120 bp, Artificial Sequence
  ENSG00000169554_152 (sequence is synthesized)
cttaagatgtctaagatactcaacttttactctcaacaaggtcactttaagaaaaattctatgattgcaaaacttgtataattgcttttacaaagaaaacaaatatgaaaagtgtttcct

SEQ ID NO: 560799 - DNA, 120 bp, Artificial Sequence
  ENSG00000169554_153 (sequence is synthesized)
ccccatgccgtttaatatcatgctctcccttccctgctaagtttctctatggcctttctcgtttctcctcctgcctccctacacactctcccttactttgtagtgaggtctccccgaggt

SEQ ID NO: 560800 - DNA, 120 bp, Artificial Sequence
  ENSG00000169554_154 (sequence is synthesized)
gtagagagattcagagatcggccaaccgagtgttctattttaatttacttagagaccctttattaaaatgccaaactactttttaatattgggatccagtccagaaattcatcatgcaca

SEQ ID NO: 560801 - DNA, 120 bp, Artificial Sequence
  ENSG00000169554_155 (sequence is synthesized)
caccctaatacacatgccctaagatgcagctcccatgcagcatttttttttctggctctggtacctaaaaagaaaaaaataacaataagagaaagggcagagaactttgttccagaagct

SEQ ID NO: 560802 - DNA, 120 bp, Artificial Sequence
  ENSG00000169554_156 (sequence is synthesized)
gtactgagatacctacacaatttgatgtgcatctcaaatctggtcattagagatatctgtataagaagagactatctggattgaggacccgggatctttccctttaactttcgccccttg

SEQ ID NO: 560803 - DNA, 120 bp, Artificial Sequence
  ENSG00000169554_157 (sequence is synthesized)
atgaggtatttgcaccacatttacaatgtgcaaattatgtaacatgatcaagatctatactttcatgataggaaatggaagcaaatgtaaaaactcacaacatatatatgtatataaaaa

SEQ ID NO: 560804 - DNA, 120 bp, Artificial Sequence
  ENSG00000169554_158 (sequence is synthesized)
tattttgtgtggaaattatgtagcatttcaaaccaaataactgtcagtttaatgtagcttcagtgtctgtctgacacctcctattggaattcaatcgtttaatgattcccttttgttaag

SEQ ID NO: 560805 - DNA, 120 bp, Artificial Sequence
  ENSG00000169554_159 (sequence is synthesized)
tgtgaatgtgatttcacacttttacctggtcaggtagctttcttattatttatcagctaagtacttgataatgattcctgctgtttggtgggactctcaagggaagtaaaaatggtccca

SEQ ID NO: 560806 - DNA, 120 bp, Artificial Sequence
  ENSG00000169554_160 (sequence is synthesized)
ggccaactataataaaactaaggtaaattatattcaaactaaaacttccgacaacactgtgcaaacgggaaatgtcttggtctaaaattcacttatgacggagaatcgctaaggtatgaa

SEQ ID NO: 560807 - DNA, 120 bp, Artificial Sequence
  ENSG00000169554_161 (sequence is synthesized)
atgtttaacaaaatacaagaaatcttattcctgtgaactttctctgctcatctttacatggtaaagtggcctggaaaatttgtttaaatgacctctctaattcagacctcatgtcacctt

SEQ ID NO: 560808 - DNA, 120 bp, Artificial Sequence
  ENSG00000169554_162 (sequence is synthesized)
catctctattcccaggacccactgagagttatcattgtttaccccaccttgttttttctttgacaacataagcaacaaaagcatttttataaataggtgaagtggctgggaaggagtcta

SEQ ID NO: 560809 - DNA, 120 bp, Artificial Sequence
  ENSG00000169554_163 (sequence is synthesized)
cctatatgctgttgtgatgtcgcagactataaaccatcaaacataggcagaataattgtttggtatactggaaggaggataataaaagcacttccactacgaaagaaaattaaatgtgag

SEQ ID NO: 560810 - DNA, 120 bp, Artificial Sequence
  ENSG00000169554_164 (sequence is synthesized)
atgaaagaaaaagaaaaaagactgatggcaatttgagtacagtgtatttgtttttcgttttcctaacatactgtgccaagttttctactctttccgtttccaattttgctttcggtgaag

SEQ ID NO: 560811 - DNA, 120 bp, Artificial Sequence
  ENSG00000169554_165 (sequence is synthesized)
tacgtttaattaggggcagaggatgatcattaaaggaagtctgactgctgcagaagtcattaacaatcttaaatgaaatttttatttttatgatagccatttacatgtataataagagcc

SEQ ID NO: 560812 - DNA, 120 bp, Artificial Sequence
  ENSG00000169554_166 (sequence is synthesized)
aatgattcttgggagcagtgtgacagaaacagagtgtggcgagaactcatgtaagacatactatttaaatgagctggtgttagctattcatatttgttaatgaactagatatgcagggct

SEQ ID NO: 560813 - DNA, 120 bp, Artificial Sequence
  ENSG00000169554_167 (sequence is synthesized)
ataagaatgaatgttctgatgctttaaattttaatatctagaaatcaagggtaaggaccaattactagaatttccacccttagaagaataattaataacaatgtaacaaatgtacagccc

SEQ ID NO: 560814 - DNA, 120 bp, Artificial Sequence
  ENSG00000169554_168 (sequence is synthesized)
caaacctcttttaaaaaagtttaatttaaaaaatttaatatcaatagttgaaaaacagccaaacagcaatgtcaagctgtagtagtttgtgattgtggcagctttttgtgttggtcatgg

SEQ ID NO: 560815 - DNA, 120 bp, Artificial Sequence
  ENSG00000169554_169 (sequence is synthesized)
atcataattctaaacgttttaatatacagtaatccatatgaatgcattgcagaccctgttatcacctgtagttaatggtgcctgtgatacaagtgaacaggctgttctttgctcttacct

SEQ ID NO: 560816 - DNA, 120 bp, Artificial Sequence
  ENSG00000169554_170 (sequence is synthesized)
ttatggtaaataaaccagcattctggagtcacaataattaaataaaatgtaaatccctaatctcatttggctatttggaccaagaaacttacccggctattacctgtctagttctaatga

SEQ ID NO: 560817 - DNA, 120 bp, Artificial Sequence
  ENSG00000169554_171 (sequence is synthesized)
ttactaatgatttattgttctttttttttattgttctaaaagtgctctgatgtggtgccttgatgtctaatgaaaagaaattggtcttaaaaagctactcattgtttatcctgactctga

SEQ ID NO: 560818 - DNA, 120 bp, Artificial Sequence
  ENSG00000169554_172 (sequence is synthesized)
gataacacatttttcttctgataaaatatttttcttatttattgttcaaaacacacaatatagacaataactctaattctggtgcagttttatttagtagtgttttatccccggtgcctg

SEQ ID NO: 560819 - DNA, 120 bp, Artificial Sequence
  ENSG00000169554_173 (sequence is synthesized)
gctgtctacagtcatacctcagcacatagctttactctgagataagccctctctcctttgctctttctcccatgctttctggagtttgtctgcaggatgcaggttttgaactgaagagcg

SEQ ID NO: 560820 - DNA, 120 bp, Artificial Sequence
  ENSG00000169554_174 (sequence is synthesized)
cagtggagttcttactgtgcctttccggttccagcacaatcaaagttttgtgtttggaattgtccttgacattctttcgtcccacaatggggtggacacagtgtgctggaaaccatgaca

SEQ ID NO: 560821 - DNA, 120 bp, Artificial Sequence
  ENSG00000169554_175 (sequence is synthesized)
tcattatcattgacacagacttaaataaatcacctgcatcttggcctctttctgcttattcaaggattcttcatcttaaggaagaaagtgctctttatttttacaaatcttcatcccagg

SEQ ID NO: 560822 - DNA, 120 bp, Artificial Sequence
  ENSG00000169554_176 (sequence is synthesized)
ggtgactggaagacgcaaacttttacaagtgttttaaaaataaatatactatgtggttttagacacagtatgctgagtcagaggtgtcttagagaatgtttaaggttagacataaggcag

SEQ ID NO: 560823 - DNA, 120 bp, Artificial Sequence
  ENSG00000169554_177 (sequence is synthesized)
aaagacagccagattgcctttaattcggaggcaatattcctaaactgtgtatcattatgtccttctgaatatggattcacttgaaacttaattaaataggcatatacataacatttcaaa

SEQ ID NO: 560824 - DNA, 120 bp, Artificial Sequence
  ENSG00000169554_178 (sequence is synthesized)
tacatacctgaaaaggcttagtagtgtttcattttcacacattgagcttgatattcaaaaaagaaaaagattgatgctcagtgaatcaaagcaaagtactttctaggtaaaagtgacacc

SEQ ID NO: 560825 - DNA, 120 bp, Artificial Sequence
  ENSG00000169554_179 (sequence is synthesized)
atctcatccaatgtctctgaaagatctcagttgcacagtctttggataaaaagggttataactaaataatactacaaaatgcaatttacacaatgtgctgactacacatttgtataccca

SEQ ID NO: 560826 - DNA, 120 bp, Artificial Sequence
  ENSG00000169554_180 (sequence is synthesized)
gcatttattaatttgggaagcaaccaactactgtaacttctctttactttttcataagaaaatgacaatgaggaaggaagtgcagcagaaatcttgaacattaccactattatgcaaaaa

SEQ ID NO: 560827 - DNA, 120 bp, Artificial Sequence
  ENSG00000169554_181 (sequence is synthesized)
caaaatcatatagaaattcctggaaagaaataatggcaataataatcgtataagtagaagctggaagggaaaaaaagatggtcatccaggaacctagaatggcactttatataattttaa

SEQ ID NO: 560828 - DNA, 120 bp, Artificial Sequence
  ENSG00000169554_182 (sequence is synthesized)
tgaagtcaacagtgtatatatagactaaggcgacaaggagataaaacgtgtaaagcagtgtgtgtgttttaaaggctggtcaagaacgtgagttagaagacaatgctatgtacatttaat

SEQ ID NO: 560829 - DNA, 120 bp, Artificial Sequence
  ENSG00000169554_183 (sequence is synthesized)
aaaaagcaaaggagaaggaggcagttgaagaaaaataaatgtacaaagagagaaacaagtatctgaaatacaaccttccagattctcaggctagcaagatgcctggcagaggcagtgcca

SEQ ID NO: 560830 - DNA, 120 bp, Artificial Sequence
  ENSG00000169554_184 (sequence is synthesized)
gggccaagttaacccatagcgggcagtcagtctcctttcccccacatggaaaggatgaaatctcttcccagaaaataagatgtgcaggaggaaagagggagtggggtgagggggaaggag

SEQ ID NO: 560831 - DNA, 120 bp, Artificial Sequence
  ENSG00000169554_185 (sequence is synthesized)
gcaaaaagcgagttgcccgcagacaagaatgtgtgtcggtttcaagaaagttcagtcagatgatcctcagtcgcctgactcactttgtaacactttcactgacgctggagaggaggggga

SEQ ID NO: 560832 - DNA, 120 bp, Artificial Sequence
  ENSG00000169554_186 (sequence is synthesized)
agaatgagatgagaacctatggtaggtggaggtgaaaaatgaaatgcgtcagggaagatcatgactgggaccgccgcacactgcagtgatgaagacggagaagctattcttcagggaacc

SEQ ID NO: 560833 - DNA, 120 bp, Artificial Sequence
  ENSG00000169562_0 (sequence is synthesized)
gggcggtgatgaattgggacgcaggcgcggagcccagggaccactccccctgcacagacatgagaccataggggacctgtctgggtggcctcagggataggcgctccccaaggtgtgaat

SEQ ID NO: 560834 - DNA, 120 bp, Artificial Sequence
  ENSG00000169562_1 (sequence is synthesized)
gaggcaggatgaactggacaggtttgtacaccttgctcagtggcgtgaaccggcattctactgccattggccgagtatggctctcggtcatcttcatcttcagaatcatggtgctggtgg

SEQ ID NO: 560835 - DNA, 120 bp, Artificial Sequence
  ENSG00000169562_2 (sequence is synthesized)
tggctgcagagagtgtgtggggtgatgagaaatcttccttcatctgcaacacactccagcctggctgcaacagcgtttgctatgaccaattcttccccatctcccatgtgcggctgtggt

SEQ ID NO: 560836 - DNA, 120 bp, Artificial Sequence
  ENSG00000169562_3 (sequence is synthesized)
ccctgcagctcatcctagtttccaccccagctctcctcgtggccatgcacgtggctcaccagcaacacatagagaagaaaatgctacggcttgagggccatggggaccccctacacctgg

SEQ ID NO: 560837 - DNA, 120 bp, Artificial Sequence
  ENSG00000169562_4 (sequence is synthesized)
aggaggtgaagaggcacaaggtccacatctcagggacactgtggtggacctatgtcatcagcgtggtgttccggctgttgtttgaggccgtcttcatgtatgtcttttatctgctctacc

SEQ ID NO: 560838 - DNA, 120 bp, Artificial Sequence
  ENSG00000169562_5 (sequence is synthesized)
ctggctatgccatggtgcggctggtcaagtgcgacgtctacccctgccccaacacagtggactgcttcgtgtcccgccccaccgagaaaaccgtcttcaccgtcttcatgctagctgcct

SEQ ID NO: 560839 - DNA, 120 bp, Artificial Sequence
  ENSG00000169562_6 (sequence is synthesized)
ctggcatctgcatcatcctcaatgtggccgaggtggtgtacctcatcatccgggcctgtgcccgccgagcccagcgccgctccaatccaccttcccgcaagggctcgggcttcggccacc

SEQ ID NO: 560840 - DNA, 120 bp, Artificial Sequence
  ENSG00000169562_7 (sequence is synthesized)
gcctctcacctgaatacaagcagaatgagatcaacaagctgctgagtgagcaggatggctccctgaaagacatactgcgccgcagccctggcaccggggctgggctggctgaaaagagcg

SEQ ID NO: 560841 - DNA, 120 bp, Artificial Sequence
  ENSG00000169562_8 (sequence is synthesized)
tgatgccacataccaggcaacctcccatcccacccccgaccctgccctgggcgagcccctccttctcccctgccggtgcacaggcctctgcctgctggggattactcgatcaaaaccttc

SEQ ID NO: 560842 - DNA, 120 bp, Artificial Sequence
  ENSG00000169562_9 (sequence is synthesized)
cttccctggctacttcccttcctcccggggccttccttttgaggagctggaggggtggggagctagaggccacctatgccagtgctcaaggttactgggagtgtgggctgcccttgttgc

SEQ ID NO: 560843 - DNA, 120 bp, Artificial Sequence
  ENSG00000169562_10 (sequence is synthesized)
ctgcacccttccctcttccctctccctctctctgggaccactgggtacaagagatgggatgctccgacagcgtctccaattatgaaactaatcttaaccctgtgctgtcagataccctgt

SEQ ID NO: 560844 - DNA, 120 bp, Artificial Sequence
  ENSG00000169562_11 (sequence is synthesized)
ttctggagtcacatcagtgaggagggatgtgggtaagaggagcagagggcaggggtgctgtggacatgtgggtggagaagggagggtggccagcactagtaaaggaggaatagtgcttgc

SEQ ID NO: 560845 - DNA, 120 bp, Artificial Sequence
  ENSG00000169562_12 (sequence is synthesized)
tggccacaaggaaaaggaggaggtgtctggggtgagggagttagggagagagaagcaggcagataagttggagcaggggttggtcaaggccacctctgcctctagtccccaaggcctctc

SEQ ID NO: 560846 - DNA, 120 bp, Artificial Sequence
  ENSG00000169562_13 (sequence is synthesized)
tctgcctgaaatgttacacattaaacaggattttacagtaaatgaagaggtggcttgtgtgtttgtcaagttctttctcctgcaacctctgacctcccccaggatgagctggccttggtt

SEQ ID NO: 560847 - DNA, 120 bp, Artificial Sequence
  ENSG00000169562_14 (sequence is synthesized)
ttttactgattaagaaaggaacagggcaaaagaagtagttacttgagtagctgaagctgcaaatgaggaaatcactgtacttctgggccgcagagccagccccggagccattcctccctg

SEQ ID NO: 560848 - DNA, 120 bp, Artificial Sequence
  ENSG00000169562_15 (sequence is synthesized)
ttgcttttgttgttgtggttcttgtctttttcattgtctaataacagctttattgggatttagtttacatacctccttcctctgattttgaaaagattaaaaatgacaactccctctgaa

SEQ ID NO: 560849 - DNA, 120 bp, Artificial Sequence
  ENSG00000169562_16 (sequence is synthesized)
agacattctctgggaaagggcagcagcagccaggtgtggcagtgacagggagacactatctgcagaagcacagggagcctgctgtagaaagacttctgtctcagatacattgtttcatcc

SEQ ID NO: 560850 - DNA, 120 bp, Artificial Sequence
  ENSG00000169562_17 (sequence is synthesized)
agggatcagttctccttccaaaggtaacagcaaaaattgagatcacagcacccagacaagggtccttagaggccccacagggagctactggctatgtcccagaagactcaagaagaaaaa

SEQ ID NO: 560851 - DNA, 120 bp, Artificial Sequence
  ENSG00000169562_18 (sequence is synthesized)
aggcggggagttacaagaacctagaaactcaggggtggccaggatgtctgtggcacacccctgaagggcagagaagagaacagctaaggtttgctttgcagtttgaggaagcagcccaag

SEQ ID NO: 560852 - DNA, 120 bp, Artificial Sequence
  ENSG00000169564_0 (sequence is synthesized)
gcctcccgcccgctcccgctcgctcccgcggccctcgctcgcctcgcgccggcagttttgggcctacacctcccctccccccgccagccgccaaagacttgaccacgtaacgagcccaac

SEQ ID NO: 560853 - DNA, 120 bp, Artificial Sequence
  ENSG00000169564_1 (sequence is synthesized)
tcccccgaacgccgcccgccgctcgccatggatgccggtgtgactgaaagtggactaaatgtgactctcaccattcggcttcttatgcacggaaaggaagtaggaagcatcattgggaag

SEQ ID NO: 560854 - DNA, 120 bp, Artificial Sequence
  ENSG00000169564_2 (sequence is synthesized)
aaaggggagtcggttaagaggatccgcgaggagagtggcgcgcggatcaacatctcggaggggaattgtccggagagaatcatcactctgaccggccccaccaatgccatctttaaggct

SEQ ID NO: 560855 - DNA, 120 bp, Artificial Sequence
  ENSG00000169564_3 (sequence is synthesized)
ttcgctatgatcatcgacaagctggaggaagatatcaacagctccatgaccaacagtaccgcggccagcaggcccccggtcaccctgaggctggtggtgccggccacccagtgcggctcc

SEQ ID NO: 560856 - DNA, 120 bp, Artificial Sequence
  ENSG00000169564_4 (sequence is synthesized)
ctgattgggaaaggcgggtgtaagatcaaagagatccgcgagagtacgggggcgcaggtccaggtggcgggggatatgctgcccaactccaccgagcgggccatcaccatcgctggcgtg

SEQ ID NO: 560857 - DNA, 120 bp, Artificial Sequence
  ENSG00000169564_5 (sequence is synthesized)
ccgcagtctgtcaccgagtgtgtcaagcagatttgcctggtcatgctggagacgctctcccagtctccgcaagggagagtcatgaccattccgtaccagcccatgccggccagctcccca

SEQ ID NO: 560858 - DNA, 120 bp, Artificial Sequence
  ENSG00000169564_6 (sequence is synthesized)
cccccatgccacccatgacctggagggaccacctctagatgcctactcgattcaaggacaacacaccatttctccgctcgatctggccaagctgaaccaggtggcaagacaacagtctca

SEQ ID NO: 560859 - DNA, 120 bp, Artificial Sequence
  ENSG00000169564_7 (sequence is synthesized)
ctttgccatgatgcacggcgggaccggattcgccggaattgactccagctctccagaggtgaaaggctattgggcaagtttggatgcatctactcaaaccacccatgaactcaccattcc

SEQ ID NO: 560860 - DNA, 120 bp, Artificial Sequence
  ENSG00000169564_8 (sequence is synthesized)
aaataacttaattggctgcataatcgggcgccaaggcgccaacattaatgagatccgccagatgtccggggcccagatcaaaattgccaacccagtggaaggctcctctggtaggcaggt

SEQ ID NO: 560861 - DNA, 120 bp, Artificial Sequence
  ENSG00000169564_9 (sequence is synthesized)
tactatcactggctctgctgccagtattagtctggcccagtatctaatcaatgccaggctttcctctgagaagggcatggggtgcagctagaacagtgtaggttccctcaataacccctt

SEQ ID NO: 560862 - DNA, 120 bp, Artificial Sequence
  ENSG00000169564_10 (sequence is synthesized)
tctgctgttctcccatgatccaactgtgtaatttctggtcagtgattccaggttttaaataatttgtaagtgttcagtttctacacaactttatcatccgctaagaatttaaaaatcaca

SEQ ID NO: 560863 - DNA, 120 bp, Artificial Sequence
  ENSG00000169564_11 (sequence is synthesized)
ttctctgttcagctgttaatgctgggatccatatttagttttataagcttttccctgtttttagttttgttttgggttttttggctcatgaattttatttctgtttgtcgataagaaatg

SEQ ID NO: 560864 - DNA, 120 bp, Artificial Sequence
  ENSG00000169564_12 (sequence is synthesized)
taagagtggaatgttaataaatttcagtttagttctgtaatgtcaagaatttaagaattaaaaaacggattggttaaaaaatgcttcatatttgaaaaagctgggaattgctgtcttaaa

SEQ ID NO: 560865 - DNA, 120 bp, Artificial Sequence
  ENSG00000169567_0 (sequence is synthesized)
ctcccttcttccgagcctctcctctggccgccgcgcgggagagaggccgagatggcagatgagattgccaaggctcaggtcgctcggcctggtggcgacacgatctttgggaagatcatc

SEQ ID NO: 560866 - DNA, 120 bp, Artificial Sequence
  ENSG00000169567_1 (sequence is synthesized)
cgcaaggaaataccagccaaaatcatttttgaggatgaccggtgccttgctttccatgacatttcccctcaagcaccaacacattttctggtgatacccaagaaacatatatcccagatt

SEQ ID NO: 560867 - DNA, 120 bp, Artificial Sequence
  ENSG00000169567_2 (sequence is synthesized)
tctgtggcagaagatgatgatgaaagtcttcttggacacttaatgattgttggcaagaaatgtgctgctgatctgggcctgaataagggttatcgaatggtggtgaatgaaggttcagat

SEQ ID NO: 560868 - DNA, 120 bp, Artificial Sequence
  ENSG00000169567_3 (sequence is synthesized)
gtctatcacgttcatctccatgttcttggaggtcggcaaatgcattggcctcctggttaagcacgttttggggataattttctcttctttaggcaatgattaagttaggcaatttccagt

SEQ ID NO: 560869 - DNA, 120 bp, Artificial Sequence
  ENSG00000169567_4 (sequence is synthesized)
atgttaagtaacacacttatttttgcctgtgtatggagagattcaagaaataattttaaaaccgcatacataataaaagacattgttgcatggcttatagtctctctgagtgttgcgttt

SEQ ID NO: 560870 - DNA, 120 bp, Artificial Sequence
  ENSG00000169567_5 (sequence is synthesized)
gatttgttattttaaaaacatatttgttggaatatgtgaaggtgggtttataattttggatgtttcttgctttttcttcccaaggaggactcaacatatgaacatcgcattgttttaatg

SEQ ID NO: 560871 - DNA, 120 bp, Artificial Sequence
  ENSG00000169567_6 (sequence is synthesized)
gtgttactagtctttgaagacaaataatgagagtttataaatttagctttaacttcgaaatatctttccaggctaaaataggtccaacttagatttttaagctaattctcacattttcta

SEQ ID NO: 560872 - DNA, 120 bp, Artificial Sequence
  ENSG00000169567_7 (sequence is synthesized)
ctaaggaaaaaccagaaaaaccattaggacttcaactgcccagctgttttccaaagttactgcatcattttgtatcccaccagcaatgaatgagcgttccagcttctccgtatccttatc

SEQ ID NO: 560873 - DNA, 85 bp, Artificial Sequence
  ENSG00000169567_8 (sequence is synthesized)
tctcctgcctcagcctcccgagtagtgggacaacaggcgcccgccaccaagtttcaccatgttagtcaggatagtttcgatttcc

SEQ ID NO: 560874 - DNA, 120 bp, Artificial Sequence
  ENSG00000169567_9 (sequence is synthesized)
tatcaccagtctggaaaaggatcagaattcgaagtatggtttctcctgaatgcatatcgccacaccattgtaaagttgaaaaatcataatttccccaacttacaatttttgtccattgtc

SEQ ID NO: 560875 - DNA, 120 bp, Artificial Sequence
  ENSG00000169567_10 (sequence is synthesized)
agccagtgacaactacagatcccaattggccatgctgatgttaaacgttaaaggatggctgccaatgagaattgtgcgccgggcaggaacgtgcatcatgcttgggcgtgagaaatgaat

SEQ ID NO: 560876 - DNA, 120 bp, Artificial Sequence
  ENSG00000169570_0 (sequence is synthesized)
gggcttcaatgccacggcctgaccggagtgtccgccatggagtcgcagaaagaggcacgaacactccaggagcccgttgcgcggccttctggggcctcaagctctcagacgccgaacgac

SEQ ID NO: 560877 - DNA, 120 bp, Artificial Sequence
  ENSG00000169570_1 (sequence is synthesized)
cgaacgacaaggagcggcgggagggcggcgcagtgccggcggcggctgccctgggcgcagaggcggacgacgacagtgcggacgggctgtgggagctgccggtggagccggccgagcgga

SEQ ID NO: 560878 - DNA, 120 bp, Artificial Sequence
  ENSG00000169570_2 (sequence is synthesized)
tgcacccgctgcagccggcctcagaaagtgtgtttgtgtccatttctcccagcgcaccctctgcatatctctacccacttgtacataattcagcatccagcagaggaaaacaaagtgttg

SEQ ID NO: 560879 - DNA, 120 bp, Artificial Sequence
  ENSG00000169570_3 (sequence is synthesized)
cgtacagttcctctactagcagcatgcctcccccaggacaagtgtaaagtgaagatcggtcgtcgcttcagtgaagaaagagatcctgaactttcaactgtttgccggaagtctggtaca

SEQ ID NO: 560880 - DNA, 120 bp, Artificial Sequence
  ENSG00000169570_4 (sequence is synthesized)
ttaatattatatccaggggctgaagctgctaatttggaagaatttatattagattctcctgtttatccttctacaatcatcatcattgatggtacatggagccaggctaaggacattttc

SEQ ID NO: 560881 - DNA, 120 bp, Artificial Sequence
  ENSG00000169570_5 (sequence is synthesized)
tataagaactccttgttccgacatcccaaacaggtgcaattaaaaactagcatttctagtcagtatgtaattcggatgcagccgactaatagatgcctttctacactggagtgtgcagct

SEQ ID NO: 560882 - DNA, 120 bp, Artificial Sequence
  ENSG00000169570_6 (sequence is synthesized)
gttgctctttccatcttggagaaaaataattacatacaagagactttgcttcgccctcttcaagctttatgctcctttcaacttcagcatggtgcccaaattcgcctcagcaaggaacac

SEQ ID NO: 560883 - DNA, 120 bp, Artificial Sequence
  ENSG00000169570_7 (sequence is synthesized)
cttctgaaaaatggattatatcctaaaccaatgccaaagaacaaacgcaaactcaggaaaatggaattgttaatgaatagtgttaaaatttagtacagttattcttttggtgctagctta

SEQ ID NO: 560884 - DNA, 120 bp, Artificial Sequence
  ENSG00000169570_8 (sequence is synthesized)
actgtcttcatctaacaataccaaattaagttttcatatagttaaggtctgtaggtttttgacttgctaaagaaggagaattgcatactaatcttacccagaagaaggaagtaaaccaaa

SEQ ID NO: 560885 - DNA, 120 bp, Artificial Sequence
  ENSG00000169570_9 (sequence is synthesized)
tattcataaatacaaataaacagaaattcactggctcactgaaaagcaggatttcctactgtacttgtttttaaaaatgtgcctctaatacatgttttcaaacccaaatttaaaatatga

SEQ ID NO: 560886 - DNA, 120 bp, Artificial Sequence
  ENSG00000169570_10 (sequence is synthesized)
tttgttgttgtgataggttagaagttcttacttgtaaaatagaagaaaattgttgtagtggattggaacggtgttgtgtccattaatgtttataaataattaggtgtagaccaataatat

SEQ ID NO: 560887 - DNA, 120 bp, Artificial Sequence
  ENSG00000169570_11 (sequence is synthesized)
aagattcctacatcagtttgcagtcctgactttacagtttgaaataagtagcaaaagaaaattatgataatcaagtaatttattattttgtaaaatagtataaaggaataaggaaatttt

SEQ ID NO: 560888 - DNA, 120 bp, Artificial Sequence
  ENSG00000169570_12 (sequence is synthesized)
aagtattgtttaggggccaaatttgaactcagctaatatgatttaagcgctctattaattgccctgatttttaaagaggtgcatgtaattttgaaatagcacacattttcatttgtaatc

SEQ ID NO: 560889 - DNA, 120 bp, Artificial Sequence
  ENSG00000169570_13 (sequence is synthesized)
actctggataaatttgtatttttcagtgttcattgaacaggcttattgactctggtaaacttattttattgatgttttcatatggaaaataataagtggaatatgatacaattgttattt

SEQ ID NO: 560890 - DNA, 120 bp, Artificial Sequence
  ENSG00000169570_14 (sequence is synthesized)
tcagaacatatttctttagggctatttaatataacctttttaacgagcaaaaactttccatttgagagaaaaaattcttcctgctctgtgggaaaatatttgctgagattttgtatagaa

SEQ ID NO: 560891 - DNA, 120 bp, Artificial Sequence
  ENSG00000169570_15 (sequence is synthesized)
taagagacatgtatgtaacatatatgtatattcagcacaagtctactgcaattatgtacacattttggcaggaagaggggattttgtttagtctttgtttatgagttctagagtttcctg

SEQ ID NO: 560892 - DNA, 120 bp, Artificial Sequence
  ENSG00000169570_16 (sequence is synthesized)
tatctagtgttaagttgtaaggaaaaactaaacatgccatttaaaggtaaacttggtaactatttatagagcatacaccaatgattatttctcacagttttcatgatcatttgtttatta

SEQ ID NO: 560893 - DNA, 120 bp, Artificial Sequence
  ENSG00000169570_17 (sequence is synthesized)
tttacttggattagactcattaaaaggtataatgctggtcacaattagaatgctaatatttggggaaactatgcagaaaatattttaaaatattaaaagagtgctggcttctattgttga

SEQ ID NO: 560894 - DNA, 80 bp, Artificial Sequence
  ENSG00000169570_18 (sequence is synthesized)
tattttaaaatattaaaagagtgctggcttctattgttgatttatttttggatttaaaaacaaattagggctgggcccat

SEQ ID NO: 560895 - DNA, 120 bp, Artificial Sequence
  ENSG00000169570_19 (sequence is synthesized)
gagaccagcctgggcaatatggtgagactccatctccatacaaaattaaaaaaaaaataattagccagatgtggtggtgtgcacttgtagtcctagctacttgggaggctaaggtgggag

SEQ ID NO: 560896 - DNA, 120 bp, Artificial Sequence
  ENSG00000169570_20 (sequence is synthesized)
gcactccagcctgggctacagagtgagacctgtctaaaataaataaataaataaacaaactagctcatttacaatgtaaagcacttaatatcaaatgattatttggtgtactagaaaaga

SEQ ID NO: 560897 - DNA, 120 bp, Artificial Sequence
  ENSG00000169570_21 (sequence is synthesized)
gcacttaatatcaaatgattatttggtgtactagaaaagaaacagcatataataatgtataatagtttcttaacaagtggggctaaaatcattttgtagtaatttttcacattgatatta

SEQ ID NO: 560898 - DNA, 120 bp, Artificial Sequence
  ENSG00000169570_22 (sequence is synthesized)
cctgacctcgtgatctgtctgccttggcctccaaaagtgctgggaccgtgcccagccatcattattattttttaaaaagaaaactccccctacccccagtataccattttgtatctcaaa

SEQ ID NO: 560899 - DNA, 120 bp, Artificial Sequence
  ENSG00000169570_23 (sequence is synthesized)
cccccagtataccattttgtatctcaaaattttactttattgatttttaagagtaatttctacttttatcttttaaataaaacattttagagtatttttgaagacttaaaaagcttaaaa

SEQ ID NO: 560900 - DNA, 120 bp, Artificial Sequence
  ENSG00000169570_24 (sequence is synthesized)
ttcttgaagtatgtatagttttccaaattactttactgacctgttaactcactgtacttgttttttacttattttttcctgacctcttaacaaggtgagtccatttaatcatctgtggta

SEQ ID NO: 560901 - DNA, 120 bp, Artificial Sequence
  ENSG00000169570_25 (sequence is synthesized)
taaaatgcttctctagtcacctgttctcattaaacagttgtaagtaagttttaaaagccattattttaattactaaaagttctcaagtgtgtagtattatctgagtattttaattgaaaa

SEQ ID NO: 560902 - DNA, 120 bp, Artificial Sequence
  ENSG00000169570_26 (sequence is synthesized)
attaatcaggcttttaaaaattacttttttattgtattagttggcttttaaattcagattctttatatttgcttgatttttcctggaagttccaagttttatgaatttgtagctgatagt

SEQ ID NO: 560903 - DNA, 120 bp, Artificial Sequence
  ENSG00000169570_27 (sequence is synthesized)
aggttttacttgtgtaccccatctgcactttgatgttgtgtagatcgttttgtgagttatttgaaccgtgtaactcagagaatagtatttcctcatacataaagtgacctcacttttaat

SEQ ID NO: 560904 - DNA, 120 bp, Artificial Sequence
  ENSG00000169570_28 (sequence is synthesized)
cagctcctttatagtatgttgaaaatcactgcgtgtaatgagaggtattgagagtttcttgcacacatgagtgtaaaaggttgagaactagattatacaaagtagtaagtcacagtgcat

SEQ ID NO: 560905 - DNA, 120 bp, Artificial Sequence
  ENSG00000169570_29 (sequence is synthesized)
ggcaactttctacaggttggattataagacttatgtggaataggagaattatattgggaaaaaattattttctctaacttgaagactccagagacacttttcttagtcatgaccagtaat

SEQ ID NO: 560906 - DNA, 120 bp, Artificial Sequence
  ENSG00000169570_30 (sequence is synthesized)
atttttcatatattttggaagaaataagctcctcactataccaccagttagtgatttatttatttatgtattttagagacagggcctccttctgtcacccagtttggagtgcagtggtgt

SEQ ID NO: 560907 - DNA, 88 bp, Artificial Sequence
  ENSG00000169570_31 (sequence is synthesized)
gtcctcagccccatgccaccacactcagctaattttaaattttactaatttcatttaatttttgtggagatgggggtcttgctgtgtt

SEQ ID NO: 560908 - DNA, 120 bp, Artificial Sequence
  ENSG00000169570_32 (sequence is synthesized)
tttcatttaatttttgtggagatgggggtcttgctgtgttgtttaggctggtcctgaactcctggcctcaagcgatccttctgccttggcctctcagtaaattatatagaagagcacttc

SEQ ID NO: 560909 - DNA, 120 bp, Artificial Sequence
  ENSG00000169570_33 (sequence is synthesized)
tgtataatttactcagtttcttcatcacatatttccaactgttgccctaaataggtttaaaaatgtgatcatgttattagaaaatcctttccattgaatttcagggatgctgaatttcag

SEQ ID NO: 560910 - DNA, 120 bp, Artificial Sequence
  ENSG00000169570_34 (sequence is synthesized)
ggagctaaattgttgacccttgcctgtagttgttattggttcagaagtaaattttattgatgctacaagtaaaaaattagatctgacttagtaaactcaaaagttttacaaaactgtatt

SEQ ID NO: 560911 - DNA, 120 bp, Artificial Sequence
  ENSG00000169570_35 (sequence is synthesized)
ttactatgtagatgtatttctttaaaataggtatggatggatatttttatgaataaataatattgcattatagatggaatgaaactttgcatttaatttgccccataagtaggctttttg

SEQ ID NO: 560912 - DNA, 120 bp, Artificial Sequence
  ENSG00000169570_36 (sequence is synthesized)
tagaatgaattactctcttaaattgtccaatctaaatttttattagctacattaacttaaagcatattctctctcttttctcttcacactttcttcctccttcccagggtcttcctctcc

SEQ ID NO: 560913 - DNA, 120 bp, Artificial Sequence
  ENSG00000169570_37 (sequence is synthesized)
ctctttcatcacctacattgttccccttcccttttatactattcttattgtatgtactagctgttgttatttatacaaatactcatacatccttacatagcatgtttttaaacaaaagat

SEQ ID NO: 560914 - DNA, 120 bp, Artificial Sequence
  ENSG00000169570_38 (sequence is synthesized)
actgtagtggtcttaacagtttacaattttatatttaaaaattattcaggaaatctggaaatccctgactttttacaccgtgctgatcacttgactcctgtcttagtccattctggctgc

SEQ ID NO: 560915 - DNA, 120 bp, Artificial Sequence
  ENSG00000169570_39 (sequence is synthesized)
tctctcagaataccagagactggatagcttataaaaaacagaaatttatttcttctaagtctggaggctgggaaatacaatatcaaggtgccagcagatttggtgtctggtgaggggccc

SEQ ID NO: 560916 - DNA, 120 bp, Artificial Sequence
  ENSG00000169570_40 (sequence is synthesized)
actcactggttcatagatggtgcattctagctgtgtcttcacctagtggaagggtcgagctagctctctgagacccttatgacctaatcatcccccaaaggttccacttcctaatactat

SEQ ID NO: 560917 - DNA, 120 bp, Artificial Sequence
  ENSG00000169570_41 (sequence is synthesized)
acctcgggaattaaggtttcaacctgtgagttttgtggggacacaaatattcagaccatagcaactcctgtactctactaaaaagcatattagagaaataagtaattgtttttcaatttt

SEQ ID NO: 560918 - DNA, 120 bp, Artificial Sequence
  ENSG00000169570_42 (sequence is synthesized)
actctagcctgggcgacagagtgagacagtgtctcaaataaataaataaataaataaaaataagattcacttgaactaacaacgtaagaattatttttaaaagaaactttttaatgtaag

SEQ ID NO: 560919 - DNA, 120 bp, Artificial Sequence
  ENSG00000169575_0 (sequence is synthesized)
aggagtcagagctctgcatgtctgcaccatgtcctgggctcctgtcctgctcatgctgtttgtctactgcacaggttgtggtcctcagccggtgctgcatcagccgccggccatgtcctc

SEQ ID NO: 560920 - DNA, 120 bp, Artificial Sequence
  ENSG00000169575_1 (sequence is synthesized)
ggcccttggaaccacaatccgcctcacctgcaccctgaggaacgaccatgacatcggtgtgtacagcgtctactggtaccagcagaggccgggccaccctcccaggttcctgctgagata

SEQ ID NO: 560921 - DNA, 120 bp, Artificial Sequence
  ENSG00000169575_2 (sequence is synthesized)
gcttctctggatccaaagatgtggccaggaacagggggtatttgagcatctctgagctgcagcctgaggacgaggctatgtattactgtgctatgggggcccgcagctcggagaaggagg

SEQ ID NO: 560922 - DNA, 120 bp, Artificial Sequence
  ENSG00000169575_3 (sequence is synthesized)
agagggagagggagtgggaggaagaaatggaacccactgcagccaggacacgtgtcccttgaactgaagacagcagaggcacgcatccccttggagagactgtcatggaagagggtggag

SEQ ID NO: 560923 - DNA, 120 bp, Artificial Sequence
  ENSG00000169575_4 (sequence is synthesized)
tcgccgcccgaagcgccgaggaggctgagccactcagcatctcctggtcctgcagtgttgctgtaaatccccattggagactgcattagggaattaaagctgcttgtcactttttgctga

SEQ ID NO: 560924 - DNA, 120 bp, Artificial Sequence
  ENSG00000169583_0 (sequence is synthesized)
gcgcctgaccgcggcagctcccaccatggcggagaccaagctccagctgtttgtcaaggcgagtgaggacggggagagcgtgggtcactgcccctcctgccagcggctcttcatggtcct

SEQ ID NO: 560925 - DNA, 120 bp, Artificial Sequence
  ENSG00000169583_1 (sequence is synthesized)
gctcctcaagggcgtacctttcaccctcaccacggtggacacgcgcaggtccccggacgtgctgaaggacttcgcccccggctcgcagctgcccatcctgctctatgacagcgacgccaa

SEQ ID NO: 560926 - DNA, 120 bp, Artificial Sequence
  ENSG00000169583_2 (sequence is synthesized)
gacagacacgctgcagatcgaggactttctggaggagacgctggggccgcccgacttccccagcctggcgcctcgttacagggagtccaacaccgccggcaacgacgttttccacaagtt

SEQ ID NO: 560927 - DNA, 120 bp, Artificial Sequence
  ENSG00000169583_3 (sequence is synthesized)
tgcgcgcgcccctggagcacgagctggcgggggagccgcagctgcgcgagtcccgccgccgcttcctggacggcgacaggctcacgctggccgactgcagcctcctgcccaagctgcaca

SEQ ID NO: 560928 - DNA, 120 bp, Artificial Sequence
  ENSG00000169583_4 (sequence is synthesized)
tcgtcgacacggtgtgcgcgcacttccgccaggcgcccatccccgcggagctgcgcggcgtacgccgctacctggacagcgcgatgcaggagaaagagttcaaatacacgtgtccgcaca

SEQ ID NO: 560929 - DNA, 120 bp, Artificial Sequence
  ENSG00000169583_5 (sequence is synthesized)
gcgccgagatcctggcggcctaccggcccgccgtgcacccccgctagcgccccaccccgcgtctgtcgcccaataaaggcatctttgtcgggagtgagggtgtcctgacatctgaagggc

SEQ ID NO: 560930 - DNA, 120 bp, Artificial Sequence
  ENSG00000169583_6 (sequence is synthesized)
acggtggacacgcgcaggtgaggccccatcctgtggacccccgcctggcctcgcacactggtgggccggcctcctcccaccccgctgctgcccgcaggtccccggacgtgctgaaggact

SEQ ID NO: 560931 - DNA, 120 bp, Artificial Sequence
  ENSG00000169592_0 (sequence is synthesized)
gggagcggcacggcagccactgcttggggtagcgggagggcagactctgggcgccactcccgggccggtcatgaacgggccggcggacggcgaagtggactacaaaaaaaaataccggaa

SEQ ID NO: 560932 - DNA, 120 bp, Artificial Sequence
  ENSG00000169592_1 (sequence is synthesized)
tctgaagcggaagctcaagttcctcatctacgagcacgagtgcttccaggaggagctgaggaaagcgcaaaggaaattactgaaggtgtcccgggacaagagtttcctcctagaccgact

SEQ ID NO: 560933 - DNA, 120 bp, Artificial Sequence
  ENSG00000169592_2 (sequence is synthesized)
tctgcagtacgagaacgtggatgaagactcttcggactcagatgccactgcatcatcagataacagcgagacggaggggacacccaagttgtctgacacaccggcccctaagaggaagag

SEQ ID NO: 560934 - DNA, 120 bp, Artificial Sequence
  ENSG00000169592_3 (sequence is synthesized)
aagccctccgctggggggcgccccctctccctccagcctctccctgcctccttcaacagggtttccccttcaggcctccggggtcccctccccatacctgagctcgctggcctcctcccg

SEQ ID NO: 560935 - DNA, 120 bp, Artificial Sequence
  ENSG00000169592_4 (sequence is synthesized)
aacggccccgcctgccccggaaactcaagatggcggtgggaccccccgactgccctgtgggagggccgctgaccttccctggccggggttctggggctggggtcgggacaaccctgaccc

SEQ ID NO: 560936 - DNA, 120 bp, Artificial Sequence
  ENSG00000169592_5 (sequence is synthesized)
ccctcccaccccctaagatgcccccccccacgatcctgagcacggtccctcggcagatgttcagcgatgcaggtagcggggacgatgccttggatggagacgatgacctggtgatcgaca

SEQ ID NO: 560937 - DNA, 120 bp, Artificial Sequence
  ENSG00000169592_6 (sequence is synthesized)
tcccggagtgaccgtgacatcacgccatgcccaccacggccccgcccggcgccctccccgtgccagcacacacgagtccagcttcctcggaggtgtttattgatgcccagctgccatgct

SEQ ID NO: 560938 - DNA, 120 bp, Artificial Sequence
  ENSG00000169592_7 (sequence is synthesized)
ccggccactgacacaaccagaaaaggcgtaaacatgcacgggtgtcccccaggagggtggcaggggccctgccttcaaaccccggccccctccaggggacagttatttaaacgagtggcc

SEQ ID NO: 560939 - DNA, 120 bp, Artificial Sequence
  ENSG00000169592_8 (sequence is synthesized)
gggagcatctgccacctgctggggaggcagagaccctgcaatggccacctctttaaaagggcagctgtacagggctaggttttttcaatgaagtttctgtattaaaggagtggctctggg

SEQ ID NO: 560940 - DNA, 120 bp, Artificial Sequence
  ENSG00000169592_9 (sequence is synthesized)
gaccgttggcccttggccgcggaccgcgtgggccgagaactttgccagacgagacttgttttctctgggcagttggagggtctcgcggctcctacccttttttggaacggatcattttaa

SEQ ID NO: 560941 - DNA, 120 bp, Artificial Sequence
  ENSG00000169592_10 (sequence is synthesized)
aagttctcgttagaaaccaattcggcgccggcaccctttgggtgaaacctaatcagcccgcgacgctgcctttctcactggtcacgggcaacagctaggctgctgttatttcgcaaggca

SEQ ID NO: 560942 - DNA, 120 bp, Artificial Sequence
  ENSG00000169592_11 (sequence is synthesized)
gaagagaaaaggcatcctcgcgagcagatgaggaacctcggggataaatccttttgtggcttcaagtgtctaagtacattagagtcaggaacggcgctttccagcgtccgccatttttgt

SEQ ID NO: 560943 - DNA, 120 bp, Artificial Sequence
  ENSG00000169592_12 (sequence is synthesized)
ggcgtcaccgcgtcgctgctacgccatccccagcgcagtggctgccgcgctcctgtcccagtgtcccccgggaggtcggcccgtgcggtgacgcccctgagcgcggggtacgccgggagt

SEQ ID NO: 560944 - DNA, 120 bp, Artificial Sequence
  ENSG00000169592_13 (sequence is synthesized)
ggcctgactgaggagagcaaagcccaggacagcatcctgctgctgcccggcccttctgtgctcgggagccccgggagccgcactcatcaccatctcttttgtttttccatcctccttctg

SEQ ID NO: 560945 - DNA, 120 bp, Artificial Sequence
  ENSG00000169592_14 (sequence is synthesized)
tttgcatttcttcccccaccctcaccccggtccattccgcctcccatctccatccccgctcccgcccgcagctggcctcctcccgctaccccccattcccttctgactacctggccctgc

SEQ ID NO: 560946 - DNA, 120 bp, Artificial Sequence
  ENSG00000169592_15 (sequence is synthesized)
agctgcccgagcccagtcccctgaggcccaagcgggagaaacggccccgcctgccccggaaactcaaggtaccctgacgtgggggtgctagggaggggcaggacggcaggaggacagtca

SEQ ID NO: 560947 - DNA, 120 bp, Artificial Sequence
  ENSG00000169592_16 (sequence is synthesized)
cctgagggaggctgaaggcgggggcctgtcagagaaccatgaacagttaatttggggacccagtcagcacttagcactgaggggtggatcacagaagtctcggcttacaggcttgtatgg

SEQ ID NO: 560948 - DNA, 120 bp, Artificial Sequence
  ENSG00000169592_17 (sequence is synthesized)
agacaaatcagggcagaaccagccttggaggacccggtgtgcagatgccagggatcccgccctttcatggctgcagtgtagcggggccaggctcattttcccaggggggcgtgttgtgtg

SEQ ID NO: 560949 - DNA, 120 bp, Artificial Sequence
  ENSG00000169592_18 (sequence is synthesized)
atgccaggtagccccagaccgggtcaggattatgggatctagagtcaagtcaagactgcctgttagaaaccacgtggccttgagcaggtctctgctaccctctaggcctcctaggcttgg

SEQ ID NO: 560950 - DNA, 120 bp, Artificial Sequence
  ENSG00000169592_19 (sequence is synthesized)
cacctatagggcgagtggtcctactcgatgtgaccagcaagcgcccctggagcgcctcctgttacacggcagtgcacaaagcagaccagtgcctgccctcacagagctcacagtctagca

SEQ ID NO: 560951 - DNA, 120 bp, Artificial Sequence
  ENSG00000169592_20 (sequence is synthesized)
agataggcagaaaacacaccagaaaagtaggtacttgtggagaagaacagagcgaggtccagagcatggggacgccagggggacgaggctgacacttagggcccagcagtctgggatgtt

SEQ ID NO: 560952 - DNA, 120 bp, Artificial Sequence
  ENSG00000169592_21 (sequence is synthesized)
cttgatcagagacttacaggaaatggcagcaagctgtgtggctcctgggcagtgtttctgtcgggcagagtctgtgtttgggagaaaagtaagcagggaattgggtcccggagcaggtca

SEQ ID NO: 560953 - DNA, 120 bp, Artificial Sequence
  ENSG00000169592_22 (sequence is synthesized)
gagggggagctcatgaggtgccagtgtgcaggattcgctgtgaatgaagccttggagacagcagttccctggcggggcgcaggttgcaggtgtggagggggagtgatctaattgcatctt

SEQ ID NO: 560954 - DNA, 120 bp, Artificial Sequence
  ENSG00000169592_23 (sequence is synthesized)
aacaaaattgcagacactggtggtcagagaacagactgagcggtggagtgagttgggacgggagtgaggaggccaccacggtaaaccaggccaagggcagagggtccagagggagctgcg

SEQ ID NO: 560955 - DNA, 120 bp, Artificial Sequence
  ENSG00000169592_24 (sequence is synthesized)
gacccatttcagagaatgagcatgggagttcctggaggacctggtgtgggctgtgcgggagagaggccaggatgcctccagggctttagtctgagcacgagtggagtctccctccctgga

SEQ ID NO: 560956 - DNA, 120 bp, Artificial Sequence
  ENSG00000169592_25 (sequence is synthesized)
gatgggagggctgtgggaccacaggcttggaggaaaactgagtctggccgcggatgtgtcagatgccatctggaaaggcagctagatagcggcccgtgaggggctgcgcatttggaagcc

SEQ ID NO: 560957 - DNA, 120 bp, Artificial Sequence
  ENSG00000169592_26 (sequence is synthesized)
gccaggctggcggtagatgcaagccttgggagagatggggatgggctgaggggcagagcggagtggggaccaactgggcggctcccagggttctggagccagaagcagaatgagaggccg

SEQ ID NO: 560958 - DNA, 120 bp, Artificial Sequence
  ENSG00000169592_27 (sequence is synthesized)
ggagctctaatcccaactctgccgttttctccgtgtgaccttggccctgtgaggcttcacctcttgagcctgagaagcagaggtgacagtactggccctggttcttagcaggggggtggc

SEQ ID NO: 560959 - DNA, 120 bp, Artificial Sequence
  ENSG00000169592_28 (sequence is synthesized)
gggcagggtagggggtggcgcagcactggggggcactttgaggctttctggctgggtgctgagtcctgaagcagagtcatgtccgggagcaaagttgtagacattctggagagaaggttt

SEQ ID NO: 560960 - DNA, 120 bp, Artificial Sequence
  ENSG00000169592_29 (sequence is synthesized)
gagagggtggcccaggtccatggctgtcgggggaggtggggagaagccaggaaaggcctcagcaaggagaacgtgtaagcccagggtgagtggatttggatattcctggctgaagccata

SEQ ID NO: 560961 - DNA, 120 bp, Artificial Sequence
  ENSG00000169592_30 (sequence is synthesized)
gtgggaagggagacagggccacagggaaagcactgcctgggccagagcaggagtggtaagaaattggcaagaagaaccgggtggggtggggtcatggaaggcctggacagtggcctgaag

SEQ ID NO: 560962 - DNA, 120 bp, Artificial Sequence
  ENSG00000169592_31 (sequence is synthesized)
tgggaatttgtctgttactgtcaggggagcgggagtccctgaagggccaggggagtgaggagatggaaggaagggagtccaagcagaggaaggatagctgtgaagacagaagcaggttgg

SEQ ID NO: 560963 - DNA, 120 bp, Artificial Sequence
  ENSG00000169592_32 (sequence is synthesized)
ttctgtcaggcctgagttggacttggccagctttgaatcccagctcttccagtgctcaccatgcgacctcagcgttgtcatttcactctttaagccacagctctctttctccattcagtg

SEQ ID NO: 560964 - DNA, 120 bp, Artificial Sequence
  ENSG00000169592_33 (sequence is synthesized)
gcggcattgtgcggagaatgtgagtgaagggatgaaaatcgctcggcccgtgcctggcccctagtaagccacagagaaatgtgagccgctgccagtcaggctgagaggacgccactgagg

SEQ ID NO: 560965 - DNA, 120 bp, Artificial Sequence
  ENSG00000169592_34 (sequence is synthesized)
aagtccaggccagggtgggacatgctgcgcacagtggggaaggagaggaggtggccagaggaggggatggtcctttccagtcatacacgcatgtctgcttgtgtgtgtacatgtgggggc

SEQ ID NO: 560966 - DNA, 120 bp, Artificial Sequence
  ENSG00000169592_35 (sequence is synthesized)
ctggtgcagggcgtgggggtgctgttcagagttggaccccccatcatccatcctgccagcctcctataccctgaggcctgacccaccctggcccccacaccaccccagcagcggagatga

SEQ ID NO: 560967 - DNA, 120 bp, Artificial Sequence
  ENSG00000169592_36 (sequence is synthesized)
gggtaagtgagggctccttaggaagcagagaggaggccacagggccaaatgtgacactcagaagggccactggagaccacgcatggcgtttcctgccagcccactcagcatctagcccag

SEQ ID NO: 560968 - DNA, 120 bp, Artificial Sequence
  ENSG00000169592_37 (sequence is synthesized)
ggccagactggacactgccccgcaggacccagcaggcctaagcctcaggacctccatgtccacaccaggttcagcctcctctgctggcacgtgacttctccccgtttcccgccccccagt

SEQ ID NO: 560969 - DNA, 120 bp, Artificial Sequence
  ENSG00000169592_38 (sequence is synthesized)
gtcctgaggctgggagggcattaacagaaaccacctgacacacagcaggtgcccagtttgtgcccacagacaaagcacggggactgcagaggagacccacagagctctctagggagggtt

SEQ ID NO: 560970 - DNA, 120 bp, Artificial Sequence
  ENSG00000169592_39 (sequence is synthesized)
tgtgaggacctggcagcgggggggagctgaagggttgagcagggcagaggccacttcccaccctcagaggacaaagcaggacttctgacaaatagagcaggatgcccagggggaggggct

SEQ ID NO: 560971 - DNA, 120 bp, Artificial Sequence
  ENSG00000169592_40 (sequence is synthesized)
gcctgtcgtcccgcaggcggcactcccgccccgaggccccgagtggcacggtgacgcgctcaggtctgtgttttagagcgcgcgctctggctgccgtgcggaggagctggatctgggaga

SEQ ID NO: 560972 - DNA, 120 bp, Artificial Sequence
  ENSG00000169592_41 (sequence is synthesized)
gagaagcagaggggagcgggagtccctgaagggccaggggagtgaggagatggaaggaagggagtccaagcagaggaaggatagctgtgaagacagaagcagtggcggcattgtgcggag

SEQ ID NO: 560973 - DNA, 120 bp, Artificial Sequence
  ENSG00000169592_42 (sequence is synthesized)
agcatgttcatggccagagtgggttgcatctgaggaggaagagccagcgatgcgagccccactcccgtcctggaggcccacgccctggccagggagacactcgcaaacgacgcttttcag

SEQ ID NO: 560974 - DNA, 120 bp, Artificial Sequence
  ENSG00000169592_43 (sequence is synthesized)
cacagtgtgagggcagccatgacgagagtagagcgttccaggagagcctgcagttaactgggcttgagggattctggaagacttcacagaggaggtggcatttaatctgcttcttaaagg

SEQ ID NO: 560975 - DNA, 120 bp, Artificial Sequence
  ENSG00000169592_44 (sequence is synthesized)
tcccctgaggcccaagcgggagaaacggccccgcctgccccggaaactcaagatgttcagcgatgcaggtagcggggacgatgccttggatggagacgatgacctggtgatcgacatccc

SEQ ID NO: 560976 - DNA, 120 bp, Artificial Sequence
  ENSG00000169592_45 (sequence is synthesized)
gaagcggaagctcaagttcctcatctacgtgagtgctgccgcgggaaggctgtgggggatgaggcctggcgcggacaagatctcagtttacccaggtgtaaagtgggtggggcgagcggc

SEQ ID NO: 560977 - DNA, 120 bp, Artificial Sequence
  ENSG00000169592_46 (sequence is synthesized)
tagggccacaagtgcatgggctctttcaagtatccgatgggccagctgggagggacaggtacccaggaggacattgctgcgctggaaaatcactgtccgtgtctccttccctcccctcag

SEQ ID NO: 560978 - DNA, 80 bp, Artificial Sequence
  ENSG00000169594_0 (sequence is synthesized)
ggggcggccatcgtgctgcgcagcctgggcgcttggggagccgcccacttcgccgggtcgcgccccgacggccggagcgt

SEQ ID NO: 560979 - DNA, 120 bp, Artificial Sequence
  ENSG00000169594_1 (sequence is synthesized)
gggcggcccgggcccgggagacgcgccggcagccccggcaccgcagcggtcgcaggatggccgaggctatcagctgtactctgaactgtagttgccaaagtttcaaacccgggaaaataa

SEQ ID NO: 560980 - DNA, 120 bp, Artificial Sequence
  ENSG00000169594_2 (sequence is synthesized)
accaccgtcagtgtgaccaatgcaagcatggatgggtggcccacgctctaagtaagctaaggatcccccccatgtatccaacaagccaggtggagattgtccagtccaatgtagtgtttg

SEQ ID NO: 560981 - DNA, 120 bp, Artificial Sequence
  ENSG00000169594_3 (sequence is synthesized)
atattagcagcctcatgctctatgggacccaggccatccccgttcgcctaaaaatcctactggaccggctcttcagtgtgttgaagcaagatgaggttctccagatcctccatgccttgg

SEQ ID NO: 560982 - DNA, 120 bp, Artificial Sequence
  ENSG00000169594_4 (sequence is synthesized)
actggacacttcaggattatatccgtggatacgtactgcaggatgcatcaggaaaggtgttggatcactggagcatcatgaccagtgaggaagaagtggccaccttgcagcagttccttc

SEQ ID NO: 560983 - DNA, 120 bp, Artificial Sequence
  ENSG00000169594_5 (sequence is synthesized)
gttttggagagaccaaatctatagttgaactcatggcaattcaagagaaagaagagcaatccatcatcataccaccttccacagcaaatgtagatatcagggctttcatcgagagctgca

SEQ ID NO: 560984 - DNA, 120 bp, Artificial Sequence
  ENSG00000169594_6 (sequence is synthesized)
gtcacaggagttctagcctccccactcctgtggacaaaggaaaccccagcagtatacacccctttgagaacctcataagcaacatgactttcatgctgcctttccagttcttcaaccctc

SEQ ID NO: 560985 - DNA, 120 bp, Artificial Sequence
  ENSG00000169594_7 (sequence is synthesized)
tgcctcctgcactgatagggtcattgcccgaacaatatatgttggagcagggtcatgaccaaagtcaggaccccaaacaggaagtccatgggcccttccctgacagcagcttcttaactt

SEQ ID NO: 560986 - DNA, 120 bp, Artificial Sequence
  ENSG00000169594_8 (sequence is synthesized)
ccagttccacaccatttcaggttgaaaaagatcagtgtttaaactgtccggatgctattactaaaaaagaagacagcacccatttaagtgactccagctcatacaacattgtcactaagt

SEQ ID NO: 560987 - DNA, 120 bp, Artificial Sequence
  ENSG00000169594_9 (sequence is synthesized)
ttgaaaggacacagttatcccctgaggccaaagtgaagcctgagaggaatagccttggtacaaagaagggccgggtgttctgcactgcatgtgagaagaccttctatgacaaaggcaccc

SEQ ID NO: 560988 - DNA, 120 bp, Artificial Sequence
  ENSG00000169594_10 (sequence is synthesized)
tcaaaatccactacaatgccgtccacttgaagatcaagcataagtgcaccatcgaagggtgtaacatggtgttcagctccctaaggagccggaatcgccatagcgccaaccccaaccctc

SEQ ID NO: 560989 - DNA, 120 bp, Artificial Sequence
  ENSG00000169594_11 (sequence is synthesized)
ggctgcacatgccaatgaacagaaataaccgggacaaagacctcaggaacagcctgaacctggccagctctgagaactacaagtgcccaggtttcacagtgacgtccccagactgtaggc

SEQ ID NO: 560990 - DNA, 120 bp, Artificial Sequence
  ENSG00000169594_12 (sequence is synthesized)
ctcctcccagctaccctggttcaggagaggattccaaaggccaaccagccttcccaaacattgggcaaaatggtgtgctttttcccaacctaaagacagtccagccagtccttcctttct

SEQ ID NO: 560991 - DNA, 120 bp, Artificial Sequence
  ENSG00000169594_13 (sequence is synthesized)
accgcagtccagccacgcctgccgaggtagcaaacacgcctgggatactcccttccctcccgctgttgtcctcttcaatcccagaacagctcatttcaaacgaaatgccatttgatgccc

SEQ ID NO: 560992 - DNA, 120 bp, Artificial Sequence
  ENSG00000169594_14 (sequence is synthesized)
ttcccaagaagaaatccaggaagtccagtatgcctatcaaaatagagaaagaagctgtggaaatagctaatgagaaaagacacaacctcagctcagatgaagacatgcccctacaggtgg

SEQ ID NO: 560993 - DNA, 120 bp, Artificial Sequence
  ENSG00000169594_15 (sequence is synthesized)
tcagtgaagatgagcaggaggcctgcagtcctcagtcacacagagtatctgaggagcagcatgtacagtcaggaggcttagggaagcctttccctgaaggggagaggccctgccatcgtg

SEQ ID NO: 560994 - DNA, 120 bp, Artificial Sequence
  ENSG00000169594_16 (sequence is synthesized)
aatcagtaattgagtccagtggagccatcagccaaacccctgagcaggccacacacaattcagagagggagactgagcagacaccagcattgatcatggtgccaagggaggtcgaggatg

SEQ ID NO: 560995 - DNA, 120 bp, Artificial Sequence
  ENSG00000169594_17 (sequence is synthesized)
gtggccatgaacactacttcacacctgggatggaaccccaagttcctttttctgactacatggaactgcagcagcgcctgctggctgggggactcttcagtgctttgtccaacaggggaa

SEQ ID NO: 560996 - DNA, 120 bp, Artificial Sequence
  ENSG00000169594_18 (sequence is synthesized)
tggcttttccttgtcttgaagattctaaagaactggagcacgtgggtcagcatgcattagcaaggcagatagaagaaaatcgcttccagtgtgacatctgcaagaagacctttaaaaatg

SEQ ID NO: 560997 - DNA, 120 bp, Artificial Sequence
  ENSG00000169594_19 (sequence is synthesized)
acatgcacagtggagggctgtaatgctacctttccctcccgcaggagcagagacagacacagctcaaacctaaacctccaccaaaaagcattgagccaggaagcattggagagtagtgaa

SEQ ID NO: 560998 - DNA, 120 bp, Artificial Sequence
  ENSG00000169594_20 (sequence is synthesized)
gatcatttccgtgcagcttaccttctgaaagatgtggctaaggaagcctatcaggatgtggcttttacacagcaagcctcccagacatctgtcatcttcaaaggaacaagtcgaatgggc

SEQ ID NO: 560999 - DNA, 120 bp, Artificial Sequence
  ENSG00000169594_21 (sequence is synthesized)
agtctggtttacccaataacgcaagtccacagtgccagcctggagagctacaactctggccccttgagcgagggcaccatcctggatttgagcactacctcgagcatgaagtcagagagt

SEQ ID NO: 561000 - DNA, 120 bp, Artificial Sequence
  ENSG00000169594_22 (sequence is synthesized)
agcagccattcttcctgggactctgacggggtgagtgaggaaggcactgtgcttatggaggacagtgatgggaactgtgaagggtcgagccttgtccctggggaagatgagtaccccatc

SEQ ID NO: 561001 - DNA, 120 bp, Artificial Sequence
  ENSG00000169594_23 (sequence is synthesized)
tgtgtcctgatggagaaggctgaccagagccttgctagcctgccttctgggttgcccataacctgtcatctctgccaaaagacatacagtaacaaagggacctttagggcccactacaaa

SEQ ID NO: 561002 - DNA, 120 bp, Artificial Sequence
  ENSG00000169594_24 (sequence is synthesized)
actgtgcacctccggcagctccacaaatgcaaagtaccaggctgcaacaccatgttttcgtctgttcgcagtcgaaacagacacagccagaatcccaacctgcacaaaagcctggcctca

SEQ ID NO: 561003 - DNA, 120 bp, Artificial Sequence
  ENSG00000169594_25 (sequence is synthesized)
tctccaagtcacctccagtaacaagatggcaaaccaagtatgctcagataagcttttttcataattcaggaataaagtagtccatagaaatgtttctgtttcatatcatttggggcgagt

SEQ ID NO: 561004 - DNA, 120 bp, Artificial Sequence
  ENSG00000169594_26 (sequence is synthesized)
caggcaaaagtatttgatttgactttatagttttccacagcacaatgagcaaaagacaaacctcgtgggaagatgacactggggcagcccttcctattatttttcttagcccaagaggtc

SEQ ID NO: 561005 - DNA, 120 bp, Artificial Sequence
  ENSG00000169594_27 (sequence is synthesized)
tttcactgatacaaggaaaacttgcagaaatgtgatttttcccagatttgtttacatgttccctgggacagatccaggtctgcagatcgacaccagtgggcccaggacctgggggtggct

SEQ ID NO: 561006 - DNA, 120 bp, Artificial Sequence
  ENSG00000169594_28 (sequence is synthesized)
ttaaatgaggcttgcagtgttaaaggtcttggataagaagggtcctggggaagaagactctgtggacaagataccagtccccaaaacagcattttcagttccttcttcaattagtttgaa

SEQ ID NO: 561007 - DNA, 120 bp, Artificial Sequence
  ENSG00000169594_29 (sequence is synthesized)
atccagacctgagtttggaagactgattttttgagaccatccctgtgtttggagtggataattgtccctcccctcagccctgcaccagaggtctcatatgttaccccagggagttctcag

SEQ ID NO: 561008 - DNA, 120 bp, Artificial Sequence
  ENSG00000169594_30 (sequence is synthesized)
aggattgggttggcctctaacatgttccttgttaattcttgttctgtaacatgcattcaagaagctaggggaaaaatatctcatgcacttaaataatggtcttcaatttaatttaaaaat

SEQ ID NO: 561009 - DNA, 120 bp, Artificial Sequence
  ENSG00000169594_31 (sequence is synthesized)
attttgacaatatttaatttgtgcttatgtggtgtttggtgtgagtgcagatattgcactgtgtcacctctggatctctgctcagaagcagaacaagtgatgacctaaatgtcaaaatca

SEQ ID NO: 561010 - DNA, 120 bp, Artificial Sequence
  ENSG00000169594_32 (sequence is synthesized)
ctgctcgttttcatttggtgaacttcaaactctgttctttttggtcacctgtggaatgaatgcaagcatgattttggcaggaacatttgtacatattctgccgtagataatgtggttctg

SEQ ID NO: 561011 - DNA, 120 bp, Artificial Sequence
  ENSG00000169594_33 (sequence is synthesized)
atggttgttgtgtattttcagtatcactggatccctcagtcttcaccgttttataaacgtataagattaggatgaacttttgaatttacttggtaggaaaaaaagtaggacattattgcc

SEQ ID NO: 561012 - DNA, 120 bp, Artificial Sequence
  ENSG00000169594_34 (sequence is synthesized)
atattgtatgtcttaatatttaacttattcggaaatatattccacactgttacatacattttccatggtagaaaggaagttcagtcagtcctgtggaatgaaaccatctcctaaaattca

SEQ ID NO: 561013 - DNA, 120 bp, Artificial Sequence
  ENSG00000169594_35 (sequence is synthesized)
gcatttgcagcattctaaaagcctgtgtaggtacaaggacattgattttgtattcagaattcaagttaactatcttttaaattcgtggttgatgtaagtaataaaaaacattcttaaagt

SEQ ID NO: 561014 - DNA, 120 bp, Artificial Sequence
  ENSG00000169594_36 (sequence is synthesized)
tgagggttataagagagattatttctgtggtctaaaggttaaaaagccaacaacctgttaccaattatttcagctttttttgttttaataagtgtgacaacttaaaacttgtttctattt

SEQ ID NO: 561015 - DNA, 120 bp, Artificial Sequence
  ENSG00000169594_37 (sequence is synthesized)
aaagtgaaatgtatctttcaactgtttagttacccagctgtttaatattccagtcttcccaaagtgaaaagatttgtatacaaatgttttctatgatttaataaaaatatatggcacacc

SEQ ID NO: 561016 - DNA, 120 bp, Artificial Sequence
  ENSG00000169594_38 (sequence is synthesized)
gccggagttcctcgggatttgtcagccagatgtgacaagattgtggcgaggcgagtgaaggagatctgatattaatcagcgcgtagctccgagccaaactttcacaaatgcggtgtagaa

SEQ ID NO: 561017 - DNA, 120 bp, Artificial Sequence
  ENSG00000169594_39 (sequence is synthesized)
acatgttcttctcatttaaggcatctctttgtggctgcggggctgccaccgctccgagtctgacagctatcagctgtactctgaactgtagttgccaaagtttcaaacccgggaaaataa

SEQ ID NO: 561018 - DNA, 120 bp, Artificial Sequence
  ENSG00000169598_0 (sequence is synthesized)
ccgctactctggccctcagggttgtgtagtttccggggccacggcacctgggcacaccaggtggcgtcgcgcctttgctttcctgagccttctgagtaaggtaatgtggtgtccgtgggg

SEQ ID NO: 561019 - DNA, 120 bp, Artificial Sequence
  ENSG00000169598_1 (sequence is synthesized)
cgacgcctgcgcacaagaccgcgtcgggcctcacttttcccaggccttctgggtaatgtagtttccgggatcggcacccggcctgtgccagcttgcagagctcaccaggtgcagacccct

SEQ ID NO: 561020 - DNA, 120 bp, Artificial Sequence
  ENSG00000169598_2 (sequence is synthesized)
gcggccagggcgaggacggatctgagcagctgggcagcaggtgccaccgcctgtgggacccagagggcttgaggacatctgcaatgctccagaagcccaagagcgtgaagctgcgggccc

SEQ ID NO: 561021 - DNA, 120 bp, Artificial Sequence
  ENSG00000169598_3 (sequence is synthesized)
tgcgcagcccgaggaagttcggcgtggctggccggagctgccaggaggtgctgcgcaagggctgtctccgcttccagctccctgagcgcggttcccggctgtgcctgtacgaggatggca

SEQ ID NO: 561022 - DNA, 120 bp, Artificial Sequence
  ENSG00000169598_4 (sequence is synthesized)
cggagctgacggaagattacttccccagtgttcccgacaacgccgagctggtgctgctcaccttgggccaggcctggcagggctatgtgagcgacatcaggcgcttcctcagtgcatttc

SEQ ID NO: 561023 - DNA, 120 bp, Artificial Sequence
  ENSG00000169598_5 (sequence is synthesized)
acgagccacaggtggggctcatccaggccgcccagcagctgctgtgtgatgagcaggccccacagaggcagaggctgctggctgacctcctgcacaacgtcagccagaacatcgcggccg

SEQ ID NO: 561024 - DNA, 120 bp, Artificial Sequence
  ENSG00000169598_6 (sequence is synthesized)
agacccgggctgaggacccgccgtggtttgaaggcttggagtcccgatttcagagcaagtctggctatctgagatacagctgtgagagccggatccggagttacctgagggaggtgagct

SEQ ID NO: 561025 - DNA, 120 bp, Artificial Sequence
  ENSG00000169598_7 (sequence is synthesized)
cctacccctccacggtgggtgcggaggctcaggaggaattcctgcgggtcctcggctccatgtgccagaggctccggtccatgcagtacaatggcagctacttcgacagaggagccaagg

SEQ ID NO: 561026 - DNA, 120 bp, Artificial Sequence
  ENSG00000169598_8 (sequence is synthesized)
gcggcagccgcctctgcacaccggaaggctggttctcctgccagggtccctttgacatggacagctgcttatcaagacactccatcaacccctacagtaacagggagagcaggatcctct

SEQ ID NO: 561027 - DNA, 120 bp, Artificial Sequence
  ENSG00000169598_9 (sequence is synthesized)
tcagcacctggaacctggatcacataatagaaaagaaacgcaccatcattcctacactggtggaagcaattaaggaacaagatggaagagaagtggactgggagtatttttatggcctgc

SEQ ID NO: 561028 - DNA, 120 bp, Artificial Sequence
  ENSG00000169598_10 (sequence is synthesized)
tttttacctcagagaacctaaaactagtgcacattgtctgccataagaaaaccacccacaagctcaactgtgacccaagcagaatctacaaaccccagacaaggttgaagcggaagcagc

SEQ ID NO: 561029 - DNA, 120 bp, Artificial Sequence
  ENSG00000169598_11 (sequence is synthesized)
gaagcagcctgtgcggaaacgccagtgacacgtacacaccacgtcctggtctttgtttgaggcctgacgtgggcatcattttaacaggtgccttttttgtttttttgtttttcgtttttt

SEQ ID NO: 561030 - DNA, 120 bp, Artificial Sequence
  ENSG00000169598_12 (sequence is synthesized)
ggaaaaaaccttaaaaaatgtttcctccaaatctgatttcattacatttctgaattgttggggttttttttgttgttttgttttgttttgtagatggagtttcacttttgttgcccaggc

SEQ ID NO: 561031 - DNA, 81 bp, Artificial Sequence
  ENSG00000169598_13 (sequence is synthesized)
catttcttataccttctgacagcccaacttccagaggacagctctggggtactcgttggatgtctgtgagtacctggtcat

SEQ ID NO: 561032 - DNA, 120 bp, Artificial Sequence
  ENSG00000169598_14 (sequence is synthesized)
ctctggggtactcgttggatgtctgtgagtacctggtcatacgggtcagtagggataagaattgtctctgggctgaggaattcttctgttctctggtttcaccagcgttgggtttgctca

SEQ ID NO: 561033 - DNA, 120 bp, Artificial Sequence
  ENSG00000169598_15 (sequence is synthesized)
tgtaatgtggtcaccatactcaaatggtgtcatggctgaagttggccaccttgcttgagggacaagttgtttatgtatcagctctctgctgggtctccctttccatggcaaatgggcagc

SEQ ID NO: 561034 - DNA, 120 bp, Artificial Sequence
  ENSG00000169598_16 (sequence is synthesized)
tccatcctcttgactcttctaaatgcccaaaagaggtgtcatgctttgggggtacgatgtttatactccgtaaagaacatacaaggacattcactgctgatttttttttttgtttgtttg

SEQ ID NO: 561035 - DNA, 120 bp, Artificial Sequence
  ENSG00000169598_17 (sequence is synthesized)
caggcatgagccactgcacctgacctgctgaattgtttataatggcaagaaataggaaaccccccaatgtctgttgaacagctatcacgttgaaccacgtgaaactgctgttttctaggc

SEQ ID NO: 561036 - DNA, 120 bp, Artificial Sequence
  ENSG00000169598_18 (sequence is synthesized)
ctgctgttttctaggccaaaaatggtgagcgatcatttatttcatgattcaacctgatacatttacatagtgcaaaactgtgtcacagtttcaggcttttatgaggaaagcgtttctgtg

SEQ ID NO: 561037 - DNA, 120 bp, Artificial Sequence
  ENSG00000169598_19 (sequence is synthesized)
tagaaactggaagctgttcagggcatcggcagctgaaccctgctccgttggtcagcgttactatcatctcggatcatatggagctcatgtcagccgtgtgggtggcgggtgcacagagac

SEQ ID NO: 561038 - DNA, 120 bp, Artificial Sequence
  ENSG00000169598_20 (sequence is synthesized)
ggtctggaaggaaacacgcggatctgaacagcagtaatcctgggggatacgggggttgggctagattacagagggctcattttctacgtcatgtattttatgatacttgaattttttgaa

SEQ ID NO: 561039 - DNA, 120 bp, Artificial Sequence
  ENSG00000169598_21 (sequence is synthesized)
atgggcatttattttataacatgttaaaatgtactttttaaattaagtcattttgtaatatttgaatttttacatttgttgtacaatcaggaaaagcaataaagatttttcaaaaataga

SEQ ID NO: 561040 - DNA, 120 bp, Artificial Sequence
  ENSG00000169598_22 (sequence is synthesized)
tggtgctgctcaccttgggccaggcctggcagggctggtttcgccatgtttcccaggatagtctcacactcctgggctcaagctgtcctcctgccttggtctcctaaagtgctgggatta

SEQ ID NO: 561041 - DNA, 120 bp, Artificial Sequence
  ENSG00000169598_23 (sequence is synthesized)
ctcttcagcacctggaacctggatcacatagatggagtcttgctctgtggcccaggctaaagtgcagtggcaggatcatggctcactgaagccctgaactcctggcctcaagcaatcctc

SEQ ID NO: 561042 - DNA, 120 bp, Artificial Sequence
  ENSG00000169598_24 (sequence is synthesized)
cctggcagggctctgttggtgtcagggcaaggacaaagacccgggacacctcaagtctgagtcctggtgattgccaggccctggggaatgggggaagatgtggtcagaggctcttcttgt

SEQ ID NO: 561043 - DNA, 120 bp, Artificial Sequence
  ENSG00000169598_25 (sequence is synthesized)
ggtaacaaagtgagacctcatctctaaaaacatttaaaaagtgagccaggtgtggtagtgcgtccctgtagtcttagccacttggaagtctgaggcaggaggattccctgagcccaggag

SEQ ID NO: 561044 - DNA, 120 bp, Artificial Sequence
  ENSG00000169598_26 (sequence is synthesized)
gttaaggctgtagtaagctgtgttcgtgccactgtactccagcctggaggacagagcaagaccctgtcaaaaagatgaagcagtatgaccctcatattctgccctgcttggcacctgggc

SEQ ID NO: 561045 - DNA, 120 bp, Artificial Sequence
  ENSG00000169599_0 (sequence is synthesized)
gggaaaggttccccggcctctcttggtcagggtgacgcagtagcctgcaaacctcggcgcgtaggccaccgcacttatccgcagcaggaccgcccgcagccggtagggtgggctcttccc

SEQ ID NO: 561046 - DNA, 120 bp, Artificial Sequence
  ENSG00000169599_1 (sequence is synthesized)
agtgcccgcccagctaccggccagcctgcggctgcgcagatctttcgtggttctgtcagggagacccttaggcactccggactaagatggcggcgacggccaggcggggctggggagctg

SEQ ID NO: 561047 - DNA, 120 bp, Artificial Sequence
  ENSG00000169599_2 (sequence is synthesized)
cggctgttgccgccgggctgcgcaggcggttctgtcatatgttgaagaatccatacaccattaagaaacagcctctgcatcagtttgtacaaagaccacttttcccactacctgcagcct

SEQ ID NO: 561048 - DNA, 120 bp, Artificial Sequence
  ENSG00000169599_3 (sequence is synthesized)
tttatcacccagtgagatacatgtttattcaaacacaagataccccaaatccaaacagcttaaagtttataccaggaaaaccagttcttgagacaaggaccatggattttcccaccccag

SEQ ID NO: 561049 - DNA, 120 bp, Artificial Sequence
  ENSG00000169599_4 (sequence is synthesized)
ctgcagcatttcgctcccctctggctaggcagttatttaggattgaaggagtaaaaagtgtcttctttggaccagatttcatcactgtcacaaaggaaaatgaagaattagactggaatt

SEQ ID NO: 561050 - DNA, 120 bp, Artificial Sequence
  ENSG00000169599_5 (sequence is synthesized)
tactgaaaccagatatttatgcaacaatcatggacttctttgcatctggcttacccctggttactgaggaaacaccttcaggagaagcaggatctgaagaagatgatgaagttgtggcaa

SEQ ID NO: 561051 - DNA, 120 bp, Artificial Sequence
  ENSG00000169599_6 (sequence is synthesized)
tacggccaactgtgcaggaagatggaggggatgtaatctacaaaggctttgaagatggcattgtacagctgaaactccagggttcttgtaccagctgccctagttcaatcattactctga

SEQ ID NO: 561052 - DNA, 120 bp, Artificial Sequence
  ENSG00000169599_7 (sequence is synthesized)
aaaatggaattcagaacatgctgcagttttatattccggaggtagaaggcgtagaacaggttatggatgatgaatcagatgaaaaagaagcaaactcaccttaaaataatctggattttc

SEQ ID NO: 561053 - DNA, 120 bp, Artificial Sequence
  ENSG00000169599_8 (sequence is synthesized)
tttgggcataacagtcagacttgttgataatatatatcaagtttttattattaatatgctgaggaacttgaagattaataaaatatgctcttcagagaatgatatataaatattgcatgt

SEQ ID NO: 561054 - DNA, 120 bp, Artificial Sequence
  ENSG00000169599_9 (sequence is synthesized)
ttgctttacctcatatgagttatttataacctcttgaatcatcttctgtacacgtggattttatccaaggatatttttatttttgtccctcatttcccatggctctttctttgcatatgt

SEQ ID NO: 561055 - DNA, 120 bp, Artificial Sequence
  ENSG00000169599_10 (sequence is synthesized)
gtgaaggagtttaaaatacatttccccccatctaatttatttacttttttccatacaggaagaaacagaatgctttttagaatattctaaaatagctttttgtgaaatatctaaaactat

SEQ ID NO: 561056 - DNA, 120 bp, Artificial Sequence
  ENSG00000169599_11 (sequence is synthesized)
ttttactgaagtttttagcttaagaaacagctaaacaagtctgttttaaaaatggtatctggctactagcccccaattaagtagcaaagaactgcttaagaccaaaaaaaagaaatcaaa

SEQ ID NO: 561057 - DNA, 120 bp, Artificial Sequence
  ENSG00000169599_12 (sequence is synthesized)
cggctgttgccgccgggctgcgcaggcggtaggtgacgagcctggagctccgaataggtgtgccgctgggcttagccagcggagcggtcgccgccttgcagaccctctctcgaggcgggt

SEQ ID NO: 561058 - DNA, 120 bp, Artificial Sequence
  ENSG00000169599_13 (sequence is synthesized)
gaaacaccttcaggagaagcaggtaatcaattatcccagtctttcctcatgaatttataatattatacatgggtctttttctaagatgttttttgtccctgtggtctttttgcccccctt

SEQ ID NO: 561059 - DNA, 120 bp, Artificial Sequence
  ENSG00000169599_14 (sequence is synthesized)
cctgttttaataacatatggagttttaattataatatctctgtaacaattagtatagtatatgataatatctggaagaaaaagttcctcaattaaaaaaaactttctggtagtctgctca

SEQ ID NO: 561060 - DNA, 120 bp, Artificial Sequence
  ENSG00000169599_15 (sequence is synthesized)
ctttattcttccttgtaaatttaatgaccatcttgtaaagtctctaaaaaaccatgtcaagagtttggttgaagttgcattaaatttacagattaaatttgggagaattaacatttcttc

SEQ ID NO: 561061 - DNA, 120 bp, Artificial Sequence
  ENSG00000169599_16 (sequence is synthesized)
aacatgctgcagttttatattccggaggtagaaggcgtagaacaggagtataacacagcaccttgtcatcagtaataatgagtctcactgcagtgattctcaaccaaaaagcatggcctt

SEQ ID NO: 561062 - DNA, 120 bp, Artificial Sequence
  ENSG00000169599_17 (sequence is synthesized)
atggagagagattatcaaggagtgaagggatgtgtggaaattagaaatttccaacccacagaatttcaggttatggatgatgaatcagatgaaaaagaagcaaactcaccttaaaataat

SEQ ID NO: 561063 - DNA, 120 bp, Artificial Sequence
  ENSG00000169604_0 (sequence is synthesized)
gacggaactccttccattgcaaaagctcggcgcggcctcgggagctgcccggcggccccggaccgaggcagccctcccctttaaaagaagcggaggacaggattgggatccttgaaaccc

SEQ ID NO: 561064 - DNA, 120 bp, Artificial Sequence
  ENSG00000169604_1 (sequence is synthesized)
gaaacccagaaacagcatcggagcggaaaccagaggggaaaccttgaactcctccagacaattgcttccggggagttgcgagggagcgagggggaataaaggacccgcgaggaagggccc

SEQ ID NO: 561065 - DNA, 120 bp, Artificial Sequence
  ENSG00000169604_2 (sequence is synthesized)
gcggatggcgcgtccctgagggtcgtggcgagttcgcggagcgtgggaaggagcggaccctgctctccccgggctgcgggccatggccacggcggagcggagagccctcggcatcggctt

SEQ ID NO: 561066 - DNA, 120 bp, Artificial Sequence
  ENSG00000169604_3 (sequence is synthesized)
ccagtggctctctttggccactctggtgctcatctgcgccgggcaagggggacgcagggaggatgggggtccagcctgctacggcggatttgacctgtacttcattttggacaaatcagg

SEQ ID NO: 561067 - DNA, 120 bp, Artificial Sequence
  ENSG00000169604_4 (sequence is synthesized)
aagtgtgctgcaccactggaatgaaatctattactttgtggaacagttggctcacaaattcatcagcccacagttgagaatgtcctttattgttttctccacccgaggaacaaccttaat

SEQ ID NO: 561068 - DNA, 120 bp, Artificial Sequence
  ENSG00000169604_5 (sequence is synthesized)
gaaactgacagaagacagagaacaaatccgtcaaggcctagaagaactccagaaagttctgccaggaggagacacttacatgcatgaaggatttgaaagggccagtgagcagatttatta

SEQ ID NO: 561069 - DNA, 120 bp, Artificial Sequence
  ENSG00000169604_6 (sequence is synthesized)
tgaaaacagacaagggtacaggacagccagcgtcatcattgctttgactgatggagaactccatgaagatctctttttctattcagagagggaggctaataggtctcgagatcttggtgc

SEQ ID NO: 561070 - DNA, 120 bp, Artificial Sequence
  ENSG00000169604_7 (sequence is synthesized)
aattgtttactgtgttggtgtgaaagatttcaatgagacacagctggcccggattgcggacagtaaggatcatgtgtttcccgtgaatgacggctttcaggctctgcaaggcatcatcca

SEQ ID NO: 561071 - DNA, 120 bp, Artificial Sequence
  ENSG00000169604_8 (sequence is synthesized)
ctcaattttgaagaagtcctgcatcgaaattctagcagctgaaccatccaccatatgtgcaggagagtcatttcaagttgtcgtgagaggaaacggcttccgacatgcccgcaacgtgga

SEQ ID NO: 561072 - DNA, 120 bp, Artificial Sequence
  ENSG00000169604_9 (sequence is synthesized)
cagggtcctctgcagcttcaagatcaatgactcggtcacactcaatgagaagcccttttctgtggaagatacttatttactgtgtccagcgcctatcttaaaagaagttggcatgaaagc

SEQ ID NO: 561073 - DNA, 120 bp, Artificial Sequence
  ENSG00000169604_10 (sequence is synthesized)
tgcactccaggtcagcatgaacgatggcctctcttttatctccagttctgtcatcatcaccaccacacactgttctgacggttccatcctggccatcgccctgctgatcctgttcctgct

SEQ ID NO: 561074 - DNA, 120 bp, Artificial Sequence
  ENSG00000169604_11 (sequence is synthesized)
cctagccctggctctcctctggtggttctggcccctctgctgcactgtgattatcaaggaggtccctccaccccctgccgaggagagtgaggaagaagatgatgatggtctgcctaagaa

SEQ ID NO: 561075 - DNA, 120 bp, Artificial Sequence
  ENSG00000169604_12 (sequence is synthesized)
aaagtggccaacggtagacgcctcttattatggtgggagaggcgttggaggcattaaaagaatggaggttcgttggggagaaaagggctccacagaagaaggtgctaagttggaaaaggc

SEQ ID NO: 561076 - DNA, 120 bp, Artificial Sequence
  ENSG00000169604_13 (sequence is synthesized)
aaagaatgcaagagtcaagatgccggagcaggaatatgaattccctgagccgcgaaatctcaacaacaatatgcgtcggccttcttccccccggaagtggtactctccaatcaagggaaa

SEQ ID NO: 561077 - DNA, 120 bp, Artificial Sequence
  ENSG00000169604_14 (sequence is synthesized)
actcgatgccttgtgggtcctactgaggaaaggatatgatcgtgtgtctgtgatgcgtccacagccaggagacacggggcgctgcatcaacttcaccagggtcaagaacaaccagccagc

SEQ ID NO: 561078 - DNA, 120 bp, Artificial Sequence
  ENSG00000169604_15 (sequence is synthesized)
caagtacccactcaacaacgcctaccacacctcctcgccgcctcctgcccccatctacactcccccacctcctgcgccccactgccctcccccgccccccagcgcccctacccctcccat

SEQ ID NO: 561079 - DNA, 120 bp, Artificial Sequence
  ENSG00000169604_16 (sequence is synthesized)
cccgtccccaccttccacccttccccctcctccccaggctccacctcccaacagggcacctcctccctcccgccctcctccaaggccttctgtctagagcccaaagttcctgctctgggc

SEQ ID NO: 561080 - DNA, 120 bp, Artificial Sequence
  ENSG00000169604_17 (sequence is synthesized)
tctctcagaaacttcaggagatgttagaacaagtctttccagttagagaagaggagtggtgataaagcccactgaccttcacacattctaaaaattggttggcaatgccagtataccaac

SEQ ID NO: 561081 - DNA, 120 bp, Artificial Sequence
  ENSG00000169604_18 (sequence is synthesized)
aatcatgatcagctgaaagaaacagatattttaaattgccagaaaacaaatgatgaggcaactacagtcagatttatagccagccatctatcacctctagaaggttccagagacagtgaa

SEQ ID NO: 561082 - DNA, 120 bp, Artificial Sequence
  ENSG00000169604_19 (sequence is synthesized)
actgcaagatgctctcaacaggattatgtctcatggagaccagtaagaaaatcatttatctgaaggtgaaatgcagagttggataagaaatacattgctgggtttctaaaatgctgcctt

SEQ ID NO: 561083 - DNA, 120 bp, Artificial Sequence
  ENSG00000169604_20 (sequence is synthesized)
cctgcctctactccacctccatccctggactttggacccttggcctaggagcctaaggaccttcacccctgtgcaccacccaagaaagaggaaaactttgcctacaactttggaaatgct

SEQ ID NO: 561084 - DNA, 120 bp, Artificial Sequence
  ENSG00000169604_21 (sequence is synthesized)
ggggtccctggtgtggtaagaaactcaacatcagacgggtatgcagaaggatgttcttctgggatttgcaggtacataaaaaatgtatggcatcttttccttgcaaattcttccagtttc

SEQ ID NO: 561085 - DNA, 120 bp, Artificial Sequence
  ENSG00000169604_22 (sequence is synthesized)
caagtgagaaggggagcaggtgtttactgatggaaaaggtatgttgctatgttgatgtgtaagtgaaatcagttgtgtgcaatagacaggggcgtattcatgggagcatcagccagtttc

SEQ ID NO: 561086 - DNA, 120 bp, Artificial Sequence
  ENSG00000169604_23 (sequence is synthesized)
taaaacccacaggccatcagcagctagaggtggctggctttggccagacatggaccctaaatcaacagacaatggcattgtcgaagagcaacctgttaatgaatcatgttaaaaatcaag

SEQ ID NO: 561087 - DNA, 120 bp, Artificial Sequence
  ENSG00000169604_24 (sequence is synthesized)
gtttgtttgttttttgttttttttcttggtaaagccatgcaccacagacttctgggcagagctgagagacaatggtcctgacataataaggatctttgattaacccccataaggcatgtg

SEQ ID NO: 561088 - DNA, 120 bp, Artificial Sequence
  ENSG00000169604_25 (sequence is synthesized)
tgattaacccccataaggcatgtgtgtgtatacaaatatacttctctttggcttttcgacatagaacctcagctgttaaccaaggggaaatacatcagatctgcaacacagaaatgctct

SEQ ID NO: 561089 - DNA, 120 bp, Artificial Sequence
  ENSG00000169604_26 (sequence is synthesized)
gcctgaaatttccaccatgcctaggactcaccccatttatccaggtctttctggatctgtttaatcaataagccctataatcacttgctaaacactgggcttcatcacccagggataaaa

SEQ ID NO: 561090 - DNA, 120 bp, Artificial Sequence
  ENSG00000169604_27 (sequence is synthesized)
acagagatcattgtcttggacctcctgcatcagcctattcaaaattatctctctctctagctttccacaaatcctaaaattcctgtcccaagccacccaaattctcagatcttttctgga

SEQ ID NO: 561091 - DNA, 120 bp, Artificial Sequence
  ENSG00000169604_28 (sequence is synthesized)
acaaggcagaatataaaataaatatacatttagtggcttgggctatggtctccaaagatccttcaaaaatacatcaagccagcttcattcactcactttacttagaacagagatataagg

SEQ ID NO: 561092 - DNA, 120 bp, Artificial Sequence
  ENSG00000169604_29 (sequence is synthesized)
gcctgggatgcatttattttatcaataccaatttttgtggccatggcagacattgctaatcaatcacagcactatttcctattaagcccactgatttcttcacaatccttctcaaattac

SEQ ID NO: 561093 - DNA, 120 bp, Artificial Sequence
  ENSG00000169604_30 (sequence is synthesized)
aattccaaagagccgccactcaacagtcagatgaacccaacagtcagatgagagaaatgaaccctacttgctatctctatcttagaaagcaaaaacaaacaggagtttccagggagaatg

SEQ ID NO: 561094 - DNA, 120 bp, Artificial Sequence
  ENSG00000169604_31 (sequence is synthesized)
ggaaagccagggggcataaaaggtacagtcaggggaaaatagatctaggcagagtgccttagtcagggaccacgggcgctgaatctgcagtgccaacaccaaactgacacatctccaggt

SEQ ID NO: 561095 - DNA, 120 bp, Artificial Sequence
  ENSG00000169604_32 (sequence is synthesized)
gtacctccaaccctagccttctcccacagctgcctacaacagagtctcccagccttctcagagagctaaaaccagaaatttccagactcatgaaagcaaccccccagcctctccccaacc

SEQ ID NO: 561096 - DNA, 120 bp, Artificial Sequence
  ENSG00000169604_33 (sequence is synthesized)
ctgccgcattgtctaatttttagaacactaggcttcttctttcatgtagttcctcataagcaggggccagaatatctcagccacctgcagtgacattgctggacccctgaaaaccattcc

SEQ ID NO: 561097 - DNA, 120 bp, Artificial Sequence
  ENSG00000169604_34 (sequence is synthesized)
ataggagaatgggttccccaggctcacagtgtagagacattgagcccatcacaactgttttgactgctggcagtctaaaacagtccacccaccccatggcactgccgcgtgattcccgcg

SEQ ID NO: 561098 - DNA, 120 bp, Artificial Sequence
  ENSG00000169604_35 (sequence is synthesized)
gccattcagaagttcaagccgagatgctgacgttgctgagcaacgagatggtgagcatcagtgcaaatgcaccattcagcacatcagtcatatgcccagtgcagttacaagatgttgttt

SEQ ID NO: 561099 - DNA, 120 bp, Artificial Sequence
  ENSG00000169604_36 (sequence is synthesized)
cggcaaagcattttgatggaatagggaactgcaaatgtatgatgattttgaaaaggctcagcaggatttgttcttaaaccgactcagtgtgtcatccccggttatttagaattacagtta

SEQ ID NO: 561100 - DNA, 120 bp, Artificial Sequence
  ENSG00000169604_37 (sequence is synthesized)
agaaggagaaacttctataagactgtatgaacaaggtgatatcttcatagtgggctattacaggcaggaaaatgttttaactggtttacaaaatccatcaatacttgtgtcattccctgt

SEQ ID NO: 561101 - DNA, 120 bp, Artificial Sequence
  ENSG00000169604_38 (sequence is synthesized)
aaaaggcaggagacatgtgattatgatcaggaaactgcacaaaattattgttttcagcccccgtgttattgtccttttgaactgtttttttttttattaaagccaaatttgtgttgtata

SEQ ID NO: 561102 - DNA, 120 bp, Artificial Sequence
  ENSG00000169604_39 (sequence is synthesized)
tattcgtattccatgtgttagatggaagcatttcctatccagtgtgaataaaaagaacagttgtagtaaattattataaagccgatgatatttcatggcaggttattctaccaagctgtg

SEQ ID NO: 561103 - DNA, 120 bp, Artificial Sequence
  ENSG00000169604_40 (sequence is synthesized)
cttgttggtttttcccatgactgtattgcttttataaatgtacaaatagttactgaaatgacgagacccttgtttgcacagcattaataagaaccttgataagaaccatattctgttgac

SEQ ID NO: 561104 - DNA, 120 bp, Artificial Sequence
  ENSG00000169604_41 (sequence is synthesized)
agccagctcacagtttcttgcctgaagcttggtgcaccctccagtgagacacaagatctctcttttaccaaagttgagaacagagctggtggattaattaatagtcttcgatatctggcc

SEQ ID NO: 561105 - DNA, 120 bp, Artificial Sequence
  ENSG00000169604_42 (sequence is synthesized)
atgggtaacctcattgtaactatcatcagaatgggcagagatgatcttgaagtgtcacatacactaaagtccaaacactatgtcagatgggggtaaaatccattaaagaacaggaaaaaa

SEQ ID NO: 561106 - DNA, 120 bp, Artificial Sequence
  ENSG00000169604_43 (sequence is synthesized)
taattataagatgataagcaaatgtttcagcccaatgtcaacccagttaaaaaaaaaattaatgctgtgtaaaatggttgaattagtttgcaaactatataaagacatatgcagtaaaaa

SEQ ID NO: 561107 - DNA, 120 bp, Artificial Sequence
  ENSG00000169604_44 (sequence is synthesized)
gtctgttaatgcacatcctgtgggaatggagtgttctaaccaattgccttttcttgttatctgagctctcctatattatcatactcagataaccaaattaaaagaattagaatatgattt

SEQ ID NO: 561108 - DNA, 120 bp, Artificial Sequence
  ENSG00000169604_45 (sequence is synthesized)
ttaatacacttaacattaaactcttctaactttcttctttctgtgataattcagaagatagttatggatcttcaatgcctctgagtcattgttataaaaaatcagttatcactataccat

SEQ ID NO: 561109 - DNA, 120 bp, Artificial Sequence
  ENSG00000169604_46 (sequence is synthesized)
gctataggagactgggcaaaacctgtacaatgacaaccctggaagttgctttttttaaaaaaataataaatttcttaaatcaactcttttttctggttgtctgtttgttataaagtgcaa

SEQ ID NO: 561110 - DNA, 120 bp, Artificial Sequence
  ENSG00000169604_47 (sequence is synthesized)
cgtattcaagtcctcaatatcctgatcataataccatgctataggagactgggcaaaacctgtacaatgacaaccctggaagttgcttttttaaaaaaaataataaatttcttaaatcaa

SEQ ID NO: 561111 - DNA, 120 bp, Artificial Sequence
  ENSG00000169604_48 (sequence is synthesized)
agagtccatgggtttcttcgacaagtggcttcaaggaagggaattcccacccttgtcttccagcaaggccacacacatgaaaccagcagaaaagagtcttatttgctggaaagaccccca

SEQ ID NO: 561112 - DNA, 120 bp, Artificial Sequence
  ENSG00000169604_49 (sequence is synthesized)
gcaagggcatagtgagcccttacagtggttccagtcagaaaaggcaccacttgggtgggcacagccccatgggtgtccagcttggtaagcagagcaaggctggacttgagtccccgtcct

SEQ ID NO: 561113 - DNA, 120 bp, Artificial Sequence
  ENSG00000169604_50 (sequence is synthesized)
ccacaaaacacagagccacaagccccagccctgcagcagccctccggaagcagcggggcactggtttccttgtcccctgccatctaccgagtggctcactctcaggtgggagtgctggtg

SEQ ID NO: 561114 - DNA, 120 bp, Artificial Sequence
  ENSG00000169604_51 (sequence is synthesized)
atggttaattaggactgcagaaacatgagcctccttaacaaagtattgggactcttaagggtaagtgtgaaaaaggaatggtctaaatgcattaatcttgaataaaccgaaaaccaaacc

SEQ ID NO: 561115 - DNA, 120 bp, Artificial Sequence
  ENSG00000169604_52 (sequence is synthesized)
ctgtagcctccacaaaattgcatcaggccccacaacagctgcttgcatggaatagcagagaataccgcctgctccctccggacagcacactcctgaaaacggggagagaggagccaaaca

SEQ ID NO: 561116 - DNA, 120 bp, Artificial Sequence
  ENSG00000169604_53 (sequence is synthesized)
tgctcggtttacactttccttatttactgaatgagtggagggcagagacaggcctggagttacgcacactgagtgccccaacatggaaagaaacatcaggagggacaggaaacgttccct

SEQ ID NO: 561117 - DNA, 120 bp, Artificial Sequence
  ENSG00000169604_54 (sequence is synthesized)
ccttaaccaacagttttcaagaccttactggaggcactttattggctacataatcactccatgcggtgggcatcaggcagaatcctggtgcagacccaactttgaggtggaggatttcac

SEQ ID NO: 561118 - DNA, 120 bp, Artificial Sequence
  ENSG00000169604_55 (sequence is synthesized)
agtttctttattttgaacttcccccaggctcccactaattcctctccattctatcctcctccctttcccacaaaagaaaacagaaaggagcagcagtgtttgataccgtatcatccagag

SEQ ID NO: 561119 - DNA, 120 bp, Artificial Sequence
  ENSG00000169604_56 (sequence is synthesized)
gcctggttctctcccattatagggcaaacaagccctggcaagatatttcactcccgccccatgccatgcattaaaaatccaaaattgcctatattccacctgccaagcaagagatgcttt

SEQ ID NO: 561120 - DNA, 120 bp, Artificial Sequence
  ENSG00000169604_57 (sequence is synthesized)
cattattgaagttccaaatgtatacctttgagaacagtgccttctcgtcttaaaagagaggtcctcattttgtgagttgggagcagagggaattaaagaaagccatgatgcagggatttg

SEQ ID NO: 561121 - DNA, 120 bp, Artificial Sequence
  ENSG00000169604_58 (sequence is synthesized)
gccattcaagccgggcagccttcagagaatgtcatccctaatgacacatgcccgaatgaaggagcggggctgagcttgtcctgccttcgtattgaatgttgcctgtctgcctccttaata

SEQ ID NO: 561122 - DNA, 120 bp, Artificial Sequence
  ENSG00000169604_59 (sequence is synthesized)
gcgggcctctgtgtgagcatttgacaagacttaaaactattcattgaagaaaatggatgatcccccaacaggaagatgcaaccccatgggctgcctgcttgaccacagaagtgcttccag

SEQ ID NO: 561123 - DNA, 120 bp, Artificial Sequence
  ENSG00000169604_60 (sequence is synthesized)
ctccagttgctcatctgagaactccccccaccacttgctgttaaaattgttaaaattaaaggccatgttgattgattttttaaactttatttccattttttttaataaaataagaattgg

SEQ ID NO: 561124 - DNA, 120 bp, Artificial Sequence
  ENSG00000169604_61 (sequence is synthesized)
ctggtgagcttgttattactgatggcttttcagggcagcccctgagcccagtgaaggcctcatattcccctgggttctgaatataactagagccccttagccccaacggctttcctaaat

SEQ ID NO: 561125 - DNA, 120 bp, Artificial Sequence
  ENSG00000169604_62 (sequence is synthesized)
tcagagtgcggaactcagatctcaaatattgtttatgaactgaaataaaagtagtttgccaacatctctattttgacaacccttgtaacccttatatgtataaaaatatcttttaaaaga

SEQ ID NO: 561126 - DNA, 120 bp, Artificial Sequence
  ENSG00000169604_63 (sequence is synthesized)
gcaacgtattttatacaatgctctgaaaatcatagtctcaatctagacagtcttttcctctagttccctgtattcaaatcccagtgtctaacattcaataaatagctatatgaaatcaaa

SEQ ID NO: 561127 - DNA, 120 bp, Artificial Sequence
  ENSG00000169604_64 (sequence is synthesized)
ggcttttaggatacccaacagcatctagcacaatctggcttaataaatgtttggtattggtactagtcaagatgttagactcctcgcacccccaccgcaaccaaatgtccttgaaccttc

SEQ ID NO: 561128 - DNA, 120 bp, Artificial Sequence
  ENSG00000169605_0 (sequence is synthesized)
ataacacctagtttgagtcaacctggttaagtacaaatatgagaaggcttctcattcaggtccatgcttgcctactcctctgtccactgctttcgtgaagacaagatgaagttcacaatt

SEQ ID NO: 561129 - DNA, 120 bp, Artificial Sequence
  ENSG00000169605_1 (sequence is synthesized)
gtctttgctggacttcttggagtctttctagctcctgccctagctaactataatatcaacgtcaatgatgacaacaacaatgctggaagtgggcagcagtcagtgagtgtcaacaatgaa

SEQ ID NO: 561130 - DNA, 120 bp, Artificial Sequence
  ENSG00000169605_2 (sequence is synthesized)
cacaatgtggccaatgttgacaataacaacggatgggactcctggaattccatctgggattatggaaatggctttgctgcaaccagactctttcaaaagaagacatgcattgtgcacaaa

SEQ ID NO: 561131 - DNA, 120 bp, Artificial Sequence
  ENSG00000169605_3 (sequence is synthesized)
agggcctgatgtactcagtcaacccaaacaaagtcgatgacctgagcaagttcggaaaaaacattgcaaacatgtgtcgtgggattccaacatacatggctgaggagatgcaagaggcaa

SEQ ID NO: 561132 - DNA, 120 bp, Artificial Sequence
  ENSG00000169605_4 (sequence is synthesized)
gcctgtttttttactcaggaacgtgctacacgaccagtgtactatggattgtggacatttccttctgtggagacacggtggagaactaaacaattttttaaagccactatggatttagtc

SEQ ID NO: 561133 - DNA, 120 bp, Artificial Sequence
  ENSG00000169605_5 (sequence is synthesized)
atctgaatatgctgtgcagaaaaaatatgggctccagtggtttttaccatgtcattctgaaatttttctctactagttatgtttgatttctttaagtttcaataaaatcatttagcattg

SEQ ID NO: 561134 - DNA, 120 bp, Artificial Sequence
  ENSG00000169605_6 (sequence is synthesized)
aaattctaattacacatagcatacagttataagtaaaggtgaccattttgctcatccgattttgttccctagagataactactgttaataagtgttgcatgatcagttaaaattcaaacc

SEQ ID NO: 561135 - DNA, 120 bp, Artificial Sequence
  ENSG00000169605_7 (sequence is synthesized)
aacaaacactatgttcaagggattgtgggtatatacaacaaatatgaacatccttttgccttgcctgcagataccctcaataatgctgaaagacttatacaacattactgcttccaaagc

SEQ ID NO: 561136 - DNA, 120 bp, Artificial Sequence
  ENSG00000169607_0 (sequence is synthesized)
actgaagagtcatggtggggcccgggcctaccgctgctgccgctgtcgaagagcggcagagaaagcttcaggagtaccttgcagccaagggaaaactgaagagccaaaacaccaagcctt

SEQ ID NO: 561137 - DNA, 120 bp, Artificial Sequence
  ENSG00000169607_1 (sequence is synthesized)
atctaaaatccaagaataattgccagaatcaaccaccttctaaatctactattagacccaaaaatgatgttaccaaccatgttgttttgcctgtcaaacctaaaaggtccatcagcatta

SEQ ID NO: 561138 - DNA, 120 bp, Artificial Sequence
  ENSG00000169607_2 (sequence is synthesized)
aactccagcccagaccacctaatactgcagggtcccagaagccgaagttggagccaccaaaacttctgggcaaaaggctgacttcagaatgtgtttcttctaacccatactctaagcctt

SEQ ID NO: 561139 - DNA, 120 bp, Artificial Sequence
  ENSG00000169607_3 (sequence is synthesized)
ctagcaagagttttcaacagtgtgaagctggatcgtccacaacaggagaactgtcaagaaaacctgtggggtcacttaatatagagcaattgaaaactacaaagcagcagttaacagatc

SEQ ID NO: 561140 - DNA, 120 bp, Artificial Sequence
  ENSG00000169607_4 (sequence is synthesized)
aaggaaatggtaaatgtatagactttatgaataatatccatgttgaaaacgaatctttggataactttctaaaagaaacaaacaaagagaacttgctcgatatcttaacagaacctgaga

SEQ ID NO: 561141 - DNA, 120 bp, Artificial Sequence
  ENSG00000169607_5 (sequence is synthesized)
ggaagccagatcctaaattatataccagaagtaagccaaagactgactcttataatcaaaccaagaacagtttagttcctaaacaagccttgggcaaaagttcagttaatagtgctgttc

SEQ ID NO: 561142 - DNA, 120 bp, Artificial Sequence
  ENSG00000169607_6 (sequence is synthesized)
tgaaagatagggttaataaacaatttgttggagaaacacaaagcaggactttcccagtaaaatcacagcaactctctagaggagcagatcttgcaagaccaggagtaaaaccctcaagga

SEQ ID NO: 561143 - DNA, 120 bp, Artificial Sequence
  ENSG00000169607_7 (sequence is synthesized)
cggttccctctcactttattcggacccttagtaaagttcagtcatcaaagaaaccagtagtcaagaacatcaaagatataaaggttaataggagtcaatatgaaagaccaaatgaaacta

SEQ ID NO: 561144 - DNA, 120 bp, Artificial Sequence
  ENSG00000169607_8 (sequence is synthesized)
agatacggtcataccctgttactgaacagagagtgaagcacaccaaacccagaacataccccagtttgcttcagggtgaatataacaacagacatccaaacatcaagcaagatcagaagt

SEQ ID NO: 561145 - DNA, 120 bp, Artificial Sequence
  ENSG00000169607_9 (sequence is synthesized)
ccagccaagtttgtatacctcagacatcatgtgtactgcaaaagtcaaaagccataagccagaggcctaatttgacagttggcagatttaattcagccattccaagcacccctagcataa

SEQ ID NO: 561146 - DNA, 120 bp, Artificial Sequence
  ENSG00000169607_10 (sequence is synthesized)
gaccaaatggaaccagtggtaataaacataacaataatggctttcagcaaaaagcacagactttggactccaagttgaaaaaggctgttccccagaaccattttctgaacaagacagctc

SEQ ID NO: 561147 - DNA, 120 bp, Artificial Sequence
  ENSG00000169607_11 (sequence is synthesized)
ccaaaactcaagctgatgtcacaaccgtaaatgggacccaaacaaacccaaatattaaaaagaaggcaacagcagaggatcgaaggaaacaactagaagaatggcagaaatctaagggaa

SEQ ID NO: 561148 - DNA, 120 bp, Artificial Sequence
  ENSG00000169607_12 (sequence is synthesized)
aaacctataaacggcctcctatggaacttaaaacaaaaagaaaagtaataaaggaaatgaatatttcattctggaagagcattgaaaaagaagaggaagaaaagaaagcacaactcgaac

SEQ ID NO: 561149 - DNA, 120 bp, Artificial Sequence
  ENSG00000169607_13 (sequence is synthesized)
tgtccagtaaaattaacaacactctgacagaatgtctgaacctcatcgaagggggtgtaccttctaatgaaatacttaacatattgtccagcattcctgaagctgaaaaatttgctaaat

SEQ ID NO: 561150 - DNA, 120 bp, Artificial Sequence
  ENSG00000169607_14 (sequence is synthesized)
tctggatctgcaaagcaaagttgttggcaagtaaaggcacctttgatgttattgggctatatgaagaggccattaaaaatggggcaacaccaatacaagagttgcggaaagttgttctta

SEQ ID NO: 561151 - DNA, 120 bp, Artificial Sequence
  ENSG00000169607_15 (sequence is synthesized)
atatcttgcaagactcaaacagaaccacagaagggattacttctgactctttagttgctgaaactagtataacatcagtggaagagctggccaagaagatggaatctgtgaagtcttgtc

SEQ ID NO: 561152 - DNA, 120 bp, Artificial Sequence
  ENSG00000169607_16 (sequence is synthesized)
tttctccaaaagagagggaacaagtcacggcgacaccccgaatagccaaggcagaacagcataattatcctggtatcaaattacagattggtccaatccctagaataaatgggatgccgg

SEQ ID NO: 561153 - DNA, 120 bp, Artificial Sequence
  ENSG00000169607_17 (sequence is synthesized)
aagtgcaagacatgaaatttatcactcctgtacggcgttcgtcgaggattgagcgagcagtgtcccgctacccagaaatgctgcaggaacacgatttagtagtggcttctcttgatgaac

SEQ ID NO: 561154 - DNA, 120 bp, Artificial Sequence
  ENSG00000169607_18 (sequence is synthesized)
tgttagaagtggaagaaacaaaatgttttatattccgtagaaatgaggcgctgcctgtaacattggggtttcaaacccctgaatcataatttcttgatgctttttttaaaaaaggtgttt

SEQ ID NO: 561155 - DNA, 120 bp, Artificial Sequence
  ENSG00000169607_19 (sequence is synthesized)
ggaaaaaaagagaggcatcatggatgcagattatggacgctcaggacttaagtaattcactgggcttactctcaaattttctctccccatgggaaaatctttgctttatgtgtttaagac

SEQ ID NO: 561156 - DNA, 120 bp, Artificial Sequence
  ENSG00000169607_20 (sequence is synthesized)
cagtttgccagttttacagtatacataaatttcaaacttttgaatatttaccctacaactatgataaatatttatactttattgatctactttaatcccaacatagttttttatatcaga

SEQ ID NO: 561157 - DNA, 120 bp, Artificial Sequence
  ENSG00000169607_21 (sequence is synthesized)
aggttggtcccacaatataatgggacttttctttctgcatccaccttagcagagggcaagttctttcatcgtggaagatctgaactttgacgctagcttgacaggctgaatggaccttga

SEQ ID NO: 561158 - DNA, 120 bp, Artificial Sequence
  ENSG00000169607_22 (sequence is synthesized)
cagatggccaagtcaaaacccctcattttacagatgagtttatgctagctgtgcctttgctcagagatcataaatttatgtgtgatctttgactttcatcacagtatccttgtaaatgag

SEQ ID NO: 561159 - DNA, 120 bp, Artificial Sequence
  ENSG00000169607_23 (sequence is synthesized)
agagaattcttgttttttctatgccaggtctcctcagatgaaacacaatcctgaattggcatggtcgtctagcttttatattcaaacctagttttgcatttgttactcagaaacacttca

SEQ ID NO: 561160 - DNA, 120 bp, Artificial Sequence
  ENSG00000169607_24 (sequence is synthesized)
agtaacaaaaggggggcaggggagaggggtggggagtggacacttgcttcttcagttctttgctcagctagggtatagctggcctgagaaggcagtgcaagccccagagactgttgtagg

SEQ ID NO: 561161 - DNA, 120 bp, Artificial Sequence
  ENSG00000169607_25 (sequence is synthesized)
ttgctttttcttcctcctgggcaactatttgtggaaaggttttaccttagtcattatgtaaatataattgtgtagaaaaacctagtcaacacattttaaattttagctttcttaatattt

SEQ ID NO: 561162 - DNA, 120 bp, Artificial Sequence
  ENSG00000169607_26 (sequence is synthesized)
aagtattatcttaaaacaacattaaatttctattagttcctgcttgtttatcttatttattatagaaaaccatgataatggctttgcatagagaattaggagtttgtctaaggatatacc

SEQ ID NO: 561163 - DNA, 120 bp, Artificial Sequence
  ENSG00000169607_27 (sequence is synthesized)
agttggctgtcctaagaaacaaggagcattcattaccaaggagaatggactttgatcaaaggtctatcagcctcatccaggaactagatttttttaagggaagcagatctatttctgaaa

SEQ ID NO: 561164 - DNA, 120 bp, Artificial Sequence
  ENSG00000169607_28 (sequence is synthesized)
gtcagatttataataaagctcaaaaaactgagctataaacctgtaataccagcagactttcaataagagactcttacaactcaattgtggaaaaactaataattaaaaatgggcaaagga

SEQ ID NO: 561165 - DNA, 120 bp, Artificial Sequence
  ENSG00000169607_29 (sequence is synthesized)
cctgagcagacatttctccaaagaagacataagaaatggccagtaggtatagatatgaaaaggtgttcagcatcattaatcataagaataatgtaaattaaaaccactgtgagctatcac

SEQ ID NO: 561166 - DNA, 120 bp, Artificial Sequence
  ENSG00000169607_30 (sequence is synthesized)
ctcacatctataagaatggctattaacaagacatgagataaatgttgatgagattgtggagaaaagagaaccctagtacactgtttgtgggcgtgtagactggggcagccgttatggaaa

SEQ ID NO: 561167 - DNA, 120 bp, Artificial Sequence
  ENSG00000169607_31 (sequence is synthesized)
gaaaacggtatggaggctcctaaagaaattaaaaatagaactgttatctgaccctcttctgagtaagtatgtacccaaagaagatgaaatcaccagctgggcgcagtgactcacacctgt

SEQ ID NO: 561168 - DNA, 120 bp, Artificial Sequence
  ENSG00000169607_32 (sequence is synthesized)
tctcaaaaaaaaaaaagatgaaatcatcacctcataaagatatctgcactcacatgtttgtggcagtgttattctcaatagccaagatgtggaaacaacctaaatgcccatcaatggaca

SEQ ID NO: 561169 - DNA, 120 bp, Artificial Sequence
  ENSG00000169607_33 (sequence is synthesized)
aataaagaaaatacggcatatgcatgccgtggaatagtattcatccttggaaaagagggagttcttgccatttgccacaacatagatggacctggagaacattatgctaagtgaaataag

SEQ ID NO: 561170 - DNA, 120 bp, Artificial Sequence
  ENSG00000169607_34 (sequence is synthesized)
ccagacccaaggaaaaatactgcatgatctcacatatggaatatttaattttttaagaaagagctcaagtacacagagaaagtgcttaccacagattggggaagaggaaatggggagatg

SEQ ID NO: 561171 - DNA, 120 bp, Artificial Sequence
  ENSG00000169607_35 (sequence is synthesized)
caggccaaggatacaaaatagcagataaaatgaacaagtctagagatagggctaaagttaatacaattgtattagggatttttgttaaataagtagattttagctgctattatcacaaaa

SEQ ID NO: 561172 - DNA, 120 bp, Artificial Sequence
  ENSG00000169607_36 (sequence is synthesized)
aaactgagatgataatgttaatctgcttcactatagcagccattttattatctatatgtatcccataacatcatgttgtaaatcttaaatatacctaataaaataaaattgtcaccaaaa

SEQ ID NO: 561173 - DNA, 120 bp, Artificial Sequence
  ENSG00000169607_37 (sequence is synthesized)
agctgtaccagtaaaaatcatccaggacatataggaaaaagaagaaaagaatcatcccctgaaatgcttctcacttcttggtttccatgacctggccctttcagccattgtcatcagctg

SEQ ID NO: 561174 - DNA, 120 bp, Artificial Sequence
  ENSG00000169607_38 (sequence is synthesized)
acttatttgtattattacaagtaaatgcactactcaatactgaacaaaggttgtttccaccaaaacagcctagactggagtgtcccacttccttggaatcctagatggcagaagacaaac

SEQ ID NO: 561175 - DNA, 120 bp, Artificial Sequence
  ENSG00000169607_39 (sequence is synthesized)
acacctctcagcctgcggtggttagaagttgattggttaaatctgcacccagggctaaggcttctgcgttccctaatctcttagatgtgcttggagccctttcctacctttcaaaatact

SEQ ID NO: 561176 - DNA, 120 bp, Artificial Sequence
  ENSG00000169607_40 (sequence is synthesized)
cctgctcagatgccactttctccaagatacgcaccgttgttttgtttcatccattattcctgttgatgcctacgaggtcctaggcactttacataacaagctttaaagatggcatttctg

SEQ ID NO: 561177 - DNA, 120 bp, Artificial Sequence
  ENSG00000169607_41 (sequence is synthesized)
cctatgtcagcccctacgctctacattgcccgccaagctgtctctaaggatagatacatgagcatcagagagcaaaacagggcaactccgttcagatgagaagagcggcagagaaagctt

SEQ ID NO: 561178 - DNA, 120 bp, Artificial Sequence
  ENSG00000169609_0 (sequence is synthesized)
agagggctcttccggcgccttcccaggcggggatgctgcggctccgcagcgggctgaggcaccttcgggcaacacccaatactcggggctccgctcggcttctttgcgccgagatgccta

SEQ ID NO: 561179 - DNA, 120 bp, Artificial Sequence
  ENSG00000169609_1 (sequence is synthesized)
agaaggctggtgcgacgaccaagggtaaaagccagagcaaggaaccagagagaccacttcctcccttaggtcctgtggcagttgatcctaaaggatgcgtcaccatagccatccatgcaa

SEQ ID NO: 561180 - DNA, 120 bp, Artificial Sequence
  ENSG00000169609_2 (sequence is synthesized)
aacctggctccaaacaaaatgctgtaacagatttgacagcagaggctgtaaatgtagctattgcagcacctccatcagagggagaggctaatgctgagctctgtcggtatctttccaagg

SEQ ID NO: 561181 - DNA, 120 bp, Artificial Sequence
  ENSG00000169609_3 (sequence is synthesized)
tcctagaactcaggaagagtgatgtggttttggataagggtggtaaatctcgtgaaaaggtggtgaagcttttggcttctacaactccagaagagatcttggagaaattaaaaaaggaag

SEQ ID NO: 561182 - DNA, 61 bp, Artificial Sequence
  ENSG00000169609_4 (sequence is synthesized)
acaactccagaagagatcttggagaaattaaaaaaggaagccaaaaaaacataaaagcaag

SEQ ID NO: 561183 - DNA, 120 bp, Artificial Sequence
  ENSG00000169609_5 (sequence is synthesized)
cctgggcaacaagagtgaaactctctccccccgaaaaaaaagaaataaaaaatacatccttgagaaacttttttattgctaatggtgaagaggctgttaaatagaaaaatatactacatg

SEQ ID NO: 561184 - DNA, 120 bp, Artificial Sequence
  ENSG00000169609_6 (sequence is synthesized)
aatggtgaagaggctgttaaatagaaaaatatactacatgcacagaagaacatgggggacatatatatatgtatatattcgaataagactccaaaaagtagaaatttaaaaagtgctata

SEQ ID NO: 561185 - DNA, 120 bp, Artificial Sequence
  ENSG00000169609_7 (sequence is synthesized)
cattgcatcaggttctaaaatcccaaaccccaaacagcctggaacatgttactctgatttcatggcgttgtaaaataacagagctgggaagaatattcaagatgacctgatttaacacct

SEQ ID NO: 561186 - DNA, 120 bp, Artificial Sequence
  ENSG00000169609_8 (sequence is synthesized)
ttcattctgttggggggcctttgatttcctatatccagaagttgagagacttactcaagattgtaccatgcaagctggcaactagaacccaaatccttggactacttgttgaatgcagtt

SEQ ID NO: 561187 - DNA, 120 bp, Artificial Sequence
  ENSG00000169609_9 (sequence is synthesized)
tttctagattgtaaattaaaaatcatatctccacaacggttctggaattctggggattgccttctaatccagtttacaagtgacagaaaacctgttatgctgctttgtagtcttacctta

SEQ ID NO: 561188 - DNA, 120 bp, Artificial Sequence
  ENSG00000169609_10 (sequence is synthesized)
atgctgctttgtagtcttaccttagatttttaaatgcttatttaaatgtaaaaaaaattttttttttacatcttttaaagactatatttaccattttgttgaaaaagtaaagaaaaatca

SEQ ID NO: 561189 - DNA, 120 bp, Artificial Sequence
  ENSG00000169609_11 (sequence is synthesized)
taatttttgagaagtcactgaattttcatcttcctctaataacttaaataatcagcaaattcagtagtttttatgaatctccaaagatccttaaaagaagaaagaggacttggaagctat

SEQ ID NO: 561190 - DNA, 120 bp, Artificial Sequence
  ENSG00000169609_12 (sequence is synthesized)
cttggaagctattttcagtatttgtaaaagcttgtcagaaattacatctatattaaagtttcaaaagctaataatatatttttacatcttcaggtcaagttatagtaatttattaaagaa

SEQ ID NO: 561191 - DNA, 120 bp, Artificial Sequence
  ENSG00000169609_13 (sequence is synthesized)
ttcctttgctgatcaggagagctgatctgcagttgtgcgctttgtccagcaagtacatgagaaagatgtattgatggaccaaatcattaaaaacaaaatccacaaggaagaacaataata

SEQ ID NO: 561192 - DNA, 78 bp, Artificial Sequence
  ENSG00000169609_14 (sequence is synthesized)
aaatcattaaaaacaaaatccacaaggaagaacaataataaaaattgctgatggtaaggttgaggcaggaggaacact

SEQ ID NO: 561193 - DNA, 120 bp, Artificial Sequence
  ENSG00000169609_15 (sequence is synthesized)
gcaacgaagtgagaccctgtatctgtctctgtctctttctttatagatagatagatatacatagatagattttatacatagatatatatatttatatgtaagattatatataagacctca

SEQ ID NO: 561194 - DNA, 120 bp, Artificial Sequence
  ENSG00000169609_16 (sequence is synthesized)
gacaagagtgagactccgtctcaaaaagaaagaaaaaatcccagacagtgaaagagaagctactcgtctagtacaactcttaacttgtaccaaataggtatcaagggcaagaaaaggtgg

SEQ ID NO: 561195 - DNA, 120 bp, Artificial Sequence
  ENSG00000169609_17 (sequence is synthesized)
ggtatcaagggcaagaaaaggtggcttatgtgagatcacagtgcacattaatggcagagcttggtttaagcccagctgctttgtcttctaaactgtgccatatactgcctgcaaatgtgc

SEQ ID NO: 561196 - DNA, 120 bp, Artificial Sequence
  ENSG00000169609_18 (sequence is synthesized)
ttctgttttacatggtcttaagagcttttcccactctttctcaagaccattgccatgtgtgctgtaaagccgttttacttgtggattttacatggatcactgttagaatgtcataaaatg

SEQ ID NO: 561197 - DNA, 63 bp, Artificial Sequence
  ENSG00000169609_19 (sequence is synthesized)
gtggattttacatggatcactgttagaatgtcataaaatgatatcataaaagatcaactttcc

SEQ ID NO: 561198 - DNA, 77 bp, Artificial Sequence
  ENSG00000169609_20 (sequence is synthesized)
ctgggcaaatcaacttttggtcaggcgtgttggcttacgcctgtaattccagcgctttgggaggccgaggcaggcag

SEQ ID NO: 561199 - DNA, 76 bp, Artificial Sequence
  ENSG00000169609_21 (sequence is synthesized)
ctgaggcaggagaattgcttgtgaaccggggaactgcgctccagcgtgggctgcagaggcagactccgtctcaaga

SEQ ID NO: 561200 - DNA, 120 bp, Artificial Sequence
  ENSG00000169609_22 (sequence is synthesized)
cgctccagcgtgggctgcagaggcagactccgtctcaagaaaaaaaaaaatcagctttctttccttcccctgaatcttctgcagtgccagtttcatcctcaggcccacttgtttcatgta

SEQ ID NO: 561201 - DNA, 120 bp, Artificial Sequence
  ENSG00000169609_23 (sequence is synthesized)
gacaaaaggccaaccaggtttcatattcacgtatcaacccctgcagtaggagaaaaggccactcctaggagctctggtattttccagaagctttcagtcagccttcccttgtatcagccc

SEQ ID NO: 561202 - DNA, 120 bp, Artificial Sequence
  ENSG00000169609_24 (sequence is synthesized)
aaatcaagtcacatgaaatttctaagccagcccctgtgatcagggaatgccattctataacacaagttccctaaagcagtaactatagaagaaagaattaccctaattgtttcaggccaa

SEQ ID NO: 561203 - DNA, 120 bp, Artificial Sequence
  ENSG00000169609_25 (sequence is synthesized)
ttaaggcccatcctagaggtggaaatggggtcagcatactcagaagcaaagaagtagagagagttggatacctgaataaaattgggaaaagttacaaagagaggaatggatgctggagag

SEQ ID NO: 561204 - DNA, 120 bp, Artificial Sequence
  ENSG00000169609_26 (sequence is synthesized)
gaaccaccagtttctactacgataacctatttacttcattttaaacggtgatattttaaacgtgggaacattttgcctagtgagtttttttctttgagaaacgtagcagtatcttgtaac

SEQ ID NO: 561205 - DNA, 78 bp, Artificial Sequence
  ENSG00000169609_27 (sequence is synthesized)
tgagtttttttctttgagaaacgtagcagtatcttgtaacaaagaagatatggggacactctgtcatcaaaaactact

SEQ ID NO: 561206 - DNA, 73 bp, Artificial Sequence
  ENSG00000169609_28 (sequence is synthesized)
taacaacaacaaaaaaacagaaacaaacaaaacaaaacaaactactgttggaggtaggaactggcccaggggc

SEQ ID NO: 561207 - DNA, 120 bp, Artificial Sequence
  ENSG00000169609_29 (sequence is synthesized)
aaaacaaactactgttggaggtaggaactggcccaggggctgtattcccagaacacgattcccttttccccactgcaaacaagatagtctacagcagcctcacaacttaattgtctcaca

SEQ ID NO: 561208 - DNA, 120 bp, Artificial Sequence
  ENSG00000169609_30 (sequence is synthesized)
caggactattcctactgttaagagatcacagctaaggcttgggcaccttgacctgctgtagaagctcagttaatgtacttttcatcatctgggccctggtattcccctgtaaatactgaa

SEQ ID NO: 561209 - DNA, 120 bp, Artificial Sequence
  ENSG00000169609_31 (sequence is synthesized)
gtagacccagtgacctagtgcccaagacacaaaatattcagcctccgtaacatttgtctaatgacatggttctagctttgctcactcccattaatttcaagtgagtactggctaggcagt

SEQ ID NO: 561210 - DNA, 120 bp, Artificial Sequence
  ENSG00000169609_32 (sequence is synthesized)
ctatagtgacttgattacactgtctttcttgtcctgtgctgtcctgagaatcctggatttgaagcagcctatgaataaggtttgaaaaatatttatccaactatgccgacatatgatgtt

SEQ ID NO: 561211 - DNA, 120 bp, Artificial Sequence
  ENSG00000169609_33 (sequence is synthesized)
ctagcactgcatctgtcatctatcacccgcaccttaataaatgataattacttgtgcaaacatgatgtattaatcacttattaacttggttgcttacttgacagacactgctaggtggtt

SEQ ID NO: 561212 - DNA, 120 bp, Artificial Sequence
  ENSG00000169609_34 (sequence is synthesized)
tgcctatgctgtacttcgacagatcctgggaaagaacagcctggctcattatgccctggaggcaggagcagagatttcagacttctgatttctgtgagccattccacactttcctctcgg

SEQ ID NO: 561213 - DNA, 120 bp, Artificial Sequence
  ENSG00000169609_35 (sequence is synthesized)
tgtgagccattccacactttcctctcggttaggggagggacagcaataaccagaggatgaaggtggaacctttgcagtgcacacctaggccagtgcagtggcttatgcctgtaatcccag

SEQ ID NO: 561214 - DNA, 120 bp, Artificial Sequence
  ENSG00000169609_36 (sequence is synthesized)
ggtggatcacttgaagtcaggagtttaagaccagcctgaccaatatggcgaaaccctgtttctactacaaatacaaatattcgctgggcatggcaatgcatgcctgtagtcccagctact

SEQ ID NO: 561215 - DNA, 74 bp, Artificial Sequence
  ENSG00000169609_37 (sequence is synthesized)
attccatcttgaaaaataaagttccaaatacctaaatgctcaaactttaggaggcagctctctgggctgtgggc

SEQ ID NO: 561216 - DNA, 120 bp, Artificial Sequence
  ENSG00000169609_38 (sequence is synthesized)
aatgctcaaactttaggaggcagctctctgggctgtgggctgtcagcatccccctcctagattccagggatttggttacatagttctttagctgtaatgcagagtataaattttagaacc

SEQ ID NO: 561217 - DNA, 120 bp, Artificial Sequence
  ENSG00000169609_39 (sequence is synthesized)
cacatggccccaaattcaaattgttttaatgcatgtaactagtgactaaaaacttagaatttcaatttacatccaagaggtggcaccataacacaacagcaaaaagccacacaaactgaa

SEQ ID NO: 561218 - DNA, 120 bp, Artificial Sequence
  ENSG00000169609_40 (sequence is synthesized)
cttgtatcttaaatttagctcaggtcggagtgttgttaacttggggccagctgggttcgtgagagtctcagcccattgccatggtggagtcagcatggtcttgagttccttccttaactc

SEQ ID NO: 561219 - DNA, 120 bp, Artificial Sequence
  ENSG00000169609_41 (sequence is synthesized)
tgcaggtttcagaaatccacgtagccagtgtttctgaaaatggatctaggctgggcaattggcaaggagctaatttcttatcaagatgccagcttattaacttgagtgaagaacacaact

SEQ ID NO: 561220 - DNA, 120 bp, Artificial Sequence
  ENSG00000169609_42 (sequence is synthesized)
gccaaatagactgtatagtgggatctgctagtgagaacattctgtccctttgggaaatctctttaagagaatcatcatttgaaggctgcttggagagcctggaatcagagccagggaaat

SEQ ID NO: 561221 - DNA, 120 bp, Artificial Sequence
  ENSG00000169609_43 (sequence is synthesized)
taggggccagggtaagggagctatgaccatctatagctcccatttctgctgcagggatggacctatggtatcagccagccacagaaggtcttttgggacaacactggagataatgatcct

SEQ ID NO: 561222 - DNA, 120 bp, Artificial Sequence
  ENSG00000169609_44 (sequence is synthesized)
tcatagtacaggaactccctttttctaggttgcaggaagaccacctatttctacccacataggcattcctcagacaatcctcataatttagttattaagggtttttgcattttataatcc

SEQ ID NO: 561223 - DNA, 120 bp, Artificial Sequence
  ENSG00000169609_45 (sequence is synthesized)
tgtctgcctcagggtccatcggtcccctagatagagtttggggagggaagaatccccaaactttgcagccacaagttacgtactccctggtcatttctacagaaaactaatctgtgatgt

SEQ ID NO: 561224 - DNA, 120 bp, Artificial Sequence
  ENSG00000169609_46 (sequence is synthesized)
gtttttactatcgcagtgacgttcaaactgtttcaaagccttaggtttccccagagatgcctagggggattggggcactgtggacaataagggagtgagtcaagtcaacagaaatgctag

SEQ ID NO: 561225 - DNA, 120 bp, Artificial Sequence
  ENSG00000169609_47 (sequence is synthesized)
ctagcctttagttctcttctacagccgtactgggtggcatgtacacgtgatagctgctcacaccacatgtggctattgagcacttgaaatgtggctaacataatttaaaagtaaaaggta

SEQ ID NO: 561226 - DNA, 120 bp, Artificial Sequence
  ENSG00000169609_48 (sequence is synthesized)
atcccagcactttgggaagctgaggtaggaggatagtttgtggccaggagtttgagaccagcttgggcgacgtggtaagaccccatttctccaaaaaaaattaaaaaaattaactaggca

SEQ ID NO: 561227 - DNA, 88 bp, Artificial Sequence
  ENSG00000169609_49 (sequence is synthesized)
tgagaccagcttgggcgacgtggtaagaccccatttctccaaaaaaaattaaaaaaattaactaggcacgaggctgaggcaggaggat

SEQ ID NO: 561228 - DNA, 120 bp, Artificial Sequence
  ENSG00000169609_50 (sequence is synthesized)
gccactgcactccagcttgggtgagagggcaagacgctgtctcaaataaataaaaatgagccccctccccctccccctccccctctccctcaccctctccctctccccacggtctccctc

SEQ ID NO: 561229 - DNA, 120 bp, Artificial Sequence
  ENSG00000169609_51 (sequence is synthesized)
aataaataaataaaaatgaaaaacaaaagcataatagaaataaagaccatgttggaaacagtgcaacagagaagaggctgaaaacggtatgaaatttagaaggcaagatagagaacagtg

SEQ ID NO: 561230 - DNA, 90 bp, Artificial Sequence
  ENSG00000169609_52 (sequence is synthesized)
cggtatgaaatttagaaggcaagatagagaacagtgaataaagacaggaaaataacagctatagaagtcagttaaaaataataataatag

SEQ ID NO: 561231 - DNA, 90 bp, Artificial Sequence
  ENSG00000169609_53 (sequence is synthesized)
cgatccatccgccttggcctcccaaattactgggattacaggcgtgaaccactgcatccagccaaaattattcatttttgtattgtttca

SEQ ID NO: 561232 - DNA, 120 bp, Artificial Sequence
  ENSG00000169609_54 (sequence is synthesized)
gccttggcctcccaaattactgggattacaggcgtgaaccactgcatccagccaaaattattcatttttgtattgtttcactttttatattttttattttattttattattttattttat

SEQ ID NO: 561233 - DNA, 120 bp, Artificial Sequence
  ENSG00000169609_55 (sequence is synthesized)
gagccaccgcgccagctttattattttgtaaacacacaagttgaggaaattttaaaatgagaaaaatacacacacaaacaacaaagctctagccattagcaattagaacagctttattta

SEQ ID NO: 561234 - DNA, 120 bp, Artificial Sequence
  ENSG00000169609_56 (sequence is synthesized)
cctaattcagacaaagagactggagattctttagggagttaaaggcacgagcagtggaaaaaaaccatgagatcatcatcacatcatcccctgaagctgtctcaggaggagtcactgaaa

SEQ ID NO: 561235 - DNA, 120 bp, Artificial Sequence
  ENSG00000169609_57 (sequence is synthesized)
cccagagaaaatctaactggtaattaatacatagggctctcgtgtccctgagggaaaggagtgaaaacaccaactgaattagcccatacatggggctgtctgtgccctttagggagagga

SEQ ID NO: 561236 - DNA, 120 bp, Artificial Sequence
  ENSG00000169609_58 (sequence is synthesized)
gtgaaaacaactgaaatcagcccatcagcccatgaagacactggtgaaaattatgcgacttgtccttcttgcacctaagcagcccacagataactcactcttatatacgaacctgactga

SEQ ID NO: 561237 - DNA, 120 bp, Artificial Sequence
  ENSG00000169609_59 (sequence is synthesized)
ctgggtagccattatgtgcctagcttagtgctgcatgctttatgctctctcttaatcctgcaatggggcagtcgaatcacatattagctgtttttgttgcctgtttgtttttgagacgga

SEQ ID NO: 561238 - DNA, 120 bp, Artificial Sequence
  ENSG00000169609_60 (sequence is synthesized)
acaggcgtgagccaccgtgcctggccagctgttctgactgaagacttgtcttcttcgttaacctgctcctcctgtttcatcctgcaaatgtttaaatctgaggggtattatccacagctc

SEQ ID NO: 561239 - DNA, 120 bp, Artificial Sequence
  ENSG00000169609_61 (sequence is synthesized)
cacagctcatctccacttttctaatctgacagcactgataattgaattcctcagaagcaagatgtttctctggcacccagaggcctcagcagtgtcacgacagctgaagtgtcacttatt

SEQ ID NO: 561240 - DNA, 120 bp, Artificial Sequence
  ENSG00000169609_62 (sequence is synthesized)
cctcatcctgggcacaccatgatggagtgcagccccactgattgggacccatgcagccagcctggcccagggccactctctctcccagaatgtgcacaagtcaagggatctctacttcca

SEQ ID NO: 561241 - DNA, 120 bp, Artificial Sequence
  ENSG00000169609_63 (sequence is synthesized)
tccttattttcctcaaaagctggtgccagcagtaatcaaccagacttctagaaaagaggagataatctgctctcaaggctgctgtgggctccagtgttgtaatctactacttgaatctag

SEQ ID NO: 561242 - DNA, 120 bp, Artificial Sequence
  ENSG00000169609_64 (sequence is synthesized)
ttgtttatttcattctataataatttaatacagcagatgtcaggagaaatctttgtttagatattatgtcatatctggatatatctgaatcctgaatgattaatctaaatattaacaata

SEQ ID NO: 561243 - DNA, 120 bp, Artificial Sequence
  ENSG00000169609_65 (sequence is synthesized)
ttcacttctgccaatgtcaagagtattttctgctactgggcttaaatcaattttaaaatttgagagttttaaaagcatatctttctgtgttcataaataaacagaacgaagattctttga

SEQ ID NO: 561244 - DNA, 120 bp, Artificial Sequence
  ENSG00000169609_66 (sequence is synthesized)
gcctcccagagtgctgggataacagctttattactgatttccctctaaaaagagactcaagtgtggagctgactcatctatagattaaggaatcacaaagtaccatagtcacttaacaaa

SEQ ID NO: 561245 - DNA, 79 bp, Artificial Sequence
  ENSG00000169609_67 (sequence is synthesized)
cgaactcctggctaacaggtgtgagccaccatacccaaccagctttattactgatttccctctaaaaagagactcaagt

SEQ ID NO: 561246 - DNA, 120 bp, Artificial Sequence
  ENSG00000169609_68 (sequence is synthesized)
tttctgtgaatctactagcaaacatctcttcaaactttggaacagcttcggcagtgtcagtcattctgaaaatctgtacaattttaaagacatttccattaaaaaaaatttaaaaattaa

SEQ ID NO: 561247 - DNA, 120 bp, Artificial Sequence
  ENSG00000169609_69 (sequence is synthesized)
gcagcgggctgaggcaccttcgggcaacacccaatactcggggctccgctcggcttctttgcgccgagatgcctaagaaggctggtgcgacgaccaaggccagtagcaggtcccgtggcg

SEQ ID NO: 561248 - DNA, 120 bp, Artificial Sequence
  ENSG00000169609_70 (sequence is synthesized)
gcagaggggtgggcctcaggggtacttgttgaagagcgcgggagaagcggggcccgggagtgagtggaggcactgccagcggcttgccgtctctcagttccggggctcaggacagccgcc

SEQ ID NO: 561249 - DNA, 120 bp, Artificial Sequence
  ENSG00000169609_71 (sequence is synthesized)
gccacccccagagctgcggcctgctgccgtcgccccgcctcagtaggctgcgctgccgtccacctggtgatttctgagcgctgggcccggcggcagccgagctctccttgggctgcgtgt

SEQ ID NO: 561250 - DNA, 120 bp, Artificial Sequence
  ENSG00000169609_72 (sequence is synthesized)
gctgacctttggcctcctacccgcactcccagtccagcaattcatgttcccgcagcggcatgacctgcgtttccccaggaggctgtattctgctttctcctcccttgctttggctgatcg

SEQ ID NO: 561251 - DNA, 120 bp, Artificial Sequence
  ENSG00000169609_73 (sequence is synthesized)
caccccttctgtcaagaatacagcactcccatttccaccatctttgtttggccaaccccagtccgtttctcagactcagctcaagcactgcctcctgctggcagcattctccagtgcccc

SEQ ID NO: 561252 - DNA, 120 bp, Artificial Sequence
  ENSG00000169609_74 (sequence is synthesized)
aatgctgatttgcctgtggggtaatgttctgtgcctatctcatcggtgcacttagcacagtgtattataattttgtatgttctttctccctcgcagcagtccgagctccttgagagcaag

SEQ ID NO: 561253 - DNA, 120 bp, Artificial Sequence
  ENSG00000169609_75 (sequence is synthesized)
gaccatgtaccttttcatctttacatatccattgcctacatatttgttgaacgaaagttcctagcacagcccctgtcccataacaggcctttaaatatcaagcactatttttttttcctc

SEQ ID NO: 561254 - DNA, 120 bp, Artificial Sequence
  ENSG00000169609_76 (sequence is synthesized)
aatgatccctgcccccaaggaattggaaatacaaagcagagggaggagcaagcattaaggtttagaagccagagttaggttttcttgcaaggggggaaaaaacactgttgggttgatggg

SEQ ID NO: 561255 - DNA, 120 bp, Artificial Sequence
  ENSG00000169609_77 (sequence is synthesized)
aacccttcgtgggaaaattgagtagagccttgaaggttgtgggaaaagctttctaggtggccagaagtccctggacaccactgatgagcctagtttgtctgttaagggtgaaagggggta

SEQ ID NO: 561256 - DNA, 120 bp, Artificial Sequence
  ENSG00000169609_78 (sequence is synthesized)
aatgctgagctctgtcggtatctttccaaggtcctagaactcaggaagagtgatgtggttttggataagggtctctcactttgtcacccaggctggagcacagcggcacaacctcgggtc

SEQ ID NO: 561257 - DNA, 120 bp, Artificial Sequence
  ENSG00000169609_79 (sequence is synthesized)
acaggtgcatgccacccacacccggctaattttcgtattttttgaagagacgggatctcgccatgttgcctaggctggaagtcttgggcttcggtgatcctcctgccttggcttcccaaa

SEQ ID NO: 561258 - DNA, 120 bp, Artificial Sequence
  ENSG00000169609_80 (sequence is synthesized)
tggcccgaattatttttcttactttattaacttccaataaaaggtttgggacaaaaagatgtgacaatggaagctattgtgataacttcttcattagtctgcctttcctccaaacatatg

SEQ ID NO: 561259 - DNA, 120 bp, Artificial Sequence
  ENSG00000169609_81 (sequence is synthesized)
gggatgctgcggctccgcagcgggctgaggcaccttcgggcaacacccaatactcggggctccgctcggcttctttgcgccgagatgcctaagaaggctggtgcgacgaccaaggccagt

SEQ ID NO: 561260 - DNA, 120 bp, Artificial Sequence
  ENSG00000169609_82 (sequence is synthesized)
gtcggtatctttccaaggtcctagaactcaggaagagtgatgtggttttggataaggtaggtctcgctctcttttttttttttttgagacaaaatcttgctctgtcgcccaagctggagt

SEQ ID NO: 561261 - DNA, 120 bp, Artificial Sequence
  ENSG00000169609_83 (sequence is synthesized)
ctgacctcaaatgatccacctgccttctcctcccgaagcgctgggattagaggtatgagccaccatgcccggaggtctctctctttttaaacttctttaattattttctttttttttttg

SEQ ID NO: 561262 - DNA, 77 bp, Artificial Sequence
  ENSG00000169609_84 (sequence is synthesized)
ttaattacctggagtgcagtggtgcaatcttgacgcactgctacctctcactcctggattcaagcgattctcctgcc

SEQ ID NO: 561263 - DNA, 120 bp, Artificial Sequence
  ENSG00000169612_0 (sequence is synthesized)
aggtggttgtcggattttagaggaaggcgctcggttacattggagaactggagtggtctggagttccacggtgtagtggaccagaggccacctctcctgggcttctcagtgtctcgccgg

SEQ ID NO: 561264 - DNA, 120 bp, Artificial Sequence
  ENSG00000169612_1 (sequence is synthesized)
cggggttcggcctgagctggattgacatagcccttggcggatttaaacaacctaaacattaagcagtacagctgcctcaaacctttgggattttcagaatgactgacactgccgaagctg

SEQ ID NO: 561265 - DNA, 120 bp, Artificial Sequence
  ENSG00000169612_2 (sequence is synthesized)
ttccaaagtttgaagagatgtttgctagtagattcacagaaaatgacaaggagtatcaggaatacctgaaacgccctcctgagtctcctccaattgttgaggaatggaatagcagagctg

SEQ ID NO: 561266 - DNA, 120 bp, Artificial Sequence
  ENSG00000169612_3 (sequence is synthesized)
gtgggaaccaaagaaacagaggcaatcggttgcaagacaacagacagttcagaggcagggacaacagatgggggtggccaagtgacaatcgatccaatcagtggcatggacgatcctggg

SEQ ID NO: 561267 - DNA, 120 bp, Artificial Sequence
  ENSG00000169612_4 (sequence is synthesized)
gtaacaactacccgcaacacagacaagaaccttactatccccagcaatatggacattatggttacaaccagcggcctccttacggttactactgatagaaatgttggcagcttttagtaa

SEQ ID NO: 561268 - DNA, 120 bp, Artificial Sequence
  ENSG00000169612_5 (sequence is synthesized)
aagcatttactctgttaccatgagaaaagtttgggtgtcttctgttggtcatagttttacatctgattttacagaatggattattgattttttggaagttgagactttaaaaaaaataga

SEQ ID NO: 561269 - DNA, 120 bp, Artificial Sequence
  ENSG00000169612_6 (sequence is synthesized)
cttgcgaaatgcgatggttgctgggaatacctgaaactgtggattatattgcttgacttctacctcagaatcttctttgtttcatgacttaatagtgctttaagtttggtatattatttg

SEQ ID NO: 561270 - DNA, 120 bp, Artificial Sequence
  ENSG00000169612_7 (sequence is synthesized)
acctctaggaattctttgttttacacagaaataaaaattttaaaatagaaaatgcttttactttgtaaggtaagagagtatccatatgcttagatgtgctcgtttctaaaattctagagg

SEQ ID NO: 561271 - DNA, 120 bp, Artificial Sequence
  ENSG00000169612_8 (sequence is synthesized)
ttgatataatcagctcatgaatgcacagctatgctttttgtgatagattgtacataacatcagcagttgaaaggtaaaacaattgcttttttttttttttgcatttgttaagtgactatg

SEQ ID NO: 561272 - DNA, 120 bp, Artificial Sequence
  ENSG00000169612_9 (sequence is synthesized)
gtactttgtgattccttaatctatagatgagtcagctccacacttgagtctctttttagagggaaatcagtaataaagctgtaaaataaggaaggaatcattgtcagtttgtgtcttgat

SEQ ID NO: 561273 - DNA, 120 bp, Artificial Sequence
  ENSG00000169612_10 (sequence is synthesized)
ctggtggtggttgggataagggtacacatcattttatacaaacactaaagctttttgctaacaacatagcaggtcaaaattcacacataagaaagtttaactctgtactgttcacacttt

SEQ ID NO: 561274 - DNA, 120 bp, Artificial Sequence
  ENSG00000169612_11 (sequence is synthesized)
ttaatcctgtaaataatgctgcattttgatggttcttacttttttggtatttaatgtgggctgattttacaatgttatattcacttccagatgcatacctctgctgctttctctcctata

SEQ ID NO: 561275 - DNA, 120 bp, Artificial Sequence
  ENSG00000169612_12 (sequence is synthesized)
aatagtgatgctataaacttcctttcacagagatcattctatttcaaatcactttaatgattattacaatgatttcattcaaataaaaattttaaaatatttaagcatcttcactcccaa

SEQ ID NO: 561276 - DNA, 120 bp, Artificial Sequence
  ENSG00000169618_0 (sequence is synthesized)
acgcctcgccaagagcccgcacctcggcgcctcacggccaccggaggcggggacagggagtccggcgcgggccgggtcgggggatctgcagcggcggcgcgaaggtaactcccccgccag

SEQ ID NO: 561277 - DNA, 120 bp, Artificial Sequence
  ENSG00000169618_1 (sequence is synthesized)
agccgggaaagagccccgagcagaggaggaagggagcggggacctgcccttcgcctgccggcttctggaagaagcgtctcctgatccggccccggaataagaaacccggaccttgcctgc

SEQ ID NO: 561278 - DNA, 120 bp, Artificial Sequence
  ENSG00000169618_2 (sequence is synthesized)
cgggctccgcgatgccgcaggtttagaatggagctcagataccataccccaaagatgctggcagagacattctgactcattaagggagagctggctgatagcagagaggggtgacatcag

SEQ ID NO: 561279 - DNA, 120 bp, Artificial Sequence
  ENSG00000169618_3 (sequence is synthesized)
ccttgcagacattgccctggggaattctgagcagtgttgctcacagcaccacctggccagatggagaccaccatggggttcatggatgacaatgccaccaacacttccaccagcttcctt

SEQ ID NO: 561280 - DNA, 120 bp, Artificial Sequence
  ENSG00000169618_4 (sequence is synthesized)
tctgtgctcaaccctcatggagcccatgccacttccttcccattcaacttcagctacagcgactatgatatgcctttggatgaagatgaggatgtgaccaattccaggacgttctttgct

SEQ ID NO: 561281 - DNA, 120 bp, Artificial Sequence
  ENSG00000169618_5 (sequence is synthesized)
gccaagattgtcattgggatggccctggtgggcatcatgctggtctgcggcattggaaacttcatctttatcgctgccctggtccgctacaagaaactgcgcaacctcaccaacctgctc

SEQ ID NO: 561282 - DNA, 120 bp, Artificial Sequence
  ENSG00000169618_6 (sequence is synthesized)
atcgccaacctggccatctctgacttcctggtggccattgtctgctgcccctttgagatggactactatgtggtgcgccagctctcctgggagcacggccacgtcctgtgcacctctgtc

SEQ ID NO: 561283 - DNA, 120 bp, Artificial Sequence
  ENSG00000169618_7 (sequence is synthesized)
aactacctgcgcactgtctctctctatgtctccaccaatgccctgctggccatcgccattgacaggtatctggctattgtccatccgctgagaccacggatgaagtgccaaacagccact

SEQ ID NO: 561284 - DNA, 120 bp, Artificial Sequence
  ENSG00000169618_8 (sequence is synthesized)
ggcctgattgccttggtgtggacggtgtccatcctgatcgccatcccttccgcctacttcaccaccgagacggtcctcgtcattgtcaagagccaggaaaagatcttctgcggccagatc

SEQ ID NO: 561285 - DNA, 120 bp, Artificial Sequence
  ENSG00000169618_9 (sequence is synthesized)
tggcctgtggaccagcagctctactacaagtcctacttcctctttatctttggcatagaattcgtgggccccgtggtcaccatgaccctgtgctatgccaggatctcccgggagctctgg

SEQ ID NO: 561286 - DNA, 120 bp, Artificial Sequence
  ENSG00000169618_10 (sequence is synthesized)
ttcaaggcggtccctggattccagacagagcagatccgcaagaggctgcgctgccgcaggaagacggtcctggtgctcatgtgcatcctcaccgcctacgtgctatgctgggcgcccttc

SEQ ID NO: 561287 - DNA, 120 bp, Artificial Sequence
  ENSG00000169618_11 (sequence is synthesized)
tacggcttcaccatcgtgcgcgacttcttccccaccgtgtttgtgaaggagaagcactacctcactgccttctacatcgtcgagtgcatcgccatgagcaacagcatgatcaacactctg

SEQ ID NO: 561288 - DNA, 120 bp, Artificial Sequence
  ENSG00000169618_12 (sequence is synthesized)
tgcttcgtgaccgtcaagaacgacaccgtcaagtacttcaaaaagatcatgttgctccactggaaggcttcttacaatggcggtaagtccagtgcagacctggacctcaagacaattggg

SEQ ID NO: 561289 - DNA, 120 bp, Artificial Sequence
  ENSG00000169618_13 (sequence is synthesized)
atgcctgccaccgaagaggtggactgcatcagactaaaataaccccctggactttgcaaagtttaaacacaaagcagggtcctgtggacactgactagtgtgcttggatgcacatcaacc

SEQ ID NO: 561290 - DNA, 120 bp, Artificial Sequence
  ENSG00000169618_14 (sequence is synthesized)
tggaactttttgtttgctgcagagggtaaagtaaatggaccactctgtgagcaatgttttcaaggagctcagagtttctaaaatgcatgtgaccagacactatcaacagtggcatttgct

SEQ ID NO: 561291 - DNA, 120 bp, Artificial Sequence
  ENSG00000169618_15 (sequence is synthesized)
gaatgtctaatttacacgccagtaggtactggtaaaacctatatatgttgatgacatttagttggcaaaatgaaattggaattaaaccaaggaaaatgtggtggtgtagatagaaataag

SEQ ID NO: 561292 - DNA, 120 bp, Artificial Sequence
  ENSG00000169618_16 (sequence is synthesized)
ggagtttccacaaaagaactggagtaggtatctaggattgcagtacatgtgttcgtagtgtgagagtatctctgggactattcttgcactggacttcatgcctaacatttgcaaggctgg

SEQ ID NO: 561293 - DNA, 120 bp, Artificial Sequence
  ENSG00000169618_17 (sequence is synthesized)
gcatgcatgtgcacggacatcccagtattcatggccaagttctgtgcaaactcttcctcccacactgctctatggccaccctcaggcccagggctctgcacataggtggtaaggctcttc

SEQ ID NO: 561294 - DNA, 120 bp, Artificial Sequence
  ENSG00000169618_18 (sequence is synthesized)
atcagaaggactggcttggcgaagaagacacatagaccctggatgccatttggacagggaattatggggttctgggtacctggagtaagtccagagggggaagcctggattcagggtaag

SEQ ID NO: 561295 - DNA, 120 bp, Artificial Sequence
  ENSG00000169618_19 (sequence is synthesized)
catgtcccctggctccatggactttttgccttcagtgagaagggagatgcaagtggaggagactcagaacgggaaggcaaaactggaagcatgcagggctcaatgcagctcaggtgtggc

SEQ ID NO: 561296 - DNA, 120 bp, Artificial Sequence
  ENSG00000169618_20 (sequence is synthesized)
aggggctcaggctctccaggtatacagatgataccgttcccacctgttatttcatttggaccaattaggcttccccttaagtccttcccttccctctcacgcctccatgcttgtgaagca

SEQ ID NO: 561297 - DNA, 120 bp, Artificial Sequence
  ENSG00000169618_21 (sequence is synthesized)
tagaatctttgaaaatggacacaatacctcctggatgtggccttcattcatttttctgttttcaccagctctcaaatgtgagtgatgaagagttccctcctaaccagacagcatggtaag

SEQ ID NO: 561298 - DNA, 120 bp, Artificial Sequence
  ENSG00000169618_22 (sequence is synthesized)
gtatcctcatcgatatgatttgagggcaagatatccttattactggcacctgaatcccatcctagtctttgttcctttggattaagacttgctttgcttctaaaataggggtcctcttag

SEQ ID NO: 561299 - DNA, 120 bp, Artificial Sequence
  ENSG00000169618_23 (sequence is synthesized)
gagggataagccacacgtttctagtcctcagcgtgaatgaagtcatgtgatccagtggcaggggatgcaggtcagatgcatcttccagaagtctgggcacccaggaaagaaggggacaca

SEQ ID NO: 561300 - DNA, 120 bp, Artificial Sequence
  ENSG00000169618_24 (sequence is synthesized)
cagataggtagtgtcagaccaaacaatgagcttcagtgaccccataggttgttgaagactcatcccactttctaacctgcctcctttgtttgatgttttgagttttggagtttggtattt

SEQ ID NO: 561301 - DNA, 120 bp, Artificial Sequence
  ENSG00000169618_25 (sequence is synthesized)
tggagttggaagatctgagagccagacttgactctgtcaactgtgtagccctgggcaaagcctctccgaggggacaaaggtaacacctttgtccttctgtggtaccttctgtgatacctg

SEQ ID NO: 561302 - DNA, 120 bp, Artificial Sequence
  ENSG00000169618_26 (sequence is synthesized)
tgataccttctgactgagtggctatgagaagccaatgagacaatacgtgggagatgccttcaaccacacaagttatcaaaaggatgggctaggaactacgtgtagtgcgcctggacaaga

SEQ ID NO: 561303 - DNA, 120 bp, Artificial Sequence
  ENSG00000169618_27 (sequence is synthesized)
aaaacctcttactttggcttgtgtatccagaaacctggccgtctccacttttatttttctttgtgtaaattattcctttgtgcttcataacagtgctgtatgcattatgtgcctaatgac

SEQ ID NO: 561304 - DNA, 120 bp, Artificial Sequence
  ENSG00000169618_28 (sequence is synthesized)
atggttgtgcaaacaaggtcatgagatttgctggtagacgcataaaggaaagggtggctgagtctccggttagaagatgagtttaggggtttggatactccagaatcggagtatctttgt

SEQ ID NO: 561305 - DNA, 120 bp, Artificial Sequence
  ENSG00000169618_29 (sequence is synthesized)
gatactagaagtgctgatcatcttcccatgactgttcccagccagcatgaatctgggcaatggaatagttgtttctcagtctgtttttattctcacgagtgtgtaggctacagcgtggac

SEQ ID NO: 561306 - DNA, 120 bp, Artificial Sequence
  ENSG00000169618_30 (sequence is synthesized)
ttgtctttttcttatttaactctagagcagcgcacttacaaggttatttaagtggcacctgtatgacatgttcccctccaaatatagtcaactccttattttgggcagcaaagtttattt

SEQ ID NO: 561307 - DNA, 120 bp, Artificial Sequence
  ENSG00000169618_31 (sequence is synthesized)
tgtatagttactttatttccctgaaagacacattacaaaaacctatttatttcttcccatttatcacccagtagacttaccctacaatttaatcagaatgctcttggagagtaaaattaa

SEQ ID NO: 561308 - DNA, 120 bp, Artificial Sequence
  ENSG00000169618_32 (sequence is synthesized)
ttaaaatattagcctaaatcaaaaatgcattggagggccatttttattttttatataagatcatatattgcattctaaaatctggaaggttagcttttgtattaaaaagttaaaaatgat

SEQ ID NO: 561309 - DNA, 120 bp, Artificial Sequence
  ENSG00000169618_33 (sequence is synthesized)
acaatttattgtcattatgttcaccgctttcattaagaatgctaaacaagagttgattgtattaaacaggagctttttatatgcggcaaccaaagcccactctgcttttcagcctaaaat

SEQ ID NO: 561310 - DNA, 120 bp, Artificial Sequence
  ENSG00000169618_34 (sequence is synthesized)
gtatcaatttttcactcaactatctgtgttacttccaaatattagtgtctgcttgtaattttgtagtgaatgagggtgttgtgttgttatcaagtgaaatgaaaatacttggatatacag

SEQ ID NO: 561311 - DNA, 120 bp, Artificial Sequence
  ENSG00000169621_0 (sequence is synthesized)
gagaggaccggcgcagccgcggggagcctttgaggccctccctcggtgttttttcccagggcgtgggcttgccccgcgcgtgtctgtggagggcggaaacagcggaggggccagtctcct

SEQ ID NO: 561312 - DNA, 120 bp, Artificial Sequence
  ENSG00000169621_1 (sequence is synthesized)
ggcgaaggggcctaatccttgcccgccatgtccgggggcttcgagctgcagccgcgggacggcggtccccgggtggccctggcgcccggggagacggtgatcggccgcgggccgctgctg

SEQ ID NO: 561313 - DNA, 120 bp, Artificial Sequence
  ENSG00000169621_2 (sequence is synthesized)
ggaataacagacaagagagtatccagaagacatgccattcttgaggtggcaggtggtcagctgcgaatcaaaccgatacacacaaatccatgtttttaccagtcttcagagaagagtcag

SEQ ID NO: 561314 - DNA, 120 bp, Artificial Sequence
  ENSG00000169621_3 (sequence is synthesized)
ctcttaccattgaagccaaatctatggtgctatttgaatcctggagacagcttttctttgttagttgacaaatacattttccgcattctctctataccctctgaagtggaaatgcaatgt

SEQ ID NO: 561315 - DNA, 120 bp, Artificial Sequence
  ENSG00000169621_4 (sequence is synthesized)
accttaagaaacagtcaagtgcttgatgaagataatatattgaatgaaacaccaaaatcccccgtgattaatttacctcatgagactactggtgcctcacaactggaaggaagcacagaa

SEQ ID NO: 561316 - DNA, 120 bp, Artificial Sequence
  ENSG00000169621_5 (sequence is synthesized)
atagccaagacccagatgactcccacaaatagtgtgtctttcctaggtgaaaatagagactgcaataagcagcagccaatccttgccgagaggaaaagaatccttccaacttggatgtta

SEQ ID NO: 561317 - DNA, 120 bp, Artificial Sequence
  ENSG00000169621_6 (sequence is synthesized)
gcagaacatttaagtgatcaaaacctttcagtaccagcaatcagtggaggtaatgtaatccagggaagtggaaaagaagaaatctgcaaagataaatcccagctaaacacaacccagcaa

SEQ ID NO: 561318 - DNA, 120 bp, Artificial Sequence
  ENSG00000169621_7 (sequence is synthesized)
ggaagaaggcaattaatttcatcaggaagttcagaaaatacatcagcagaacaagacacaggagaagagtgcaaaaatactgatcaggaagagtctaccatttcatccaaggaaatgcca

SEQ ID NO: 561319 - DNA, 120 bp, Artificial Sequence
  ENSG00000169621_8 (sequence is synthesized)
caatcattttctgcaatcacattaagtaacacagagatgaataatattaagactaatgcacagagaaacaaacttccaatagaggaacttggtaaagtttctaaacataaaattgccact

SEQ ID NO: 561320 - DNA, 120 bp, Artificial Sequence
  ENSG00000169621_9 (sequence is synthesized)
aaaagaacaccacataaagaagatgaggcaatgagctgttctgaaaattgttcgagtgcccagggcgactcacttcaggatgagtctcaagggtctcattctgagtccagctctaatccc

SEQ ID NO: 561321 - DNA, 120 bp, Artificial Sequence
  ENSG00000169621_10 (sequence is synthesized)
tccaatcctgaaactttgcatgcaaaggcaactgattcagttctacaaggttctgaaggaaacaaggtcaagaggacatcctgcatgtatggggcaaactgctataggaagaatcctgtt

SEQ ID NO: 561322 - DNA, 120 bp, Artificial Sequence
  ENSG00000169621_11 (sequence is synthesized)
cattttcaacattttagccatcctggtgatagtgattatggaggtgtacaaatcgtgggccaagatgagactgatgaccggcctgaatgtccctatggaccatcctgttataggaagaat

SEQ ID NO: 561323 - DNA, 120 bp, Artificial Sequence
  ENSG00000169621_12 (sequence is synthesized)
ccccagcacaagatagaatatagacataatacgcttccagtgagaaatgttttagatgaagataatgataatgttgggcaacccaatgagtatgacctgaacgacagctttctagatgat

SEQ ID NO: 561324 - DNA, 120 bp, Artificial Sequence
  ENSG00000169621_13 (sequence is synthesized)
gaggaagaagactatgagccaacagatgaagattctgactgggaaccaggaaaggaagatgaagagaaggaagatgtggaagagcttttgaaagaagcaaaaaggtttatgaaaagaaaa

SEQ ID NO: 561325 - DNA, 120 bp, Artificial Sequence
  ENSG00000169621_14 (sequence is synthesized)
tagtaactaacttctgtagtcatatctgccttacatttactttttctttgtgggaaaacatttatgaactaaggaggtacttaagtgacagttattttccttcttttgatagttaatgac

SEQ ID NO: 561326 - DNA, 120 bp, Artificial Sequence
  ENSG00000169621_15 (sequence is synthesized)
tggaaataggaagacagagaaggtagagtaaaaatggatattttttatgtactttgtatattggtaataaaaagtaaaagccataggttgcataaaactttggtctttttaaattttttt

SEQ ID NO: 561327 - DNA, 120 bp, Artificial Sequence
  ENSG00000169621_16 (sequence is synthesized)
ccaaagattatggagtactctgcaagtataaccaggcaaagtacatgaaaacatgcctcttttcattgttactgaagtaattctgtaagcagaaccaggctttaaaaaatgcagccatta

SEQ ID NO: 561328 - DNA, 120 bp, Artificial Sequence
  ENSG00000169621_17 (sequence is synthesized)
cataatggcgttttttttctagtaccttagatgtgagctttgcaatttcacttactacttttatccttcaaaacttgggaagattggttccaaatgggtactgaaaatagattcaactag

SEQ ID NO: 561329 - DNA, 120 bp, Artificial Sequence
  ENSG00000169621_18 (sequence is synthesized)
gctgtagaagagaaatgttcaccatgtagggaatgttattttgtgttccacatctgcaatttactgtatgtttgaatttaaaagtaaaaaaactcaaaaaacttgaccttttttttcaaa

SEQ ID NO: 561330 - DNA, 120 bp, Artificial Sequence
  ENSG00000169621_19 (sequence is synthesized)
ctaaagtcctagctgattattttaactctcagtgtgctgtctttatattaagaatagagaaacgacataactttctcaaatggcattagttttgccttagtttttttgacctcagatgaa

SEQ ID NO: 561331 - DNA, 120 bp, Artificial Sequence
  ENSG00000169621_20 (sequence is synthesized)
agtagcaagttgtttgccagttgaaagttcaagattctggcctcccatatcaagaagaaaccacttattctccagttttacaaagtatctttctgtatttctgttctaaaactactttaa

SEQ ID NO: 561332 - DNA, 120 bp, Artificial Sequence
  ENSG00000169621_21 (sequence is synthesized)
gccctataatgctcttcatattacgtgactttgaattgttaaaatgtagtttagaatctttaataacagttgggttgtgtacacagagcaggagatatttattgaaatcataaatcacta

SEQ ID NO: 561333 - DNA, 120 bp, Artificial Sequence
  ENSG00000169621_22 (sequence is synthesized)
caggagatatttattgaaatcataaatcactaagccaaaagaatctttgttaaatgctattattttctactctaaaggaacctaaaaatttatatcttaaaagatcaaaacatatttata

SEQ ID NO: 561334 - DNA, 120 bp, Artificial Sequence
  ENSG00000169621_23 (sequence is synthesized)
atctcccagtaattatacaatatttaatatttacttaaactggaacaagaataagataaacatttctctagactataacctattattctgatttttatctcttattgttatttgggaact

SEQ ID NO: 561335 - DNA, 120 bp, Artificial Sequence
  ENSG00000169621_24 (sequence is synthesized)
ttccccttataatgtccctttagccttggtagtataacaaatctacgaatgtaatatttaacttattctcatccctgccactaacttaatccttgaagtgttacataatctactcctagg

SEQ ID NO: 561336 - DNA, 120 bp, Artificial Sequence
  ENSG00000169621_25 (sequence is synthesized)
tatatacccagaggaattgaaaacatttccacataaaaactgtacacaatgtcaatagaagcattattcttaacagccaaaaagtataaacacccaaagtctatcaactatcaactgggt

SEQ ID NO: 561337 - DNA, 120 bp, Artificial Sequence
  ENSG00000169621_26 (sequence is synthesized)
gaatggataagcaaaacgtggtatatctgtgcaatggaatattatttggtcataaaaaggaataaagtactgatacatgctacaagatagatgaaccttgaaggcaagtaaaagaagcca

SEQ ID NO: 561338 - DNA, 120 bp, Artificial Sequence
  ENSG00000169621_27 (sequence is synthesized)
gacacaaaaggccacatactgtatgaactcatttatatgaaatttccaaaacaggcaaatccataaagacagaaagcaaatttgtggttgccagggacttggggaggaagaatggggagt

SEQ ID NO: 561339 - DNA, 120 bp, Artificial Sequence
  ENSG00000169621_28 (sequence is synthesized)
gactgctaatgagtataggatttccttttgagtgataaaaatgttctaagattagatggcagtgatggttgcacaactctgtaaatatattacaaacaatgcattgtacactttcaaagg

SEQ ID NO: 561340 - DNA, 120 bp, Artificial Sequence
  ENSG00000169621_29 (sequence is synthesized)
gtagatttcattgcacgtgaactatatatttcaataaatctgtcacaaaaaagtaatgcaaagggtaataccagtcttttagaaggaaaaaaatatttaatatcaaaggatattcttcgt

SEQ ID NO: 561341 - DNA, 120 bp, Artificial Sequence
  ENSG00000169621_30 (sequence is synthesized)
agtaatgtaatagttcatggtagctgcttttaacgatacagttttaatgcaactttcataatcatcctgaagacacttttgagtataactattgtataaataaatgtatagcttaattga

SEQ ID NO: 561342 - DNA, 120 bp, Artificial Sequence
  ENSG00000169621_31 (sequence is synthesized)
gcctgcaagaggagtcagagggcaaagggtgagacccttccaccggtccagctggactctagcctcagggacgtcctgctcctgggggcagtctcaggtaaaaccaaaggaagaggattg

SEQ ID NO: 561343 - DNA, 120 bp, Artificial Sequence
  ENSG00000169621_32 (sequence is synthesized)
tcccaccctcttctggacaactcctgacattctgtgatattcagcattcaccataaacattgcatgattcagttctccttgatatcttggtgcttggactcttcactgttggcatcatta

SEQ ID NO: 561344 - DNA, 120 bp, Artificial Sequence
  ENSG00000169621_33 (sequence is synthesized)
ggtcagcaggtgaacactcaggattgtttctcttctgttagtagagcaccaaaagacagggtctggctctgtcacctaagccagagggcaatggtacaatcaccattgactgcagtctca

SEQ ID NO: 561345 - DNA, 120 bp, Artificial Sequence
  ENSG00000169621_34 (sequence is synthesized)
ggctcaagcaatcctcccgcctcagcttcccaagcagctgggactacaggcatgccccaccatgtccagggaatggtgtctggacccagagaataactggatcttcaaggaaggaagaga

SEQ ID NO: 561346 - DNA, 120 bp, Artificial Sequence
  ENSG00000169621_35 (sequence is synthesized)
ggaagagaaatcttcagaagaacatggattttccccactggtagttagttgtctcttccatatccagaaataacttgaacacgttagacggggccactgtgcatagtgtcctcccaggaa

SEQ ID NO: 561347 - DNA, 120 bp, Artificial Sequence
  ENSG00000169621_36 (sequence is synthesized)
aacgccaagattctccaagacactttcatatcctaagccctgttctgtttgttcttgtgtagtaaattggcaaatttggcagtacagaagacatctctaacctgatgtcacaaagaatca

SEQ ID NO: 561348 - DNA, 120 bp, Artificial Sequence
  ENSG00000169621_37 (sequence is synthesized)
ggagagctggctgatagcagagaggggtgacatcagccttgcagacattgccctggggaattctgagcagtgttgctcacagcaccacctggccagatggagaccaccatggggttcatg

SEQ ID NO: 561349 - DNA, 120 bp, Artificial Sequence
  ENSG00000169621_38 (sequence is synthesized)
gatgacaatgccaccaacacttccaccagcttcctttctgtgctcaaccctcatggagcccatgccacttccttcccattcaacttcagctacagcgactatgatatgcctttggatgaa

SEQ ID NO: 561350 - DNA, 120 bp, Artificial Sequence
  ENSG00000169621_39 (sequence is synthesized)
gatgaggatgtgaccaattccaggacgttctttgctgccaagattgtcattgggatggccctggtgggcatcatgctggtctgcggcattggaaacttcatctttatcgctgccctggtc

SEQ ID NO: 561351 - DNA, 120 bp, Artificial Sequence
  ENSG00000169621_40 (sequence is synthesized)
cgctacaagaaactgcgcaacctcaccaacctgctcatcgccaacctggccatctctgacttcctggtggccattgtctgctgcccctttgagatggactactatgtggtgcgccagctc

SEQ ID NO: 561352 - DNA, 120 bp, Artificial Sequence
  ENSG00000169621_41 (sequence is synthesized)
tcctgggagcacggccacgtcctgtgcacctctgtcaactacctgcgcactgtctctctctatgtctccaccaatgccctgctggccatcgccattgacagagtaactgtgatgtgacag

SEQ ID NO: 561353 - DNA, 120 bp, Artificial Sequence
  ENSG00000169621_42 (sequence is synthesized)
gatacgacagtgaataagacaaaaaaaactccttgctttcctggagcttataaccaaaggatggagagagatccagtcaggcaaacacaaaaggaaggtatctggctattgtccatccgc

SEQ ID NO: 561354 - DNA, 120 bp, Artificial Sequence
  ENSG00000169621_43 (sequence is synthesized)
tgagaccacggatgaagtgccaaacagccactggcctgattgccttggtgtggacggtgtccatcctgatcgccatcccttccgcctacttcaccaccgagacggtcctcgtcattgtca

SEQ ID NO: 561355 - DNA, 120 bp, Artificial Sequence
  ENSG00000169621_44 (sequence is synthesized)
agagccaggaaaagatcttctgcggccagatctggcctgtggaccagcagctctactacaagtcctacttcctctttatctttggcatagaattcgtgggccccgtggtcaccatgaccc

SEQ ID NO: 561356 - DNA, 120 bp, Artificial Sequence
  ENSG00000169621_45 (sequence is synthesized)
tgtgctatgccaggatctcccgggagctctggttcaaggcggtccctggattccagacagagcagatccgcaagaggctgcgctgccgcaggaagacggtcctggtgctcatgtgcatcc

SEQ ID NO: 561357 - DNA, 120 bp, Artificial Sequence
  ENSG00000169621_46 (sequence is synthesized)
tcaccgcctacgtgctatgctgggcgcccttctacggcttcaccatcgtgcgcgacttcttccccaccgtgtttgtgaaggagaagcactacctcactgccttctacatcgtcgagtgca

SEQ ID NO: 561358 - DNA, 120 bp, Artificial Sequence
  ENSG00000169621_47 (sequence is synthesized)
tcgccatgagcaacagcatgatcaacactctgtgcttcgtgaccgtcaagaacgacaccgtcaagtacttcaaaaagatcatgttgctccactggaaggcttcttacaatggcggtaagt

SEQ ID NO: 561359 - DNA, 120 bp, Artificial Sequence
  ENSG00000169621_48 (sequence is synthesized)
ccagtgcagacctggacctcaagacaattgggatgcctgccaccgaagaggtggactgcatcagactaaaataaccccctggactttgcaaagtttaaacacaaagcagggtcctgtgga

SEQ ID NO: 561360 - DNA, 120 bp, Artificial Sequence
  ENSG00000169621_49 (sequence is synthesized)
cactgactagtgtgcttggatgcacatcaacctggaactttttgtttgctgcagagggtaaagtaaatggaccactctgtgagcaatgttttcaaggagctcagagtttctaaaatgcat

SEQ ID NO: 561361 - DNA, 120 bp, Artificial Sequence
  ENSG00000169621_50 (sequence is synthesized)
gtgaccagacactatcaacagtggcatttgctgaatgtctaatttacacgccagtaggtactggtaaaacctatatatgttgatgacatttagttggcaaaatgaaattggaattaaacc

SEQ ID NO: 561362 - DNA, 120 bp, Artificial Sequence
  ENSG00000169621_51 (sequence is synthesized)
aacaagcttgaggactaccactggaagtttcagaaggtggagcagaatgggttctgtggcaaccaaaggacatcttcaggaatatgcaccagggtctaaagcatatgggagcaaagctga

SEQ ID NO: 561363 - DNA, 120 bp, Artificial Sequence
  ENSG00000169621_52 (sequence is synthesized)
tcggcttcagtgagagtgtggttaatggtgtcaaagtaggctttctggcttctcctaggccactcattcagtgataggggctgtgtctcaaagcccagggaactcacttcattgatttgg

SEQ ID NO: 561364 - DNA, 120 bp, Artificial Sequence
  ENSG00000169621_53 (sequence is synthesized)
aaccatgtaagccactagaatgttaaactaatgctctggcactgaggtgggtatcttgagcatttgtgactttacagtttattatctgtattggttaaaatatatatgaacatatgctaa

SEQ ID NO: 561365 - DNA, 120 bp, Artificial Sequence
  ENSG00000169627_0 (sequence is synthesized)
aaggtagcgtggccggcgcccgagctggggttgtgtccctgctgggctgccgttccagctggactgccgccatggaactcagcgccgaatacctccgcgagaagctgcagcgggacctgg

SEQ ID NO: 561366 - DNA, 120 bp, Artificial Sequence
  ENSG00000169627_1 (sequence is synthesized)
aggtggaggacacgaccctcaaccgttgctcctgtagcttccgagtcctggtggtgtcggccaagttcgaggggaaaccgctgcttcagagacacaggctggtgaacgcgtgcctagcag

SEQ ID NO: 561367 - DNA, 120 bp, Artificial Sequence
  ENSG00000169627_2 (sequence is synthesized)
aagagctcccgcacatccatgcctttgaacagaaaaccctgaccccagaccagtgggcacgtgagcgacagaaatgagggactgggatctgcacagccattaaattataaatctggacca

SEQ ID NO: 561368 - DNA, 120 bp, Artificial Sequence
  ENSG00000169627_3 (sequence is synthesized)
cttcctcccggcacagaaggcctccccctctcaccagggccctcgcccgctggtccgccaggccccgccttttttgcggcccccattgtgctgctggacccgacgagcagtgttgacagt

SEQ ID NO: 561369 - DNA, 120 bp, Artificial Sequence
  ENSG00000169627_4 (sequence is synthesized)
gaaccccacgtagacgcggccccggtaccgggggttcaggcagtagagcaggtagacgccgaaaaagcgccctggcctcgccgcgacccccgcgggacccatcgggccttggggttcggg

SEQ ID NO: 561370 - DNA, 120 bp, Artificial Sequence
  ENSG00000169627_5 (sequence is synthesized)
aaccacagcagggggttgattgccgtgacctagggtccaggggagggctggatcgctagggctgcagggtgcttgcttcggaacaagctctcggggactatccggaggcagcctgcagga

SEQ ID NO: 561371 - DNA, 120 bp, Artificial Sequence
  ENSG00000169627_6 (sequence is synthesized)
agccgtagcgccggtacgtgcccctctcctgtctggaggcgggtgtagaagtccgaccgcggaagccagactgctgtccagtcggcgagcgcgtaccattcagcatcggctccgcccgag

SEQ ID NO: 561372 - DNA, 120 bp, Artificial Sequence
  ENSG00000169627_7 (sequence is synthesized)
gcaacctgactcccgcactccccctggcgtggctcagggaccttgaggatcccgccttcgtgacccctgcttcgagtatttcgatgtagaccctctctccaagtacgtgttcccacggcc

SEQ ID NO: 561373 - DNA, 120 bp, Artificial Sequence
  ENSG00000169627_8 (sequence is synthesized)
tggggactacaaccttggggacaccagtctcttgggtcaccctagcctcggggtgtgcgatcaccgctggccttttcctaaccccatctctcgccccaggctggtgaacgcgtgcctagc

SEQ ID NO: 561374 - DNA, 120 bp, Artificial Sequence
  ENSG00000169629_0 (sequence is synthesized)
acacagtgctgaggcagaacgcaggttcgtcacagtgggcctccgtgggcggcgccgcacgctcgtcacagtgggcctccgccggctacgccgctgcttcagtggcttgcaggcactttc

SEQ ID NO: 561375 - DNA, 120 bp, Artificial Sequence
  ENSG00000169629_1 (sequence is synthesized)
ctcttggaagtggcgactgctgcggggctgagcggtgctcgcacgcgtctcgggagccaggttggcggcgcgatgaggcgcagcaaggccgatgtggagcggtacgtcgcctcggtgctg

SEQ ID NO: 561376 - DNA, 120 bp, Artificial Sequence
  ENSG00000169629_2 (sequence is synthesized)
ggtctcaccccgtcgcctcgacagaagtcaatgaaaggattctattttgcaaagctgtattatgaagctaaagaatatgatcttgctaaaaaatacatatgtacttacattaatgtgcaa

SEQ ID NO: 561377 - DNA, 120 bp, Artificial Sequence
  ENSG00000169629_3 (sequence is synthesized)
gagagggatcccaaagctcacagatttctgggtcttctttatgaattggaagaaaacacagagaaagccgttgaatgttacaggcgttcagtggaattaaacccaacacaaaaagatctt

SEQ ID NO: 561378 - DNA, 120 bp, Artificial Sequence
  ENSG00000169629_4 (sequence is synthesized)
gtgttgaagattgcagaattgctttgtaaaaatgatgttactgatggaagagcaaaatactgggtcgaaagagcagcaaaacttttcccaggaagtcctgcaatttataaactaaaggaa

SEQ ID NO: 561379 - DNA, 120 bp, Artificial Sequence; identical to SEQ ID NO: 437137
  ENSG00000169629_5 (sequence is synthesized)

SEQ ID NO: 561380 - DNA, 120 bp, Artificial Sequence
  ENSG00000169629_6 (sequence is synthesized)
tcaactaaaagattgaaggatgctgtggcccactgccatgaggcagagaggaacatagctttgcgttcaagtttagagtggaattcgtgtgttgtacagacccttaaggaatatctggag

SEQ ID NO: 561381 - DNA, 120 bp, Artificial Sequence
  ENSG00000169629_7 (sequence is synthesized)
tctttacagtgtttggagtctgataaaagtgactggcgagcaaccaatacagacttactgctggcctatgctaatcttatgcttcttacgctttccactagagatgtgcaggaaaataga

SEQ ID NO: 561382 - DNA, 120 bp, Artificial Sequence
  ENSG00000169629_8 (sequence is synthesized)
gctcttcagtctgcgaaatcttctttgggtggaaatgatgaactgtcagctactttcttagaaatgaaaggacatttctatatgtatgctggttctctgctcttgaagatgggtcagcat

SEQ ID NO: 561383 - DNA, 120 bp, Artificial Sequence
  ENSG00000169629_9 (sequence is synthesized)
cttagaaatgaaaggacatttctatatgtatgctggttctctgctcttgaagatgggtcagcatggtaataatgttcaatggcgagctctttctgagctggctgcattgtgctatctcat

SEQ ID NO: 561384 - DNA, 120 bp, Artificial Sequence
  ENSG00000169629_10 (sequence is synthesized)
ggtaaagctggacaaaatctgctggaaatgatggcctgtgaccgactgagccaatcagggcacatgttgctaagcttaagtcgtggcaagcaagatttcttaaaagaggttgttgaaact

SEQ ID NO: 561385 - DNA, 120 bp, Artificial Sequence
  ENSG00000169629_11 (sequence is synthesized)
tttgccaacaaaattgggcagtctgcgttatatgatgctctgttttctagtcagtcacctaaggatacatcttttcttggtagcgatgatattggaaaaattgatgtacaagaaccagag

SEQ ID NO: 561386 - DNA, 120 bp, Artificial Sequence
  ENSG00000169629_12 (sequence is synthesized)
aagatttggctagatacgatgttggtgctattcgagcacataatggtagtcttcagcatcttacttggcttggcttacagtggaattcattgcctgctttacctggaatccgaaaatggc

SEQ ID NO: 561387 - DNA, 120 bp, Artificial Sequence
  ENSG00000169629_13 (sequence is synthesized)
tggctaaaacagcttttccatcgtttgccccatgaaacctcaaggcttgaaacaaatgcgcctgaatcaatatgtattttagatcttgaagtatttctccttggagtagtatataccagc

SEQ ID NO: 561388 - DNA, 120 bp, Artificial Sequence
  ENSG00000169629_14 (sequence is synthesized)
cacttacaattaaaggagaaatgtaattctcaccatagctcctatcagccgttatgcctgccctttcctgtgtgtaaacagctttgtacagaaagacaaaaatcttggtgggatgcggtt

SEQ ID NO: 561389 - DNA, 120 bp, Artificial Sequence
  ENSG00000169629_15 (sequence is synthesized)
tgtactctgattcacagaaaagcagtacctggaaacttggcaaaattgagacttctagttcagcatgaaataaacactctaagagcccaggaaaaacatggccttcaacctgctctgctt

SEQ ID NO: 561390 - DNA, 120 bp, Artificial Sequence
  ENSG00000169629_16 (sequence is synthesized)
gtacattgggcaaaataccttcagaaaacgggcagcggtcttaattctttttatggtcaactagaatacatagggagaagtgttcattattggaagaaagttttgccattgttgaagata

SEQ ID NO: 561391 - DNA, 120 bp, Artificial Sequence
  ENSG00000169629_17 (sequence is synthesized)
ataaagaagaacagtattcctgaacctattgatcctctgtttaaacattttcatagtgtagacattcaggcatcagaaattgttgaatatgaagaagacgcacacataacttttgctata

SEQ ID NO: 561392 - DNA, 120 bp, Artificial Sequence
  ENSG00000169629_18 (sequence is synthesized)
ttggatgcagtaaatggaaatatagaagatgctgtgactgcttttgaatctataaaaagtgttgtttcttattggaatcttgcactgatttttcacaggaaggcagaagacattgaaaat

SEQ ID NO: 561393 - DNA, 120 bp, Artificial Sequence
  ENSG00000169629_19 (sequence is synthesized)
gatgccctttctcctgaagaacaagaagaatgcagaaattatctgacaaagaccagggactacctaataaagattatagatgacggtgattcaaatctttcagtggtcaagaaattgcct

SEQ ID NO: 561394 - DNA, 120 bp, Artificial Sequence
  ENSG00000169629_20 (sequence is synthesized)
gtgcccctggagtctgtaaaacagatgcttaattcagtcatgcaggaactcgaagactatagtgaaggaggtcctctctataaaaatggttctttgcgaaatgcagattcagaaataaaa

SEQ ID NO: 561395 - DNA, 120 bp, Artificial Sequence
  ENSG00000169629_21 (sequence is synthesized)
cattctacaccgtctcctaccaaatattcactatcaccaagtaaaagttacaagtattctcccgaaacaccacctcgatggacagaagatcggaattctttactgaatatgatttgccaa

SEQ ID NO: 561396 - DNA, 120 bp, Artificial Sequence
  ENSG00000169629_22 (sequence is synthesized)
caagtagaggccattaagaaagaaatgcaggagttgaaactaaatagcagtaagtcagcatcccgtcatcgttggcccacagagaattatggaccagactcggtgcctgatggatatcag

SEQ ID NO: 561397 - DNA, 89 bp, Artificial Sequence
  ENSG00000169629_23 (sequence is synthesized)
accagcatataattcccagtatcttctcagaccagcagctaatgttactcccacaaagggttcttctaatacagaatttaagtcaacca

SEQ ID NO: 561398 - DNA, 120 bp, Artificial Sequence
  ENSG00000169629_24 (sequence is synthesized)
cccacaaagggttcttctaatacagaatttaagtcaaccaaagaaggattttccatccctgtgtctgctgatggatttaaatttggcatttcggaaccaggaaatcaagaaaagaaaagg

SEQ ID NO: 561399 - DNA, 120 bp, Artificial Sequence
  ENSG00000169629_25 (sequence is synthesized)
gaaaagcctcttgaaaatgatactggcttacaggctcaggatattaggggccggaagaagggccgtggtgtgatttttggccaaacaagtagcacttttacatttgcagatgttgcaaaa

SEQ ID NO: 561400 - DNA, 120 bp, Artificial Sequence
  ENSG00000169629_26 (sequence is synthesized)
tcaacttcaggagaaggatttcagtttggcaaaaaagacctcaatttcaagggattttcaggtgctggagaaaaattattctcatcacgatacggtaaaatggccaataaagcaaacact

SEQ ID NO: 561401 - DNA, 120 bp, Artificial Sequence
  ENSG00000169629_27 (sequence is synthesized)
tccggtgactttgagaaagatgatgatgcctataagactgaggacagcgatgacatccattttgaaccagtagttcaaatgcctgaaaaagtagaacttgtaacaggagaagaaggtgaa

SEQ ID NO: 561402 - DNA, 120 bp, Artificial Sequence
  ENSG00000169629_28 (sequence is synthesized)
aaagttctgtattcacagggggtaaaactatttagatttgatgctgaggtaaggcagtggaaagaaaggggcttggggaacttaaaaattctcaaaaacgaggtcaatggcaaactaaga

SEQ ID NO: 561403 - DNA, 120 bp, Artificial Sequence
  ENSG00000169629_29 (sequence is synthesized)
atgctgatgcgaagagaacaagtactaaaagtgtgtgctaatcattggataacgactacaatgaacctgaagcccctctctggatcagatagagcatggatgtggtcagccagtgatttc

SEQ ID NO: 561404 - DNA, 120 bp, Artificial Sequence; identical to SEQ ID NO: 17282
  ENSG00000169629_30 (sequence is synthesized)

SEQ ID NO: 561405 - DNA, 120 bp, Artificial Sequence
  ENSG00000169629_31 (sequence is synthesized)
aatgatcaaacaaaagtcactgaggaagaaaataagggttcaggtacaggtgtggccggtgcctcagacacaacaataaaacccaatgctgaaaacactgggcccacattagaatgggat

SEQ ID NO: 561406 - DNA, 120 bp, Artificial Sequence; identical to SEQ ID NO: 17284
  ENSG00000169629_32 (sequence is synthesized)

SEQ ID NO: 561407 - DNA, 120 bp, Artificial Sequence; identical to SEQ ID NO: 17285
  ENSG00000169629_33 (sequence is synthesized)

SEQ ID NO: 561408 - DNA, 120 bp, Artificial Sequence; identical to SEQ ID NO: 17286
  ENSG00000169629_34 (sequence is synthesized)

SEQ ID NO: 561409 - DNA, 120 bp, Artificial Sequence; identical to SEQ ID NO: 17287
  ENSG00000169629_35 (sequence is synthesized)

SEQ ID NO: 561410 - DNA, 120 bp, Artificial Sequence; identical to SEQ ID NO: 17288
  ENSG00000169629_36 (sequence is synthesized)

SEQ ID NO: 561411 - DNA, 120 bp, Artificial Sequence; identical to SEQ ID NO: 17289
  ENSG00000169629_37 (sequence is synthesized)

SEQ ID NO: 561412 - DNA, 120 bp, Artificial Sequence
  ENSG00000169629_38 (sequence is synthesized)
aaaattgctgtagctgtattagaagaaatcacaagagagaggacagatgttattcagggtgatgatgtagcagatgcagcttcagaagttgaagtgtctagcacatctgaaacaacaaca

SEQ ID NO: 561413 - DNA, 120 bp, Artificial Sequence
  ENSG00000169629_39 (sequence is synthesized)
aaagcagtggtttctcctccaaagtttgtatttgtttcagagtctgttaaaagaatttttagtagtgaaaaatcaaaaccatttgcatttggcaacagttctgccactgggtctttgttt

SEQ ID NO: 561414 - DNA, 120 bp, Artificial Sequence; identical to SEQ ID NO: 17292
  ENSG00000169629_40 (sequence is synthesized)

SEQ ID NO: 561415 - DNA, 120 bp, Artificial Sequence; identical to SEQ ID NO: 17293
  ENSG00000169629_41 (sequence is synthesized)

SEQ ID NO: 561416 - DNA, 120 bp, Artificial Sequence; identical to SEQ ID NO: 17294
  ENSG00000169629_42 (sequence is synthesized)

SEQ ID NO: 561417 - DNA, 120 bp, Artificial Sequence; identical to SEQ ID NO: 17295
  ENSG00000169629_43 (sequence is synthesized)

SEQ ID NO: 561418 - DNA, 120 bp, Artificial Sequence
  ENSG00000169629_44 (sequence is synthesized)
agacttcttcctgttataaatacgatgttgcagctcagccctgaagaaaagggaaaacttgctgcggttgctcaagatgaggaagaaaatccttcccgttcttctggatgagcatcctat

SEQ ID NO: 561419 - DNA, 120 bp, Artificial Sequence; identical to SEQ ID NO: 17297
  ENSG00000169629_45 (sequence is synthesized)

SEQ ID NO: 561420 - DNA, 120 bp, Artificial Sequence
  ENSG00000169629_46 (sequence is synthesized)
atatgtgtttgcatttacatatatttgtacatctgtatgacagatgtattttaaaagtttcaacttgaagtaaaagtacaacagcttgaagtgttgataccaggccacagccctctaact

SEQ ID NO: 561421 - DNA, 120 bp, Artificial Sequence; identical to SEQ ID NO: 17299
  ENSG00000169629_47 (sequence is synthesized)

SEQ ID NO: 561422 - DNA, 120 bp, Artificial Sequence; identical to SEQ ID NO: 17300
  ENSG00000169629_48 (sequence is synthesized)

SEQ ID NO: 561423 - DNA, 120 bp, Artificial Sequence; identical to SEQ ID NO: 17301
  ENSG00000169629_49 (sequence is synthesized)

SEQ ID NO: 561424 - DNA, 120 bp, Artificial Sequence; identical to SEQ ID NO: 17302
  ENSG00000169629_50 (sequence is synthesized)

SEQ ID NO: 561425 - DNA, 120 bp, Artificial Sequence; identical to SEQ ID NO: 17303
  ENSG00000169629_51 (sequence is synthesized)

SEQ ID NO: 561426 - DNA, 120 bp, Artificial Sequence; identical to SEQ ID NO: 17304
  ENSG00000169629_52 (sequence is synthesized)

SEQ ID NO: 561427 - DNA, 120 bp, Artificial Sequence; identical to SEQ ID NO: 17305
  ENSG00000169629_53 (sequence is synthesized)

SEQ ID NO: 561428 - DNA, 120 bp, Artificial Sequence; identical to SEQ ID NO: 17306
  ENSG00000169629_54 (sequence is synthesized)

SEQ ID NO: 561429 - DNA, 120 bp, Artificial Sequence; identical to SEQ ID NO: 17307
  ENSG00000169629_55 (sequence is synthesized)

SEQ ID NO: 561430 - DNA, 120 bp, Artificial Sequence; identical to SEQ ID NO: 17308
  ENSG00000169629_56 (sequence is synthesized)

SEQ ID NO: 561431 - DNA, 120 bp, Artificial Sequence; identical to SEQ ID NO: 17309
  ENSG00000169629_57 (sequence is synthesized)

SEQ ID NO: 561432 - DNA, 120 bp, Artificial Sequence; identical to SEQ ID NO: 17310
  ENSG00000169629_58 (sequence is synthesized)

SEQ ID NO: 561433 - DNA, 120 bp, Artificial Sequence; identical to SEQ ID NO: 17311
  ENSG00000169629_59 (sequence is synthesized)

SEQ ID NO: 561434 - DNA, 120 bp, Artificial Sequence
  ENSG00000169629_60 (sequence is synthesized)
ggcctagggggtgggggtgtgcctggatgtgtgttgcgggggtctgaacccttagttaggaccgggggccctcctttccacttcgtgcagtccctggggtctggggcatcctagccatgc

SEQ ID NO: 561435 - DNA, 120 bp, Artificial Sequence
  ENSG00000169629_61 (sequence is synthesized)
gtggggcctccctgctgggattggagaccccctgacagctggggctggtcccagcattttcgctcttcccccagaaggactcagatgcagggtcttctctgctccccgtcacacagaggg

SEQ ID NO: 561436 - DNA, 120 bp, Artificial Sequence
  ENSG00000169629_62 (sequence is synthesized)
tggcacccccgatgggaactctcatttatcaccaaaccagaagataatggagaaactgacagagaagggctgcaagcagctaccgcagggcggtgtgtggatgcagatgggatgggcaga

SEQ ID NO: 561437 - DNA, 120 bp, Artificial Sequence
  ENSG00000169629_63 (sequence is synthesized)
tggaggcgggggccagcatcgctgccttcttgcccctcccagaggaccccaggtccccagctcgggcgccccaccagactgctttcattaaggttttctatagataagatcatgtcaaga

SEQ ID NO: 561438 - DNA, 120 bp, Artificial Sequence; identical to SEQ ID NO: 17361
  ENSG00000169629_64 (sequence is synthesized)

SEQ ID NO: 561439 - DNA, 120 bp, Artificial Sequence; identical to SEQ ID NO: 17362
  ENSG00000169629_65 (sequence is synthesized)

SEQ ID NO: 561440 - DNA, 120 bp, Artificial Sequence; identical to SEQ ID NO: 17363
  ENSG00000169629_66 (sequence is synthesized)

SEQ ID NO: 561441 - DNA, 120 bp, Artificial Sequence; identical to SEQ ID NO: 17360
  ENSG00000169629_67 (sequence is synthesized)

SEQ ID NO: 561442 - DNA, 80 bp, Artificial Sequence
  ENSG00000169635_0 (sequence is synthesized)
acaagcttccaagatggcgctgggcgggcggctgtgagcggcgctcggggcgcgctaggcggggagccgagccgggctgg

SEQ ID NO: 561443 - DNA, 120 bp, Artificial Sequence
  ENSG00000169635_1 (sequence is synthesized)
cgctgaggacaagggccgctggtagggccggccggccggcgggcggagcgccgccgccgacgcacacgaggtgaccaggcattgatgcacccccaggaaggccacgcgctcaggagcccc

SEQ ID NO: 561444 - DNA, 120 bp, Artificial Sequence
  ENSG00000169635_2 (sequence is synthesized)
ccccgccgctggctgctgctcacatggtgtctgggcccttggcactccggtggtgcgcgtgggcagggcgcggggacatggggcccgacatggagctgcccagccactcgaagcagctcc

SEQ ID NO: 561445 - DNA, 120 bp, Artificial Sequence
  ENSG00000169635_3 (sequence is synthesized)
tgctgcagctgaaccagcagaggaccaagggcttcctgtgtgacgtcatcatcatggtggagaactccatcttccgggcccacaagaacgtcctagccgccagcagcatctatttcaagt

SEQ ID NO: 561446 - DNA, 120 bp, Artificial Sequence
  ENSG00000169635_4 (sequence is synthesized)
ccctggtcctgcacgacaacctcatcaacctggacacagacatggtcagctccacagtgttccagcagatcttggacttcatctacacaggcaagctgctgcccagcgaccagccagccg

SEQ ID NO: 561447 - DNA, 120 bp, Artificial Sequence
  ENSG00000169635_5 (sequence is synthesized)
agcccaacttcagcaccctcctcactgccgccagctacctccagctgcccgagttggcagccctctgccgccgcaaactcaagcgagccggcaagccctttggctctgggagggcggggt

SEQ ID NO: 561448 - DNA, 120 bp, Artificial Sequence
  ENSG00000169635_6 (sequence is synthesized)
ccactggcatggggcggcccccccgcagccagcggctgtccacggcctctgtcatccaagctcggtatcaggggctcgtggatgggcgcaagggggcccacgccccccaggagctccccc

SEQ ID NO: 561449 - DNA, 120 bp, Artificial Sequence
  ENSG00000169635_7 (sequence is synthesized)
aagccaaaggctcagacgatgaactctttcttggtggctctaaccaggatagcgtgcaaggtctgggccgggctgtctgcccagctggcggggaggcgggtctggggggctgcagcagca

SEQ ID NO: 561450 - DNA, 120 bp, Artificial Sequence
  ENSG00000169635_8 (sequence is synthesized)
gcaccaacgggagcagcgggggctgcgagcaggagctgggcttggacctgtccaagaaaagcccacccttgccccctgccaccccaggtccccacctcactcccgatgacgcagcccagc

SEQ ID NO: 561451 - DNA, 120 bp, Artificial Sequence
  ENSG00000169635_9 (sequence is synthesized)
tgagcgacagccaacatggctcgccccctgcggcctctgctcctcccgttgccaacagtgcctcttattctgagctggggggcacccctgatgagcccatggatctggagggggccgagg

SEQ ID NO: 561452 - DNA, 120 bp, Artificial Sequence
  ENSG00000169635_10 (sequence is synthesized)
acaaccacctgagcctgctggaggcgcctggtgggcagcctcggaagagcctccggcactccactcggaagaaggagtggggcaagaaggagcctgtggctggctccccctttgagcgga

SEQ ID NO: 561453 - DNA, 120 bp, Artificial Sequence
  ENSG00000169635_11 (sequence is synthesized)
gagaagcagggcccaagggtccctgcccgggagaggagggtgagggggtcggggacagggttcccaatggcatcctggctagtggggctggccctagcgggccctatggggagcccccct

SEQ ID NO: 561454 - DNA, 120 bp, Artificial Sequence
  ENSG00000169635_12 (sequence is synthesized)
acccctgcaaggaggaggaggagaacggcaaggatgcaagtgaagacagtgcgcagagcgggagcgaggggggcagcggccatgccagcgcccactacatgtaccggcaggagggctacg

SEQ ID NO: 561455 - DNA, 120 bp, Artificial Sequence
  ENSG00000169635_13 (sequence is synthesized)
agacggtgtcctacggggacaacttgtatgtgtgcattccctgcgccaagggcttccccagctctgagcagctcaatgcgcacgtggagactcacacggaggaagagctgttcatcaagg

SEQ ID NO: 561456 - DNA, 120 bp, Artificial Sequence
  ENSG00000169635_14 (sequence is synthesized)
aagagggggcctacgagacaggcagtgggggtgccgaggaggaggccgaggacctgtcagcacccagtgcggcctacacggctgagccccggcccttcaagtgttcggtctgcgagaaga

SEQ ID NO: 561457 - DNA, 120 bp, Artificial Sequence
  ENSG00000169635_15 (sequence is synthesized)
cctacaaggacccagccacgctgcggcagcacgagaagacgcactggctgacacggcccttcccctgcaacatctgtggcaaaatgttcacgcagcgcggcaccatgacgcgtcacatgc

SEQ ID NO: 561458 - DNA, 120 bp, Artificial Sequence
  ENSG00000169635_16 (sequence is synthesized)
ggagccacctgggcctgaagcccttcgcctgcgatgagtgtggcatgcgcttcacccgtcagtaccgcctcacggagcacatgcgtgtgcactcgggcgagaaaccttacgagtgccagc

SEQ ID NO: 561459 - DNA, 120 bp, Artificial Sequence
  ENSG00000169635_17 (sequence is synthesized)
tgtgcgggggcaagttcacccagcagcgcaacctcatcagccacctgcgcatgcacacctccccctcctagaagccaaagacccgcgggcgccctctgccaccttgctccccgggaaccc

SEQ ID NO: 561460 - DNA, 120 bp, Artificial Sequence
  ENSG00000169635_18 (sequence is synthesized)
atggaaggagaagcgaggtgatgcagcagcaggggcaagaccctgggtccagtggaggctccgggtggcccctctggcccccactgcccacacccagagctttaatggacagtccgtacc

SEQ ID NO: 561461 - DNA, 120 bp, Artificial Sequence
  ENSG00000169635_19 (sequence is synthesized)
aagcagagccgagaggagggaagccaggggtcccagcccgtctacctccccatcccacccaggcccccagctccccgcgggggccaccgcagggcctgtgggctgggtcacgtgggtctc

SEQ ID NO: 561462 - DNA, 120 bp, Artificial Sequence
  ENSG00000169635_20 (sequence is synthesized)
gctgggacctggtccctttgttgcaggcggcttggagaaagggcagtgggacgctggccacggccagggtggtgtcgggagcaggcctcaccccgctggccgtgtctgtgtgtgtgcacg

SEQ ID NO: 561463 - DNA, 120 bp, Artificial Sequence
  ENSG00000169635_21 (sequence is synthesized)
tgtgcttgtgtctgtgcgggcgcgtgcagccctggttctgcagggaacaggtgctgggggtgcagatccctccctccttgagccagggtggcactgttcactggcgctgggacagtcagg

SEQ ID NO: 561464 - DNA, 120 bp, Artificial Sequence
  ENSG00000169635_22 (sequence is synthesized)
gtgaccccaccgcctacctctctacatctaaagagccctctgggcctgtgttgctgttattcctactgatctgttcctctgtttttctttttgatttttgttttttaaaccaaaacagac

SEQ ID NO: 561465 - DNA, 120 bp, Artificial Sequence
  ENSG00000169635_23 (sequence is synthesized)
aatagcttattttctttccgccccctccggggctgagcctgggtctgaagactgaatgtaacaggggccgctggcactcctgcgcgtcccccggctctggcgctgcaggggtgtcggcgc

SEQ ID NO: 561466 - DNA, 120 bp, Artificial Sequence
  ENSG00000169635_24 (sequence is synthesized)
gccacctctccaggccccagaagcccttcttgcccaaaggcttccctggtccctgagccctgcctcggctgcctcaggggagagtgcttttcctgtagtttccaaggaatattctttgtt

SEQ ID NO: 561467 - DNA, 120 bp, Artificial Sequence
  ENSG00000169635_25 (sequence is synthesized)
tagaggtacttgttttttattaagagaaaaaccagtgtaacgtttatgtgactgtttgaactggaaggtctggggttccggggggtggggggaggctagactcaatgccggggccgtcgg

SEQ ID NO: 561468 - DNA, 120 bp, Artificial Sequence
  ENSG00000169635_26 (sequence is synthesized)
tactcttgttttcatttgtgtgtgcgtgcgtgtgtgtgtgtgtatgtgcgtatgtgtgtgtctatgtgtggtgtgtgccgtatgcatgggcagatgtttcgctttccctccttcctcgct

SEQ ID NO: 561469 - DNA, 120 bp, Artificial Sequence
  ENSG00000169635_27 (sequence is synthesized)
gaacaaggtggagacttctgaccttttgctacctcttgaattcatgacaacgatatgttggtgactggcagtggaagcccttgacactcttgttttccttcgcttagcacctaggaagtc

SEQ ID NO: 561470 - DNA, 120 bp, Artificial Sequence
  ENSG00000169635_28 (sequence is synthesized)
cacacaaacctctgtggtataggtgaggggtgtgaggccccagcctggagccaggcactgggtgctgacaggggaaccatgaggagggtggcaggtctttgcagctcccggccagggtga

SEQ ID NO: 561471 - DNA, 120 bp, Artificial Sequence
  ENSG00000169635_29 (sequence is synthesized)
ggcggaagtgagccctcatcctgccactcctatcctccattcctgcaagagttttaagcttgagagagctgaccacagggccccccggggaacagggatggcacttccctgagcagtcct

SEQ ID NO: 561472 - DNA, 120 bp, Artificial Sequence
  ENSG00000169635_30 (sequence is synthesized)
ggcccccggccactgtctcggggcccacctctcgcccctcatcttggtaattagccagcctcagatacttctgtgggccctgaagtgggctctcaaggtcagaccaaggttgctgatctc

SEQ ID NO: 561473 - DNA, 120 bp, Artificial Sequence
  ENSG00000169635_31 (sequence is synthesized)
agtcccactgtcttcagccagctgaagctgtggggctgggctggcagcctttattgtcatcttgcttcaccatttttttttctctctcttttcattctattttaagtttagaccaaaaaa

SEQ ID NO: 561474 - DNA, 120 bp, Artificial Sequence
  ENSG00000169635_32 (sequence is synthesized)
atacagagtcatcccctacccccacccctctagagaccctccagctaaaaacagagcctgagttcagggacccaagtggtgagcggcgtcttttgggggtgagggagcttgggtagatga

SEQ ID NO: 561475 - DNA, 120 bp, Artificial Sequence
  ENSG00000169635_33 (sequence is synthesized)
ggctcctggctgagccctccctgtggtgatcccagcctaagatggcccctcttccctcctggtgggagacagaggactggaccctgggtctcaggttccagcaagtcaggctagggacct

SEQ ID NO: 561476 - DNA, 120 bp, Artificial Sequence
  ENSG00000169635_34 (sequence is synthesized)
ggggggaggagacccatggacttcacccatactcagtgagggggctcctgccgtcctgacgccaccccgccccatcagcacttaagccacatgacacaaagtctgtaccgcacgggaaat

SEQ ID NO: 561477 - DNA, 120 bp, Artificial Sequence
  ENSG00000169635_35 (sequence is synthesized)
gttcacgcgcctggccgtgtgcatggcctcccgggctgtgggcagccgcatctgtgaggtgactcgtgaaagtaggtgattcctttgcagaacttcagggactgggagcagaggcccctc

SEQ ID NO: 561478 - DNA, 120 bp, Artificial Sequence
  ENSG00000169635_36 (sequence is synthesized)
actcaacgacgtttgtgcgacatagtattgtatccaccttagtattgtatcgagccttttctgtgttttaatgagaaagcagaacactagtttcctatttaagactttaagggtttgtgg

SEQ ID NO: 561479 - DNA, 120 bp, Artificial Sequence
  ENSG00000169635_37 (sequence is synthesized)
ggcggggcgggattaacacaacatttggctttgttttctttttcctttgatttccacatcaggtgtgtgcgagtgtgtgtgtgtggagatgttaagagcctcacaaggaaactgggttat

SEQ ID NO: 561480 - DNA, 120 bp, Artificial Sequence
  ENSG00000169635_38 (sequence is synthesized)
tggaggccaaggcggcttacagttctctgcgttcgtcacttaattcctgaatgtttcagagaaacaggaatcagaaaatagcagatatcatgtaggaaagagaggataaacaaagaaaaa

SEQ ID NO: 561481 - DNA, 120 bp, Artificial Sequence
  ENSG00000169635_39 (sequence is synthesized)
agaaaaaaaaataagctcatacccaaattcacaaagcctattttttaaaccaaagcacattttgaatgagtatggaacctccatgggctcagaaaaaagatgctaatatatttatctcat

SEQ ID NO: 561482 - DNA, 120 bp, Artificial Sequence
  ENSG00000169635_40 (sequence is synthesized)
tgtttacataagcttttacagtttcagacctcagcagctgtaaggccagtccagggaaccctcccctgctgctggaaacccttctgagttggccctggagtggctcacgggcagagaagg

SEQ ID NO: 561483 - DNA, 120 bp, Artificial Sequence
  ENSG00000169635_41 (sequence is synthesized)
gtagccctggggctgggggagggattggaagcctccctggagtcacctgagccctcgtccccattcccagggcccctccaagcccagctggcaccaaagagcttgggcccgtgctgacca

SEQ ID NO: 561484 - DNA, 120 bp, Artificial Sequence
  ENSG00000169635_42 (sequence is synthesized)
gcccccaaggccctctggccggaccatgctggtcctgaccagctagcctacgcggggatggccgtcagttctggccacaggacccgagtctgggcttgggtccccctgctgctctgcccg

SEQ ID NO: 561485 - DNA, 120 bp, Artificial Sequence
  ENSG00000169635_43 (sequence is synthesized)
tgacccttggggatgggttgatgcgagggtcccactcaagccaaaaagccgggacctttgcgcagctctgtcgactctggtgggtccccactcctggggccccctaaccccaccccaggc

SEQ ID NO: 561486 - DNA, 120 bp, Artificial Sequence
  ENSG00000169635_44 (sequence is synthesized)
agcggaaggggctgactgggtctggtccttaccaacatagacggtgcaaacactcttaacagtgttgtttttgtatcaatatgtttgtgcagtgatgaatgtatttatttctcagacttg

SEQ ID NO: 561487 - DNA, 120 bp, Artificial Sequence
  ENSG00000169635_45 (sequence is synthesized)
gggcgagtgagcgggtggcaggccgggctccgccactgcatgctcccgccggaccgagccccagcaagggctcctccaggattgcaaaaaaaaaaggaagagaaaagatgaacctttaag

SEQ ID NO: 561488 - DNA, 120 bp, Artificial Sequence
  ENSG00000169635_46 (sequence is synthesized)
caaataagaatctcagagactcgcagcatagccatacacctcagcctgtgaaatgaacgatccggaccctcaccaactttccccacctcaggcagccctgtgtgtttaccgttcatcacc

SEQ ID NO: 561489 - DNA, 120 bp, Artificial Sequence
  ENSG00000169635_47 (sequence is synthesized)
actcgggggcaccgggccgcccacccactcccaaaatccgtcagtattcactggacctcaggccctgtgcaggagtgcgatccgggctgggccgctgggcaggctgaccccctgccctcc

SEQ ID NO: 561490 - DNA, 120 bp, Artificial Sequence
  ENSG00000169635_48 (sequence is synthesized)
tgcggccatcctgagttggggtgaggcctgggcagccggagggcagggctcagggagcaggaggctgcatccgtccacccccaggcgtgggggacaaaagccaaaggtgccaggccttag

SEQ ID NO: 561491 - DNA, 120 bp, Artificial Sequence
  ENSG00000169635_49 (sequence is synthesized)
agcagacaagggctctcagccctggcatgccccctaaagggaccaaggtcctcctatttcccagaaccccgttggggcagatgttactgaacctgtgaatcagacgccaggagtgagggc

SEQ ID NO: 561492 - DNA, 120 bp, Artificial Sequence
  ENSG00000169635_50 (sequence is synthesized)
tggggagggacctaactggagcctcagtctgacattccacgccggggtgggggtgggcatgagcggtgggaactgaggctgcccaggacccccttcctaggatgccccggcttcagtcac

SEQ ID NO: 561493 - DNA, 120 bp, Artificial Sequence
  ENSG00000169635_51 (sequence is synthesized)
cccactttaactttctaccaggaccccctccccctacctcaccttgctatttattgctgtaatttattgacctcaaaaatgctgcataacagacctcactggggcagggaggatccccag

SEQ ID NO: 561494 - DNA, 120 bp, Artificial Sequence
  ENSG00000169635_52 (sequence is synthesized)
ggctcccaccctccacttggcgggccccgtggggccaggtgctgaggggagcctctctaccccacccatcactagcttccctctgccctctcccaccccgggggggacccaggttgggca

SEQ ID NO: 561495 - DNA, 120 bp, Artificial Sequence
  ENSG00000169635_53 (sequence is synthesized)
ctggctcatttctcgcaaatacctcgaaggggaggggggagggatggggttatagctgttttgtttaattggaactggaagagggatcatgttttgttttatgcccttcccagaaggggg

SEQ ID NO: 561496 - DNA, 120 bp, Artificial Sequence
  ENSG00000169635_54 (sequence is synthesized)
gagggacaccgggatcgcactcctgtactggccaccgccgctgtcacttgtcacattgagttcatgtcccttgagagtttgtataaattcaggtcagagctgcagctacacagctgccca

SEQ ID NO: 561497 - DNA, 120 bp, Artificial Sequence
  ENSG00000169635_55 (sequence is synthesized)
gtgtcatagaaaagcaattcaccaacgactgatctctccattcagaagtgtgcagtcttaaatgtacagcgataagaaactgttattttatgatcttttcattaaaagcttgattgaaaa

SEQ ID NO: 561498 - DNA, 120 bp, Artificial Sequence
  ENSG00000169635_56 (sequence is synthesized)
ttttaaaaggcagtggtagggtagagggtggcagtggagacagctggagagcactgaggacgcggacccacgggtactgtgtgagctgtgaagcccgcttgggagaccccactgccagcc

SEQ ID NO: 561499 - DNA, 120 bp, Artificial Sequence
  ENSG00000169635_57 (sequence is synthesized)
ggccaagaattgtgtgtctgccaccagcgccccctggcctaggtggcccctgggtgtccttaatctcctgtgtgtgttagaggggcaggcattgcacccaccgaactccctagacctgtt

SEQ ID NO: 561500 - DNA, 120 bp, Artificial Sequence
  ENSG00000169635_58 (sequence is synthesized)
cgctggtccttactcttcctggctgtcagatccaactaccaggctctgtggccacagtctcctgctgggctgcccctggtgccccagccagagacccccaggtgcgtcccttcatcgccc

SEQ ID NO: 561501 - DNA, 120 bp, Artificial Sequence
  ENSG00000169641_0 (sequence is synthesized)
cggcttcccaggcccgcggccggctggcggcgcggagctgtcactgcggcaaacggcgaacgcgccggccccctcccccgccgcccgcaagcctggtgcagtcggcccatgagtatttca

SEQ ID NO: 561502 - DNA, 120 bp, Artificial Sequence
  ENSG00000169641_1 (sequence is synthesized)
gtcggcccatgagtatttcatgaagtgccgcagccggattcatggctcactggcgcaggaggggagagaggctgagtcctgtcaagcgccagcgccccacccgtcacggagcgcacgccg

SEQ ID NO: 561503 - DNA, 120 bp, Artificial Sequence
  ENSG00000169641_2 (sequence is synthesized)
cgggggccaggctggggagggaagggtgtccagccctctcttttgggtggtgagatgctgaggcctgagggtttctagggcgcctagcacaggacccagctacggaggcaataaaaactt

SEQ ID NO: 561504 - DNA, 120 bp, Artificial Sequence
  ENSG00000169641_3 (sequence is synthesized)
ggtggagtctaagtcctgggaagggaaaaaaaggacggagggggcggggcctacagacaaccccgcccatcacaaagaccccgccttccagaacgctgacgtcacaatttggccccgccc

SEQ ID NO: 561505 - DNA, 120 bp, Artificial Sequence
  ENSG00000169641_4 (sequence is synthesized)
ctcattgtcagtcccgcggagccagaggaggcgccggtcgctggcagctgagcggcggaacccttcgctggcgggagcgcggttcggggccgcagaggtcaagagacaactgcctttgaa

SEQ ID NO: 561506 - DNA, 120 bp, Artificial Sequence
  ENSG00000169641_5 (sequence is synthesized)
agagagtgagtgactgtttccaaaacagcaagcatagggagagccgccggaagtattgacggaaagcttgaattacctacatgattgatgatggtctccagctgtcaaagaagattgtgg

SEQ ID NO: 561507 - DNA, 120 bp, Artificial Sequence
  ENSG00000169641_6 (sequence is synthesized)
ttgccaagagaaaggtaaccatttctcatccccttgagtggaattggatgcctctaggagcccacattggctggcagtagacatggccgaatttacaagctacaaggagacggcctccag

SEQ ID NO: 561508 - DNA, 120 bp, Artificial Sequence
  ENSG00000169641_7 (sequence is synthesized)
ccgccacttgcggtttaagctacagagtctaagccgccgccttgatgagttggaggaagccacaaaaaacctccagaaagcagaggatgaactcctggatctccaggacaaggtgattca

SEQ ID NO: 561509 - DNA, 120 bp, Artificial Sequence
  ENSG00000169641_8 (sequence is synthesized)
ggcagaaggtagcaactccagcatgttggcggagattgaagtgctgcgccagcgggtgctgagaattgaaggcaaagacgaggaaattaagagagcagaggatctgtgtcgtctgatgaa

SEQ ID NO: 561510 - DNA, 120 bp, Artificial Sequence
  ENSG00000169641_9 (sequence is synthesized)
ggagaaacttgaagaggaagaaaacctcacccgggagctgaaatctgagattgagcggcttcagaaacgaatggctgaattagagaagctagaagaggccttcagcaggagtaagaatga

SEQ ID NO: 561511 - DNA, 120 bp, Artificial Sequence
  ENSG00000169641_10 (sequence is synthesized)
ctgtacccagctgtgtctgagcctgaatgaggagagaaatctgaccaagaaaatctcctctgagctggaaatgctcagagtcaaagtgaaagaactagaatcttctgaggaccgcctgga

SEQ ID NO: 561512 - DNA, 120 bp, Artificial Sequence
  ENSG00000169641_11 (sequence is synthesized)
taaaactgagcagagtttagcgtcagagttagaaaagctgaaatcattaactctgagctttgtaagtgagagaaaatacttgaatgaaaaggagaaagaaaatgagaaattgataaaaga

SEQ ID NO: 561513 - DNA, 120 bp, Artificial Sequence
  ENSG00000169641_12 (sequence is synthesized)
actcactcaaaaactagagcagaacaaaaaaatgaaccgagattatacaaggaatgcttctaatctggaaagaaatgacctacggattgaggatggcatctcttccacactgccgtccaa

SEQ ID NO: 561514 - DNA, 120 bp, Artificial Sequence
  ENSG00000169641_13 (sequence is synthesized)
agaatcaagaaggaagggtggtctggactacctaaagcaggtagagaatgaaacaagaaacaaatcagaaaatgaaaagaaccgcaatcaggaagacaacaaagtcaaagaccttaacca

SEQ ID NO: 561515 - DNA, 120 bp, Artificial Sequence
  ENSG00000169641_14 (sequence is synthesized)
agagattgagaaacttaagacacaaatcaaacactttgaatcgttggaagaagagcttaagaaaatgaagtccaaaaataacgaccttcaggataattacctaagtgaacaaaataaaaa

SEQ ID NO: 561516 - DNA, 120 bp, Artificial Sequence
  ENSG00000169641_15 (sequence is synthesized)
caaattattagccagccaactggaggagataaagctacaaatcaagaaacagaaagagttagaaaatggagaggtagaaggggaagatgctttcctgtccagcaaaggcagacatgagag

SEQ ID NO: 561517 - DNA, 120 bp, Artificial Sequence
  ENSG00000169641_16 (sequence is synthesized)
gactaagtttagaggccacggaagtgaagcttctgtgtccaagcacacagcgcgggaactgtctcctcagcataagcgggaacgactccggaacagggagtttgctctcaacaatgaaaa

SEQ ID NO: 561518 - DNA, 120 bp, Artificial Sequence
  ENSG00000169641_17 (sequence is synthesized)
ctattctctgagcaacaggcaggtttcttctcccagtttcaccaacaggagggcagcaaaagcttctcacatgggggtgagtacagacagtgggactcaggagacaaagaaaactgaaga

SEQ ID NO: 561519 - DNA, 120 bp, Artificial Sequence
  ENSG00000169641_18 (sequence is synthesized)
ccggtttgtacccggctcctcccagagcgaagggaagaagtctagggagcagccctcagtgctgagtcgctaccccccggctgctcaggagcacagtaaagcgtggaaggggacttccaa

SEQ ID NO: 561520 - DNA, 120 bp, Artificial Sequence
  ENSG00000169641_19 (sequence is synthesized)
gccaggcaccgagagcggactgaagggaaaagtggagaagacaacacgaacgtttagtgacaccacccatggatctgttcccagtgacccattgggtagagctgacaaggcttctgacac

SEQ ID NO: 561521 - DNA, 120 bp, Artificial Sequence
  ENSG00000169641_20 (sequence is synthesized)
ctcctctgagactgtctttggcaagaggggacacgtgcttggcaacggaagtcaagtaactcaggctgcaaactctggctgttctaaggccattggagccctggcctcatctcgaagatc

SEQ ID NO: 561522 - DNA, 120 bp, Artificial Sequence
  ENSG00000169641_21 (sequence is synthesized)
ctcctcagaagggctctctaaaggcaaaaaggctgccaatggccttgaggctgataacagttgcccgaattccaaggctcctgttctatcgaagtatccttatagctgtagaagccaaga

SEQ ID NO: 561523 - DNA, 120 bp, Artificial Sequence
  ENSG00000169641_22 (sequence is synthesized)
gaacatccttcagggattttcaacctcacataaagaaggggttaatcaacctgcagcagttgtgatggaagacagcagtccgcatgaagccttgaggtgtcgagtcatcaaatccagtgg

SEQ ID NO: 561524 - DNA, 120 bp, Artificial Sequence
  ENSG00000169641_23 (sequence is synthesized)
cagagagaagccagactcagatgatgacttggacatagcatctcttgttactgccaagttggtaaatacaaccatcactccagagccagagcccaaaccacagcctaactctagagaaaa

SEQ ID NO: 561525 - DNA, 120 bp, Artificial Sequence
  ENSG00000169641_24 (sequence is synthesized)
ggctaaaacccgaggggcacctagaacctccctatttgagaatgataaagatgctggaatggagaatgaatctgtgaaatctgtcagagcctccaccaataccatggagctcccagatac

SEQ ID NO: 561526 - DNA, 120 bp, Artificial Sequence
  ENSG00000169641_25 (sequence is synthesized)
caatggtgctggggtaaaaagccaaaggccctttagccccagagaggcgttgcggtctagagccatcatcaaacctgttattgttgataaggatgtgaaaaaaatcatgggaggatctgg

SEQ ID NO: 561527 - DNA, 120 bp, Artificial Sequence
  ENSG00000169641_26 (sequence is synthesized)
aacagagactacgttggagaaacagaaacccgtctccaaaccagggccaaacaaagtgacaagtagcattactatatatccatctgacagcagcagccccagagctgctccgggtgaggc

SEQ ID NO: 561528 - DNA, 120 bp, Artificial Sequence
  ENSG00000169641_27 (sequence is synthesized)
cctgagggagaggcacacatccactagcaatatccaggtggggctggcagagctcacatcagttagcaaccatgtcagctccccttttgagctctccattcacaaacatgacatcaccct

SEQ ID NO: 561529 - DNA, 120 bp, Artificial Sequence
  ENSG00000169641_28 (sequence is synthesized)
gcagcttgcagaagcggagagaatggcagatgggcccctgaaggacaggccagaaacagtggtctctcggagcagcattataatcaagccatcggatcctgtggagaggaatagccatgc

SEQ ID NO: 561530 - DNA, 120 bp, Artificial Sequence
  ENSG00000169641_29 (sequence is synthesized)
acctccagcggagacaatcaggtggaaaagccatagtgccccttcagaagtgggcttctcagatgccagacatgttactgtgcggaatgcctggaagagtaggcgagacttgaaatcttt

SEQ ID NO: 561531 - DNA, 120 bp, Artificial Sequence
  ENSG00000169641_30 (sequence is synthesized)
agaagaccccccaactcgaataggtaaaaacgtggaatctaccaatagcaatgcctacacccagaggtcttccacagacttctcagaactcgaacagcccaggtcctgcctttttgagca

SEQ ID NO: 561532 - DNA, 120 bp, Artificial Sequence
  ENSG00000169641_31 (sequence is synthesized)
gggcactcgaagggtaggaccaagttcaggggatgcccctgagccctcctccagaaggacccaaagtagcctcactgtgtcagaggtgcttacccgtcggaatcgggtaggagacaccat

SEQ ID NO: 561533 - DNA, 120 bp, Artificial Sequence
  ENSG00000169641_32 (sequence is synthesized)
cactgtcgcagcctggaaccactcagcaagcatggaggaagaaggggaagactgtacactcagtgtctacaggcaactgcacaactccctggatccgtctgaactgcctgggaagcaggg

SEQ ID NO: 561534 - DNA, 120 bp, Artificial Sequence
  ENSG00000169641_33 (sequence is synthesized)
gctgccagagtctgggcgagtacgggccgaggaacgattacggccaaccaggccctgtgctgaggagaactgagcccgctgggtgtctgttgtctgccctctgctcctgcttctcagctc

SEQ ID NO: 561535 - DNA, 120 bp, Artificial Sequence
  ENSG00000169641_34 (sequence is synthesized)
ttccaccgtcctgccccacgaaggatccaaggccagttaaccaggcaagacacaagccttggctggaaaactgtggtagagccgggctgtggctcaggtaatttttgccatttggccaga

SEQ ID NO: 561536 - DNA, 120 bp, Artificial Sequence
  ENSG00000169641_35 (sequence is synthesized)
gggaatcagagactacaagctggacagtcacccaggcccaaccttccccaatgcacgagtcctctctctctccttgtccctgtccaccaagtagttggaccattctggcccccaaacaag

SEQ ID NO: 561537 - DNA, 120 bp, Artificial Sequence
  ENSG00000169641_36 (sequence is synthesized)
ggaagataaagtccccagcacacagcaggagtcaaaaattcttctcggctccttggtgggttgtttctggatcctagggcagcctctgtctgtgtggttaatgttctggtttctcagtct

SEQ ID NO: 561538 - DNA, 120 bp, Artificial Sequence
  ENSG00000169641_37 (sequence is synthesized)
actcctcatttgcccaatgggctcaagtaccccataagatttaccagccatcagctctatctagggggctttcatttctttccccttggagttcttttcttcagacttaaagcagaaagg

SEQ ID NO: 561539 - DNA, 120 bp, Artificial Sequence
  ENSG00000169641_38 (sequence is synthesized)
ggtctgtgctgcctctaaaggattatgagactaccctttaggttgaagtttgacctggctcctggcttaccagtctcctggaagcagagcatgcagatactcatgcggatacccattgga

SEQ ID NO: 561540 - DNA, 120 bp, Artificial Sequence
  ENSG00000169641_39 (sequence is synthesized)
atgacatcatccctccccaaccccagctctctctgctcaccttccaaaggcacctggaggtgcaagcctcatgcatctcctttcctgagcaccagtaatgctgctggcatcgcctgcttt

SEQ ID NO: 561541 - DNA, 120 bp, Artificial Sequence
  ENSG00000169641_40 (sequence is synthesized)
ctctccagtggctggagacttcaagctgacttcattgtttccaccttgggaaaatccctaggctaagctgggcctgacccagcatcctctgccttctaggaagtgcccagcaagagggaa

SEQ ID NO: 561542 - DNA, 120 bp, Artificial Sequence
  ENSG00000169641_41 (sequence is synthesized)
agcagacccctttagtcactccacaagcaatagctccatgagaggcatggactgtgagactactccctcctgttcctccttctccatcccccatggaggaggcatcgcactttaccaagc

SEQ ID NO: 561543 - DNA, 120 bp, Artificial Sequence
  ENSG00000169641_42 (sequence is synthesized)
tgatgcattcctacagaagtgggccccggatttctgcaagtcgactatcatgatgacttcgctggaggaaaggtgatacgtacatacgcattgagggcctcagctttatatagttcaaaa

SEQ ID NO: 561544 - DNA, 120 bp, Artificial Sequence
  ENSG00000169641_43 (sequence is synthesized)
tgcagcaaacttttcagaaagccacgtaaataaattggttaggttccttataccagtcacatggggaagttgaaaagaattgtatattcttggcagtgctttttctttagcattctgtca

SEQ ID NO: 561545 - DNA, 120 bp, Artificial Sequence
  ENSG00000169641_44 (sequence is synthesized)
attcaaagaagggatcctctttcaaaggctacctttatgaagtagacactattgccctcagaatgagagaacattaaactaccagtctggtaagctggatttttttccccatggctttac

SEQ ID NO: 561546 - DNA, 120 bp, Artificial Sequence
  ENSG00000169641_45 (sequence is synthesized)
ttccttgctgtgtgaccttgggtgagtcattgtcttcttggagcctcagtttccctgtctgtaaaatgagttctttgaaatggatgatctctaagggcaccaaatctggtattctaaggt

SEQ ID NO: 561547 - DNA, 120 bp, Artificial Sequence
  ENSG00000169641_46 (sequence is synthesized)
tctcctgttttcaccatctataatagtatgggatgatttttgcttgtggaaggtatcatccgtgtgggttcttccctcctgccctcaattgtttttctgggccttgttttttagtttctg

SEQ ID NO: 561548 - DNA, 120 bp, Artificial Sequence
  ENSG00000169641_47 (sequence is synthesized)
tatgttttaatctcatggggatgagctcagagaagctccgtgggcctgtttcccaatctgcaaagtgtgaagggattagatgggatggtctctgaggctctttgtggcatcagccttgcc

SEQ ID NO: 561549 - DNA, 120 bp, Artificial Sequence
  ENSG00000169641_48 (sequence is synthesized)
cagtgccacacagtatctcctggcgttctaggagtctaggtattatggaaagtacccaagtctgtgtatctcctgttcctgtgcatctcctatgaatttcctggcaagaggaagactcaa

SEQ ID NO: 561550 - DNA, 120 bp, Artificial Sequence
  ENSG00000169641_49 (sequence is synthesized)
gacttcctccagaggaatttgtcttctctgccttcactcagcatgggaaccagtgttcatcctgaccttgtctgtatcagatttggcagtgaggaggcttggggagcacctaccttactt

SEQ ID NO: 561551 - DNA, 120 bp, Artificial Sequence
  ENSG00000169641_50 (sequence is synthesized)
tcagggacaggaatctattgctcatacttctgcttcccagagttttgccaatctaaaggcattgtcatgtggcctgcctttcctgtccacatccccacctctgatgctcaagatgctatt

SEQ ID NO: 561552 - DNA, 120 bp, Artificial Sequence
  ENSG00000169641_51 (sequence is synthesized)
tccaagatctcttactgctgcttctcctggcttactggccagaaactagctcactcaaggctgccatccttcacttgcagcctccctgccattctccttcactggttggcaaccttgaga

SEQ ID NO: 561553 - DNA, 120 bp, Artificial Sequence
  ENSG00000169641_52 (sequence is synthesized)
gttcaaagaaaatcaacctctgtggtggtcaactaaaggtattaggaaactaagtctgtggctcttctctgctgatggaaacagaagggcgccaagccatgcctaaaaagatctcgccaa

SEQ ID NO: 561554 - DNA, 120 bp, Artificial Sequence
  ENSG00000169641_53 (sequence is synthesized)
taattcttgtctttgagtgttggagccctggattctggtgctatagctcctggtgccaaagtctggatctttccacatttcagcagcaccaacatctgctgctactcaaaatgtcctgtt

SEQ ID NO: 561555 - DNA, 120 bp, Artificial Sequence
  ENSG00000169641_54 (sequence is synthesized)
gaagagggacagctgtgatgcccttttgctggggctgccatcttgaaatctgagtgcaataggatttgcttgtaacagttatttcaggatattttgtttctttaatctgcacactttcta

SEQ ID NO: 561556 - DNA, 120 bp, Artificial Sequence
  ENSG00000169641_55 (sequence is synthesized)
gatagattttatttttaagtgtcctcagcattgcagaaaataacattgtaatagcaagtaaaggctggaggctgtttctctgggcttcaaatggctggcaaggctggctctcaaatccca

SEQ ID NO: 561557 - DNA, 120 bp, Artificial Sequence
  ENSG00000169641_56 (sequence is synthesized)
aagttgggaggcatgtttctgaaaagcaactgaggtgtgactgtttggacccaggcctcatcatcaggggtcctggaggaagcctccaagtagaggggagacctggtagttgaatagttg

SEQ ID NO: 561558 - DNA, 120 bp, Artificial Sequence
  ENSG00000169641_57 (sequence is synthesized)
tttaatcaagccaaatagtcccactgcccccggtcaacaaacccacttttatgacagttttcttccgcagcttggctcttaaattttactggcaggtgtatggttgttggagggttccta

SEQ ID NO: 561559 - DNA, 120 bp, Artificial Sequence
  ENSG00000169641_58 (sequence is synthesized)
gtgagttgggggacctggcaatagagctgcttggttggaggaagtgaagctggcttagtaccagcagctgatctcttccacgtgctgctgctttttttgccactctgatactaaaccaga

SEQ ID NO: 561560 - DNA, 120 bp, Artificial Sequence
  ENSG00000169641_59 (sequence is synthesized)
gaaagctgcaggtggataaagaagctgtggctgttttttgcttttgggtggcaatgagaaagagtcacagtgtgggttaaagggatctgcagtggggccaaggatgccaccccaccctca

SEQ ID NO: 561561 - DNA, 120 bp, Artificial Sequence
  ENSG00000169641_60 (sequence is synthesized)
gctgtaggcaagcttgcacataaataacccccgtcagtggagtgttcgggatgcagggggcactatagtgttcttggacttgtcgtcctggggcagttttagttctttatatttagtggg

SEQ ID NO: 561562 - DNA, 120 bp, Artificial Sequence
  ENSG00000169641_61 (sequence is synthesized)
tcagtgccaagtgctaccacttcccaataaaggaatggggacccagaggctgggtccctggctaccttgttatgaggttttgttatttctctgacaagattgctttggaaagagctgctt

SEQ ID NO: 561563 - DNA, 120 bp, Artificial Sequence
  ENSG00000169641_62 (sequence is synthesized)
ttagggattattttttgaataccccgagtggggagcagggttctcctcaaagcctcacaaccataggatcataggaaaggggccctattttcctgctgcttcccagctcagaacatatac

SEQ ID NO: 561564 - DNA, 120 bp, Artificial Sequence
  ENSG00000169641_63 (sequence is synthesized)
tgaatggaatgtatttttaagagaataaagtctatttttttgtattttaaagattgagagggctaagaaagtagccctcaaataaactgttattgcattataggcccctttgttgggggc

SEQ ID NO: 561565 - DNA, 120 bp, Artificial Sequence
  ENSG00000169641_64 (sequence is synthesized)
agcctgttggtccacacctacttgctcaggcaggtgctctggtctctctcacccctgccccttagagtctaggtgcagcagctccaagcatgggaccaaggaggccagaacctgtcgctg

SEQ ID NO: 561566 - DNA, 120 bp, Artificial Sequence
  ENSG00000169641_65 (sequence is synthesized)
gaaaccagggcaaagcagtggctcagggctccttgggtgcatgtgtatcattggagctgcctgtctgcatgtatcctctggcgcgaatgctctctgttggctctgcagtacaatatgtaa

SEQ ID NO: 561567 - DNA, 120 bp, Artificial Sequence
  ENSG00000169641_66 (sequence is synthesized)
ccaataaagctccctcgtttccgtatactctgtgcgagtctgtgatgccagttttgtcaatgtcatccctgtgtatcatctgtcttctatgcgttggcgcagctctagtatatttattta

SEQ ID NO: 561568 - DNA, 120 bp, Artificial Sequence
  ENSG00000169641_67 (sequence is synthesized)
tttcattgtgtaatacttaaaattgggtattttacctaaccaattactgatactgcaaggactggaaacattaactgccctgatcctggtgtgcagattctttccattactgccacgaat

SEQ ID NO: 561569 - DNA, 120 bp, Artificial Sequence
  ENSG00000169641_68 (sequence is synthesized)
tctaagactagggggggaaaagccttctccgttttcatcttccagtcagatcaccaatatatataatgatgtcccttaactcacagtaagaaagaataaaaccacatttaagggacatta

SEQ ID NO: 561570 - DNA, 120 bp, Artificial Sequence
  ENSG00000169641_69 (sequence is synthesized)
cttggatttgcagtaacagtgtttatcatctatctgtcagtcagtcaggagcccctgggaaggaaccagcatgtaacatgtttttatcatcttatatggcaaaagggactttgcagataa

SEQ ID NO: 561571 - DNA, 120 bp, Artificial Sequence
  ENSG00000169641_70 (sequence is synthesized)
ggatgctgggatgaggcagaacatcctagatgatccaggtgggccttaaatgtaatcacaggtagtatccttttaagagagagacaaaagatttgactacaggagaaggcaatgtgatga

SEQ ID NO: 561572 - DNA, 120 bp, Artificial Sequence
  ENSG00000169641_71 (sequence is synthesized)
tggaagcagaaactggagttatgtgctctgaggatggaggaaggagccacgagccttcccacacctagaagctgaaaagagcaaggaaatgaactgatcctccctgctctgagagcctct

SEQ ID NO: 561573 - DNA, 120 bp, Artificial Sequence
  ENSG00000169641_72 (sequence is synthesized)
gtaatgaatgcagccctgtgtacccattttagactttaagcttccagaactttcgaatagatttctgtttttttaagagccactaagtttgtggcaatctgttaaaccagctgttaccta

SEQ ID NO: 561574 - DNA, 120 bp, Artificial Sequence
  ENSG00000169641_73 (sequence is synthesized)
agcccttgatcctatgtagtgcgcttcccaaaatgtacaccaccacctttagtagaattgggaagttttagcacatacccatggagggaatcaggaataaaggcagactggtctcccaaa

SEQ ID NO: 561575 - DNA, 120 bp, Artificial Sequence
  ENSG00000169641_74 (sequence is synthesized)
caagcatgagcagctaaaggagctccccgtaggccctcagaacagcatgaaaagcacaagaagcagctgcagctgatggggagctctgggcaacaggaggaggcccggtgccctttctgt

SEQ ID NO: 561576 - DNA, 120 bp, Artificial Sequence
  ENSG00000169641_75 (sequence is synthesized)
agggcacagtgagggggagccaggtcagcaagttctcggccgcctcagttagcagatcttcacaggctgctggcctctcagggatgaggagagccggggcttacactgggcctattttag

SEQ ID NO: 561577 - DNA, 120 bp, Artificial Sequence
  ENSG00000169641_76 (sequence is synthesized)
ataagcgtatacccaattccaagtgacactttcttttgccccccagacagctgtctgtctcatattatcagtctgagggcagggctggttcagtatagctcattacagctttgataaatc

SEQ ID NO: 561578 - DNA, 120 bp, Artificial Sequence
  ENSG00000169641_77 (sequence is synthesized)
cagaaccacctgccttatgtgagtgtgaggctcagggtgtcagaacagcatctggagaagcccctgggagtgtctttttgatgagaaacctgtgatgatgaaaaacttcttggacctgga

SEQ ID NO: 561579 - DNA, 80 bp, Artificial Sequence
  ENSG00000169641_78 (sequence is synthesized)
gtctcattgttgatggggacattgaataaacctgagtattgtgtgcctgtattttgactgcgacctatcagatgagatca

SEQ ID NO: 561580 - DNA, 120 bp, Artificial Sequence
  ENSG00000169641_79 (sequence is synthesized)
ggagccagaggaggcgccggtcgctggcagctgagcggcggaacccttcgctggcgggagcgcggttcggggccgcagaggggacattgaataaacctgagtattgtgtgcctgtatttt

SEQ ID NO: 561581 - DNA, 120 bp, Artificial Sequence
  ENSG00000169660_0 (sequence is synthesized)
aggccccgccccatcagccccagtcccgcccactccatggccctgtccgccgccgcagcgcgcgcccttcccctcctcaccgctacctgctccggttccggcgctcggccgctccgttgc

SEQ ID NO: 561582 - DNA, 120 bp, Artificial Sequence
  ENSG00000169660_1 (sequence is synthesized)
tccgttgccctcgggcgccttggttgcggccctccgctgaggagccatcggaccaggccgccgcggagccgggccggacgcgggcgccaggcccggggacgaacgccgtaacagggagcg

SEQ ID NO: 561583 - DNA, 120 bp, Artificial Sequence
  ENSG00000169660_2 (sequence is synthesized)
taacagggagcgcgaggcaggcacggcgcagggacgcgagtgcgacgcgctcggccatcggcccctgggctggcggccaggcccgagcaatcggcggccgagcggggcggggctcagagc

SEQ ID NO: 561584 - DNA, 120 bp, Artificial Sequence
  ENSG00000169660_3 (sequence is synthesized)
cgcgagggcggggcggccgggcctggctgcgcccccggacctcgcgggaccgcggcggcgcaggaagaagtccccaaggagacttcgccataggagttcacaggaaatattgaaatgtca

SEQ ID NO: 561585 - DNA, 120 bp, Artificial Sequence
  ENSG00000169660_4 (sequence is synthesized)
ggttccactccatttcagatgagattagttcatttagaccttaaaggagctccaccaaaggtctcgtacctctcagagatttttcctctgttccgtgcgctaggtgcaaacggcctcctc

SEQ ID NO: 561586 - DNA, 120 bp, Artificial Sequence
  ENSG00000169660_5 (sequence is synthesized)
attgagtatgaagacatgtttccctacgagggccctctgaggctgctgagggccaagtacgcctacagcccctctgaaatcaaagagatcttgcatctggctggactcaatgagctggag

SEQ ID NO: 561587 - DNA, 120 bp, Artificial Sequence
  ENSG00000169660_6 (sequence is synthesized)
gtgattcccttggtgcagacatttggacacatggagtttgtgctgaagcacacggccttcgcccacctgcgggaggtgggctccttcccctgcaccctgaacccccacgaggcagagtcc

SEQ ID NO: 561588 - DNA, 120 bp, Artificial Sequence
  ENSG00000169660_7 (sequence is synthesized)
ctggcgctggtgggcgccatgattgaccaggtcctggagctacacccaggcgcccagcggctgcacatcgggtgtgatgaggtctattacctcggagagggggaggcctcgcgccggtgg

SEQ ID NO: 561589 - DNA, 120 bp, Artificial Sequence
  ENSG00000169660_8 (sequence is synthesized)
ctacagcaagagcagaacagcacggggaagttgtgcctgtcacacatgcgggcggtggccagcggcgtgaaggcccggcgccccagcgtgacacccctggtgtgggacgacatgctccga

SEQ ID NO: 561590 - DNA, 120 bp, Artificial Sequence
  ENSG00000169660_9 (sequence is synthesized)
gcctgaggaccagctcgcagcgtccggggtgccgcagctggtggagccggtgctctgggactacacggccgacctggatgtgcacggcaaggtcctcctcatgcagaagtaccggcggtg

SEQ ID NO: 561591 - DNA, 120 bp, Artificial Sequence
  ENSG00000169660_10 (sequence is synthesized)
cggctttccgcagctgtgggcagccagtgccttcaagggtgccacggggcccagccaggccgtgccccctgttgagcaccacctcaggaaccacgtgcagtggctgcaggtggcgggcag

SEQ ID NO: 561592 - DNA, 120 bp, Artificial Sequence
  ENSG00000169660_11 (sequence is synthesized)
cgggcccacggactcactgcagggcatcatcctgaccggctggcagaggtacgaccactactctgtgctgtgcgagctgctgcccgcaggagtcccgtccctggccgcctgcctgcagtt

SEQ ID NO: 561593 - DNA, 120 bp, Artificial Sequence
  ENSG00000169660_12 (sequence is synthesized)
gcttctacgcggaggatttgatgaagatgttaaagcgaaagtggagaaccttctcgggatttccagcctggaaaaaacggaccctgttaggcaagcaccctgcagccctccctgtcccct

SEQ ID NO: 561594 - DNA, 120 bp, Artificial Sequence
  ENSG00000169660_13 (sequence is synthesized)
tcttcccctccccttcccccgcccgtggagacagctgttctcagcagggctctccgcagggagggggccggctccttccctggcagcaacatccttgcccttgtcacacaagtcagcctc

SEQ ID NO: 561595 - DNA, 120 bp, Artificial Sequence
  ENSG00000169660_14 (sequence is synthesized)
catctgcgcagctctgtggatgcgctgctggagggcaacaggtatgtcactggctggttcagcccctaccaccgccagcggaagctcatccacccggtcatggttcagcacatccagccc

SEQ ID NO: 561596 - DNA, 120 bp, Artificial Sequence
  ENSG00000169660_15 (sequence is synthesized)
gcagcgctcagcctcctggcacagtggagcaccctcgtgcaggagctggaggctgccctgcagctggctttctacccggatgccgtggaggagtggctggaggaaaacgtgcaccccagc

SEQ ID NO: 561597 - DNA, 120 bp, Artificial Sequence
  ENSG00000169660_16 (sequence is synthesized)
ctgcagcggctgcaagctctgctgcaggacctcagcgaggtgtctgcccccccgctgccacccaccagccctggcagggacgttgctcaggacccctgaggggagagctcatgccagggg

SEQ ID NO: 561598 - DNA, 120 bp, Artificial Sequence
  ENSG00000169660_17 (sequence is synthesized)
gctcctgctggaggctgggggggctctgcactgccaaatggcctgggcaatacgggcccacgtgggcgtcgtgccctctggcccagcagtgtcttgcccacactcagttcctgagggccc

SEQ ID NO: 561599 - DNA, 120 bp, Artificial Sequence
  ENSG00000169660_18 (sequence is synthesized)
tgggcagcccctgggggagagactagaaaacacagaaggaagcagcacagggagacccgctttgtgatctgcatgtgtgacactgattctttggaaataaagagtggaagctgcaggtga

SEQ ID NO: 561600 - DNA, 120 bp, Artificial Sequence
  ENSG00000169660_19 (sequence is synthesized)
gcccacggccccatccgccacccgtgactggggcacttccctcctgccctctggccgtcagcctcttgcagcaagcatttccatgaacaccaagtcggagattcgtccacgctggtgcct

SEQ ID NO: 561601 - DNA, 120 bp, Artificial Sequence
  ENSG00000169660_20 (sequence is synthesized)
gggaacggctccacctttgctgcacacacgtcctgcccacctggccgagcaggtgtggggctcaggcgcccggccctggaaggccccgcaccctggacccagcactcacacttccaggtc

SEQ ID NO: 561602 - DNA, 120 bp, Artificial Sequence
  ENSG00000169660_21 (sequence is synthesized)
tcctgagggagcagcgggacccatgggcaggggcaggcaccggggaaccccttggggtcggcagggggcttggccagaggagctgtgtgtgtggaaactcgcaggccacacgggaaatta

SEQ ID NO: 561603 - DNA, 120 bp, Artificial Sequence
  ENSG00000169660_22 (sequence is synthesized)
gccttggcttcattctttaaagttttgagcagtgttctgtggaaacgggtacctagaacacaaccacaaggttctcggtggagcaagatggtggcagcagcattgattttgaatttcctc

SEQ ID NO: 561604 - DNA, 120 bp, Artificial Sequence
  ENSG00000169660_23 (sequence is synthesized)
acaaccaggatgacaaaagggaaaaaaaaaaaagacagagaacaaaagaaactcacagcttctttcttttgggttgaagtgtatctttccaaaaagatatgttcaagtcttaacccctgg

SEQ ID NO: 561605 - DNA, 120 bp, Artificial Sequence
  ENSG00000169660_24 (sequence is synthesized)
gacctgtgaatgagaccttatttggaaataggatctttgcagatgtaatcaaaataagatgaagttgtactagaatatggtgaaccctaatccagtgattggcatccttatgaggagagg

SEQ ID NO: 561606 - DNA, 120 bp, Artificial Sequence
  ENSG00000169660_25 (sequence is synthesized)
gaaatttagagcctgagacacacggagggaaggcagtgtgaagacccaggaggatgccccgcggtgccagcagccaagatggtcatgacgtgccacgaaccccaggatgccgaggacagc

SEQ ID NO: 561607 - DNA, 120 bp, Artificial Sequence
  ENSG00000169660_26 (sequence is synthesized)
atgtccggcagttcatcccaactgtcagctggggctccttagttctcctgcatgtgtgtcatccaggaggcctagcatgtgcctgtagtcccagctccttggaaggctgaggctggagga

SEQ ID NO: 561608 - DNA, 84 bp, Artificial Sequence
  ENSG00000169660_27 (sequence is synthesized)
gcctgtagtcccagctccttggagggtgctgcagcgagccatgatcatgccagcacgctccagcctgggcaacagagtgagacc

SEQ ID NO: 561609 - DNA, 120 bp, Artificial Sequence
  ENSG00000169660_28 (sequence is synthesized)
cccgaaagacccggagggcaggaggccaagcacccagtgctccaaccaccctgctggactgtggtggtcctcacagtcggaggatggtctcaccgccccagctcagccacccacctgccc

SEQ ID NO: 561610 - DNA, 120 bp, Artificial Sequence
  ENSG00000169660_29 (sequence is synthesized)
gggacccgcaggcgcggcggcccagggacggggacgcggccggtgagaggacgcagaatgagatcagattgacttctcagttgctgactctcaactgcttagaaaggggcagaaacgata

SEQ ID NO: 561611 - DNA, 120 bp, Artificial Sequence
  ENSG00000169660_30 (sequence is synthesized)
aagtccacccaggctgggcctgtgtctgggtctccaggcctaagcccaaagcaggctggagagtgacgcgggaggcacccctcagacacagtgaatccgcagaaatgcacgcaggtcgga

SEQ ID NO: 561612 - DNA, 120 bp, Artificial Sequence
  ENSG00000169660_31 (sequence is synthesized)
cagaaagaaaaatggccgagacgcgcggagagcgggacccgcaggcgcggcggcccagggacggggacgcggccggaggatttgatgaagatgttaaagcgaaagtggagaaccttctcg

SEQ ID NO: 561613 - DNA, 120 bp, Artificial Sequence
  ENSG00000169660_32 (sequence is synthesized)
gccaagttgtggggggtgtgttgtcctggccatgtgcctgggaaggccatccctggccctgtgaccctgcagccggaactgcccagcctggagcctgcacgggtagaggccagggcacag

SEQ ID NO: 561614 - DNA, 120 bp, Artificial Sequence
  ENSG00000169660_33 (sequence is synthesized)
ccccagcagaccccagcccatggtgcctcgggacggccaccgtgcaccggtgcctcacctccctccctgttccaccagtgttttcctagtgagcaggtgaaccaggggccacgtacactc

SEQ ID NO: 561615 - DNA, 120 bp, Artificial Sequence
  ENSG00000169660_34 (sequence is synthesized)
gtctcaggcggctcccatgttggctctgggtacagccccgggaggcgtgtccagggccgtgttggccgcctcccctggagccactcacctgtttgctttctcacccagtcctcctcatgc

SEQ ID NO: 561616 - DNA, 120 bp, Artificial Sequence
  ENSG00000169676_0 (sequence is synthesized)
agtgccagcctggcgcccgcgactgcctgccccagcccctcagtggcggcttgctctcttctctcgctccgaaccagacacagccgctgccgctgccgtccggcgcgctacagactcccg

SEQ ID NO: 561617 - DNA, 120 bp, Artificial Sequence
  ENSG00000169676_1 (sequence is synthesized)
agaacagccctggctgtcagcgagcaccagccgcttcctgtccccatcgcggagactggaggggcgcaccacggccatggagccagaggcgcttcaggaggcaagagaagtccccgcgcg

SEQ ID NO: 561618 - DNA, 120 bp, Artificial Sequence
  ENSG00000169676_2 (sequence is synthesized)
ctccgcagcccggcgcagctcatggtgagcgccctctggggctcgagggtcccttggctgagggggcgcatcctcggggtgcccgatggggctgcctgggggtcgcagggctgaagttgg

SEQ ID NO: 561619 - DNA, 120 bp, Artificial Sequence
  ENSG00000169676_3 (sequence is synthesized)
gaccgcgcacagaccgcccctgcagtccagcccgaaatgctgccgccaggcagcaacggcaccgcgtacccggggcagttcgctctataccagcagctggcgcaggggaacgccgtgggg

SEQ ID NO: 561620 - DNA, 120 bp, Artificial Sequence
  ENSG00000169676_4 (sequence is synthesized)
ggctcggcgggggcaccgccactggggccctcacaggtggtcaccgcctgcctgctgaccctactcatcatctggaccctgctgggcaacgtgctggtgtgcgcagccatcgtgcggagc

SEQ ID NO: 561621 - DNA, 120 bp, Artificial Sequence
  ENSG00000169676_5 (sequence is synthesized)
cgccacctgcgcgccaacatgaccaacgtcttcatcgtgtctctggccgtgtcagaccttttcgtggcgctgctggtcatgccctggaaggcagtcgccgaggtggccggttactggccc

SEQ ID NO: 561622 - DNA, 120 bp, Artificial Sequence
  ENSG00000169676_6 (sequence is synthesized)
tttggagcgttctgcgacgtctgggtggccttcgacatcatgtgctccactgcctccatcctgaacctgtgcgtcatcagcgtggaccgctactgggccatctccaggcccttccgctac

SEQ ID NO: 561623 - DNA, 120 bp, Artificial Sequence
  ENSG00000169676_7 (sequence is synthesized)
aagcgcaagatgactcagcgcatggccttggtcatggtcggcctggcatggaccttgtccatcctcatctccttcattccggtccagctcaactggcacagggaccaggcggcctcttgg

SEQ ID NO: 561624 - DNA, 120 bp, Artificial Sequence
  ENSG00000169676_8 (sequence is synthesized)
ggcgggctggacctgccaaacaacctggccaactggacgccctgggaggaggacttttgggagcccgacgtgaatgcagagaactgtgactccagcctgaatcgaacctacgccatctct

SEQ ID NO: 561625 - DNA, 120 bp, Artificial Sequence
  ENSG00000169676_9 (sequence is synthesized)
tccctggagagggccgcagagcacgcgcagagctgccggagcagcgcagcctgcgcgcccgacaccagcctgcgcgcttccatcaagaaggagaccaaggttctcaagaccctgtcggtg

SEQ ID NO: 561626 - DNA, 120 bp, Artificial Sequence
  ENSG00000169676_10 (sequence is synthesized)
atcatgggggtcttcgtgtgttgctggctgcccttcttcatccttaactgcatggtccctttctgcagtggacaccccgaaggccctccggccggcttcccctgcgtcagtgagaccacc

SEQ ID NO: 561627 - DNA, 120 bp, Artificial Sequence
  ENSG00000169676_11 (sequence is synthesized)
ttcgacgtcttcgtctggttcggctgggctaactcctcactcaaccccgtcatctatgccttcaacgccgactttcagaaggtgtttgcccagctgctggggtgcagccacttctgctcc

SEQ ID NO: 561628 - DNA, 120 bp, Artificial Sequence
  ENSG00000169676_12 (sequence is synthesized)
cgcacgccggtggagacggtgaacatcagcaatgagctcatctcctacaaccaagacatcgtcttccacaaggaaatcgcagctgcctacatccacatgatgcccaacgccgttaccccc

SEQ ID NO: 561629 - DNA, 120 bp, Artificial Sequence
  ENSG00000169676_13 (sequence is synthesized)
ggcaaccgggaggtggacaacgacgaggaggagggtcctttcgatcgcatgttccagatctatcagacgtccccagatggtgaccctgttgctgagtctgtctgggagctggactgcgag

SEQ ID NO: 561630 - DNA, 120 bp, Artificial Sequence
  ENSG00000169676_14 (sequence is synthesized)
ggggagatttctttagacaaaataacacctttcaccccgaatggattccattaaactgcattaagaaaccccctcatggatctgcataaccgcacagacattgacaagcacgcacacaca

SEQ ID NO: 561631 - DNA, 120 bp, Artificial Sequence
  ENSG00000169676_15 (sequence is synthesized)
cgcaaatacatgcctttccagtgctgctccctttatcatgtgtttctgtgtagtagctcgtgtgcttagaaacctcaccccattgattggtagttcgaagaattggcagaagcagttgca

SEQ ID NO: 561632 - DNA, 120 bp, Artificial Sequence
  ENSG00000169676_16 (sequence is synthesized)
ataaactcagtcaaatgtacccagcctaccagagatggaccaacgatcctatgagagaagagagtatggtgctgggtccttaaaaaaaaaaatgatacttggtccttaaaaaatatgctc

SEQ ID NO: 561633 - DNA, 120 bp, Artificial Sequence
  ENSG00000169676_17 (sequence is synthesized)
tcccctccctttttaaacaaatggcttgttcagtcacttgtttgtgtttgaattgatttttaaacagcaggttgtgtgtgtgtgcagtgatgtggtgggagcacagctttcctgggtctg

SEQ ID NO: 561634 - DNA, 120 bp, Artificial Sequence
  ENSG00000169676_18 (sequence is synthesized)
gattcccgtggctttgtgcttatgtcatttcttctctctgtgctggtgggggcctctttaccatagcttaagaagtatccctgatttattctggtgtctaataaacacagattatttgta

SEQ ID NO: 561635 - DNA, 120 bp, Artificial Sequence
  ENSG00000169679_0 (sequence is synthesized)
attcgaatcggcggcggcttctagtttgcggttcaggtttggccgctgccggccagcgtcctctggccatggacaccccggaaaatgtccttcagatgcttgaagcccacatgcagagct

SEQ ID NO: 561636 - DNA, 120 bp, Artificial Sequence
  ENSG00000169679_1 (sequence is synthesized)
acaagggcaatgaccctcttggtgaatgggaaagatacatacagtgggtagaagagaattttcctgagaataaagaatacttgataactttactagaacatttaatgaaggaatttttag

SEQ ID NO: 561637 - DNA, 120 bp, Artificial Sequence
  ENSG00000169679_2 (sequence is synthesized)
ataagaagaaataccacaatgacccaagattcatcagttattgtttaaaatttgctgagtacaacagtgacctccatcaattttttgagtttctgtacaaccatgggattggaaccctgt

SEQ ID NO: 561638 - DNA, 120 bp, Artificial Sequence
  ENSG00000169679_3 (sequence is synthesized)
catcccctctgtacattgcctgggcggggcatctggaagcccaaggagagctgcagcatgccagtgctgtccttcagagaggaattcaaaaccaggctgaacccagagagttcctgcaac

SEQ ID NO: 561639 - DNA, 120 bp, Artificial Sequence
  ENSG00000169679_4 (sequence is synthesized)
aacaatacaggttatttcagacacgcctcactgaaacccatttgccagctcaagctagaacctcagaacctctgcataatgttcaggttttaaatcaaatgataacatcaaaatcaaatc

SEQ ID NO: 561640 - DNA, 120 bp, Artificial Sequence
  ENSG00000169679_5 (sequence is synthesized)
caggaaataacatggcctgcatttctaagaatcagggttcagagctttctggagtgatatcttcagcttgtgataaagagtcaaatatggaacgaagagtgatcacgatttctaaatcag

SEQ ID NO: 561641 - DNA, 120 bp, Artificial Sequence
  ENSG00000169679_6 (sequence is synthesized)
aatattctgtgcactcatctttggcatccaaagttgatgttgagcaggttgttatgtattgcaaggagaagcttattcgtggggaatcagaattttcctttgaagaattgagagcccaga

SEQ ID NO: 561642 - DNA, 120 bp, Artificial Sequence
  ENSG00000169679_7 (sequence is synthesized)
aatacaatcaacggagaaagcatgagcaatgggtaaatgaagacagacattatatgaaaaggaaagaagcaaatgcttttgaagaacagctattaaaacagaaaatggatgaacttcata

SEQ ID NO: 561643 - DNA, 120 bp, Artificial Sequence
  ENSG00000169679_8 (sequence is synthesized)
agaagttgcatcaggtggtggagacatcccatgaggatctgcccgcttcccaggaaaggtccgaggttaatccagcacgtatggggccaagtgtaggctcccagcaggaactgagagcgc

SEQ ID NO: 561644 - DNA, 120 bp, Artificial Sequence
  ENSG00000169679_9 (sequence is synthesized)
catgtcttccagtaacctatcagcagacaccagtgaacatggaaaagaacccaagagaggcacctcctgttgttcctcctttggcaaatgctatttctgcagctttggtgtccccagcca

SEQ ID NO: 561645 - DNA, 120 bp, Artificial Sequence
  ENSG00000169679_10 (sequence is synthesized)
ccagccagagcattgctcctcctgttcctttgaaagcccagacagtaacagactccatgtttgcagtggccagcaaagatgctggatgtgtgaataagagtactcatgaattcaagccac

SEQ ID NO: 561646 - DNA, 120 bp, Artificial Sequence
  ENSG00000169679_11 (sequence is synthesized)
agagtggagcagagatcaaagaagggtgtgaaacacataaggttgccaacacaagttcttttcacacaactccaaacacatcactgggaatggttcaggcaacgccatccaaagtgcagc

SEQ ID NO: 561647 - DNA, 120 bp, Artificial Sequence
  ENSG00000169679_12 (sequence is synthesized)
catcacccaccgtgcacacaaaagaagcattaggtttcatcatgaatatgtttcaggctcctacacttcctgatatttctgatgacaaagatgaatggcaatctctagatcaaaatgaag

SEQ ID NO: 561648 - DNA, 120 bp, Artificial Sequence
  ENSG00000169679_13 (sequence is synthesized)
atgcatttgaagcccagtttcaaaaaaatgtaaggtcatctggggcttggggagtcaataagatcatctcttctttgtcatctgcttttcatgtgtttgaagatggaaacaaagaaaatt

SEQ ID NO: 561649 - DNA, 120 bp, Artificial Sequence
  ENSG00000169679_14 (sequence is synthesized)
atggattaccacagcctaaaaataaacccacaggagccaggacctttggagaacgctctgtcagcagacttccttcaaaaccaaaggaggaagtgcctcatgctgaagagtttttggatg

SEQ ID NO: 561650 - DNA, 120 bp, Artificial Sequence
  ENSG00000169679_15 (sequence is synthesized)
ccagtcctaagagcccaggagacttcacatctgctgcacaacttgcgtctacaccattccacaagcttccagtggagtcagtgcacattttagaagataaagaaaatgtggtagcaaaac

SEQ ID NO: 561651 - DNA, 120 bp, Artificial Sequence
  ENSG00000169679_16 (sequence is synthesized)
agtgtacccaggcgactttggattcttgtgaggaaaacatggtggtgccttcaagggatggaaaattcagtccaattcaagagaaaagcccaaaacaggccttgtcgtctcacatgtatt

SEQ ID NO: 561652 - DNA, 120 bp, Artificial Sequence
  ENSG00000169679_17 (sequence is synthesized)
cagcatccttacttcgtctgagccagcctgctgcaggtggggtacttacctgtgaggcagagttgggcgttgaggcttgcagactcacagacactgacgctgccattgcagaagatccac

SEQ ID NO: 561653 - DNA, 120 bp, Artificial Sequence
  ENSG00000169679_18 (sequence is synthesized)
cagatgctattgctgggctccaagcagaatggatgcagatgagttcacttgggactgttgatgctccaaacttcattgttgggaacccatgggatgataagctgattttcaaacttttat

SEQ ID NO: 561654 - DNA, 120 bp, Artificial Sequence
  ENSG00000169679_19 (sequence is synthesized)
ctgggctttctaaaccagtgagttcctatccaaatacttttgaatggcaatgtaaacttccagccatcaagcccaagactgaatttcaattgggttctaagctggtctatgtccatcacc

SEQ ID NO: 561655 - DNA, 120 bp, Artificial Sequence
  ENSG00000169679_20 (sequence is synthesized)
ttcttggagaaggagcctttgcccaggtgtacgaagctacccagggagatctgaatgatgctaaaaataaacagaaatttgttttaaaggtccaaaagcctgccaacccctgggaattct

SEQ ID NO: 561656 - DNA, 120 bp, Artificial Sequence
  ENSG00000169679_21 (sequence is synthesized)
acattgggacccagttgatggaaagactaaagccatctatgcagcacatgtttatgaagttctattctgcccacttattccagaatggcagtgtattagtaggagagctctacagctatg

SEQ ID NO: 561657 - DNA, 120 bp, Artificial Sequence
  ENSG00000169679_22 (sequence is synthesized)
gaacattattaaatgccattaacctctataaaaatacccctgaaaaagtgatgcctcaaggtcttgtcatctcttttgctatgagaatgctttacatgattgagcaagtgcatgactgtg

SEQ ID NO: 561658 - DNA, 120 bp, Artificial Sequence
  ENSG00000169679_23 (sequence is synthesized)
aaatcattcatggagacattaaaccagacaatttcatacttggaaacggatttttggaacaggatgatgaagatgatttatctgctggcttggcactgattgacctgggtcagagtatag

SEQ ID NO: 561659 - DNA, 120 bp, Artificial Sequence
  ENSG00000169679_24 (sequence is synthesized)
atatgaaactttttccaaaaggaactatattcacagcaaagtgtgaaacatctggttttcagtgtgttgagatgctcagcaacaaaccatggaactaccagatcgattactttggggttg

SEQ ID NO: 561660 - DNA, 120 bp, Artificial Sequence
  ENSG00000169679_25 (sequence is synthesized)
ctgcaacagtatattgcatgctctttggcacttacatgaaagtgaaaaatgaaggaggagagtgtaagcctgaaggtctttttagaaggcttcctcatttggatatgtggaatgaatttt

SEQ ID NO: 561661 - DNA, 120 bp, Artificial Sequence
  ENSG00000169679_26 (sequence is synthesized)
ttcatgttatgttgaatattccagattgtcatcatcttccatctttggatttgttaaggcaaaagctgaagaaagtatttcaacaacactatactaacaagattagggccctacgtaata

SEQ ID NO: 561662 - DNA, 120 bp, Artificial Sequence
  ENSG00000169679_27 (sequence is synthesized)
ggctaattgtactgctcttagaatgtaagcgttcacgaaaataaaatttggatatagacagtccttaaaaatcacactgtaaatatgaatctgctcactttaaacctgtttttttttcat

SEQ ID NO: 561663 - DNA, 120 bp, Artificial Sequence
  ENSG00000169679_28 (sequence is synthesized)
ttattgtttatgtaaatgtttgttaaaaataaatcccatggaatatttccatgtaacttagttgttataaatatttcaacaaaatatacaaccccataaggtccctatatagcaggctga

SEQ ID NO: 561664 - DNA, 120 bp, Artificial Sequence
  ENSG00000169679_29 (sequence is synthesized)
ttgggctgcttctgggatgcaagcatttgtgagaataattcagacatgagcattctctagaaatcactttttaaacactgacctgtttaagccaaaaaagggccaagacagctattttcc

SEQ ID NO: 561665 - DNA, 72 bp, Artificial Sequence
  ENSG00000169679_30 (sequence is synthesized)
acctgtttaagccaaaaaagggccaagacagctattttccaaatttgaagtttggtgtctaacatttccaag

SEQ ID NO: 561666 - DNA, 120 bp, Artificial Sequence
  ENSG00000169679_31 (sequence is synthesized)
attcgaatcggcggcggcttctagtttgcggttcaggtttggccgctgccggccagcgtcctctggccatggacaccccggaaaatgtccttcaatacatacagtgggtagaagagaatt

SEQ ID NO: 561667 - DNA, 120 bp, Artificial Sequence
  ENSG00000169679_32 (sequence is synthesized)
atccattgaagacagatgccatgctttgagaagatgtaatgcctgattagtagtattctggacttcatggttttgtttttgttgtttgtttgtttaatatgaaaggttaatccagcacgt

SEQ ID NO: 561668 - DNA, 120 bp, Artificial Sequence
  ENSG00000169679_33 (sequence is synthesized)
agcaaagatgctgggtaagctgaaggtagtcctagagatcacagtgatgtgagtggcacctgtcaccttctttacatgacctgcattatcaggaacagtatgtaaaagatgaatgatgtc

SEQ ID NO: 561669 - DNA, 120 bp, Artificial Sequence
  ENSG00000169679_34 (sequence is synthesized)
tgccttttatttttagataggtatgttgttgaaaaagcaagtggcaaaacattgctcccaatcctttaggcttacttattccatgcttcttttagaatatttattttatactttcgtgaa

SEQ ID NO: 561670 - DNA, 120 bp, Artificial Sequence
  ENSG00000169679_35 (sequence is synthesized)
ggtaacgtgtgtgtgtgtgtgtgtgtgtgattctcctatttgccccccaacctccaatagggagttgtatctgtaatactaaactgatcattttgttaagccatgattgtaggattgtgc

SEQ ID NO: 561671 - DNA, 120 bp, Artificial Sequence
  ENSG00000169679_36 (sequence is synthesized)
ttgctgttgggactataactcctataactcatagagggcaatttgccaatatctattaaaattaaaaatgcatttacttttaaagccagctatccacttttaaggatttcctatagatat

SEQ ID NO: 561672 - DNA, 120 bp, Artificial Sequence
  ENSG00000169679_37 (sequence is synthesized)
tattatatacttctatagtaaaatactatagtaacattggcaacagaacaagaaagctcactctgtactgatagggaatgagctccaaaacataccatactgttaaaagggcagagccgt

SEQ ID NO: 561673 - DNA, 120 bp, Artificial Sequence
  ENSG00000169679_38 (sequence is synthesized)
tttcagtacctgaaagtcaacagtcactttgtaactgaagaatatacagctgttaggctaaaattccctttgctcactggctttgattgaatacctacagggatcataactgtctagaca

SEQ ID NO: 561674 - DNA, 120 bp, Artificial Sequence
  ENSG00000169679_39 (sequence is synthesized)
attacttgacatgtgttctcatattccttctgtcttcccatagagagcagtttgggattaatacacatgattctgtctctcaaaatgtacctctgcactggaagtttttaccccaatttt

SEQ ID NO: 561675 - DNA, 120 bp, Artificial Sequence
  ENSG00000169679_40 (sequence is synthesized)
gagggatttttccagatttcagaaattatagttaatgtcatatcactcgtttaagttacatttttacctccagtcattttggctctcttttagctcgtttttatagggatttgtaaaatt

SEQ ID NO: 561676 - DNA, 120 bp, Artificial Sequence
  ENSG00000169679_41 (sequence is synthesized)
aaaaatgctttgcatgttttactttataccttaacagggtttattaagggaactccagcaatgttaaatagacatgttagatccactaccccaagtgcacttaaagtgtgatataaatgg

SEQ ID NO: 561677 - DNA, 120 bp, Artificial Sequence
  ENSG00000169679_42 (sequence is synthesized)
gggcccaggaggtcaaagctggagtgagctattaccttgccacagcaacccagactgggcaacagcaagaccctgtctctaaagaacaaacaaaaaactactacaacttcacctctgtgg

SEQ ID NO: 561678 - DNA, 120 bp, Artificial Sequence
  ENSG00000169679_43 (sequence is synthesized)
tcttccccccaaaatccaataactccaaagtaaccacaagaaatgtatcaaacaaacccaatttgagggccattctacaacatacctgactagtactctttggaactgtcaaggtcatca

SEQ ID NO: 561679 - DNA, 120 bp, Artificial Sequence
  ENSG00000169679_44 (sequence is synthesized)
aaaacaaggaacatctgagaaactgtcacagtccagaagtggctaagtggacatgatgactaaacataaagtatcctagaacacaggcaaaaactagtgaaagttctaagctggtctatg

SEQ ID NO: 561680 - DNA, 120 bp, Artificial Sequence
  ENSG00000169679_45 (sequence is synthesized)
agtttgcggttcaggtttggccgctgccggccagcgtcctctggccatggacaccccggaaaatgtccttcactgtgtaatacttcatgtaccctaattgatctaagcagtcaacacagg

SEQ ID NO: 561681 - DNA, 120 bp, Artificial Sequence
  ENSG00000169679_46 (sequence is synthesized)
tcctttctatgtgctgttttagagttaattctgatgttaatttagctagtaactttctgaaagtctaaaataatttgacatagacgttcacaatgtagagtgagagtggaaagttacaaa

SEQ ID NO: 561682 - DNA, 120 bp, Artificial Sequence
  ENSG00000169679_47 (sequence is synthesized)
acagaatggtagtatgttttacatgtttgtgtatgtgtacatgtctatatattcatgtatttatatatagacctttttctggtttttgtacagtgactattgtgtaatgaaaattggagt

SEQ ID NO: 561683 - DNA, 120 bp, Artificial Sequence
  ENSG00000169679_48 (sequence is synthesized)
gttcaggtttggccgctgccggccagcgtcctctggccatggacaccccggaaaatgtccttcactgtgtaatacttcatgtaccctaattgatctaagcagtcaacacaggatgcttga

SEQ ID NO: 561684 - DNA, 120 bp, Artificial Sequence
  ENSG00000169679_49 (sequence is synthesized)
tttctcctattatatgttattttgtttgttcttctgagtacttaatgtaacctgacattactttgcatgtttctttttgtttagcccttctagctctccccaaggggaattttgctttgc

SEQ ID NO: 561685 - DNA, 120 bp, Artificial Sequence
  ENSG00000169679_50 (sequence is synthesized)
ctggctgctttttttcagctgtagttgagtatatggaagtgggggatgcagagttctctgggagctctgtggctgatttctgagcactgttatcatctgctcttcctcagggactttgtt

SEQ ID NO: 561686 - DNA, 120 bp, Artificial Sequence
  ENSG00000169679_51 (sequence is synthesized)
ggcaccttgggttccgctgaggcccggcgcttgtccgcccatctgcgccgcggtggccgtttggagcaatctggataattcgttaggccctcagagctctcgtttattctttgatgcttg

SEQ ID NO: 561687 - DNA, 120 bp, Artificial Sequence
  ENSG00000169682_0 (sequence is synthesized)
acatgaccggctttaagcaacatggcggctgccgtggtgcagcgcccgggctgagcgacagcaagtgcagcgggctcctaccccgggtgaggggtggcctccgcgtgggatcgtgccctc

SEQ ID NO: 561688 - DNA, 120 bp, Artificial Sequence
  ENSG00000169682_1 (sequence is synthesized)
ttcagcccgctcctgtccccgacatcacgtgtattccgcacgtcccctccgcgctgtgtgtctactgagacggggaggcgtgacagggcccgggtcccttctcagtggtgctctgtgctt

SEQ ID NO: 561689 - DNA, 120 bp, Artificial Sequence
  ENSG00000169682_2 (sequence is synthesized)
cagggcaagctccccgtctccgggcgcacttccctcgcctgtgttcggtccatcctcctttctccagcctcctcccctcgcaggtgggatcgtcggtgggaccggagcgcgggcgggcgc

SEQ ID NO: 561690 - DNA, 120 bp, Artificial Sequence
  ENSG00000169682_3 (sequence is synthesized)
ggccccccgggaccatggccgggtccgacaccgcgcccttcctcagccaggcggatgacccggacgacgggccagtgcctggcaccccggggttgccagggtccacggggaacccgaagt

SEQ ID NO: 561691 - DNA, 120 bp, Artificial Sequence
  ENSG00000169682_4 (sequence is synthesized)
ccgaggagcccgaggtcccggaccaggaggggctgcagcgcatcaccggcctgtctcccggccgttcggctctcatagtggcggtgctgtgctacatcaatctcctgaactacatggacc

SEQ ID NO: 561692 - DNA, 120 bp, Artificial Sequence
  ENSG00000169682_5 (sequence is synthesized)
gcttcaccgtggctggcgtccttcccgacatcgagcagttcttcaacatcggggacagtagctctgggctcatccagaccgtgttcatctccagttacatggtgttggcacctgtgtttg

SEQ ID NO: 561693 - DNA, 120 bp, Artificial Sequence
  ENSG00000169682_6 (sequence is synthesized)
gctacctgggtgacaggtacaatcggaagtatctcatgtgcgggggcattgccttctggtccctggtgacactggggtcatccttcatccccggagagcatttctggctgctcctcctga

SEQ ID NO: 561694 - DNA, 120 bp, Artificial Sequence
  ENSG00000169682_7 (sequence is synthesized)
cccggggcctggtgggggtcggggaggccagttattccaccatcgcgcccactctcattgccgacctctttgtggccgaccagcggagccggatgctcagcatcttctactttgccattc

SEQ ID NO: 561695 - DNA, 120 bp, Artificial Sequence
  ENSG00000169682_8 (sequence is synthesized)
cggtgggcagtggtctgggctacattgcaggctccaaagtgaaggatatggctggagactggcactgggctctgagggtgacaccgggtctaggagtggtggccgttctgctgctgttcc

SEQ ID NO: 561696 - DNA, 120 bp, Artificial Sequence
  ENSG00000169682_9 (sequence is synthesized)
atttgccacccctgaaccccacctcgtggtgggcagatctgagggctctggcaagaaatcctagtttcgtcctgtcttccctgggcttcactgctgtggcctttgtcacgggctccctgg

SEQ ID NO: 561697 - DNA, 120 bp, Artificial Sequence
  ENSG00000169682_10 (sequence is synthesized)
ctctgtgggctccggcattcctgctgcgttcccgcgtggtccttggggagaccccaccctgccttcccggagactcctgctcttcctctgacagtctcatctttggactcatcacctgcc

SEQ ID NO: 561698 - DNA, 120 bp, Artificial Sequence
  ENSG00000169682_11 (sequence is synthesized)
tgaccggagtcctgggtgtgggcctgggtgtggagatcagccgccggctccgccactccaacccccgggctgatcccctggtctgtgccactggcctcctgggctctgcacccttcctct

SEQ ID NO: 561699 - DNA, 120 bp, Artificial Sequence
  ENSG00000169682_12 (sequence is synthesized)
tcctgtcccttgcctgcgcccgtggtagcatcgtggccacttatattttcatcttcattggagagaccctcctgtccatgaactgggccatcgtggccgacattctgctgtacgtggtga

SEQ ID NO: 561700 - DNA, 120 bp, Artificial Sequence
  ENSG00000169682_13 (sequence is synthesized)
tccctacccgacgctccaccgccgaggccttccagatcgtgctgtcccacctgctgggtgatgctgggagcccctacctcattggcctgatctctgaccgcctgcgccggaactggcccc

SEQ ID NO: 561701 - DNA, 120 bp, Artificial Sequence
  ENSG00000169682_14 (sequence is synthesized)
cctccttcttgtccgagttccgggctctgcagttctcgctcatgctctgcgcgtttgttggggcactgggcggcgcagccttcctgggcaccgccatcttcattgaggccgaccgccggc

SEQ ID NO: 561702 - DNA, 120 bp, Artificial Sequence
  ENSG00000169682_15 (sequence is synthesized)
gggcacagctgcacgtgcagggcctgctgcacgaagcagggtccacagacgaccggattgtggtgccccagcggggccgctccacccgcgtgcccgtggccagtgtgctcatctgagagg

SEQ ID NO: 561703 - DNA, 120 bp, Artificial Sequence
  ENSG00000169682_16 (sequence is synthesized)
ctgccgctcacctacctgcacatctgccacagctggccctgggcccaccccacgaagggcctgggcctaaccccttggcctggcccagcttccagagggaccctgggccgtgtgccagct

SEQ ID NO: 561704 - DNA, 120 bp, Artificial Sequence
  ENSG00000169682_17 (sequence is synthesized)
cccagacactacctgggtagctcaggggaggaggtgggggtccaggagggggatccctctccacaggggcagccccaagggctcggtgctatttgtaacggaataaaatttgtagccaga

SEQ ID NO: 561705 - DNA, 120 bp, Artificial Sequence
  ENSG00000169682_18 (sequence is synthesized)
gcacagctgcacgtgcagggtcagttaggagctgtgcccggcccagcttcttgatctgcctgtctgtctgtccatctgtctgcccactcctgtgcacctggcagctcagtccacagccct

SEQ ID NO: 561706 - DNA, 72 bp, Artificial Sequence
  ENSG00000169682_19 (sequence is synthesized)
agagacagggtcttgttgtgtcacccaggctgcagtgcagtggtgcagtcatagctcactgtagcctggaac

SEQ ID NO: 561707 - DNA, 75 bp, Artificial Sequence
  ENSG00000169682_20 (sequence is synthesized)
aggtgcccgccaccatgcctggctaattaaaaaaactttttctttttgtaggctgggtgtggtggctaacacctg

SEQ ID NO: 561708 - DNA, 71 bp, Artificial Sequence
  ENSG00000169682_21 (sequence is synthesized)
cggatcacctgaggtcaggagttctagttagccaggcatggtgacgcatgcctgtaatctcagctactcgg

SEQ ID NO: 561709 - DNA, 76 bp, Artificial Sequence
  ENSG00000169682_22 (sequence is synthesized)
acacaaaattttttttttttgtagagatggggtctttgtatgttgcccaggttggttttgaactcctggcctcaag

SEQ ID NO: 561710 - DNA, 120 bp, Artificial Sequence
  ENSG00000169682_23 (sequence is synthesized)
caagcaatcctcttgccttggcctcctaaagtgctgggcttacgggtgtgagccatgcgcctggctccaaataccccttttttggggcagctctcattctgctgagcctgcaggagactg

SEQ ID NO: 561711 - DNA, 120 bp, Artificial Sequence
  ENSG00000169682_24 (sequence is synthesized)
gggcagctctcattctgctgagcctgcaggagactggctgccctcacctggaagccatgtgctagacagaattcttgcgtgcaggtgacagaagcccattgtaaaactgtaagcccccta

SEQ ID NO: 561712 - DNA, 120 bp, Artificial Sequence
  ENSG00000169682_25 (sequence is synthesized)
ctgtgtttggctacctgggtgacaggtacaatcggaagtatctcatgtgcgggggcattgccttctggtccctggtgacactggggtcatccttcatccccggagagattttcatcttca

SEQ ID NO: 561713 - DNA, 120 bp, Artificial Sequence
  ENSG00000169682_26 (sequence is synthesized)
atggctggagactggcactgggctctgaggccctctgtctcccaggtgacaccgggtctaggagtggtggccgttctgctgctgttcctggtagtgcgggagccgccaaggggagccgtg

SEQ ID NO: 561714 - DNA, 120 bp, Artificial Sequence
  ENSG00000169682_27 (sequence is synthesized)
agtttacaaggctagcagggttggggaatctcaacaaagggcggggcgttgctcaagctccatccgtccgtccgtccatccctccgtccctccaatcctccatccatcgcgctgctcaag

SEQ ID NO: 561715 - DNA, 120 bp, Artificial Sequence
  ENSG00000169682_28 (sequence is synthesized)
atccatttatccatccatccatccatcctttattgagagtaaaaagccgccaaccagaccctgggaggaagacaggatggttcccgagaactagggctgctccttggcttttagaggtgg

SEQ ID NO: 561716 - DNA, 120 bp, Artificial Sequence
  ENSG00000169682_29 (sequence is synthesized)
cgcgtcacatgaccggctttaagcaacatggcggctgccgtggtgcagcgcccgggctgagcgacagcaagtgcagcgggctcctaccccgggtgggatcgtcggtgggaccggagcgcg

SEQ ID NO: 561717 - DNA, 120 bp, Artificial Sequence
  ENSG00000169683_0 (sequence is synthesized)
gttcttcctggatactgaggccccgacgcggctgtcgcgagggcgggggtcggggctgcaggcggggcagggctgggtgggggcgcgcgacgcacctgcctgcttcctgcacgggtggtc

SEQ ID NO: 561718 - DNA, 120 bp, Artificial Sequence
  ENSG00000169683_1 (sequence is synthesized)
cccaagcactgcggggccccagcccaaagcggaccttgactaccgcccagccccgcgctcccaggacctcccgcccgcggagcccactcggattgctctccgcccgggtcggcggaggcc

SEQ ID NO: 561719 - DNA, 120 bp, Artificial Sequence
  ENSG00000169683_2 (sequence is synthesized)
ccgtctcctgtacccggcgctgggactgctccgcaccgcgcggctccctttcagcagctgcgggagcatgcggaggaggccctgccggccccgcgggtcatggaggagttccggcgctcc

SEQ ID NO: 561720 - DNA, 120 bp, Artificial Sequence
  ENSG00000169683_3 (sequence is synthesized)
tacagccgcctgtgcagggagagtggggccgagccccaggaggctgtcctgcagcagctgcaccagcttcccaggggccggctggacctggccacgcaaagcctgacggtggagacctgc

SEQ ID NO: 561721 - DNA, 120 bp, Artificial Sequence
  ENSG00000169683_4 (sequence is synthesized)
agggccctgggcaagctgctgccgagggagacgctgtgcacggagctggtcctgagtgactgcatgctcagcgaggaaggggccacactgctgctccgaggcctgtgtgccaacaccgtg

SEQ ID NO: 561722 - DNA, 120 bp, Artificial Sequence
  ENSG00000169683_5 (sequence is synthesized)
ctgcgctttctggacttaaagggcaacaaccttcgggctgcaggggccgaggctctgggaaaactcctccaacagaacaagtccattcagagcctcacgctggagtggaacagcctgggc

SEQ ID NO: 561723 - DNA, 120 bp, Artificial Sequence
  ENSG00000169683_6 (sequence is synthesized)
acgtgggacgatgccttcgccaccttctgcgggggcctggcggccaacggcgccctgcagcggctggacctccgcaacaaccagatcagtcacaagggcgcggaggagctggccctagcc

SEQ ID NO: 561724 - DNA, 120 bp, Artificial Sequence
  ENSG00000169683_7 (sequence is synthesized)
ctgaagggcaacaccaccctccagcagctggacctgcgctggaataacgttggcctcctggggggccgggccctcatgaactgtctccccagcaacagaaccctgtggagactggacctg

SEQ ID NO: 561725 - DNA, 120 bp, Artificial Sequence
  ENSG00000169683_8 (sequence is synthesized)
gctgggaacaacatccctggagacgtcctcagagccgtggagcaagccatgggccacagccaggaccggctcaccaccttccaggagaaccaagcccgcactcacgtcctcagcaaggag

SEQ ID NO: 561726 - DNA, 120 bp, Artificial Sequence
  ENSG00000169683_9 (sequence is synthesized)
gtccagcacctccgggaggagaagtccaagcagttcctcgacttgatggagactattgataagcagcgagaagagatggccaagagcagcagggcgtcggcagcccgtgtagggcagctt

SEQ ID NO: 561727 - DNA, 120 bp, Artificial Sequence
  ENSG00000169683_10 (sequence is synthesized)
caggaagccctgaatgagaggcactccatcatcaacgctctcaaggccaagctgcagatgacagaggccgccctggctctgtcggagcagaaggcccaggacctgggggagctcctggcc

SEQ ID NO: 561728 - DNA, 120 bp, Artificial Sequence
  ENSG00000169683_11 (sequence is synthesized)
agcagcaggaagctgcagagcgggagtctaaactcctcagagacttgtctgctgccaatgaaaagaacctgcttctgcaaaaccaggtagacgagttggagcggaagttcaggtgtcagc

SEQ ID NO: 561729 - DNA, 120 bp, Artificial Sequence
  ENSG00000169683_12 (sequence is synthesized)
aggagcagctgttccagaccaggcaggagatgaccagcatgtcagctgagctgaagatgcgggccatccaggccgaggagcgcctggacatggagaagagaagatgcagacagagcctgg

SEQ ID NO: 561730 - DNA, 120 bp, Artificial Sequence
  ENSG00000169683_13 (sequence is synthesized)
aggactccgaaagcctgcgcatcaaggaggtggagcatatgacccgtcacctggaggagagtgagaaggccatgcaggagcgggtgcagaggctggaggcggcgcggctgtccctggagg

SEQ ID NO: 561731 - DNA, 120 bp, Artificial Sequence
  ENSG00000169683_14 (sequence is synthesized)
aggagctgagccgagtgaaagcagcggcactcagcgagcgtggccaggctgaggaggagctgatcaaggccaagagccaggcccgcctggaggagcaacagcgcctggctcacctggagg

SEQ ID NO: 561732 - DNA, 120 bp, Artificial Sequence
  ENSG00000169683_15 (sequence is synthesized)
acaagctgagactgctggcgcaggcacgggacgaggcgcagggcgcttgcctacagcagaagcaggtggtggccgaggcccagacccgggtcagccagctgggcctgcaagttgagggcc

SEQ ID NO: 561733 - DNA, 120 bp, Artificial Sequence
  ENSG00000169683_16 (sequence is synthesized)
tgcggcggcgcctggaagagctgcagcaggagctgagcctcaaggaccaggaaagggtggccgaggtgagcagggtgcgcgtggagctgcaggagcagaacggccggctgcaggcggagc

SEQ ID NO: 561734 - DNA, 120 bp, Artificial Sequence
  ENSG00000169683_17 (sequence is synthesized)
tggcggctcaggaggcgctgagggagaaggcggcggccctggagcgccagctgaaagtgatggcgagcgaccaccgagaggcgctgctggacagggagagcgagaacgcgtctctccggg

SEQ ID NO: 561735 - DNA, 120 bp, Artificial Sequence
  ENSG00000169683_18 (sequence is synthesized)
agaagctgcggctccgggaggcggagatcgcccgcatccgggacgaggaggcccagagggcgagcttcctgcagaacgccgtcctggcttacgtgcaggcgtcccccgtgaggaccctga

SEQ ID NO: 561736 - DNA, 120 bp, Artificial Sequence
  ENSG00000169683_19 (sequence is synthesized)
gccccccaaagtgagacaggccgggaggacccgggcgcagtaggagtgcatcaggcggcgcccgagatggaccaggggctgcgtcccgcccgcgccgcctctttgagacccgggtcgtct

SEQ ID NO: 561737 - DNA, 120 bp, Artificial Sequence
  ENSG00000169683_20 (sequence is synthesized)
gttccacgcggcggttgcggcgactgttggtggtgtcgcggctgcgggggaaccccgtgggaggcgcctgggaagggctccctaccggccccttcttcccggtcgacgccacgtgggagc

SEQ ID NO: 561738 - DNA, 120 bp, Artificial Sequence
  ENSG00000169683_21 (sequence is synthesized)
acaccgggaaggggtcccgcgggcgcgtctccccctcgccttttgcgatgtcaccgtgaacgctgcggccgcctgcgcgcggcggggtttggaaatacagcgcgtttgcactttgtgata

SEQ ID NO: 561739 - DNA, 120 bp, Artificial Sequence
  ENSG00000169683_22 (sequence is synthesized)
tgtccccaaagcacacacctggtgggagcttcccttgccaaccttgggtcactgggtggccgtattttgccagcctgagcggatgtcagacccagaacctcctattgggggcggcggggg

SEQ ID NO: 561740 - DNA, 120 bp, Artificial Sequence
  ENSG00000169683_23 (sequence is synthesized)
gaccccggcaatgtctgagccgtagtacaggctgccgttgaagagacaccaaggcccactcgttcagggtgtgcatgctgcggtagtttcctgctaggccatctgaggcagtgctttctc

SEQ ID NO: 561741 - DNA, 120 bp, Artificial Sequence
  ENSG00000169683_24 (sequence is synthesized)
tgcagaggctggaggcggcgcggctgtccctggaggagcaacagcgcctggctcacctggaggacaagctgagactgctggcgcaggcacgggacgaggcgcagggcgcttgcctacagc

SEQ ID NO: 561742 - DNA, 120 bp, Artificial Sequence
  ENSG00000169683_25 (sequence is synthesized)
ccaaagtgctgggattccaggcatgagcccctgtgcccagctgacacagctccttctgcagagcaagccatgggccacagccaggaccggctcaccaccttccaggagaaccaagcccgc

SEQ ID NO: 561743 - DNA, 120 bp, Artificial Sequence
  ENSG00000169683_26 (sequence is synthesized)
gttctcaagagacacctgcctttcagggtggggagtccgtgaggagaaggtagggaggcccgctctccactctggccccacaatccctgcccctgagcaggtggagcatatgacccgtca

SEQ ID NO: 561744 - DNA, 120 bp, Artificial Sequence
  ENSG00000169683_27 (sequence is synthesized)
ggcagcccgaggtcgcttcctctccaggctctccaatttctgtgccgtagttaaagcgagcaggggcgccccttcctgcacctgggagtagagggcagttcctctgtatgacgggggaga

SEQ ID NO: 561745 - DNA, 120 bp, Artificial Sequence
  ENSG00000169683_28 (sequence is synthesized)
ggccttaacattcgcggtcttacctggttccccgcgtgcagagccggcttggtgcctggcaggggctgcaggtgtttcaaacatgacttcgcagcgagactcttggccagcgccaaccca

SEQ ID NO: 561746 - DNA, 120 bp, Artificial Sequence
  ENSG00000169683_29 (sequence is synthesized)
gaccatcgggacagttgtcccttcctgggtctagggagctgccctgaaaaggggcccacggggagggccttggggtcagcaggggcagagagtgaccgccggccccccttacacaggggc

SEQ ID NO: 561747 - DNA, 120 bp, Artificial Sequence
  ENSG00000169684_0 (sequence is synthesized)
acatgcgtcccgagcccgccagaagctgctaggctgaggctgctgtcccggcgggagctgtggcgcggagcggcccctctgctgcgtctgccctcgttttgtctcacgactcacactcag

SEQ ID NO: 561748 - DNA, 120 bp, Artificial Sequence
  ENSG00000169684_1 (sequence is synthesized)
actcacactcagtgctccattccccaagagttcgcgttccccgcgcggcggtcgagaggcggctgcccgcggtcccgcgcgggcgcggggcgatggcggcgcgggggtcagggccccgcg

SEQ ID NO: 561749 - DNA, 120 bp, Artificial Sequence
  ENSG00000169684_2 (sequence is synthesized)
tgctcttggtccagctggtcgcggggcgctgcggtctagcgggcgcggcgggcggcgcgcagagaggattatctgaaccttcttctattgcaaaacatgaagatagtttgcttaaggatt

SEQ ID NO: 561750 - DNA, 120 bp, Artificial Sequence
  ENSG00000169684_3 (sequence is synthesized)
tatttcaagactacgaaagatgggttcgtcctgtggaacacctgaatgacaaaataaaaataaaatttggacttgcaatatctcaattggtggatgtggatgagaaaaatcagttaatga

SEQ ID NO: 561751 - DNA, 120 bp, Artificial Sequence
  ENSG00000169684_4 (sequence is synthesized)
caacaaacgtctggttgaaacaggaatggatagatgtaaaattaagatggaaccctgatgactatggtggaataaaagttatacgtgttccttcagactctgtctggacaccagacatcg

SEQ ID NO: 561752 - DNA, 120 bp, Artificial Sequence
  ENSG00000169684_5 (sequence is synthesized)
ttttgtttgataatgcagatggacgttttgaagggaccagtacgaaaacagtcatcaggtacaatggcactgtcacctggactccaccggcaaactacaaaagttcctgtaccatagatg

SEQ ID NO: 561753 - DNA, 120 bp, Artificial Sequence
  ENSG00000169684_6 (sequence is synthesized)
tcacgtttttcccatttgaccttcagaactgttccatgaaatttggttcttggacttatgatggatcacaggttgatataattctagaggaccaagatgtagacaagagagatttttttg

SEQ ID NO: 561754 - DNA, 120 bp, Artificial Sequence
  ENSG00000169684_7 (sequence is synthesized)
ataatggagaatgggagattgtgagtgcaacagggagcaaaggaaacagaaccgacagctgttgctggtatccgtatgtcacttactcatttgtaatcaagcgcctgcctctcttttata

SEQ ID NO: 561755 - DNA, 120 bp, Artificial Sequence
  ENSG00000169684_8 (sequence is synthesized)
ccttgttccttataataccctgtattgggctctcatttttaactgtacttgtcttctatcttccttcaaatgaaggtgaaaagatttgtctctgcacttcagtacttgtgtctttgactg

SEQ ID NO: 561756 - DNA, 120 bp, Artificial Sequence
  ENSG00000169684_9 (sequence is synthesized)
tcttccttctggttattgaagagatcataccatcatcttcaaaagtcatacctctaattggagagtatctggtatttaccatgatttttgtgacactgtcaattatggtaaccgtcttcg

SEQ ID NO: 561757 - DNA, 120 bp, Artificial Sequence
  ENSG00000169684_10 (sequence is synthesized)
ctatcaacattcatcatcgttcttcctcaacacataatgccatggcgcctttggtccgcaagatatttcttcacacgcttcccaaactgctttgcatgagaagtcatgtagacaggtact

SEQ ID NO: 561758 - DNA, 120 bp, Artificial Sequence
  ENSG00000169684_11 (sequence is synthesized)
tcactcagaaagaggaaactgagagtggtagtggaccaaaatcttctagaaacacattggaagctgcgctcgattctattcgctacattacaagacacatcatgaaggaaaatgatgtcc

SEQ ID NO: 561759 - DNA, 120 bp, Artificial Sequence
  ENSG00000169684_12 (sequence is synthesized)
gtgaggttgttgaagattggaaattcatagcccaggttcttgatcggatgtttctgtggacttttcttttcgtttcaattgttggatctcttgggctttttgttcctgttatttataaat

SEQ ID NO: 561760 - DNA, 120 bp, Artificial Sequence
  ENSG00000169684_13 (sequence is synthesized)
gggcaaatatattaataccagttcatattggaaatgcaaataagtgaagcctcccaagggactgaagtatacatttagttaacacacatatatctgatggcacctataaaattatgaaaa

SEQ ID NO: 561761 - DNA, 120 bp, Artificial Sequence
  ENSG00000169684_14 (sequence is synthesized)
tgtaagttatgtgttaaatttagtgcaagctttaacagactaagttgctaacctcaatttatgttaacagatgatccatttgaacagttggctgtatgactgaagtaataactgatgaga

SEQ ID NO: 561762 - DNA, 120 bp, Artificial Sequence
  ENSG00000169684_15 (sequence is synthesized)
caaaatattatctgaactggactagtgaaaaatctagtatttgtatcctggcaaataatactaatttataatccacagtaaagttcatcctttgactgtgctggagaattccagttgtat

SEQ ID NO: 561763 - DNA, 120 bp, Artificial Sequence
  ENSG00000169684_16 (sequence is synthesized)
ttgaagactgattttaaaacttttctgcatttggtaaaggtatgtaaactttcctgtactcactgagtaacagctaatctttaatataatattatactgctatatttaaaaagctgacta

SEQ ID NO: 561764 - DNA, 120 bp, Artificial Sequence
  ENSG00000169684_17 (sequence is synthesized)
ctgctgcttttccataaccaacattttaaaaataaatgaaaaacaggaattgggaactcctttaaggcttactttattctttagatgcttaattattgtgttaactatttctgtagctta

SEQ ID NO: 561765 - DNA, 120 bp, Artificial Sequence
  ENSG00000169684_18 (sequence is synthesized)
gcttccactgtaaagtcatacagtagacaactcctgtggacacgcagtagcatatccttaacattaatttcagtcctcttgtccacatttcccacaattaatagaaccatcttctatata

SEQ ID NO: 561766 - DNA, 120 bp, Artificial Sequence
  ENSG00000169684_19 (sequence is synthesized)
aattgtggtagtatctctttatccttgatcttagaatagtcagtccactacaattacatgaaccccatttaaaaaacatatttagggccgggggcagtggctcacatctgtaatccaagc

SEQ ID NO: 561767 - DNA, 120 bp, Artificial Sequence
  ENSG00000169684_20 (sequence is synthesized)
tctgtctcaaacatattttggtctaaatcattctgtgagaaaacaatcttctaatatgaaacacagtattctaatttggtatatgcacactgttatatacctgtaatatttcagttttct

SEQ ID NO: 561768 - DNA, 120 bp, Artificial Sequence
  ENSG00000169684_21 (sequence is synthesized)
ctccttcattctaacaattacaataatagaatcttagagttgcaagggcctttagatgtaatcaatcttagcctattactagtacagcgtaaatgatttagtacagtataatgtatcaca

SEQ ID NO: 561769 - DNA, 120 bp, Artificial Sequence
  ENSG00000169684_22 (sequence is synthesized)
gttaaaacagttaaattccatctctaaatgtcaccacttcaggtgtgaccaggtagcaaacactgacagaaaccctcgttcaatttagaactcttagctgttgagatcacaaacacctca

SEQ ID NO: 561770 - DNA, 120 bp, Artificial Sequence
  ENSG00000169684_23 (sequence is synthesized)
tttatttataataagtaacctatctaagttcaagccaatgctctttggaaggcggaggagaccctatctaatttgcatttaatcgtaggcaggtgtttaatgccatttaatgagtgaaag

SEQ ID NO: 561771 - DNA, 120 bp, Artificial Sequence
  ENSG00000169684_24 (sequence is synthesized)
cctggtgtgatgaatttagattgcctgccagctacctaccttagttcgtatacatccctgatccctcttatactaccattactgttacttatgatttttatatataaatttttatcgaca

SEQ ID NO: 561772 - DNA, 120 bp, Artificial Sequence
  ENSG00000169688_0 (sequence is synthesized)
atcacaccttcctcctgccctgacttctcatatcttgcctaggaactccaggcttgtcttggctccaaatggatcccaactgctcctgcaccacaggtggctcctgtgcctgcgccggct

SEQ ID NO: 561773 - DNA, 120 bp, Artificial Sequence
  ENSG00000169688_1 (sequence is synthesized)
gcaagaagtgctgctgctcttgctgccccgtgggctgtgccaagtgtgcccagggctgtgtctgcaaaggctcatcagagaagtgccgctgctgtgcctgatgttgggagagccctgctc

SEQ ID NO: 561774 - DNA, 120 bp, Artificial Sequence
  ENSG00000169688_2 (sequence is synthesized)
ccagacataaatagagcaaccagtactaacctggatttttttttttaactaccctgaccggtttgctacattcttttttctattcaatatgtgaaagacaataaaacacttttgacttga

SEQ ID NO: 561775 - DNA, 120 bp, Artificial Sequence
  ENSG00000169689_0 (sequence is synthesized)
gcgttgaggctgcggtcatggagggagcaggagctggatccggcttccggaaggagctggtgagcaggctgctgcacctgcacttcaaggatgacaagaccaaagtgagcggggacgcgc

SEQ ID NO: 561776 - DNA, 120 bp, Artificial Sequence
  ENSG00000169689_1 (sequence is synthesized)
tgcagctcatggtggagttgctgaaggtcttcgttgtggaagcagcagtccgcggcgtgcggcaggcccaggcagaagacgcgctccgtgtggacgtggaccagctggagaaggtgcttc

SEQ ID NO: 561777 - DNA, 120 bp, Artificial Sequence
  ENSG00000169689_2 (sequence is synthesized)
cgcagctgctcctggacttctagggatctcagccgtggctgaggccacccccagaggagcccctggtccacagaagcaggccttgtgtttccagcggcctctgataagaggcagggaagg

SEQ ID NO: 561778 - DNA, 120 bp, Artificial Sequence
  ENSG00000169689_3 (sequence is synthesized)
ccagcctgtgcagaaggggcaggactgcagtgcactgcgggccttggagtgtccagtggggacactggtgtgggaaggggcagcacctggggagtccctgcctctcctccctgggacaat

SEQ ID NO: 561779 - DNA, 120 bp, Artificial Sequence
  ENSG00000169689_4 (sequence is synthesized)
agtgtgcatgccacccggggtcctacaggcaggtgctgggaaaggcctggccagcaggtagcctgtgtgtttgacaaacagcagctggcagcgctgcctcctgcccacattcctgccacc

SEQ ID NO: 561780 - DNA, 120 bp, Artificial Sequence
  ENSG00000169689_5 (sequence is synthesized)
cgacatcaaagctggcgtgtgacctttccagccatgcgatattccccttggaagatgcttccccaggctataaatttgttctcacaaagcaacatcaataaatcaaaactgtctctccca

SEQ ID NO: 561781 - DNA, 120 bp, Artificial Sequence
  ENSG00000169689_6 (sequence is synthesized)
gcccctgccaggcaccaagccggctctgcacgcggggaaccaggagctggtgagcaggctgctgcacctgcacttcaaggatgacaagaccaaagaagcagcagtccgcggcgtgcggca

SEQ ID NO: 561782 - DNA, 120 bp, Artificial Sequence
  ENSG00000169689_7 (sequence is synthesized)
gggccggagggcaggggctaggcaggcgcggacgctccgtcccgacctcacgcgtgacactgtgagggccagacgccagcccccgcgccgccccctgtgcctttgaggttgggcccgttc

SEQ ID NO: 561783 - DNA, 120 bp, Artificial Sequence
  ENSG00000169689_8 (sequence is synthesized)
ctcattggctggaggcgcggggcggggttccggtgggcgcgcgttgaggctgcggtcatggagggagcaggagctggatccggcttccggaaggagctggtgagcaggctgctgcacctg

SEQ ID NO: 561784 - DNA, 120 bp, Artificial Sequence
  ENSG00000169689_9 (sequence is synthesized)
ctgcagctcatggtggagttgctgaaggtcttcgttgtgggtgagcccagggcccacgctccctccgggcacagcatccggaattttgcgtttttccagcgggaaaaccaagacgtgttt

SEQ ID NO: 561785 - DNA, 120 bp, Artificial Sequence
  ENSG00000169689_10 (sequence is synthesized)
gggcgcgcgttgaggctgcggtcatggagggagcaggagctggatccggcttccggaaggagctggtgagcaggctgctgcacctgcacttcaaggatgacaagaccaaaggtgcgggtg

SEQ ID NO: 561786 - DNA, 120 bp, Artificial Sequence
  ENSG00000169689_11 (sequence is synthesized)
ggggtgcgggcgggaggtgggtccccgtgtctgtcctcagggaccctttcctgcaactctgcagggccaaggcctcgggagggcgggggtatgtctggagcacccagccagagcggtggg

SEQ ID NO: 561787 - DNA, 120 bp, Artificial Sequence
  ENSG00000169689_12 (sequence is synthesized)
ggggggcaccggcccaggctgaggccctcactgggctcgggtttaagatccccccagcatcccccacctctcgcgtttctcaccgcagaagcagcagtccgcggcgtgcggcaggcccag

SEQ ID NO: 561788 - DNA, 120 bp, Artificial Sequence
  ENSG00000169692_0 (sequence is synthesized)
ggagaagcgggagcgggagcgggagcgagctggcggcgccgtcgggcgccgggccgggccatggagctgtggccgtgtctggccgcggcgctgctgttgctgctgctgctggtgcagctg

SEQ ID NO: 561789 - DNA, 120 bp, Artificial Sequence
  ENSG00000169692_1 (sequence is synthesized)
ggccgcggcgctgctgttgctgctgctgctggtgcagctgagccgcgcggccgagttctacgccaaggtcgccctgtactgcgcgctgtgcttcacggtgtccgccgtggcctcgctcgt

SEQ ID NO: 561790 - DNA, 120 bp, Artificial Sequence
  ENSG00000169692_2 (sequence is synthesized)
ctgcctgctgcgccacggcggccggacggtggagaacatgagcatcatcggctggttcgtgcgaagcttcaagtacttttacgggctccgcttcgaggtgcgggacccgcgcaggctgca

SEQ ID NO: 561791 - DNA, 120 bp, Artificial Sequence
  ENSG00000169692_3 (sequence is synthesized)
ggaggcccgtccctgtgtcatcgtctccaaccaccagagcatcctggacatgatgggcctcatggaggtccttccggagcgctgcgtgcagatcgccaagcgggagctgctcttcctggg

SEQ ID NO: 561792 - DNA, 120 bp, Artificial Sequence
  ENSG00000169692_4 (sequence is synthesized)
gcccgtgggcctcatcatgtacctcgggggcgtcttcttcatcaaccggcagcgctctagcactgccatgacagtgatggccgacctgggcgagcgcatggtcagggagaacctcaaagt

SEQ ID NO: 561793 - DNA, 120 bp, Artificial Sequence
  ENSG00000169692_5 (sequence is synthesized)
gtggatctatcccgagggtactcgcaacgacaatggggacctgctgccttttaagaagggcgccttctacctggcagtccaggcacaggtgcccatcgtccccgtggtgtactcttcctt

SEQ ID NO: 561794 - DNA, 120 bp, Artificial Sequence
  ENSG00000169692_6 (sequence is synthesized)
gcgctcgtggacacctgccaccgggccatgaggaccaccttcctccacatctccaagaccccccaggagaacggggccactgcggggtctggcgtgcagccggcccagtagcccagacca

SEQ ID NO: 561795 - DNA, 120 bp, Artificial Sequence
  ENSG00000169692_7 (sequence is synthesized)
cggcagggcatgacctggggagggcaggtggaagccgatggctggaggatgggcagaggggactcctcccggcttccaaataccactctgtccggctcccccagctctcactcagcccgg

SEQ ID NO: 561796 - DNA, 120 bp, Artificial Sequence
  ENSG00000169692_8 (sequence is synthesized)
gaagcaggaagccccttctgtcactggcctcagacacaggcccctggtgtcccctgcagggggctcagctggaccctccccgggctcgagggcagggactcgcgcccacggcacctctgg

SEQ ID NO: 561797 - DNA, 120 bp, Artificial Sequence
  ENSG00000169692_9 (sequence is synthesized)
gagctgggatgataaagatgaggcttgcggctgtggcccgctggtgggctgagccacaaggcccccgatggcccaggagcagatgggaggaccccgaggccagacgcacactgtccgagc

SEQ ID NO: 561798 - DNA, 120 bp, Artificial Sequence
  ENSG00000169692_10 (sequence is synthesized)
cctctgctcagccgcctgggacccaccagggtgcagctgggctccagggtccagcccacaagctgcatcaggctctctgggagaggaggggcctggagggccaggagtcccagactcacg

SEQ ID NO: 561799 - DNA, 120 bp, Artificial Sequence
  ENSG00000169692_11 (sequence is synthesized)
caccctgggccacagggagccgggaatcggggcctgctgctcctgctggcctggaagactctgtggggtcagcactgtactccgttgctgtttttttataaacacactcttggaagtggc

SEQ ID NO: 561800 - DNA, 120 bp, Artificial Sequence
  ENSG00000169692_12 (sequence is synthesized)
ccggctgagctggggctgtgtggggctgggtcccggggacgaggacacagggctgcctgtgcctgggcgagctcggcctcagtacctccctcagggccagacacagaggctcggaggcca

SEQ ID NO: 561801 - DNA, 120 bp, Artificial Sequence
  ENSG00000169692_13 (sequence is synthesized)
cacgacccgtccaggtagccagggagaaggcagggtgccaggcaggcctgtgggtgctcagcagctgtcttccagcgcacgctgtctccccctctctctctgtctctgtctctctgtctc

SEQ ID NO: 561802 - DNA, 120 bp, Artificial Sequence
  ENSG00000169696_0 (sequence is synthesized)
gggtcacgtgagcggaaaatggcggccccggcaggcggcggaggctccgcggtgtcggtgctggccccgaacggccggcgccacacggtgaaggtgacgccgagcaccgtgctgcttcag

SEQ ID NO: 561803 - DNA, 120 bp, Artificial Sequence
  ENSG00000169696_1 (sequence is synthesized)
gttctggaggacacgtgccggcggcaggacttcaacccctgtgaatatgatctgaagtttcagaggagcgtgctcgacctttctctccagtggagatttgccaacctgcccaacaatgcc

SEQ ID NO: 561804 - DNA, 120 bp, Artificial Sequence
  ENSG00000169696_2 (sequence is synthesized)
aagctggagatggtgcccgcttcccggagccgtgaggggcctgagaacatggttcgcatcgctttgcagctggacgatggctcgaggttgcaggactctttctgttcaggccagaccctc

SEQ ID NO: 561805 - DNA, 120 bp, Artificial Sequence
  ENSG00000169696_3 (sequence is synthesized)
tgggagcttctcagccattttccacagatcagggagtgcctgcagcaccccggcggggccaccccagtctgcgtgtacacgagggatgaggtgacgggtgaagctgccctgcggggcacg

SEQ ID NO: 561806 - DNA, 120 bp, Artificial Sequence
  ENSG00000169696_4 (sequence is synthesized)
acgctgcagtcgctgggcctgaccgggggcagcgccaccatcaggtttgtcatgaagtgctacgaccccgtgggcaagaccccaggaagcctgggctcgtcagcgtcggctggccaggca

SEQ ID NO: 561807 - DNA, 120 bp, Artificial Sequence
  ENSG00000169696_5 (sequence is synthesized)
gccgccagcgctccacttcccttggaatctggggagctcagccgcggcgacttgagccgtccggaggacgcggacacctcagggccctgctgcgagcacactcaggagaagcagagcaca

SEQ ID NO: 561808 - DNA, 120 bp, Artificial Sequence
  ENSG00000169696_6 (sequence is synthesized)
agggcacccgcagctgccccctttgttcctttctcgggtgggggacagagactggggggccctcctgggcccacgaggcctctgacatcatcttcagctaagttgccgaagtccctctcc

SEQ ID NO: 561809 - DNA, 120 bp, Artificial Sequence
  ENSG00000169696_7 (sequence is synthesized)
ccccagcaggagcaggagcgggagcggcccgtggaccgggagcccgtggaccgggagccggtggtgtgccaccccgacctggaggagcggctgcaggcctggccagcggagctgcctgat

SEQ ID NO: 561810 - DNA, 120 bp, Artificial Sequence
  ENSG00000169696_8 (sequence is synthesized)
gagttctttgagctgacggtggacgacgtgagaagacgcttggcccagctcaagagtgagcggaagcgcctggaagaagcccccttggtgaccaaggccttcagggaggcgcagataaag

SEQ ID NO: 561811 - DNA, 120 bp, Artificial Sequence
  ENSG00000169696_9 (sequence is synthesized)
gagaagctggagcgctacccaaaggtggctctgagggtcctgttccccgaccgctacgtcctacagggcttcttccgccccagcgagacagtgggggacttgcgagacttcgtgaggagc

SEQ ID NO: 561812 - DNA, 120 bp, Artificial Sequence
  ENSG00000169696_10 (sequence is synthesized)
cacctggggaaccccgagctgtcattttacctgttcatcacccctccaaaaacagtcctggacgaccacacgcagaccctctttcaggcgaacctcttcccggccgctctggtgcacttg

SEQ ID NO: 561813 - DNA, 120 bp, Artificial Sequence
  ENSG00000169696_11 (sequence is synthesized)
ggagccgaggagccggcaggtgtctacctggagcctggcctgctggagcatgccatctccccatctgcggccgatgtgctggtggccaggtacatgtccagggccgccgggtccccttcc

SEQ ID NO: 561814 - DNA, 120 bp, Artificial Sequence
  ENSG00000169696_12 (sequence is synthesized)
ccattgccagcccctgaccctgcacctaagtctgagccagctgctgaggagggggcgctggtcccccctgagcccatcccagggacggcccagcccgtgaagaggagcctgggcaaggtg

SEQ ID NO: 561815 - DNA, 120 bp, Artificial Sequence
  ENSG00000169696_13 (sequence is synthesized)
cccaagtggctgaagctgccggccagcaagaggtgagagctgccagcctgaggtgcccactccgccagccacaggaccacctcctctgccagcaggaataaagacttgtgcatccctcaa

SEQ ID NO: 561816 - DNA, 120 bp, Artificial Sequence
  ENSG00000169696_14 (sequence is synthesized)
gaacacgcttgccagtggtaggagatggaggcgacgtggactctgggaggcttcttttttggggtccatccagaggccgagcctctccaagcactggtcagcctccatgccacccagtct

SEQ ID NO: 561817 - DNA, 120 bp, Artificial Sequence
  ENSG00000169696_15 (sequence is synthesized)
gccgaccctcctctccaccatcccctcgtccgagcagtggcgatccctcccgagtcaaggctgggcacaagcacgtggggacaggccgggcgaacctcttcccggccgctctggtgcact

SEQ ID NO: 561818 - DNA, 120 bp, Artificial Sequence
  ENSG00000169696_16 (sequence is synthesized)
cctggaggcaccctggtgtgggctgtgggcctgggggtccttggcactgtccagtatgcggacgtggcagcagcccacatttcccccagtgaccaccaggctgtgccctggacgtggccg

SEQ ID NO: 561819 - DNA, 120 bp, Artificial Sequence
  ENSG00000169696_17 (sequence is synthesized)
cctgagcacggcatgtcctggggccccgtctggtggtcaggctcagtacgagcccatcaggggtactctgcccgcctgggaagacagtgtggcttctgggggctcctccagggaggctct

SEQ ID NO: 561820 - DNA, 120 bp, Artificial Sequence
  ENSG00000169696_18 (sequence is synthesized)
ggaccaggctgcagaggatgccaacctgccacaggctggcctggccgctcatggacatggcggctcctggcccagggtctctcccccgggaacccaggcgtgctcgcggccctctggaat

SEQ ID NO: 561821 - DNA, 120 bp, Artificial Sequence
  ENSG00000169696_19 (sequence is synthesized)
gcaggcgctggggctgtggggggccgcctggcgcctggcatcttgttataaaaagctctggcgcaggctgctctcagtggctgcaggatggttgtggctttggaagggcagcccccaggg

SEQ ID NO: 561822 - DNA, 120 bp, Artificial Sequence
  ENSG00000169696_20 (sequence is synthesized)
gccttggtcagccacctgtgggccccactgccgagccgtggtcagccctcactggctgccctgccatgacgctgctgaggtcagtgcagctcccgccagactcccgtgacaagtcataac

SEQ ID NO: 561823 - DNA, 120 bp, Artificial Sequence
  ENSG00000169696_21 (sequence is synthesized)
agagccacatgctgggtggctgcagggccctgtcgcccacagcagtcgaggtctcaggtgtgtccggagggcagccctggagacacctgggacaggcgtacctctggcaggcgcaccctg

SEQ ID NO: 561824 - DNA, 120 bp, Artificial Sequence
  ENSG00000169696_22 (sequence is synthesized)
gctgtcacccagtgtgggcatggtgggggtgctggaatgctgtgtagggcaggaggcagcagcccgtggctgggtgggagactgcagggtagacgggacgggaccaggagggttgttcgc

SEQ ID NO: 561825 - DNA, 120 bp, Artificial Sequence
  ENSG00000169696_23 (sequence is synthesized)
agggactgccaagccatccccaggtgtcgagagtgtgaggtaggagtgggagcccagagccggctccaggccaccccaactcccgacagctctcggctgttctgtgtgaggggggacggg

SEQ ID NO: 561826 - DNA, 120 bp, Artificial Sequence
  ENSG00000169696_24 (sequence is synthesized)
gccgagtgtgggtcggcgcagtgctgaggtgtcccacgtaccccagcactgtgctgaatgcattgaaatcactgcccagggctccgcgagctgcacggcccggctttgtcaatttcattg

SEQ ID NO: 561827 - DNA, 120 bp, Artificial Sequence
  ENSG00000169696_25 (sequence is synthesized)
catggagctgtggccaagagggcagcgggggcagctggactggggtttttgccgacgctctaatttggcggctgtcgccacccctcccccccatggagaccctgacgtggcctgagccag

SEQ ID NO: 561828 - DNA, 120 bp, Artificial Sequence
  ENSG00000169696_26 (sequence is synthesized)
actccaggggccatgtgccctgctggggagcaggggctcagcatcaggtctggtgcactgactgggagaggggggtctccagccctggacaggctctgagtggggtggggtcccccagct

SEQ ID NO: 561829 - DNA, 120 bp, Artificial Sequence
  ENSG00000169696_27 (sequence is synthesized)
gctgtgcccagccctgcccccaggacctggccttggccctgcgctggccggggccagggagggagtgggcccagctcccaagtctgtgtgaccacctcggctggggcactgacagcccgg

SEQ ID NO: 561830 - DNA, 120 bp, Artificial Sequence
  ENSG00000169696_28 (sequence is synthesized)
ctcctggcaccggcgaggaggctggggaggggggacgggaattcccccaggggccaggccttgactgccctgcagggccctcgctgtcgcttttttccctcacagtgtctcatccctcaa

SEQ ID NO: 561831 - DNA, 120 bp, Artificial Sequence
  ENSG00000169696_29 (sequence is synthesized)
cctctgttttccatccaaaggcatctctgtgaatccacctggcgcgggagcggcgctgatgccacaaatgcgggccagactgctgggcagagctcaccagtcaacagggctgggtgtggc

SEQ ID NO: 561832 - DNA, 120 bp, Artificial Sequence
  ENSG00000169696_30 (sequence is synthesized)
tggggcagccctgagaccccaggccctgccgctgtggctcccccttcctggcccctcttctctgtgggacagaaagtctctcctggggaaggctcggagctgagctgatgggtgtttgaa

SEQ ID NO: 561833 - DNA, 120 bp, Artificial Sequence
  ENSG00000169696_31 (sequence is synthesized)
gtttctccacacacagggtcccctggcatctccctctgtcatttggtggccaagtgacatttcccagcagccctactgcagacgccatatgttctcggggtgactcaggtggcctgggcc

SEQ ID NO: 561834 - DNA, 120 bp, Artificial Sequence
  ENSG00000169696_32 (sequence is synthesized)
cttctggtagccgcttatccagcctgaccccaggctccagcgaggctgctccggatcggggctgctctgcccaggtgaagggcgggtgtgggaggtttccgtagaggccgctctcccctg

SEQ ID NO: 561835 - DNA, 120 bp, Artificial Sequence
  ENSG00000169696_33 (sequence is synthesized)
ctaccacggccccgtgtgggaccctgggtctgtctgacagacagaggcttcctgagccaggcccttgggatgacgggtaggaatctagggtggatccacaggaattagagattttttcag

SEQ ID NO: 561836 - DNA, 120 bp, Artificial Sequence
  ENSG00000169696_34 (sequence is synthesized)
gccgatgtgctggtggccaggtaagtgccggtgggtctgggggcacctcccgtggcggcactcaccactctgtgtcttcgcctccccacaggtacatgtccagggccgccgggtcccctt

SEQ ID NO: 561837 - DNA, 120 bp, Artificial Sequence
  ENSG00000169696_35 (sequence is synthesized)
ccgtctccatcccctcccttgctggccagccagttgataaacattgaatttggaagatgccttgggatggaggaggaccagtgcccaggcctgcagcccaccctcccgctgggaggcccc

SEQ ID NO: 561838 - DNA, 120 bp, Artificial Sequence
  ENSG00000169696_36 (sequence is synthesized)
tgagagcactggggtgctgctgccctgtttctggggacgcttggcttccctaccagccaccgtctcctgccctccatcagctcggctctagcctcggggcctctcggggtggtgtccccg

SEQ ID NO: 561839 - DNA, 120 bp, Artificial Sequence
  ENSG00000169696_37 (sequence is synthesized)
gtgacgtgcctgcctgcctgcctgccgtcagagagctggcggggctgagggaaggaagcctgcctccctggcaggcaagcaggcggcgggcgcggaagcaccagctttcacgtctctggc

SEQ ID NO: 561840 - DNA, 120 bp, Artificial Sequence
  ENSG00000169696_38 (sequence is synthesized)
agagccccactccggctgcctgctgcctgggggatgtccaggggccggcccccggcttccgagagggacagcgtgcgtgggtgtgggggctccggtagcccggcagccctctgtggccct

SEQ ID NO: 561841 - DNA, 120 bp, Artificial Sequence
  ENSG00000169696_39 (sequence is synthesized)
ggcccaggagagtgcaggttttctgggagggctgggaggaggcggccaggagtgaggacagggaattgtgagcagtgtgggggcaccactgtggggaacaaagccccccgcccctgcctg

SEQ ID NO: 561842 - DNA, 120 bp, Artificial Sequence
  ENSG00000169696_40 (sequence is synthesized)
aaacctgcgtcctggccctgggcatcagggctggccctgccctggtgtcctcacacagtcacttctgtgtgcggtccgcgtcctcaggtcatgaggaaggtcaccctgggctaggcccac

SEQ ID NO: 561843 - DNA, 120 bp, Artificial Sequence
  ENSG00000169696_41 (sequence is synthesized)
ctttgatgtcacggtcacctcacttatctcttcaaaggctctgctgtttgggcttccttccattggctttggcagggcaagcctggctcctaacaccctccgtttgttggagctctcagg

SEQ ID NO: 561844 - DNA, 120 bp, Artificial Sequence
  ENSG00000169696_42 (sequence is synthesized)
ctgcctctggggaccgtctgccaggacacaggccacccttgctgcctggttccccactccccaagccactcacctggcagggcgtgactggcacttctggcctgagtgcctgctgggcgc

SEQ ID NO: 561845 - DNA, 120 bp, Artificial Sequence
  ENSG00000169696_43 (sequence is synthesized)
ccgcccctagccagttctgtcgtccttcctttccacccaggacagccccgtcctgcactgccgtgtcgcccactgccggggcctctctgggaccaacaggcccccttccttccacccacc

SEQ ID NO: 561846 - DNA, 120 bp, Artificial Sequence
  ENSG00000169696_44 (sequence is synthesized)
aggccctaccccacctggaccctctgaaatgttcctcgttgacaaatggtcttgcagaaggcaggatggctcctgcagcccccactcccgctctgtgggtggatgccccgtctctccctg

SEQ ID NO: 561847 - DNA, 120 bp, Artificial Sequence
  ENSG00000169696_45 (sequence is synthesized)
cccaggcaccgtggtgccttctctctcccgggcaccgtggtgccacctccctcccagacaccatgatgctgcctccctcccgggctctgtggtgccatctccctgccgaggcactgtggt

SEQ ID NO: 561848 - DNA, 120 bp, Artificial Sequence
  ENSG00000169696_46 (sequence is synthesized)
gccgccttcctcccgggcacggtggtgccgcctccctcccaggcgctgtggtgccgcctccctcccgggcgtcttgagctgcaagggctcctctcttggcttcgttccccggagggtggt

SEQ ID NO: 561849 - DNA, 120 bp, Artificial Sequence
  ENSG00000169696_47 (sequence is synthesized)
gctgttctcgttggagggggcggccaggcgctgggccacgtgtgcatgcagcccctacagagttgctgccccgtgggggttgacgtgggcctcctttcggaagctcttcctggcaacact

SEQ ID NO: 561850 - DNA, 120 bp, Artificial Sequence
  ENSG00000169696_48 (sequence is synthesized)
gagtggggcaaggggttggcagcagagaggcggctggatttggggccccagtgtcctgggcggcagctagggaggggccggctccaggccctcaggctgtgtcagggcagggcgggcacc

SEQ ID NO: 561851 - DNA, 120 bp, Artificial Sequence
  ENSG00000169696_49 (sequence is synthesized)
cccacttctccctgtcagccgagggagccaggcaggggcagcctgagacatcctgggacagtgctggtggggagaggcccctcagcctgtgcctccctcaaaggcccttcccgggccctg

SEQ ID NO: 561852 - DNA, 120 bp, Artificial Sequence
  ENSG00000169696_50 (sequence is synthesized)
gtgccccaggcctggctgccaagcctacttccctctcctggtgttcccgagtcctgcccgcccctttctgtgcgtcccgtggggcagtgctggttgggggtcctggcctgtgggggctat

SEQ ID NO: 561853 - DNA, 120 bp, Artificial Sequence
  ENSG00000169696_51 (sequence is synthesized)
gatgagaaccaggtgcctctctgcatcggtggcctctgagggagccctctcgcccggcagcaggtgggatgcagatggggctggccagggctcctgtgcccacagcagcctctgggcagt

SEQ ID NO: 561854 - DNA, 120 bp, Artificial Sequence
  ENSG00000169696_52 (sequence is synthesized)
gtcccctgggcttctgtgagcagccgcagcctgggtgtgaatcttggaggcccggtggtggcggagcatgctctccatctgggagaggctgagaccatggcagctcctggcgctgtcctc

SEQ ID NO: 561855 - DNA, 120 bp, Artificial Sequence
  ENSG00000169696_53 (sequence is synthesized)
cccgtgcccccttcctggctccccagcttccggcgcctctccagggccactcgggcagcccctgcccaccccacaggcccttctctgctcacaaggctttgatcccaggcggcacaattg

SEQ ID NO: 561856 - DNA, 120 bp, Artificial Sequence
  ENSG00000169696_54 (sequence is synthesized)
ggttttcaaagcattcacggcccttgtttgtgtccctgggcccccggctggaggctgaggtttcggcgttcctgggcctggcctttgaagcttcctcttattaatcttttaacatccccc

SEQ ID NO: 561857 - DNA, 120 bp, Artificial Sequence
  ENSG00000169696_55 (sequence is synthesized)
agccccactcccacccccagcctgtggccctgagcagcctggagccgggagggggaatctggagctgggagggggataccccagcctggcagctgcacccctccacggtggtcccggcgc

SEQ ID NO: 561858 - DNA, 120 bp, Artificial Sequence
  ENSG00000169696_56 (sequence is synthesized)
atccgccaggacccgccacgcctggccccaccttcctcgggtgcagaggccagaggagggaggacggtgatgctgcatggcttgaggaccctcgaggccccagccttcagctggcttggg

SEQ ID NO: 561859 - DNA, 120 bp, Artificial Sequence
  ENSG00000169696_57 (sequence is synthesized)
gcttggggtggtcccatggagggcgctggtcccaggacgccctggccttgcttacaggggtagggctggtgtcagacaggaagctgggcgatgggctcatgggggccgggcaggcagagc

SEQ ID NO: 561860 - DNA, 120 bp, Artificial Sequence
  ENSG00000169696_58 (sequence is synthesized)
ctgtctgagggtggagctggggcctggccctgggggtgtagctgccttcacagcaggggggtgctctgcccacacccggcccctgagccccccgccctccctgcaggcgaacctcttccc

SEQ ID NO: 561861 - DNA, 120 bp, Artificial Sequence
  ENSG00000169696_59 (sequence is synthesized)
cggtctggggcctcctttgggtctgagagggagatctgcggcccccagtaaccacctccccgagagaggactgggacagccacctgctggccacccccctcccagagctgagtgctggtg

SEQ ID NO: 561862 - DNA, 120 bp, Artificial Sequence
  ENSG00000169696_60 (sequence is synthesized)
ggcagatgctgggtggatggtgagtggacccctcctcagaggctcagggtgagcttgggcctccctgcaggtgtctacctggagcctggcctgctggagcatgccatctccccatctgcg

SEQ ID NO: 561863 - DNA, 120 bp, Artificial Sequence
  ENSG00000169696_61 (sequence is synthesized)
acgtgagcggaaaatggcggccccggcaggcggcggaggctccgcggtgtcggtgctggccccgaacggccggcgccacacggtgaaggtgacgccgagcaccgtgctgcttcaggtttc

SEQ ID NO: 561864 - DNA, 120 bp, Artificial Sequence
  ENSG00000169696_62 (sequence is synthesized)
tggccggccctcggagcccgggctgccccgaaacctccctcggcgccctgtttgttttttcagcttctctcaaagcccaagagtcacaaaagtggtttcatttaataaatatttgctttg

SEQ ID NO: 561865 - DNA, 120 bp, Artificial Sequence
  ENSG00000169696_63 (sequence is synthesized)
ttcggggcatctggataaatggttagcatcattgtggtccggtccttggcggccctcctggaggccgggacctgggggtccaccgggggcctgggtttgcaggagacaggaaggggctaa

SEQ ID NO: 561866 - DNA, 120 bp, Artificial Sequence
  ENSG00000169696_64 (sequence is synthesized)
aggggcagaagcatgcaggggcttcacctgcaggaggagtcgggtctttcacagctgcccggccaccctcggagcctgagaggccatcacacctttccctcatggtgccagctggaccct

SEQ ID NO: 561867 - DNA, 120 bp, Artificial Sequence
  ENSG00000169696_65 (sequence is synthesized)
ccacgctccttgcctccttgtgtgtcatgtggcagccacaggcacccccaccctgtggcgcattttgagcttctggggagctcagcacacacagcccctgtgaaagtgcagtgccggctg

SEQ ID NO: 561868 - DNA, 120 bp, Artificial Sequence
  ENSG00000169696_66 (sequence is synthesized)
ctggaccctgctgtgcccccggcatcacccctgtcctctgagacctctgactctgcccagcaagaggggcagggtcgggaagaagggagtgtggggcctttggaagccgggcccaggcag

SEQ ID NO: 561869 - DNA, 120 bp, Artificial Sequence
  ENSG00000169696_67 (sequence is synthesized)
tgaggcggaaaccaggctgggctcagcatggcgagctcctcctggtgaaggcactggtgtccgggggcatcagcggcacagagaaggttctgggctccatctcctgaacctgtctggaag

SEQ ID NO: 561870 - DNA, 120 bp, Artificial Sequence
  ENSG00000169696_68 (sequence is synthesized)
agcccagctgctcccatggacctgcgacctgctgcccggggccgggggtctgggcctctttgcatcggctcaggggaggccatccgtggctgggcgagggtcagctgccatttggatgcc

SEQ ID NO: 561871 - DNA, 120 bp, Artificial Sequence
  ENSG00000169696_69 (sequence is synthesized)
ccggcagccgtggggctctcgcctctgccagagcaggcagcttccgaggtggcaagggctttggggagcagcgggaggcctgggggtgccgagtgttccggaaatattgctggttcttct

SEQ ID NO: 561872 - DNA, 120 bp, Artificial Sequence
  ENSG00000169696_70 (sequence is synthesized)
ggggcagtcctggcccgctgggcagagcagaacacggcctctgctcagtggcagggtggggcgccggggtggcggaaacatgaggccgcgtgaagtgggcatcagttgggccctggggtt

SEQ ID NO: 561873 - DNA, 120 bp, Artificial Sequence
  ENSG00000169696_71 (sequence is synthesized)
tggtctcggaggcctgcggggcagtggtcccccggctcttgctgccctgcggttcagttcctcctgctgcagcgcctgtgtgccccgtgggtcggcaggtctcgtgagaggcctcatctg

SEQ ID NO: 561874 - DNA, 120 bp, Artificial Sequence
  ENSG00000169696_72 (sequence is synthesized)
agacaggaagccccacgcaggcttctggaaggctcctcctggctctcagccaccccgttggctgagtgagactgaccccagcagcttcctgaggcgtggcaaggcccccagggacacctg

SEQ ID NO: 561875 - DNA, 120 bp, Artificial Sequence
  ENSG00000169696_73 (sequence is synthesized)
gcggccacacacctgggggaccccaccaaggctgagacccaggttggggccccctgcactgctgaggtttgggcctcattccccgctggccctccgtctgcttgggagctttccaggtgg

SEQ ID NO: 561876 - DNA, 120 bp, Artificial Sequence
  ENSG00000169696_74 (sequence is synthesized)
ggatgtttgtagggacagtggtatggcatccagttgcctcctccctgaaaccttcaacccgaacctcactcagcacagagaattgggggccagaccacggcggacggaggcgtcctgctg

SEQ ID NO: 561877 - DNA, 120 bp, Artificial Sequence
  ENSG00000169696_75 (sequence is synthesized)
acacagcccctgtcgggatgtgggaaggggcggaggcacagctccagccccagcgtgaccgtgtgtgtgggaaaaccgtccgggtacttggggacagcagggacatttccagtgtgggtg

SEQ ID NO: 561878 - DNA, 120 bp, Artificial Sequence
  ENSG00000169696_76 (sequence is synthesized)
tgtgagagccacctcccccatgcggtgggccctggtgtgatgctggcagctgggacaagagtccttctctcagcagatgctgctgtgctcctggggcacagtctgtggttttcttttgtg

SEQ ID NO: 561879 - DNA, 120 bp, Artificial Sequence
  ENSG00000169696_77 (sequence is synthesized)
tgcatgtccatgcttgggtgttgtgtgcatgtccttgcgtgtgcgtgtccttgcgtgtgcacgtgtgtgcttgggggcgtgtgtgtgtccttgcgggtacacatgcgtgcttggggtgtg

SEQ ID NO: 561880 - DNA, 120 bp, Artificial Sequence
  ENSG00000169696_78 (sequence is synthesized)
tgtgcatgtccttgtgggtgcacgtgtgtgcacgggtgtgtgtgtgtgcgtccttgcatgtgcacaggtgtgtgtgtgtgtgtgtgtccttgcgggtgcatgtgcatgcttggggggcgt

SEQ ID NO: 561881 - DNA, 120 bp, Artificial Sequence
  ENSG00000169696_79 (sequence is synthesized)
gtgcgtgtccttgcgggtgcacgtgcgtgtttgggggtgtgtgtgtgtccttgcgggtgcacgtgtgcttgggtgcatgcaggtgtgtgtgtatatgcatgtctgtgtgtgcacatatgt

SEQ ID NO: 561882 - DNA, 120 bp, Artificial Sequence
  ENSG00000169696_80 (sequence is synthesized)
gcatgcatgtttgccccagagcggaaggaaagtgaatgcagccgaatgatcacatctgcatgaggggtgttcactgttgtgtctgcccatctttctgtgggctgaaatatttcaaaataa

SEQ ID NO: 561883 - DNA, 120 bp, Artificial Sequence
  ENSG00000169696_81 (sequence is synthesized)
gaaattgaggggaaagagaaaggagggtgcttgtctctctccttgcctcctgctcctcctccctgtgttggaggctccaggacgcctcacccccggttgacgtcatttttggcctgcaca

SEQ ID NO: 561884 - DNA, 120 bp, Artificial Sequence
  ENSG00000169696_82 (sequence is synthesized)
gctgcgagtcaggagggcagctccttctggaagcctggagctggtgaggccaggtgctttccctgctgcggtggctggcgatgggagtgtttcctgaggctgccaccaagcccctcctca

SEQ ID NO: 561885 - DNA, 120 bp, Artificial Sequence
  ENSG00000169696_83 (sequence is synthesized)
ctgtcctgaggctgtggccctcagggacccttacaccctttggcttttgtgctgggccattgactgtgccctcgctagaggcagcttctccaccccttcctcacaggtgacgggtgaagc

SEQ ID NO: 561886 - DNA, 120 bp, Artificial Sequence
  ENSG00000169696_84 (sequence is synthesized)
agaagcaatgaatgtcctgtccttggcctgtgggagagctgcctggggccttccgaagccctctggcctaatggtttcctcttcaaagcctcttcagatattttaattagccacagaggc

SEQ ID NO: 561887 - DNA, 120 bp, Artificial Sequence
  ENSG00000169696_85 (sequence is synthesized)
cggtgatgctgcatggcttgaggaccctcgaggccccagccttcagctggcttggggcttggggtggtcccatggagggcgctggtcccaggacgccctggccttgcttacaggggcgaa

SEQ ID NO: 561888 - DNA, 78 bp, Artificial Sequence
  ENSG00000169696_86 (sequence is synthesized)
tgcacttttacttgggcaccttgtgaccgcgaatcaattaaatgtaaaagtgtgggatgccgaggcgggtggatcacg

SEQ ID NO: 561889 - DNA, 86 bp, Artificial Sequence
  ENSG00000169696_87 (sequence is synthesized)
cccttggtgaccaaggccttcagggaggcgcagataaaggagaagctggagcgctacccaacagtggtgccatctcagctcactgc

SEQ ID NO: 561890 - DNA, 120 bp, Artificial Sequence
  ENSG00000169696_88 (sequence is synthesized)
cgtcacctgcgcttccgctggggtcccgggggtcccgggggtcccgagtgggggcggggcggtggcgagccttcccaggggtgaggtagaacggcgccgcgtgtcacccgcatcgagtac

SEQ ID NO: 561891 - DNA, 120 bp, Artificial Sequence
  ENSG00000169696_89 (sequence is synthesized)
tcggcgcccggccgagcccagctcgcgagggcgccgggaagagggaggagtggagccctagacccgcgttcccattccggggcgtcccccggagcgggagcccgggttgcgcggtggcag

SEQ ID NO: 561892 - DNA, 120 bp, Artificial Sequence
  ENSG00000169696_90 (sequence is synthesized)
ccagcctgggagacagagcgagactccatatcaaaaaaaaaaaaaaaaagtatttattgagcctctgctgcgtgggggaccgtgaggatccgaaggtgcacacgactcggagtttgcggg

SEQ ID NO: 561893 - DNA, 120 bp, Artificial Sequence
  ENSG00000169696_91 (sequence is synthesized)
cgtgaggatccgaaggtgcacacgactcggagtttgcgggagcagcccacggcgtggggtccccaggcctgggcaggtggagggcgcagccaggaggctgttggtgccaggcgtgcagag

SEQ ID NO: 561894 - DNA, 120 bp, Artificial Sequence
  ENSG00000169696_92 (sequence is synthesized)
caggagtgtgggcacagggcgtgctcgtgaggggctcttctgccccacttgaggcgtcacccccatctgcaggcctgtcttccttcgggcgcatggatgggcgaggtccacggtgcttcc

SEQ ID NO: 561895 - DNA, 120 bp, Artificial Sequence
  ENSG00000169704_0 (sequence is synthesized)
cagctgtatcccatagagttgccacccaggcctcagccaggacctttcaggccagacaggagcacctgaccaaaggcttcacagccgccctcaccgcccggccttctacggtgtccagag

SEQ ID NO: 561896 - DNA, 120 bp, Artificial Sequence
  ENSG00000169704_1 (sequence is synthesized)
acagttagccaggcctgggctgggcacactccaccttccctagtcaccagctggtttcccagaggagaaggctgagacccgagaagggagccagcctgtcccatgcctgcctggggagcc

SEQ ID NO: 561897 - DNA, 120 bp, Artificial Sequence
  ENSG00000169704_2 (sequence is synthesized)
ctgttcctgctctgggccacagcagaggccaccaaggactgccccagcccatgtacctgccgcgccctggaaaccatggggctgtgggtggactgcaggggccacggactcacggccctg

SEQ ID NO: 561898 - DNA, 120 bp, Artificial Sequence
  ENSG00000169704_3 (sequence is synthesized)
ttcagtccgtgcccccgggagcctttgaccacctgccccagctgcagaccctcgatgtgacgcagaacccctggcactgtgactgcagcctcacctatctgcgcctctggctggaggacc

SEQ ID NO: 561899 - DNA, 120 bp, Artificial Sequence
  ENSG00000169704_4 (sequence is synthesized)
gcacgcccgaggccctgctgcaggtccgctgtgccagccccagcctcgctgcccatggcccgctgggccggctgacaggctaccagctgggcagctgtggctggcagctgcaggcgtcct

SEQ ID NO: 561900 - DNA, 120 bp, Artificial Sequence
  ENSG00000169704_5 (sequence is synthesized)
gggtgcgcccgggggtcttgtgggacgtggcgctggtcgccgtggccgcgctgggcctggctcttctggctggcctgctgtgtgccaccacagaggccctggattgagccaggcccccag

SEQ ID NO: 561901 - DNA, 120 bp, Artificial Sequence
  ENSG00000169704_6 (sequence is synthesized)
aacccctggctccaggccagggggccagtccctgaggcaggtccccagactccaccaagcctggtcagcccaaaccaccagaagcccagaataaactggcagctcagctgttttatataa

SEQ ID NO: 561902 - DNA, 120 bp, Artificial Sequence
  ENSG00000169710_0 (sequence is synthesized)
gccccggcctccctctccgccgcgcttcagcctcccgctccgccgcgctccagcctcgctctccgccgcccgcaccgccgcccgcgccctcaccagagcagccatggaggaggtggtgat

SEQ ID NO: 561903 - DNA, 120 bp, Artificial Sequence
  ENSG00000169710_1 (sequence is synthesized)
gccatggaggaggtggtgattgccggcatgtccgggaagctgccagagtcggagaacttgcaggagttctgggacaacctcatcggcggtgtggacatggtcacggacgatgaccgtcgc

SEQ ID NO: 561904 - DNA, 120 bp, Artificial Sequence
  ENSG00000169710_2 (sequence is synthesized)
tggaaggcggggctctacggcctgccccggcggtccggcaagctgaaggacctgtctaggtttgatgcctccttcttcggagtccaccccaagcaggcacacacgatggaccctcagctg

SEQ ID NO: 561905 - DNA, 120 bp, Artificial Sequence
  ENSG00000169710_3 (sequence is synthesized)
cggctgctgctggaagtcacctatgaagccatcgtggacggaggcatcaacccagattcactccgaggaacacacactggcgtctgggtgggcgtgagcggctctgagacctcggaggcc

SEQ ID NO: 561906 - DNA, 120 bp, Artificial Sequence
  ENSG00000169710_4 (sequence is synthesized)
ctgagccgagaccccgagacactcgtgggctacagcatggtgggctgccagcgagcgatgatggccaaccggctctccttcttcttcgacttcagagggcccagcatcgcactggacaca

SEQ ID NO: 561907 - DNA, 120 bp, Artificial Sequence
  ENSG00000169710_5 (sequence is synthesized)
gcctgctcctccagcctgatggccctgcagaacgcctaccaggccatccacagcgggcagtgccctgccgccatcgtggggggcatcaatgtcctgctgaagcccaacacctccgtgcag

SEQ ID NO: 561908 - DNA, 120 bp, Artificial Sequence
  ENSG00000169710_6 (sequence is synthesized)
ttcttgaggctggggatgctcagccccgagggcacctgcaaggccttcgacacagcggggaatgggtactgccgctcggagggtgtggtggccgtcctgctgaccaagaagtccctggcc

SEQ ID NO: 561909 - DNA, 120 bp, Artificial Sequence
  ENSG00000169710_7 (sequence is synthesized)
cggcgggtgtacgccaccatcctgaacgccggcaccaatacagatggcttcaaggagcaaggcgtgaccttcccctcaggggatatccaggagcagctcatccgctcgttgtaccagtcg

SEQ ID NO: 561910 - DNA, 120 bp, Artificial Sequence
  ENSG00000169710_8 (sequence is synthesized)
gccggagtggcccctgagtcatttgaatacatcgaagcccacggcacaggcaccaaggtgggcgacccccaggagctgaatggcatcacccgagccctgtgcgccacccgccaggagccg

SEQ ID NO: 561911 - DNA, 120 bp, Artificial Sequence
  ENSG00000169710_9 (sequence is synthesized)
ctgctcatcggctccaccaagtccaacatggggcacccggagccagcctcggggctggcagccctggccaaggtgctgctgtccctggagcacgggctctgggcccccaacctgcacttc

SEQ ID NO: 561912 - DNA, 120 bp, Artificial Sequence
  ENSG00000169710_10 (sequence is synthesized)
catagccccaaccctgagatcccagcgctgttggatgggcggctgcaggtggtggaccagcccctgcccgtccgtggcggcaacgtgggcatcaactcctttggcttcgggggctccaac

SEQ ID NO: 561913 - DNA, 120 bp, Artificial Sequence
  ENSG00000169710_11 (sequence is synthesized)
gtgcacatcatcctgaggcccaacacgcagccgccccccgcacccgccccacatgccaccctgccccgtctgctgcgggccagcggacgcacccctgaggccgtgcagaagctgctggag

SEQ ID NO: 561914 - DNA, 120 bp, Artificial Sequence
  ENSG00000169710_12 (sequence is synthesized)
cagggcctccggcacagccaggacctggctttcctgagcatgctgaacgacatcgcggctgtccccgccaccgccatgcccttccgtggctacgctgtgctgggtggtgagcgcggtggc

SEQ ID NO: 561915 - DNA, 120 bp, Artificial Sequence
  ENSG00000169710_13 (sequence is synthesized)
ccagaggtgcagcaggtgcccgctggcgagcgcccgctctggttcatctgctctgggatgggcacacagtggcgcgggatggggctgagcctcatgcgcctggaccgcttccgagattcc

SEQ ID NO: 561916 - DNA, 120 bp, Artificial Sequence
  ENSG00000169710_14 (sequence is synthesized)
atcctacgctccgatgaggctgtgaagccattcggcctgaaggtgtcacagctgctgctgagcacagacgagagcacctttgatgacatcgtccattcgtttgtgagcctgactgccatc

SEQ ID NO: 561917 - DNA, 120 bp, Artificial Sequence
  ENSG00000169710_15 (sequence is synthesized)
cagataggcctcatagacctgctgagctgcatggggctgaggccagatggcatcgtcggccactccctgggggaggtggcctgtggctacgccgacggctgcctgtcccaggaggaggcc

SEQ ID NO: 561918 - DNA, 120 bp, Artificial Sequence
  ENSG00000169710_16 (sequence is synthesized)
gtcctcgctgcctactggaggggacagtgcatcaaagaagcccatctcccgccgggcgccatggcagccgtgggcttgtcctgggaggagtgtaaacagcgctgccccccgggcgtggtg

SEQ ID NO: 561919 - DNA, 120 bp, Artificial Sequence
  ENSG00000169710_17 (sequence is synthesized)
cccgcctgccacaactccaaggacacagtcaccatctcgggacctcaggccccggtgtttgagttcgtggagcagctgaggaaggagggtgtgtttgccaaggaggtgcggaccggcggt

SEQ ID NO: 561920 - DNA, 120 bp, Artificial Sequence
  ENSG00000169710_18 (sequence is synthesized)
atggccttccactcctacttcatggaggccatcgcacccccactgctgcaggagctcaagaaggtgatccgggagccgaagccacgttcagcccgctggctcagcacctctatccccgag

SEQ ID NO: 561921 - DNA, 120 bp, Artificial Sequence
  ENSG00000169710_19 (sequence is synthesized)
gcccagtggcacagcagcctggcacgcacgtcctccgccgagtacaatgtcaacaacctggtgagccctgtgctgttccaggaggccctgtggcacgtgcctgagcacgcggtggtgctg

SEQ ID NO: 561922 - DNA, 120 bp, Artificial Sequence
  ENSG00000169710_20 (sequence is synthesized)
gagatcgcgccccacgccctgctgcaggctgtcctgaagcgtggcctgaagccgagctgcaccatcatccccctgatgaagaaggatcacagggacaacctggagttcttcctggccggc

SEQ ID NO: 561923 - DNA, 120 bp, Artificial Sequence
  ENSG00000169710_21 (sequence is synthesized)
atcggcaggctgcacctctcaggcatcgacgccaaccccaatgccttgttcccacctgtggagttcccagctccccgaggaactcccctcatctccccactcatcaagtgggaccacagc

SEQ ID NO: 561924 - DNA, 120 bp, Artificial Sequence
  ENSG00000169710_22 (sequence is synthesized)
ctggcctgggacgtgccggccgccgaggacttccccaacggttcaggttccccctcagccgccatctacaacatcgacaccagctccgagtctcctgaccactacctggtggaccacacc

SEQ ID NO: 561925 - DNA, 120 bp, Artificial Sequence
  ENSG00000169710_23 (sequence is synthesized)
ctcgacggtcgcgtcctcttccccgccactggctacctgagcatagtgtggaagacgctggcccgcgccctgggcctgggcgtcgagcagctgcctgtggtgtttgaggatgtggtgctg

SEQ ID NO: 561926 - DNA, 120 bp, Artificial Sequence
  ENSG00000169710_24 (sequence is synthesized)
caccaggccaccatcctgcccaagactgggacagtgtccctggaggtacggctcctggaggcctcccgtgccttcgaggtgtcagagaacggcaacctggtagtgagtgggaaggtgtac

SEQ ID NO: 561927 - DNA, 120 bp, Artificial Sequence
  ENSG00000169710_25 (sequence is synthesized)
cagtgggatgaccctgaccccaggctcttcgaccacccggaaagccccacccccaaccccacggagcccctcttcctggcccaggctgaagtttacaaggagctgcgtctgcgtggctac

SEQ ID NO: 561928 - DNA, 120 bp, Artificial Sequence
  ENSG00000169710_26 (sequence is synthesized)
gactacggccctcatttccagggcatcctggaggccagcctggaaggtgactcggggaggctgctgtggaaggataactgggtgagcttcatggacaccatgctgcagatgtccatcctg

SEQ ID NO: 561929 - DNA, 120 bp, Artificial Sequence
  ENSG00000169710_27 (sequence is synthesized)
ggctcggccaagcacggcctgtacctgcccacccgtgtcaccgccatccacatcgaccctgccacccacaggcagaagctgtacacactgcaggacaaggcccaagtggctgacgtggtg

SEQ ID NO: 561930 - DNA, 120 bp, Artificial Sequence
  ENSG00000169710_28 (sequence is synthesized)
gtgagcaggtggctgagggtcacagtggccggaggcgtccacatctccgggctccacactgagtcggccccgcggcggcagcaggagcagcaggtgcccatcctggagaagttttgcttc

SEQ ID NO: 561931 - DNA, 120 bp, Artificial Sequence
  ENSG00000169710_29 (sequence is synthesized)
actccccacacggaggaggggtgcctgtctgagcgcgctgccctgcaggaggagctgcaactgtgcaaggggctggtgcaggcactgcagaccaaggtgacccagcaggggctgaagatg

SEQ ID NO: 561932 - DNA, 120 bp, Artificial Sequence
  ENSG00000169710_30 (sequence is synthesized)
gtggtgcccggactggatggggcccagatcccccgggacccctcacagcaggaactgccccggctgttgtcggctgcctgcaggcttcagctcaacgggaacctgcagctggagctggcg

SEQ ID NO: 561933 - DNA, 120 bp, Artificial Sequence
  ENSG00000169710_31 (sequence is synthesized)
caggtgctggcccaggagaggcccaagctgccagaggaccctctgctcagcggcctcctggactccccggcactcaaggcctgcctggacactgccgtggagaacatgcccagcctgaag

SEQ ID NO: 561934 - DNA, 120 bp, Artificial Sequence
  ENSG00000169710_32 (sequence is synthesized)
atgaaggtggtggaggtgctggctggccacggtcacctgtattcccgcatcccaggcctgctcagcccccatcccctgctgcagctgagctacacggccaccgaccgccacccccaggcc

SEQ ID NO: 561935 - DNA, 120 bp, Artificial Sequence
  ENSG00000169710_33 (sequence is synthesized)
ctggaggctgcccaggccgagctgcagcagcacgacgttgcccagggccagtgggatcccgcagaccctgcccccagcgccctgggcagcgccgacctcctggtgtgcaactgtgctgtg

SEQ ID NO: 561936 - DNA, 120 bp, Artificial Sequence
  ENSG00000169710_34 (sequence is synthesized)
gctgccctcggggacccggcctcagctctcagcaacatggtggctgccctgagagaagggggctttctgctcctgcacacactgctccgggggcaccccctcggggacatcgtggccttc

SEQ ID NO: 561937 - DNA, 120 bp, Artificial Sequence
  ENSG00000169710_35 (sequence is synthesized)
tctccagggtgtcgctgcgcctggtgggcctgaagaagtccttctacggctccacgctcttcctgtgccgccggcccaccccgcaggacagccccatcttcctgccggtggacgatacca

SEQ ID NO: 561938 - DNA, 120 bp, Artificial Sequence
  ENSG00000169710_36 (sequence is synthesized)
gcttccgctgggtggagtctctgaagggcatcctggctgacgaagactcttcccggcctgtgtggctgaaggccatcaactgtgccacctcgggcgtggtgggcttggtgaactgtctcc

SEQ ID NO: 561939 - DNA, 120 bp, Artificial Sequence
  ENSG00000169710_37 (sequence is synthesized)
gccgagagcccggcgggaaccgcctccggtgtgtgctgctctccaacctcagcagcacctcccacgtcccggaggtggacccgggctccgcagaactgcagaaggtgttgcagggagacc

SEQ ID NO: 561940 - DNA, 120 bp, Artificial Sequence
  ENSG00000169710_38 (sequence is synthesized)
tggtgatgaacgtctaccgcgacggggcctggggggctttccgccacttcctgctggaggaggacaagcctgaggagccgacggcacatgcctttgtgagcaccctcacccggggggacc

SEQ ID NO: 561941 - DNA, 120 bp, Artificial Sequence
  ENSG00000169710_39 (sequence is synthesized)
tgtcctccatccgctgggtctgctcctcgctgcgccatgcccagcccacctgccctggcgcccagctctgcacggtctactacgcctccctcaacttccgcgacatcatgctggccactg

SEQ ID NO: 561942 - DNA, 120 bp, Artificial Sequence
  ENSG00000169710_40 (sequence is synthesized)
gcaagctgtcccctgatgccatcccagggaagtggacctcccaggacagcctgctaggtatggagttctcgggccgagacgccagcggcaagcgtgtgatgggactggtgcctgccaagg

SEQ ID NO: 561943 - DNA, 120 bp, Artificial Sequence
  ENSG00000169710_41 (sequence is synthesized)
gcctggccacctctgtcctgctgtcaccggacttcctctgggatgtgccttccaactggacgctggaggaggcggcctcggtgcctgtcgtctacagcacggcctactacgcgctggtgg

SEQ ID NO: 561944 - DNA, 120 bp, Artificial Sequence
  ENSG00000169710_42 (sequence is synthesized)
tgcgtgggcgggtgcgccccggggagacgctgctcatccactcgggctcgggcggcgtgggccaggccgccatcgccatcgccctcagtctgggctgccgcgtcttcaccaccgtggggt

SEQ ID NO: 561945 - DNA, 120 bp, Artificial Sequence
  ENSG00000169710_43 (sequence is synthesized)
cggctgagaagcgggcgtacctccaggccaggttcccccagctcgacagcaccagcttcgccaactcccgggacacatccttcgagcagcatgtgctgtggcacacgggcgggaagggcg

SEQ ID NO: 561946 - DNA, 120 bp, Artificial Sequence
  ENSG00000169710_44 (sequence is synthesized)
ttgacctggtcttgaactccttggcggaagagaagctgcaggccagcgtgaggtgcttggctacgcacggtcgcttcctggaaattggcaaattcgacctttctcagaaccacccgctcg

SEQ ID NO: 561947 - DNA, 120 bp, Artificial Sequence
  ENSG00000169710_45 (sequence is synthesized)
gcatggctatcttcctgaagaacgtgacattccacggggtcctactggatgcgttcttcaacgagagcagtgctgactggcgggaggtgtgggcgcttgtgcaggccggcatccgggatg

SEQ ID NO: 561948 - DNA, 120 bp, Artificial Sequence
  ENSG00000169710_46 (sequence is synthesized)
gggtggtacggcccctcaagtgcacggtgttccatggggcccaggtggaggacgccttccgctacatggcccaagggaagcacattggcaaagtcgtcgtgcaggtgcttgcggaggagc

SEQ ID NO: 561949 - DNA, 120 bp, Artificial Sequence
  ENSG00000169710_47 (sequence is synthesized)
cggaggcagtgctgaagggggccaaacccaagctgatgtcggccatctccaagaccttctgcccggcccacaagagctacatcatcgctggtggtctgggtggcttcggcctggagttgg

SEQ ID NO: 561950 - DNA, 120 bp, Artificial Sequence
  ENSG00000169710_48 (sequence is synthesized)
cgcagtggctgatacagcgtggggtgcagaagctcgtgttgacttctcgctccgggatccggacaggctaccaggccaagcaggtccgccggtggaggcgccagggcgtacaggtgcagg

SEQ ID NO: 561951 - DNA, 120 bp, Artificial Sequence
  ENSG00000169710_49 (sequence is synthesized)
tgtccaccagcaacatcagctcactggagggggcccggggcctcattgccgaggcggcgcagcttgggcccgtgggcggcgtcttcaacctggccgtggtcttgagagatggcttgctgg

SEQ ID NO: 561952 - DNA, 120 bp, Artificial Sequence
  ENSG00000169710_50 (sequence is synthesized)
agaaccagaccccagagttcttccaggacgtctgcaagcccaagtacagcggcaccctgaacctggacagggtgacccgagaggcgtgccctgagctggactactttgtggtcttctcct

SEQ ID NO: 561953 - DNA, 120 bp, Artificial Sequence
  ENSG00000169710_51 (sequence is synthesized)
ctgtgagctgcgggcgtggcaatgcgggacagagcaactacggctttgccaattccgccatggagcgtatctgtgagaaacgccggcacgaaggcctcccaggcctggccgtgcagtggg

SEQ ID NO: 561954 - DNA, 120 bp, Artificial Sequence
  ENSG00000169710_52 (sequence is synthesized)
gcgccatcggcgacgtgggcattttggtggagacgatgagcaccaacgacacgatcgtcagtggcacgctgccccagcgcatggcgtcctgcctggaggtgctggacctcttcctgaacc

SEQ ID NO: 561955 - DNA, 120 bp, Artificial Sequence
  ENSG00000169710_53 (sequence is synthesized)
agccccacatggtcctgagcagctttgtgctggctgagaaggctgcggcctatagggacagggacagccagcgggacctggtggaggccgtggcacacatcctgggcatccgcgacttgg

SEQ ID NO: 561956 - DNA, 120 bp, Artificial Sequence
  ENSG00000169710_54 (sequence is synthesized)
ctgctgtcaacctggacagctcactggcggacctgggcctggactcgctcatgagcgtggaggtgcgccagacgctggagcgtgagctcaacctggtgctgtccgtgcgcgaggtgcggc

SEQ ID NO: 561957 - DNA, 120 bp, Artificial Sequence
  ENSG00000169710_55 (sequence is synthesized)
aactcacgctccggaaactgcaggagctgtcctcaaaggcggatgaggccagcgagctggcatgccccacgcccaaggaggatggtctggcccagcagcagactcagctgaacctgcgct

SEQ ID NO: 561958 - DNA, 120 bp, Artificial Sequence
  ENSG00000169710_56 (sequence is synthesized)
ccctgctggtgaacccggagggccccaccctgatgcggctcaactccgtgcagagctcggagcggcccctgttcctggtgcacccaatcgagggctccaccaccgtgttccacagcctgg

SEQ ID NO: 561959 - DNA, 120 bp, Artificial Sequence
  ENSG00000169710_57 (sequence is synthesized)
cctcccggctcagcatccccacctatggcctgcagtgcacccgagctgcgccccttgacagcatccacagcctggctgcctactacatcgactgcatcaggcaggtgcagcccgagggcc

SEQ ID NO: 561960 - DNA, 120 bp, Artificial Sequence
  ENSG00000169710_58 (sequence is synthesized)
cctaccgcgtggccggctactcctacggggcctgcgtggcctttgaaatgtgctcccagctgcaggcccagcagagcccagcccccacccacaacagcctcttcctgttcgacggctcgc

SEQ ID NO: 561961 - DNA, 120 bp, Artificial Sequence
  ENSG00000169710_59 (sequence is synthesized)
ccacctacgtactggcctacacccagagctaccgggcaaagctgaccccaggctgtgaggctgaggctgagacggaggccatatgcttcttcgtgcagcagttcacggacatggagcaca

SEQ ID NO: 561962 - DNA, 120 bp, Artificial Sequence
  ENSG00000169710_60 (sequence is synthesized)
acagggtgctggaggcgctgctgccgctgaagggcctagaggagcgtgtggcagccgccgtggacctgatcatcaagagccaccagggcctggaccgccaggagctgagctttgcggccc

SEQ ID NO: 561963 - DNA, 120 bp, Artificial Sequence
  ENSG00000169710_61 (sequence is synthesized)
ggtccttctactacaagctgcgtgccgctgagcagtacacacccaaggccaagtaccatggcaacgtgatgctactgcgcgccaagacgggtggcgcctacggcgaggacctgggcgcgg

SEQ ID NO: 561964 - DNA, 120 bp, Artificial Sequence
  ENSG00000169710_62 (sequence is synthesized)
actacaacctctcccaggtatgcgacgggaaagtatccgtccacgtcatcgagggtgaccaccgcacgctgctggagggcagcggcctggagtccatcatcagcatcatccacagctccc

SEQ ID NO: 561965 - DNA, 120 bp, Artificial Sequence
  ENSG00000169710_63 (sequence is synthesized)
tggctgagccacgcgtgagcgtgcgggagggctaggcccgtgcccccgcctgccaccggaggtcactccaccatccccaccccaccccaccccacccccgccatgcaacgggattgaagg

SEQ ID NO: 561966 - DNA, 120 bp, Artificial Sequence
  ENSG00000169710_64 (sequence is synthesized)
gtcctgccggtgggaccctgtccggcccagtgccactgccccccgaggctgctagatgtaggtgttaggcatgtcccacccacccgccgcctcccacggcacctcggggacaccagagct

SEQ ID NO: 561967 - DNA, 120 bp, Artificial Sequence
  ENSG00000169710_65 (sequence is synthesized)
gccgacttggagactcctggtctgtgaagagccggtggtgcccgtgcccgcaggaactgggctgggcctcgtgcgcccgtggggtctgcgcttggtctttctgtgcttggatttgcatat

SEQ ID NO: 561968 - DNA, 120 bp, Artificial Sequence
  ENSG00000169710_66 (sequence is synthesized)
ttattgcattgctggtagagacccccaggcctgtccaccctgccaagactcctcaggcagcgtgtgggtcccgcactctgcccccatttccccgatgtcccctgcgggcgcgggcagcca

SEQ ID NO: 561969 - DNA, 120 bp, Artificial Sequence
  ENSG00000169710_67 (sequence is synthesized)
cccaagcctgctggctgcggccccctctcggccaggcattggctcagcccgctgagtggggggtcgtgggccagtccccgaggagctgggcccctgcacaggcacacagggcccggccac

SEQ ID NO: 561970 - DNA, 120 bp, Artificial Sequence
  ENSG00000169710_68 (sequence is synthesized)
acccagcggccccccgcacagccacccgtggggtgctgcccttatgcccggcgccgggcaccaactccatgtttggtgtttgtctgtgtttgtttttcaagaaatgattcaaattgctgc

SEQ ID NO: 561971 - DNA, 120 bp, Artificial Sequence
  ENSG00000169710_69 (sequence is synthesized)
ttggattttgaaatttactgtaactgtcagtgtacacgtctggaccccgtttcatttttacaccaatttggtaaaaatgctgctctcagcctcccacaattaaaccgcatgtgatctcca

SEQ ID NO: 561972 - DNA, 120 bp, Artificial Sequence
  ENSG00000169710_70 (sequence is synthesized)
gtggcgtggccgcccggggatggccgcggtttaaatagcgtcggcgccggcctagagggagccagagagacggcagcggccccggcctccctctccgccgcgcttcagcctcccgctccg

SEQ ID NO: 561973 - DNA, 83 bp, Artificial Sequence
  ENSG00000169710_71 (sequence is synthesized)
acctatagtcccacctactcgggaggagaatcgcttgaaccgggtaggtggaggttgcggagggaggagaatcgcttgaaccg

SEQ ID NO: 561974 - DNA, 120 bp, Artificial Sequence
  ENSG00000169710_72 (sequence is synthesized)
gtaggtggaggttgcggagggaggagaatcgcttgaaccgggtaggtggaggttgcggtgagctgagatcgccccactccatctagcctgggtaacaaaaatgaaactcgtctcaaaaaa

SEQ ID NO: 561975 - DNA, 120 bp, Artificial Sequence
  ENSG00000169710_73 (sequence is synthesized)
tgctggaagtcacctatgaagccatcgtggacggaggctgcccttggcgctggagaggccactggccgacgggctcatcagagctgccggtgacaccaggggccaaaggcgtcgcctggg

SEQ ID NO: 561976 - DNA, 120 bp, Artificial Sequence
  ENSG00000169710_74 (sequence is synthesized)
cgaggtactcccgggccctcctctggaagcggtggtcagtgctggccatcacggggcccgtggctgccgcctgcacatgctgagtgcccggcactgccattgcagctgcgccccttgaca

SEQ ID NO: 561977 - DNA, 120 bp, Artificial Sequence
  ENSG00000169714_0 (sequence is synthesized)
gtgcgcagcggcgtatgtggggccgtgtgcagacccgcgtgtggcgcaggcaaggaccctcaaaataaacagcctctaccttgcgagccgtcttccccaggcctgcgtccgagtctccgc

SEQ ID NO: 561978 - DNA, 120 bp, Artificial Sequence
  ENSG00000169714_1 (sequence is synthesized)
cgctgcgggcccgctccgacgcggaagatctgactgcagccatgagcagcaatgagtgcttcaagtgtggacgatctggccactgggcccgggaatgtcctactggtggaggccgtggtc

SEQ ID NO: 561979 - DNA, 120 bp, Artificial Sequence
  ENSG00000169714_2 (sequence is synthesized)
gtggaatgagaagccgtggcagaggtggttttacctcggatagaggtttccagtttgtttcctcgtctcttccagacatttgttatcgctgtggtgagtctggtcatcttgccaaggatt

SEQ ID NO: 561980 - DNA, 120 bp, Artificial Sequence
  ENSG00000169714_3 (sequence is synthesized)
gtgatcttcaggaggatgcctgctataactgcggtagaggtggccacattgccaaggactgcaaggagcccaagagagagcgagagcaatgctgctacaactgtggcaaaccaggccatc

SEQ ID NO: 561981 - DNA, 120 bp, Artificial Sequence
  ENSG00000169714_4 (sequence is synthesized)
tggctcgtgactgcgaccatgcagatgagcagaaatgctattcttgtggagaattcggacacattcaaaaagactgcaccaaagtgaagtgctataggtgtggtgaaactggtcatgtag

SEQ ID NO: 561982 - DNA, 120 bp, Artificial Sequence
  ENSG00000169714_5 (sequence is synthesized)
ccatcaactgcagcaagacaagtgaagtcaactgttaccgctgtggcgagtcagggcaccttgcacgggaatgcacaattgaggctacagcctaattattttcctttgtcgcccctcctt

SEQ ID NO: 561983 - DNA, 120 bp, Artificial Sequence
  ENSG00000169714_6 (sequence is synthesized)
aggaggaaaggggtggaaaaaaaccgactttctgcatttaactacaaaaaaagtttatgtttagtttggtagaggtgttatgtataatgctttgttaaagaaccccctttccgtgccact

SEQ ID NO: 561984 - DNA, 120 bp, Artificial Sequence
  ENSG00000169714_7 (sequence is synthesized)
ggtgaatagggattgatgaatgggaagagttgagtcagaccagtaagcccgtcctgggttccttgaacatgttcccatgtaggaggtaaaaccaattctggaagtgtctatgaacttcca

SEQ ID NO: 561985 - DNA, 120 bp, Artificial Sequence
  ENSG00000169714_8 (sequence is synthesized)
taaataactttaattttagtataatgatggtcttggattgtctgacctcagtagctattaaataacatcaagtaacatctgtatcaggccctacatagaacatacagttgagtgggagta

SEQ ID NO: 561986 - DNA, 120 bp, Artificial Sequence
  ENSG00000169714_9 (sequence is synthesized)
aacaaaaagataaacatgcgtgttaatggctgttcgagagaaatcggaataaaagcctaaacaggaacaacttcatcacagtgttgatgttggacacatagatggtgatggcaaaggttt

SEQ ID NO: 561987 - DNA, 120 bp, Artificial Sequence
  ENSG00000169714_10 (sequence is synthesized)
agaacacattattttcaaagactaaatctaaaacccagagtaaacatcaatgctcagagttagcataatttggagctattcaggaattgcagagaaatgcattttcacagaaatcaagat

SEQ ID NO: 561988 - DNA, 120 bp, Artificial Sequence
  ENSG00000169714_11 (sequence is synthesized)
gttatttttgtatactatatcacttagacaactgtgtttcatttgctgtaatcagtttttaaaagtcagatggaaagagcaactgaagtcctagaaaatagaaatgtaattttaaactat

SEQ ID NO: 561989 - DNA, 120 bp, Artificial Sequence
  ENSG00000169714_12 (sequence is synthesized)
tccaataaagctggaggaggaaggggagtttgactaaagttctttttgtttgtttcaaattttcattaatgtatatagtgcaaaataccatattaaagaggggaatgtggaggactgaaa

SEQ ID NO: 561990 - DNA, 120 bp, Artificial Sequence
  ENSG00000169714_13 (sequence is synthesized)
aggtggtttccagtttgtttcctcgtctcttccagacatttgttatcgctgtggtgagtctggtcatcttgccaaggattgtgatcttcaggaggatgtcttggcctgtttcttttcctt

SEQ ID NO: 561991 - DNA, 120 bp, Artificial Sequence
  ENSG00000169714_14 (sequence is synthesized)
tggagaggtgagcacatgcaactgtgtatagcatttccacctttgaggttttgtattgtataatttaaaacgtaacactttgtaaaggttttatagtcttggcctgtttcttttccttat

SEQ ID NO: 561992 - DNA, 120 bp, Artificial Sequence
  ENSG00000169715_0 (sequence is synthesized)
cggaacacgctgggaggagggtggaaggcaacctcggggaaactgggaaaggcggcctggacttcgggaacaccgcgtacctgcgggggcacagccccacccgagcgaacgggctccaaa

SEQ ID NO: 561993 - DNA, 120 bp, Artificial Sequence
  ENSG00000169715_1 (sequence is synthesized)
acgggctccaaaggggaggtcccgcggtgcccaccgcgcagagctcagggggtggtgcgcccggcccttctgcggcgcacagcccagcccaggaacgcgggcggtgcggactcagcgggc

SEQ ID NO: 561994 - DNA, 120 bp, Artificial Sequence
  ENSG00000169715_2 (sequence is synthesized)
ctggtgtgagctccagcatcccctttgctcgaaatggaccccaactgctcttgcgccactggtggctcctgcacgtgcgccggctcctgcaagtgcaaagagtgcaaatgcacctcctgc

SEQ ID NO: 561995 - DNA, 120 bp, Artificial Sequence
  ENSG00000169715_3 (sequence is synthesized)
aagaagagctgctgttcctgctgccccgtgggctgtgccaagtgtgcccagggctgcgtctgcaaaggggcatcggagaagtgcagctgctgtgcctgatgtgggaacagctcttctccc

SEQ ID NO: 561996 - DNA, 120 bp, Artificial Sequence
  ENSG00000169715_4 (sequence is synthesized)
agatgtaaatagaacaacctgcacaacctggatttttttaaaaatacaacactgagccatttgctgcatttctttttatactaaatatgtgactgacaataaaaacaattttgactttaa

SEQ ID NO: 561997 - DNA, 120 bp, Artificial Sequence
  ENSG00000169715_5 (sequence is synthesized)
catccttctggggaactgggctttctttgccctcattgcccgtgtcattccctctccaggctttctgccctaaattcagatggggcaggacagcatttttctcgtgggacacaaacccca

SEQ ID NO: 561998 - DNA, 120 bp, Artificial Sequence
  ENSG00000169715_6 (sequence is synthesized)
gagctgtgccagacgaaaaaaagcatcctctgggtctgggttctgagctcgagccaggcttgctattagggcagggaggtgcccggtcaagtctactgccacctctcactctccccttct

SEQ ID NO: 561999 - DNA, 120 bp, Artificial Sequence
  ENSG00000169717_0 (sequence is synthesized)
aaccccctggccccctggaagaggcctcagcaggcccaggccacctggagggagagcagacctgcggctgaggatgcagggctcccgggcacggtgctagccctgccttgagacaccccg

SEQ ID NO: 562000 - DNA, 120 bp, Artificial Sequence
  ENSG00000169717_1 (sequence is synthesized)
agagctgtgggaagagctgtgggatcccctattgcatcacaaagcggccctggagggctggtctttattttgatgaggctgagaagggaaggctgcgggcatgtttaatccgcacgcttt

SEQ ID NO: 562001 - DNA, 120 bp, Artificial Sequence
  ENSG00000169717_2 (sequence is synthesized)
agactccccggctgtgatttttgacaatggctcggggttctgcaaagcgggcctgtctggggagtttggaccccggcacatggtcagctccatcgtggggcacctgaaattccaggctcc

SEQ ID NO: 562002 - DNA, 120 bp, Artificial Sequence
  ENSG00000169717_3 (sequence is synthesized)
ctcagcagaggccaaccagaagaagtactttgtgggggaggaggccctgtacaagcaggaggccctgcagctgcactcccctttcgagcgtggcctgatcacagggtgggatgacgtgga

SEQ ID NO: 562003 - DNA, 120 bp, Artificial Sequence
  ENSG00000169717_4 (sequence is synthesized)
gagactctggaagcacctctttgagtgggagctaggcgtgaaacccagcgaccagcccctgcttgcaacggagccctccctgaaccccagggagaaccgtgagaagatggcagaagtcat

SEQ ID NO: 562004 - DNA, 120 bp, Artificial Sequence
  ENSG00000169717_5 (sequence is synthesized)
tgtccccatctttgagggttactccctgccccacgcagtcaccaagctccacgtggcgggcagggacatcacggagctcctcatgcagctgctcctggccagcggccacaccttcccctg

SEQ ID NO: 562005 - DNA, 120 bp, Artificial Sequence
  ENSG00000169717_6 (sequence is synthesized)
ccagctggacaagggtctcgtggacgacatcaaaaagaagctgtgctacgtggccttggagcccgagaaggagctttcccggaggccggaggaggtcctgagggagtacaagctgcccga

SEQ ID NO: 562006 - DNA, 120 bp, Artificial Sequence
  ENSG00000169717_7 (sequence is synthesized)
cgggaacatcatcagcctcggggacccgctgcaccaggcgcccgaggccctgttcgtgccccagcagctgggcagccagagccccgggctctcgaatatggtctccagcagcatcaccaa

SEQ ID NO: 562007 - DNA, 120 bp, Artificial Sequence
  ENSG00000169717_8 (sequence is synthesized)
gtgtgataccgacatccagaagatcctctttggggagattgtgctgtcggggggcactaccctgttccacgggctggatgaccggcttctcaaggagctggagcagctggcctccaagga

SEQ ID NO: 562008 - DNA, 120 bp, Artificial Sequence
  ENSG00000169717_9 (sequence is synthesized)
cacccccatcaagatcacggctccccccgaccggtggttctccacctggattggagcctccatcgtcacctctctgagtagcttcaagcagatgtgggtcaccgccgcagacttcaagga

SEQ ID NO: 562009 - DNA, 120 bp, Artificial Sequence
  ENSG00000169717_10 (sequence is synthesized)
gtttgggacctccgtggtgcagagaagatgcttctgaaggccgcttctcgttgggtaccgtggggggtgaaccctagccccagctttgggaggatgttcaataaaggaccaatgccggaa

SEQ ID NO: 562010 - DNA, 120 bp, Artificial Sequence
  ENSG00000169718_0 (sequence is synthesized)
gggcccgggacaccggcacccggcgccctcggagccaaaggcgcgcggcggacacggcggggccctcgcgcgcctggagacgatgccaaagctgcagggcttcgagttctggagccgcac

SEQ ID NO: 562011 - DNA, 120 bp, Artificial Sequence
  ENSG00000169718_1 (sequence is synthesized)
cctgcgaggggcccgccacgtcgtggcccccatggtggaccagagcgagctggcctggaggctgctgagccggcgccacggggcacagctctgctacacgcccatgctgcatgcccaggt

SEQ ID NO: 562012 - DNA, 120 bp, Artificial Sequence
  ENSG00000169718_2 (sequence is synthesized)
ctttgtccgcgacgccaactaccggaaggagaacctgtactgcgaggtgtgccccgaggaccggcccctcatcgtgcagttctgtgccaatgacccggaggtgtttgttcaggcggctct

SEQ ID NO: 562013 - DNA, 120 bp, Artificial Sequence
  ENSG00000169718_3 (sequence is synthesized)
cctggctcaggattactgtgacgccattgacctgaacttgggctgcccacagatgatagccaagagaggtcactatggcgcctttctgcaggacgagtgggacctgctccaaagaatgat

SEQ ID NO: 562014 - DNA, 120 bp, Artificial Sequence
  ENSG00000169718_4 (sequence is synthesized)
tttgctggcccacgagaaactctctgttcctgtcacgtgcaaaatccgtgtcttcccggagattgacaagaccgtgaggtacgcccagatgctggagaaggccggctgccagttgctgac

SEQ ID NO: 562015 - DNA, 120 bp, Artificial Sequence
  ENSG00000169718_5 (sequence is synthesized)
ggtgcacggacgcaccaaggagcagaaggggcccctgtcgggtgcagcgtcctgggagcatatcaaggctgtgcggaaggctgtggccatccctgtgtttgctaacgggaacatccagtg

SEQ ID NO: 562016 - DNA, 120 bp, Artificial Sequence
  ENSG00000169718_6 (sequence is synthesized)
cctgcaggacgtggagcgctgcctccgggacacgggtgtgcagggcgtcatgagcgcagagggcaacctgcacaaccccgccctgttcgagggccggagccctgccgtgtgggagctggc

SEQ ID NO: 562017 - DNA, 120 bp, Artificial Sequence
  ENSG00000169718_7 (sequence is synthesized)
cgaggagtatctggacatcgtgcgggagcacccctgccccctgtcctacgtccgggcccacctcttcaagctgtggcaccacacgctgcaggtgcaccaggagctgcgagaggagctggc

SEQ ID NO: 562018 - DNA, 120 bp, Artificial Sequence
  ENSG00000169718_8 (sequence is synthesized)
aggcaggagggagcgaagcccaccggcgacttgcccttccactggatctgccagccctacatccggccggggcccagggaggggagcaaggagaaggcaggtgcgcgcagcaagcgggcc

SEQ ID NO: 562019 - DNA, 120 bp, Artificial Sequence
  ENSG00000169718_9 (sequence is synthesized)
ctggaggaagaggagggtggcacggaggtcctgtccaagaacaagcaaaagaagcagctgaggaacccccacaagaccttcgacccctctctgaagccaaaatatgcaaagtgtgaccag

SEQ ID NO: 562020 - DNA, 120 bp, Artificial Sequence
  ENSG00000169718_10 (sequence is synthesized)
tgtggaaacccaaagggcaacagatgtgtgttcagcctgtgccgcggctgctgcaagaagcgagcctccaaagagactgcagactgcccaggtcacggattgctttttaaaaccaaattg

SEQ ID NO: 562021 - DNA, 120 bp, Artificial Sequence
  ENSG00000169718_11 (sequence is synthesized)
gagaagtctctggcctggaaagaggcccagcctgagctgcaggagcctcagccagcagcacctggaacaccaggtggcttctccgaagtcatgggcagtgccctggcctgaaggcccaca

SEQ ID NO: 562022 - DNA, 120 bp, Artificial Sequence
  ENSG00000169718_12 (sequence is synthesized)
acccccacccccaggactgctgctggagcctggacacgtcctacttaagaaaatgccttttactcagggaatctcctgctacttaatgtggaaagacacgcccatgtcccccttcggccc

SEQ ID NO: 562023 - DNA, 120 bp, Artificial Sequence
  ENSG00000169718_13 (sequence is synthesized)
actctgggggcctggaaatgctgcagtggggagcaggccccaggctggacctgccctgtcctcagcacgcgtgtgcaaaagtgaacaataaatcatttcaaagatgcgagagcccacagc

SEQ ID NO: 562024 - DNA, 120 bp, Artificial Sequence
  ENSG00000169718_14 (sequence is synthesized)
ctgtgaccactgccctctcagacccagggaggcatgagccggggcaggtgcggttggggccagtgggggcttctgaacaacaggatacatctaaatgaaggcagcatctgggtagacaaa

SEQ ID NO: 562025 - DNA, 120 bp, Artificial Sequence
  ENSG00000169718_15 (sequence is synthesized)
agtgggggcttaggtcccctccccacctcccctaggcgcctccataggcaagtggccaaagcctccgggagcttcgtgatgcctcacagccttggaagcaccgcctgcgaggccacagtg

SEQ ID NO: 562026 - DNA, 120 bp, Artificial Sequence
  ENSG00000169718_16 (sequence is synthesized)
gctgctgctgggggctgttgaatctgagggccaggcttctcatttctctcaccaggccctgcctccaagcctagtcccagggagacagccctcaggaacccaaggccacccaggggtgac

SEQ ID NO: 562027 - DNA, 120 bp, Artificial Sequence
  ENSG00000169718_17 (sequence is synthesized)
ggaggagtctcgcgaggggcgcccctgtggcgtttcgggccagccgggccgcctggccgggtgcggagaaggaagctctgcccttcccctggcccggcgcggagccgattctcccgggaa

SEQ ID NO: 562028 - DNA, 120 bp, Artificial Sequence
  ENSG00000169718_18 (sequence is synthesized)
ggggccgggggtcctaacttcaccgccgggcggcctgctcagggccaggcccgcggggacgctggcgtcaaggtttcttcccccttcacgccagtcccctaccaggccgacatcgagtcc

SEQ ID NO: 562029 - DNA, 120 bp, Artificial Sequence
  ENSG00000169718_19 (sequence is synthesized)
cgctccccagggagggtcaagtcccaggggtccagcggctcccccgaggtccgctaggaggtggcggcactggagtggccgttctccagcctgcaccgacccccgcctttagtgcccccg

SEQ ID NO: 562030 - DNA, 120 bp, Artificial Sequence
  ENSG00000169718_20 (sequence is synthesized)
cgtgtgacccaacggtggtactggagcggccttagaagggtgaccgctgcctctgagttgagtcttaagcccctcgttgggcctggctgaaccccgggtctgcgcctttcccccagcctg

SEQ ID NO: 562031 - DNA, 120 bp, Artificial Sequence
  ENSG00000169718_21 (sequence is synthesized)
caaagaatgagtgagttggctgggtggatggtgaaggacccccagagaccctcaagagggacacatgggcactgtccacttggttggggctcaggagaggacaggcgttggcaggagttc

SEQ ID NO: 562032 - DNA, 120 bp, Artificial Sequence
  ENSG00000169718_22 (sequence is synthesized)
tcagcatcaccctggggcttcctgcccacagcagcctctctgctggaaggaggtggctgtgaagttgcctgtcctgcaccacccaccccttaaaaccagacagtaggtgccagggcagag

SEQ ID NO: 562033 - DNA, 120 bp, Artificial Sequence
  ENSG00000169718_23 (sequence is synthesized)
tccttgctcgggcccagccccagatgtcctgggagacagagccggccttggccctgcttgtttgaacttcggagggccgggggtatggcggagggagcctgcccagcaacctgagggaga

SEQ ID NO: 562034 - DNA, 120 bp, Artificial Sequence
  ENSG00000169718_24 (sequence is synthesized)
cacccagatggtggcccgggctgcctcccagcctcccggcaaagctgcctgggctccgctgtctgcagggccctgggctctggggcttggccgctaaagtgggaacaccatggccccctc

SEQ ID NO: 562035 - DNA, 120 bp, Artificial Sequence
  ENSG00000169718_25 (sequence is synthesized)
cacacggcctgataccaccgcccaggtcggtgcctcccactgcctactgccctccccatggtgctgttcacagatggtgttcatcaatcccagtctgctctgatgggcctgagctggcct

SEQ ID NO: 562036 - DNA, 120 bp, Artificial Sequence
  ENSG00000169718_26 (sequence is synthesized)
tgtcccttgtgaggtggcacagaagggtgtcctgagtgtcccaggctttcctgtgccgtccacctggagcaacccacgaggtgtccttccccgctcctcctcccacagagggcaacctgc

SEQ ID NO: 562037 - DNA, 120 bp, Artificial Sequence
  ENSG00000169718_27 (sequence is synthesized)
tgtggcaccacacgtgagttgccccctaaggcagaagccacgttggagggccgcccaggcagattccgtcagaccccacctggggcattttgcaggttttgtcaaaacaacttgctgcta

SEQ ID NO: 562038 - DNA, 120 bp, Artificial Sequence
  ENSG00000169718_28 (sequence is synthesized)
agtcaggtcttgaggggctggggtgacttaggagtggagttgggcaggaagagacacaggtccccgtgtgcccagtgctcagcctggggcctgacggtggagccgggagcccagcctgcg

SEQ ID NO: 562039 - DNA, 120 bp, Artificial Sequence
  ENSG00000169718_29 (sequence is synthesized)
tgacagggcctctgtctcaggctgcaggtgcaccaggagctgcgagaggagctggccaaggtgaagaccctggagggcatcgctgctgtgagccaggagctgaagctgcggtgtcaggca

SEQ ID NO: 562040 - DNA, 120 bp, Artificial Sequence
  ENSG00000169718_30 (sequence is synthesized)
ggtgctggggctggtgggagcccggccttgcagggggtgaggggctggggccatgaccagggccttgggcttttgcaggaggagatatccaggcaggagggagcgaagcccaccggcgac

SEQ ID NO: 562041 - DNA, 120 bp, Artificial Sequence
  ENSG00000169718_31 (sequence is synthesized)
ttgcccttccactggatctgccagccctacatccggccggggtgagagcccagccagccctgggcggggatgtgcaccaaggtgtgggctccaccctgtgcccacagtgctgcgcctgcc

SEQ ID NO: 562042 - DNA, 120 bp, Artificial Sequence
  ENSG00000169718_32 (sequence is synthesized)
ctgcttgtcctcagccattatggtcagtcatctcctgcccaagggaaaggaggagggaggcctcggctccgagcagcacacaccttccacgtgcccctcggtgtccttggtggaggatgc

SEQ ID NO: 562043 - DNA, 120 bp, Artificial Sequence
  ENSG00000169718_33 (sequence is synthesized)
tggtggctcagctgtgtcctccctcagtggacgctcggattttaaatcttttcttccataacatacttctctgagctcctctgatcctggtggatttgcccgtgggtcaagaggttgacc

SEQ ID NO: 562044 - DNA, 120 bp, Artificial Sequence
  ENSG00000169718_34 (sequence is synthesized)
ccagcttctgctgggttctcagaggtgaggccatccgtggccacagccctccctggagctggtggttcagagcttggggctgcccgagctgcggactccatctcagaggccccggactcc

SEQ ID NO: 562045 - DNA, 120 bp, Artificial Sequence
  ENSG00000169718_35 (sequence is synthesized)
aatgggctgcccgagggaaaggagggcactcctcacagcagcggcactcgccacggccgcctggcccctcacccagactcagacccgtgtggctgtggctgctgggcccctctcacagtg

SEQ ID NO: 562046 - DNA, 120 bp, Artificial Sequence
  ENSG00000169718_36 (sequence is synthesized)
gccagtaacaggaacccagacttgtggtcagcaaggctcaaggcccagagctggaagcagacacctggagggcttggcggagtagtcagccagacttggggtcagaacggggaccctgtg

SEQ ID NO: 562047 - DNA, 120 bp, Artificial Sequence
  ENSG00000169718_37 (sequence is synthesized)
caggccacagcccgtgcatgtgggacatgggctcagtgaatcagatgaggctatgggacaagcttttcagccaggtgaagctcgtctacagctcagggcctcgggtccctgcggctgccc

SEQ ID NO: 562048 - DNA, 120 bp, Artificial Sequence
  ENSG00000169718_38 (sequence is synthesized)
ctgcccagcctcacacaggacacctgagcagctgctgagagggaggctggggtccccgggagtgtgtgcatgggtcttgttgctgggccaaaggcacgggacgaggctgctcgcccctct

SEQ ID NO: 562049 - DNA, 120 bp, Artificial Sequence
  ENSG00000169718_39 (sequence is synthesized)
cttagccaccagtggcaaggcctcagcctagtgctgtctcccctgagacccctggtcgccgccgtatcctgggccagcccatctgggccctcaacaggtggcagcctcccagatctctga

SEQ ID NO: 562050 - DNA, 120 bp, Artificial Sequence
  ENSG00000169718_40 (sequence is synthesized)
caactttacaagctgcaggggagaccagcgataaccctgaaaccttcccatgtaacccccagggcgctggccagtccaagagcagctgccacatcaggctggtgccagcagtccctgcct

SEQ ID NO: 562051 - DNA, 120 bp, Artificial Sequence
  ENSG00000169718_41 (sequence is synthesized)
gccacactgccccccaccaggccactgaatgaggcagctgggagaggcaggaagtggggcttcaggctgaattcttgatttgacccttcttggcccttttgcttgggagacctggaactg

SEQ ID NO: 562052 - DNA, 120 bp, Artificial Sequence
  ENSG00000169718_42 (sequence is synthesized)
aagggcatggaaccccccttggaccctgtgggcaggaaaactgctccccttgtccctgcctgggggtaggacagataaggctgctcgtcctgcggcggccccccagcccacctgcttcct

SEQ ID NO: 562053 - DNA, 120 bp, Artificial Sequence
  ENSG00000169718_43 (sequence is synthesized)
atccgtttcctgcaggatggtgccccctgcatcccctcacccattgctcacggaaggaaaagcagacgtggccagcctgcatcctctgccctccctgagcctcctggcctggctggccac

SEQ ID NO: 562054 - DNA, 120 bp, Artificial Sequence
  ENSG00000169718_44 (sequence is synthesized)
agctggcatggacgccatcagcaggctccgtgcaggcggacggggcagcccccacagccagggcaccctggccctcactcaccagcacccttttgttcttttcctagcaaaatatgcaaa

SEQ ID NO: 562055 - DNA, 120 bp, Artificial Sequence
  ENSG00000169718_45 (sequence is synthesized)
ccagctgggtttgcaacgtggctcaaggtggcatggatgcctcaggacggccccttgcttccagccaagcccctgcccaggcctggaggggaagagagtctgggtgggtgggggtgaggg

SEQ ID NO: 562056 - DNA, 120 bp, Artificial Sequence
  ENSG00000169718_46 (sequence is synthesized)
agaggcatctggcttgggagcagttcccagggctgcatccaggccgtgggcatctggcagaggcttccccagtggggctgctcccctgctggccagcctggccccgggagtggtgctggc

SEQ ID NO: 562057 - DNA, 80 bp, Artificial Sequence
  ENSG00000169718_47 (sequence is synthesized)
ctcggagccgggcgcggtttccggggaacgcgtttcccgccgcaccgtgggccgcccggaccgcgcaggaccgggcacct

SEQ ID NO: 562058 - DNA, 120 bp, Artificial Sequence
  ENSG00000169718_48 (sequence is synthesized)
cgggacacgggtgtgcagggcgtcatgagcgcaggtgggcagggcccaggacagcagccagggccccatgcacacggcctgataccaccgcccagagggcaacctgcacaaccccgccct

SEQ ID NO: 562059 - DNA, 80 bp, Artificial Sequence
  ENSG00000169727_0 (sequence is synthesized)
cttgcaggtaacgagccgaggccgccccgggcctccgcgcccccgcgccccccgccactggggccgggctgaggtcgagc

SEQ ID NO: 562060 - DNA, 80 bp, Artificial Sequence
  ENSG00000169727_1 (sequence is synthesized)
aggagtcggtcgggcacgctccgtgccgggcctccgcgggcagcgcgcgtcgggggctgcagggccgagggcgcgtctcc

SEQ ID NO: 562061 - DNA, 120 bp, Artificial Sequence
  ENSG00000169727_2 (sequence is synthesized)
agcagctcacgggagaggttcccggccgccccgacgctaacgctctttctcccttcagcagccagccagctctgtgtcagggtcggggggtgcagaaagtcaggacagaatgagggatag

SEQ ID NO: 562062 - DNA, 120 bp, Artificial Sequence
  ENSG00000169727_3 (sequence is synthesized)
ctcggcccccagctcggcctcctcgtcagtgacagatctgtactgcacccctcacagcagtaggtcagacctcgtcctgcccggcacggccggggacttcagcctgagcgccagcctgtc

SEQ ID NO: 562063 - DNA, 120 bp, Artificial Sequence
  ENSG00000169727_4 (sequence is synthesized)
ggcctgtacgctgctctacgagggggccgtggagcccatgcagatcgacgtggacccccaggaagacccgcagaatgcacctgacgtcaactacgtggtggagaaccccagcctggatct

SEQ ID NO: 562064 - DNA, 120 bp, Artificial Sequence
  ENSG00000169727_5 (sequence is synthesized)
ggaacagtacgcggccagctacagcggcctgatgcgcatcgaacggctgcagttcattgctgatcactgccccacgctgcgggtggaggccctgaagatggccctctccttcgtgcagag

SEQ ID NO: 562065 - DNA, 120 bp, Artificial Sequence
  ENSG00000169727_6 (sequence is synthesized)
aacctttaacgtggacatgtacgaggagatccaccgcaagctctcagaggccaccagggagctgcagaacgcacccgacgccatccctgagagcggcgtggagcccccagccctggacac

SEQ ID NO: 562066 - DNA, 120 bp, Artificial Sequence
  ENSG00000169727_7 (sequence is synthesized)
ggcctgggtggaggccacgcggaagaaggcgctgctgaagctggagaagctggacacagacctgaagaactacaagggcaactccatcaaagagagcatccggcgcggccacgacgacct

SEQ ID NO: 562067 - DNA, 120 bp, Artificial Sequence
  ENSG00000169727_8 (sequence is synthesized)
gggcgaccactacctggactgtggggacctcagcaacgccctcaagtgctattcccgggcccgggactactgcaccagcgccaaacacgtcatcaacatgtgcctcaatgtcatcaaggt

SEQ ID NO: 562068 - DNA, 120 bp, Artificial Sequence
  ENSG00000169727_9 (sequence is synthesized)
ccaagctcaagtgtgccgcaggcttggcagagctggccgccaggaagtacaagcaggctgccaagtgcctcctgctggcttcctttgatcactgtgacttccctgagctgctgtccccca

SEQ ID NO: 562069 - DNA, 120 bp, Artificial Sequence
  ENSG00000169727_10 (sequence is synthesized)
gcaacgtggccatctacggtggcctgtgcgccttggctacctttgaccggcaggagctgcagcgcaatgtcatctccagcagctccttcaagttgttcttggagctggagccacaggtcc

SEQ ID NO: 562070 - DNA, 120 bp, Artificial Sequence
  ENSG00000169727_11 (sequence is synthesized)
gagacatcatcttcaaattctacgagtccaagtacgcctcatgtctcaagatgctggacgagatgaaggacaacctgctcctggacatgtatctggccccccatgtcaggaccctgtaca

SEQ ID NO: 562071 - DNA, 120 bp, Artificial Sequence
  ENSG00000169727_12 (sequence is synthesized)
cccagattcgcaaccgtgccctcatccagtatttcagcccctacgtgtcagccgacatgcataggatggcggcagccttcaataccacggtggccgccctggaggacgagctgacgcagc

SEQ ID NO: 562072 - DNA, 120 bp, Artificial Sequence
  ENSG00000169727_13 (sequence is synthesized)
taatcctggaggggctgatcagtgcccgtgtggactcacacagcaagatcctatacgcccgggacgtggatcagcgcagcaccacctttgagaagtctctgttgatgggcaaggagttcc

SEQ ID NO: 562073 - DNA, 120 bp, Artificial Sequence
  ENSG00000169727_14 (sequence is synthesized)
agcgccgcgccaaggccatgatgctgcgggcagctgtgctccgcaaccagatccatgtcaagtccccgcccagagaagggagccagggggagctgactccagccaacagccagtcccgga

SEQ ID NO: 562074 - DNA, 120 bp, Artificial Sequence
  ENSG00000169727_15 (sequence is synthesized)
tgagcaccaacatgtgaggggtgaaccttggcctccaggacatctgcaccccctccccacctccacggacctcggacctccaggcggctcagtgctgcctgcggcccagctaaggggcct

SEQ ID NO: 562075 - DNA, 120 bp, Artificial Sequence
  ENSG00000169727_16 (sequence is synthesized)
ggccactgggtgccacccagcctgtgtgccctccctggggctgaggaggcaggcggctgctagttgtggcccttcctggaaggagaggcctgcagggctcgaccctgtgggtttctgtcc

SEQ ID NO: 562076 - DNA, 120 bp, Artificial Sequence
  ENSG00000169727_17 (sequence is synthesized)
ccagggagcagactgtgcggcacccaggcccagtggcaccatttcccagacccctcctgttcccgcctcagtcaggtgcagacaagtgggcggtgtccattaaagagcagactcagcgtt

SEQ ID NO: 562077 - DNA, 120 bp, Artificial Sequence
  ENSG00000169727_18 (sequence is synthesized)
agcgacggcttcgctgccccggaagtggacggcacgccgcggcggggtgggtgcaagatgccgctgccggttcaggtgtttaacttgcagcagtaggtcagacctcgtcctgcccggcac

SEQ ID NO: 562078 - DNA, 120 bp, Artificial Sequence
  ENSG00000169727_19 (sequence is synthesized)
acgagcccagtattgctgctccgctgctcaggacagattccgggggctggtcctcctgcctcctggggttgaggtggcgtcccgttcttctccgtggcttggaggaaactacatcaggat

SEQ ID NO: 562079 - DNA, 120 bp, Artificial Sequence
  ENSG00000169727_20 (sequence is synthesized)
tgtctgctttctggctttcagagatgagcggctagaatcaggcgaggggtttctgcttctgagccttagagtcttgtgaggagacccctccctgatgtggtggcacaggagcctgggtgg

SEQ ID NO: 562080 - DNA, 120 bp, Artificial Sequence
  ENSG00000169727_21 (sequence is synthesized)
gggcgggggtgactgggagggcacacctgggggacagcagcggcgggagtgtggtccgactggcctggaagatcttgggcagagctgacctcagagaacagtgcgggtctctcgccctcc

SEQ ID NO: 562081 - DNA, 120 bp, Artificial Sequence
  ENSG00000169727_22 (sequence is synthesized)
aagtggacggcacgccgcggcggggtgggtgcaagatgccgctgccggttcaggtgtttaacttgcagtaggtcagacctcgtcctgcccggcacggccggggacttcagcctgagcgcc

SEQ ID NO: 562082 - DNA, 120 bp, Artificial Sequence
  ENSG00000169727_23 (sequence is synthesized)
ggacggcacgccgcggcggggtgggtgcaagatgccgctgccggttcaggtgtttaacttgcagtccccaggacgaggtgccaggtgcctggcccatgttgcagggggccgtggagccca

SEQ ID NO: 562083 - DNA, 120 bp, Artificial Sequence
  ENSG00000169727_24 (sequence is synthesized)
gccaagcgcaggaggggagggagccccggtgggcccggggcctgcggagggagccgagctcttggtgcttttcccgaaggagcgcgggaggcccacgggtccggcgagtgcccggcatgg

SEQ ID NO: 562084 - DNA, 120 bp, Artificial Sequence
  ENSG00000169727_25 (sequence is synthesized)
cggcttttccagcctgctttgtgttaagccgaggtcctggcttctctgtgtctcccagctgggggccatgaggctccctgagatgactcttttccccttctcccaactccgtggcgtgac

SEQ ID NO: 562085 - DNA, 120 bp, Artificial Sequence
  ENSG00000169727_26 (sequence is synthesized)
agctctcagaggccaccaggtgaggccaggggcttggcgagaggaagcagaggccaccaagggagcgcgggtgtctgggactgggcccccttcctgtgccctgcatctcccacccctgtg

SEQ ID NO: 562086 - DNA, 120 bp, Artificial Sequence
  ENSG00000169727_27 (sequence is synthesized)
ctgggaagtcgggcgggtagagctctcgctctcttttggccagcagtggaagtgccctgtgtgtgtgtggcttctgtgtgtgtgcatgcagggctttgattccaaggggagctgttggag

SEQ ID NO: 562087 - DNA, 120 bp, Artificial Sequence
  ENSG00000169727_28 (sequence is synthesized)
actgtggctcaggggccgcctccctgctggtttccccacccggctgtaggctcctggggcagcagttctctctgtggccctggtgcagactggtccctagaggtggggtttgaggccagc

SEQ ID NO: 562088 - DNA, 120 bp, Artificial Sequence
  ENSG00000169727_29 (sequence is synthesized)
gggaggtgcccacctgtgtgccggttgggcctttgagggcagcctgagattggcggcttcctcccctcctccctggcccccgtgaccgccgccatcctgatggccaggtcctctctcagg

SEQ ID NO: 562089 - DNA, 120 bp, Artificial Sequence
  ENSG00000169727_30 (sequence is synthesized)
accccagagattgccgaggtacgggccacctcctcagagaccttgcccccaggattcctgaccactgctggcccctcctgtcctcccccacctcattctcccccagatctgaatctgcct

SEQ ID NO: 562090 - DNA, 120 bp, Artificial Sequence
  ENSG00000169727_31 (sequence is synthesized)
catcctcaccaagctcaagtgtgccgcaggtgagggcctgggtcacgcccagctgaccccacgttcccctgttgctaagtcctcccagcccagggcagtaggctggtccctgcctcagcc

SEQ ID NO: 562091 - DNA, 120 bp, Artificial Sequence
  ENSG00000169727_32 (sequence is synthesized)
agggaaaacttccctggcagggcgcaggatgttgtgggcacatgtacaggtgtaggtggtgcctaaagtctgccccggggaagccagtgggtgacgtgtggtcagggtctggctgctgtc

SEQ ID NO: 562092 - DNA, 120 bp, Artificial Sequence
  ENSG00000169727_33 (sequence is synthesized)
actgtgggcgtgaggcaggtctgccagcccgagctgctctgaactggggtgtcctttgcagccctgctagcacctagggcttccctgcatgcctggcttcagggagcctcctcagcattg

SEQ ID NO: 562093 - DNA, 120 bp, Artificial Sequence
  ENSG00000169727_34 (sequence is synthesized)
gtggggctctttccacccgtgactagagtatctgtccccagcgctgaggaacagctcccggggcaggagaggccagcgagccggctggtggtcgcgttctccctggtttccaggcgttag

SEQ ID NO: 562094 - DNA, 120 bp, Artificial Sequence
  ENSG00000169727_35 (sequence is synthesized)
cggcttccccaggctctggggtcttaccccctctcccccctccccgcccccggctccttccactaggcttggcagagctggccgccaggaagtacaagcaggctgccaagtgcctcctgc

SEQ ID NO: 562095 - DNA, 120 bp, Artificial Sequence
  ENSG00000169727_36 (sequence is synthesized)
tggcttcctttgatcactgtgacttccctgaggtgaggagccctctggggacttgggaggcagagcatgggctcatgggtcaggctgcttctgtaggagggtgaggtctctcacaaatgg

SEQ ID NO: 562096 - DNA, 120 bp, Artificial Sequence
  ENSG00000169727_37 (sequence is synthesized)
ggtcttaggcattctccgagcgggtgatgggcaggcaggggtggcctggcccttcactgcctgtgacgccaggtctctgctcctcagctgctgtcccccagcaacgtggccatctacggt

SEQ ID NO: 562097 - DNA, 120 bp, Artificial Sequence
  ENSG00000169727_38 (sequence is synthesized)
ggcctgtgcgccttggctacctttgaccggcaggagctgcagcgcaatgtcatctccagcaggtaggtgccccggtcctgcagccctgaaggctgtccccgtccctctccgtggctgctg

SEQ ID NO: 562098 - DNA, 120 bp, Artificial Sequence
  ENSG00000169727_39 (sequence is synthesized)
cttcggccttgcatgtcctggccccctggccccagcgttttctcaggtgtttgtctggggactggtgtcccactggccacttggagggaggggcaggcagaggacagagttctgaggggt

SEQ ID NO: 562099 - DNA, 120 bp, Artificial Sequence
  ENSG00000169727_40 (sequence is synthesized)
ctgcctcaccagctccttcaagttgttcttggagctggagccacaggtccgagacatcatcttcaaattctacgagtccaagtacgcctcatgtctcaagatgctggacgagatgaagta

SEQ ID NO: 562100 - DNA, 120 bp, Artificial Sequence
  ENSG00000169727_41 (sequence is synthesized)
ggactcacacagcaaggtggctgtgggctgcggggcggtgggggcagctgggggtgagcctgggccccgctgagcttgtgcctgcacagatcctatacgcccgggacgtggatcagcgca

SEQ ID NO: 562101 - DNA, 120 bp, Artificial Sequence
  ENSG00000169727_42 (sequence is synthesized)
gggggcaggcgcacggcgtgtggggcctggtggctgtgagctgctccttgtctcccctgcagtccccgcccagagaagggagccagggggagctgactccagccaacagccagtcccgga

SEQ ID NO: 562102 - DNA, 120 bp, Artificial Sequence
  ENSG00000169727_43 (sequence is synthesized)
gaagcaggcggccatcggttgggatctcttgagtggaaacaggacggaggcagctcgccctgacctggcctggaagggcggattccctgctggcgcttcttcaggggacgtggcactagc

SEQ ID NO: 562103 - DNA, 120 bp, Artificial Sequence
  ENSG00000169727_44 (sequence is synthesized)
ctccacggacatcttgcagcagagggcctgacgagtgcgcaccgccgagcagttggtgttgatgacacggtcgcctgcgaatcagagacgggaagcacgcacgtagaggatggcactggg

SEQ ID NO: 562104 - DNA, 120 bp, Artificial Sequence
  ENSG00000169727_45 (sequence is synthesized)
gttggggtaaggcctgtgccccacctgcccccaagggccagggcacaacgtggctgtctgacatgcctggacaccttgcctgggtccaaccacagccctagccctcacgcgctgaccctg

SEQ ID NO: 562105 - DNA, 120 bp, Artificial Sequence
  ENSG00000169727_46 (sequence is synthesized)
ctagtgtgagaggctggtggggagcagagcttggctggcagggtgggccctccgcaggcccggcacagcgccccacgcgcgcggctcatgcggccgccgggacccccggcgctgcgagcg

SEQ ID NO: 562106 - DNA, 120 bp, Artificial Sequence
  ENSG00000169727_47 (sequence is synthesized)
aagtggacggcacgccgcggcggggtgggtgcaagatgccgctgccggttcaggtgtttaacttgcagccagccagctctgtgtcagggtcggggggtgcagaaagtcaggacagaatga

SEQ ID NO: 562107 - DNA, 120 bp, Artificial Sequence
  ENSG00000169727_48 (sequence is synthesized)
aagtggacggcacgccgcggcggggtgggtgcaagatgccgctgccggttcaggtgtttaacttgcagcagccagccagctctgtgtcagggtcggggggtgcagaaagtcaggacagaa

SEQ ID NO: 562108 - DNA, 120 bp, Artificial Sequence
  ENSG00000169727_49 (sequence is synthesized)
tgcacctgacgtcaactacgtggtggagaaccccagcctggtacggagcccagtggggggaccttgggtgtctcagtcctgctgaggggtccagggcacactccccgctgcagcctgcac

SEQ ID NO: 562109 - DNA, 120 bp, Artificial Sequence
  ENSG00000169727_50 (sequence is synthesized)
agcttcagatgctgctcatggagaagccagggcaggtctcctccccgctcagcctagcgaccagcagtcactagtgggtgtctatccccgaaagcccccgggtgcagggtcccactcctg

SEQ ID NO: 562110 - DNA, 120 bp, Artificial Sequence
  ENSG00000169727_51 (sequence is synthesized)
aggctcctgcgccaggcccaccccagcggtcttcgtagctcctgggacagcagtcagtctcgtacccccatgcccggttctggttatgggcccagggcgacattctggctaggacagtca

SEQ ID NO: 562111 - DNA, 120 bp, Artificial Sequence
  ENSG00000169727_52 (sequence is synthesized)
ccgggcctcgggagcctgggcagagaaaggcacccacagcagcgaaggggccgtggcttcggagcgagaaaggctcggggggcagatcccgcgggcgccggggagtgggggacactcacc

SEQ ID NO: 562112 - DNA, 120 bp, Artificial Sequence
  ENSG00000169727_53 (sequence is synthesized)
gccctggagctcgagctcagggtcgtccccgtcggtgaagataaacgtctgggggagaaacaatctatgaggcttctggggcgctgcccaggccggagaccgacccgccccgcgcggagc

SEQ ID NO: 562113 - DNA, 120 bp, Artificial Sequence
  ENSG00000169727_54 (sequence is synthesized)
cctagaccctgggaggcggggcgggtgggcgtggggctcgccgtcggggtcggggtccggcgcacctgctggcgggcccgggagatccagggggccgtggagcccatgcagatcgacgtg

SEQ ID NO: 562114 - DNA, 80 bp, Artificial Sequence
  ENSG00000169733_0 (sequence is synthesized)
gccgcatgagccgcgcgcgtggggcgctgtgccgggcctgcctcgcgctggccgcggccctggccgcgctgctgttactg

SEQ ID NO: 562115 - DNA, 80 bp, Artificial Sequence
  ENSG00000169733_1 (sequence is synthesized)
ccgccccggccccgcgcgcgcccccgtcccggcccgctgcccccagcctgcggcctgacgacgtcttcatcgccgtcaag

SEQ ID NO: 562116 - DNA, 120 bp, Artificial Sequence
  ENSG00000169733_2 (sequence is synthesized)
accacccggaagaaccacgggccgcgcctgcggctgctgctgcgcacctggatctcccgggcccgccagcagacgtttatcttcaccgacggggacgaccctgagctcgagctccagggc

SEQ ID NO: 562117 - DNA, 120 bp, Artificial Sequence
  ENSG00000169733_3 (sequence is synthesized)
ggcgaccgtgtcatcaacaccaactgctcggcggtgcgcactcgtcaggccctctgctgcaagatgtccgtggagtatgacaagttcattgagtccgggcgcaagtggttttgccacgtg

SEQ ID NO: 562118 - DNA, 120 bp, Artificial Sequence
  ENSG00000169733_4 (sequence is synthesized)
gatgatgacaattatgtgaacgccaggagcctcctgcacctgctctccagcttctcacccagccaggacgtctacctggggcggcccagcctggaccaccccattgaggccaccgagagg

SEQ ID NO: 562119 - DNA, 120 bp, Artificial Sequence
  ENSG00000169733_5 (sequence is synthesized)
gtccagggtggcagaactgtgaccacggtcaagttctggtttgctactggtggggccgggttctgcctcagcagaggccttgccctcaagatgagcccatgggccagcctgggcagcttc

SEQ ID NO: 562120 - DNA, 120 bp, Artificial Sequence
  ENSG00000169733_6 (sequence is synthesized)
atgagcacagctgagcaggtgcggctgccggatgactgcacagttggctacatcgtggaggggctcctgggcgcccgcctgctgcacagccccctcttccactctcacctggagaacctg

SEQ ID NO: 562121 - DNA, 120 bp, Artificial Sequence
  ENSG00000169733_7 (sequence is synthesized)
acataacgtggtgaacgtggctggaggcttcagcctgcatcaagaccccacacggtttaagtctatccattgtcttctgtacccagacacggactggtgtcccaggcagaaacagggcgc

SEQ ID NO: 562122 - DNA, 120 bp, Artificial Sequence
  ENSG00000169733_8 (sequence is synthesized)
cccgacctctcggtgacaccaaccaccccgacccagggctgcctggctctgtcccaggcgcggggaaccagagccccctatgggctcagtgggctccctcaggtgccacggccacaccag

SEQ ID NO: 562123 - DNA, 120 bp, Artificial Sequence
  ENSG00000169733_9 (sequence is synthesized)
tgagatgcaggcacctggcagaccctctggctagcctgcagccccccctctcccagcccctggtgggctgcggtgatgggtgttttgggagaacgaagacagccaggctgatggccaggg

SEQ ID NO: 562124 - DNA, 120 bp, Artificial Sequence
  ENSG00000169733_10 (sequence is synthesized)
ccgcagtgcccctccccccgacccagccccaaggttgatcccacgggaacaggcttccaccccagcacttgcgcacctgggagggagctgccatccgggctccattacctgttgctgaag

SEQ ID NO: 562125 - DNA, 120 bp, Artificial Sequence
  ENSG00000169733_11 (sequence is synthesized)
gcgggtgctaggctggctgggtgtcaaggagcaggctccaggccaaggtcctggcccagccacggccattgcaagggctcagcctggcaggctttgtgggggacgccgccctctctgccg

SEQ ID NO: 562126 - DNA, 120 bp, Artificial Sequence
  ENSG00000169733_12 (sequence is synthesized)
caggctgggtgcacggccgggcaccacagtgggactcaggcccgggaaggtcatgttctcgaccagagctttgctcccagtccaggcgcctcattcggaggcctcttgactgggaccaca

SEQ ID NO: 562127 - DNA, 120 bp, Artificial Sequence
  ENSG00000169733_13 (sequence is synthesized)
gagatgttttctccgctctgacttgtggctcaggactactttctgggtcgtgctcctgccccactgtgcctgggcccataaacaacaggagccttttgttccgctgacctgcccatccca

SEQ ID NO: 562128 - DNA, 120 bp, Artificial Sequence
  ENSG00000169733_14 (sequence is synthesized)
gcagacccacctccccgcctggtgccttccatggagggaaatgggacaggggccgtcatctcccctctgcctcctgctttgctgttgccgagcacgagtaaagcttttgttcttacttca

SEQ ID NO: 562129 - DNA, 120 bp, Artificial Sequence
  ENSG00000169733_15 (sequence is synthesized)
tacgcggcgctgacccgacccgcagagagctcagagccaagctgggtgggggcctcctgtccagccatgccaggccctcgtgcccaggactcccctcgcccacaggtggttttgccacgt

SEQ ID NO: 562130 - DNA, 120 bp, Artificial Sequence
  ENSG00000169733_16 (sequence is synthesized)
gacgccatcggagcagacgccttccttgacaccagcccgggaggcacagcagagggcgtggaaagctggcttgagaagggcatagggttgggggcccaagctgatccacccaggtggttt

SEQ ID NO: 562131 - DNA, 120 bp, Artificial Sequence
  ENSG00000169733_17 (sequence is synthesized)
gcatgtggtgtttcaggagcaggccaggaggccctcaccgtactgggcagagagggggtgtctgggccaggtggggagggtctggaggctacgggtcaatggcctgcagaagcccccggc

SEQ ID NO: 562132 - DNA, 120 bp, Artificial Sequence
  ENSG00000169733_18 (sequence is synthesized)
tctttttgctccaagaagcttctgttacctgggtgggatctcctaaggggcagcttaagaaagatgcctggggagtcccatgaagagtcaggggtgagaagccctgtcctgggcagctct

SEQ ID NO: 562133 - DNA, 120 bp, Artificial Sequence
  ENSG00000169733_19 (sequence is synthesized)
cccggcccaggcccccggaggctccgcgcggggcgggtcggtctccggcctgggcagcgccccagaagcctcatagattgtttctcccccagacgtttatcttcaccgacggggacgacc

SEQ ID NO: 562134 - DNA, 120 bp, Artificial Sequence
  ENSG00000169733_20 (sequence is synthesized)
cccaggctcccgaggcccggggaggccccgacgctgcccaggtcacgcggcctgcggagggcccaccctgccagccaagctctgctccccaccagcctctcacactagccgcttcccggg

SEQ ID NO: 562135 - DNA, 120 bp, Artificial Sequence
  ENSG00000169733_21 (sequence is synthesized)
gcgtggggctagtgccacgtcccctgaagaagcgccagcagggaatccgcccttccaggccaggtcagggcgagctgcctccgtcctgtttccactcaagagatcccaaccgatggccgc

SEQ ID NO: 562136 - DNA, 120 bp, Artificial Sequence
  ENSG00000169733_22 (sequence is synthesized)
ctgcttcagcctcggtggcaccagcagggtcagcgcgtgagggctagggctgtggttggacccaggcaaggtgtccaggcatgtcagacagccacgttgtgccctggcccttgggggcag

SEQ ID NO: 562137 - DNA, 120 bp, Artificial Sequence
  ENSG00000169733_23 (sequence is synthesized)
catcagctccctctacccacggccctgacccccgctgctccctccgcccacggccctgaccccggcttctccctgtacccacggccctgaccccaggttctcccgccgcccacggccctg

SEQ ID NO: 562138 - DNA, 120 bp, Artificial Sequence
  ENSG00000169733_24 (sequence is synthesized)
gaggctgccgcccgacaccctgctccagcaggtacaggcgccactctgggtgcctctgccacctgggctttgccccgccctgactcccccaggggccccactgccccggcccgatgcccg

SEQ ID NO: 562139 - DNA, 120 bp, Artificial Sequence
  ENSG00000169733_25 (sequence is synthesized)
gctgagcaggcaggtgggatttgcatgtggctgggggtggaccctggacaggccccttggcctgttggacacagggtcctcacgtacagatggggtatggtgtctggggcagaggaacga

SEQ ID NO: 562140 - DNA, 120 bp, Artificial Sequence
  ENSG00000169733_26 (sequence is synthesized)
ggggagaagcacagttctcgggccagtgaggccccatgccagctgggcagtgggtgtggtgtgtatggtgatggtgagtcggaacaggtcccatcacgtggagcagggagggaatgaggg

SEQ ID NO: 562141 - DNA, 120 bp, Artificial Sequence
  ENSG00000169733_27 (sequence is synthesized)
ttgccctggaggtttcagatccctatcttctgtcccccaggctctgcctgaggtgtccccctactcagctcatgccatgcttcaatgctgtttccaagcctggcctccccgagggcctgg

SEQ ID NO: 562142 - DNA, 120 bp, Artificial Sequence
  ENSG00000169733_28 (sequence is synthesized)
ggagagggggtgggcaaaggggctctagcagggctcctggccaggggcaggcgtggcccgagaccagaccaggccacacactctgcccacacccttccctcccaggttaccttgagccat

SEQ ID NO: 562143 - DNA, 120 bp, Artificial Sequence
  ENSG00000169738_0 (sequence is synthesized)
ggagactgcgccgacatggagctgttcctcgcgggccgccgggtgctggtcaccggggcaggcaaaggtatagggcgcggcacggtccaggcgctgcacgcgacgggcgcgcgggtggtg

SEQ ID NO: 562144 - DNA, 120 bp, Artificial Sequence
  ENSG00000169738_1 (sequence is synthesized)
gctgtgagccggactcaggcggatcttgacagccttgtccgcgagtgcccggggatagaacccgtgtgcgtggacctgggtgactgggaggccaccgagcgggcgctgggcagcgtgggc

SEQ ID NO: 562145 - DNA, 120 bp, Artificial Sequence
  ENSG00000169738_2 (sequence is synthesized)
cccgtggacctgctggtgaacaacgccgctgtcgccctgctgcagcccttcctggaggtcaccaaggaggcctttgacagatcctttgaggtgaacctgcgtgcggtcatccaggtgtcg

SEQ ID NO: 562146 - DNA, 120 bp, Artificial Sequence
  ENSG00000169738_3 (sequence is synthesized)
aggggcttaatagcccggggagtcccaggggccatcgtgaatgtctccagccagtgctcccagcgggcagtaactaaccatagcgtctactgctccaccaagggtgccctggacatgctg

SEQ ID NO: 562147 - DNA, 120 bp, Artificial Sequence
  ENSG00000169738_4 (sequence is synthesized)
accaaggtgatggccctagagctcgggccccacaagatccgagtgaatgcagtaaaccccacagtggtgatgacgtccatgggccaggccacctggagtgacccccacaaggccaagact

SEQ ID NO: 562148 - DNA, 120 bp, Artificial Sequence
  ENSG00000169738_5 (sequence is synthesized)
atgctgaaccgaatcccacttggcaagtttgctgaggtagagcacgtggtgaacgccatcctctttctgctgagtgaccgaagtggcatgaccacgggttccactttgccggtggaaggg

SEQ ID NO: 562149 - DNA, 120 bp, Artificial Sequence
  ENSG00000169738_6 (sequence is synthesized)
ggcttctgggcctgctgagctccctccacacacctcaagccccatgccgtgctcatcctacccccaatccctccaataaacctgattctgctgcccagactatgtgctattcctaggctg

SEQ ID NO: 562150 - DNA, 120 bp, Artificial Sequence
  ENSG00000169738_7 (sequence is synthesized)
gaaatggctgcgaagcaggccccgggcaggagtcgctcgggcgcagggaggaagtgaaccggccggaggtagcgcccggctgctggccccacagtcccgacaccttcggaactcctaact

SEQ ID NO: 562151 - DNA, 120 bp, Artificial Sequence
  ENSG00000169738_8 (sequence is synthesized)
agggcggagactgcgccgacatggagctgttcctcgcgggccgccgggtgctggtcaccggggcaggcaaaggtgggcggcggggaaaggtgggcaaaggccggcggcgggcagaggcgg

SEQ ID NO: 562152 - DNA, 120 bp, Artificial Sequence
  ENSG00000169738_9 (sequence is synthesized)
ccttgtccgcgaggtcaccagccccagtccccagctgtgccgcttgctgggcacagagcctctggtaactgccccctgatacacacagtgcccggggatagaacccgtgtgcgtggacct

SEQ ID NO: 562153 - DNA, 120 bp, Artificial Sequence
  ENSG00000169738_10 (sequence is synthesized)
aggcggatcttgacagccttgtccgcgaggtaggtcccgccgggtcccagcgctgcgaggcggcgagccaggagggggcggcagcgagcgggggcggtacctctgtgcgcgactccgcct

SEQ ID NO: 562154 - DNA, 120 bp, Artificial Sequence
  ENSG00000169738_11 (sequence is synthesized)
cgcttctcaccgcggcctgggcgcccgcgcaccctctctcggggctggtggcctgcgtgggcggccgggtggtcggcagagccgccggggcccccgggctcagaaagaggccgaaatggc

SEQ ID NO: 562155 - DNA, 120 bp, Artificial Sequence
  ENSG00000169738_12 (sequence is synthesized)
agtgcggagggcggagactgcgccgacatggagctgttcctcgcgggccgccgggtgctggtcaccggggcaggcaaagggcgcggcacggtccaggcgctgcacgcgacgggcgcgcgg

SEQ ID NO: 562156 - DNA, 120 bp, Artificial Sequence
  ENSG00000169738_13 (sequence is synthesized)
ggaggggctgtcctggaggacgcagcagccctaatctctgaccagggtctgtccctcggcctctagatcctttgaggtgaacctgcgtgcggtcatccaggtgtcgcagattgtggccag

SEQ ID NO: 562157 - DNA, 120 bp, Artificial Sequence
  ENSG00000169738_14 (sequence is synthesized)
aagtttgctggtcccacagatgtacataaccgaggggcagagaaaacagtcgtgtatgcagaaataagtaggaagtgacgtttgccgattttgcttttaataacacaaattgtaagcttc

SEQ ID NO: 562158 - DNA, 120 bp, Artificial Sequence
  ENSG00000169738_15 (sequence is synthesized)
gccagcgtggtgccagcagtccctaggtagagcacgtggtgaacgccatcctctttctgctgagtgaccgaagtggcatgaccacgggttccactttgccggtggaagggggcttctggg

SEQ ID NO: 562159 - DNA, 120 bp, Artificial Sequence
  ENSG00000169738_16 (sequence is synthesized)
caggtgagctgccctgtgggctggacgggaattctcgtgagtgatgccagctctgcctcacggtctcgctgcgattccagattgtggccaggggcttaatagcccggggagtcccagggg

SEQ ID NO: 562160 - DNA, 120 bp, Artificial Sequence
  ENSG00000169738_17 (sequence is synthesized)
taaccatagcgtctactgtgagtgccccagctgtgccctcagccccaccccagccccagcctcgccctcatcaccgaccccagccccagccagcttgggttcctcttcgtaggctccacc

SEQ ID NO: 562161 - DNA, 120 bp, Artificial Sequence
  ENSG00000169738_18 (sequence is synthesized)
aagggtgccctggacatgctgaccaagatccgagtgaatgcagtaaaccccacagtggtgatgacgtccatgggccaggccacctggagtgacccccacaaggccaagactatgctgaac

SEQ ID NO: 562162 - DNA, 120 bp, Artificial Sequence
  ENSG00000169740_0 (sequence is synthesized)
gtagtccattccgccggcgccggcgctggcgctgctgcgggctcggcgccggcctttgtctgcgggcacgcgccgctgcggtgctcaggaacagcccatggaagaatcatatgaagaggt

SEQ ID NO: 562163 - DNA, 120 bp, Artificial Sequence
  ENSG00000169740_1 (sequence is synthesized)
ggtgactgaggtcgtaagcaggagtggacatgtttggatttccaacagctaccctgctggactgtcatggaagatatgcccagaatgtagcgttcttcaatgtgatgactgaagcccacc

SEQ ID NO: 562164 - DNA, 120 bp, Artificial Sequence
  ENSG00000169740_2 (sequence is synthesized)
acaaatatgaccactctgaggctacaggatcctcaagctgggatatccaaaattctttcagaagagagaagctggaacaaaaatccccagattcgaagacactacaggaagattcacctg

SEQ ID NO: 562165 - DNA, 120 bp, Artificial Sequence
  ENSG00000169740_3 (sequence is synthesized)
gagtgagacaaagggtctatgagtgccaggagtgtggaaaatccttccggcaaaaaggtagtctaacgttacatgagagaatccacactggtcaaaagccttttgagtgcacccactgtg

SEQ ID NO: 562166 - DNA, 120 bp, Artificial Sequence
  ENSG00000169740_4 (sequence is synthesized)
gtgtgggaaaagcttcagtcaacgaggtagtctcgctgtccacgagagactccacactggacagaaaccctacgagtgtgctatttgtcagagaagcttcaggaatcagagtaaccttgc

SEQ ID NO: 562167 - DNA, 120 bp, Artificial Sequence
  ENSG00000169740_5 (sequence is synthesized)
tgttcacaggagagttcacagtggtgagaagccctatagatgtgatcagtgtggaaaagccttcagtcagaaaggaagcttaattgttcacatcagagtccacacaggcctgaagcccta

SEQ ID NO: 562168 - DNA, 120 bp, Artificial Sequence
  ENSG00000169740_6 (sequence is synthesized)
tgcctgtacccagtgcaggaagagtttccacaccagggggaattgtattctgcatggcaaaatccacacaggagagacaccctatctgtgcggccagtgtggaaaaagcttcacccagag

SEQ ID NO: 562169 - DNA, 120 bp, Artificial Sequence
  ENSG00000169740_7 (sequence is synthesized)
agggagtctggctgtgcaccagcgaagctgctcacagaggctcaccctttgaccactttcctgaagagaagttctctttatgaattaagagtacaaaatcctctgagatgaagcaaccta

SEQ ID NO: 562170 - DNA, 120 bp, Artificial Sequence
  ENSG00000169740_8 (sequence is synthesized)
tccagttctatggaatgaatggagaatctttcagaaagaccatcattgggtagggcaaactgatttttttcctttcccccaaaagagtatgaaaaataaatgtcttgtttattatcatta

SEQ ID NO: 562171 - DNA, 120 bp, Artificial Sequence
  ENSG00000169740_9 (sequence is synthesized)
gcggccgccaaggaaatgagcaggcctggccggcccgggccccgagggaggccagccgcgagcggagaggtcggcggtccgcagagcagggtcccgtggaccggagagcgggatgccgag

SEQ ID NO: 562172 - DNA, 120 bp, Artificial Sequence
  ENSG00000169744_0 (sequence is synthesized)
agttcccagccagcgtgttcagcctgcctgcctgcctgcctctgtgtgtgtgtgagcgtgtgtgcgtgcgtctactttgtactgggaagaacacagcccatgtgctctgcatggacgtta

SEQ ID NO: 562173 - DNA, 120 bp, Artificial Sequence
  ENSG00000169744_1 (sequence is synthesized)
ctgatactctgtttagcttgattttcgaaaagcaggcaagatgtccagcacaccacatgaccccttctattcttctcctttcggcccattttataggaggcatacaccatacatggtaca

SEQ ID NO: 562174 - DNA, 120 bp, Artificial Sequence
  ENSG00000169744_2 (sequence is synthesized)
gccagagtaccgaatctatgagatgaacaagagactgcagtctcgcacagaggatagtgacaacctctggtgggacgcctttgccactgaattttttgaagatgacgccacattaaccct

SEQ ID NO: 562175 - DNA, 120 bp, Artificial Sequence
  ENSG00000169744_3 (sequence is synthesized)
ttcattttgtttggaagatggaccaaagcgatacactatcggcaggaccctcatcccccgttactttagcactgtgtttgaaggaggggtgaccgacctgtattacattctcaaacactc

SEQ ID NO: 562176 - DNA, 120 bp, Artificial Sequence
  ENSG00000169744_4 (sequence is synthesized)
gaaagagtcataccacaactcatccatcacggtggactgcgaccagtgtaccatggtcacccagcacgggaagcccatgtttaccaaggtatgtacagaaggcagactgatcttggagtt

SEQ ID NO: 562177 - DNA, 120 bp, Artificial Sequence
  ENSG00000169744_5 (sequence is synthesized)
cacctttgatgatctcatgagaatcaaaacatggcactttaccattagacaataccgagagttagtcccgagaagcatcctagccatgcatgcacaagatcctcaggtcctggatcagct

SEQ ID NO: 562178 - DNA, 120 bp, Artificial Sequence
  ENSG00000169744_6 (sequence is synthesized)
gtccaaaaacatcaccaggatggggctaacaaacttcaccctcaactacctcaggttgtgtgtaatattggagccaatgcaggaactgatgtcgagacataaaacttacaacctcagtcc

SEQ ID NO: 562179 - DNA, 120 bp, Artificial Sequence
  ENSG00000169744_7 (sequence is synthesized)
ccgagactgcctgaagacctgcttgtttcagaagtggcagaggatggtggctccgccagcagaacccacaaggcaaccaacaaccaaacggagaaaaaggaaaaattccaccagcagcac

SEQ ID NO: 562180 - DNA, 120 bp, Artificial Sequence
  ENSG00000169744_8 (sequence is synthesized)
ttccaacagcagcgctgggaacaatgcaaacagcactggcagcaagaagaagaccacagctgcaaacctgagtctgtccagtcaggtacctgatgtgatggtggtaggagagccaactct

SEQ ID NO: 562181 - DNA, 120 bp, Artificial Sequence
  ENSG00000169744_9 (sequence is synthesized)
attcacccgcgctggggaacaacagcccgtggaacagtaaacctcccgccactcaagagaccaaatcagaaaaccccccaccccaggcttcccaataagatgatcggcaccagaatccac

SEQ ID NO: 562182 - DNA, 120 bp, Artificial Sequence
  ENSG00000169744_10 (sequence is synthesized)
tgtcaataggcccgtgggtgatcattacaattgcaaatctttacttacaggagaggaaacagaagagataaaaacttttccatgcaaatatctatttctaaaccacaatgatctgatttt

SEQ ID NO: 562183 - DNA, 120 bp, Artificial Sequence
  ENSG00000169744_11 (sequence is synthesized)
ctttcttctttctttttttctaattgagaggattattcccagtaagcttccatgaccctttcttggaggccttcacaggtaatacagatactggcactgattgtaattaaaatgagagaa

SEQ ID NO: 562184 - DNA, 120 bp, Artificial Sequence
  ENSG00000169744_12 (sequence is synthesized)
aactctagcgcatcttctggcacggttttaacaacgtgtttgtgttgaatttcctttttatgcatcaaacgaaggccatattgtccataaatgctcagtgctcaggatctcattaatatg

SEQ ID NO: 562185 - DNA, 120 bp, Artificial Sequence
  ENSG00000169744_13 (sequence is synthesized)
ccgaacctaactacagatgactttttaatattgtaaaatattttctgctttttgacttgcatctgagagtttcttgtttcagtaaaaaaagaaaagacaaaaaaatcagctttggaaagt

SEQ ID NO: 562186 - DNA, 120 bp, Artificial Sequence
  ENSG00000169744_14 (sequence is synthesized)
aatttaaatgtaccttattttttttttctttatgttttctttcattgggcaacagctaagagggcccagcaaggtaatttatggttgagctgatgtcaattggttcttgtcttgagtcga

SEQ ID NO: 562187 - DNA, 120 bp, Artificial Sequence
  ENSG00000169744_15 (sequence is synthesized)
ctcaatttagcccaagtgctgaaacaagaaatgtcatttttttcatcaaagacaccagggcagatttttaagtaaagaaagacaattggacccttaagaatttatgcatttgtaaagttg

SEQ ID NO: 562188 - DNA, 120 bp, Artificial Sequence
  ENSG00000169744_16 (sequence is synthesized)
ctgttgatccaaatattttcaagccatgtaatccattggttttgtgggcagtttaataaacctgaacctttgtgtgttttctaattgtacctgagttgaccatcctttctttttatagta

SEQ ID NO: 562189 - DNA, 120 bp, Artificial Sequence
  ENSG00000169744_17 (sequence is synthesized)
tatttcttgtatgatattttgtaaagctctcacctggttcttttatggggacttttcgtttttgggcaactccagtgtatttatgtgaaactttataagagaattaatttttccatttgc

SEQ ID NO: 562190 - DNA, 120 bp, Artificial Sequence
  ENSG00000169744_18 (sequence is synthesized)
atattaatatgttcctccacacatgtaaaggcacagtggctccgtgtgttaaaaaacagctgtattttatgtatgctttactgataagtgtgccaataataaactgtgttaatgaccaaa

SEQ ID NO: 562191 - DNA, 120 bp, Artificial Sequence
  ENSG00000169744_19 (sequence is synthesized)
tggccaatttaaggagaagcattgaggggccctgaaaggagtcacttccagtcctcctcagaggatgtgatggtggtaggagagccaactctgatgggaggtgagtttggggacgaggac

SEQ ID NO: 562192 - DNA, 120 bp, Artificial Sequence
  ENSG00000169744_20 (sequence is synthesized)
gcagttttcttctcatattccttgcctcctgttattttgcatgtactaaaatataaatgtatttattgaggatagagcacctgcctggatctggtgcatgcataaataccattgaatttc

SEQ ID NO: 562193 - DNA, 120 bp, Artificial Sequence
  ENSG00000169744_21 (sequence is synthesized)
atctgcactgtaattctacaagtttggatttatcattggtattcagagacaggtatcttggacataatggactctatggagtgaatggatgagtgatcccagctatcggcaggaccctca

SEQ ID NO: 562194 - DNA, 120 bp, Artificial Sequence
  ENSG00000169744_22 (sequence is synthesized)
actagaaagacaatgtcttttgcataacaatttaatccatccattcatttactggtgaatattcatattctggaggtagaaatttcaggatttacacattggtggaaataggaaatgtag

SEQ ID NO: 562195 - DNA, 120 bp, Artificial Sequence
  ENSG00000169744_23 (sequence is synthesized)
tggaagatggaccaaagcgatacattgtgcattcagcggcagatgccagaggaaactgcaaccagctcggggattcggaaccagatgcctgtgatggattattacaatttcctatcatgt

SEQ ID NO: 562196 - DNA, 120 bp, Artificial Sequence
  ENSG00000169744_24 (sequence is synthesized)
gagtctgtccagtcaggtacctattgctagcattgctcgttctccagtgtcaggctgcgcactaaggacataaactcgcgtggttgttacacatcaggaggcgatgtttatttcctgtag

SEQ ID NO: 562197 - DNA, 120 bp, Artificial Sequence
  ENSG00000169744_25 (sequence is synthesized)
aaatcaaatatgcgtctcggcccccgacattgagacttgaccccgttgtacagtacacgagtgtgtctgtcctagattccccgactcctcccactgttattttaagctgagcttctctct

SEQ ID NO: 562198 - DNA, 120 bp, Artificial Sequence
  ENSG00000169744_26 (sequence is synthesized)
caagagactgcagtctcgcacagaggatctctacatggcctcagaaaaccaatttgtttcttttctcatttgatatttctgctacttctgtctctctatatctacctgggagcccacagc

SEQ ID NO: 562199 - DNA, 120 bp, Artificial Sequence
  ENSG00000169744_27 (sequence is synthesized)
cgtgaattacggtatgaatcatgataatatgttacatttcctggagcactttgcattttaggtgccacatcattgggaactatgatgatgatgacgacgatgacgacgatacacttattc

SEQ ID NO: 562200 - DNA, 120 bp, Artificial Sequence
  ENSG00000169744_28 (sequence is synthesized)
tttaagaccaattggggaaaaaatgaatattaatggaaaatggtgttgctgccagaatttattgtttggggactggagaagagaactgttctacacaataaaaaattattgagaaacaca

SEQ ID NO: 562201 - DNA, 120 bp, Artificial Sequence
  ENSG00000169744_29 (sequence is synthesized)
agatttgtttcctaaatcgtggtgcacccagcaaagcaacaaagctgtctggctcccattcttgtccactggaatgagcccaagtccctcgagctatcggcaggaccctcatcccccgtt

SEQ ID NO: 562202 - DNA, 120 bp, Artificial Sequence
  ENSG00000169744_30 (sequence is synthesized)
acagttctctgtgttctgtctccttgcagtttctggagaatcctttgtctatagtccagatctcctttcatggctatctaatggatctgtcttctgcagcgtttccatccaggtgttggc

SEQ ID NO: 562203 - DNA, 120 bp, Artificial Sequence
  ENSG00000169744_31 (sequence is synthesized)
atcctttcacagtaagcagtaggagaggcttgctgccgaggctcatatatgtcacaaacaagactacctgatcttcattgagagtcactctgatgaggacattacatgttaccatatcta

SEQ ID NO: 562204 - DNA, 120 bp, Artificial Sequence
  ENSG00000169744_32 (sequence is synthesized)
atacgcgaagtaatgagcaaggagcagctgagtttttctttctcttcccttttctcttcctctttgagatatttcccactttcccttgttaaataaatgatctgtctctttgcaggatag

SEQ ID NO: 562205 - DNA, 120 bp, Artificial Sequence
  ENSG00000169744_33 (sequence is synthesized)
aaggtgccatgttacattttacaaggttacaaattgcagtcttcaaataatgaaaatagtctccaggtggtcctccactttctgagctaggctttatacctaatacctctgaagatcagg

SEQ ID NO: 562206 - DNA, 120 bp, Artificial Sequence
  ENSG00000169744_34 (sequence is synthesized)
gggaaaaagccaaaagagggaaataaagagtctctttattaaaaaagtatcaagttatgcccacttctggtgaaattttgaatagagaaaatggcctgatttagataaatcaactgaaaa

SEQ ID NO: 562207 - DNA, 120 bp, Artificial Sequence
  ENSG00000169744_35 (sequence is synthesized)
agtgtacacaggagcccatttctttatccaatcctggagttaaaggcagtaacattcgttagtttcctctagcaaataagaaaaagtgcatctcagaggattctgaaacggtgatatagc

SEQ ID NO: 562208 - DNA, 120 bp, Artificial Sequence
  ENSG00000169744_36 (sequence is synthesized)
tacttaaaggcactgtagctgcaagaatcccaatcagttcaacagatgttttctgagctcctactatgtgcccacactgtgccaggtactagcaataccaaggtgaaaaacaacaacaac

SEQ ID NO: 562209 - DNA, 120 bp, Artificial Sequence
  ENSG00000169744_37 (sequence is synthesized)
aaagccctgtcattgaagagctcactgtctaatctagggatggcaaggacattttctctctcctgccagccctcagagtatggtattgaggaggattctaaggtctagtctgggtttggt

SEQ ID NO: 562210 - DNA, 120 bp, Artificial Sequence
  ENSG00000169744_38 (sequence is synthesized)
gggccatccattagtgatgtctgacatggttgtagaagttgagagtagcagcttacatgtcatatgttttgacacatatggtctagtcagaatcatttcaatttcatttgaaagaggata

SEQ ID NO: 562211 - DNA, 120 bp, Artificial Sequence
  ENSG00000169744_39 (sequence is synthesized)
tagcttctgtactctgttatgctcctgtcttccaaatcaacaactgtattttactggaggttacctgtatccagagggtttgtaacaagtagagaccctttgcattttgtgtgattaaga

SEQ ID NO: 562212 - DNA, 120 bp, Artificial Sequence
  ENSG00000169744_40 (sequence is synthesized)
gcaaggcaccgttaggaaatgagagttggattccatcactatctccacactatgcagttaaagatgttttaataaagtaaaattgtcagatgttacagagaggcagaaagaacaaccaga

SEQ ID NO: 562213 - DNA, 120 bp, Artificial Sequence
  ENSG00000169744_41 (sequence is synthesized)
ttaggaaaatgtacaaattcatatgtgtcctggagttgaatggacattaaatgataagcgttggatgacttgtggtgaccatatcttttaaccctgtctactgagttatcaacactattc

SEQ ID NO: 562214 - DNA, 120 bp, Artificial Sequence
  ENSG00000169744_42 (sequence is synthesized)
tactggttaactagagatgctacctgcaggcatccactgtctggtccaaaggcatgtgccactatgaccacagctgtggtctgtgtagctgctgcggcagcgatgtgtgtgtctggcgag

SEQ ID NO: 562215 - DNA, 120 bp, Artificial Sequence
  ENSG00000169744_43 (sequence is synthesized)
ggctagggtttaatccttggattctgcttctcactccatgagcaggggctaggagcgatcccgaactgcagcctcaaccctgggagggatggagacctgtgtcattcaacagcagtgacc

SEQ ID NO: 562216 - DNA, 120 bp, Artificial Sequence
  ENSG00000169744_44 (sequence is synthesized)
agaccaattggggaaaaaatgaatattaatggaaaatggttcttatgcatcacagcccacctcattccctagttccctctggaggattaattgtcccttctgtctgtgccagtgacatgt

SEQ ID NO: 562217 - DNA, 120 bp, Artificial Sequence
  ENSG00000169750_0 (sequence is synthesized)
cggcgccgggcatttctccgcagctcggctcgcggccgcgcccgccgccgcccggcccgcgcccatgcaggccatcaagtgcgtggtggtcggcgacggcgccgtggggaagacatgctt

SEQ ID NO: 562218 - DNA, 120 bp, Artificial Sequence
  ENSG00000169750_1 (sequence is synthesized)
gccgtggggaagacatgcttgctgatcagctacacgaccaacgccttccccggagagtacatccccaccgtttttgacaactactctgccaacgtgatggtggacgggaaaccagtcaac

SEQ ID NO: 562219 - DNA, 120 bp, Artificial Sequence
  ENSG00000169750_2 (sequence is synthesized)
ttggggctgtgggacacagcgggtcaggaggactacgatcggctgcggccactctcctacccccaaactgacgtctttctgatctgcttctctctggtgagcccggcctccttcgagaat

SEQ ID NO: 562220 - DNA, 120 bp, Artificial Sequence
  ENSG00000169750_3 (sequence is synthesized)
gttcgtgccaagtggtacccggaggtgcggcaccactgcccccacacgcccatcctcctggtgggcaccaagctggacctccgcgacgacaaggacaccattgagcggctgcgggacaag

SEQ ID NO: 562221 - DNA, 120 bp, Artificial Sequence
  ENSG00000169750_4 (sequence is synthesized)
gccctgacccagcggggcctgaagacagtgtttgacgaggcgatccgcgcggtgctctgcccgcccccagtgaagaagccggggaagaagtgcaccgtcttctagagccctggcccaccc

SEQ ID NO: 562222 - DNA, 120 bp, Artificial Sequence
  ENSG00000169750_5 (sequence is synthesized)
gagcctgagggctggcggggagcagccctggacgtgtccgctgttgtgttgagacgtgtggtgtccctgagtcggctgtggggagcggtgggggtgggccggggggaagcatggggatga

SEQ ID NO: 562223 - DNA, 120 bp, Artificial Sequence
  ENSG00000169750_6 (sequence is synthesized)
ggctgggtggcaggatcctgtcctctctgccgcctcattctggggtgtggctccagccttccctggcccccgccggaggccgggagggagcagggtctccctcagggctgcaggggcagg

SEQ ID NO: 562224 - DNA, 120 bp, Artificial Sequence
  ENSG00000169750_7 (sequence is synthesized)
tgcagggaagccccaggatgggcttccctggagggggagggtgggggggagttctgttccttgtgccccgaggtggggcagccccttctcattttatacaataaacattctccacctaca

SEQ ID NO: 562225 - DNA, 120 bp, Artificial Sequence
  ENSG00000169750_8 (sequence is synthesized)
cctcccagtgggtggggccaggcctctcacctgggctgaaccctcagccggccccaccctctcctgccgccaccctcggagtcggggcctctgcctggggccccagtgtggggcgccctg

SEQ ID NO: 562226 - DNA, 120 bp, Artificial Sequence
  ENSG00000169750_9 (sequence is synthesized)
cgcccttattcaccaccccagcccccggagcccggcctgcccaggtcgtcctccagccttaggtcgccacggatctggtgggctgggtccccctctcgaccccagacgcccctaactcgc

SEQ ID NO: 562227 - DNA, 120 bp, Artificial Sequence
  ENSG00000169750_10 (sequence is synthesized)
cgcacaagggagggagcagggccctggggagcccctgaccactccaccaggtcccacctttttcccaaggacgtctttctgatctgcttctctctggtgagcccggcctccttcgagaat

SEQ ID NO: 562228 - DNA, 120 bp, Artificial Sequence
  ENSG00000169750_11 (sequence is synthesized)
accaacgccttccccggagagtacatccccaccgtgtgagtgtgggggcttcccgggagagcacaggccctccgtttttgacaactactctgccaacgtgatggtggacgggaaaccagt

SEQ ID NO: 562229 - DNA, 120 bp, Artificial Sequence
  ENSG00000169752_0 (sequence is synthesized)
agatttttgacatgttataaaatgcaagtcacagctgctgttgtctgcggtattcaaaaacttttgaaacactgcatgtccaacaaaatttattttttgtgtgaatgtactgtttttcaa

SEQ ID NO: 562230 - DNA, 120 bp, Artificial Sequence
  ENSG00000169752_1 (sequence is synthesized)
ccctactctcttgaccaagaatgaaactatttacaaattaagatgccaacagatcacgaagagccctgtggtcccagtcacaagtcgttttgcctgaatggggggctttgttatgtgata

SEQ ID NO: 562231 - DNA, 120 bp, Artificial Sequence
  ENSG00000169752_2 (sequence is synthesized)
cctactattcccagcccattttgtaggtgcgttgaaaactatacaggagctcgttgtgaagaggtttttctcccaggctccagcatccaaactaaaagtaacctgtttgaagcttttgtg

SEQ ID NO: 562232 - DNA, 120 bp, Artificial Sequence
  ENSG00000169752_3 (sequence is synthesized)
gcattggcggtcctagtaacacttatcattggagccttctacttcctttgcaggaaaggccactttcagagagccagttcagtccagtatgatatcaacctggtagagacgagcagtacc

SEQ ID NO: 562233 - DNA, 120 bp, Artificial Sequence
  ENSG00000169752_4 (sequence is synthesized)
agtgcccaccacagtcatgaacaacactgaagaaacgtcaaagtgaaccaaatcattgtttttattttacaaaggcagaaaatgaaacaccactaggtaaaagaattaaaaatctaatcc

SEQ ID NO: 562234 - DNA, 120 bp, Artificial Sequence
  ENSG00000169752_5 (sequence is synthesized)
tttatttcttaaataaaacgcttgtgtaactcgtatcatgaaccataatccattctgctgcaaggtgtgtgtgcttctgtaatgtgcatcagtccatcggcaactgctaagtagggggtg

SEQ ID NO: 562235 - DNA, 120 bp, Artificial Sequence
  ENSG00000169752_6 (sequence is synthesized)
ataccagtataattcgaagtcacattggttcaacatgactctccccagaaagctgatgtgctgaagcaaccagaggcaaatgttcacacacctagagagaaaccctaagggatatatgaa

SEQ ID NO: 562236 - DNA, 120 bp, Artificial Sequence
  ENSG00000169752_7 (sequence is synthesized)
gatcttatgaaaaaggatgaaaaccctttaaatgcaaggagtagctggcttagtggcttcaaaaccacctcattcctgctgttatctgagaagctgcaagtactgatgaaaaaactgaga

SEQ ID NO: 562237 - DNA, 120 bp, Artificial Sequence
  ENSG00000169752_8 (sequence is synthesized)
agacatttcacctggcaattagaaaaaagcgctgactgatagatacctctgtatcattctttcaatattgatgaaaatgctttctactagaagtgactgatttcaaggatctgtctctca

SEQ ID NO: 562238 - DNA, 120 bp, Artificial Sequence
  ENSG00000169752_9 (sequence is synthesized)
aaggaagaaacaaaaacccaaaattttgactgcaaaagattgactaattctaggtgcaagtaactggaaatttaggattgttattgtactacacaggtcacaaagttccaaacctatttc

SEQ ID NO: 562239 - DNA, 120 bp, Artificial Sequence
  ENSG00000169752_10 (sequence is synthesized)
ccttgtaatttttagtgcatgatttttcagaatgcagtttctatctttttaggtgcaatattaagaactgattaggtcagaacaatttagtttctccagttttttctacctaagttacat

SEQ ID NO: 562240 - DNA, 120 bp, Artificial Sequence
  ENSG00000169752_11 (sequence is synthesized)
gggggaaaaaaaagcaatagtaactttaaggaagtatgaaaataaagtcttggagcagtggaaaggtctggggctggtaaatggcttaggcagaagggcatgcaccggccaaacctaaca

SEQ ID NO: 562241 - DNA, 120 bp, Artificial Sequence
  ENSG00000169752_12 (sequence is synthesized)
gcctgtctctgaactatgtcctcgtcaaggctgggatgcacgctggcttctctacacagtctggcccagtgtaagtgctgtgaattcagtgggtcactagtgtcaccaattcattcatca

SEQ ID NO: 562242 - DNA, 120 bp, Artificial Sequence
  ENSG00000169752_13 (sequence is synthesized)
tattagaagttttagattttcagaaaaactgagcagatagtatagagttcccctatgcttccccccaccccaggcctttattattaacatcttgcactagtgtggtatatttgtttaacc

SEQ ID NO: 562243 - DNA, 120 bp, Artificial Sequence
  ENSG00000169752_14 (sequence is synthesized)
aatattgacacatttttactttactttttgagacaaagtctcactctgtcatccaggctagctgaagcctgtaatttacatgaagggtcctctttttgttgtatgtctttatggattttg

SEQ ID NO: 562244 - DNA, 120 bp, Artificial Sequence
  ENSG00000169752_15 (sequence is synthesized)
accaatatataatgtcatgtatccactattatagtattgtatacagtagtttcaccaccctaaaaatctctactccatgtatttacccctccctctctcccactgaacctctggcaacca

SEQ ID NO: 562245 - DNA, 120 bp, Artificial Sequence
  ENSG00000169752_16 (sequence is synthesized)
gtctttactaactttgctttctccagaatgtcatatatttgaaatcatgtagtatgtagcctttcagactaacttctttcacttagcaatatacacttaaagttcctctatgtcttgtga

SEQ ID NO: 562246 - DNA, 120 bp, Artificial Sequence
  ENSG00000169752_17 (sequence is synthesized)
acttagcaatatacacttaaagttcctctatgtcttgtgactaaataccccaccccctgccctttttaaaaaaaaaaaaaaaagctaggccatatttttttttttttttttttttggtgg

SEQ ID NO: 562247 - DNA, 120 bp, Artificial Sequence
  ENSG00000169752_18 (sequence is synthesized)
ttttaaccattttgaagttacagtttaaaggcattaaatacattcgttgtatgtaccagtcaccactatgcacctccggaactttttcatgatcccacactaatctctgtgccccttaaa

SEQ ID NO: 562248 - DNA, 120 bp, Artificial Sequence
  ENSG00000169752_19 (sequence is synthesized)
caataaattcccattccctcctgctccctgtgacaaaacgtaatctttgttctactttgtctctatgaatctcactagtctaggtacctcacatcagtggattcatatagtattgtcctt

SEQ ID NO: 562249 - DNA, 120 bp, Artificial Sequence
  ENSG00000169752_20 (sequence is synthesized)
ttgtgatttacttaatgtctgaaaggttcatccatgatgtagtatgtagaaggatttcctttttatggctgaataatattccattgtatggatataacacattttgtctatccattcatc

SEQ ID NO: 562250 - DNA, 120 bp, Artificial Sequence
  ENSG00000169752_21 (sequence is synthesized)
tgttgggtatttgggttgtttctaccttttgactacggtgaataatgctgcagtgaacactggtatacaaatataccctcaagcctccgctttcaattattttgtgtatatacccagaaa

SEQ ID NO: 562251 - DNA, 120 bp, Artificial Sequence
  ENSG00000169752_22 (sequence is synthesized)
tgcaattgctgaatcaaatgacaattctatatttaattggaaaatcaccatactgttttctacagcagctgcataccactatatttccatcagtaataagagttccaatttctccacatc

SEQ ID NO: 562252 - DNA, 120 bp, Artificial Sequence
  ENSG00000169752_23 (sequence is synthesized)
cttgccaacacttgtgtgtttttttaattttaataagagctatcccagtgggtatgaagtggtatctcaatgtggttttgatttgcatttccttactgtttagtgatgctaagcattttt

SEQ ID NO: 562253 - DNA, 120 bp, Artificial Sequence
  ENSG00000169752_24 (sequence is synthesized)
tcctgtgctcactggctatctgcatgtcctctctggagatctatccaaatcctttgccattttttaaatcaggtttttacactgttgttgcattttgggagttttgtatgtattctggat

SEQ ID NO: 562254 - DNA, 120 bp, Artificial Sequence
  ENSG00000169752_25 (sequence is synthesized)
gtttaatccttattaggtacgtgaactgcatattatttcctcccactccataggtaatctttttactctgttgatagtgttctttgatgcacaaaattttaatgaagtataatttgccta

SEQ ID NO: 562255 - DNA, 120 bp, Artificial Sequence
  ENSG00000169752_26 (sequence is synthesized)
ctagtaacacttatcattggagccttctacttcctttgcaggtgtggtaacacatgcatgtagtcctagctgcttgggaggctgagatgggaagatcgcttgagcccaggaatgagaggc

SEQ ID NO: 562256 - DNA, 120 bp, Artificial Sequence
  ENSG00000169752_27 (sequence is synthesized)
atttttgacatgttataaaatgcaagtcacagctgctgttgtctgcggtattcaaaaacttttgaaacactgcatgtccaacaaaatttattttttgtgtgaatgtaagtttttattgag

SEQ ID NO: 562257 - DNA, 120 bp, Artificial Sequence
  ENSG00000169752_28 (sequence is synthesized)
acaggaagtgaactgatgctggcttctctttgtcttattccaagttgggcatgagattttccctgcattagaaggttgttgagacctgaagcctgggaaggtgcgttgaaaactatacag

SEQ ID NO: 562258 - DNA, 120 bp, Artificial Sequence
  ENSG00000169752_29 (sequence is synthesized)
gagctgggcagggggcggaggcgggggctcggctgtctccggggctgccacgcagagcgggcttcgtggcgtggactaaaagtgaatcagaaaaataaagaaccagcatcaaatttgaag

SEQ ID NO: 562259 - DNA, 120 bp, Artificial Sequence
  ENSG00000169752_30 (sequence is synthesized)
tggccacaaattctattaaagcagaagaaatagtggtgaaccataaaagagaaccagtttcctctctattctgcaatttagaggaaaaattttcatccaaggacagatcaggtggtggac

SEQ ID NO: 562260 - DNA, 120 bp, Artificial Sequence
  ENSG00000169752_31 (sequence is synthesized)
ctgcggaacggcggcgcggctgtctaggaaaccgcggcgtcggctggcaggggctggcggcctgagctgggcagggggcggaggcgggggctcggctgtctccggggctgccacgcagag

SEQ ID NO: 562261 - DNA, 120 bp, Artificial Sequence
  ENSG00000169752_32 (sequence is synthesized)
agagcgggcttcgtggcgtggacataactgttcgtttctaacgtggctgtagttggcattctctctcataccaagataccttttgagactaaaagtgaatcagaaaaataaagaaccagc

SEQ ID NO: 562262 - DNA, 120 bp, Artificial Sequence
  ENSG00000169752_33 (sequence is synthesized)
ggcctgagctgggcagggggcggaggcgggggctcggctgtctccggggctgccacgcagagcgggcttcgtggcgtggatgaagaaactgaggcacagagggattaagtagcctgctca

SEQ ID NO: 562263 - DNA, 120 bp, Artificial Sequence
  ENSG00000169752_34 (sequence is synthesized)
agatcacacagctagtaaggaaccaagattcaaacttgggcagtgtgattcagagactttaaattcaacgctggtgcctcactgcctcacactaaaagtgaatcagaaaaataaagaacc

SEQ ID NO: 562264 - DNA, 120 bp, Artificial Sequence
  ENSG00000169752_35 (sequence is synthesized)
aatggggggctttgttatgtgatacctactattcccagcccattttgtagtctacacgaaaatgaaaatgacaacaatgaagacctttatgatgatctacttccacttaatgaatagtaa

SEQ ID NO: 562265 - DNA, 120 bp, Artificial Sequence
  ENSG00000169752_36 (sequence is synthesized)
tgttcccattaaaactgaatttatggcagtgcaaacctgggccagactgggtataaaatgacaaaagcatatttatattcttaaaaatttctgcagattgcatagaaagttctcagattt

SEQ ID NO: 562266 - DNA, 120 bp, Artificial Sequence
  ENSG00000169752_37 (sequence is synthesized)
gcatccactggggtcttggaatgtatcccccatggagaagaggggactactgtacttaatgctactgaacttaaaaatggttaaaatggtcatgaacaacactgaagaaacgtcaaagtg

SEQ ID NO: 562267 - DNA, 120 bp, Artificial Sequence
  ENSG00000169752_38 (sequence is synthesized)
ctgcctgttctcgctcgtgtgtgtttctctcgattgcttgctcgctttctctgcctctctgcttgtctaagaaagagctgttggctttgagagaagaccttggtattacaactgtgttag

SEQ ID NO: 562268 - DNA, 120 bp, Artificial Sequence
  ENSG00000169752_39 (sequence is synthesized)
atcagggggttgacttgtgattttttttttaactgccccaggtgattcttattgacaggagagggtgggggaatcctagagctataaatagtacaggtgctgcttcagtacactgcaggt

SEQ ID NO: 562269 - DNA, 120 bp, Artificial Sequence
  ENSG00000169752_40 (sequence is synthesized)
gactaatgagaggaattttgtgagtaaaggagcttagtagcaacaggaaagtataagagctgtaaagcagaagtggaactgtgggtttaagcttggtatatcacttccttgccagacata

SEQ ID NO: 562270 - DNA, 120 bp, Artificial Sequence
  ENSG00000169756_0 (sequence is synthesized)
acaaagactgtgtcactactttgtggaatgttattttagaacttccagaatgcctcagtaaatcctgactgccatgtaactgtgtactgtgctgctgagctcttaacatgaagcagcagt

SEQ ID NO: 562271 - DNA, 120 bp, Artificial Sequence
  ENSG00000169756_1 (sequence is synthesized)
agtgaccctggcgggccaggctgacgtgcgtgggaacagtgggagtgaccctggctgggaagcagggaggcctggatattgtttctcctggctctgtgtcctgccattctcgtccctgtg

SEQ ID NO: 562272 - DNA, 120 bp, Artificial Sequence
  ENSG00000169756_2 (sequence is synthesized)
ctcagagctctcaagcacccacgatggccttctcaggccgagcgcgcccctgcattatcccagagaacgaagaaatcccccgagcagcccttaacactgtccacgaggccaatgggaccg

SEQ ID NO: 562273 - DNA, 120 bp, Artificial Sequence
  ENSG00000169756_3 (sequence is synthesized)
aggacgagagggctgtttccaaactgcagcgcaggcacagtgacgtgaaagtctacaaggagttctgtgacttttatgcgaaattcaacatggccaacgccctggccagcgccacttgcg

SEQ ID NO: 562274 - DNA, 120 bp, Artificial Sequence
  ENSG00000169756_4 (sequence is synthesized)
agcgctgcaagggcggctttgcgcccgctgagaagatcgtgaacagtaatggggagctgtaccatgagcagtgtttcgtgtgcgctcagtgcttccagcagttcccagaaggactcttct

SEQ ID NO: 562275 - DNA, 120 bp, Artificial Sequence
  ENSG00000169756_5 (sequence is synthesized)
atgagtttgaaggaagaaagtactgtgaacatgactttcagatgctctttgccccttgctgtcatcagtgtggtgaattcatcattggccgagttatcaaagccatgaataacagctggc

SEQ ID NO: 562276 - DNA, 120 bp, Artificial Sequence
  ENSG00000169756_6 (sequence is synthesized)
atccggagtgcttccgctgtgacctctgccaggaagttctggcagatatcgggtttgtcaagaatgctgggagacacctgtgtcgcccctgtcataatcgtgagaaagccagaggccttg

SEQ ID NO: 562277 - DNA, 120 bp, Artificial Sequence
  ENSG00000169756_7 (sequence is synthesized)
agaccatttcaactgcgccaactgcgggaaggagctgactgccgatgcacgggagctgaaaggggagctatactgcctcccatgccatgataaaatgggggtccccatctgtggtgcttg

SEQ ID NO: 562278 - DNA, 120 bp, Artificial Sequence
  ENSG00000169756_8 (sequence is synthesized)
ccgacggcccatcgaagggcgcgtggtgaacgctatgggcaagcagtggcatgtggagcattttgtttgtgccaagtgtgagaaaccctttcttggacatcgccattatgagaggaaagg

SEQ ID NO: 562279 - DNA, 120 bp, Artificial Sequence
  ENSG00000169756_9 (sequence is synthesized)
cctggcatattgtgaaactcactataaccagctatttggtgatgtttgcttccactgcaatcgtgttatagaaggtgatgtggtctctgctcttaataaggcctggtgcgtgaactgctt

SEQ ID NO: 562280 - DNA, 120 bp, Artificial Sequence
  ENSG00000169756_10 (sequence is synthesized)
tgcctgttctacctgcaacactaaattaacactcaagaataagtttgtggagtttgacatgaagccagtctgtaagaagtgctatgagaaatttccattggagctgaagaaaagacttaa

SEQ ID NO: 562281 - DNA, 120 bp, Artificial Sequence
  ENSG00000169756_11 (sequence is synthesized)
gaaactagctgagaccttaggaaggaaataagttcctttattttttcttttctatgcaagataagagattaccaacattacttgtcttgatctacccatatttaaagctatatctcaaag

SEQ ID NO: 562282 - DNA, 120 bp, Artificial Sequence
  ENSG00000169756_12 (sequence is synthesized)
cagttgagagaagaggacctatatgaatggttttatgtcatttttttaattaaaaaagaaaaattcatataatcgtgtttaaaacacaaatgaagtcagtatttgcctttgttaaccctt

SEQ ID NO: 562283 - DNA, 120 bp, Artificial Sequence
  ENSG00000169756_13 (sequence is synthesized)
atccatttgttgacatgtagactgtttacaaaaaaaaaacacatggttaaatgttaaattttaattaaggcccccaaaaattaaatataactttttaaaatgaaaggagtcaccttttac

SEQ ID NO: 562284 - DNA, 120 bp, Artificial Sequence
  ENSG00000169756_14 (sequence is synthesized)
atgactcaggtgaaaaaacagtataaacattaatttactttgtgttcaaaagaaaattccaactgctgttggggaaggacacagaaaagaaaaataaccacccaagaaaaacaaaaacaa

SEQ ID NO: 562285 - DNA, 120 bp, Artificial Sequence
  ENSG00000169756_15 (sequence is synthesized)
cctcggcaagggacgctgctttcccctggcagccacactgctgagcataaatgctttaaagtgtcagcaattgatgtgtggagagaagtatgactgcattacagcttaaagagctttcac

SEQ ID NO: 562286 - DNA, 120 bp, Artificial Sequence
  ENSG00000169756_16 (sequence is synthesized)
ttcaactgcgccaactgcgggtactggaattgtttcttttttattacacaagcagtgggaatgaaagattacatttatctatatttctgttactctagcaaaccaaattgtttttctcca

SEQ ID NO: 562287 - DNA, 120 bp, Artificial Sequence
  ENSG00000169756_17 (sequence is synthesized)
ttgtgtgtatacagtccacattctcgtttcaccctcctatgtatgtgtgcacgtgtgcctgtatacgcatacctctaaaatttctcatgagtcccagtatgcgtctcctgagaataagag

SEQ ID NO: 562288 - DNA, 120 bp, Artificial Sequence
  ENSG00000169756_18 (sequence is synthesized)
cattttcctatggaaccacgatactttttgtaaatttttttttgccttgagacagggtctctctcgctctattgcccaggctgaagtgcagtgggcaatcagagctcactgcagcctcac

SEQ ID NO: 562289 - DNA, 120 bp, Artificial Sequence
  ENSG00000169756_19 (sequence is synthesized)
gctcaagcagtcctcccacttcagcctccagagtagctgagaccacaggcacacaccacccttcctgactaatttttttaaattttttgtagagatggagccttgctgcgttgcccaggc

SEQ ID NO: 562290 - DNA, 90 bp, Artificial Sequence
  ENSG00000169756_20 (sequence is synthesized)
tcatctcagccttctgcacctggccagaaccacaatactcttattatgcctaagaaaattagcaataatcttataatatcaactatcagt

SEQ ID NO: 562291 - DNA, 120 bp, Artificial Sequence
  ENSG00000169756_21 (sequence is synthesized)
taagaaaattagcaataatcttataatatcaactatcagtccatattaaaaatattcccagtagccccagaaatatttgtcatcactatgtttttccaatcgaagatctaaaaacaaaaa

SEQ ID NO: 562292 - DNA, 120 bp, Artificial Sequence
  ENSG00000169756_22 (sequence is synthesized)
aaggtcttatctctgtacatgcataacttttacagttgtaataattaggtattatcttaaaagatgttgttacatttatttaatttggcttggtttatatctaaaagaaatatatttaat

SEQ ID NO: 562293 - DNA, 63 bp, Artificial Sequence
  ENSG00000169756_23 (sequence is synthesized)
cagtgcttccagcagttcccagaaggactcttctatgagaaaggcctcccaaagtgctaggat

SEQ ID NO: 562294 - DNA, 120 bp, Artificial Sequence
  ENSG00000169756_24 (sequence is synthesized)
gtcaccccctccacaacttcccagcctcgagccaggagcgtccatgcatttattttctaagggaaaaaaaaataagtattttagggaactatactgtctacatttagctctcctgggtgt

SEQ ID NO: 562295 - DNA, 120 bp, Artificial Sequence
  ENSG00000169756_25 (sequence is synthesized)
gcagcatgaccgcttcctgagctcctgctgccgcatttaggccctgtcagctgtgaggccactggtgctgagtcagagggaaaagctcagaacagccttgagcagtgaagaataaagtgt

SEQ ID NO: 562296 - DNA, 120 bp, Artificial Sequence
  ENSG00000169756_26 (sequence is synthesized)
gtgctgttattccaaaagatgcgatgaatacccagaactaggctattcatgggctgttgcccagttcaagatctgttgggtcctgaggaagattactattttggctaaattgtttatcat

SEQ ID NO: 562297 - DNA, 120 bp, Artificial Sequence
  ENSG00000169756_27 (sequence is synthesized)
taaaaccagcccagggatgtgtaaacctgcatctggagaataagacatttctttttggttaaatgatattagagaaaaaaactatccaagactgctaacaaataatcttcactttcagtt

SEQ ID NO: 562298 - DNA, 120 bp, Artificial Sequence
  ENSG00000169756_28 (sequence is synthesized)
atatccagcaataagttgttttccagaaaagaaagcttggaaacttacccagtttgccttccatttgggacatgactgatgtgcttcagtctttgtataataaatgcatcttcgccactc

SEQ ID NO: 562299 - DNA, 120 bp, Artificial Sequence
  ENSG00000169756_29 (sequence is synthesized)
actcttgaattaagagaaggggagctggaggtggctcaggtagagtgcgtaggtttgcagaactgggcctgtgtgtgtaaagtgactaaggcaaaggagtggaagtttgagagaagttta

SEQ ID NO: 562300 - DNA, 120 bp, Artificial Sequence
  ENSG00000169756_30 (sequence is synthesized)
tgtaattcagaactacttgattttttttagttaaatgcaataattattatgcttagttttataacctgctctccttgtgaattcttccttcaaatgattacttaacgcagtagtaatagc

SEQ ID NO: 562301 - DNA, 120 bp, Artificial Sequence
  ENSG00000169756_31 (sequence is synthesized)
tagctgtaggatgtcctttaaatttttgtgcaaaaaaaaatttataccaggtatttggaaatatactttacaatattggaaaatgaagtatttttaatgtattacagcaattatgtttct

SEQ ID NO: 562302 - DNA, 120 bp, Artificial Sequence
  ENSG00000169756_32 (sequence is synthesized)
aagcttaatgttaagcatgtagtcttagaataggacatgaaattaaattgtatgtagcttggaatatattgcttcagaaaactgaatgtgtatgtcggtcatattgcctttataaccatg

SEQ ID NO: 562303 - DNA, 120 bp, Artificial Sequence
  ENSG00000169756_33 (sequence is synthesized)
ctaatatctatgctttatacatactcaaacttgccttgccttaaaaacatacatactacatacttaaatcaggaattctagccatctcacagaataccaactaaaactaagtgcattgag

SEQ ID NO: 562304 - DNA, 120 bp, Artificial Sequence
  ENSG00000169756_34 (sequence is synthesized)
ggaaatccattgaagttaatttctgttatcttattagaagaaaatgatgttgatatgtgtttcagattttccatttgaaatcttataattaatttgatttatttactgtaagtaggaggt

SEQ ID NO: 562305 - DNA, 120 bp, Artificial Sequence
  ENSG00000169756_35 (sequence is synthesized)
ataaatgacactcttaaattggaaggaggggtgttttagtgtctgttttaggtcaaaattagtgattctatttttatcaaaagttttatcctgaagtttcaggaccactcttccttaata

SEQ ID NO: 562306 - DNA, 120 bp, Artificial Sequence
  ENSG00000169756_36 (sequence is synthesized)
aacttgttaatggaaagcgagctttatgaacatttaaaaatgttgctgctgctttgttgcttaaaaagaaagttgccaagagagacttcttagggaaaatatttgggttttttttccaaa

SEQ ID NO: 562307 - DNA, 120 bp, Artificial Sequence
  ENSG00000169756_37 (sequence is synthesized)
aattgctgaaatattgttttgccatttttaaaaagtctcaggttattaccactctgccattaaatatttgtatgcctgcatttttaaaaattctgtgcatgtactttatggagtacattc

SEQ ID NO: 562308 - DNA, 120 bp, Artificial Sequence
  ENSG00000169756_38 (sequence is synthesized)
tatttttgttttcagataccctacaaccaattttttttagtaatcttttagaattgaaattatcataaatgatcgagaataatcatcacatagtttaagattgtatatgttgagtagttt

SEQ ID NO: 562309 - DNA, 120 bp, Artificial Sequence
  ENSG00000169756_39 (sequence is synthesized)
aaaacaatctttgcattttacagtaagaatcaaagtcccttcagtgtgcctttgtcagctaatatgtgaccagcaatgacaaccttgggagtatttattaaatattatgctatgaatata

SEQ ID NO: 562310 - DNA, 120 bp, Artificial Sequence
  ENSG00000169756_40 (sequence is synthesized)
ggcaacacagaacagggtttgcagtatagcgtcttgatgctaaattctcatatacctctacacgagaaatatggaggagaaaaacaagcatttacatatattcttcgtcactttgaagat

SEQ ID NO: 562311 - DNA, 120 bp, Artificial Sequence
  ENSG00000169756_41 (sequence is synthesized)
gcatggcctgaactcgactgcttgtgtttgtttacatatcaggcatacccaggcatctcctgcagccagaggttccattgctgtctttgctcagtcctcttttaaaatatgaattagtgg

SEQ ID NO: 562312 - DNA, 120 bp, Artificial Sequence
  ENSG00000169756_42 (sequence is synthesized)
tctgtctcaaaaaaaataaataaataaattatgaatgagtattttctagaaattcaacttgctaagcctgtaatacttaagggtagtttatctagatacagtactttcttccctgataag

SEQ ID NO: 562313 - DNA, 120 bp, Artificial Sequence
  ENSG00000169756_43 (sequence is synthesized)
agtttatctagatacagtactttcttccctgataagtagtatcattggagcccttaggtataggagaagaggaagaagtttaaaaagtgtaagtgggccgggcgtggtggctcatgcctg

SEQ ID NO: 562314 - DNA, 120 bp, Artificial Sequence
  ENSG00000169756_44 (sequence is synthesized)
ctccgtctcaaaaaaaaaaaaaaagtgtaagtggattaaaagagaaacttggtctagttcataatatttttaatagggctttccctggctgctggaaaacttaggccagtaagcatctct

SEQ ID NO: 562315 - DNA, 120 bp, Artificial Sequence
  ENSG00000169756_45 (sequence is synthesized)
ttgtttaaagtcctacaagacaatttgaaataattcattgttcatgccaaaattctaagtactgtttttcttagcaagtgtaacataatcaggaacaatgggtacaagtaaaacattctt

SEQ ID NO: 562316 - DNA, 120 bp, Artificial Sequence
  ENSG00000169756_46 (sequence is synthesized)
tggatgatattcaaagccttattagcactgcacctgaataataggtcattttgcctcactcatttgccaaagtagccatttctaagttaaggaagtttttagataggctcatagccttgt

SEQ ID NO: 562317 - DNA, 120 bp, Artificial Sequence
  ENSG00000169756_47 (sequence is synthesized)
atttcgttttagattgtaagctcaatggcagggatactatattggtaattatgttttcatatagcaaccaccacagtatattcttggtgcttaataaatgtttataattgttaacaataa

SEQ ID NO: 562318 - DNA, 120 bp, Artificial Sequence
  ENSG00000169756_48 (sequence is synthesized)
gaggacacagtgagagggtgccatctatgagcatggagagcttagcttggacagccagctgatgagggacacatcgaatcaagatacatgacatgcaacatggccaacgccctggccagc

SEQ ID NO: 562319 - DNA, 120 bp, Artificial Sequence
  ENSG00000169756_49 (sequence is synthesized)
tagttcaagacaacagagacaaagctaagatgaggaagttctgtacagtttaggaaatagaggctttcaaagataattcgcagtgatgtgaaactggcctcccaagccctgataacaaca

SEQ ID NO: 562320 - DNA, 120 bp, Artificial Sequence
  ENSG00000169756_50 (sequence is synthesized)
gctccgggcccgccagtagccggccgcggcggcgagggactaggacgcggctggagcggcgccgggagacgaggggctgagagacggcggcggccgaaagcggagagatgctgggcgtgg

SEQ ID NO: 562321 - DNA, 120 bp, Artificial Sequence
  ENSG00000169756_51 (sequence is synthesized)
ctttcctgaggcctcctccttcatgttcagtttcatgatgaaagactgaagtgccacatgcatgccaggtatttgatagctgtgaggtcagaggtggcatctctatggcccatatgggca

SEQ ID NO: 562322 - DNA, 120 bp, Artificial Sequence
  ENSG00000169756_52 (sequence is synthesized)
aaggataagtttgttgaaattgacctaaagccagtctgcaaacactgttatgagaaaatgccagaagaatttaagaggcgacttgccaaacgggagagagaagcaaaggataaggacaag

SEQ ID NO: 562323 - DNA, 66 bp, Artificial Sequence
  ENSG00000169756_53 (sequence is synthesized)
tggtaagttttactgctaaatgtcaagtaaaaagtaagtttgaggaggatcacctgaggtcaggaa

SEQ ID NO: 562324 - DNA, 120 bp, Artificial Sequence
  ENSG00000169758_0 (sequence is synthesized)
agagccgagcgaatcccgagcccgggcagcagggcactatatttgtatgtgtcttgtagaacccacgcttggaaatgctgacagcaggcttcaggacagctgagccccactaaacaccaa

SEQ ID NO: 562325 - DNA, 120 bp, Artificial Sequence
  ENSG00000169758_1 (sequence is synthesized)
gaaaacccatggctgtggctccatctttcaacatgaccaatccacagcctgccatagaaggaggaatttctgaagttgagatcatctcccaacaagtagacgaagaaaccaagagcattg

SEQ ID NO: 562326 - DNA, 120 bp, Artificial Sequence
  ENSG00000169758_2 (sequence is synthesized)
ctcctgtgcagctggtgaactttgcctatcgggacttgcccctggctgctgtcgatctctccacggcgggctcgcagctcctgtcaaatctggacgaagattaccaaagagaagggtcta

SEQ ID NO: 562327 - DNA, 120 bp, Artificial Sequence
  ENSG00000169758_3 (sequence is synthesized)
actggctgaagccgtgctgtgggaagagagcagccgtgtggcaggtatttttgctcagtgcaagtctcaacagtttcctggtagcctgtgtaatattggtggtgattctcctgactctgg

SEQ ID NO: 562328 - DNA, 120 bp, Artificial Sequence
  ENSG00000169758_4 (sequence is synthesized)
aacttctaatagatataaagcttctccagttttccagcgcattccagtttgctggcgtgattcactggatcagcctggtcattctgtccgtgttcttctcagagactgttctacggattg

SEQ ID NO: 562329 - DNA, 120 bp, Artificial Sequence
  ENSG00000169758_5 (sequence is synthesized)
tggtgcttgggatctgggattacatcgaaaacaaaatagaggtgtttgacggggctgtgatcatcctatctttggctccgatggtggcatccactgtggccaatggacccaggagcccct

SEQ ID NO: 562330 - DNA, 120 bp, Artificial Sequence
  ENSG00000169758_6 (sequence is synthesized)
gggacgccatcagcctcatcatcatgctccggatctggagggtgaagagggtcattgatgcctacgtcctgccagtgaagctggagatggagatggttatccagcagtacgagaaggcca

SEQ ID NO: 562331 - DNA, 120 bp, Artificial Sequence
  ENSG00000169758_7 (sequence is synthesized)
aggtcatccaagacgagcagctggagaggctgacgcagatctgtcaggagcaagggtttgagatccggcagctgcgcgcgcacctggcgcagcaggacctggacctggctgccgagcgcg

SEQ ID NO: 562332 - DNA, 120 bp, Artificial Sequence
  ENSG00000169758_8 (sequence is synthesized)
aagcggcgctccaggccccgcacgtgctcagccagccgcgcagccgcttcaaagtgttggaggccggcacgtgggacgaggagacggcggccgagagcgtcgtggaggagctgcagccct

SEQ ID NO: 562333 - DNA, 120 bp, Artificial Sequence
  ENSG00000169758_9 (sequence is synthesized)
gtgtgtatggtcaccacggccgcaatagacattcaccagcccaacatctcctcggacctcttctctctggacatgcccctcaaactcggcggtaatggcaccagcgccacctcggagagt

SEQ ID NO: 562334 - DNA, 120 bp, Artificial Sequence
  ENSG00000169758_10 (sequence is synthesized)
gcctcccgcagctcagtcacccgggcccagagtgacagcagccagacgctgggctcctccatggactgcagcactgcccgcgaggagccgtcctctgagcccggcccttctcccccgccg

SEQ ID NO: 562335 - DNA, 120 bp, Artificial Sequence
  ENSG00000169758_11 (sequence is synthesized)
ctgccatcccagcagcaggtggaggaggccacagtccaggacctgctgtcctccctgtcggaggacccctgcccttcccagaaggccttggacccagcccccctcgcccggcccagccca

SEQ ID NO: 562336 - DNA, 120 bp, Artificial Sequence
  ENSG00000169758_12 (sequence is synthesized)
gcgggctcggcccaaaccagccccgagctggaacacagggtaagtctgttcaaccagaagaaccaggagggcttcactgtctttcagatcaggcctgtcatccacttccagcccactgtg

SEQ ID NO: 562337 - DNA, 120 bp, Artificial Sequence
  ENSG00000169758_13 (sequence is synthesized)
cccatgctggaggacaagttcagatctttggaatccaaagagcaaaagctgcacagggtccctgaggcctagagcctgccatgggctgggtgagatgaggggagacagccatctcaaagc

SEQ ID NO: 562338 - DNA, 120 bp, Artificial Sequence
  ENSG00000169758_14 (sequence is synthesized)
tctcctgggaccctggaggctgccaagggccacacgcggggcccaggagcccacctggcctccctcagggtgctgcctgcctccagggaggcgacgccaggccaggaggccacaagcttc

SEQ ID NO: 562339 - DNA, 120 bp, Artificial Sequence
  ENSG00000169758_15 (sequence is synthesized)
agacctcaaagcccagagctggcgcctcttctcgccctgctcaggggagggtggtgctcgtggctgggttttctttttaaccatttttacaaaaaccagcctgtggcccagcttcagcag

SEQ ID NO: 562340 - DNA, 120 bp, Artificial Sequence
  ENSG00000169758_16 (sequence is synthesized)
ggtagagtgtgggggggccagctcagcctcttgcgttgccttcgttcctgacgcccaccctggactctagggaacagcactgtgagcaggggctgtccagccccacccctaagccgtctt

SEQ ID NO: 562341 - DNA, 120 bp, Artificial Sequence
  ENSG00000169758_17 (sequence is synthesized)
tcccaggaatcctgggtggagtccaacacaatcacacggagaccaccatctgagcctatgtcatttgtcctcattctcattccagcatgagcgtttctgagtctcttcaagacgaatcta

SEQ ID NO: 562342 - DNA, 120 bp, Artificial Sequence
  ENSG00000169758_18 (sequence is synthesized)
gttttcaccttcacaggatataaagggatcaacctagaggtgggtgggagggtcctagagggcaggggaacaaccattttccaaccttggctttaataataaaaaccagctgcactgaga

SEQ ID NO: 562343 - DNA, 120 bp, Artificial Sequence
  ENSG00000169758_19 (sequence is synthesized)
agagccgagcgaatcccgagcccgggcagcagaggccacatgagctgtggaaagcacattacctgggaccgggtcacctgagaagatctttgtatcagatgttcctgggatcaaaggcac

SEQ ID NO: 562344 - DNA, 120 bp, Artificial Sequence
  ENSG00000169758_20 (sequence is synthesized)
agtggaatgagccccaagttggaaccagaaagacctcagcaggtagcagacctgaagtgcaagtgaaagaagccaatcttagaaggctgcatactgtatgattccacctatttgaccttc

SEQ ID NO: 562345 - DNA, 120 bp, Artificial Sequence
  ENSG00000169758_21 (sequence is synthesized)
tgaaaaaggcaaagctacagagacagaaaaaaaggcacaaagatgaccttgcacatctgctgcagatggcacctccacccagctgtccccagcacagcattgacttgtcgagagctgtcc

SEQ ID NO: 562346 - DNA, 120 bp, Artificial Sequence
  ENSG00000169758_22 (sequence is synthesized)
tttgagtctgatggattattgagactttttgaatgcaggaagcacactcatggggccatccaagggccttgcattatttttctgcctttgaaaagccactgaactaaatttggcagataa

SEQ ID NO: 562347 - DNA, 120 bp, Artificial Sequence
  ENSG00000169758_23 (sequence is synthesized)
aaatatgcctgagagatttctttcttaatttgctgattatgagccctgaccgtaaggagcttacggtctagagtagatggtatgtgagcataaaccactataacacaaggtaaactatga

SEQ ID NO: 562348 - DNA, 120 bp, Artificial Sequence
  ENSG00000169758_24 (sequence is synthesized)
ttcatagtctgggagaggtaccgttgaagtgggcaagagagagaggaaatccagcccctccccactggcctcaagtggaagcagtgacaccagttctgaaagtttggattggagggccag

SEQ ID NO: 562349 - DNA, 76 bp, Artificial Sequence
  ENSG00000169758_25 (sequence is synthesized)
gcagtgacaccagttctgaaagtttggattggagggccaggtaggagtgagactcctacccactcctatgaaatat

SEQ ID NO: 562350 - DNA, 80 bp, Artificial Sequence
  ENSG00000169758_26 (sequence is synthesized)
ataaaagaaagaaagaaagatgttccaagcagagagaattccataagcagaggcagagaggtgaataattgtgtgtgcac

SEQ ID NO: 562351 - DNA, 120 bp, Artificial Sequence
  ENSG00000169758_27 (sequence is synthesized)
ccataagcagaggcagagaggtgaataattgtgtgtgcacatgcactaggaacagataggtggctggagcacagtgtagagaaggataaggaatggcttaaaaggctggggccagatggt

SEQ ID NO: 562352 - DNA, 120 bp, Artificial Sequence
  ENSG00000169758_28 (sequence is synthesized)
ggaaggctctgaattcctggccaaggaattgagagcatgttcagtaagcagtaggcacctctgcaggtttgagtcagggaataagcagatcacactgcgcttcagaagagtcaccaggtg

SEQ ID NO: 562353 - DNA, 63 bp, Artificial Sequence
  ENSG00000169758_29 (sequence is synthesized)
ataagcagatcacactgcgcttcagaagagtcaccaggtggcagcgtataggatgtgcctgaa

SEQ ID NO: 562354 - DNA, 83 bp, Artificial Sequence
  ENSG00000169758_30 (sequence is synthesized)
tcacaaggtcaggagatcgaaaccatcctagctaacacgatgaagccccatctccactaaaaatacaaaaaatgagccgggcg

SEQ ID NO: 562355 - DNA, 84 bp, Artificial Sequence
  ENSG00000169758_31 (sequence is synthesized)
gaaaaagaaaaggatgtgcctgaagcaagatgcccagcggtaagaacacccatcaggaggctacttcagggcagttacaaggac

SEQ ID NO: 562356 - DNA, 120 bp, Artificial Sequence
  ENSG00000169758_32 (sequence is synthesized)
aacacccatcaggaggctacttcagggcagttacaaggacccagacagttggaagctgtctcttctgcgtctgcactcccacggccctttatcagtacttctcttaggtacttaccaatt

SEQ ID NO: 562357 - DNA, 120 bp, Artificial Sequence
  ENSG00000169758_33 (sequence is synthesized)
tttaccttatctacatttttaattaaaaatagttgtggttcattataaaggaaaattagacagtatagaaaaatataaattgtaatcccaccatccattaaataactactgttgacactc

SEQ ID NO: 562358 - DNA, 80 bp, Artificial Sequence
  ENSG00000169758_34 (sequence is synthesized)
gcccggcccagcccagcgggctcggcccaaaccagccccgagctggaacacaggatggagtctcgttctgtcaccctggc

SEQ ID NO: 562359 - DNA, 89 bp, Artificial Sequence
  ENSG00000169758_35 (sequence is synthesized)
cgtggcctcaaccatattactgtgtattagttcagaaagtgctttcattagattcatttgatttaacaatcaaatcttgaattccttca

SEQ ID NO: 562360 - DNA, 120 bp, Artificial Sequence
  ENSG00000169758_36 (sequence is synthesized)
cgtggagaaaacgagccagtgttcagaccagcgggcagtgacgccaggatggggtcccccaggctgggacgggggccctgggtgtcctgaggtttcctgttctgaaagaggctttcatgt

SEQ ID NO: 562361 - DNA, 120 bp, Artificial Sequence
  ENSG00000169758_37 (sequence is synthesized)
tgtcgagcaccccttggggtcacacatctgggcgaagagctagaactgaatttgcacccagggctcctgactccccgtccagtggcctttccacaaaggaaacacgttgtgtttcctctc

SEQ ID NO: 562362 - DNA, 120 bp, Artificial Sequence
  ENSG00000169758_38 (sequence is synthesized)
ccgggcatccgtgagatgggggccagactgcaaggcacctgagacgcaggatcgcacaggttggaaaaggctccgcaaccgtaagaagctcttgcgaaccgcgatgctgggagattccta

SEQ ID NO: 562363 - DNA, 120 bp, Artificial Sequence
  ENSG00000169758_39 (sequence is synthesized)
aggaatcatccagctgcgggaggctcagcccagtcctccccaccccgcccccatgcaggagcaaagcgcccagaggtcaggctggaggcccccgccggcccctcgccgctgattcagcct

SEQ ID NO: 562364 - DNA, 120 bp, Artificial Sequence
  ENSG00000169760_0 (sequence is synthesized)
gaattcatttttgaggtcaatttccaatcgagataaatctattggattagtaggattatctgattgcagccgaaagaagtaacgttgtttgatcatttgtatttcttgcctgatggtcgg

SEQ ID NO: 562365 - DNA, 120 bp, Artificial Sequence
  ENSG00000169760_1 (sequence is synthesized)
atttacatggaggtggctttgggtccccaggattctggatcgtggttgcatctggagagaaaaaaggatcaatcgacacgttttagaagtgtccgtgggtgaataaaaaaggaggggggg

SEQ ID NO: 562366 - DNA, 120 bp, Artificial Sequence
  ENSG00000169760_2 (sequence is synthesized)
gtgcaaaactggggttgcggatgcttaaagcaaaaaaagagaaaaggaagcgtcttgaatcctggaacaagaattaccgggtgctcgagatttcaaaaaagcgtctagaaactggtaaat

SEQ ID NO: 562367 - DNA, 120 bp, Artificial Sequence
  ENSG00000169760_3 (sequence is synthesized)
acttggaccatttcagcttgaatttgacggcgaagtgttgtagagaccgtctccttgaatcattgcaaagggaccggggaaagatgagggggctccctctgtggatttatcttgctgagg

SEQ ID NO: 562368 - DNA, 120 bp, Artificial Sequence
  ENSG00000169760_4 (sequence is synthesized)
gatatagacctgcagctaactggatttgatttataagagagaaatctgcagtcaatgcccactcttgccacactgctaatatggaaaacagaatgttcaataggatatggtctgataaat

SEQ ID NO: 562369 - DNA, 120 bp, Artificial Sequence
  ENSG00000169760_5 (sequence is synthesized)
agtgatgattgaagatgctgctccaatacatgtgaaatcaatgggagatatctgctgtctgaagatctttcagagcttttctcgacaagctcccctgtaagaaatcggaggtatattcta

SEQ ID NO: 562370 - DNA, 120 bp, Artificial Sequence
  ENSG00000169760_6 (sequence is synthesized)
ccattatacagtctttctcaagtggatataaatacgtttgcctcactgtaaccagacaactagacaactaatgtgggaccatggcactgcccagatgcacgtggccaaattatgtttgga

SEQ ID NO: 562371 - DNA, 120 bp, Artificial Sequence
  ENSG00000169760_7 (sequence is synthesized)
gagcagtgatggcatgcttggtacaccggggattgggtgccccattgactctctgtatgttgggatgtttgcttcaggctggccatgtgctatcacaaaaattggatgatgtggacccac

SEQ ID NO: 562372 - DNA, 120 bp, Artificial Sequence
  ENSG00000169760_8 (sequence is synthesized)
tggtggctaccaactttggaaagataagagggattaagaaggaactcaataatgaaattttggggcctgttattcaatttcttggggttccatatgcagccccaccaacaggggaacgtc

SEQ ID NO: 562373 - DNA, 120 bp, Artificial Sequence
  ENSG00000169760_9 (sequence is synthesized)
gttttcagcctccagaaccaccatctccctggtcagatatcagaaatgccactcaatttgctcctgtgtgtccccagaatatcattgatggcagattgccagaagtcatgcttcctgtgt

SEQ ID NO: 562374 - DNA, 120 bp, Artificial Sequence
  ENSG00000169760_10 (sequence is synthesized)
ggtttactaataacttggatgtggtttcatcatatgtgcaagaccagagcgaagactgcctatatttaaatatatatgtcccgactgaggatgatattcgggacagtgggggtcccaaac

SEQ ID NO: 562375 - DNA, 120 bp, Artificial Sequence
  ENSG00000169760_11 (sequence is synthesized)
cagtgatggtgtatatccatggtggctcatatatggaaggtactggaaatttatatgatggaagtgtcttggcaagttatggcaatgtgatcgtcatcacagtcaactatcgacttggag

SEQ ID NO: 562376 - DNA, 120 bp, Artificial Sequence
  ENSG00000169760_12 (sequence is synthesized)
tactcggtttcttgagtacaggcgatcaggctgcaaaggggaactatggactccttgatctcatacaagctttaagatggactagtgaaaacattggattctttggtggtgaccccttaa

SEQ ID NO: 562377 - DNA, 120 bp, Artificial Sequence
  ENSG00000169760_13 (sequence is synthesized)
gaatcactgtttttggatctggtgctgggggttcatgtgtcaacctgctgactttatcccattattctgaaggtaaccgttggagcaattcaaccaaaggactttttcaacgagcaatag

SEQ ID NO: 562378 - DNA, 120 bp, Artificial Sequence
  ENSG00000169760_14 (sequence is synthesized)
ctcaaagtggaacagccctttccagctgggctgttagttttcaacctgcaaaatatgctagaatgttggccacaaaagttggttgcaatgtttcagatacagtagagttagtggaatgcc

SEQ ID NO: 562379 - DNA, 120 bp, Artificial Sequence
  ENSG00000169760_15 (sequence is synthesized)
tacagaagaagccttacaaagaacttgttgaccaagatattcaaccagctcgataccacatagcctttggacctgtgattgatggtgatgtaataccagacgacccccagatattgatgg

SEQ ID NO: 562380 - DNA, 120 bp, Artificial Sequence
  ENSG00000169760_16 (sequence is synthesized)
agcaaggagagtttctcaactatgatataatgttaggagtgaaccaaggggaagggttaaaatttgttgaaaatatagtagatagcgatgatggtatatcagctagtgattttgactttg

SEQ ID NO: 562381 - DNA, 120 bp, Artificial Sequence
  ENSG00000169760_17 (sequence is synthesized)
ctgtttcaaattttgttgataatttatatggatatcctgaaggcaaagatgttttgagagaaaccattaagttcatgtatactgactgggctgaccgtcataaccctgaaaccagaagaa

SEQ ID NO: 562382 - DNA, 120 bp, Artificial Sequence
  ENSG00000169760_18 (sequence is synthesized)
agacattactggctttgtttacggaccatcagtgggtggcaccagctgtagccacagcggatcttcactcaaactttggttcacctacgtacttctatgccttttaccatcattgccaaa

SEQ ID NO: 562383 - DNA, 120 bp, Artificial Sequence
  ENSG00000169760_19 (sequence is synthesized)
cagatcaggttccagcttgggctgatgcagcccacggagacgaggttccctatgtactgggaatccccatgattggccctacagagttatttccttgcaatttctccaaaaatgatgtga

SEQ ID NO: 562384 - DNA, 120 bp, Artificial Sequence
  ENSG00000169760_20 (sequence is synthesized)
tgctgagtgcagttgtaatgacatactggacaaattttgctaaaactggtgacccaaatcaaccagtccctcaagacacgaaattcattcataccaaacccaaccgttttgaagaagtag

SEQ ID NO: 562385 - DNA, 120 bp, Artificial Sequence
  ENSG00000169760_21 (sequence is synthesized)
accaagagttaaagaacattacagagccaataaggtgaacctctggttggagttggtacctcatctgcataatctcaatgacatttctcagtatacctctacaacaactaaagtgccatc

SEQ ID NO: 562386 - DNA, 120 bp, Artificial Sequence
  ENSG00000169760_22 (sequence is synthesized)
aactgacatcactttcagacctacgagaaaaaattctgtacctgtcacgtcagcctttcccactgccaagcaggatgatcccaaacaacaaccaagtccattttcagtggatcaaaggga

SEQ ID NO: 562387 - DNA, 120 bp, Artificial Sequence
  ENSG00000169760_23 (sequence is synthesized)
ctactcaacagagctgagtgtcactattgcagttggagcatcactgctgtttctgaacatcttggcctttgcagccctgtactacaaaaaggataagaggagacatgatgttcacaggag

SEQ ID NO: 562388 - DNA, 120 bp, Artificial Sequence
  ENSG00000169760_24 (sequence is synthesized)
atgcagccctcagcgcactactaccaatgatctaacccatgcacaagaagaggaaatcatgtccctccaaatgaagcacactgatttggatcatgaatgtgagtccattcatccacatga

SEQ ID NO: 562389 - DNA, 120 bp, Artificial Sequence
  ENSG00000169760_25 (sequence is synthesized)
ggtggttcttcggaccgcctgtcccccagattacacactagctatgaggaggtcacctgatgatgttcccttaatgacacccaacaccattacaatgattcccaacactataccagggat

SEQ ID NO: 562390 - DNA, 120 bp, Artificial Sequence
  ENSG00000169760_26 (sequence is synthesized)
tcagcccttacacacattcaatacatttactggaggacagaacaatactctgccccatccccatccccacccccattcacattcaacaaccagggtatagccagataagagaaacaaact

SEQ ID NO: 562391 - DNA, 120 bp, Artificial Sequence
  ENSG00000169760_27 (sequence is synthesized)
attttttttgatggattgcagtaaacgatcactgaagattccttggctttcaacctacaagacttactatttaaataaggaggaatattatgtgaatatacatatcaagaactttggggg

SEQ ID NO: 562392 - DNA, 120 bp, Artificial Sequence
  ENSG00000169760_28 (sequence is synthesized)
ttttgaaaaaaatgaattgtatatatacaaatcaactttaaaaacaaatttcaattgcttgaagcaattgttctgaatgatactttttcattcacattcaagaattaattttttgaagat

SEQ ID NO: 562393 - DNA, 120 bp, Artificial Sequence
  ENSG00000169760_29 (sequence is synthesized)
ttaagttacataatggaattaggcatgtggaacaccaaacaggaaagaactatgtctgaaatataaaaaataaaaataaaaaaacaactatgaatatgcacaagggacacaccagtggaa

SEQ ID NO: 562394 - DNA, 120 bp, Artificial Sequence
  ENSG00000169760_30 (sequence is synthesized)
tgtcagataattttcaccagtttttatttggagccgttttattgtgtagaccatatttacatatttggataagtacacaaagcgtcaatgctgttaatggccttagcaaaggctcatgct

SEQ ID NO: 562395 - DNA, 120 bp, Artificial Sequence
  ENSG00000169760_31 (sequence is synthesized)
gaaatttgccagtaaaacaaagaagtttaaagactggcaggtacaccattatcacataagtgctgtcagtataaagttgtggggataaaggaaactggatatttttagcacgatgtgcat

SEQ ID NO: 562396 - DNA, 120 bp, Artificial Sequence
  ENSG00000169760_32 (sequence is synthesized)
gataatttatatgcttggtggctgtgctgctgattaagccgtaattaaaattcttctcatcccattggagtttttaatagaagcttcctccatcaattggcagaacctaaagaagatttt

SEQ ID NO: 562397 - DNA, 120 bp, Artificial Sequence
  ENSG00000169760_33 (sequence is synthesized)
aaggggcaaaagtaattacaataaaataattcacagtagtttcaatatagaaggaattagctattaaaggtatttgaagaaactataggtatagtggtgaatactcgctgatatgaatcc

SEQ ID NO: 562398 - DNA, 120 bp, Artificial Sequence
  ENSG00000169760_34 (sequence is synthesized)
cagaaaaaaatttcctgtttttaatgttcttttcaatcccatctagataatttatagaaatataaccctaattggacatgtggtacaggatctataagttgctgtgtttttttgttactc

SEQ ID NO: 562399 - DNA, 120 bp, Artificial Sequence
  ENSG00000169760_35 (sequence is synthesized)
tgtattttgttccttttggtaaggtgaagtgtgtccaaagagttacttgcaacagtctttcatgatatgaggatgcccccgtattaccactctgattatagttctgagttctttgattta

SEQ ID NO: 562400 - DNA, 120 bp, Artificial Sequence
  ENSG00000169760_36 (sequence is synthesized)
ctcatgctgcatgacaaaatgtttactaataacaattcattataaagttatatccctctttacatcacttatctttctcactgaggttcattcactggaatttactcacgcaatctcagt

SEQ ID NO: 562401 - DNA, 120 bp, Artificial Sequence
  ENSG00000169760_37 (sequence is synthesized)
agagtacaacgtagatacagaacctaggagagtcaacatctggaggattttagtctttcttacacatatgtgtgattttaaacgaatattctcagaccacaggaaactcttcatccccct

SEQ ID NO: 562402 - DNA, 120 bp, Artificial Sequence
  ENSG00000169760_38 (sequence is synthesized)
gttgtttaccagtaacagtatatcacagacctttccaaatgtttgtatatgtaatcagatgtacatttatattgaaaaacaaatgagatggacttaaagagcacatcctgataaatactt

SEQ ID NO: 562403 - DNA, 120 bp, Artificial Sequence
  ENSG00000169760_39 (sequence is synthesized)
tctctctcacctgtactatatttctattagactaaagttatgtgattttttttttacattttttcagatgactagcaattttgatagtttataagataatgcaaagaactttctctgaca

SEQ ID NO: 562404 - DNA, 120 bp, Artificial Sequence
  ENSG00000169760_40 (sequence is synthesized)
aactaactgcagtaacagaaacctttcttttcagttactctttttcaagaatgaaagattattatacaaaaaattgtatactacttgatggaaccaactttgtacatcttggccatgtca

SEQ ID NO: 562405 - DNA, 120 bp, Artificial Sequence
  ENSG00000169760_41 (sequence is synthesized)
ctggtcattgtgtgaaataaagataatctggataatgactattagtccaatgctaagaaacatgatctttgctcattaaagagctaaaatgtttattgctgttttgtctttcttttttct

SEQ ID NO: 562406 - DNA, 120 bp, Artificial Sequence
  ENSG00000169760_42 (sequence is synthesized)
aaacatgactgtctcaaagagtaatttttctagattagaccagtcaggtttttgaagacatataggtaacttccacagaaaacacaaacatgtatttaaaggcaagtctcatctaagatg

SEQ ID NO: 562407 - DNA, 120 bp, Artificial Sequence
  ENSG00000169760_43 (sequence is synthesized)
aaactcataaaaattatttaatgtttgttatgaatttaaaagctccagaaatccatgaaaaaaagaaagattagctttgtgttgttaaatatctcttaggtacagatgttgtagaaataa

SEQ ID NO: 562408 - DNA, 120 bp, Artificial Sequence
  ENSG00000169760_44 (sequence is synthesized)
agtgccaattgttttcagttagttagaaaaacaagttccaattctagtcatcaaggaaaaggtctattgaaaagaaatttgcaatatttcatggaatacaaataactaggttcataaaat

SEQ ID NO: 562409 - DNA, 120 bp, Artificial Sequence
  ENSG00000169760_45 (sequence is synthesized)
gggggtgattaaactaccataaagtaatgaatagaaagttgccatgctaagagaatgtaaaagtgctgagcaagatattaaactgacactaaaagataaaaatctatttcaaggaattta

SEQ ID NO: 562410 - DNA, 120 bp, Artificial Sequence
  ENSG00000169760_46 (sequence is synthesized)
tgtgattataatcccccctcccaattattatctatcaaagaaatgtaggtattcctccataattaaaaaaaagtctctgttagaagcaaaagtcttcaaaatccagagtgatctacatac

SEQ ID NO: 562411 - DNA, 120 bp, Artificial Sequence
  ENSG00000169760_47 (sequence is synthesized)
agcttttgactgaggtggttatgcttttcaactgtgaactgccagtgtacacaaatacaaataattgtttagcatctgaagtattgttcaattggaacactgtattttactgtattaatt

SEQ ID NO: 562412 - DNA, 120 bp, Artificial Sequence
  ENSG00000169760_48 (sequence is synthesized)
aaacaaaacacaagaacagaatagaaatgacaacaaaataagatatgaatgaatactttcatatgcattgcttcatttggcaaaaccaaacattctattaaatagtatgttttaacgatg

SEQ ID NO: 562413 - DNA, 120 bp, Artificial Sequence
  ENSG00000169760_49 (sequence is synthesized)
gccatatttatatcatctacctaccaatctattgctctgcatttatcaatctgcctatatatagcataactgtcaccctctttatattaatttaggaaaatgattgaggaaaacaaagca

SEQ ID NO: 562414 - DNA, 120 bp, Artificial Sequence
  ENSG00000169760_50 (sequence is synthesized)
tagccctattaattattttctctaaattagggtagaataactttatggaagataaagcagcctaggtttaattgttgttcaccagtcacgtgataaagtcattgtgaatgagtgttagtt

SEQ ID NO: 562415 - DNA, 120 bp, Artificial Sequence
  ENSG00000169760_51 (sequence is synthesized)
gctagttttataattgcagtctctagtttctgaatgaaaaaggatgccccacattatacagaacattaagaactgtttttaaagctgaaacataatctttatatgcaagaaaaataaata

SEQ ID NO: 562416 - DNA, 120 bp, Artificial Sequence
  ENSG00000169760_52 (sequence is synthesized)
tttagcaaatatgtttaaaatgtatttatttagataattttctttgaaaaacaatgtaagtaacaaaattaaaataatatttttggcattatttgttaattcagattttcctgcctccga

SEQ ID NO: 562417 - DNA, 120 bp, Artificial Sequence
  ENSG00000169760_53 (sequence is synthesized)
tcctgcctccgattaaaaattaggcaaagctgcttataatttatacaaagattacactaaaatgaactttatttcattgttttgctgttatataaaatttttaccaaatgtttaccaaga

SEQ ID NO: 562418 - DNA, 120 bp, Artificial Sequence
  ENSG00000169760_54 (sequence is synthesized)
gattaatgttttagagtatgaggatagaaaaataaaagtgacagatttcatagttttaaatctctactgaacatgttgactatgaacaaaatctaattggctaccacagatatataacaa

SEQ ID NO: 562419 - DNA, 120 bp, Artificial Sequence
  ENSG00000169760_55 (sequence is synthesized)
agtttattactaactttatgcaaattggaaaataatttgctaaagcattaaaaatgtcagatttgtagacgtcttgctggcaactcaaagcagaaaatctgagtatatattattttattc

SEQ ID NO: 562420 - DNA, 120 bp, Artificial Sequence
  ENSG00000169760_56 (sequence is synthesized)
ctcatttcaaatataaaagttgaccaaagtgatgctttatttccgacttcctgatctgtatgtgaaaacagcaacatttttttaaaaattatcaagtatatataatattaaaaagaggaa

SEQ ID NO: 562421 - DNA, 120 bp, Artificial Sequence
  ENSG00000169760_57 (sequence is synthesized)
aacagatggcactaattttcttacaggagtgaagtgctgaaactaaattgttacatctgtaacaacagttatttcacctcttgccacactcatcctgacatacgtattaatatcaaaaaa

SEQ ID NO: 562422 - DNA, 120 bp, Artificial Sequence
  ENSG00000169760_58 (sequence is synthesized)
tgatacaaagaatatgagaaatgtgttccagcattaaagacactactacatagaaattactgggattcttttctttggcgagtttcactgaaatagtttcacaggatgaaatgatgaatt

SEQ ID NO: 562423 - DNA, 120 bp, Artificial Sequence
  ENSG00000169760_59 (sequence is synthesized)
gaattcttaagaagctgtcaaatatggcagtcttttgatgttagtaattttgttttcttctgtgttattggttcaaagtactggccttttccttcatttccagtaattagttgttataga

SEQ ID NO: 562424 - DNA, 120 bp, Artificial Sequence
  ENSG00000169760_60 (sequence is synthesized)
ctatcactttttaatgtgagtggaaattagatgatttggttatacttgtgaaaacatgcttccaaataaattcaattaatgggcacttccctgctgagattttgttatcattcatttgat

SEQ ID NO: 562425 - DNA, 120 bp, Artificial Sequence
  ENSG00000169760_61 (sequence is synthesized)
tatcttgtcaagctttactgttacgacaaatgttttagctttctggtcaatagactaagggaatttctccagtagccttatacctctcctgcacttgatctgatagcaacatacacttca

SEQ ID NO: 562426 - DNA, 120 bp, Artificial Sequence
  ENSG00000169760_62 (sequence is synthesized)
aatttccatcagaagtctctaaagaaatttcctactgctatgaaacatttggtggccaacttgattctttttcataagcattctgatttgattttattctggcacgttgctgtatttgga

SEQ ID NO: 562427 - DNA, 120 bp, Artificial Sequence
  ENSG00000169760_63 (sequence is synthesized)
tgcaggccagaaatcaattccatttgataagggttgtggagaatacagactggaataaccgtgtgcagggcttaagtgccttttcctcctgagattttatttataaaacttagctttttt

SEQ ID NO: 562428 - DNA, 120 bp, Artificial Sequence
  ENSG00000169760_64 (sequence is synthesized)
atttaaagagtacaataggatgactatattataaattaccaataaagaaagtttatttggacatttttacatttaatttgatttttaaaataatatcagatgcatctaaatggcttccgg

SEQ ID NO: 562429 - DNA, 120 bp, Artificial Sequence
  ENSG00000169760_65 (sequence is synthesized)
cagatgcatctaaatggcttccgggaaagactgaggtaaatttttgaaagtgacaattatataggcatctgacttgatggtacttaagaataaaaatttaaatctctagcaaactttaaa

SEQ ID NO: 562430 - DNA, 120 bp, Artificial Sequence
  ENSG00000169760_66 (sequence is synthesized)
aattgtccaaatagtaagtttaatttgaaagaagtctgaagctattagagaaaatcatgtactagataggtatatatttttttctagtcagctattacgtacaccacataatatatatac

SEQ ID NO: 562431 - DNA, 120 bp, Artificial Sequence
  ENSG00000169760_67 (sequence is synthesized)
cctatatactatatggtttatataacatttataatggccctttcagacccatatacttacaaatgacattgtataactacctacatatgtattaatgtgacagaatttagtcctttatgg

SEQ ID NO: 562432 - DNA, 120 bp, Artificial Sequence
  ENSG00000169760_68 (sequence is synthesized)
aaagtcaaaccaaattgctagcagttttgagttgaaatgaatgataacaattaaagcttttaagaaattggtaaaggtaccgtaacaaaaactcagcagataaatttaaaagagagggac

SEQ ID NO: 562433 - DNA, 120 bp, Artificial Sequence
  ENSG00000169760_69 (sequence is synthesized)
catttttgaatgccattttcagagttgacatctaaactagatggtgtgtttaaaaggattttagtggttttgattcatcctttctctgcattcatatcatttagcaaattaatgggacat

SEQ ID NO: 562434 - DNA, 120 bp, Artificial Sequence
  ENSG00000169760_70 (sequence is synthesized)
atgtcatggtttttgtaaaaaagaccattgggttgtcatgattcagtttgtgtttggacatctatggctttcattaaaaacgtgtttattatcatgaataaatattaccatgttttccaa

SEQ ID NO: 562435 - DNA, 120 bp, Artificial Sequence
  ENSG00000169760_71 (sequence is synthesized)
gggcagagcaacattgttttgacagtgaaaattaccaatttataattttttaagaaaagcatgcctagcacagaccacctgattaccaagaggaagctgaagaggagattctactagaga

SEQ ID NO: 562436 - DNA, 120 bp, Artificial Sequence
  ENSG00000169760_72 (sequence is synthesized)
atatccaaggaatgtgccagaaagcccggcaagaaaatatgtagaaaaggaggtccccttacaaagaaacagacagatgatttaggtgataatgacggtgctgaagatgaagatattcgg

SEQ ID NO: 562437 - DNA, 120 bp, Artificial Sequence
  ENSG00000169760_73 (sequence is synthesized)
gagagcgcgcccgggcggccagcgccgagcgcgcggagctggcgtggggagacacggcaggaaaggcgagtcggagtgggtgatgagaggccgggagagcccgtccgagccggagagacc

SEQ ID NO: 562438 - DNA, 120 bp, Artificial Sequence
  ENSG00000169760_74 (sequence is synthesized)
ggagagaagggagcgagcgactgtgcggcgctcacgctgccagagcccgggcggagtgcagtcgcctccaaagccttagagcggcgccccagtcactgcagctcttcaccctagagctgt

SEQ ID NO: 562439 - DNA, 120 bp, Artificial Sequence
  ENSG00000169760_75 (sequence is synthesized)
cggaaattctgcatattgaagcaggtggctcctggtacgaaatctctggatacatttggcttgccaagttttgctcttcgctgtcccctcccgtttacagaagcatctgtggtgcttttc

SEQ ID NO: 562440 - DNA, 120 bp, Artificial Sequence
  ENSG00000169760_76 (sequence is synthesized)
attttggatttacatgcaggaaacgtatatatgtttatataccgaccgcataatatataaatacatatacgcgtgcccaagggcctggttttcgtctctcctccccacgaaacggaatgt

SEQ ID NO: 562441 - DNA, 120 bp, Artificial Sequence
  ENSG00000169760_77 (sequence is synthesized)
tttggagccgatggataacaagaacactattaacattcttttgagcctgttttttaaaagggggagggagcgtgaagaattgtttaacatttggccatcgtttggctgcacactaagcac

SEQ ID NO: 562442 - DNA, 120 bp, Artificial Sequence
  ENSG00000169760_78 (sequence is synthesized)
gatcactctccaaagtctcttccaactctgaaattcttatattttattctgcttttactattttcacatggttatccagtgccaagatctacatatcccttcaaattacattaaactagc

SEQ ID NO: 562443 - DNA, 120 bp, Artificial Sequence
  ENSG00000169760_79 (sequence is synthesized)
tgtttctggttttctttataggataattaagtagctagaactataaaatacagttataaatctgagatctgagttttttataaaatttttcacatacattttaatgctattgacaacttt

SEQ ID NO: 562444 - DNA, 120 bp, Artificial Sequence
  ENSG00000169760_80 (sequence is synthesized)
gacacttactgggtgggcagagcaacattgttttgacagtgaaaattaccaatttataattttttaagaaaagcatgcctagcacagaccacctgattaccaagaggaagctgaagagga

SEQ ID NO: 562445 - DNA, 80 bp, Artificial Sequence
  ENSG00000169762_0 (sequence is synthesized)
gttgtgctcggaacatggcgggcgtcggcgacgcggccgctccgggagaaggcggcggtggcggcgtggacggcccgcag

SEQ ID NO: 562446 - DNA, 120 bp, Artificial Sequence
  ENSG00000169762_1 (sequence is synthesized)
gcggacaggggcccccgccggcgcctcagctcacagagacgctgggcttctacgagagcgaccggcggcgggagaggcgccggggccgcacagagctttcattgttgaggttcctcagtg

SEQ ID NO: 562447 - DNA, 120 bp, Artificial Sequence
  ENSG00000169762_2 (sequence is synthesized)
ctgaactaacaagagggtacttccttgaacataatgaggccaagtatacagaaagaagagaaagagtatacacttgtttgcgaataccaagagaattggaaaagctgatggtttttggaa

SEQ ID NO: 562448 - DNA, 120 bp, Artificial Sequence
  ENSG00000169762_3 (sequence is synthesized)
tctttctgtgcctggatgcgtttttgtatgtgttcaccctgcttcctttaagagttttcctggcactattcaggctcctcactttgccttgctatggcttaagggacagacgtttgcttc

SEQ ID NO: 562449 - DNA, 120 bp, Artificial Sequence
  ENSG00000169762_4 (sequence is synthesized)
agcctgcccaggtgtgtgacattttgaagggtgtcattttggtaatctgctattttatgatgcactatgttgactactccatgatgtaccacctgataagggggcagtccgtcatcaagc

SEQ ID NO: 562450 - DNA, 120 bp, Artificial Sequence
  ENSG00000169762_5 (sequence is synthesized)
tctacatcatctacaacatgctggaggtagctgatcgtctgttttcatcttttggacaagacatattagatgctctctattggacagcaacagagcctaaagaaagaaaaagagcccaca

SEQ ID NO: 562451 - DNA, 120 bp, Artificial Sequence
  ENSG00000169762_6 (sequence is synthesized)
ttggggtgattcctcactttttcatggctgttctctatgtctttttgcatgcaattcttataatggttcaagcaacaactctcaatgtagcttttaactcacacaacaagtctttgctta

SEQ ID NO: 562452 - DNA, 120 bp, Artificial Sequence
  ENSG00000169762_7 (sequence is synthesized)
ctatcatgatgtctaataattttgttgaaattaaaggaagtgttttcaagaagtttgaaaagaacaatctctttcaaatgtcaaatagcgatattaaggaacgattcacaaattatgtgc

SEQ ID NO: 562453 - DNA, 120 bp, Artificial Sequence
  ENSG00000169762_8 (sequence is synthesized)
ttttactgatagtgtgtctaagaaacatggaacagttttcttggaatccagatcatctctgggtgttgtttccagatgtctgtatggtaattgcatcagaaattgccgtggatattgtaa

SEQ ID NO: 562454 - DNA, 120 bp, Artificial Sequence
  ENSG00000169762_9 (sequence is synthesized)
aacatgcctttattactaaattcaatgacattactgcagatgtctacagtgaatatagagccagtcttgcttttgaccttgttagcagccgacagaaaaatgcatacactgattacagtg

SEQ ID NO: 562455 - DNA, 120 bp, Artificial Sequence
  ENSG00000169762_10 (sequence is synthesized)
actctgtagcacggaggatgggctttattcctctcccactagctgttttactcatcagagttgtaacaagctcaattaaagtgcaaggaatcctgtcttatgcctgtgtcatactcttct

SEQ ID NO: 562456 - DNA, 120 bp, Artificial Sequence
  ENSG00000169762_11 (sequence is synthesized)
attttgggttgatatccctgaaagtacttaatagcatcgtgctgttggggaaatcgtgccagtatgtgaaggaagccaaaatggaagagaagctgtcgaatcctcccgcaacctgcactc

SEQ ID NO: 562457 - DNA, 120 bp, Artificial Sequence
  ENSG00000169762_12 (sequence is synthesized)
caggcaagccgtccagtaaatcacagaacaaatgtaaaccctctcaaggcctttccacagaagaaaacctgtctgcctccatcaccaaacaacctattcatcaaaaggaaaatatcatac

SEQ ID NO: 562458 - DNA, 120 bp, Artificial Sequence
  ENSG00000169762_13 (sequence is synthesized)
cattacttgtgacaagcaattctgatcagtttttgacaactccagatggtgacgagaaggacataacgcaggacaattctgaattaaaacacagatcctcaaagaaagatttgttagaga

SEQ ID NO: 562459 - DNA, 120 bp, Artificial Sequence
  ENSG00000169762_14 (sequence is synthesized)
tagacaggttcacaatttgtggaaaccgaattgactgaatctgtggcttcatgcgctgaagaagctgggtcctggggcaacaagtgctgtgttgccaggacaaatagatgctaaacatgg

SEQ ID NO: 562460 - DNA, 120 bp, Artificial Sequence
  ENSG00000169762_15 (sequence is synthesized)
cacttaaatatttatttaaaaacttaaattattattggcaagcaaatcttagtatctttcttccagtaatatggcctggctgagggtcagaccacaggacaggagcgacctccggccttg

SEQ ID NO: 562461 - DNA, 120 bp, Artificial Sequence
  ENSG00000169762_16 (sequence is synthesized)
actgtctgggaagcttgatggattataaaacttcctcctgcctggccaagcagcagcatcatttccaggacccaacaaaggcaacatcaaaatctgttttgctttgtcagtctgggcttc

SEQ ID NO: 562462 - DNA, 120 bp, Artificial Sequence
  ENSG00000169762_17 (sequence is synthesized)
cagaatgttgaatttgcctcaaggcctcttcagtataaggaaatacctggaaaactgtgaaacttttaccacgacgtaatctttccagtctcatactattttcacaaacagttttcaaac

SEQ ID NO: 562463 - DNA, 120 bp, Artificial Sequence
  ENSG00000169762_18 (sequence is synthesized)
tcttaattaatcagaataaaaggctaccttaaataagacatgatgaatagtagcattttgtagggttaaaaaaaaatgctaaactagtttatttattaaaaaaataattaatgaaggcta

SEQ ID NO: 562464 - DNA, 120 bp, Artificial Sequence
  ENSG00000169762_19 (sequence is synthesized)
gctatgcattactgggaaaaatccttcataatttttcagtttactctttaaagcaaaatgtgagctgtatgtcatttaattggtggataaaacaaatttccttacaaaagggcacttttt

SEQ ID NO: 562465 - DNA, 120 bp, Artificial Sequence
  ENSG00000169762_20 (sequence is synthesized)
acaccaaggaagcagagcagtgttaactttaaggtatacttaactgattttgctttaaaactaattacttcataaattattacagctaaaaggattcgatgttgaacaggctgaaaaatt

SEQ ID NO: 562466 - DNA, 120 bp, Artificial Sequence
  ENSG00000169762_21 (sequence is synthesized)
gtcaatgtacaaaattcaaaactgtcaactttaactgtaaagtaaatgctccaagtgtgttagacagcatcatcttgcttgggcttaccaaatgcattagtctttgtgtttgggtcgaca

SEQ ID NO: 562467 - DNA, 120 bp, Artificial Sequence
  ENSG00000169762_22 (sequence is synthesized)
gcgagtgtgcctgtgctggggcagggtgtgtgttctgtgggagggtgtctgtggggatgtgactatcagggtgggcctgtgctggggatggggcaggcctgggtctggagaggattttgt

SEQ ID NO: 562468 - DNA, 120 bp, Artificial Sequence
  ENSG00000169762_23 (sequence is synthesized)
gtgaaagtaaatggggtgtttgaggcgtatgggtggctgttggtgtggggaggcatctgtgtatggctgttgggaacagcaaccaaaaggtgctttttggttttatttgagatgaagatt

SEQ ID NO: 562469 - DNA, 120 bp, Artificial Sequence
  ENSG00000169762_24 (sequence is synthesized)
gtgtttccgcttaattactagtttgtggtctatatcatagaagttatttcccaccccattttatcttgacaaccgtgtttgcatttctgtaaaacttctacaacttctggtgtcagaact

SEQ ID NO: 562470 - DNA, 120 bp, Artificial Sequence
  ENSG00000169762_25 (sequence is synthesized)
gtccagaagatggtactgttaactgttatttcctttgatgttttgattttgaagtttagctctcatgcaaatgtttcaggcgtacatacataggcagaaagcaatttttaggtgatttgt

SEQ ID NO: 562471 - DNA, 120 bp, Artificial Sequence
  ENSG00000169762_26 (sequence is synthesized)
ctgtttcttggatgaaatataaagcaagctttaatgttctgacttgttcatttgaaatacaaaaaagtaagtgaattttaatgttttgcattaactaaagaaatctgaagattaatgttg

SEQ ID NO: 562472 - DNA, 120 bp, Artificial Sequence
  ENSG00000169762_27 (sequence is synthesized)
aggaaattgtatggacatgcctttgtgaaaccaggaagtattttaagttaaaaatgaaaaaggttttaattgctttgtgtgtgttttaatggagccccattttagaattattttttccat

SEQ ID NO: 562473 - DNA, 120 bp, Artificial Sequence
  ENSG00000169762_28 (sequence is synthesized)
ctccctttaccaacaaaaggaacaatgccaccgtgaatggaatagtttggggaaagctttgccaaacacaaccctgatttcagagcaggaacatggtttggatagatcttcagttccgct

SEQ ID NO: 562474 - DNA, 120 bp, Artificial Sequence
  ENSG00000169762_29 (sequence is synthesized)
tgaattattctgttactgcgctgtcattttcagaagatttccattcctttgcagatgctgttgggagttcgggattatgttcatttcttctgttttaatggcattcagtactaattttat

SEQ ID NO: 562475 - DNA, 120 bp, Artificial Sequence
  ENSG00000169762_30 (sequence is synthesized)
aagtgcatcttgtgtgaatctcaataaattcagttttgtaatcttttttaaaaaggtcactgaatttattttaatatttactattgtatttggtagagtgaatttcccactgtataataa

SEQ ID NO: 562476 - DNA, 120 bp, Artificial Sequence
  ENSG00000169762_31 (sequence is synthesized)
gtatttatttgtaattcacaagtgatagagctatcttaatttgaattattgctttggtcttaatggtggcaaaatgtttaattttgtctttggaaaaaataggctcggccttgattatag

SEQ ID NO: 562477 - DNA, 120 bp, Artificial Sequence
  ENSG00000169762_32 (sequence is synthesized)
accatttaatatttctcagcaaatgaaggtatttgcattttacaagtgttttgaatgtcacacaaaatatttttcacatctgggagtcaagttcaagacagtgctttggttttaaaaaaa

SEQ ID NO: 562478 - DNA, 120 bp, Artificial Sequence
  ENSG00000169762_33 (sequence is synthesized)
tctaatgaaggcacaggataggccagacccttattaggttttcctttagaataagtgtaaagaccaagtgtcactgatacgcttgtccagattttcttgtggactttggccagtatttag

SEQ ID NO: 562479 - DNA, 120 bp, Artificial Sequence
  ENSG00000169762_34 (sequence is synthesized)
agtttatattcatgttacataaagtgaaagaaacttgctataattaggccatcaaaatatatcctgccactcctggtaactcagcagaggaggagataaatttacaaaataatgtaatat

SEQ ID NO: 562480 - DNA, 120 bp, Artificial Sequence
  ENSG00000169762_35 (sequence is synthesized)
ctctacattgttacatgttttcaactattttttatcaacaaagatttgttaatcacttcctatgtgtcagaaactgttctaagtggtgggatcagcaatgagcaagataagtccctgttc

SEQ ID NO: 562481 - DNA, 120 bp, Artificial Sequence
  ENSG00000169762_36 (sequence is synthesized)
gtctgtggaagactgataggaacaagtcgatgaaataatgtctgctggtcacagagtgtccactgaccaaatgatctctcaggcttatttcagctctaaaatatagttctttaaaacgtt

SEQ ID NO: 562482 - DNA, 120 bp, Artificial Sequence
  ENSG00000169762_37 (sequence is synthesized)
atggaataaaatgaatattgcagaaaactccaaaagactttggctgttttactgtttgggtattggtgaaacaatcatctgtcacttaatgaccttcagtcaacaatagaccacatatac

SEQ ID NO: 562483 - DNA, 120 bp, Artificial Sequence
  ENSG00000169762_38 (sequence is synthesized)
ctcaagcttccagttgtagtgagtggaaagtatataaataacttcctttgaccttgtttttctcacctgagatgagataactatggagtaatttgctttagaggaacagaggaaaaacac

SEQ ID NO: 562484 - DNA, 120 bp, Artificial Sequence
  ENSG00000169762_39 (sequence is synthesized)
gccttgcttaccccgcacaggcctggccagggcactcagcttcaagtcttcagttctgaaggtacctgagagtcaagaatgctctaccgactctagttatggtgcttctggcctttactg

SEQ ID NO: 562485 - DNA, 120 bp, Artificial Sequence
  ENSG00000169762_40 (sequence is synthesized)
tgctgtcatcacttgggggctcttcttaaacatggattctgatttaggagatctaggctgggtctggagaatctgcatttccagggcggtggggctcatgctgctggtctgggacacacc

SEQ ID NO: 562486 - DNA, 120 bp, Artificial Sequence
  ENSG00000169762_41 (sequence is synthesized)
ctgcccagacattttagaaccagtacccccttgagtatccaaattgtcaagtgctagggaaattagtttcacaacttcattagaaacccatgctagaactttaaattatgaagtaaatgt

SEQ ID NO: 562487 - DNA, 120 bp, Artificial Sequence
  ENSG00000169762_42 (sequence is synthesized)
tatgattatgtatatgtttgctgtaagaaatacacattttaagttgcacatttaaattcagatctttacatagggtaaataaatataagttcccaatttttgtaagtaatgtttttagta

SEQ ID NO: 562488 - DNA, 120 bp, Artificial Sequence
  ENSG00000169762_43 (sequence is synthesized)
caatatgtctcacttcaaagcattcagcgtatgaaaatctgcatttatataaaaaataagttgagctgatatacattcactttacaaaaaaatgcttcgctttataagccagatattcac

SEQ ID NO: 562489 - DNA, 120 bp, Artificial Sequence
  ENSG00000169762_44 (sequence is synthesized)
tgcttcgctttataagccagatattcacaagttttttaaatagtaagctaccctaagttatataataaactttgaaattcaaattgcaggccggcacggtggctcacacctgtaatccca

SEQ ID NO: 562490 - DNA, 120 bp, Artificial Sequence
  ENSG00000169762_45 (sequence is synthesized)
gctgaggtaggagaatcacatgaaccctagaggtggaggttgtagtgagctgaaatcgtcccactgcaccccagcctgggtaacacagcgagactccatctcggggaaaaaaaaaaagaa

SEQ ID NO: 562491 - DNA, 120 bp, Artificial Sequence
  ENSG00000169762_46 (sequence is synthesized)
gaagccatggagctctagccttcctggtacctcctaaattcaagaccaagatgttttaaaaccataccccagctacctgattctaggcttgctgcgcgtacactttgccccaccaagtag

SEQ ID NO: 562492 - DNA, 120 bp, Artificial Sequence
  ENSG00000169762_47 (sequence is synthesized)
caagtctttgcttactatcatgatgtctaataatgtaagtatgagatttatcttacatttttgaagttatacaggcatttcagctgcaatactctgggtgggataaaattctttgttcta

SEQ ID NO: 562493 - DNA, 120 bp, Artificial Sequence
  ENSG00000169762_48 (sequence is synthesized)
ctgaatcaggtttaggtgacatggagggacagggaagctgctgtccggagagtgtggtgaagtggcctctggggttcaaaattcagagttcactaagaggaacagaggaaaaacacgggt

SEQ ID NO: 562494 - DNA, 120 bp, Artificial Sequence
  ENSG00000169762_49 (sequence is synthesized)
gcgcagccccgaggcccccgcggccgcgccaggccaggtgtgccctagaaggggtctgcggccgggaaagttctgtccgggtccttgcatcgccctcggaaggtcttaggttagcgggca

SEQ ID NO: 562495 - DNA, 120 bp, Artificial Sequence
  ENSG00000169762_50 (sequence is synthesized)
tctcccacgtctcggagcccaaacgtgagaagcacacggctgatttcttaattatattcatgccaagatgagataactatggagtaatttgctttagaggaacagaggaaaaacacgggt

SEQ ID NO: 562496 - DNA, 120 bp, Artificial Sequence
  ENSG00000169762_51 (sequence is synthesized)
gctcccaccgccccagctggtggtggtctcgacaccacgctcgttgcggggtcacacgccagagctggaaaggggaggtccagccccaagtaaagcgacaaaagctttcattgttgaggt

SEQ ID NO: 562497 - DNA, 120 bp, Artificial Sequence
  ENSG00000169762_52 (sequence is synthesized)
aggctctctgctaaaccactggagcccacatgtaaagcagttcttggcacttagaaagtactgaataaatatttgggtttttgttgttgttgtttgagacggagtcttgctctttcgccc

SEQ ID NO: 562498 - DNA, 76 bp, Artificial Sequence
  ENSG00000169762_53 (sequence is synthesized)
catctctgggtgttgtttccagatgtctgtatggtaattgcatcagaaattgccgtggatattgtaaaacatgcct

SEQ ID NO: 562499 - DNA, 120 bp, Artificial Sequence
  ENSG00000169762_54 (sequence is synthesized)
tatacattacactacttaaaatagtcacttttccccaaattctaaactctcaggatcatagtcgttggatatttattcccctttaaagaaaaacctttagaagatctatgaatgttaaca

SEQ ID NO: 562500 - DNA, 120 bp, Artificial Sequence
  ENSG00000169762_55 (sequence is synthesized)
gttcggtggaattgaggttacattttacctttactgtaggaaaacaaataagaaattatgcccagatgtcagcttggttattagcacttgttcctggttaattattaaatgtttttatta

SEQ ID NO: 562501 - DNA, 120 bp, Artificial Sequence
  ENSG00000169762_56 (sequence is synthesized)
ctctattctcaacactaaataaacatttacaaattaagaataatagtaatacttaacattaagtagtatatgctctttgcagcattttaagttattcaactttgtatttaagacttgtga

SEQ ID NO: 562502 - DNA, 120 bp, Artificial Sequence
  ENSG00000169762_57 (sequence is synthesized)
acatttggatttccacatcattttataagtgccaggttctgttcttgctccatagcctcacctgtttagaacatttgctggtaataagtgaatagtacttttaaaatgctgtttaaatcc

SEQ ID NO: 562503 - DNA, 120 bp, Artificial Sequence
  ENSG00000169764_0 (sequence is synthesized)
ggttttcgggggaggcgtttggggcctggacggcggcgcggggagggggcagctaggggcgcggcctgccagtgcctcctgcagtacagccctggagggcgtggggacttgggggcggtg

SEQ ID NO: 562504 - DNA, 120 bp, Artificial Sequence
  ENSG00000169764_1 (sequence is synthesized)
aaatagccgctgtaggtccgcctctttcattgaagaaatttaagttcgtgtggttttaccttttccgggagtctccagctggccctcatttgtgtccggagctcaggagttcccaaaccg

SEQ ID NO: 562505 - DNA, 120 bp, Artificial Sequence
  ENSG00000169764_2 (sequence is synthesized)
actcagtcgcaccaagtttccgtcttttggaattggggaaggagtttctttctttcttttcttttttcttgagccagttttaatcgctttgaataaatactcccttaagtagttaaatat

SEQ ID NO: 562506 - DNA, 120 bp, Artificial Sequence
  ENSG00000169764_3 (sequence is synthesized)
aggaggagaaagaatacatcggttgttaaagcaggagaggaagagagacctgccctgtagcgtgactcctctagaaaaaaaaaaaaaaagccggagtattttactaagcccctaaaatgt

SEQ ID NO: 562507 - DNA, 120 bp, Artificial Sequence
  ENSG00000169764_4 (sequence is synthesized)
cgagatttgtacaagatcttagcaaagcaatgtctcaagatggtgcttctcagttccaagaagtcattcggcaagagctagaattatctgtgaagaaggaactagaaaaaatactcacca

SEQ ID NO: 562508 - DNA, 120 bp, Artificial Sequence
  ENSG00000169764_5 (sequence is synthesized)
cagcatcatcacatgaatttgagcacaccaaaaaagacctggatggatttcggaagctatttcatagatttttgcaagaaaaggggccttctgtggattggggaaaaatccagagacccc

SEQ ID NO: 562509 - DNA, 120 bp, Artificial Sequence
  ENSG00000169764_6 (sequence is synthesized)
ctgaagattcgattcaaccctatgaaaagataaaggccaggggcttgcctgataatatatcttccgtgttgaacaaactagtggtggtgaaactcaatggtggtttgggaaccagcatgg

SEQ ID NO: 562510 - DNA, 120 bp, Artificial Sequence
  ENSG00000169764_7 (sequence is synthesized)
gctgcaaaggccctaaaagtctgattggtgtgaggaatgagaatacctttctggatctgactgttcagcaaattgaacatttgaataaaacctacaatacagatgttcctcttgttttaa

SEQ ID NO: 562511 - DNA, 120 bp, Artificial Sequence
  ENSG00000169764_8 (sequence is synthesized)
tgaactcttttaacacggatgaagataccaaaaaaatactacagaagtacaatcattgtcgtgtgaaaatctacactttcaatcaaagcaggtacccgaggattaataaagaatctttac

SEQ ID NO: 562512 - DNA, 120 bp, Artificial Sequence
  ENSG00000169764_9 (sequence is synthesized)
aggtcatggtgatatttacgccagtttctacaactctggattgcttgatacctttataggagaaggcaaagagtatatttttgtgtctaacatagataatctgggtgccacagtggatct

SEQ ID NO: 562513 - DNA, 120 bp, Artificial Sequence
  ENSG00000169764_10 (sequence is synthesized)
gtatattcttaatcatctaatgaacccacccaatggaaaacgctgtgaatttgtcatggaagtcacaaataaaacacgtgcagatgtaaagggcgggacactcactcaatatgaaggcaa

SEQ ID NO: 562514 - DNA, 120 bp, Artificial Sequence
  ENSG00000169764_11 (sequence is synthesized)
actgagactggtggaaattgctcaagtgccaaaagcacatgtagacgagttcaagtctgtatcaaagttcaaaatatttaatacaaacaacctatggatttctcttgcagcagttaaaag

SEQ ID NO: 562515 - DNA, 120 bp, Artificial Sequence
  ENSG00000169764_12 (sequence is synthesized)
actgcaggagcaaaatgccattgacatggaaatcattgtgaatgcaaagactttggatggaggcctgaatgtcattcaattagaaactgcagtaggggctgccatcaaaagttttgagaa

SEQ ID NO: 562516 - DNA, 120 bp, Artificial Sequence
  ENSG00000169764_13 (sequence is synthesized)
ttctctaggtattaatgtgccaaggagccgttttctgcctgtcaaaaccacatcagatctcttgctggtgatgtcaaacctctatagtcttaatgcaggatctctgacaatgagtgaaaa

SEQ ID NO: 562517 - DNA, 120 bp, Artificial Sequence
  ENSG00000169764_14 (sequence is synthesized)
gcgggaatttcctacagtgcccttggttaaattaggcagttcttttacgaaggttcaagattatctaagaagatttgaaagtataccagatatgcttgaattggatcacctcacagtttc

SEQ ID NO: 562518 - DNA, 120 bp, Artificial Sequence
  ENSG00000169764_15 (sequence is synthesized)
aggagatgtgacatttggaaaaaatgtttcattaaagggaacggttatcatcattgcaaatcatggtgacagaattgatatcccacctggagcagtattagagaacaagattgtgtctgg

SEQ ID NO: 562519 - DNA, 120 bp, Artificial Sequence
  ENSG00000169764_16 (sequence is synthesized)
aaaccttcgcatcttggaccactgaaatgaaaaatactgtggacacttaaataatgggctagtttcttacaatgaaatgttctctaggattctaaaataggcaggtactttactatgtta

SEQ ID NO: 562520 - DNA, 120 bp, Artificial Sequence
  ENSG00000169764_17 (sequence is synthesized)
ctgtaccctgcagtgttgatttttaaaatagagttttctgcagtatgcttttagtctaagaaaagcacagatggagcaatactttccttctttgaagagaatcccaaaagttagttcatc

SEQ ID NO: 562521 - DNA, 120 bp, Artificial Sequence
  ENSG00000169764_18 (sequence is synthesized)
ttaaagtgcaatattgtttaatcttaaaactgggcaactttggaagaacttttaacagaagcctcaatgatgatcactttgaattgcttgtgatttcaaaaataaagcagtgaagcaata

SEQ ID NO: 562522 - DNA, 120 bp, Artificial Sequence
  ENSG00000169764_19 (sequence is synthesized)
ctgtcggtccgtgcggcagggacatttccgcattgaaggggctgctccgaatggagggggaggggaggtgtttaggagaaagtaggggctgtgggtgtcgggagccggctgacgggtgga

SEQ ID NO: 562523 - DNA, 120 bp, Artificial Sequence
  ENSG00000169764_20 (sequence is synthesized)
caagggggggttagcagctgggctgcgaccgttagggaggggctcaaggtgtgcatgtgtgagggaagagagagagagagaagggcgcctcagaggtgactttcagcctgcgagccttct

SEQ ID NO: 562524 - DNA, 120 bp, Artificial Sequence
  ENSG00000169764_21 (sequence is synthesized)
caattgtcatagaagttttccagaactgggaggcatttacttttttacttgtaaatcaatagacaccgggttttgccatattgccgaggctggtctcaaactcctgagctcaaacgatca

SEQ ID NO: 562525 - DNA, 120 bp, Artificial Sequence
  ENSG00000169764_22 (sequence is synthesized)
caaagtgctgggattacaggcatgcaccaactacgcccagcctgtattagcttttaggatgtgaaaaagtcttgctccctccatgtcctaatggtcacaccaaaaaagacctggatggat

SEQ ID NO: 562526 - DNA, 120 bp, Artificial Sequence
  ENSG00000169764_23 (sequence is synthesized)
gaggaagagagacctgccctgtagcgtgactcctctagaaaaaaaaaaaaaaagccggagtattttactaagcccctaaaatgtcgagatttgtacaagatggtgcttctcagttccaag

SEQ ID NO: 562527 - DNA, 120 bp, Artificial Sequence
  ENSG00000169764_24 (sequence is synthesized)
catatttcttaaatgtgtaattataaagatatgatatacatgtgaattggagactaattacagtctctaccactgacctgttgtattcctctgtctttgataccttttaaagggaattga

SEQ ID NO: 562528 - DNA, 120 bp, Artificial Sequence
  ENSG00000169764_25 (sequence is synthesized)
ccatagaagataaatattttacttcacatttgaaacatgattgccatatggagagtagaaaataatctttaaattttggggcattttatcttctgtctcttccaagaccagtactgcttt

SEQ ID NO: 562529 - DNA, 120 bp, Artificial Sequence
  ENSG00000169764_26 (sequence is synthesized)
catcagtgggaaaaggttaattctggcttaacaaatacttattgaatgcctatcatgtactgggcagtgttctaggttctagggatttagcagtaaacaaaacagactaaatctttgtct

SEQ ID NO: 562530 - DNA, 120 bp, Artificial Sequence
  ENSG00000169764_27 (sequence is synthesized)
tcacggaattgacattctagtggggaaaggatgataagtaagtaaatgtatgatataccaagtggtggaaaatgctatggagaaacaaagcaagggtggagaatagggaatgcctgggga

SEQ ID NO: 562531 - DNA, 120 bp, Artificial Sequence
  ENSG00000169764_28 (sequence is synthesized)
ggtggcggggtggtgttgatggtgtaattttacattgagtggccacaggcagcctcattgagttgattgagtctgacaaatcggtatctagtgcaaaaagtgttctagacaggtggaata

SEQ ID NO: 562532 - DNA, 120 bp, Artificial Sequence
  ENSG00000169764_29 (sequence is synthesized)
gcaagtacagtacatcctcagtgtcatcagtatgttcttggaaactgccacagtaagcagaacaatgtgtaacacattttgccataggctaattgatataaacaagagttcagttcctac

SEQ ID NO: 562533 - DNA, 120 bp, Artificial Sequence
  ENSG00000169764_30 (sequence is synthesized)
gagctgtacatacattgattaataaaaacaagataattcttgactcacttattccagttcaggttcactggtgaccagagcttatcccggcagctcagggcacaaggcaggagccaaccc

SEQ ID NO: 562534 - DNA, 120 bp, Artificial Sequence
  ENSG00000169764_31 (sequence is synthesized)
tgcacaggccgccatcccatctcagggcacactcacacatatccacactcatactgggaccatgtagacacaccagttcacctaacatgcacatctttgggatgtgggaagaaaccagaa

SEQ ID NO: 562535 - DNA, 120 bp, Artificial Sequence
  ENSG00000169764_32 (sequence is synthesized)
tagttggagaaaacccacacagatgtggggagaacgtgcaaactccacacagacagtagccctggctggcaatcctttttttcccctcatcagcgttataacaaagtaacattgaacaaa

SEQ ID NO: 562536 - DNA, 120 bp, Artificial Sequence
  ENSG00000169764_33 (sequence is synthesized)
acagcactatctgtggacctgctgtaaaactccaacctagcctgataagtgaaatccaaaaaatttaatcaatgaaatgtgacactgtgagcctttgtggttggcctatggggtcctgct

SEQ ID NO: 562537 - DNA, 120 bp, Artificial Sequence
  ENSG00000169764_34 (sequence is synthesized)
ctgccatccaagtctgttttagtccacagcaggtgtggtttggtgccacctgctgtggatgtgtagaatgcagatggggaattagaaactatgaatgcatgtgtcctcagagtcaaatga

SEQ ID NO: 562538 - DNA, 120 bp, Artificial Sequence
  ENSG00000169764_35 (sequence is synthesized)
agaaaatatttcaagtgggattgatcatgtgtcaaatgctgctgctgattcaagtaagatgagaattagatttatcagtatggaggtttgggagcctcacaggcatggatttaaaagaga

SEQ ID NO: 562539 - DNA, 120 bp, Artificial Sequence
  ENSG00000169764_36 (sequence is synthesized)
atgaaaaacgaggaattggagatatgaatatcgaaaactcaagagttttgccttaaagagaaacagagaaatggggctataggtagaaaggaatataggatttgagtttttgtttttttt

SEQ ID NO: 562540 - DNA, 120 bp, Artificial Sequence
  ENSG00000169764_37 (sequence is synthesized)
taatgggaggatgtttatacattaatgggaatgcagtcaggagggaaaaaagactgaagagggagagttgctgaaacaacacttgataggccataagaagggatctgatgaacaaatgga

SEQ ID NO: 562541 - DNA, 120 bp, Artificial Sequence
  ENSG00000169764_38 (sequence is synthesized)
gaggctggctttaagtaggaatagaagcagtccaattccagtactaggaaggcagagtaatgggcaatgggggcaaagtagtggtggtggtggatggaaacaagtggaagttttctaatt

SEQ ID NO: 562542 - DNA, 120 bp, Artificial Sequence
  ENSG00000169764_39 (sequence is synthesized)
gctcccattttcccagcaaaataggaaacggggtcacataggacaatctctagtgcttgtaaatctaaggaaataaaaagacaaagatggtgataacataataatttgtgctgttgctct

SEQ ID NO: 562543 - DNA, 120 bp, Artificial Sequence
  ENSG00000169764_40 (sequence is synthesized)
tcctaaaatgtgctctaatttttcagaatccgacctatccactaaagtccagctccagtctagcctgcttcaaagcatgatctctttttttcagttaaattcagattgtgtgaactattc

SEQ ID NO: 562544 - DNA, 120 bp, Artificial Sequence
  ENSG00000169764_41 (sequence is synthesized)
atctggctcttggcatgttgattatctttaaaaaaaaaaagaaaaaaaacccttagatctgctcaactatcttgtaaattgcttggtgtaaaaacaatgtttgtagctcctggtctttcc

SEQ ID NO: 562545 - DNA, 120 bp, Artificial Sequence
  ENSG00000169764_42 (sequence is synthesized)
tgcacggcatttagcatataatgagtgcttaataagtaggtgcttcccacagaggacctgagctttgccaaaaaaggtttctacagttcagttaaactttcttgttaatatttttcctgt

SEQ ID NO: 562546 - DNA, 120 bp, Artificial Sequence
  ENSG00000169764_43 (sequence is synthesized)
gatccatctgtcacagaagtgcccggctatgccaaaagcattaaaagtctagtctgacacacgtaagcagtggaaagtcttggctgaaattgggaaccagaagatggcaggcagccctat

SEQ ID NO: 562547 - DNA, 120 bp, Artificial Sequence
  ENSG00000169764_44 (sequence is synthesized)
gcccttctccttttaaaatgaaaacgtcgatacagggaagtagaggcaccttggaattgccaatacctctcaaggggttcttgtttagtggagaatatgaaactggagtgaaacgagtcc

SEQ ID NO: 562548 - DNA, 120 bp, Artificial Sequence
  ENSG00000169764_45 (sequence is synthesized)
gcgtataatttatgctcctgtaccctgctgggtttagttttgcctccctgaaatcaggtacctgtgcgtgcacgcagacgggaagggctggggaagcgggaggactgagaaaagccggat

SEQ ID NO: 562549 - DNA, 120 bp, Artificial Sequence
  ENSG00000169764_46 (sequence is synthesized)
tcagcaaattgaagtgagtaacatttagcctttctcatgagatactaaaatagtttttagtttttaagttatcataaatgttataaaatgtagcagatgtgaatttgagctaaccaaaga

SEQ ID NO: 562550 - DNA, 120 bp, Artificial Sequence
  ENSG00000169764_47 (sequence is synthesized)
cttttcgttgaattgtcatctgagctgccttgagctgctgggttgacgttccagacgcgtataatttatgctcctgtaccctgctgggtttagttttgcctccctgaaatcagatcttag

SEQ ID NO: 562551 - DNA, 120 bp, Artificial Sequence
  ENSG00000169777_0 (sequence is synthesized)
gctgttctcccagctgtctgaaggtgtctgattccattatttgcctgtgatgactttgaaagctaggtaaacctgtaaaatgcaaaagccatcaataagaagcaaattgatgctagagta

SEQ ID NO: 562552 - DNA, 120 bp, Artificial Sequence
  ENSG00000169777_1 (sequence is synthesized)
tctcctccttatttgactgtctcagaactaaatagagaaagcagtgacataaacaaatgtacaccaccttcctgccccatgcctttattgttagtcttcttccccagaggagtcctgatc

SEQ ID NO: 562553 - DNA, 120 bp, Artificial Sequence
  ENSG00000169777_2 (sequence is synthesized)
taattgaagagcgtgaacaacccaacctgtccaaaactttataacttcattattttttaagtaaataattttttattcctaaaatgctagagtctcacctcattatctattttcttcttg

SEQ ID NO: 562554 - DNA, 120 bp, Artificial Sequence
  ENSG00000169777_3 (sequence is synthesized)
cagtgatacaatttcttcttgggattttcacaaatggcatcattgtggtggtgaatggcattgacttgatcaagcacagaaaaatggctccgctggatctccttctttcttgtctggcag

SEQ ID NO: 562555 - DNA, 120 bp, Artificial Sequence
  ENSG00000169777_4 (sequence is synthesized)
tttctagaatttttctgcagttgttcatcttctacgttaatgtgattgttatcttcttcatagaattcatcatgtgttctgcgaattgtgcaattctcttatttataaatgaattggaac

SEQ ID NO: 562556 - DNA, 120 bp, Artificial Sequence
  ENSG00000169777_5 (sequence is synthesized)
aggttgccagcgtccgtcacccactcttcatctggttgaagatgaggatatccaagctggtcccatggatgatcctggggtctctgctatatgtatctatgatttgtgttttccatagca

SEQ ID NO: 562557 - DNA, 120 bp, Artificial Sequence
  ENSG00000169777_6 (sequence is synthesized)
aatatgcagggtttatggtcccatacttcctaaggaaatttttctcccaaaatgccacaattcaaaaagaagatacactggctatacagattttctcttttgttgctgagttctcagtgc

SEQ ID NO: 562558 - DNA, 120 bp, Artificial Sequence
  ENSG00000169777_7 (sequence is synthesized)
cattgcttatcttcctttttgctgttttgctcttgattttctctctggggaggcacacccggcaaatgagaaacacagtggccggcagcagggttcctggcaggggtgcacccatcagcg

SEQ ID NO: 562559 - DNA, 120 bp, Artificial Sequence
  ENSG00000169777_8 (sequence is synthesized)
cgttgctgtctatcctgtccttcctgatcctctacttctcccactgcatgataaaagtttttctctcttctctaaagtttcacatcagaaggttcatctttctgttcttcatccttgtga

SEQ ID NO: 562560 - DNA, 120 bp, Artificial Sequence
  ENSG00000169777_9 (sequence is synthesized)
ttggtatatacccttctggacactctctcatcttaattttaggaaatcctaaattgaaacaaaatgcaaaaaagttcctcctccacagtaagtgctgtcagtgagagagaagttggatca

SEQ ID NO: 562561 - DNA, 120 bp, Artificial Sequence
  ENSG00000169777_10 (sequence is synthesized)
gttcaaagaacccatgattcaatgatttacccatgcctgccacacttccctcagccagacaaagcagcctgttcataaatatacaacatgtccccttcaggcctgtttatccagcctgag

SEQ ID NO: 562562 - DNA, 120 bp, Artificial Sequence
  ENSG00000169777_11 (sequence is synthesized)
ggtgtttgaccaaactactgggcaccataccccagccaagtcagcatataatgtgaaccatcacagtgggagacatgtcacaaagtggtaagacagcaagaattggtggtctgggctgga

SEQ ID NO: 562563 - DNA, 120 bp, Artificial Sequence
  ENSG00000169777_12 (sequence is synthesized)
aaacactgatgcctaaagggaccaggcagtagacctgactggggagctaagtgatctcgtgtgactctctatgcctcgttgccaccagcgtgggccatctccaggggctctcaaaccgat

SEQ ID NO: 562564 - DNA, 120 bp, Artificial Sequence
  ENSG00000169783_0 (sequence is synthesized)
cggacagacggacagccagccccgcgagggcgcgcggactgccgggcggaggtgtcggaggaggaggaaacggaggagggggctgggcaggggctggggcctggtcgggccggctggaga

SEQ ID NO: 562565 - DNA, 120 bp, Artificial Sequence
  ENSG00000169783_1 (sequence is synthesized)
gctggagagacatgcgattggtgaccgagccgagcggaccgaaggcgcgcccgagatgcaggtgagcaagaggatgctggcggggggcgtgaggagcatgcccagccccctcctggcctg

SEQ ID NO: 562566 - DNA, 120 bp, Artificial Sequence
  ENSG00000169783_2 (sequence is synthesized)
ctggcagcccatcctcctgctggtgctgggctcagtgctgtcaggctcggccacgggctgcccgccccgctgcgagtgctccgcccaggaccgcgctgtgctgtgccaccgcaagcgctt

SEQ ID NO: 562567 - DNA, 120 bp, Artificial Sequence
  ENSG00000169783_3 (sequence is synthesized)
tgtggcagtccccgagggcatccccaccgagacgcgcctgctggacctaggcaagaaccgcatcaaaacgctcaaccaggacgagttcgccagcttcccgcacctggaggagctggagct

SEQ ID NO: 562568 - DNA, 120 bp, Artificial Sequence
  ENSG00000169783_4 (sequence is synthesized)
caacgagaacatcgtgagcgccgtggagcccggcgccttcaacaacctcttcaacctccggacgctgggtctccgcagcaaccgcctgaagctcatcccgctaggcgtcttcactggcct

SEQ ID NO: 562569 - DNA, 120 bp, Artificial Sequence
  ENSG00000169783_5 (sequence is synthesized)
cagcaacctgaccaagctggacatcagcgagaacaagatcgttatcctactggactacatgtttcaggacctgtacaacctcaagtcactggaggttggcgacaatgacctcgtctacat

SEQ ID NO: 562570 - DNA, 120 bp, Artificial Sequence
  ENSG00000169783_6 (sequence is synthesized)
ctctcaccgcgccttcagcggcctcaacagcctggagcagctgacgctggagaaatgcaacctgacctccatccccaccgaggcgctgtcccacctgcacggcctcatcgtcctgaggct

SEQ ID NO: 562571 - DNA, 120 bp, Artificial Sequence
  ENSG00000169783_7 (sequence is synthesized)
ccggcacctcaacatcaatgccatccgggactactccttcaagaggctgtaccgactcaaggtcttggagatctcccactggccctacttggacaccatgacacccaactgcctctacgg

SEQ ID NO: 562572 - DNA, 120 bp, Artificial Sequence
  ENSG00000169783_8 (sequence is synthesized)
cctcaacctgacgtccctgtccatcacacactgcaatctgaccgctgtgccctacctggccgtccgccacctagtctatctccgcttcctcaacctctcctacaaccccatcagcaccat

SEQ ID NO: 562573 - DNA, 120 bp, Artificial Sequence
  ENSG00000169783_9 (sequence is synthesized)
tgagggctccatgttgcatgagctgctccggctgcaggagatccagctggtgggcgggcagctggccgtggtggagccctatgccttccgcggcctcaactacctgcgcgtgctcaatgt

SEQ ID NO: 562574 - DNA, 120 bp, Artificial Sequence
  ENSG00000169783_10 (sequence is synthesized)
ctctggcaaccagctgaccacactggaggaatcagtcttccactcggtgggcaacctggagacactcatcctggactccaacccgctggcctgcgactgtcggctcctgtgggtgttccg

SEQ ID NO: 562575 - DNA, 120 bp, Artificial Sequence
  ENSG00000169783_11 (sequence is synthesized)
gcgccgctggcggctcaacttcaaccggcagcagcccacgtgcgccacgcccgagtttgtccagggcaaggagttcaaggacttccctgatgtgctactgcccaactacttcacctgccg

SEQ ID NO: 562576 - DNA, 120 bp, Artificial Sequence
  ENSG00000169783_12 (sequence is synthesized)
acggtgcagtttgtgtgccgggccgatggcgacccgccgcccgccatcctctggctctcaccccgaaagcacctggtctcagccaagagcaatgggcggctcacagtcttccctgatggc

SEQ ID NO: 562577 - DNA, 120 bp, Artificial Sequence
  ENSG00000169783_13 (sequence is synthesized)
acgctggaggtgcgctacgcccaggtacaggacaacggcacgtacctgtgcatcgcggccaacgcgggcggcaacgactccatgcccgcccacctgcatgtgcgcagctactcgcccgac

SEQ ID NO: 562578 - DNA, 120 bp, Artificial Sequence
  ENSG00000169783_14 (sequence is synthesized)
tggccccatcagcccaacaagaccttcgctttcatctccaaccagccgggcgagggagaggccaacagcacccgcgccactgtgcctttccccttcgacatcaagaccctcatcatcgcc

SEQ ID NO: 562579 - DNA, 120 bp, Artificial Sequence
  ENSG00000169783_15 (sequence is synthesized)
accaccatgggcttcatctctttcctgggcgtcgtcctcttctgcctggtgctgctgtttctctggagccggggcaagggcaacacaaagcacaacatcgagatcgagtatgtgccccga

SEQ ID NO: 562580 - DNA, 120 bp, Artificial Sequence
  ENSG00000169783_16 (sequence is synthesized)
aagtcggacgcaggcatcagctccgccgacgcgccccgcaagttcaacatgaagatgatatgaggccggggcggggggcagggacccccgggcggccgggcaggggaaggggcctggccg

SEQ ID NO: 562581 - DNA, 120 bp, Artificial Sequence
  ENSG00000169783_17 (sequence is synthesized)
ccacctgctcactctccagtccttcccacctcctccctacccttctacacacgttctctttctccctcccgcctccgtcccctgctgccccccgccagccctcaccacctgccctccttc

SEQ ID NO: 562582 - DNA, 120 bp, Artificial Sequence
  ENSG00000169783_18 (sequence is synthesized)
taccaggacctcagaagcccagacctggggaccccacctacacaggggcattgacagactggagttgaaagccgacgaaccgacacgcggcagagtcaataattcaataaaaaagttacg

SEQ ID NO: 562583 - DNA, 120 bp, Artificial Sequence
  ENSG00000169783_19 (sequence is synthesized)
aactttctctgtaacttgggtttcaataattatggatttttatgaaaacttgaaataataaaaagagaaaaaaactatttcctatagctagtcggaatgcaaacttttgacgtcctgatt

SEQ ID NO: 562584 - DNA, 120 bp, Artificial Sequence
  ENSG00000169783_20 (sequence is synthesized)
gctccagggccctcttccaactcagtttcttgtttttctcttcctcctcctcctcttcttcctcctttctcttctcttccccagtggggagggatcactcaggaaaacaggaaaggaggt

SEQ ID NO: 562585 - DNA, 120 bp, Artificial Sequence
  ENSG00000169783_21 (sequence is synthesized)
tccagccccacccacctgcccaccccgccccaggcaccatcaggagcaggctagggggcaggcctgggcccagctccgggctggctttttgcagggcgcaggtggaggggacaggtctgc

SEQ ID NO: 562586 - DNA, 120 bp, Artificial Sequence
  ENSG00000169783_22 (sequence is synthesized)
cgatgggggtgggagcctgtctgctgggctgccaggcggcaccactgcaaggggtgggagcctggcttgggtgtggctgagactctggacagaggctggggtcctcctgggggacagcac

SEQ ID NO: 562587 - DNA, 120 bp, Artificial Sequence
  ENSG00000169783_23 (sequence is synthesized)
agtcagtggagagagccaggggctggaggtggggcccaccccagcctctggtcccagctctgctgctcacttgctgtgtggcctcaagcaggtcactggcctctctgggcctcagtctcc

SEQ ID NO: 562588 - DNA, 120 bp, Artificial Sequence
  ENSG00000169783_24 (sequence is synthesized)
acatctgtacaaatgggaacattaccccctgccctgcctacctcacagggctgttgtgaggaattgatgagatgatgtatgtgaaacactttgtaacctgtaaagcgctgtgcacacgtg

SEQ ID NO: 562589 - DNA, 120 bp, Artificial Sequence
  ENSG00000169783_25 (sequence is synthesized)
agaggataattccccattatacagagatatttagcctaatagaagccgacagatcattcagggcagtaatgtactccggcttcaagcgtgtagtttcctcagcctgaactcccagattaa

SEQ ID NO: 562590 - DNA, 120 bp, Artificial Sequence
  ENSG00000169783_26 (sequence is synthesized)
aggctccttgcccagcccgccctgtgccggtgcctgtgaccttgactgcaatgatgggggatcttatgaccatgacctggctaccttgagtctgtggggctacacagccttcagcctgca

SEQ ID NO: 562591 - DNA, 120 bp, Artificial Sequence
  ENSG00000169783_27 (sequence is synthesized)
tctccagggctctgactctatccagctcctggaccagctcccaagtctactcctgaccccagcctgggccaaggggacttctcaagctttgggacccagcaggacacagcagcagtcagg

SEQ ID NO: 562592 - DNA, 120 bp, Artificial Sequence
  ENSG00000169783_28 (sequence is synthesized)
tgcatgctgggaccgcgacggacaggctgccgcaccccaggcccccagaggccagtctgtttgcctcccaacgccatctgacccaggtgagcaagaggatgctggcggggggcgtgagga

SEQ ID NO: 562593 - DNA, 120 bp, Artificial Sequence
  ENSG00000169783_29 (sequence is synthesized)
acctcgttccctggtttccctgatgaggcagttggaaggaggaggcagaccagtcctgcctccggcacccacaggccctgaggctccagtgcccacaggcagagagggcgactgagtcca

SEQ ID NO: 562594 - DNA, 120 bp, Artificial Sequence
  ENSG00000169783_30 (sequence is synthesized)
gcccaggctgagccctgcccagctgtactccccagacacccacccaacccgaggtgtcccaccgaggaggccctgatcttgagcccggagccctgagccctgagacgatgcttgaggatc

SEQ ID NO: 562595 - DNA, 120 bp, Artificial Sequence
  ENSG00000169783_31 (sequence is synthesized)
gcacacgctgcgcgctctcacgcgcatacacacgccctccctgccgcgctcgccgccgcggccaccatcgcggagccgagccctgcggagcgggaaccgaggccggagcggggaccggag

SEQ ID NO: 562596 - DNA, 120 bp, Artificial Sequence
  ENSG00000169783_32 (sequence is synthesized)
actctgagatctaacccaaggaggagcgggtgcccgagaggggaagggagctcaagaaaaaaaaaaatagcttgcttgacttaattatgactgattgtgacagcttacatctttagtctg

SEQ ID NO: 562597 - DNA, 120 bp, Artificial Sequence
  ENSG00000169783_33 (sequence is synthesized)
caccgccccggactgttcccgcgcagcgaggtcccttccccggggcccccgggtggggccggtcgagccggcctccggcacccacaggccctgaggctccagtgcccacaggcagagagg

SEQ ID NO: 562598 - DNA, 120 bp, Artificial Sequence
  ENSG00000169783_34 (sequence is synthesized)
agaccagtcctggtgagtgtccggggtggcaaggattgcagtctcagcggtggcctcagctctcacaggcaaggagcctccggcacccacaggccctgaggctccagtgcccacaggcag

SEQ ID NO: 562599 - DNA, 120 bp, Artificial Sequence
  ENSG00000169783_35 (sequence is synthesized)
tccagacaggactgtccagagcaacggtgtgccagagagactgagaagtacccagaaatggtgcagctggaacagaaggtgagcaagaggatgctggcggggggcgtgaggagcatgccc

SEQ ID NO: 562600 - DNA, 80 bp, Artificial Sequence
  ENSG00000169783_36 (sequence is synthesized)
agctgtcagcggcagccgaggctagcgcgggacgtcgccaccctagcgccaggccggagctagcagccgcggagccgcgg

SEQ ID NO: 562601 - DNA, 120 bp, Artificial Sequence
  ENSG00000169783_37 (sequence is synthesized)
tcgccgcccactgcgcgctcgaaccctgggccccgcgagcggcgggcggcacccgctgtaatgcggagaatcctccggcacccacaggccctgaggctccagtgcccacaggcagagagg

SEQ ID NO: 562602 - DNA, 120 bp, Artificial Sequence
  ENSG00000169783_38 (sequence is synthesized)
attattagctccatctaagagacaggaagacggagattccaagaggctcagggacttgcccggggtcacctggctgaccagtggccttgtcaggcctccacccagggatcttatgaccat

SEQ ID NO: 562603 - DNA, 120 bp, Artificial Sequence
  ENSG00000169783_39 (sequence is synthesized)
ggctcagcctcaggtcctgcggggctgaccagtgtgcagagtgccctgaaagtgccaggcctggctgggtgcttcccatcttcacagcagctgagaggcagctaccaccacccttcttat

SEQ ID NO: 562604 - DNA, 120 bp, Artificial Sequence
  ENSG00000169783_40 (sequence is synthesized)
agttggaaggaggaggcagaccagtcctggtgagtgtccggggtggcaaggattgcagtctcagcggtggcctcagctctcacagcctccggcacccacaggccctgaggctccagtgcc

SEQ ID NO: 562605 - DNA, 120 bp, Artificial Sequence
  ENSG00000169789_0 (sequence is synthesized)
aagaagaggagcacaccacaccagaaacagacatcttgcagtgtttcactgtctcaaccttatctgcacagtccgaggtcagtctgagagagcttctgagagacccaggatgaagggatg

SEQ ID NO: 562606 - DNA, 120 bp, Artificial Sequence
  ENSG00000169789_1 (sequence is synthesized)
cagtgaggtcaagagcccaaccttctttcactgacacccacctctaaggactcagagagacatgaataaaatgggcctcaacaatcccaagagaccactcaaggacaatgggagccactg

SEQ ID NO: 562607 - DNA, 120 bp, Artificial Sequence
  ENSG00000169789_2 (sequence is synthesized)
ggcttggctttctactttcctggagacaagacaatttgaatggcactgactgccagggatgcaatattttatacttctctgagactacggggagcatgtgttctgaactttccttgaaca

SEQ ID NO: 562608 - DNA, 120 bp, Artificial Sequence
  ENSG00000169789_3 (sequence is synthesized)
gaggtcttgaggccagaaggaagaaggatcttaaagactcatttctctggagatatgggaaggttggctgtatctcacttccacttcgtgagatgaccgcctggattaacccaccccaaa

SEQ ID NO: 562609 - DNA, 120 bp, Artificial Sequence
  ENSG00000169789_4 (sequence is synthesized)
tttcagagattttccaaggctaccaccagagggtgcacggagctgatgcactgagcctgcaaaccaactctctgagaagcaggttatcttcacagtgcctcggacagagcttccttctca

SEQ ID NO: 562610 - DNA, 120 bp, Artificial Sequence
  ENSG00000169789_5 (sequence is synthesized)
gacatctgtggccacgttcatgaagaagactaagcctacttcatctcaggacccgcccaagagtggccgcggctttgggacacctggggtcgggtccaccatgaggataaaacctccttc

SEQ ID NO: 562611 - DNA, 120 bp, Artificial Sequence
  ENSG00000169789_6 (sequence is synthesized)
tcttctggacatgtccaggagtggccgttgctacaagtcacctggtgctacgaccagggtgagaataaagacgtctcctcaggaccctcccaggagagtacatggcattgagacatctgg

SEQ ID NO: 562612 - DNA, 120 bp, Artificial Sequence
  ENSG00000169789_7 (sequence is synthesized)
cggccaagtgaggaaaagacaccctgtctgcagcacccagaactgaggaggggcactgccctgggccttacttcccagccctggcctccaattctgaccttacaaaagtgtcccttgagt

SEQ ID NO: 562613 - DNA, 120 bp, Artificial Sequence
  ENSG00000169789_8 (sequence is synthesized)
gaggcagtgaccacgcattgtcacagctaccaaagtgtggtttgcagatgatctgggcttgtttctggcagagattctggtacagagaaaggagaggcgctgagtggaaccacgatgggc

SEQ ID NO: 562614 - DNA, 120 bp, Artificial Sequence
  ENSG00000169789_9 (sequence is synthesized)
tgaggccaggggagacatcacaacctccaacaacactttttttcatgctttaataactcatttttcttagagaactaaagtagttgaaacaatatagaaacattttttaagtaggcatat

SEQ ID NO: 562615 - DNA, 120 bp, Artificial Sequence
  ENSG00000169789_10 (sequence is synthesized)
gaggtcttgaggccagaaggaagaaggatcttaaagactcatttctctggagagacggggtttcaccgtgtttaccatgctgatctggaatccctgtcctcaggtgatctggccgcttcg

SEQ ID NO: 562616 - DNA, 120 bp, Artificial Sequence
  ENSG00000169800_0 (sequence is synthesized)
cagggtagctccagctgtccctcccgcagttggccctgtggtgttccgaagccggttacgtacggcctgagggccaggcgaacctcaggctctttgtcctactaaaaagcgcagcacaat

SEQ ID NO: 562617 - DNA, 120 bp, Artificial Sequence
  ENSG00000169800_1 (sequence is synthesized)
gaagcagatcatcctggcaagcttttcattggtggcctcaatagagaaaccaatgagaagatgcttaaagcagtatttgggaaacatggtcccatatcagaagttcttttgataaaggat

SEQ ID NO: 562618 - DNA, 120 bp, Artificial Sequence
  ENSG00000169800_2 (sequence is synthesized)
taaaggatcgaaccagcaaatccagaggctttgcatttattacttttgagaaccctgcagatgctaagaatgctgcgaaagatatgaatggaacgtctttgcatggaaaagcaataaaag

SEQ ID NO: 562619 - DNA, 73 bp, Artificial Sequence
  ENSG00000169800_3 (sequence is synthesized)
agaccaccagcttcttagtggaggaacaagagggtggcttccctcacatgaagggcacctggatgatggtgga

SEQ ID NO: 562620 - DNA, 120 bp, Artificial Sequence
  ENSG00000169800_4 (sequence is synthesized)
tacactcctgatctcaagatgagttattctaggggactcattccagttaaaagaggtccatcttcaagaagtggaggtcctcctccgaaaaaatctgctccttctgctgtggcaagaagc

SEQ ID NO: 562621 - DNA, 80 bp, Artificial Sequence
  ENSG00000169800_5 (sequence is synthesized)
ttccagttaaaagaggtccatcttcaagaagtggaggtcctcctccgaaaaaatctgctccttctccatgtcacaaagaa

SEQ ID NO: 562622 - DNA, 120 bp, Artificial Sequence
  ENSG00000169800_6 (sequence is synthesized)
ttcctggagaaatgatcgcatgtcaacaagacatgatggttatgcaactaacgatggaaatcatccaagttgccaagaaacgagggattatgctccaccatctagaggctatgcataccg

SEQ ID NO: 562623 - DNA, 120 bp, Artificial Sequence
  ENSG00000169800_7 (sequence is synthesized)
accatctagaggccatgcataccgtgattatggtcattctcgtcgggatgaaagttattctagaggatacagaaatcatcgaagttcccgagaaactagggagtatgctccaccatctag

SEQ ID NO: 562624 - DNA, 120 bp, Artificial Sequence
  ENSG00000169800_8 (sequence is synthesized)
aggccatggataccgtgattatggtcattctcgtcgacatgaaagttattctagaggatatagaaatcatccaagttcccgagaaaccagggattatgctccaccacatagagactatgc

SEQ ID NO: 562625 - DNA, 80 bp, Artificial Sequence
  ENSG00000169800_9 (sequence is synthesized)
gagaaaccagggattatgctccaccacatagagactatgcataccgtgattatggtcattctagttgggatgaacattcc

SEQ ID NO: 562626 - DNA, 120 bp, Artificial Sequence
  ENSG00000169800_10 (sequence is synthesized)
tagagatgcacttcagaggtacgggacctctcatggtgcaccacctgcaagagggcctcggatgtcttatggtggaagcacctgccacgcatatagtaatacacgagatagatatggcag

SEQ ID NO: 562627 - DNA, 120 bp, Artificial Sequence
  ENSG00000169800_11 (sequence is synthesized)
aagttgggagagttactcgagctgtggtgattttcattattgtgatcgtgagcatgtttgcagaaaagaccaaaggaatccgccttctctgggtagggtgctccctgatcctcgtgaagc

SEQ ID NO: 562628 - DNA, 120 bp, Artificial Sequence
  ENSG00000169800_12 (sequence is synthesized)
atatggtagctcaagttatgtggcatctatagtagatggtggggagagtcgatctgaaaaaggagactcgagcagatattaaagcaagcattgaaaataatagttattgcataccaatcc

SEQ ID NO: 562629 - DNA, 120 bp, Artificial Sequence
  ENSG00000169800_13 (sequence is synthesized)
ataatagttattgcataccaatccttgtttgcaaatcaaaaattgaaatgttatttctgcattgttacctgcatattactgaaagaaacatgttggttttgtggagagaggtagatacta

SEQ ID NO: 562630 - DNA, 120 bp, Artificial Sequence
  ENSG00000169800_14 (sequence is synthesized)
tattcaaaggaaaaggaattgttttcaaagtaatttcatacttgttgatgctatttgaaaagtgtttagatgtaatatctaccttaaaattttcacaataaaattttacatgtactgcaa

SEQ ID NO: 562631 - DNA, 120 bp, Artificial Sequence; identical to SEQ ID NO: 562605
  ENSG00000169807_0 (sequence is synthesized)

SEQ ID NO: 562632 - DNA, 120 bp, Artificial Sequence; identical to SEQ ID NO: 562606
  ENSG00000169807_1 (sequence is synthesized)

SEQ ID NO: 562633 - DNA, 120 bp, Artificial Sequence; identical to SEQ ID NO: 562607
  ENSG00000169807_2 (sequence is synthesized)

SEQ ID NO: 562634 - DNA, 120 bp, Artificial Sequence; identical to SEQ ID NO: 562608
  ENSG00000169807_3 (sequence is synthesized)

SEQ ID NO: 562635 - DNA, 120 bp, Artificial Sequence; identical to SEQ ID NO: 562609
  ENSG00000169807_4 (sequence is synthesized)

SEQ ID NO: 562636 - DNA, 120 bp, Artificial Sequence; identical to SEQ ID NO: 562610
  ENSG00000169807_5 (sequence is synthesized)

SEQ ID NO: 562637 - DNA, 120 bp, Artificial Sequence; identical to SEQ ID NO: 562611
  ENSG00000169807_6 (sequence is synthesized)

SEQ ID NO: 562638 - DNA, 120 bp, Artificial Sequence; identical to SEQ ID NO: 562612
  ENSG00000169807_7 (sequence is synthesized)

SEQ ID NO: 562639 - DNA, 120 bp, Artificial Sequence; identical to SEQ ID NO: 562613
  ENSG00000169807_8 (sequence is synthesized)

SEQ ID NO: 562640 - DNA, 120 bp, Artificial Sequence
  ENSG00000169807_9 (sequence is synthesized)
tgaggccaggggagacatcgcaacctccaacaacactttttttcatgctttaataactcatttttcttagagaactaaagtagttgaaacaatatagaaacattttttaagtaggcatat

SEQ ID NO: 562641 - DNA, 120 bp, Artificial Sequence; identical to SEQ ID NO: 562615
  ENSG00000169807_10 (sequence is synthesized)

SEQ ID NO: 562642 - DNA, 120 bp, Artificial Sequence
  ENSG00000169813_0 (sequence is synthesized)
gtcgtggaagcaggactgcgccgcgtcttcctcaaggtggggttcggggggccaccgaatcgctgtcacgccggcaggttgagaacaaaaacatgcacctggagtttccccggagccctc

SEQ ID NO: 562643 - DNA, 120 bp, Artificial Sequence
  ENSG00000169813_1 (sequence is synthesized)
tgcgtggttgagcttcggtggaatttcggggctcttggctgccagccgcgcttgcctggtagcaacagaaaccagtcctgctcgcctccgtggacatttcattaccatccagaagtgtct

SEQ ID NO: 562644 - DNA, 120 bp, Artificial Sequence
  ENSG00000169813_2 (sequence is synthesized)
cccactgaaggcatccgtggttgtttttaagccacaaaaaagccacacccaagatcacctgacacccaccctgacaagtgtccatgatgctgggccctgagggaggtgaaggctttgtgg

SEQ ID NO: 562645 - DNA, 120 bp, Artificial Sequence
  ENSG00000169813_3 (sequence is synthesized)
tcaagctccgtggcctgccctggtcctgctctgttgaggacgtgcagaacttcctctctgactgcacgattcatgatggggccgcaggtgtccatttcatctacactagagagggcaggc

SEQ ID NO: 562646 - DNA, 120 bp, Artificial Sequence
  ENSG00000169813_4 (sequence is synthesized)
agagtggtgaggcttttgttgaacttggatcagaagatgatgtaaaaatggccctgaaaaaagacagggaaagcatgggacaccggtacattgaggtgttcaagtcccacagaaccgaga

SEQ ID NO: 562647 - DNA, 120 bp, Artificial Sequence
  ENSG00000169813_5 (sequence is synthesized)
tggattgggtgttgaagcacagtggtcccaacagtgccgacagcgccaacgatggcttcgtgcggcttcgaggactcccatttggatgcacaaaggaagaaattgttcagttcttctcag

SEQ ID NO: 562648 - DNA, 120 bp, Artificial Sequence
  ENSG00000169813_6 (sequence is synthesized)
ggttggaaattgtgccaaacgggatcacattgcctgtggaccccgaaggcaagattacaggggaagcgttcgtgcagtttgcctcgcaggagttagctgagaaggctctagggaaacaca

SEQ ID NO: 562649 - DNA, 120 bp, Artificial Sequence
  ENSG00000169813_7 (sequence is synthesized)
aggagaggatagggcacaggtacattgaggtgtttaagagcagccaggaggaagttaggtcatactcagatccccctctgaagttcatgtccgtgcagcggccagggccctatgaccggc

SEQ ID NO: 562650 - DNA, 120 bp, Artificial Sequence
  ENSG00000169813_8 (sequence is synthesized)
ccgggactgccaggaggtacattggcatcgtgaagcaggcaggcctggaaaggatgaggcctggtgcctacagcacaggctacgggggctacgaggagtacagtggcctcagtgatggct

SEQ ID NO: 562651 - DNA, 120 bp, Artificial Sequence
  ENSG00000169813_9 (sequence is synthesized)
agagacctcagctactgtctctccggaatgtatgaccacagatacggcgacagtgagttcacagtgcagagcaccacaggccactgtgtccacatgaggggcctgccgtacaaagcgacc

SEQ ID NO: 562652 - DNA, 120 bp, Artificial Sequence
  ENSG00000169813_10 (sequence is synthesized)
gagaacgacatttacaacttcttctctcctctcaaccctgtgagagtccatattgagattggcccagatggaagagtgacgggtgaagcagatgttgagtttgctactcatgaagaagct

SEQ ID NO: 562653 - DNA, 120 bp, Artificial Sequence
  ENSG00000169813_11 (sequence is synthesized)
gtggcagctatgtccaaagacagggccaatatgcagcacagatatatagaactcttcttgaattcaacaacaggggccagcaatggggcgtatagcagccaggtgatgcaaggcatgggg

SEQ ID NO: 562654 - DNA, 120 bp, Artificial Sequence
  ENSG00000169813_12 (sequence is synthesized)
gtgtctgctgcccaggccacttacagtggcctggagagccagtcagtgagtggctgttacggggccggctacagtgggcagaacagcatgggtggctatgactagttttgttaggaacat

SEQ ID NO: 562655 - DNA, 120 bp, Artificial Sequence
  ENSG00000169813_13 (sequence is synthesized)
ttgagttacttcaatcattttcacaggcagccaacaagcaattaagagcagttataatagaggaagctgggggacccattttgcaccatgagtttgtgaaaaatctggattaaaaaatta

SEQ ID NO: 562656 - DNA, 120 bp, Artificial Sequence
  ENSG00000169813_14 (sequence is synthesized)
cctcttcagtgttttctcatgcaaaattttcttctagcatgtgataatgagtaaactaaaactattttcagcttttctcaattaacattttggtagtatacttcagagtgatgttatcta

SEQ ID NO: 562657 - DNA, 120 bp, Artificial Sequence
  ENSG00000169813_15 (sequence is synthesized)
agtttaagtagtttaagtatgttaaatgtggatcttttacaccacatcacagtgaacacactggggagacgtgcttttttggaaaactcaaaggtgctagctccctgattcaaagaaata

SEQ ID NO: 562658 - DNA, 120 bp, Artificial Sequence
  ENSG00000169813_16 (sequence is synthesized)
tttctcatgtttgttcattctagtttatattttcatttaaaatcctttaggttaagtttaagctttttaaaagttagttttgagaattgagacacaatactaatactgtaggaattggtg

SEQ ID NO: 562659 - DNA, 120 bp, Artificial Sequence
  ENSG00000169813_17 (sequence is synthesized)
aggccttgacttaaaactttctttgtactgtgatttccttttgggtgtattttgctaagtgaaacttgttaaattttttgttaactaaatttttttcttaaaataaagactttttcacaa

SEQ ID NO: 562660 - DNA, 120 bp, Artificial Sequence
  ENSG00000169813_18 (sequence is synthesized)
gctcgcaggcgggggtttccatggtgatggtcaacaagcctcaactgcctctgctacaactgccaagttccccgcgtcccaccctcctctaggtgctccaagggaccaccggggtgcctg

SEQ ID NO: 562661 - DNA, 120 bp, Artificial Sequence
  ENSG00000169813_19 (sequence is synthesized)
gaagataattcattttaatcgtaatgtattttagtgtgaatttaaaaatttcatacatcaaatctatgatctcccttatattcttatgatgaggctaaataaaagtctaataaaaatgtt

SEQ ID NO: 562662 - DNA, 120 bp, Artificial Sequence
  ENSG00000169813_20 (sequence is synthesized)
aaatatgtgaatggtggaaatggtgactagcagcacacattctgggaagcatcaaatagacacacggccccagccacctgcaacttatgtgcactgttgtaaaccattcagaattttcct

SEQ ID NO: 562663 - DNA, 120 bp, Artificial Sequence
  ENSG00000169813_21 (sequence is synthesized)
gctaggcccttgatgctggagtcacatctgttgatagctggagaactttagtttcaagtactacattgtgaaagcaattattttgtttctagtttttataaaatgctgatttaaactttt

SEQ ID NO: 562664 - DNA, 120 bp, Artificial Sequence
  ENSG00000169813_22 (sequence is synthesized)
cggttcccgtagccttagctctcggccccgggccctttttcctcctcggctgcgccgcgtgtcctcggagcgcggtccctgtattggtctcctgctcctagaggttgagaacaaaaacat

SEQ ID NO: 562665 - DNA, 120 bp, Artificial Sequence
  ENSG00000169813_23 (sequence is synthesized)
gcccggaagctcccgcccgagcccgcgcaggccctggggccgaccttcctgccgggccgggcggtccgaggctgctggagtgccgtgagcaggccgcgggaacgtcgccgtcaccttgtc

SEQ ID NO: 562666 - DNA, 120 bp, Artificial Sequence
  ENSG00000169813_24 (sequence is synthesized)
aacgtcgccgtcaccttgtctcggggcctcggcgctgcttcccgccaaaacacgtttaccgcgcgcccgggcctcccaccttgcggaagggaccccaccaccacttggatttctgttgca

SEQ ID NO: 562667 - DNA, 120 bp, Artificial Sequence
  ENSG00000169813_25 (sequence is synthesized)
acgcgtttcccattggtgacatcttggcgggcccggcaatggcacttcctcctctgcaccccgtgacccacgtccggctgccggtcttggatcacgaggcctccgcttcccggactccgg

SEQ ID NO: 562668 - DNA, 120 bp, Artificial Sequence
  ENSG00000169814_0 (sequence is synthesized)
aggagattgctgcctatgcaaagcaggtaagaagccgaactctgaggcctctcgccattgtctccgagtcggccagctggagcgttttcggggctgtaaagggagaatggcgcatgcgca

SEQ ID NO: 562669 - DNA, 120 bp, Artificial Sequence
  ENSG00000169814_1 (sequence is synthesized)
tattcagggcggaaggcgcgctaagagcagatttgtggtctgcattatgtctggagccagaagtaagcttgctcttttcctctgcggctgttacgtggttgccctgggagcccacaccgg

SEQ ID NO: 562670 - DNA, 120 bp, Artificial Sequence
  ENSG00000169814_2 (sequence is synthesized)
ggaggagagcgtggctgaccatcacgaggctgaatattatgtggctgccgtgtatgagcatccatccatcctgagtctgaaccctctggctctcatcagccgccaagaggccttggagct

SEQ ID NO: 562671 - DNA, 120 bp, Artificial Sequence
  ENSG00000169814_3 (sequence is synthesized)
catgaaccagaaccttgacatctatgaacagcaagtgatgactgcagcccaaaaggatgtacagattatagtgtttccagaagatggcattcatggattcaactttacaagaacatccat

SEQ ID NO: 562672 - DNA, 120 bp, Artificial Sequence
  ENSG00000169814_4 (sequence is synthesized)
ttatccatttttggacttcatgccgtctccccaggtggtcaggtggaacccatgcctggagcctcaccgcttcaatgacacagaggtgctccagcgcctgagttgtatggccatcagggg

SEQ ID NO: 562673 - DNA, 120 bp, Artificial Sequence
  ENSG00000169814_5 (sequence is synthesized)
agatatgttcttggtggccaatcttgggacaaaggagccttgtcatagcagtgacccaaggtgcccaaaagatgggagataccagttcaacacaaatgtcgtgttcagcaataatggaac

SEQ ID NO: 562674 - DNA, 120 bp, Artificial Sequence
  ENSG00000169814_6 (sequence is synthesized)
ccttgttgaccgctaccgtaaacacaacctctactttgaggcagcattcgatgttcctcttaaagtggatctcatcacctttgataccccctttgctggcaggtttggcatcttcacatg

SEQ ID NO: 562675 - DNA, 120 bp, Artificial Sequence
  ENSG00000169814_7 (sequence is synthesized)
ctttgatatattgttctttgaccctgccatcagagtcctcagagactacaaggtgaagcatgttgtgtacccaactgcctggatgaaccagctcccactcttggcagcaattgagattca

SEQ ID NO: 562676 - DNA, 120 bp, Artificial Sequence
  ENSG00000169814_8 (sequence is synthesized)
gaaagcttttgctgttgcctttggcatcaacgttctggcagctaatgtccaccacccagttctggggatgacaggaagtggcatacacacccctctggagtccttttggtaccatgacat

SEQ ID NO: 562677 - DNA, 120 bp, Artificial Sequence
  ENSG00000169814_9 (sequence is synthesized)
ggaaaatcccaaaagtcaccttataattgcccaggtggccaaaaatccagtgggtctcattggtgcagagaatgcaacaggtgaaacggacccatcccatagtaagtttttaaaaatttt

SEQ ID NO: 562678 - DNA, 120 bp, Artificial Sequence
  ENSG00000169814_10 (sequence is synthesized)
gtcaggcgatccgtactgtgagaaggatgctcaggaagtccactgtgatgaggccaccaagtggaacgtgaatgctcctcccacatttcactctgagatgatgtatgacaatttcaccct

SEQ ID NO: 562679 - DNA, 120 bp, Artificial Sequence
  ENSG00000169814_11 (sequence is synthesized)
ggtccctgtctggggaaaggaaggctatctccacgtctgttccaatggcctctgctgttatttactttacgagaggcccaccttatccaaagagctgtatgccctgggggtctttgatgg

SEQ ID NO: 562680 - DNA, 120 bp, Artificial Sequence
  ENSG00000169814_12 (sequence is synthesized)
gcttcacacagtacatggcacttactacatccaagtgtgtgccctggtcaggtgtgggggtcttggcttcgacacctgtggacaggaaatcacagaggccacggggatatttgagtttca

SEQ ID NO: 562681 - DNA, 120 bp, Artificial Sequence
  ENSG00000169814_13 (sequence is synthesized)
cctgtggggcaacttcagtacttcctatatctttcctttgtttctgacctcagggatgaccctagaagtccctgaccagcttggctgggagaatgaccactatttcctgaggaaaagtag

SEQ ID NO: 562682 - DNA, 120 bp, Artificial Sequence
  ENSG00000169814_14 (sequence is synthesized)
gctgtcctctgggctggtgacggcggctctctatgggcgcttgtatgagagggactaggaaaagtgtgtggtctgtggggcggactctggccatcatgttgacagccttgcacttccaca

SEQ ID NO: 562683 - DNA, 120 bp, Artificial Sequence
  ENSG00000169814_15 (sequence is synthesized)
ggctacaagccctgggaccatctttctgccttaagggcaggagcccacttctgtggcaccagattccaccctgggaactgtggaaaaagtaggagaggcagattccctcagtgtcttcct

SEQ ID NO: 562684 - DNA, 120 bp, Artificial Sequence
  ENSG00000169814_16 (sequence is synthesized)
tctttttcaagccacatcttcctctaacaaatctctcagtatgcgattggtctcaagctaaaacaaaaataaatgtcagtttatattttacacatccacaaagcagtggcttggggtttt

SEQ ID NO: 562685 - DNA, 120 bp, Artificial Sequence
  ENSG00000169814_17 (sequence is synthesized)
tttttttttttttatcttgttgatcaagtgacacccaggacatgtaaatatttcataagccttaaacatttcctgaggtaagaaacaagctctcaaagcaaaagctcaattagaaatggc

SEQ ID NO: 562686 - DNA, 120 bp, Artificial Sequence
  ENSG00000169814_18 (sequence is synthesized)
ccttgtggggaaccttcccattctggtcgaccagaactctagccagatgaaatggcaatgctagcgccaccagcaacgtcagaaacgtagaccttaaagcggcttttaaaaatagaaaag

SEQ ID NO: 562687 - DNA, 120 bp, Artificial Sequence
  ENSG00000169814_19 (sequence is synthesized)
aagcgttcctcacatctgccagtaatggaattttctgtcagtaaatggaatgtgtaggcaggacctggaataactggagagagtgcaacgcttcggggtgaagggcgggtggggactgga

SEQ ID NO: 562688 - DNA, 120 bp, Artificial Sequence
  ENSG00000169814_20 (sequence is synthesized)
aatgttgagacgggggcagccatgggaaggtatgagtaatagaattctttctgtacgacacagctcatccagggattccagggaccttaataaatcacggtagctttgggcaagagttgg

SEQ ID NO: 562689 - DNA, 120 bp, Artificial Sequence
  ENSG00000169814_21 (sequence is synthesized)
gcacgttgcccgactgtgcaggatggattgatgctggtataatttgatctggagccctatagaggatctcgttgctttgcagcgatgcctggcaccccatagagataagttgcagggact

SEQ ID NO: 562690 - DNA, 120 bp, Artificial Sequence
  ENSG00000169814_22 (sequence is synthesized)
gccgtgaagggcatgaagggtggcccactttagtcatgcatttattcaatcacccaacaggcacagagcaggagcttcccatgttaggaattccagatgcaaaattatcagactcaatat

SEQ ID NO: 562691 - DNA, 120 bp, Artificial Sequence
  ENSG00000169814_23 (sequence is synthesized)
ggtgaagacatttttaggccactgatttctgtgtaatttgtgtccaatatttcaaagccatttaaaaaaggattttgactgcatgcctagtagctgtttcagatcattttttaagtacag

SEQ ID NO: 562692 - DNA, 120 bp, Artificial Sequence
  ENSG00000169814_24 (sequence is synthesized)
aatggataattagtcttcagtgatttgcctcttaaatgtggccatttagtttgaactcctttttagttattttaaacagtatatgcttaaacatcacacgattttataaagcaagaaaaa

SEQ ID NO: 562693 - DNA, 120 bp, Artificial Sequence
  ENSG00000169814_25 (sequence is synthesized)
tgaaatgatctccctattcccccacggtgtaggcctccagatccttttctggcttttaggcaggacaattaacaatgtggattctgcagtcagactgatggggtttccatgcatggcctc

SEQ ID NO: 562694 - DNA, 120 bp, Artificial Sequence
  ENSG00000169814_26 (sequence is synthesized)
accattaactcctcactggggagaccttgggcctcggttttttattcatagaatgcatgttgaataaaccatgtgggaaaaagcagagccagcaccagcccctgctgactcactgatccc

SEQ ID NO: 562695 - DNA, 120 bp, Artificial Sequence
  ENSG00000169814_27 (sequence is synthesized)
tcggaaaggtctgggatgagtcaagtcttcagggaataagcagcaaggacttggaattcctgagcaagccttgggttccccacgccctaggaagtccctctggaaggggagcaggacctc

SEQ ID NO: 562696 - DNA, 120 bp, Artificial Sequence
  ENSG00000169814_28 (sequence is synthesized)
tcccaccagatgacggagttcgctttctcgcccagcgcagctcccaccaggcgtgagctggcagtccagaagcggccccagatgtggctacccaccgcccagtctgcttccctgcctcaa

SEQ ID NO: 562697 - DNA, 120 bp, Artificial Sequence
  ENSG00000169814_29 (sequence is synthesized)
accccagggagacagaaattacctaaaaatgcatatcattgccttatgccaagatgattcaaataagcctgagaaagagaggccagcgctaaatacagacttggcagaactacttcaccc

SEQ ID NO: 562698 - DNA, 120 bp, Artificial Sequence
  ENSG00000169814_30 (sequence is synthesized)
agtaaacatctaatcagcacctgcaggatcctcattctgcccttctgggcagagcaccacgaactttccctgagttattttctaccaacaatttagaatgaattgctcgtgaagtagaaa

SEQ ID NO: 562699 - DNA, 120 bp, Artificial Sequence
  ENSG00000169814_31 (sequence is synthesized)
tgaggggaaaagcaactaatggtggtagaacaaagtaatttttacaattaaaagaagtagctgccagatgacagaacaaagtagaggacgggaaaataaatcattttcagggaaaaaata

SEQ ID NO: 562700 - DNA, 120 bp, Artificial Sequence
  ENSG00000169814_32 (sequence is synthesized)
gccccgcaccccagtcgtcccgtgcataacctcacgggccagcacctggtagctgctggaaggcttctgggggatgcctgggcccctccagccctacctctagtcctgccactttacaac

SEQ ID NO: 562701 - DNA, 120 bp, Artificial Sequence
  ENSG00000169814_33 (sequence is synthesized)
agttggacttggggagggctgcgcaaaggctgccgggagctgggaagcccggcgcgcgtcgtttgctggggctgtttgtgcgttgctgctgtgctaccgcgttgcgttttctaggcattt

SEQ ID NO: 562702 - DNA, 120 bp, Artificial Sequence
  ENSG00000169814_34 (sequence is synthesized)
acttacacgctttgtggtttacgctctcataaccttgtggttttatagtccttaaattattgtagcgcacgttacttaaatccagaagcagatgtgtaccccagcaagagataaaatgac

SEQ ID NO: 562703 - DNA, 120 bp, Artificial Sequence
  ENSG00000169814_35 (sequence is synthesized)
gctcagagtcagtagatccagaccgtgcctgagatcctgaatcctgtttcctacccactattcagccattgggtcacaagcgatgaaaagagcaccttgaagatttgtggtctgcattat

SEQ ID NO: 562704 - DNA, 120 bp, Artificial Sequence
  ENSG00000169814_36 (sequence is synthesized)
agcttccgtaggagcctttcattccaggaaggtccatcgtacttgcgttttcagggcctgagcgatgactttagcaccagacacctgctcctcgctgcgctctgcgaagttactgtccgg

SEQ ID NO: 562705 - DNA, 120 bp, Artificial Sequence
  ENSG00000169814_37 (sequence is synthesized)
catcttccaccgaaaagctctaagcactcacgcagccggcaaacaagcggaatcatccagcaaggcaaacgcgaaatcggcagcacgccacctctggtactgcacctctgacggacagga

SEQ ID NO: 562706 - DNA, 120 bp, Artificial Sequence
  ENSG00000169814_38 (sequence is synthesized)
tgtcacagggggaatgggcagcgtcactttttacatccagtcatattgtatgaaattgcaacaaattcaaaaagatgccatcgtgggagtgtgaagacactattgtaatagcatggctag

SEQ ID NO: 562707 - DNA, 120 bp, Artificial Sequence
  ENSG00000169814_39 (sequence is synthesized)
ggaagaggcggtctaaattcgtccacttcccgggagaggtgagaatgtaaacacgcgcgttctccaatcagaactgcgctctcttctcggctcctccattcgcgcgccagaatgccagag

SEQ ID NO: 562708 - DNA, 120 bp, Artificial Sequence
  ENSG00000169814_40 (sequence is synthesized)
acatgctcacaatccatctctacaacttagactgtgctggtgtactcttggttcaacgtactcgtcctctgaaatcactgaaaatttttaagaaattatcattgagaataacgtttttgc

SEQ ID NO: 562709 - DNA, 120 bp, Artificial Sequence
  ENSG00000169814_41 (sequence is synthesized)
aaaatgtccttttgagaaatcatgaattaaatggcttatcacagatctaaattatcagaagcattagataagaagcatgttccagaggccatgagttttagctgaagtttgttgctcgta

SEQ ID NO: 562710 - DNA, 120 bp, Artificial Sequence
  ENSG00000169814_42 (sequence is synthesized)
tgaaccaactgcctaatttttccctggtggtactatttaaaacttagtccaaaatcttccaatctcaaactttcctcttcctagtagaggtaagacacagcacaaaatgaacattttttt

SEQ ID NO: 562711 - DNA, 120 bp, Artificial Sequence
  ENSG00000169814_43 (sequence is synthesized)
cctgggggaaaaaaaaattaacaaatctacttaaagagtacttgtattattcagaatattcccagtattttgatgttctcatttgagaacatactttttaaagaaatagttttacttatc

SEQ ID NO: 562712 - DNA, 120 bp, Artificial Sequence
  ENSG00000169814_44 (sequence is synthesized)
cagaaattatgttcttttacagaaggcagtatttccttttgtaggtttattctctctctctctctcactcataacctacaacttggctggaataagatgaaaaaaagtattctgccaccc

SEQ ID NO: 562713 - DNA, 120 bp, Artificial Sequence
  ENSG00000169814_45 (sequence is synthesized)
tggacttttttttcccaaacaactcctgttttgttttctattttctggcagcccagaattaataaaaaagaacaaagataagagaaaacctgccatgaccagctatcttttcttaaagaa

SEQ ID NO: 562714 - DNA, 120 bp, Artificial Sequence
  ENSG00000169814_46 (sequence is synthesized)
tcatctggggtatctatatcaaatcctacaagaatgaatacatcttatttataacagacatattattttacactaaagaattgtgtcatgaaacatcaagaatcacatcctcccctccaa

SEQ ID NO: 562715 - DNA, 120 bp, Artificial Sequence
  ENSG00000169814_47 (sequence is synthesized)
tcccaaacaaaactatgggttcttaagtgctagagtgcctgtttaaaaggcaataggatacaatggagtattatttagcaataaaaagaaataaagtactgatactgttccatgaataac

SEQ ID NO: 562716 - DNA, 120 bp, Artificial Sequence
  ENSG00000169814_48 (sequence is synthesized)
ccttgagaacattatattaagtgaaacaagccagtcacagaagatcacatgttgggtgagtccatttataggaactgttcagaacaggcaaattttatagagatgaaaagtagattagtg

SEQ ID NO: 562717 - DNA, 120 bp, Artificial Sequence
  ENSG00000169814_49 (sequence is synthesized)
gattagtggttgcctagggctgagggaagaaagaaatggagattaactgctaatggtctttctttaacaggggatgaagaggttttctgtattttttttttttgagacagagtctcgctc

SEQ ID NO: 562718 - DNA, 120 bp, Artificial Sequence
  ENSG00000169814_50 (sequence is synthesized)
acaggcatgagccaccacgccagacctgaacccaacacgttctaaaaggggttattaaattatccatactggacccatctgcattaatttttaaaaagcaggatagagaccatctaaaaa

SEQ ID NO: 562719 - DNA, 120 bp, Artificial Sequence
  ENSG00000169814_51 (sequence is synthesized)
ttttgaggggtttgaggagacatacaaaaggctgcaaaggttacacttacctgaagaaagaagttttctgcagcaatctgaaaagccgcttaaggctgccaaatggagggggaacattcc

SEQ ID NO: 562720 - DNA, 120 bp, Artificial Sequence
  ENSG00000169814_52 (sequence is synthesized)
atgtatgccacgcctaaagttaatagaacaggacagtatcttcattttaacacaagaaaaatacaatcagttaaatacattacaaagagaccacttaagtgaaagataactaagagccaa

SEQ ID NO: 562721 - DNA, 120 bp, Artificial Sequence
  ENSG00000169814_53 (sequence is synthesized)
aatgtctaacacttcggagagtaatttggttaaagtttgatggtgggcataacttattagccagctatttttctccaaaagtcaggtttctcaccttcagcactactgtcattatggact

SEQ ID NO: 562722 - DNA, 120 bp, Artificial Sequence
  ENSG00000169814_54 (sequence is synthesized)
ttgctggggaaacgtgagaagccattctgtgcatacaggcttacaggctgttcagcagcatccctgggctctacccaatggatgtcattaacattaacaccttcctccccaaattgtgac

SEQ ID NO: 562723 - DNA, 61 bp, Artificial Sequence
  ENSG00000169814_55 (sequence is synthesized)
gctgggattacagatgtgaaccaccttacccagcctacagtttagagtttttaaaaaactt

SEQ ID NO: 562724 - DNA, 120 bp, Artificial Sequence
  ENSG00000169814_56 (sequence is synthesized)
caccttacccagcctacagtttagagtttttaaaaaacttaatataaatggaatcatgtagtatgtattatttcatatctggcatttttgtgtagcattatatgaaatttatcaatgttg

SEQ ID NO: 562725 - DNA, 120 bp, Artificial Sequence
  ENSG00000169814_57 (sequence is synthesized)
actgtagttggttcattttcattgttatacagtatttcattgtgtgattatactatggtttagttatacatttcaactactgggcatctggttgcttccagttctcccacatattttcat

SEQ ID NO: 562726 - DNA, 69 bp, Artificial Sequence
  ENSG00000169814_58 (sequence is synthesized)
tgggcatctggttgcttccagttctcccacatattttcatctatgctatattggccttgataaaaaaag

SEQ ID NO: 562727 - DNA, 120 bp, Artificial Sequence
  ENSG00000169814_59 (sequence is synthesized)
ctcaagtgatcctcccacctcagccccctgactagctctgactataggcacatgccatgcctggctaatttttaaacttttttgtagatacagggtctcgctttgttccccaggctggtc

SEQ ID NO: 562728 - DNA, 120 bp, Artificial Sequence
  ENSG00000169814_60 (sequence is synthesized)
tctgcctcccaaagtgctgggattataggagtaagccactgtgcccagccacaaaaagtaatttttccccctttgtaaagttcccattttgtcaagggtcaaagagaacaactgatgtcc

SEQ ID NO: 562729 - DNA, 120 bp, Artificial Sequence
  ENSG00000169814_61 (sequence is synthesized)
cattttgtcaagggtcaaagagaacaactgatgtccttccaagtttggcagcagtggctgaaggctgtccgtatttttaattaaattttatttgttcaaagtagctgggggagtgcttca

SEQ ID NO: 562730 - DNA, 120 bp, Artificial Sequence
  ENSG00000169814_62 (sequence is synthesized)
ctgcccacacttctttcaagggttcttctaaaggtgcctgctgctgttcctgctgctggcaggcagaacaacccattacataggccaggatgccttggatgagagcgggagtggggaaag

SEQ ID NO: 562731 - DNA, 120 bp, Artificial Sequence
  ENSG00000169814_63 (sequence is synthesized)
aagcttgtttcaggtgtgttttctagtcagaatatgactaaaaacaggctcctctcctctgcatgggggttattttttgagacgaagtctggctctgtcacccaggctagagtgcactgg

SEQ ID NO: 562732 - DNA, 120 bp, Artificial Sequence
  ENSG00000169814_64 (sequence is synthesized)
tgcaaccatagctaacggcagcctccaactcctggatataagcgatcctccaagtctcagcctcctgagtagttaagcttacagctgtgagccactgcatgagtcctgtcagctttccct

SEQ ID NO: 562733 - DNA, 120 bp, Artificial Sequence
  ENSG00000169814_65 (sequence is synthesized)
tatcttctcctatactatgactgtttacatatatgtatctttagttaatactggaggaaaggatataacttaagtatttctgtaatttaactgtataaacctcaacatcaaattactatg

SEQ ID NO: 562734 - DNA, 120 bp, Artificial Sequence
  ENSG00000169814_66 (sequence is synthesized)
ttacaatgaaaactgtaactgtcaagtgatcagacactcaagtctgttgtccctctctctgtaggcaagttacgtggaagttaggttttaactggaaggttctctggcgaccttggaaga

SEQ ID NO: 562735 - DNA, 120 bp, Artificial Sequence
  ENSG00000169814_67 (sequence is synthesized)
acatgttcaagaatatttattgtagtaattctgtaatagtgaaaaactgtaagcaacttgtatttgcaaataaggagaatgaatatattgtgaaatctttatacaataattctataaaat

SEQ ID NO: 562736 - DNA, 120 bp, Artificial Sequence
  ENSG00000169814_68 (sequence is synthesized)
cttactgtgaacctgggtttctggtccagccatagctacttctttaagctcctccagtgtgctgagcacagtctggcccctgtactgttgtctgcttgaaatggcgtcttctgatgaaca

SEQ ID NO: 562737 - DNA, 120 bp, Artificial Sequence
  ENSG00000169814_69 (sequence is synthesized)
ttctcattgaactatttatctgagttccctctgccggaacatgagccatgcctagagtagccacctagtagtgagtgacagctctgtgctggatgcacataaatggtctcccttaactgc

SEQ ID NO: 562738 - DNA, 120 bp, Artificial Sequence
  ENSG00000169814_70 (sequence is synthesized)
catgagccctaaagaaggtttgctacagctattttacagatggggaaaactgacagagagatattaatgaattgcccacatgcaaatatgtgctgagtcttggatttgcatctttatcgt

SEQ ID NO: 562739 - DNA, 120 bp, Artificial Sequence
  ENSG00000169814_71 (sequence is synthesized)
gactccacggagacccaccctctaagaccagagccagtgtcctattcatcttttgtctctgcagcgttcagcatggcactgtcttggcttacaaaatctgctctatgcttgctgactgct

SEQ ID NO: 562740 - DNA, 120 bp, Artificial Sequence
  ENSG00000169814_72 (sequence is synthesized)
gaatgaatgaatgaatgaataggtagtcacaaagaatgtttagaatgtttctcagacaggctgagaaaaaacacaacgaaacattatttccgtttggaaagtttttttatttttgtgttc

SEQ ID NO: 562741 - DNA, 120 bp, Artificial Sequence
  ENSG00000169814_73 (sequence is synthesized)
tcaaaagaaacagtgacagaaccactcagtatgaagtgcaatgaaaactgaactctgaattggaacaaataactggaattcagttaactggttttgcaaaaggataaatactcaactggt

SEQ ID NO: 562742 - DNA, 120 bp, Artificial Sequence
  ENSG00000169814_74 (sequence is synthesized)
tgttttctgccatttaacaaagagaaaaatcattgggattgtttaaacttgctttcacctttgcacctttcagttcaggatgcagtgttcaattgttaacttgggcttgatgattcagca

SEQ ID NO: 562743 - DNA, 71 bp, Artificial Sequence
  ENSG00000169814_75 (sequence is synthesized)
tctgcctccttgcacacaccactaccaactggctaatatttgtattttagtagagacggggtgtcaccatg

SEQ ID NO: 562744 - DNA, 82 bp, Artificial Sequence
  ENSG00000169814_76 (sequence is synthesized)
accctgtgcccagccttgtttttctatttctaataaataagggaatagtttatatgattagtgtgtagtaaagaatctgacc

SEQ ID NO: 562745 - DNA, 120 bp, Artificial Sequence
  ENSG00000169814_77 (sequence is synthesized)
gaatagtttatatgattagtgtgtagtaaagaatctgacctctcccaaagagaggtctgtcctttgcccctggcttcagggaggtaggtaatctaagatattcctgataaaagagtctct

SEQ ID NO: 562746 - DNA, 120 bp, Artificial Sequence
  ENSG00000169814_78 (sequence is synthesized)
atttagagtgggagctttgggtcaccaggtatcatgtatttggagactgaaatcaaccacatggacaaccaatcaagccatataatggagccccaataaaaaccgaaaatgaagctcagg

SEQ ID NO: 562747 - DNA, 120 bp, Artificial Sequence
  ENSG00000169814_79 (sequence is synthesized)
cagaggtgatctaagtcagggaccagaagctgtgacatgttaactaagattgataggagaccttaacatccccaaaatccaacccaaactcccaaagatccatgtgccacatgttcattc

SEQ ID NO: 562748 - DNA, 120 bp, Artificial Sequence
  ENSG00000169814_80 (sequence is synthesized)
cttcaatgacacagagggttctcttggaggacagacccaggcccaaagacagaagttaccgggagggaggcttcaactccatctaaggaagacctttctaacagttagagctgctcaaca

SEQ ID NO: 562749 - DNA, 120 bp, Artificial Sequence
  ENSG00000169814_81 (sequence is synthesized)
actgaatggactgcttggtgaggtagagtcacttggaagtgttcaaggtggaaagatcacccttgtagaagggactcctgcatttgttaagaggttagagactggatgaacctcaggtct

SEQ ID NO: 562750 - DNA, 120 bp, Artificial Sequence
  ENSG00000169814_82 (sequence is synthesized)
ctttcaattctgagattctagaaaattccctcagggaattcagaagagaattcctaaaaggaaagagaaagcacacatatgtatacttttagaatctgcttgatttttttttttttcaaa

SEQ ID NO: 562751 - DNA, 120 bp, Artificial Sequence
  ENSG00000169814_83 (sequence is synthesized)
aggtacaatagaaaatgtagtccactgtcattaaaatgcatattcaccttcctactactaataattaggaagggttcattatgacttctttatattataaagaaaagatgggggattaga

SEQ ID NO: 562752 - DNA, 120 bp, Artificial Sequence
  ENSG00000169814_84 (sequence is synthesized)
ggattagatttataatttctgtaaatattttagaaaaaatgcttaaaatctagtagtcaatgccctagaaactttatagatttgtagataatatgcacagatacaaatacattattcatt

SEQ ID NO: 562753 - DNA, 120 bp, Artificial Sequence
  ENSG00000169814_85 (sequence is synthesized)
agttctggctcactggattaacagggccaaggagcaagtcctttgcaatccaattgtaattacagccagcttgtccaacccttggcccaggatggctttgaatgcggcccaacacaaatt

SEQ ID NO: 562754 - DNA, 120 bp, Artificial Sequence
  ENSG00000169826_0 (sequence is synthesized)
cccgggggtgggtggctgaggcggcggcgggcccaaggcgtgaggcgccgcccgggtgtccccgcggcgcaggaggcggtggagcgcagagcgggcgagcgcgaaaaatcactaccaata

SEQ ID NO: 562755 - DNA, 120 bp, Artificial Sequence
  ENSG00000169826_1 (sequence is synthesized)
gcgaaaaatcactaccaatataatggattttatatatcagattgctttattctggatatcatggtaacaatacagaaagtatacataatttcccatttctgcaagtagtcatgactgctg

SEQ ID NO: 562756 - DNA, 120 bp, Artificial Sequence
  ENSG00000169826_2 (sequence is synthesized)
aagaaagaaaaacttaaagctacggcagaattattttatggaaattctgattttgtttttaatttttgataactttttactaaaggtatgaacacacaaagagcttattttgttaggcaa

SEQ ID NO: 562757 - DNA, 120 bp, Artificial Sequence
  ENSG00000169826_3 (sequence is synthesized)
atacacattaataagaatgcctagaagaggactgattcttcacacccggacccactggttgctgttgggccttgctttgctctgcagtttggtattatttatgtacctcctggaatgtgc

SEQ ID NO: 562758 - DNA, 120 bp, Artificial Sequence
  ENSG00000169826_4 (sequence is synthesized)
cccccagactgatggaaatgcatctcttcctggtgttgttggggaaaattatggtaaagagtattatcaagccctcctacaggaacaagaagaacattatcagaccagggcaaccagtct

SEQ ID NO: 562759 - DNA, 120 bp, Artificial Sequence
  ENSG00000169826_5 (sequence is synthesized)
gaaacgccaaattgcccaactaaaacaagaattacaagaaatgagtgagaagatgcggtcactgcaagaaagaaggaatgtaggggctaatggcataggctatcagagcaacaaagagca

SEQ ID NO: 562760 - DNA, 120 bp, Artificial Sequence
  ENSG00000169826_6 (sequence is synthesized)
agcacctagtgatcttttagagtttcttcattcccaaattgacaaagctgaagttagcataggggccaaactacccagtgagtatggggtcattccctttgaaagttttaccttaatgaa

SEQ ID NO: 562761 - DNA, 120 bp, Artificial Sequence
  ENSG00000169826_7 (sequence is synthesized)
agtatttcaattggaaatgggtctcactcgccatcctgaagaaaagccagttagaaaagacaaacgagatgaattggtggaagttattgaagcgggcttggaggtcattaataatcctga

SEQ ID NO: 562762 - DNA, 120 bp, Artificial Sequence
  ENSG00000169826_8 (sequence is synthesized)
tgaagatgatgaacaagaagatgaggagggtccccttggagagaaactgatatttaatgaaaatgacttcgtagaaggttattatcgcactgagagagataagggcacacagtatgaact

SEQ ID NO: 562763 - DNA, 120 bp, Artificial Sequence
  ENSG00000169826_9 (sequence is synthesized)
cttttttaagaaagcagaccttacggaatatagacatgtgaccctcttccgcccttttggacctctcatgaaagtgaagagtgagatgattgacatcactagatcaattattaatatcat

SEQ ID NO: 562764 - DNA, 120 bp, Artificial Sequence
  ENSG00000169826_10 (sequence is synthesized)
tgtgccacttgctgaaagaactgaagcatttgtacaatttatgcagaacttcagggatgtttgtattcatcaagacaagaagattcatctcacagtggtgtattttggtaaagaaggact

SEQ ID NO: 562765 - DNA, 120 bp, Artificial Sequence
  ENSG00000169826_11 (sequence is synthesized)
gtctaaagtcaagtctatcctagaatctgtcaccagtgagtctaattttcacaattacaccttggtctcattgaatgaagaatttaatcgtggacgaggactaaatgtgggtgcccgagc

SEQ ID NO: 562766 - DNA, 120 bp, Artificial Sequence
  ENSG00000169826_12 (sequence is synthesized)
ttgggacaagggagaggtcttgatgtttttctgtgatgttgatatctatttctcagccgaattccttaacagctgccggttaaatgctgagccaggtaagaaggtgttttaccctgtggt

SEQ ID NO: 562767 - DNA, 120 bp, Artificial Sequence
  ENSG00000169826_13 (sequence is synthesized)
gttcagtctttacaatcctgccattgtttatgccaaccaggaagtgccaccacctgtggagcagcagctggttcacaaaaaggattctggcttttggcgagattttggctttggaatgac

SEQ ID NO: 562768 - DNA, 120 bp, Artificial Sequence
  ENSG00000169826_14 (sequence is synthesized)
ttgtcagtatcgttcagatttcctgaccattggtggatttgacatggaagtgaaaggttggggtggagaagatgttcatctttatcgaaaatacttacatggtgacctcattgtgattcg

SEQ ID NO: 562769 - DNA, 120 bp, Artificial Sequence
  ENSG00000169826_15 (sequence is synthesized)
tgctgatgagctgacccccgagcagtaccgcatgtgcatccagtctaaagccatgaatgaggcctctcactcccacctgggaatgctggtcttcagggaggaaatagagacgcatcttca

SEQ ID NO: 562770 - DNA, 120 bp, Artificial Sequence
  ENSG00000169826_16 (sequence is synthesized)
taaacaggcatacaggacaaacagtgaagctgttggttgaaatcataattaatgcgttactgtatgaaccacaaaacagcactatttatttagccttacttctacttccagatgcagtgc

SEQ ID NO: 562771 - DNA, 120 bp, Artificial Sequence
  ENSG00000169826_17 (sequence is synthesized)
ctcttttggagaagacatgtttatttttcatgttctttctgacattactttagcaattcaacttgatgtgagaagaaaaaacaaatgtttcaacacaaaatctctgttttgtgagaatac

SEQ ID NO: 562772 - DNA, 120 bp, Artificial Sequence
  ENSG00000169826_18 (sequence is synthesized)
tgcactatggaataattgacaaattgaaatctcatatttgtcccaaaagttgttttgagttagttctacctggtgcccatgttctgattgtgtgtgggattgcatggtgtcctgattgca

SEQ ID NO: 562773 - DNA, 120 bp, Artificial Sequence
  ENSG00000169826_19 (sequence is synthesized)
tctaggtggagcggatggaatgtgctgggccactgttgggtggagagcagcacattcttacagaggagatggagcgttatgagcatagtatgtggataggtatcttcacctgcccgcccc

SEQ ID NO: 562774 - DNA, 120 bp, Artificial Sequence
  ENSG00000169826_20 (sequence is synthesized)
tgagtcagcctccttgacttgatagcttgaagaatccttttccactgaaatagaggataattaattgacacatctgaaatccccaatcaatcaatcaagagaaaggtagaactaaaaact

SEQ ID NO: 562775 - DNA, 120 bp, Artificial Sequence
  ENSG00000169826_21 (sequence is synthesized)
ccttaacttactgttgcttacacccctgaaagtctgtttttaagcaaatgggtaatagtagaaaataggttagaatctatggcttgattaaaaatatgttattacattatcatgttcagg

SEQ ID NO: 562776 - DNA, 120 bp, Artificial Sequence
  ENSG00000169826_22 (sequence is synthesized)
attaggattagtagtcagttgctgtaaactattttgaacaaacagaaaagaacacggaaacatttttaacagagcatttaattatgttggaatacaggatcctagctctgtctgggaaca

SEQ ID NO: 562777 - DNA, 120 bp, Artificial Sequence
  ENSG00000169826_23 (sequence is synthesized)
ttagtttatttgagccagctctatcagggtcttcccatggtggttcagaatagatgagcatagcatggttttgtttgtttttgctttcaattttctaatttggcatggatccatatgtat

SEQ ID NO: 562778 - DNA, 120 bp, Artificial Sequence
  ENSG00000169826_24 (sequence is synthesized)
ttactatcctttttctaatatattaatatatgctacatttgtatttgcattactataatactttgagttgaaaaagagtttcattgtggagagaaaaagcaaatggtatgccacaagatc

SEQ ID NO: 562779 - DNA, 120 bp, Artificial Sequence
  ENSG00000169826_25 (sequence is synthesized)
actctgatttgagaaaagggaggaggggaagatagtctgaatggaaatctgaaatacggaatgttttagagaaatatgtcacttgcatatagaatgttttaattgaggtataaattaatg

SEQ ID NO: 562780 - DNA, 120 bp, Artificial Sequence
  ENSG00000169826_26 (sequence is synthesized)
agacaaagtgaaaaagaaattatattcagataggactgcactacattatttgtcacacatggatctgttaccatcaggtcaattcctagtatgcataaattttttaacccttttaaaaga

SEQ ID NO: 562781 - DNA, 120 bp, Artificial Sequence
  ENSG00000169826_27 (sequence is synthesized)
gacctatgttgaaaacccctgaaaattcactgaagaaaaatcattactctttttctcagtaaatcatatcatctgaaatattacaaatttcaaatttctaggtgctatattaattcaata

SEQ ID NO: 562782 - DNA, 120 bp, Artificial Sequence
  ENSG00000169826_28 (sequence is synthesized)
ttacaataactcttacctaattattcttacaagttttaagttgtggtagtttagtgatttttttaaaagatgtgtgaaatgttctctgcaaaataattcaggccactgtctccttttata

SEQ ID NO: 562783 - DNA, 120 bp, Artificial Sequence
  ENSG00000169826_29 (sequence is synthesized)
tattattataattatttattatgaagaccagtgaattacgatatttaaagtgagagaacttaattatttgcaaaggtaagttacagcttgttttttgagagaatcaaatgagtttacttt

SEQ ID NO: 562784 - DNA, 120 bp, Artificial Sequence
  ENSG00000169826_30 (sequence is synthesized)
tgttcctgttgtttttaactagctttaagtttaaagatggaagctaagcaatggaaatgctatacgtttttgacatttattaaatggtaccaataaagtattttattaccaaaagttaaa

SEQ ID NO: 562785 - DNA, 120 bp, Artificial Sequence
  ENSG00000169836_0 (sequence is synthesized)
agttctccagcctgtgccgggcagctggcaccctccctacgtgtgatgtgactcgataacccttaatctcgggaggatctcattctttctgcctgccagagccgcaagcgcctctgagaa

SEQ ID NO: 562786 - DNA, 120 bp, Artificial Sequence
  ENSG00000169836_1 (sequence is synthesized)
agtgcagctgttgccccttagccccagctgcatcccctaaccagcagggattgcagtatctttcagcttccagtcttatctgaagactccggcaccaaagtgaccaggaggcagagaaga

SEQ ID NO: 562787 - DNA, 120 bp, Artificial Sequence
  ENSG00000169836_2 (sequence is synthesized)
acttcagaggagtctcgtcttgggctgcccgtgggtgagtgggagggtccgggactgcagaccggtggcgatggccactctcccagcagcagaaacctggatagacgggggtggaggcgt

SEQ ID NO: 562788 - DNA, 120 bp, Artificial Sequence
  ENSG00000169836_3 (sequence is synthesized)
gggtgcagacgccgtgaacctgaccgcctcgctagctgccggggcggccacgggggcagttgagactgggtggctgcaactgctggaccaagctggcaacctctcctcctccccttccgc

SEQ ID NO: 562789 - DNA, 120 bp, Artificial Sequence
  ENSG00000169836_4 (sequence is synthesized)
gctgggactgcctgtggcttcccccgcgccctcccagccctgggccaacctcaccaaccagttcgtgcagccgtcctggcgcatcgcgctctggtccctggcgtatggtgtggtggtggc

SEQ ID NO: 562790 - DNA, 120 bp, Artificial Sequence
  ENSG00000169836_5 (sequence is synthesized)
agtggcagttttgggaaatctcatcgtcatctggatcatcctggcccacaagcgcatgaggactgtcaccaactacttccttgtgaacctggctttctccgacgcctccatggccgcctt

SEQ ID NO: 562791 - DNA, 120 bp, Artificial Sequence
  ENSG00000169836_6 (sequence is synthesized)
caacacgttggtcaatttcatctacgcgcttcatagcgagtggtactttggcgccaactactgccgcttccagaacttctttcctatcacagctgtgttcgccagcatctactccatgac

SEQ ID NO: 562792 - DNA, 120 bp, Artificial Sequence
  ENSG00000169836_7 (sequence is synthesized)
ggccattgcggtggacaggtatatggctattattgatcccttgaaacccagactgtctgctacagcaaccaagattgtcattggaagtatttggattctagcatttctacttgccttccc

SEQ ID NO: 562793 - DNA, 120 bp, Artificial Sequence
  ENSG00000169836_8 (sequence is synthesized)
tcagtgtctttattccaaaaccaaagtcatgccaggccgtactctctgctttgtgcaatggccagaaggtcccaaacaacatttcacttaccatattatcgtcattatactggtgtactg

SEQ ID NO: 562794 - DNA, 120 bp, Artificial Sequence
  ENSG00000169836_9 (sequence is synthesized)
tttcccattgctcatcatgggtattacatacaccattgttggaattactctctggggaggagaaatcccaggagatacctgtgacaagtatcatgagcagctaaaggccaaaagaaaggt

SEQ ID NO: 562795 - DNA, 120 bp, Artificial Sequence
  ENSG00000169836_10 (sequence is synthesized)
tgtcaaaatgatgattattgttgtcatgacatttgctatctgctggctgccctatcatatttacttcattctcactgcaatctatcaacaactaaatagatggaaatacatccagcaggt

SEQ ID NO: 562796 - DNA, 120 bp, Artificial Sequence
  ENSG00000169836_11 (sequence is synthesized)
ctacctggctagcttttggctggcaatgagctcaaccatgtacaatcccatcatctactgctgtctgaataaaagatttcgagctggcttcaagagagcatttcgctggtgtcctttcat

SEQ ID NO: 562797 - DNA, 120 bp, Artificial Sequence
  ENSG00000169836_12 (sequence is synthesized)
caaagtttccagctatgatgagctagagctcaagaccaccaggtttcatccaaaccggcaaagcagtatgtacaccgtgaccagaatggagtccatgacagtcgtgtttgaccccaacga

SEQ ID NO: 562798 - DNA, 120 bp, Artificial Sequence
  ENSG00000169836_13 (sequence is synthesized)
tgcagacaccaccaggtccagtcggaagaaaagagcaacgccaagagacccaagtttcaatggctgctctcgcaggaattccaaatctgcctccgccacttcaagtttcataagctcacc

SEQ ID NO: 562799 - DNA, 120 bp, Artificial Sequence
  ENSG00000169836_14 (sequence is synthesized)
ctatacctctgtggatgaatattcttaattccatttcctgaggtaaaagattagtgtgagaccatcatggtgccagtctaggaccccattctcctatttaccagtcctgtcctatatacc

SEQ ID NO: 562800 - DNA, 120 bp, Artificial Sequence
  ENSG00000169836_15 (sequence is synthesized)
ctctagaaacagaaagcaatttttaggcagctatggtcaaattgagaaaggtagtgtataaatgtgacaaagacactaataacatgttagcctccacccaaaataaaatgggctttaaat

SEQ ID NO: 562801 - DNA, 120 bp, Artificial Sequence
  ENSG00000169836_16 (sequence is synthesized)
ttattctttgaaaactctaaattattatatgcaatgaacaaaaatatgtcaggaaaatacttgtaaactcgccagtctatctcatttacaaattgcaatatacatttgtgacattaaaat

SEQ ID NO: 562802 - DNA, 120 bp, Artificial Sequence
  ENSG00000169836_17 (sequence is synthesized)
gatatatagtttttccaagagattaaagaatctttaaaacataatattgtaagtgaagggaaacaaaatctgtataaaatctgtataaaataggcttttttgcctagagatataaaatgg

SEQ ID NO: 562803 - DNA, 120 bp, Artificial Sequence
  ENSG00000169836_18 (sequence is synthesized)
gaaaaaaagttaaatgattcattttcccactagagtaatggaaaattaacctcaagaagtaggaactgaaaatctttgctcaagaaaactcattttgtagaatgtaaagatttaaagatt

SEQ ID NO: 562804 - DNA, 120 bp, Artificial Sequence
  ENSG00000169836_19 (sequence is synthesized)
taaagatttcttccatggcatttaactgaaaaggaaatctagttaaatcattaggcaaatgtatatttcattctcttgattttttttctgagaaagtgaaattttaaaaaattatatact

SEQ ID NO: 562805 - DNA, 120 bp, Artificial Sequence
  ENSG00000169836_20 (sequence is synthesized)
ttttgaccattacttatttttgaataccaagctaaaaagtagtcagttaagaccctaaaaatatgaagaaaattcctatcattttttatttttcacagattttttaaatagctagattat

SEQ ID NO: 562806 - DNA, 120 bp, Artificial Sequence
  ENSG00000169836_21 (sequence is synthesized)
aaaacagtaaaggtacattccaataaatagaggaagaatactatttatgttctcttcctctcccctcactgaaaatagaataaggactaggagaaaatatcttcaaaggcaactccttag

SEQ ID NO: 562807 - DNA, 120 bp, Artificial Sequence
  ENSG00000169836_22 (sequence is synthesized)
aggtgtagacaagtgaattacctcttagaaaacgaatctgcacaatagtttggatacatgtaaactaataacagctgagcaagagggtgagtttaacacacatccttccacagaaagacc

SEQ ID NO: 562808 - DNA, 120 bp, Artificial Sequence
  ENSG00000169836_23 (sequence is synthesized)
ttttctttcatttgcttagattattcagaagtcttaccagaaagaaatgagataatagtcctaagaaagcatcacatttactacaagaagatatatactagcacatttctgagactcata

SEQ ID NO: 562809 - DNA, 120 bp, Artificial Sequence
  ENSG00000169836_24 (sequence is synthesized)
acataacaagaaatacttttaagtgtaaaaagtaacatccaggcctcagtgcttacagatcatctttccttgaattagggatactgttaatcctgctcaagaaagcagaaactttttgag

SEQ ID NO: 562810 - DNA, 120 bp, Artificial Sequence
  ENSG00000169836_25 (sequence is synthesized)
aatgtgaatgtgtagtacaaacttctcctttaaactcttcagtttgatttttaaagatatttgtctaaaataatactctctaacaaacactttactgttgtgcctccaccgatattaaaa

SEQ ID NO: 562811 - DNA, 120 bp, Artificial Sequence
  ENSG00000169836_26 (sequence is synthesized)
caaaatatttttgaagaacagaataaaagcaaatattcaatggcaaatcatggtctatttctcaaatctcttccctattttgaagccaaaaccagaaatatccaattgttacaaaaagtt

SEQ ID NO: 562812 - DNA, 120 bp, Artificial Sequence
  ENSG00000169836_27 (sequence is synthesized)
cggagtctaaacaagctaaacatatgtgttccagctgaatttcttctgatgataccaataaacaaagagacacacacacacacacacacacatacaaatgtgcctacacattcaatcatt

SEQ ID NO: 562813 - DNA, 120 bp, Artificial Sequence
  ENSG00000169836_28 (sequence is synthesized)
taatgaatgcaacaacttcaaagaattaaaatcaaatactgaaatgataagtggtcattacagcattgccatatgctcaataaagtctgtgaagcttgtgtgcatgttttaaataagcaa

SEQ ID NO: 562814 - DNA, 120 bp, Artificial Sequence
  ENSG00000169836_29 (sequence is synthesized)
agcttgtgtgcatgttttaaataagcaaatttaatatatagtatctaattgtttgaatataatgtttttgaatgttcattcttaaaacatatatttatcatacaatgttaaagtgtcaag

SEQ ID NO: 562815 - DNA, 120 bp, Artificial Sequence
  ENSG00000169836_30 (sequence is synthesized)
ttttcttaaatttatgaatgatatggtactagcattaattaatgttttagacatatggaaccatattcagctgtaaaatatgaatatgaagtttagccctcaaatttaatgtcatcagcc

SEQ ID NO: 562816 - DNA, 120 bp, Artificial Sequence
  ENSG00000169836_31 (sequence is synthesized)
actaccaaagtatcatacatttgaaaaatataactcctggccctcacatattagagaaattcagtagaattttctaagacatttatttctaaggaaaaatactggcctcgtcagttggat

SEQ ID NO: 562817 - DNA, 120 bp, Artificial Sequence
  ENSG00000169836_32 (sequence is synthesized)
tgttggtttgctttggcttctgtgaacatacatattgttgtgttgcttaccgagcacctcccttctagtgtgacagaaatacccagacagtattttttcaatgctttccagaaaaaaact

SEQ ID NO: 562818 - DNA, 120 bp, Artificial Sequence
  ENSG00000169836_33 (sequence is synthesized)
ggcatcattcactcactactcatggcccttaaactgagacctataggcagaattttttaagttcaaaaatttaaacgacaataataaaacaagagtgaaatataaaagagaagatttttc

SEQ ID NO: 562819 - DNA, 120 bp, Artificial Sequence
  ENSG00000169836_34 (sequence is synthesized)
actcttttgtctgcattttgacaataagaattacagaataatgcacaaaatcaaattcagtgagattcatttttaaataaagtcatcccagtgttttcatatttgctaagcttggaaaga

SEQ ID NO: 562820 - DNA, 120 bp, Artificial Sequence
  ENSG00000169836_35 (sequence is synthesized)
atctgccttcaaaatttactctaccctctgtttctaaagttcagtatgaatctttccattgtttgaaggcaaacactggctcagactactaggcagatggttaaaacagcccaggttttt

SEQ ID NO: 562821 - DNA, 120 bp, Artificial Sequence
  ENSG00000169836_36 (sequence is synthesized)
aggtttttttacttagatcagtatcagaaaaattcaaaatatttttaaacaaatatgaaagaatcaaaaaggcttacatcattgtaagtattctcttttaaacaaaatacattaaatcaa

SEQ ID NO: 562822 - DNA, 120 bp, Artificial Sequence
  ENSG00000169836_37 (sequence is synthesized)
attgcttactattttgcatctggacaaagtacaagatattgaaattacctgtatgggaaaatattaaagcggacataattgttacagaattcactctcacacttttttattttttaccaa

SEQ ID NO: 562823 - DNA, 120 bp, Artificial Sequence
  ENSG00000169836_38 (sequence is synthesized)
gtacagcacactgttgcattattccatcttctaacttcatgatggtgacatttctgacccagcagctgaattcatgtccttttccaaatcctgccaatgtcttagaaacagtgaactgag

SEQ ID NO: 562824 - DNA, 120 bp, Artificial Sequence
  ENSG00000169836_39 (sequence is synthesized)
caatttcagagtgaaccccgcccttacaaagcacataaagaataccaagaagcttggtatcaagcctatgaaatacaaaataaatgtgaaaaataaatgctggccagctcaacatttgaa

SEQ ID NO: 562825 - DNA, 120 bp, Artificial Sequence
  ENSG00000169836_40 (sequence is synthesized)
tttagtttttgcaaatgcaaaatttcctctaaaaatttatgattagtacctggtaaactatttcatcaaatagaaaagcaggagacttacaaacatttctcacacttctaacagtaacaa

SEQ ID NO: 562826 - DNA, 120 bp, Artificial Sequence
  ENSG00000169836_41 (sequence is synthesized)
tttcctacttatcattgataatatgtcaaaagctaaggaaatccagaatgacatggaccatgtagaacaataaggttggaataatttcccttagggccaagcaggaatagagaataaagt

SEQ ID NO: 562827 - DNA, 120 bp, Artificial Sequence
  ENSG00000169836_42 (sequence is synthesized)
tcagaagggctgtacaaggtcattagttttgtgttttcatacatatatatatatatatgaaaaatctgtttatataagaagtaaatgtatataaagtttgtagtgaataaagtattttca

SEQ ID NO: 562828 - DNA, 120 bp, Artificial Sequence
  ENSG00000169836_43 (sequence is synthesized)
ttcaagttgtggtaattatattgaatatgtttaatgtatttacaccctttgcatatgtgataatgtgacagatttaatttctattttttctttaaaaacattaaaactaatattaaaagt

SEQ ID NO: 562829 - DNA, 120 bp, Artificial Sequence
  ENSG00000169840_0 (sequence is synthesized)
accactagcgctggccagcaccccgcgctctttgggcggtgcccacggcagcagaggctactgtttcagcctaggtctcagccgcgcgttcagcctcctgggcagaggcagctgcgggat

SEQ ID NO: 562830 - DNA, 120 bp, Artificial Sequence
  ENSG00000169840_1 (sequence is synthesized)
accgcggccagggaaagcgcgtggagagccgaaaggtgcggtgggcgcagagggcgggctggctgcggggcgaccgcgcgccggggccatgccgcgctccttcctggtggactcgctagt

SEQ ID NO: 562831 - DNA, 120 bp, Artificial Sequence
  ENSG00000169840_2 (sequence is synthesized)
gctgcgcgaggcgggcgagaagaaggcgcccgagggcagcccgccgccgctcttcccctacgctgtgcccccgccgcacgcgctgcacggtctctcgcctggcgcctgccacgcgcgcaa

SEQ ID NO: 562832 - DNA, 120 bp, Artificial Sequence
  ENSG00000169840_3 (sequence is synthesized)
ggctgggctgctgtgcgtgtgcccgctctgcgtcaccgcctcgcagctgcatgggccccccgggccgcccgcgctgcctctactcaaggcttccttcccacccttcggctcgcagtactg

SEQ ID NO: 562833 - DNA, 120 bp, Artificial Sequence
  ENSG00000169840_4 (sequence is synthesized)
ccacgcgcccctgggccgccagcactctgctgtgtcgcccggggtcgctcacggcccggccgccgctgctgctgccgccgcgctctaccagacctcctacccgctgcctgaccccaggca

SEQ ID NO: 562834 - DNA, 120 bp, Artificial Sequence
  ENSG00000169840_5 (sequence is synthesized)
gttccactgcatctctgtggacagcagctctaaccagctgcccagcagcaagaggatgcgcacggctttcaccagcacgcagctgctagagctggagcgcgagttcgcttctaatatgta

SEQ ID NO: 562835 - DNA, 120 bp, Artificial Sequence
  ENSG00000169840_6 (sequence is synthesized)
cctgtcccgcctacgtcgcatcgagatcgcgacctacctgaatctgtccgagaagcaggtgaagatctggtttcagaaccgccgagtgaagcacaagaaggagggcaagggcagcaacca

SEQ ID NO: 562836 - DNA, 120 bp, Artificial Sequence
  ENSG00000169840_7 (sequence is synthesized)
ccggtggtggcgggagcgcaccgcaaggctgcaagtgcgcatcgctctcctcagccaagtgctccgaggatgacgacgaattgcccatgtctccgtcctcctcagggaaggacgaccggg

SEQ ID NO: 562837 - DNA, 120 bp, Artificial Sequence
  ENSG00000169840_8 (sequence is synthesized)
atcttacggtcactccctaggcgcgtgtctccctaggtcgcccaccccaagacctccctgcgcctcggagactagtcctgggactcagcgctgattcccaggcacccgcagccaaaccac

SEQ ID NO: 562838 - DNA, 120 bp, Artificial Sequence
  ENSG00000169840_9 (sequence is synthesized)
tgcctggcatggatttggcactgctttgcagaggtcccgggcctgggcagggctgagagcttggcagagactggaccatggcgtccccgccccagggctcgctcgtgtccaaagccaact

SEQ ID NO: 562839 - DNA, 120 bp, Artificial Sequence
  ENSG00000169840_10 (sequence is synthesized)
ccaagctgtgaacactgtaagcgctcgagtcctcctgggcagtgcagcaccgcggcccccgcccgcaagcctgcttggcgcagcgccttgctggcagccggcgcctcctagcccgccctc

SEQ ID NO: 562840 - DNA, 120 bp, Artificial Sequence
  ENSG00000169840_11 (sequence is synthesized)
tctgggctggcttgggcttcctcgcttactctactctcctccgctctcggtcaaggtcggcggccttggatgctcgttcgcttctctttttaaaatgtctttttgtccctccccacctct

SEQ ID NO: 562841 - DNA, 120 bp, Artificial Sequence
  ENSG00000169840_12 (sequence is synthesized)
ttcctgtgatcatttattcactcggcccccgcccgccaacacacacatttatgaacccccactttttttttccttctccttttcccttcccctcctcagggagcctcctccttcagtcag

SEQ ID NO: 562842 - DNA, 120 bp, Artificial Sequence
  ENSG00000169840_13 (sequence is synthesized)
tccatttgtcccttgatctggccttgctgtcctcagtccccacggctcctctcacagatgataaatttcgcccgtagtatccatattggggaaacagatttgctctgtttccaacacgct

SEQ ID NO: 562843 - DNA, 120 bp, Artificial Sequence
  ENSG00000169840_14 (sequence is synthesized)
cttccttcctctaaacataggaccccgctctgcgccgctggcgaccccactcttccccctccagactctggcccgccccagcctagctgtgtaattgtacggcctctgcaatgccagaag

SEQ ID NO: 562844 - DNA, 120 bp, Artificial Sequence
  ENSG00000169851_0 (sequence is synthesized)
gaatgcaggtgagaaaaggcacggactctgcggctgcgaacccaaacttgggcaccgcacggtgcgcactgctcagccttcgcccccgtgggcgaaaggctgctgcggtttcaggcggct

SEQ ID NO: 562845 - DNA, 120 bp, Artificial Sequence
  ENSG00000169851_1 (sequence is synthesized)
gcttcgtgactaatgaccttgcgcagagttgttaagaaaaaagagaaacccgcgctctccggggtgagaagggactgactctgggcgtctctgaagatggctcgggcttctctttggcgc

SEQ ID NO: 562846 - DNA, 120 bp, Artificial Sequence
  ENSG00000169851_2 (sequence is synthesized)
gccggggggaccctgacactgaccgctctgtgacgcgagtagtctcccctgcaccgtgcccgaagcgacgtgccgggggatttttcattctcgatctgttgactggctcccccgctgcat

SEQ ID NO: 562847 - DNA, 120 bp, Artificial Sequence
  ENSG00000169851_3 (sequence is synthesized)
gagcagagtcggagttgagactggcttgttgctggccccagcgcctggtgcaggaagcgactcacgtttgtctgggtggccggagccggagcagagcctgggtttggagtgagtgcctgg

SEQ ID NO: 562848 - DNA, 120 bp, Artificial Sequence
  ENSG00000169851_4 (sequence is synthesized)
aacgtgaattggactcaactcgagtagcagcaaagaccagcgggctggcaggcgggggaggctgcaggctcattccccacctcttcccagccccactgcccgtctgccggagcggttctg

SEQ ID NO: 562849 - DNA, 120 bp, Artificial Sequence
  ENSG00000169851_5 (sequence is synthesized)
gccccttccgacagagcggggactagagccggggattctccgcccgctgaggggatgactctgggttgggggagcgccgaacccgcggcgcgcagtgtcccgtgaactgtgagtactgcg

SEQ ID NO: 562850 - DNA, 120 bp, Artificial Sequence
  ENSG00000169851_6 (sequence is synthesized)
actgaacggcggcaggcgagcgggcgattagcacccattgcatgaattatgaaacaataactttcggaagaagcaggaggaaaaaaagaagcatctatcgctgccctcccacccccattc

SEQ ID NO: 562851 - DNA, 120 bp, Artificial Sequence
  ENSG00000169851_7 (sequence is synthesized)
ccggccaactctccacgccgcttttgccccctccctcccctccctctcgctccttcctttccgggagaggggagaggactcgggggagggcaggcggccggccccggaggaggggggcgc

SEQ ID NO: 562852 - DNA, 120 bp, Artificial Sequence
  ENSG00000169851_8 (sequence is synthesized)
cgagggggctgtggttagaaggagcagtagcagcagcagcaggagaagatgctgaggatgcggaccgcgggatgggcgcgcggctggtgcttgggctgctgcctcctcctgccgctctcg

SEQ ID NO: 562853 - DNA, 120 bp, Artificial Sequence
  ENSG00000169851_9 (sequence is synthesized)
ctcagcctggcggccgccaagcagctcctccggtaccggctggccgaggagggccccgccgacgtccgcatcggcaacgtggcttcagacctgggcatcgtgaccggatcgggtgaggtg

SEQ ID NO: 562854 - DNA, 120 bp, Artificial Sequence
  ENSG00000169851_10 (sequence is synthesized)
actttcagcctggagtccggttccgagtacctgaagatcgacaacctcactggcgagctgagcacgagcgagcggcgcatcgaccgcgagaagctgccccagtgtcagatgatcttcgac

SEQ ID NO: 562855 - DNA, 120 bp, Artificial Sequence
  ENSG00000169851_11 (sequence is synthesized)
gagaacgagtgcttcctggacttcgaggtgtcggtgatcgggccctcgcagagctgggtggacctgtttgagggtcaggtcatcgtgcttgacatcaacgacaacacgcccaccttcccg

SEQ ID NO: 562856 - DNA, 120 bp, Artificial Sequence
  ENSG00000169851_12 (sequence is synthesized)
tcgcccgtgctcacgctcacggtggaggagaatcggccggtgggcacactttacctgctgcccacagccaccgaccgcgacttcggccgcaacggcatcgagcgctacgagctgctccag

SEQ ID NO: 562857 - DNA, 80 bp, Artificial Sequence
  ENSG00000169851_13 (sequence is synthesized)
cgccccctaccccgggggcggcgggaacggcgcgagcggcggcggctcgggaggctccaagcggcggctggacgcatcag

SEQ ID NO: 562858 - DNA, 120 bp, Artificial Sequence
  ENSG00000169851_14 (sequence is synthesized)
cggctggacgcatcagagggcggcggcggcaccaaccccggcggccgcagcagcgtgttcgagctgcaggtggcggacaccccggacggcgagaagcagccgcagctgatcgtgaagggg

SEQ ID NO: 562859 - DNA, 120 bp, Artificial Sequence
  ENSG00000169851_15 (sequence is synthesized)
gcgctggaccgcgagcagcgcgactcctacgagctgaccctgcgagtgcgcgacggcggcgacccgcctcgctcctcgcaggccatcctacgggtcctcatcaccgacgtgaacgacaac

SEQ ID NO: 562860 - DNA, 120 bp, Artificial Sequence
  ENSG00000169851_16 (sequence is synthesized)
agcccccgcttcgagaagagcgtgtacgaggccgacttggctgagaacagcgccccggggacccccatcctgcaactgcgcgcagccgacttggacgtgggggtcaacgggcagatcgaa

SEQ ID NO: 562861 - DNA, 120 bp, Artificial Sequence
  ENSG00000169851_17 (sequence is synthesized)
tacgtgttcggggcggccaccgagtcggtgaggcggctgctgcgccttgacgagacgtccggctggctcagcgtcctgcaccggatcgaccgcgaggaggtgaaccagctgcgcttcacg

SEQ ID NO: 562862 - DNA, 120 bp, Artificial Sequence
  ENSG00000169851_18 (sequence is synthesized)
gtcatggcccgcgaccgcgggcagccccccaagaccgacaaggccaccgtggtccttaacatcaaagacgagaacgacaacgtgccgtccattgaaatccgcaagattgggcgcatcccc

SEQ ID NO: 562863 - DNA, 120 bp, Artificial Sequence
  ENSG00000169851_19 (sequence is synthesized)
ctcaaggacggggtggccaacgtggccgaggacgttctggtcgacacccccatcgctctggtgcaggtgtccgaccgagaccaaggcgagaacggggtggtcacctgcaccgtggtgggc

SEQ ID NO: 562864 - DNA, 120 bp, Artificial Sequence
  ENSG00000169851_20 (sequence is synthesized)
gacgtgcccttccagctcaagccagccagcgacaccgagggcgaccagaacaagaaaaagtacttcttgcacacctcgacccctctggactatgaggccacccgggagttcaacgtggtc

SEQ ID NO: 562865 - DNA, 120 bp, Artificial Sequence
  ENSG00000169851_21 (sequence is synthesized)
atcgtggcggtggactcaggcagccccagcctctcgagcaacaactccctgattgtcaaggtgggagacaccaacgacaacccgcccatgttcggccagtcggtggtggaggtttacttc

SEQ ID NO: 562866 - DNA, 120 bp, Artificial Sequence
  ENSG00000169851_22 (sequence is synthesized)
cctgagaacaacatcccgggcgagagggtggccacggtgctggcgacagacgcagacagcggtaagaacgccgagatcgcctactcgctggactcctctgtgatggggatctttgccatc

SEQ ID NO: 562867 - DNA, 120 bp, Artificial Sequence
  ENSG00000169851_23 (sequence is synthesized)
gatcccgattctggggacatcctggtcaataccgtgctggaccgcgagcagactgacaggtatgagtttaaagttaacgccaaagacaaaggcatccccgtgctgcagggcagcactacg

SEQ ID NO: 562868 - DNA, 120 bp, Artificial Sequence
  ENSG00000169851_24 (sequence is synthesized)
gtgattgtgcaggtggctgataaaaatgacaatgaccctaagtttatgcaggacgtcttcaccttttatgtgaaagaaaacttgcagcccaacagccctgtggggatggtcaccgtgatg

SEQ ID NO: 562869 - DNA, 120 bp, Artificial Sequence
  ENSG00000169851_25 (sequence is synthesized)
gatgctgacaaggggcggaatgcagagatgagcctgtacatagaggagaacaataacattttttctattgaaaatgacacggggaccatttactccacaatgtcttttgaccgggaacat

SEQ ID NO: 562870 - DNA, 120 bp, Artificial Sequence
  ENSG00000169851_26 (sequence is synthesized)
atcctcccagatctgccacagctacagtctcgctttttgtgatggatgaaaatgacaatgctcccacagttacccttcccaaaaacatttcctacactttactgccaccttcgagtaatg

SEQ ID NO: 562871 - DNA, 120 bp, Artificial Sequence
  ENSG00000169851_27 (sequence is synthesized)
tcaggacagtagtagctacagtgttggcaacagacagtgatgatggcatcaatgcagacctgaactacagcattgtgggaggaaatcccttcaagctgtttgaaattgatcccactagtg

SEQ ID NO: 562872 - DNA, 120 bp, Artificial Sequence
  ENSG00000169851_28 (sequence is synthesized)
gtgtggtttccttagtgggaaaactcacccaaaagcattatggcttgcacaggttggtggtgcaagtgaatgacagtgggcagccttcccagtccaccacgactctggtgcacgtgtttg

SEQ ID NO: 562873 - DNA, 120 bp, Artificial Sequence
  ENSG00000169851_29 (sequence is synthesized)
tcaatgaaagtgtttctaatgcaactgcgattgactcccagatagctagaagtttgcacatcccactcacccaggatatagctggtgacccaagctatgaaattagcaaacagagactca

SEQ ID NO: 562874 - DNA, 120 bp, Artificial Sequence
  ENSG00000169851_30 (sequence is synthesized)
gtattgtcattggcgtggttgctggcattatgacggtgattctaatcatcttaattgtagtgatggcaaggtactgcaggtccaaaaataaaaatggctatgaagccggcaaaaaagatc

SEQ ID NO: 562875 - DNA, 120 bp, Artificial Sequence
  ENSG00000169851_31 (sequence is synthesized)
acgaagacttttttacaccccaacagcatgacaaatctaaaaagcctaaaaaggacaagaaaaacaaaaaatctaagcagcctctctacagcagcattgtcactgtggaggcttctaagc

SEQ ID NO: 562876 - DNA, 120 bp, Artificial Sequence
  ENSG00000169851_32 (sequence is synthesized)
caaatggacagaggtatgatagtgtcaatgagaagctgtcagacagcccaagcatggggcgatacaggtccgttaatggtgggcccggcagtcctgacctggcaaggcattacaaatcta

SEQ ID NO: 562877 - DNA, 120 bp, Artificial Sequence
  ENSG00000169851_33 (sequence is synthesized)
gttccccattgcctactgttcagcttcatccccagtcaccaactgcaggaaaaaaacaccaggccgtacaagatctaccaccagccaacacatttgtgggagcaggagacaacatttcaa

SEQ ID NO: 562878 - DNA, 120 bp, Artificial Sequence
  ENSG00000169851_34 (sequence is synthesized)
ttggatcagatcactgctctgagtacagctgtcaaaccaataacaagtacagcaaacagatgcgtctacatccatacattactgtgtttggctgaattccactctaatatgatgctccat

SEQ ID NO: 562879 - DNA, 120 bp, Artificial Sequence
  ENSG00000169851_35 (sequence is synthesized)
tatgcaccatactgtgatgacctttctactccgaaacctgctggagcctgcccttggccgtggggtgtcagccaatcactgcttgttccacttgttgtacattttatttttgagtctttt

SEQ ID NO: 562880 - DNA, 120 bp, Artificial Sequence
  ENSG00000169851_36 (sequence is synthesized)
tctttctcatatacagaaaaatagtatgaaaataaaataaatgtatgaaacagtattaatgcagaaatgtgctactaatggatgtctgagtcaccagaaattccattcttaaagaggcgg

SEQ ID NO: 562881 - DNA, 120 bp, Artificial Sequence
  ENSG00000169851_37 (sequence is synthesized)
ttagcacctattagacgtaacagtgatgtcttttaaaaaatccaaaagcatattgcaacaataagtttgagactttgtgtgaacaaagggaaattcagcctcttatgtctttgtctttaa

SEQ ID NO: 562882 - DNA, 120 bp, Artificial Sequence
  ENSG00000169851_38 (sequence is synthesized)
tacattaaatactgattttgaataaaaatctaaattgatcaatatttttaagtgccatgtaatcacaggcctgtcagatagttttgttagagtgaaggataatatcttttgctcattctg

SEQ ID NO: 562883 - DNA, 84 bp, Artificial Sequence
  ENSG00000169851_39 (sequence is synthesized)
gttttgttagagtgaaggataatatcttttgctcattctgtgtgtgtatttttaaatgctgttttgtgtgtttgtgtgtgtttc

SEQ ID NO: 562884 - DNA, 120 bp, Artificial Sequence
  ENSG00000169851_40 (sequence is synthesized)
gtctgtaaaacaagtttgagaaattaattttttatatttataatgggcactgtaatggattgatttttttcttaatcttgaaatagtgaccaagatatttatatcatttttgaatttatt

SEQ ID NO: 562885 - DNA, 120 bp, Artificial Sequence
  ENSG00000169851_41 (sequence is synthesized)
aattctttaagaaaatttagaacttttcactttcatttgctaaagtcactgtagtcacattcggaaggaatatgtggctttctgttctttatggactacgtttatcagaagtccatattt

SEQ ID NO: 562886 - DNA, 120 bp, Artificial Sequence
  ENSG00000169851_42 (sequence is synthesized)
attaaacatcctatttgatgtcagataacgtaaactcaagcagcttcaaagagttcagcatgttacatattattgagagagcaagtgactgaattttagttgtataagcaatattatagg

SEQ ID NO: 562887 - DNA, 120 bp, Artificial Sequence
  ENSG00000169851_43 (sequence is synthesized)
taggtcagggagtcctctggatggcccctctacctctttatgtttgtatgtttatgtctttatttgttatgtcgtatgtgtttatgagcctagaaaatagcctagaaaataagtgttcca

SEQ ID NO: 562888 - DNA, 120 bp, Artificial Sequence
  ENSG00000169851_44 (sequence is synthesized)
tatgtaaagtttaataattttgtaatacatttaccacgctgtctgccctattaaaattttccacaaatttgggaactaagaatgccaaattctcaagattttttggtgaatcactctcaa

SEQ ID NO: 562889 - DNA, 120 bp, Artificial Sequence
  ENSG00000169851_45 (sequence is synthesized)
tataatagccacttaagaaaaataaataaataaatattggaaggccattggaagtgataggaaatgcactgtaacccctgtgaatctctaatgtatacctgaggattttcattttataag

SEQ ID NO: 562890 - DNA, 120 bp, Artificial Sequence
  ENSG00000169851_46 (sequence is synthesized)
ctgtgtatttaatcttgcaaaagggaaattttcagaaacatcactgcaagtacagtaagatttctgtataaaacttaattatcctcaacctctcattttgttttgaacacaaggactagt

SEQ ID NO: 562891 - DNA, 120 bp, Artificial Sequence
  ENSG00000169851_47 (sequence is synthesized)
gtaagaaactggtgaaaggaaccttaccaatctctgcttcttgaaaatgctgttttcctcattccaaatagtaaacgtcactagatattcttcaaatgtaaatcccgtaacaagtcatat

SEQ ID NO: 562892 - DNA, 120 bp, Artificial Sequence
  ENSG00000169851_48 (sequence is synthesized)
caactcaaaaacaaattacagaaaaatcaaagtctagaattttgggttaatttaatgtgcaatcacatagaagtgatatttatgaataccttcacaaagaagaacattgtaagttagcat

SEQ ID NO: 562893 - DNA, 120 bp, Artificial Sequence
  ENSG00000169851_49 (sequence is synthesized)
tttctaaacaggttgcaacacactcttgaggtatgaatcaatttattgagtctctaccacaattagaaaagtacaaaataaaatagaaaaattcagagtacatcacccatagtaagagta

SEQ ID NO: 562894 - DNA, 120 bp, Artificial Sequence
  ENSG00000169851_50 (sequence is synthesized)
aatattgacttgtgcaatttttgtttcagttgtgtttgtgtggaggtgtgtgtttctgttctcggttgctatgttaaaaatatatcttattgtggaagcagttgaaaaggtttgagaacc

SEQ ID NO: 562895 - DNA, 120 bp, Artificial Sequence
  ENSG00000169851_51 (sequence is synthesized)
agcactctagactggggtaggaagttatggctatttactattatgactggaaaaacatagtaaatcaaagcaagaaaaaaaaatgctgacactctcaaggattttagtgtactattaagc

SEQ ID NO: 562896 - DNA, 120 bp, Artificial Sequence
  ENSG00000169851_52 (sequence is synthesized)
tgaatcagaatgatcaacagcatactgattacagcaacatttatcaacagtaaaaagcttttgagaagtctattaccattcctctactattcttgtgattaaaaacaaaaaatctttgaa

SEQ ID NO: 562897 - DNA, 120 bp, Artificial Sequence
  ENSG00000169851_53 (sequence is synthesized)
tcaggggtcactgcagagttgctatgacagcgggctggaggagtcagaaacaccaagcagtaagagttcatcagggccaagactgggtgcgcttccactcccagaggacaactatgaaag

SEQ ID NO: 562898 - DNA, 120 bp, Artificial Sequence
  ENSG00000169851_54 (sequence is synthesized)
gaccacgccggatggcagtgttggtgaggcagagcatatggaaaatggtgttgctgccatcactacctttcccttcctcccctttcctcatggcaagacgcatggaagaagagtgctgtt

SEQ ID NO: 562899 - DNA, 120 bp, Artificial Sequence
  ENSG00000169851_55 (sequence is synthesized)
tcaaggcctcttccagatgtagccctgactgggaagtgcactcgtgagtgtgatgagtatggccactcagactcctgctggatgccggtccgcacttctccggagaggaagaagagccag

SEQ ID NO: 562900 - DNA, 120 bp, Artificial Sequence
  ENSG00000169851_56 (sequence is synthesized)
cctaaactgtccactttcatgcctgttgatgaacgaggaagccaggaaaagctggccaatggggaggccgccatcatgggtgaccgcaacagaaacctcctgaacaaaaagttgacctca

SEQ ID NO: 562901 - DNA, 120 bp, Artificial Sequence
  ENSG00000169851_57 (sequence is synthesized)
tcctatgagaccttcagtgcagctagtttcagcaaaaatgaggaagccaaccctgaggatattccccttacaaaaacaggggaatataagccatctcctgtcaatactctcactagaaga

SEQ ID NO: 562902 - DNA, 120 bp, Artificial Sequence
  ENSG00000169851_58 (sequence is synthesized)
gaagtttacctgtaggctataaaggagcaacagcaaagttctttacatgtatgaaaaggagaataaggggcaaaaaccttacaaagcaaaacgtttaatcacaaagagggggctaccaaa

SEQ ID NO: 562903 - DNA, 120 bp, Artificial Sequence
  ENSG00000169851_59 (sequence is synthesized)
gattctactgtacaatgtagaaaccatccttgttacttgcatgtctaaccccttcactgattcccaacactcactttctcttccccacccctctccaaaaaaaaaaaaacaaaaagaaaa

SEQ ID NO: 562904 - DNA, 120 bp, Artificial Sequence
  ENSG00000169851_60 (sequence is synthesized)
tgcaagtttctttcacagtaactgtacgaagcctgattagcagaacacaacacaccctcattatccctaagctgaagcatgattttagtcactttgattttgttcgagtgtcatctggct

SEQ ID NO: 562905 - DNA, 120 bp, Artificial Sequence
  ENSG00000169851_61 (sequence is synthesized)
ggtcaaaaataagcaggacagataaaatgtatttcagacataccatcagaaaatggtttatcaccatcaaaggcaatcctttgaaagtgatagagtccctctaaaggtacagtccttaga

SEQ ID NO: 562906 - DNA, 120 bp, Artificial Sequence
  ENSG00000169851_62 (sequence is synthesized)
tccaacaaagactaagagaaaaacaatactcagtgggtgattgcagtcctaaattgtcatatgttgttattttcaggtcaagagcatcaacttcaattccatacattcaccaaatattct

SEQ ID NO: 562907 - DNA, 120 bp, Artificial Sequence
  ENSG00000169851_63 (sequence is synthesized)
cagtatacacacagtcttgattacatgtatcaatttcaccagttatgacttctaaaaattatatatattttttcagaacaagaccactattattaactaacttgaacaattgtatcatcc

SEQ ID NO: 562908 - DNA, 120 bp, Artificial Sequence
  ENSG00000169851_64 (sequence is synthesized)
aaaggccaaagatcatatggcagatcagggaagtcatgaagttgatttggtcttgacgtggaaaaccattaaacaacaaaagcaactgaacccatgtatgcacagaaacaatcaaacact

SEQ ID NO: 562909 - DNA, 120 bp, Artificial Sequence
  ENSG00000169851_65 (sequence is synthesized)
agttcattttatagtgcccaggaaaatgttccttcttttaaaatggattttatttgaaagcgcagaaaatgaaaactagtgagatatatttttggtattataataggcaattggttgagg

SEQ ID NO: 562910 - DNA, 120 bp, Artificial Sequence
  ENSG00000169851_66 (sequence is synthesized)
ttcaagtttagtttcaggtaatattatcagggaagattccatgttttaaaatagtatttatggatcatgggtaggttaagaaagatgcattggcatatagtcttgatagttaagtccacg

SEQ ID NO: 562911 - DNA, 120 bp, Artificial Sequence
  ENSG00000169851_67 (sequence is synthesized)
attatcattttagaatccaggctatgcttgctgctctttttatccacattttaaattacaattgcattttttacttgttcagtgcacactttgatgcaccacaagtgcattaattttgaa

SEQ ID NO: 562912 - DNA, 120 bp, Artificial Sequence
  ENSG00000169851_68 (sequence is synthesized)
tcgtgtgcaatatagaaatattttgagactcacaacattgaaacaaggtgacaccctagttgactttatcactaatgtgatttgaacattatttaaacaaatctagactgaacatgaaag

SEQ ID NO: 562913 - DNA, 120 bp, Artificial Sequence
  ENSG00000169851_69 (sequence is synthesized)
aaaggagttttgggcagtgacatttttcacagaatgtatatctcaaaggtgaaagcagagtttttccagtgcaataaaaagaaacagaatatgcagattttgagctactcactctataga

SEQ ID NO: 562914 - DNA, 120 bp, Artificial Sequence
  ENSG00000169851_70 (sequence is synthesized)
ggataacctaacacggctgaaaattgagctgggacattcagacgaaagtgacaatccatggacagaatagggaataacaggtgtgaagagaacaaacttatcactgaatgtttgcaagct

SEQ ID NO: 562915 - DNA, 120 bp, Artificial Sequence
  ENSG00000169851_71 (sequence is synthesized)
ggttaaggcatagccttgatggctctctagcaaactgtagaaacaatgtagctttgggtagtttcatgctttgcagaatttcttagactataaagtgacacagcctggaatataggttga

SEQ ID NO: 562916 - DNA, 120 bp, Artificial Sequence
  ENSG00000169851_72 (sequence is synthesized)
taattcactataggtcttcaaaatacttatctttgaaaaccgcttctctgtttggtggggtacaatttgggggtcatttccttatgctctttcttaaatggagttttcattttgatgtta

SEQ ID NO: 562917 - DNA, 120 bp, Artificial Sequence
  ENSG00000169851_73 (sequence is synthesized)
gtttatgtataataggtaggatgcaaaaagatatgtaattgaaacaaaaaacattggactaaaatatcagtaattgaacatgtttatgtttgattattatttacactatggaaagatgca

SEQ ID NO: 562918 - DNA, 120 bp, Artificial Sequence
  ENSG00000169851_74 (sequence is synthesized)
attctagtactttgttaggaaactgcattaaagcagttctgccttgtataatctgtaagtacctattaagacaaaatacttctaaagatacttatgaaatgtatacacattttttcttgc

SEQ ID NO: 562919 - DNA, 120 bp, Artificial Sequence
  ENSG00000169851_75 (sequence is synthesized)
acgttacaaagaaaatactcaattgcataacacggatgtttgacaaacttttttttttttaatgcatttctttctttcatgagacattgaaaccactgatagctcatttcaccctatctt

SEQ ID NO: 562920 - DNA, 120 bp, Artificial Sequence
  ENSG00000169851_76 (sequence is synthesized)
aaacccttctcttgtctataaaactaatacgggtcacaccggaccttcggattaattggatccacattccccaatgatgtttgcaccccattcaagatagccatgccattgtcatttaac

SEQ ID NO: 562921 - DNA, 120 bp, Artificial Sequence
  ENSG00000169851_77 (sequence is synthesized)
tcgtgaacctctctttaaaactaaaatggatgtgaaagaataaaattcagtgtactgtaagtattcacagtaattctagtagaattagctgtcataacatgtttattatataatgagctg

SEQ ID NO: 562922 - DNA, 120 bp, Artificial Sequence
  ENSG00000169851_78 (sequence is synthesized)
gctggcatgacacagaaatatattttgtgtttgtatgacttttattttaaataggttaaatctggtgccactccatatatagagtgcttttgaaaaaaaatcaataaaaagaaacaaaaa

SEQ ID NO: 562923 - DNA, 120 bp, Artificial Sequence
  ENSG00000169851_79 (sequence is synthesized)
aaatgagtgaatgcaaaataagcaactgtgccttttatacctgttgttacggtaaaaaaacggttgttgggtttggacaatgaggggaaatgggctattcccaacttttttgatcctgta

SEQ ID NO: 562924 - DNA, 120 bp, Artificial Sequence
  ENSG00000169851_80 (sequence is synthesized)
tatttgtccatgtttattttctgaacataataaataatatattaaaaatttgccttctgacaaactcagataatggaccagtcttaaatattgttatgtcataaagcaaagttaaggcat

SEQ ID NO: 562925 - DNA, 120 bp, Artificial Sequence
  ENSG00000169851_81 (sequence is synthesized)
taatatgggctgcttaaatctgactagaagatgaaagcgtttattgtaagtgtaacacagagatactatcaggagtgaaatcagtccatttggcaaggtaaaatactgatttagagtttt

SEQ ID NO: 562926 - DNA, 120 bp, Artificial Sequence
  ENSG00000169851_82 (sequence is synthesized)
attctttatttcttttttgttgtgtttctttcagctatggtttcattttggttgtacagtatataaaccatatttgttttctgtacacaagactctcaagtgaattttgcatgcattata

SEQ ID NO: 562927 - DNA, 120 bp, Artificial Sequence
  ENSG00000169851_83 (sequence is synthesized)
cattaggacacatttataaattaatgagtaactatataaatttatgtgtattaaaacgtctgtagcttcaatctaaaatctactgctctttctgaatctccagatatcatttctgtatgg

SEQ ID NO: 562928 - DNA, 120 bp, Artificial Sequence
  ENSG00000169851_84 (sequence is synthesized)
tttctgactggcctgctgcctgagtttcagaaaacaagggaggcattatttttatgggaggaggaactaagatggtactgaggatgtctgactgaaacactaccctaggaagctgtcttg

SEQ ID NO: 562929 - DNA, 120 bp, Artificial Sequence
  ENSG00000169851_85 (sequence is synthesized)
taggaaaatagaataaaacacacagaccagaagaaattgtcaagaagcaaacagccatccaaaaacagtcatgagaaatctaaagacctaaataatcttaggtatatgctctcagtgaga

SEQ ID NO: 562930 - DNA, 120 bp, Artificial Sequence
  ENSG00000169851_86 (sequence is synthesized)
taaataaataaataaataataaaaagtgagcatgatcatgaatatagtaaatcttgtgagttgtgacctaggtgaaggtgtaatgataacatctggaggaagcatcatttgttcagctac

SEQ ID NO: 562931 - DNA, 120 bp, Artificial Sequence
  ENSG00000169851_87 (sequence is synthesized)
taatgataacatctggaggaagcatcatttgttcagctacctagggtttactttcagacttttcctacagtttaaagcacttgcgttcagtgtggtacgatctgtttgtaatgttaatca

SEQ ID NO: 562932 - DNA, 120 bp, Artificial Sequence
  ENSG00000169851_88 (sequence is synthesized)
ttgactattgttctgctacttggatgttgatagtgaagcagagaacaatttatcatcgtttattatgagtcactatgcacgcaactatgcttaacatggcgaaatgtattaaacactcgt

SEQ ID NO: 562933 - DNA, 120 bp, Artificial Sequence
  ENSG00000169851_89 (sequence is synthesized)
ccaactatttatgaaatactttgcataatttaatttgcttttgtacagttttatgtaaataaattgcttgtcatttttgtctctgcaaattaaaatataacatggtcaaatggtttcaca

SEQ ID NO: 562934 - DNA, 120 bp, Artificial Sequence
  ENSG00000169851_90 (sequence is synthesized)
ggagggtgctattcactttgaatttcttcatagtaatatatagagagatggattatagagactgtctctaagccagaactcaactaattaaaatgtgtgctatagtggcttctcagctgt

SEQ ID NO: 562935 - DNA, 120 bp, Artificial Sequence
  ENSG00000169851_91 (sequence is synthesized)
tcctagagaagaattggcagtgctgtgttgctgccatcactacctttcccttcctcccctttcctcatggcaagacgcatggaagaagagtgctgttaaggcctctccattaatcaacag

SEQ ID NO: 562936 - DNA, 120 bp, Artificial Sequence
  ENSG00000169851_92 (sequence is synthesized)
caaacaggtaagatgtatcccaaatatatttaaatatcccagggagggctaataactctgagacagattatcttctgtaaagttttgtcttctcgtttttaaagttattaaaattttaac

SEQ ID NO: 562937 - DNA, 120 bp, Artificial Sequence
  ENSG00000169851_93 (sequence is synthesized)
agtaggaatttaatgttaatttttgcaccattaatttagcaaaggccatctacaagaggtataccactgtattttgcaaattagaattaaggttcactaaactactgaaagaagtattca

SEQ ID NO: 562938 - DNA, 120 bp, Artificial Sequence
  ENSG00000169851_94 (sequence is synthesized)
gagtaggcagtgtttggcagttctctttgcacttgacatccctaattcatactacatttttttgtttccagaataaatatgtgtgtattacttagatggttagttttcacctgaaattat

SEQ ID NO: 562939 - DNA, 120 bp, Artificial Sequence
  ENSG00000169851_95 (sequence is synthesized)
tttcttctgtggcaactaagtggataattacatccagagaaaaagtttctaaagttactactggtgtctatgcaaattggattccatagaagttttagctatgttatttacaatgcagga

SEQ ID NO: 562940 - DNA, 120 bp, Artificial Sequence
  ENSG00000169851_96 (sequence is synthesized)
ttttacagataaatagatgctgattcatgcagatgtagtactaagtctgagatattgaaatactgactactttgatgaaactgctggtttaaaaatatttactgatatgcaaatgtcatg

SEQ ID NO: 562941 - DNA, 120 bp, Artificial Sequence
  ENSG00000169851_97 (sequence is synthesized)
caaaactccactttcaatcttttatatctataataatcgatacctataacaattagtgttctataatgatatgcaattaccatttgcattctttctgtttggtattaaaagtttgcaaac

SEQ ID NO: 562942 - DNA, 120 bp, Artificial Sequence
  ENSG00000169851_98 (sequence is synthesized)
taatcaacaggtggctgaggcaggaggaacgcttgaatccagaagttctagtccagcctggggaacatagtgagaacttatctccaaaaaaaatcagttttcttttttctaggggcctat

SEQ ID NO: 562943 - DNA, 120 bp, Artificial Sequence
  ENSG00000169851_99 (sequence is synthesized)
tctccaaaaaaaatcagttttcttttttctaggggcctatatagaattaaaataaatgtgaatacatttatttctgatatatttttggaaatattttgagacataatagtaccataagaa

SEQ ID NO: 562944 - DNA, 120 bp, Artificial Sequence
  ENSG00000169851_100 (sequence is synthesized)
cactgctctgagtacagctgtcaaaccaataacaagtacagcaaacagctggtgatggagaacaacgtgttaatcttggattccttctgtcagatagcacagaaataccacaagccattt

SEQ ID NO: 562945 - DNA, 120 bp, Artificial Sequence
  ENSG00000169855_0 (sequence is synthesized)
tcccggcaccccgagcccttcctccggagctgctgcttctactttggctgctatcgccgccgccgcgggtggcccgctgctgactgggctcgccgggagacggagaagcactttttggcc

SEQ ID NO: 562946 - DNA, 120 bp, Artificial Sequence
  ENSG00000169855_1 (sequence is synthesized)
ctccctcagcagctctcacaccccaactttgccgccgccgccgcgcctgccctcgcagcggcgctcggccgcacattgtgggggcgcacgccgggaggctccgcaagaccgtggaggcag

SEQ ID NO: 562947 - DNA, 120 bp, Artificial Sequence
  ENSG00000169855_2 (sequence is synthesized)
gaaacggcactactgcgcttctgcctcggctctttgttgttcgctttggatggttcttgaaagtgtctgagcctcctcggaaatcctggggccggagaagacaaaccttggaattcttcc

SEQ ID NO: 562948 - DNA, 120 bp, Artificial Sequence
  ENSG00000169855_3 (sequence is synthesized)
tctgcaaaagtctctgagatactgacaagcgtccggaaaggtcgacgagtaattgccctgaaaactcttggctaattgacccacgttgcttatattaagcctttgtgtgtggtgtgtggc

SEQ ID NO: 562949 - DNA, 120 bp, Artificial Sequence
  ENSG00000169855_4 (sequence is synthesized)
ttcatacatttggggaccctatttccactccctcctcttggcatgagactgtatacaggatccacccgaggacaatgattgcggagcccgctcacttttacctgtttggattaatatgtc

SEQ ID NO: 562950 - DNA, 120 bp, Artificial Sequence
  ENSG00000169855_5 (sequence is synthesized)
tctgttcaggctcccgtcttcgtcaggaagattttccacctcgcattgttgaacacccttcagacctgattgtctcaaaaggagaacctgcaactttgaactgcaaagctgaaggccgcc

SEQ ID NO: 562951 - DNA, 120 bp, Artificial Sequence
  ENSG00000169855_6 (sequence is synthesized)
ccacacccactattgaatggtacaaagggggagagagagtggagacagacaaagatgaccctcgctcacaccgaatgttgctgccgagtggatctttatttttcttacgtatagtacatg

SEQ ID NO: 562952 - DNA, 120 bp, Artificial Sequence
  ENSG00000169855_7 (sequence is synthesized)
gacggaaaagtagacctgatgaaggagtctatgtctgtgtagcaaggaattaccttggagaggctgtgagccacaatgcatcgctggaagtagccatacttcgggatgacttcagacaaa

SEQ ID NO: 562953 - DNA, 120 bp, Artificial Sequence
  ENSG00000169855_8 (sequence is synthesized)
acccttcggatgtcatggttgcagtaggagagcctgcagtaatggaatgccaacctccacgaggccatcctgagcccaccatttcatggaagaaagatggctctccactggatgataaag

SEQ ID NO: 562954 - DNA, 120 bp, Artificial Sequence
  ENSG00000169855_9 (sequence is synthesized)
atgaaagaataactatacgaggaggaaagctcatgatcacttacacccgtaaaagtgacgctggcaaatatgtttgtgttggtaccaatatggttggggaacgtgagagtgaagtagccg

SEQ ID NO: 562955 - DNA, 120 bp, Artificial Sequence
  ENSG00000169855_10 (sequence is synthesized)
agctgactgtcttagagagaccatcatttgtgaagagacccagtaacttggcagtaactgtggatgacagtgcagaatttaaatgtgaggcccgaggtgaccctgtacctacagtacgat

SEQ ID NO: 562956 - DNA, 120 bp, Artificial Sequence
  ENSG00000169855_11 (sequence is synthesized)
ggaggaaagatgatggagagctgcccaaatccagatatgaaatccgagatgatcataccttgaaaattaggaaggtgacagctggtgacatgggttcatacacttgtgttgcagaaaata

SEQ ID NO: 562957 - DNA, 120 bp, Artificial Sequence
  ENSG00000169855_12 (sequence is synthesized)
tggtgggcaaagctgaagcatctgctactctgactgttcaagttgggtctgaacctccacattttgttgtgaaaccccgtgaccaggttgttgctttgggacggactgtaacttttcagt

SEQ ID NO: 562958 - DNA, 120 bp, Artificial Sequence
  ENSG00000169855_13 (sequence is synthesized)
gtgaagcaaccggaaatcctcaaccagctattttctggaggagagaagggagtcagaatctacttttctcatatcaaccaccacagtcatccagccgattttcagtctcccagactggcg

SEQ ID NO: 562959 - DNA, 120 bp, Artificial Sequence
  ENSG00000169855_14 (sequence is synthesized)
acctcacaattactaatgtccagcgatctgatgttggttattacatctgccagactttaaatgttgctggaagcatcatcacaaaggcatatttggaagttacagatgtgattgcagatc

SEQ ID NO: 562960 - DNA, 120 bp, Artificial Sequence
  ENSG00000169855_15 (sequence is synthesized)
ggcctcccccagttattcgacaaggtcctgtgaatcagactgtagccgtggatggcactttcgtcctcagctgtgtggccacaggcagtccagtgcccaccattctgtggagaaaggatg

SEQ ID NO: 562961 - DNA, 120 bp, Artificial Sequence
  ENSG00000169855_16 (sequence is synthesized)
gagtcctcgtttcaacccaagactctcgaatcaaacagttggagaatggagtactgcagatccgatatgctaagctgggtgatactggtcggtacacctgcattgcatcaacccccagtg

SEQ ID NO: 562962 - DNA, 120 bp, Artificial Sequence
  ENSG00000169855_17 (sequence is synthesized)
gtgaagcaacatggagtgcttacattgaagttcaagaatttggagttccagttcagcctccaagacctactgacccaaatttaatccctagtgccccatcaaaacctgaagtgacagatg

SEQ ID NO: 562963 - DNA, 120 bp, Artificial Sequence
  ENSG00000169855_18 (sequence is synthesized)
tcagcagaaatacagtcacattatcgtggcaaccaaatttgaattcaggagcaactccaacatcttatattatagaagccttcagccatgcatctggtagcagctggcagaccgtagcag

SEQ ID NO: 562964 - DNA, 120 bp, Artificial Sequence
  ENSG00000169855_19 (sequence is synthesized)
agaatgtgaaaacagaaacatctgccattaaaggactcaaacctaatgcaatttaccttttccttgtgagggcagctaatgcatatggaattagtgatccaagccaaatatcagatccag

SEQ ID NO: 562965 - DNA, 120 bp, Artificial Sequence
  ENSG00000169855_20 (sequence is synthesized)
tgaaaacacaagatgtcctaccaacaagtcagggggtggaccacaagcaggtccagagagagctgggaaatgctgttctgcacctccacaaccccaccgtcctttcttcctcttccatcg

SEQ ID NO: 562966 - DNA, 120 bp, Artificial Sequence
  ENSG00000169855_21 (sequence is synthesized)
aagtgcactggacagtagatcaacagtctcagtatatacaaggatataaaattctctatcggccatctggagccaaccacggagaatcagactggttagtttttgaagtgaggacgccag

SEQ ID NO: 562967 - DNA, 120 bp, Artificial Sequence
  ENSG00000169855_22 (sequence is synthesized)
ccaaaaacagtgtggtaatccctgatctcagaaagggagtcaactatgaaattaaggctcgccctttttttaatgaatttcaaggagcagatagtgaaatcaagtttgccaaaaccctgg

SEQ ID NO: 562968 - DNA, 120 bp, Artificial Sequence
  ENSG00000169855_23 (sequence is synthesized)
cagccacctccagaagacactcaaaatggaatggtccaagagtataaggtttggtgtctgggcaatgaaactcgataccacatcaacaaaacagtggatggttccaccttttccgtggtc

SEQ ID NO: 562969 - DNA, 120 bp, Artificial Sequence
  ENSG00000169855_24 (sequence is synthesized)
attccctttcttgttcctggaatccgatacagtgtggaagtggcagccagcactggggctgggtctggggtaaagagtgagcctcagttcatccagctggatgcccatggaaaccctgtg

SEQ ID NO: 562970 - DNA, 120 bp, Artificial Sequence
  ENSG00000169855_25 (sequence is synthesized)
tcacctgaggaccaagtcagcctcgctcagcagatttcagatgtggtgaagcagccggccttcatagcaggtattggagcagcctgttggatcatcctcatggtcttcagcatctggctt

SEQ ID NO: 562971 - DNA, 120 bp, Artificial Sequence
  ENSG00000169855_26 (sequence is synthesized)
tatcgacaccgcaagaagagaaacggacttactagtacctacgcgggtatcagaaaagtaacttaccagagaggaggcgaagctgtcagcagtggagggaggcctggacttctcaacatc

SEQ ID NO: 562972 - DNA, 120 bp, Artificial Sequence
  ENSG00000169855_27 (sequence is synthesized)
agtgaacctgccgcgcagccatggctggcagacacgtggcctaatactggcaacaaccacaatgactgctccatcagctgctgcacggcaggcaatggaaacagcgacagcaacctcact

SEQ ID NO: 562973 - DNA, 120 bp, Artificial Sequence
  ENSG00000169855_28 (sequence is synthesized)
acctacagtcgcccagctgattgtatagcaaattataacaaccaactggataacaaacaaacaaatctgatgctccctgagtcaactgtttatggtgatgtggaccttagtaacaaaatc

SEQ ID NO: 562974 - DNA, 120 bp, Artificial Sequence
  ENSG00000169855_29 (sequence is synthesized)
aatgagatgaaaaccttcaatagcccaaatctgaaggatgggcgttttgtcaatccatcagggcagcctactccttacgccaccactcagctcatccagtcaaacctcagcaacaacatg

SEQ ID NO: 562975 - DNA, 120 bp, Artificial Sequence
  ENSG00000169855_30 (sequence is synthesized)
aacaatggcagcggggactctggcgagaagcactggaaaccactgggacagcagaaacaagaagtggcaccagttcagtacaacatcgtggagcaaaacaagctgaacaaagattatcga

SEQ ID NO: 562976 - DNA, 120 bp, Artificial Sequence
  ENSG00000169855_31 (sequence is synthesized)
gcaaatgacacagttcctccaactatcccatacaaccaatcatacgaccagaacacaggaggatcctacaacagctcagaccggggcagtagtacatctgggagtcaggggcacaagaaa

SEQ ID NO: 562977 - DNA, 120 bp, Artificial Sequence
  ENSG00000169855_32 (sequence is synthesized)
ggggcaagaacacccaaggtaccaaaacagggtggcatgaactgggcagacctgcttcctcctcccccagcacatcctcctccacacagcaatagcgaagagtacaacatttctgtagat

SEQ ID NO: 562978 - DNA, 120 bp, Artificial Sequence
  ENSG00000169855_33 (sequence is synthesized)
gaaagctatgaccaagaaatgccatgtcccgtgccaccagcaaggatgtatttgcaacaagatgaattagaagaggaggaagatgaacgaggccccactccccctgttcggggagcagct

SEQ ID NO: 562979 - DNA, 120 bp, Artificial Sequence
  ENSG00000169855_34 (sequence is synthesized)
tcttctccagctgccgtgtcctatagccatcagtccactgccactctgactccctccccacaggaagaactccagcccatgttacaggattgtccagaggagactggccacatgcagcac

SEQ ID NO: 562980 - DNA, 120 bp, Artificial Sequence
  ENSG00000169855_35 (sequence is synthesized)
cagcccgacaggagacggcagcctgtgagtcctcctccaccaccacggccgatctcccctccacatacctatggctacatttcaggacccctggtctcagatatggatacggatgcgcca

SEQ ID NO: 562981 - DNA, 120 bp, Artificial Sequence
  ENSG00000169855_36 (sequence is synthesized)
gaagaggaagaagacgaagccgacatggaggtagccaagatgcaaaccagaaggcttttgttacgtgggcttgagcagacacctgcctccagtgttggggacctggagagctctgtcacg

SEQ ID NO: 562982 - DNA, 120 bp, Artificial Sequence
  ENSG00000169855_37 (sequence is synthesized)
gggtccatgatcaacggctggggctcagcctcagaggaggacaacatttccagcggacgctccagtgttagttcttcggacggctcctttttcactgatgctgactttgcccaggcagtc

SEQ ID NO: 562983 - DNA, 120 bp, Artificial Sequence
  ENSG00000169855_38 (sequence is synthesized)
gcagcagcggcagagtatgctggtctgaaagtagcacgacggcaaatgcaggatgctgctggccgtcgacattttcatgcgtctcagtgccctaggcccacaagtcccgtgtctacagac

SEQ ID NO: 562984 - DNA, 120 bp, Artificial Sequence
  ENSG00000169855_39 (sequence is synthesized)
agcaacatgagtgccgccgtaatgcagaaaaccagaccagccaagaaactgaaacaccagccaggacatctgcgcagagaaacctacacagatgatcttccaccacctcctgtgccgcca

SEQ ID NO: 562985 - DNA, 120 bp, Artificial Sequence
  ENSG00000169855_40 (sequence is synthesized)
cctgctataaagtcacctactgcccaatccaagacacagctggaagtacgacctgtagtggtgccaaaactcccttctatggatgcaagaacagacagatcatcagacagaaaaggaagc

SEQ ID NO: 562986 - DNA, 120 bp, Artificial Sequence
  ENSG00000169855_41 (sequence is synthesized)
agttacaaggggagagaagtgttggatggaagacaggttgttgacatgcgaacaaatccaggtgatcccagagaagcacaggaacagcaaaatgacgggaaaggacgtggaaacaaggca

SEQ ID NO: 562987 - DNA, 120 bp, Artificial Sequence
  ENSG00000169855_42 (sequence is synthesized)
gcaaaacgagaccttccaccagcaaagactcatctcatccaagaggatattctaccttattgtagacctacttttccaacatcaaataatcccagagatcccagttcctcaagctcaatg

SEQ ID NO: 562988 - DNA, 120 bp, Artificial Sequence
  ENSG00000169855_43 (sequence is synthesized)
tcatcaagaggatcaggaagcagacaaagagaacaagcaaatgtaggtcgaagaaatattgcagaaatgcaggtacttggaggatatgaaagaggagaagataataatgaagaattagag

SEQ ID NO: 562989 - DNA, 120 bp, Artificial Sequence
  ENSG00000169855_44 (sequence is synthesized)
gaaactgaaagctgaagacaaccaagaggcttatgagatctaatgtgaaaatcatcactcaagatgcctcctgtcagatgacacatgacgccagataaaatgttcagtgcaatcagagtg

SEQ ID NO: 562990 - DNA, 120 bp, Artificial Sequence
  ENSG00000169855_45 (sequence is synthesized)
tacaaattgtcgtttttattcctcttattgggatatcattttaaaaactttattgggtttttattgttgttgtttgatccctaaccctacaaagagccttcctattcccctcgctgttgg

SEQ ID NO: 562991 - DNA, 120 bp, Artificial Sequence
  ENSG00000169855_46 (sequence is synthesized)
gcattaatagtaatacagataacgggtttgaaagaattctctactgaagaaggattgaatttttccagggtgctgatacagagaagaaacccgacttcactctctccctatttccccact

SEQ ID NO: 562992 - DNA, 120 bp, Artificial Sequence
  ENSG00000169855_47 (sequence is synthesized)
cttaggtttaaaagtctgtcacctttcgcttggtttaaactcggaaaggtctcagtgcacagcaaagttgcagggctgcgtctgcactacggagcctctagattgctgaaaacagtctta

SEQ ID NO: 562993 - DNA, 120 bp, Artificial Sequence
  ENSG00000169855_48 (sequence is synthesized)
tggaaggataacacattgtctgtcactggctggttgtaatgcaaggaagggacaaagatgaaatggaaacatgttccttttttggtcatgatatcactcctcagcttatccccaaatcac

SEQ ID NO: 562994 - DNA, 120 bp, Artificial Sequence
  ENSG00000169855_49 (sequence is synthesized)
ttataccttacttccagcaagcaaagtgctttgacttcttgcttcagtcatcagccagcaagagggaacaaaactgttcttttgcattttgccgctgagatatggcattgcactgcttat

SEQ ID NO: 562995 - DNA, 120 bp, Artificial Sequence
  ENSG00000169855_50 (sequence is synthesized)
atgccaagctaatttatagcaagatattgatcaaatatagaaagttgatattcaacctcacaagggctctcaaagtataatctttctatagccaactgctaatgcaaattaaaacatatt

SEQ ID NO: 562996 - DNA, 120 bp, Artificial Sequence
  ENSG00000169855_51 (sequence is synthesized)
tcattttaacatgatttcaaaatcagtttttcatactaccctttgctggaagaaactaaaaatatagcaaatgcagaaccacaaacaattcgaatggggtagaaacattgtaaatattta

SEQ ID NO: 562997 - DNA, 120 bp, Artificial Sequence
  ENSG00000169855_52 (sequence is synthesized)
ctctttgcaaaccctggtggtattttattttggcttcatttcaatcattgaagtatattcttattggaaatgtacttttggataagtagggctaagccagttggatctctggttgtctag

SEQ ID NO: 562998 - DNA, 120 bp, Artificial Sequence
  ENSG00000169855_53 (sequence is synthesized)
tcattgtcataagtaaacctagtaaaaccttgttctatttttcaatcatcaaaaagtaattataaatacgtattacaaacaagtggatgtttttaatgaccaattgagtaagaacatccc

SEQ ID NO: 562999 - DNA, 120 bp, Artificial Sequence
  ENSG00000169855_54 (sequence is synthesized)
tgtcttaactggcctaaatttcttctggtagtgtcagttcaactttcagaagtgccacttaaggaagtttgatttttgtttttgtaatgcactgtttttaatctctctctcttttttttt

SEQ ID NO: 563000 - DNA, 120 bp, Artificial Sequence
  ENSG00000169855_55 (sequence is synthesized)
ttttttttggttttaaaagcacaatcactaaactttatttgtaaaccattgtaactattaaccttttttgtcttattgaaaaaaaaaatgttgagaagcgtttttaacctgttttgttaa

SEQ ID NO: 563001 - DNA, 120 bp, Artificial Sequence
  ENSG00000169855_56 (sequence is synthesized)
tgctctatgtttgtatttggaatatttgaataatgacagatggtgaagtaacatgcatactttattgtgggccatgaaccaaatggttcttacttttcctggacttaaagaaaaaaagag

SEQ ID NO: 563002 - DNA, 120 bp, Artificial Sequence
  ENSG00000169855_57 (sequence is synthesized)
gtttaagtttgttgtggccaatgtcgaaacctacaagatttccttaaaatctctaatagaggcattacttgctttcaattgacaaatgatgccctctgactagtagatttctatgatcct

SEQ ID NO: 563003 - DNA, 120 bp, Artificial Sequence
  ENSG00000169855_58 (sequence is synthesized)
tttttgtcattttatgaatatcattgattttataattggtgctatttgaagaaaaaaatgtacatttattcatagatagataagtatcaggtctgaccccagtggaaaacaaagccaaac

SEQ ID NO: 563004 - DNA, 120 bp, Artificial Sequence
  ENSG00000169855_59 (sequence is synthesized)
aaaactgaaccacaaaaaaaaaggctggtgttcaccaaaaccaaacttgttcatttagataatttgaaaaagttccatagaaaaggcgtgcagtactaagggaacaatccatgtgattaa

SEQ ID NO: 563005 - DNA, 120 bp, Artificial Sequence
  ENSG00000169855_60 (sequence is synthesized)
tgttttcattatgttcatgtaagaagccccttatttttagccataattttgcatactgaaaatccaataatcagaaaagtaattttgtcacattatttattaaaaatgttctcaaataca

SEQ ID NO: 563006 - DNA, 120 bp, Artificial Sequence
  ENSG00000169855_61 (sequence is synthesized)
aattgagctggagaggaggcagcgtgagagcagaaacttcagacgccgctgatccgggaggagctggggtgagccgcggcggccgtctctcccacccgcagcagcatcctctctgccctt

SEQ ID NO: 563007 - DNA, 120 bp, Artificial Sequence
  ENSG00000169855_62 (sequence is synthesized)
ctctgccaccccggggagagccgggagctgcctctttacagcttccacgagccaggggtgcaggcagctgcccccaggaagtttgggcttctgcgtagtttaggggtgcctgcgagcgcc

SEQ ID NO: 563008 - DNA, 120 bp, Artificial Sequence
  ENSG00000169855_63 (sequence is synthesized)
ccagagggcgaggggccgagggcgatgttgggcgccgcgcggggctgggggcgcccagaagacgtgcgagtgtccgcggtcctgctgctgtctccagtaccctccgcatcccccaagtga

SEQ ID NO: 563009 - DNA, 120 bp, Artificial Sequence
  ENSG00000169855_64 (sequence is synthesized)
caagttgggtctggtaagttgacattttattggccatcttctcatcaccgtgtcactgtgactggaacttctcttcccctttccatccatacccttccatgtccttcaaccaatcagcct

SEQ ID NO: 563010 - DNA, 120 bp, Artificial Sequence
  ENSG00000169855_65 (sequence is synthesized)
atgaaattaaatgatgtgtgatctgcatccttttatttcttctctcctgaaataagtgataggattacatcttggttaagtactgttcgaatatatatatatcgtaagattaaacaaaaa

SEQ ID NO: 563011 - DNA, 120 bp, Artificial Sequence
  ENSG00000169855_66 (sequence is synthesized)
tacatgcagagaatgattttggttcttttggttcaaaatatatttgtgaattcatgtatatctctctgagtttttataactattgttctataacagtcattaaaagtcctgttggtgaat

SEQ ID NO: 563012 - DNA, 120 bp, Artificial Sequence
  ENSG00000169855_67 (sequence is synthesized)
gacgatgcagccagctcagtgagtggctggtcatttgaaagtagcacattgtgtctcattttagtattctgaatcagtgcatcatataaatgcattttgaataatgcatgtctgctactt

SEQ ID NO: 563013 - DNA, 120 bp, Artificial Sequence
  ENSG00000169855_68 (sequence is synthesized)
taattacttgtttaattatctttagtttgtttcaaagcctagaacaactgctgttgcttggatgattagaaaattgcttccagttgcagaaatctatttcctgttgtttcttctggcagt

SEQ ID NO: 563014 - DNA, 120 bp, Artificial Sequence
  ENSG00000169855_69 (sequence is synthesized)
tatttcagaactctgatttattgtttatactgcttgtaagcagatttggtatgtcagaccataataaagaacctggaatgcaactagacgacagattattactgactacattccagtggc

SEQ ID NO: 563015 - DNA, 120 bp, Artificial Sequence
  ENSG00000169855_70 (sequence is synthesized)
aatacattaaatattaggtgcctatgggatgtgatgtctaattattagttagaaatccaaatttggaacttagatgaattagggataggaaatgtttgtgtggtagatcagtatgtaaac

SEQ ID NO: 563016 - DNA, 120 bp, Artificial Sequence
  ENSG00000169855_71 (sequence is synthesized)
tatagtagataacttaactcagggagatcatgtagagtaaaaagaggactaaagtgaaagttcaaggaaaacctaacacttagagggagggaagatgaggcaagacaagtaaactcaaaa

SEQ ID NO: 563017 - DNA, 120 bp, Artificial Sequence
  ENSG00000169855_72 (sequence is synthesized)
atgaaagtgggttcaaatttcgactctgccaccgaactagatgaggaccaaggccaagttcctttacctcctatacctcagtgtcctcatccaaaaaatggaggtgagcataacagttat

SEQ ID NO: 563018 - DNA, 120 bp, Artificial Sequence
  ENSG00000169855_73 (sequence is synthesized)
ttcataccattgttatacaaacttagaaggataaaatctataaaacatttaaagtctggcaaatggtaagaatttaattaatggtcactatctttttgttttagtgtgagcacaggagct

SEQ ID NO: 563019 - DNA, 120 bp, Artificial Sequence
  ENSG00000169855_74 (sequence is synthesized)
tgaggaaataagtaaataaatgccaactttaccccaaaatgttcttttagaaagtagtttaatatgttagtccacataattataaaaacaagcttttcttctgccagctgacttagagga

SEQ ID NO: 563020 - DNA, 120 bp, Artificial Sequence
  ENSG00000169855_75 (sequence is synthesized)
ataccatgttttactctttgttttaagttatcagaaaagaatgtagcatgtgctttgaagcattgtgtgtataataatgagatctttcaagtagaaagtcacttaactgtgctttctttt

SEQ ID NO: 563021 - DNA, 120 bp, Artificial Sequence
  ENSG00000169855_76 (sequence is synthesized)
gaagcgtttgatttccatgcattgcagtatatttgttagaattttattagcttaatttaaattgttataatgttaatagtggcattaattactaactttcttgatattgaacatacattt

SEQ ID NO: 563022 - DNA, 120 bp, Artificial Sequence
  ENSG00000169855_77 (sequence is synthesized)
tgctaacagtatttgtttatttagaaaactagaaaagcaaaatgctataatagttgacttgcttcaatagtggcctacctcaaatgtgtaaatgtgaacattatattacttaatggcata

SEQ ID NO: 563023 - DNA, 120 bp, Artificial Sequence
  ENSG00000169855_78 (sequence is synthesized)
tagaaatttaattattcagaactaaaattcacatttaaaaatgaaattgttttccgtttggtttattttccattcagcattttctatttgtttattttgatccatgatttgaataatgtg

SEQ ID NO: 563024 - DNA, 120 bp, Artificial Sequence
  ENSG00000169855_79 (sequence is synthesized)
ttgatttgcccaggacttcgtgggattagcattttcttcctaaatctcatctcttttaaaacacctcagttctagacaaatcactatagctgaccaccctattcctagaaattaaacaat

SEQ ID NO: 563025 - DNA, 120 bp, Artificial Sequence
  ENSG00000169855_80 (sequence is synthesized)
atttacataaaggtaaaagattacattaactaacaacaggatttttcccaacatgtctttgtcactttggctgtataagtaattatcatgaatgattaatattcattttcatacttttga

SEQ ID NO: 563026 - DNA, 120 bp, Artificial Sequence
  ENSG00000169855_81 (sequence is synthesized)
acatttcgggggagaacatgagactagagttacacggtagaagaaataggaattgtcctgggatgtttggtggaaacaaggtatttaactttggttatggaaaattcaccgtggcagtga

SEQ ID NO: 563027 - DNA, 120 bp, Artificial Sequence
  ENSG00000169855_82 (sequence is synthesized)
ttcaccgtggcagtgaattagcattgagtgaggaacaacttaggtagtttgggactattcagacttggatgagatacatctttaaaacatatgcagctgggcacagtggctcacgcctgt

SEQ ID NO: 563028 - DNA, 82 bp, Artificial Sequence
  ENSG00000169855_83 (sequence is synthesized)
ctgaggcgggcggatcacctgaagtcacgagttcgagaccagcctggccaaggtggggcatggtggtgggtgcctgtaatcc

SEQ ID NO: 563029 - DNA, 120 bp, Artificial Sequence
  ENSG00000169855_84 (sequence is synthesized)
tggctggttgtaatgcaaggaagggacaaagatgaaatggaaacatgttccttttttggtcatgatatcactcctcagcttatccccaaatcacctgtttctggcccagcttattccagg

SEQ ID NO: 563030 - DNA, 120 bp, Artificial Sequence
  ENSG00000169855_85 (sequence is synthesized)
tcttctccaagcccatcactgaccttcctgctgaacttcaactggatgcaaaacaaacccacaaattctattttagagaattatggaagtcaaatgacgtatgtattcaggtcacagaaa

SEQ ID NO: 563031 - DNA, 120 bp, Artificial Sequence
  ENSG00000169855_86 (sequence is synthesized)
atgtatgatgcatggtgccatttaaaaaaatatttgctctgtgaagatctgctttctgcattatggaagaaaagcaattcatatttttcaacggcttgcattaaaatcctacactgtgta

SEQ ID NO: 563032 - DNA, 120 bp, Artificial Sequence
  ENSG00000169856_0 (sequence is synthesized)
aacagtaacagagccatggctcaagctggccagcggggcgggcaggcagcagacgcggcaggcgcgcgggccgcggcaggggagccggagacctcagaattttaagaaagagaggggcga

SEQ ID NO: 563033 - DNA, 120 bp, Artificial Sequence
  ENSG00000169856_1 (sequence is synthesized)
gaggtggccgaggcgggcgggctggggcactgcgctctcccaacggcgcggatcctctttggaaattaatattaaaaaaaaaaaagccgaggacgcagaggggaaggtggggggtaagag

SEQ ID NO: 563034 - DNA, 120 bp, Artificial Sequence
  ENSG00000169856_2 (sequence is synthesized)
ggaaggcgagacacacacacacacacacacgcacacgcacacacggacacacacacacggagagagagagagagagagacagagccccacagtgagaggaaggaaggcaacagtcgccag

SEQ ID NO: 563035 - DNA, 120 bp, Artificial Sequence
  ENSG00000169856_3 (sequence is synthesized)
cagccgatgtgaagaccggactccgtgcgcccctcgccgcctctgcctggccacatcgatgttgtgtccgccgcctgctcgcccggatcacgatgaacgcgcagctgaccatggaagcga

SEQ ID NO: 563036 - DNA, 120 bp, Artificial Sequence
  ENSG00000169856_4 (sequence is synthesized)
ccatggaagcgatcggcgagctgcacggggtgagccatgagccggtgcccgcccctgccgacctgctgggcggcagcccccacgcgcgcagctccgtggcgcaccgcggcagccacctgc

SEQ ID NO: 563037 - DNA, 120 bp, Artificial Sequence
  ENSG00000169856_5 (sequence is synthesized)
cgcgctccatgggcatggcgtccctgctggacggcggcagcggcggcggagattaccaccaccaccaccgggcccctgagcacagcctggccggccccctgcatcccaccatgaccatgg

SEQ ID NO: 563038 - DNA, 120 bp, Artificial Sequence
  ENSG00000169856_6 (sequence is synthesized)
cctgcgagactcccccaggtatgagcatgcccaccacctacaccaccttgacccctctgcagccgctgcctcccatctccacagtctcggacaagttcccccaccatcaccaccaccacc

SEQ ID NO: 563039 - DNA, 120 bp, Artificial Sequence
  ENSG00000169856_7 (sequence is synthesized)
atcaccaccaccacccgcaccaccaccagcgcctggcgggcaacgtgagcggtagcttcacgctcatgcgggatgagcgcgggctggcctccatgaataacctctataccccctaccaca

SEQ ID NO: 563040 - DNA, 120 bp, Artificial Sequence
  ENSG00000169856_8 (sequence is synthesized)
aggacgtggccggcatgggccagagcctctcgcccctctccagctccggtctgggcagcatccacaactcccagcaagggctcccccactatgcccacccgggggccgccatgcccaccg

SEQ ID NO: 563041 - DNA, 120 bp, Artificial Sequence
  ENSG00000169856_9 (sequence is synthesized)
acaagatgctcacccccaacggcttcgaagcccaccacccggccatgctcggccgccacggggagcagcacctcacgcccacctcggccggcatggtgcccatcaacggccttcctccgc

SEQ ID NO: 563042 - DNA, 120 bp, Artificial Sequence
  ENSG00000169856_10 (sequence is synthesized)
accatccccacgcccacctgaacgcccagggccacgggcaactcctgggcacagcccgggagcccaacccttcggtgaccggcgcgcaggtcagcaatggaagtaattcagggcagatgg

SEQ ID NO: 563043 - DNA, 120 bp, Artificial Sequence
  ENSG00000169856_11 (sequence is synthesized)
aagagatcaataccaaagaggtggcgcagcgtatcaccaccgagctcaagcgctacagcatcccacaggccatcttcgcgcagagggtgctctgccgctcccaggggaccctctcggacc

SEQ ID NO: 563044 - DNA, 120 bp, Artificial Sequence
  ENSG00000169856_12 (sequence is synthesized)
tgctgcgcaaccccaaaccctggagcaaactcaaatccggccgggagaccttccggaggatgtggaagtggctgcaggagccggagttccagcgcatgtccgcgctccgcttagcagcat

SEQ ID NO: 563045 - DNA, 120 bp, Artificial Sequence
  ENSG00000169856_13 (sequence is synthesized)
gcaaaaggaaagaacaagaacatgggaaggatagaggcaacacacccaaaaagcccaggttggtcttcacagatgtccagcgtcgaactctacatgcaatattcaaggaaaataagcgtc

SEQ ID NO: 563046 - DNA, 120 bp, Artificial Sequence
  ENSG00000169856_14 (sequence is synthesized)
catccaaagaattgcaaatcaccatttcccagcagctggggttggagctgagcactgtcagcaacttcttcatgaacgcaagaaggaggagtctggacaagtggcaggacgagggcagct

SEQ ID NO: 563047 - DNA, 120 bp, Artificial Sequence
  ENSG00000169856_15 (sequence is synthesized)
ccaattcaggcaactcatcttcttcatcaagcacttgtaccaaagcatgaaggaagaaccacaaactaaaacctcggtggaaaagctttaaattaaaaaaaatttttaaaagaccaggac

SEQ ID NO: 563048 - DNA, 120 bp, Artificial Sequence
  ENSG00000169856_16 (sequence is synthesized)
ctcaagatagcaggtttatacttagaaatatttgaagaaaaaaaagcgttatttatagtccaaagaaaccaaagacttagctcacctgcattctgactttgtttggagacacacacttca

SEQ ID NO: 563049 - DNA, 120 bp, Artificial Sequence
  ENSG00000169856_17 (sequence is synthesized)
gcagggcggcgacttggcaagacaaatgatgagcaggaaaacaccactggatctcacaccttcaatccatgaccatcctcgctgtgcttggctgtttagtggtttggagcatagtgattt

SEQ ID NO: 563050 - DNA, 120 bp, Artificial Sequence
  ENSG00000169856_18 (sequence is synthesized)
actttctcatctgttctaccatgccacgaaggtgtatggtgtctcagtactaccaccaccagtggttacagacttaggcagagctggtcttcagaaatggttgttctataggagtgcaac

SEQ ID NO: 563051 - DNA, 120 bp, Artificial Sequence
  ENSG00000169856_19 (sequence is synthesized)
caacatggtatggggttgtctgagttcattggattaggagtgtgattttgctcgtctagcctaacgtttgaacctgccaggcccgcaacctaaatgcagattcaaacccagcaaagaaaa

SEQ ID NO: 563052 - DNA, 120 bp, Artificial Sequence
  ENSG00000169856_20 (sequence is synthesized)
tttgaatgacacctaaaccagtgcattctctttgtttgttaaggaatgttcagatattttttaagaaatgaaacatgagtccatccattaaaaaaatcacctaggtaccaaagaacacac

SEQ ID NO: 563053 - DNA, 120 bp, Artificial Sequence
  ENSG00000169856_21 (sequence is synthesized)
ttaatattatagtgcaggtattttattgcaatgattttaataaccaaagctatttttacacaagatactatgaaaagttatacgtatgaactgatctagctgtaatacacatgccacata

SEQ ID NO: 563054 - DNA, 120 bp, Artificial Sequence
  ENSG00000169856_22 (sequence is synthesized)
gaatcatgactattatttatgactcttgaagcatttgaaatatgagttttcagaactggcaagaaagaatgtagcttcagggaagcaattaatatcatggcagagaggtcgatgcagtac

SEQ ID NO: 563055 - DNA, 120 bp, Artificial Sequence
  ENSG00000169856_23 (sequence is synthesized)
acgtgtacatccagatggcacactccttttcaggatccataaatgtcacttaagtagagagatagacatggttccataatctgttcctagctgagaaaacctgaggatctttccaaagta

SEQ ID NO: 563056 - DNA, 120 bp, Artificial Sequence
  ENSG00000169856_24 (sequence is synthesized)
gtaccccatttttacactagaaaactaaatttaacagggagggtaactaaattagaaaatttgttcaaagtaatgctttttagtaaaaggtcactaaataaagaactatccttagattaa

SEQ ID NO: 563057 - DNA, 120 bp, Artificial Sequence
  ENSG00000169856_25 (sequence is synthesized)
ttgacttatatttgctttatgcatctggcaccaaaaacctcttttaaatactttacaaatacaaataaagtttaaaaaaacaacattattattcaaatgagctattcagtacttataact

SEQ ID NO: 563058 - DNA, 120 bp, Artificial Sequence
  ENSG00000169856_26 (sequence is synthesized)
atcctaaaaagttatcaaattaacttattgccaatcccagaaattttatgacttggacgtcaacaaaacagcaggtgcaactgagaaatggtggaattggtggaactgtatagaaaaaag

SEQ ID NO: 563059 - DNA, 120 bp, Artificial Sequence
  ENSG00000169856_27 (sequence is synthesized)
ccagtgttctggtggacgacaagacttttgatctattggtattaatcaatttatggaactaagaatagcctccaaagcattctgccttctttcttgctactgcatttagctggaaatttt

SEQ ID NO: 563060 - DNA, 120 bp, Artificial Sequence
  ENSG00000169856_28 (sequence is synthesized)
ataatatagattttgctctctaacagggacagattaaaaactagacctgagcttacaaatacaaaattttaaatttctatttgtccaaatcacttaaccagagctgtagaagtcaaagtc

SEQ ID NO: 563061 - DNA, 120 bp, Artificial Sequence
  ENSG00000169856_29 (sequence is synthesized)
aaaaaaaaaatgaagtcgtattagtggtaccccagtgaatcacttgattcccagaaaaattctctctgaattcagttggactgtaacttatctaagtggatgccccttatgccattaggt

SEQ ID NO: 563062 - DNA, 120 bp, Artificial Sequence
  ENSG00000169856_30 (sequence is synthesized)
aaagaattggatactgtaagttaattaccacccctacttagaactatgaaattaaatgttatcctaatgataagttgttttattgagattcattaaaaatgccaaagaacaaaactgaac

SEQ ID NO: 563063 - DNA, 120 bp, Artificial Sequence
  ENSG00000169856_31 (sequence is synthesized)
catcttgacacaaaacataactccttagcatcaaatctcagcaccttgtctaggtctgtaacaggcaggcaactagagaggtaaagcaaaaccaacaagccatctatctgtgtctccttc

SEQ ID NO: 563064 - DNA, 120 bp, Artificial Sequence
  ENSG00000169856_32 (sequence is synthesized)
atgtctgctgtcgaatgagaagaggaaaccaacatatacttctcttttgatgaaatacttcatttgccttgacatgttttgttttttgtttttaatttcacccacaactccagcttaaaa

SEQ ID NO: 563065 - DNA, 120 bp, Artificial Sequence
  ENSG00000169856_33 (sequence is synthesized)
atttcccttctaaatatggcacaattatagttcagctattgaaagagaccatttaaatggccacccttcaagatttactaaaaaatagaatcttgtcaatgacataaacaaaaaggaaaa

SEQ ID NO: 563066 - DNA, 120 bp, Artificial Sequence
  ENSG00000169856_34 (sequence is synthesized)
aactgattaacattttctctctctccagggatggagggagccggggatacagctacataatgtatttataatttaggagggaggaaagccttatttatttaaaacgtgataattctaaat

SEQ ID NO: 563067 - DNA, 120 bp, Artificial Sequence
  ENSG00000169856_35 (sequence is synthesized)
gcagggaaattcaagctgtgtctacacacaatcttaccaaattcaataccccaagaaaagaatagcagaattcagacaaccatgttttttatttgttgctagtatatattacccccaaaa

SEQ ID NO: 563068 - DNA, 120 bp, Artificial Sequence
  ENSG00000169856_36 (sequence is synthesized)
ggtcccttgccttgaggggggcccaagggctcagatcttcccataccttcaggcattggcattctgatctgcacttggacagcaattacacttcttggctccacatcagtgcctgccttg

SEQ ID NO: 563069 - DNA, 120 bp, Artificial Sequence
  ENSG00000169856_37 (sequence is synthesized)
ctatttcaaagattgcctgtaactcaaattttagggctctgcactaaaaagtaataaattgaccaaaacagagtatataggctgggagttgtctagagggcatcttgcaatttctgtcaa

SEQ ID NO: 563070 - DNA, 120 bp, Artificial Sequence
  ENSG00000169856_38 (sequence is synthesized)
acactgcatgtttccagtcaccatgtgtttctcatcttcctttgcatatgccgccacgggatattcagaatcgacggtttctgaaatcactgctttcgttttcacatctggtgatgatct

SEQ ID NO: 563071 - DNA, 120 bp, Artificial Sequence
  ENSG00000169856_39 (sequence is synthesized)
catagtcccaaagagaggttatcgaaggaacgcaataaactatgtgctttttgctttctttcctgttgtcttctaaaacagatcaatggggaaaattaaataaacaaacgagcgaagcgc

SEQ ID NO: 563072 - DNA, 120 bp, Artificial Sequence
  ENSG00000169856_40 (sequence is synthesized)
agcgatccgggtttgggaagagggatgcaacgcgtgcgtggaatcgcacgcaaatgttcctcgcaggtacctctgacacatcccaggcgctgggctggagcgtgccggagcagcgtcgat

SEQ ID NO: 563073 - DNA, 120 bp, Artificial Sequence
  ENSG00000169856_41 (sequence is synthesized)
tatgggcaaaaagtttcagagccattgggcggtgggtgtgtagcacagacgagttgtaagggttaggacgctctctgcgcatggaattggctgtggaaaggagagggaggctgaccgtcc

SEQ ID NO: 563074 - DNA, 120 bp, Artificial Sequence
  ENSG00000169856_42 (sequence is synthesized)
caaggtcccagtgagagctgcaaagcaatagccatgtcctgggaccgactccgctgccgactccctgaggactttgcattttgttttattattcctcttcgcgattttcgtctgaatccc

SEQ ID NO: 563075 - DNA, 120 bp, Artificial Sequence
  ENSG00000169856_43 (sequence is synthesized)
cgtgcgggaggggggtttggggatgagagtgtgtaaatgacccccaagtctaggagcagaggtctcctgcccgaaaccccaagccccaggtgtttctgagttcagctggaagctctcctt

SEQ ID NO: 563076 - DNA, 120 bp, Artificial Sequence
  ENSG00000169856_44 (sequence is synthesized)
ggcgcagcgcagacaccgcgcctggctccccgagaccgcggataggcagagaagaaagctgagcccagcccgaaccccaccggggatttcaggaggattcggcgacccttgaggctcttg

SEQ ID NO: 563077 - DNA, 120 bp, Artificial Sequence
  ENSG00000169856_45 (sequence is synthesized)
tgctaccggcaccatatctccacccgtgggctgcccgcgagcaactgaggttccggagggagtgggcgaaggggctgctcctcgtcctgactgctccgtctctccagagcccaagcggga

SEQ ID NO: 563078 - DNA, 120 bp, Artificial Sequence
  ENSG00000169856_46 (sequence is synthesized)
gagtggtggcttctccacgcccctctgtcctccagttgccggcagcctgttgcagagggtcaaaaccctcttgcacgtggcgctgtgtttggggaggcgccttccggtcacgaaataaca

SEQ ID NO: 563079 - DNA, 120 bp, Artificial Sequence
  ENSG00000169856_47 (sequence is synthesized)
gcggctggtggaagaagggcgacaggaggaaattcccaccaaattaactaccttttaaaaatcaatatatgttccctccatgtactacttgctgctgccccattaaagagcagagcgaca

SEQ ID NO: 563080 - DNA, 120 bp, Artificial Sequence
  ENSG00000169857_0 (sequence is synthesized)
cggcctcgatccctagccccgcaccccgcgcctcgctgctaccgggcgcctttcgctcgcggctcctccgtgcggcccgcttccggtggggccagggcgtctccgccgcagctcggctcc

SEQ ID NO: 563081 - DNA, 80 bp, Artificial Sequence
  ENSG00000169857_1 (sequence is synthesized)
tcggctcccgcgcgctcagcaccgccagcggcggccagatgcaggcggagcgaggagctcggggaggccgtgggcggcgg

SEQ ID NO: 563082 - DNA, 80 bp, Artificial Sequence
  ENSG00000169857_2 (sequence is synthesized)
gatcgccacagcgagcggcccggagccgcagcggcggtagccagaggcggcggcggaggcggcggcggggacggaggcgg

SEQ ID NO: 563083 - DNA, 120 bp, Artificial Sequence
  ENSG00000169857_3 (sequence is synthesized)
gaggaggcgccccgcgaggcagccgccgggagccgggaggctggggcgcaggggccagcgcgccggttgaagatgacagcgatgcagagacctatggagaagagaatgatgaacagggaa

SEQ ID NO: 563084 - DNA, 120 bp, Artificial Sequence
  ENSG00000169857_4 (sequence is synthesized)
attattctaaaagaaagattgtctctaactgggatcgatatcaagatattgaaaaagaggtcaataatgaaagtggagagtcacagaggggaacagatttcagtgtcctccttagctctg

SEQ ID NO: 563085 - DNA, 120 bp, Artificial Sequence
  ENSG00000169857_5 (sequence is synthesized)
caggggactcattctcacagttccggtttgctgaggagaaagaatgggatagtgaagcttcttgtccaaaacagaattcagcattttatgtggatagtgagttattggttcgagcccttc

SEQ ID NO: 563086 - DNA, 120 bp, Artificial Sequence
  ENSG00000169857_6 (sequence is synthesized)
tcaggtgaaaccaaagagaactgatgatggcaagggattagggatgcagttaaaggggcccttggggcctggaggaagggggcccatctttgagctgaaatctgtggctgctggctgccc

SEQ ID NO: 563087 - DNA, 120 bp, Artificial Sequence
  ENSG00000169857_7 (sequence is synthesized)
tgtgttgctgggcaaagacaacccaagcccgggtccttcaagggattctcagaaacccacttccccactgcagtcagcaggagaccatttggaagaagaactagatctgttgcttaattt

SEQ ID NO: 563088 - DNA, 120 bp, Artificial Sequence
  ENSG00000169857_8 (sequence is synthesized)
agatgcacctataaaagagggagataacatcttaccagatcagacgtctcaggacctgaaatccaaggaagatggggaggtggtccaagaggaagaagtttgtgcaaaaccatctgtgac

SEQ ID NO: 563089 - DNA, 120 bp, Artificial Sequence
  ENSG00000169857_9 (sequence is synthesized)
tgaagaaaaaaacatggaacctgagcaaccaagtacctccaaaaatgttaccgaggaagagctggaagactggttggacagcatgatttcctaaaaaggggaaaaaaagtgcctgaagca

SEQ ID NO: 563090 - DNA, 120 bp, Artificial Sequence
  ENSG00000169857_10 (sequence is synthesized)
aatcttggttgccttctaacggcaggtgggcataaggctgtccttcaggaccagccagtttacaagcatgtctcaagctagtgtgttccattatgctcacagcagtaaatgcctacctct

SEQ ID NO: 563091 - DNA, 120 bp, Artificial Sequence
  ENSG00000169857_11 (sequence is synthesized)
gtgtttgacatctgaaagaatacattgaagcagcttgttgcatttgtttttctggcttagtaatctaatagatttccttaagggcaggagatagactctggcccttgtttctagcctcct

SEQ ID NO: 563092 - DNA, 120 bp, Artificial Sequence
  ENSG00000169857_12 (sequence is synthesized)
tccttgcagtgtttacaacatagccagtgtttacagcatagcagatgctgctgctgattaagagaatagatgcaaacaaggcatgcatttggccaaaataaacaaatgctggtctgtcca

SEQ ID NO: 563093 - DNA, 120 bp, Artificial Sequence
  ENSG00000169857_13 (sequence is synthesized)
ataatccatgcagatggggaagcagctttttaatggcattgggaagataggcacaacctattatgtagtgctcagtgtggatgttcgatgctcaggggctttttgggccctacacttgga

SEQ ID NO: 563094 - DNA, 120 bp, Artificial Sequence
  ENSG00000169860_0 (sequence is synthesized)
actccggacagagctgggcctggggaaggggttcctgaactacgcggacgccgaacgggacgcgctgcagaagcgcacgagtctgcggccacgcgcgctccgatggctgccaggagctga

SEQ ID NO: 563095 - DNA, 120 bp, Artificial Sequence
  ENSG00000169860_1 (sequence is synthesized)
gctcagggtgggcggaggaagcggttagacgccccgaaactgagctgcacgtttctaaggtagggaggaggaagatgcccccaattaagttgatctttgagccaaggaggctggggagca

SEQ ID NO: 563096 - DNA, 120 bp, Artificial Sequence
  ENSG00000169860_2 (sequence is synthesized)
gcctccccaagctagagccctgcagagcgagtttcccttgacctcgctgcgcctctggcgcgctctgcagcgcggacccgcggcccctcgggaaagcgcagtcggaaagttatccgcggc

SEQ ID NO: 563097 - DNA, 120 bp, Artificial Sequence
  ENSG00000169860_3 (sequence is synthesized)
ggttccctgcgcgccctgttgtgtaagctcggcgttgccagcggacggagaagttgctggcttgcccgatagcccagttcggtggcggcccggggcggatttcatggcccgcggcgaacg

SEQ ID NO: 563098 - DNA, 120 bp, Artificial Sequence
  ENSG00000169860_4 (sequence is synthesized)
cggggccagagctggcgtgggcgagcccctgcgcgccccctcccgcggggatccagttcgcctgctcccttccgctcgctggcttttccgatgcttgctgcgcccctggccgccgctgcc

SEQ ID NO: 563099 - DNA, 120 bp, Artificial Sequence
  ENSG00000169860_5 (sequence is synthesized)
ctctcgccgcctcctacccctcggagccgccgcctaagtcgaggaggagagaatgaccgaggtgctgtggccggctgtccccaacgggacggacgctgccttcctggccggtccgggttc

SEQ ID NO: 563100 - DNA, 120 bp, Artificial Sequence
  ENSG00000169860_6 (sequence is synthesized)
gtcctgggggaacagcacggtcgcctccactgccgccgtctcctcgtcgttcaaatgcgccttgaccaagacgggcttccagttttactacctgccggctgtctacatcttggtattcat

SEQ ID NO: 563101 - DNA, 120 bp, Artificial Sequence
  ENSG00000169860_7 (sequence is synthesized)
catcggcttcctgggcaacagcgtggccatctggatgttcgtcttccacatgaagccctggagcggcatctccgtgtacatgttcaatttggctctggccgacttcttgtacgtgctgac

SEQ ID NO: 563102 - DNA, 120 bp, Artificial Sequence
  ENSG00000169860_8 (sequence is synthesized)
tctgccagccctgatcttctactacttcaataaaacagactggatcttcggggatgccatgtgtaaactgcagaggttcatctttcatgtgaacctctatggcagcatcttgtttctgac

SEQ ID NO: 563103 - DNA, 120 bp, Artificial Sequence
  ENSG00000169860_9 (sequence is synthesized)
atgcatcagtgcccaccggtacagcggtgtggtgtaccccctcaagtccctgggccggctcaaaaagaagaatgcgatctgtatcagcgtgctggtgtggctcattgtggtggtggcgat

SEQ ID NO: 563104 - DNA, 120 bp, Artificial Sequence
  ENSG00000169860_10 (sequence is synthesized)
ctcccccatcctcttctactcaggtaccggggtccgcaaaaacaaaaccatcacctgttacgacaccacctcagacgagtacctgcgaagttatttcatctacagcatgtgcacgaccgt

SEQ ID NO: 563105 - DNA, 120 bp, Artificial Sequence
  ENSG00000169860_11 (sequence is synthesized)
ggccatgttctgtgtccccttggtgctgattctgggctgttacggattaattgtgagagctttgatttacaaagatctggacaactctcctctgaggagaaaatcgatttacctggtaat

SEQ ID NO: 563106 - DNA, 120 bp, Artificial Sequence
  ENSG00000169860_12 (sequence is synthesized)
cattgtactgactgtttttgctgtgtcttacatccctttccatgtgatgaaaacgatgaacttgagggcccggcttgattttcagaccccagcaatgtgtgctttcaatgacagggttta

SEQ ID NO: 563107 - DNA, 120 bp, Artificial Sequence
  ENSG00000169860_13 (sequence is synthesized)
tgccacgtatcaggtgacaagaggtctagcaagtctcaacagttgtgtggaccccattctctatttcttggcgggagatactttcagaaggagactctcccgagccacaaggaaagcttc

SEQ ID NO: 563108 - DNA, 120 bp, Artificial Sequence
  ENSG00000169860_14 (sequence is synthesized)
tagaagaagtgaggcaaatttgcaatccaagagtgaagacatgaccctcaatattttacctgagttcaagcagaatggagatacaagcctgtgaaggcacaagaatctccaaacacctct

SEQ ID NO: 563109 - DNA, 120 bp, Artificial Sequence
  ENSG00000169860_15 (sequence is synthesized)
ctgttgtaatatggtaggatgcttaacagaatcaagtacttttcccctctttaactttctagtttagaaaaaaatcaaaccaagaaaatagtgagttaaaaaaataatagaagtagaaat

SEQ ID NO: 563110 - DNA, 120 bp, Artificial Sequence
  ENSG00000169860_16 (sequence is synthesized)
gcccacatccacacttagcttgtttgggtttgctttcacagtctctcttccttctgactagaagtatgtataataaaacaatactacctagttaaacatttactttctcttttgccttta

SEQ ID NO: 563111 - DNA, 120 bp, Artificial Sequence
  ENSG00000169860_17 (sequence is synthesized)
aaatgtgcaggcttttctgtttaaagtgtgtgtgcacatgagtactggggctgtttttgatattagtaatttctctaagaaaactagccccctgcaacttgagtttgtggtttatctagc

SEQ ID NO: 563112 - DNA, 120 bp, Artificial Sequence
  ENSG00000169860_18 (sequence is synthesized)
ctttattgtttttttaaaatccacagtaggaataaaaaatctatattctcagaaatatctagcatggtatataacaaaacactaaactcatcagttcatccggcatcagatcaatggatc

SEQ ID NO: 563113 - DNA, 120 bp, Artificial Sequence
  ENSG00000169860_19 (sequence is synthesized)
tctgagcggggtgtttttttcagtgtcttataagcatagatgatagttgactgagtttctttagggcattgaatagacaagtaaagctaatgaatttaaaagcctgaaaagtgattgttt

SEQ ID NO: 563114 - DNA, 120 bp, Artificial Sequence
  ENSG00000169860_20 (sequence is synthesized)
tccagttatttctggaaaaggtctcattatatattgggtgctaaatgtttgatggggaaagcctgcatatattatcgtactggtaaaatgcattcaaaataattaaagtgcatgtatttt

SEQ ID NO: 563115 - DNA, 120 bp, Artificial Sequence
  ENSG00000169860_21 (sequence is synthesized)
ccttgtaaacaccatgagctctcttagacatcttgtgataaagagcatttacttgccccactgctgtgcaatgccttaggactttgtttgtgttccaggacaagtgttcactcacatctg

SEQ ID NO: 563116 - DNA, 120 bp, Artificial Sequence
  ENSG00000169860_22 (sequence is synthesized)
taaaaacaattttaagaattgcaaataaattacagaccaaagattgagtaaagtcaaataactgttagtaagttgaaggatattggacaggaggacagtatttcagaaaaggagaggttg

SEQ ID NO: 563117 - DNA, 120 bp, Artificial Sequence
  ENSG00000169860_23 (sequence is synthesized)
acagtcatccacaaggcatagcctccaagtatactctcaaatgtatgaagcaactggggtgggcagaagacattttagaatgagggctttagtttaaattaaagtcatggtggagaagac

SEQ ID NO: 563118 - DNA, 120 bp, Artificial Sequence
  ENSG00000169860_24 (sequence is synthesized)
tcttgcttcctccaagtgtttgaaaacacaaaatgcgatatgaaaagaagaaatagaatttgtataggttgcattgatagaatgggaagctataatctttgaataaaccttacatctcaa

SEQ ID NO: 563119 - DNA, 120 bp, Artificial Sequence
  ENSG00000169860_25 (sequence is synthesized)
tatttaaagaaaaaacatatatatggagggaaatatagagaattaaagtacctagatgccatagcactgaaaagtaaagtactactcaaactactaatagaagactattggtcagtgttt

SEQ ID NO: 563120 - DNA, 120 bp, Artificial Sequence
  ENSG00000169860_26 (sequence is synthesized)
ttaatgaatattgaattgctgcatgtctagtccttgaaatggtcaaattctatataatgagaataacaaggtgagataatgcaattgacaatcccaaacaaatccagtgtcaaaggaatt

SEQ ID NO: 563121 - DNA, 120 bp, Artificial Sequence
  ENSG00000169860_27 (sequence is synthesized)
tttagttttggaagctatccctcataaagtcaacatcagagtttgcaactgatggtggcataacttgtttgaaagcactttacaagtagagcaacatggggctgtatgttaaggcaagaa

SEQ ID NO: 563122 - DNA, 120 bp, Artificial Sequence
  ENSG00000169860_28 (sequence is synthesized)
agaaccttagtgccccgtggaccataatgacaggaaattttcaggtcttgatttcagttcttgcaatgcctatgtagattgaggatttgtgagaccttcagagtagcttcactttaccca

SEQ ID NO: 563123 - DNA, 120 bp, Artificial Sequence
  ENSG00000169860_29 (sequence is synthesized)
atctctggccactaagatcaatgaagaaaagctgtatttaaccttccaaagcagtgattctttttacatgttcagttttaatgcataggattatagaaaccaaatcaagaagaaacctac

SEQ ID NO: 563124 - DNA, 120 bp, Artificial Sequence
  ENSG00000169860_30 (sequence is synthesized)
tacacctccttattttgaggaaagagagggttagcaaagttctcacttcatcaggctcaaataacatccgttttagattcctacaagacaaaatctaaaatatgtcattactttattgac

SEQ ID NO: 563125 - DNA, 120 bp, Artificial Sequence
  ENSG00000169860_31 (sequence is synthesized)
cttgttaaacaagatcaatatcattaaactgaccaagatggaaattacaggacttgtaccagacttgaacttgtagcctaatgatacacatttttacaatatttcttcaccatttagttt

SEQ ID NO: 563126 - DNA, 120 bp, Artificial Sequence
  ENSG00000169860_32 (sequence is synthesized)
tctttcttttaggtctcaggatgctcagcttaatttagagtatgtgttaagtacattgtttcagcgtccagagaattttgtgagtgtggatccagtgaggaggtgaacagtaactagaaa

SEQ ID NO: 563127 - DNA, 120 bp, Artificial Sequence
  ENSG00000169860_33 (sequence is synthesized)
tgcttgtttactacttggcatgttttttccaaagtgtttcttctttagcttcatacatcacatatggacactgatgacatgtgaatgcatgccacatagtaacaagaatgatcttgccaa

SEQ ID NO: 563128 - DNA, 120 bp, Artificial Sequence
  ENSG00000169860_34 (sequence is synthesized)
ctccttccaagccaaaagaagcctctgggaaggtgtgccaatggtgaaaacgtacagagggtcagggtgaagcagtgatctctattggctgaaaaactgatcaggtcatatgatgattga

SEQ ID NO: 563129 - DNA, 120 bp, Artificial Sequence
  ENSG00000169860_35 (sequence is synthesized)
agtatgtttattgtaagggcagaaatgtgttggcatttggataaaaaactgctaacattatagaacttattacctaacaaaatttcacaccacaaaaaatattttaatggcaaattcaag

SEQ ID NO: 563130 - DNA, 120 bp, Artificial Sequence
  ENSG00000169860_36 (sequence is synthesized)
gtgttttattgcttacaaatcagcatctttgactctttgaacatcaatttgtgtttacattgaaatgacaaaaagacaaactaagaagaaatacagcatgcaagttggaattcagagtta

SEQ ID NO: 563131 - DNA, 120 bp, Artificial Sequence
  ENSG00000169860_37 (sequence is synthesized)
aaaccatgatgttgccgctcagccagctatgtgactgttgaccctttcaagaacacacatggatttaaaagttggatgacatccattgttggggccttgggggatatggtaaagcatgaa

SEQ ID NO: 563132 - DNA, 120 bp, Artificial Sequence
  ENSG00000169860_38 (sequence is synthesized)
aactaaacagccaggagcctgtgaaatctgctactgtattttccaggacttcattccactccttggctaaaaaaatcttggaagtttcacagattatgatgtggacctgtcacctgtaaa

SEQ ID NO: 563133 - DNA, 120 bp, Artificial Sequence
  ENSG00000169860_39 (sequence is synthesized)
ttgtctcaatctactcagacaagacactaaactgtctttggatactatagatgtcagtgcttatagcagctggaatttggctagtgacaatgtttaaagatgtaatactagttagtatct

SEQ ID NO: 563134 - DNA, 120 bp, Artificial Sequence
  ENSG00000169860_40 (sequence is synthesized)
attgaagcttaaactttgctggtcaggttgtagctattgtaaaagtatttattgaagaagctcacagtccttcagttgtacagactgaaaaactttcatgaaagatccaacatactaatg

SEQ ID NO: 563135 - DNA, 120 bp, Artificial Sequence
  ENSG00000169860_41 (sequence is synthesized)
ttatatttattacaatgtatgatattaatgtgtcaaactggtgtattttacaaaatatataatgcatacataaataagagttgtatattacagtgcttttcaaatatcagtgtcttggaa

SEQ ID NO: 563136 - DNA, 120 bp, Artificial Sequence
  ENSG00000169860_42 (sequence is synthesized)
ggaatatttaagtcttcacattttttggtctaaaatatgaaaatgtttcatgatacaagtgattaattttccctagtagtgcttttgcatgtttgcctttttatttaagtttttttctat

SEQ ID NO: 563137 - DNA, 120 bp, Artificial Sequence
  ENSG00000169860_43 (sequence is synthesized)
atagacacaatttggtgtcagactatcataagatcgatagtgaatataaaatatcttagccaaatggggtctgtattgtctacattttatatattaaataaaagtttttgttgtcttttc

SEQ ID NO: 563138 - DNA, 120 bp, Artificial Sequence
  ENSG00000169860_44 (sequence is synthesized)
aggaggtttagagtattgtcactaaatatgatcaaagcttccctttccaaatgcaaaagtcttgtcctacatttaaagttgatctgtcatgttttagcagtcaagtgggatgggcattat

SEQ ID NO: 563139 - DNA, 120 bp, Artificial Sequence
  ENSG00000169860_45 (sequence is synthesized)
ataaacaacgttacaatgtaaggaaaatctttaaggagatggggagagaaaaaggcagctggtataatcggttactgctgcttagttctacttaattttttgtgttgcttcttcttaagg

SEQ ID NO: 563140 - DNA, 120 bp, Artificial Sequence
  ENSG00000169860_46 (sequence is synthesized)
tgagatagcataatcttaactgttttgagatggaattttaaagtaacacactaccagcgagttcaacactgctattgattttaatctgtttttttttgtttagttgataacttaaattcc

SEQ ID NO: 563141 - DNA, 120 bp, Artificial Sequence
  ENSG00000169860_47 (sequence is synthesized)
aagtttcatagtgataattgtatattatttggctgctgaattctgttagagttttttattctgttgtacattgtattatacacataatcacaaattaatatgaaggtgaatatatgttac

SEQ ID NO: 563142 - DNA, 120 bp, Artificial Sequence
  ENSG00000169860_48 (sequence is synthesized)
caaaatttgtgaatttgaattatagtatgttttagtgctattgcaaaaaatgtttatttttatattatctgtgattttaatatagatgattgaactagatttctttttgagtgatagtgc

SEQ ID NO: 563143 - DNA, 120 bp, Artificial Sequence
  ENSG00000169860_49 (sequence is synthesized)
gtgccattgaatgagcagtatggaaacagtgttacttgatattttgagctttctcaggtttatctaaatcagtggtagcttaacaaaacccagactaattgtgtgtaattgtatttttaa

SEQ ID NO: 563144 - DNA, 120 bp, Artificial Sequence
  ENSG00000169860_50 (sequence is synthesized)
cccagactaattgtgtgtaattgtatttttaataaaaggaaagtacatttcctataatagcatagtactgtttgcatgtaagagtatgcaaaaccttgtgtgtgtgtgtgtgtgtgtgtg

SEQ ID NO: 563145 - DNA, 120 bp, Artificial Sequence
  ENSG00000169860_51 (sequence is synthesized)
cagccaactttgtatctgctatttttagtacgagcagagcttcataattgtggtcactagaactgtacttaccatggacagttaaaactgaaaaagactcaataaaactatgaaacatgg

SEQ ID NO: 563146 - DNA, 80 bp, Artificial Sequence
  ENSG00000169862_0 (sequence is synthesized)
gcacccggggccggtttcggcggcggggcggacgctccctcactagccgggcgcccgggccggccgccgaggtttaggtg

SEQ ID NO: 563147 - DNA, 80 bp, Artificial Sequence
  ENSG00000169862_1 (sequence is synthesized)
ccggagccccgaggagcccgcaggagcccgtggagcccgcggagccgggcagggggcgctgcgctcgccgagctcggagg

SEQ ID NO: 563148 - DNA, 120 bp, Artificial Sequence
  ENSG00000169862_2 (sequence is synthesized)
gccgggccgggcgctgcgcactcgcgtcgggagccgcctctcgcccgcggcgctcgcccctgccgcccgccagcatcccttgtcccgcggccgcgctcagacaacaaaagcggaagatgc

SEQ ID NO: 563149 - DNA, 120 bp, Artificial Sequence
  ENSG00000169862_3 (sequence is synthesized)
acaacaaaagcggaagatgctgcagttgggcaaggtcaggaccttgccctgaagccgggcggcgccgcgcacgcctcttcccggactgaggagctgtcgccggcggagggtgcatgtttg

SEQ ID NO: 563150 - DNA, 120 bp, Artificial Sequence
  ENSG00000169862_4 (sequence is synthesized)
cgaggaagccgccgggcgccgcgcctttgggagctatgcctgttccagaccagccttcatcagcctcagagaagacgagttccctgagccccggcttaaacacctccaacggggatggct

SEQ ID NO: 563151 - DNA, 120 bp, Artificial Sequence
  ENSG00000169862_5 (sequence is synthesized)
ctgaaacagaaaccacctctgccatcctcgcctcagtcaaagaacaggaattacagtttgaaaggctgacccgagagctggaggctgaacggcagatcgtagccagccagctggagcgat

SEQ ID NO: 563152 - DNA, 120 bp, Artificial Sequence
  ENSG00000169862_6 (sequence is synthesized)
gcaagctcggatccgagactggcagcatgagcagcatgagttcagcagaagagcagtttcagtggcagtcacaagatggtcaaaaagatatcgaagatgagcttacaacaggtctcgagc

SEQ ID NO: 563153 - DNA, 120 bp, Artificial Sequence
  ENSG00000169862_7 (sequence is synthesized)
tggtggactcctgtattaggtcactacaggaatcaggaatacttgacccacaggattattctacaggtgaaaggcccagcctgctctcccagagtgcacttcagctcaattccaaacctg

SEQ ID NO: 563154 - DNA, 120 bp, Artificial Sequence
  ENSG00000169862_8 (sequence is synthesized)
aagggtctttccagtatccggccagctaccatagcaaccagaccctggccctgggggaaaccaccccttcacagctcccggcccgaggcacacaagcccgagctacgggccagagcttca

SEQ ID NO: 563155 - DNA, 80 bp, Artificial Sequence
  ENSG00000169862_9 (sequence is synthesized)
cccgagctacgggccagagcttcagccagggcacgaccagccgcgccggccacctggcggggcccgagcccgcgccgccg

SEQ ID NO: 563156 - DNA, 80 bp, Artificial Sequence
  ENSG00000169862_10 (sequence is synthesized)
ctactactccagctccacgctgcccgcgccgccgcgcgggggctccccgctggccgcgccccagggcggttcgcccacca

SEQ ID NO: 563157 - DNA, 120 bp, Artificial Sequence
  ENSG00000169862_11 (sequence is synthesized)
gcggctcggcccccgagggcgccacctacgccgcgccgcgcggctcctcgcccaagcagtcgcccagccgcctggccaagtcctacagcaccagctcgcccatcaacatcgtcgtgtcct

SEQ ID NO: 563158 - DNA, 120 bp, Artificial Sequence
  ENSG00000169862_12 (sequence is synthesized)
cggccggcctgtccccgatccgcgtgacctcgccccccaccgtgcagtccaccatctcctcctcgcccatccaccagctgagctccaccatcggcacgtacgccaccctgtcgcccacca

SEQ ID NO: 563159 - DNA, 120 bp, Artificial Sequence
  ENSG00000169862_13 (sequence is synthesized)
agcgcctggtccacgcgtccgagcagtacagcaagcactcgcaggagctgtatgccacggccaccctccagaggccgggcagcctggcagctggttcccgagcctcatacagcagccagc

SEQ ID NO: 563160 - DNA, 120 bp, Artificial Sequence
  ENSG00000169862_14 (sequence is synthesized)
atgggcacctgggcccagagttgcgggccctgcagtccccagaacaccacatagatcccatctatgaagaccgcgtctatcagaagccccctatgaggagtctcagccagagccaggggg

SEQ ID NO: 563161 - DNA, 120 bp, Artificial Sequence
  ENSG00000169862_15 (sequence is synthesized)
accctctgccgccagcacacaccggcacctaccgcacgagcacagccccatcttcccctggtgtcgactccgtccccttgcagcgcacaggcagccagcacggcccacagaatgccgccg

SEQ ID NO: 563162 - DNA, 120 bp, Artificial Sequence
  ENSG00000169862_16 (sequence is synthesized)
cggccaccttccagagggccagctatgccgccggcccagcctccaattacgcggacccctaccgacagctgcagtattgtccctctgttgagtctccatacagcaaatccggccctgctc

SEQ ID NO: 563163 - DNA, 120 bp, Artificial Sequence
  ENSG00000169862_17 (sequence is synthesized)
tcccgcctgaaggcaccttggccaggtccccgtccattgatagcattcagaaagatcccagagaatttggatggagagacccggaactgccggaagtgattcagatgttgcagcaccagt

SEQ ID NO: 563164 - DNA, 120 bp, Artificial Sequence
  ENSG00000169862_18 (sequence is synthesized)
ttccctcggtccagtctaacgcggcagcctacttgcaacacctctgttttggagacaacaaaattaaagccgagataaggagacaaggaggcatccagctcctggtggacctgttggatc

SEQ ID NO: 563165 - DNA, 120 bp, Artificial Sequence
  ENSG00000169862_19 (sequence is synthesized)
atcggatgaccgaagtccaccgtagtgcctgtggagctctgagaaacctggtgtatgggaaggccaacgatgataacaaaattgccctgaaaaactgtggtggcatcccagcactggtga

SEQ ID NO: 563166 - DNA, 120 bp, Artificial Sequence
  ENSG00000169862_20 (sequence is synthesized)
ggttactccgcaagacgactgacctggagatccgggagctggtcacaggagtcctttggaacctctcctcatgcgatgcactcaaaatgccaatcatccaggatgccctagcagtactga

SEQ ID NO: 563167 - DNA, 120 bp, Artificial Sequence
  ENSG00000169862_21 (sequence is synthesized)
ccaacgcggtgattatcccccactcaggctgggaaaattcgcctcttcaggatgatcggaaaatacagctgcattcatcacaggtgctgcgtaacgccaccgggtgcctaaggaatgtta

SEQ ID NO: 563168 - DNA, 120 bp, Artificial Sequence
  ENSG00000169862_22 (sequence is synthesized)
gttcggccggagaggaggcccgcagaaggatgagagagtgtgatgggcttacggatgccttgctgtacgtgatccagtctgcgctggggagcagtgagatcgatagcaagaccgttgaaa

SEQ ID NO: 563169 - DNA, 120 bp, Artificial Sequence
  ENSG00000169862_23 (sequence is synthesized)
tgcattttaaggaacctctcgtaccggctggcggcagaaacgtctcagggacagcacatgggcacggacgagctggacgggctactctgtggcgaggccaatggcaaggatgctgagagc

SEQ ID NO: 563170 - DNA, 120 bp, Artificial Sequence
  ENSG00000169862_24 (sequence is synthesized)
tctgggtgctggggcaagaagaagaagaaaaagaaatcccaagatcagtgggatggagtaggacctcttccagactgtgctgaaccaccaaaagggatccagatgctgtggcacccatca

SEQ ID NO: 563171 - DNA, 120 bp, Artificial Sequence
  ENSG00000169862_25 (sequence is synthesized)
atagtcaaaccctacctcacactgctctctgagtgctcaaatccagacacgctggaaggggcggcaggcgccctgcagaacttggctgcagggagctggaagtggtcagtatatatccga

SEQ ID NO: 563172 - DNA, 120 bp, Artificial Sequence
  ENSG00000169862_26 (sequence is synthesized)
gccgctgtccgaaaagagaaaggcctgcccatcctcgtggagctgctccgaatagacaatgaccgtgtggtgtgcgcggtggccactgcgctgcggaacatggccttggacgtcagaaat

SEQ ID NO: 563173 - DNA, 120 bp, Artificial Sequence
  ENSG00000169862_27 (sequence is synthesized)
aaggagctcatcggcaaatacgccatgcgagacctagtccacaggcttccaggagggaacaacagcaacaacactgcaagcaaggccatgtcggatgacacagtgacagctgtctgctgc

SEQ ID NO: 563174 - DNA, 120 bp, Artificial Sequence
  ENSG00000169862_28 (sequence is synthesized)
acactgcacgaagtgattaccaagaacatggagaacgccaaggccttacgggatgccggtggcatcgagaagttggtcggcatctccaaaagcaaaggagataaacactctccaaaagtg

SEQ ID NO: 563175 - DNA, 120 bp, Artificial Sequence
  ENSG00000169862_29 (sequence is synthesized)
gtcaaggctgcatctcaggtcctcaacagcatgtggcagtaccgagatctgaggagtctctacaaaaaggatggatggtcacaataccactttgtagcctcgtcttcaaccatcgagagg

SEQ ID NO: 563176 - DNA, 120 bp, Artificial Sequence
  ENSG00000169862_30 (sequence is synthesized)
gaccggcaaaggccctactcctcctcccgcacgccctccatctcccctgtgcgcgtgtctcccaacaaccgctcagcaagtgccccagcttcacctcgggaaatgatcagcctcaaagaa

SEQ ID NO: 563177 - DNA, 120 bp, Artificial Sequence
  ENSG00000169862_31 (sequence is synthesized)
aggaaaacagactacgagtgcaccggcagcaacgccacctaccacggagctaaaggcgaacacacttccaggaaagatgccatgacagctcaaaacactggaatttcaactttgtatagg

SEQ ID NO: 563178 - DNA, 120 bp, Artificial Sequence
  ENSG00000169862_32 (sequence is synthesized)
aattcttatggtgcgcccgctgaagacatcaaacacaaccaggtttcagcacagccagtcccacaggagcccagcagaaaagattacgagacctaccagccatttcagaattccacaaga

SEQ ID NO: 563179 - DNA, 120 bp, Artificial Sequence
  ENSG00000169862_33 (sequence is synthesized)
aattacgatgagtccttcttcgaggaccaggtccaccatcgccctcccgccagcgagtacaccatgcacctgggtctcaagtccaccggcaactacgttgacttctactcagctgcccgt

SEQ ID NO: 563180 - DNA, 120 bp, Artificial Sequence
  ENSG00000169862_34 (sequence is synthesized)
ccctacagtgaactgaactatgaaacgagccactacccggcctcccccgactcctgggtgtgaggagcagggcacaggcgctccgggaacagtgcatgtgcatgcataccacaagacatt

SEQ ID NO: 563181 - DNA, 120 bp, Artificial Sequence
  ENSG00000169862_35 (sequence is synthesized)
tctttctgttttgtttttttctcctgcaaatttagtttgttaaagcctgttccataggaaggctgtgataaccagtaaggaaatattaagagctattttagaaagctaaatgaatcgcaa

SEQ ID NO: 563182 - DNA, 120 bp, Artificial Sequence
  ENSG00000169862_36 (sequence is synthesized)
gttaacttggaaatcagtagaaagctaaagtgatcctaaatatgacagtgggcagcacctttctagcgtgagctgtagagtaacgagaagtgctttatactgaacgtggttgatgggagg

SEQ ID NO: 563183 - DNA, 120 bp, Artificial Sequence
  ENSG00000169862_37 (sequence is synthesized)
agagacgaggcattcgggccggtggggcgtaagggttatcgttaagcacaagacacagaatagtttacacactgtgtgggggacggcttctcacgctttgtttactctcttcatccgttg

SEQ ID NO: 563184 - DNA, 120 bp, Artificial Sequence
  ENSG00000169862_38 (sequence is synthesized)
tgactctaggcttcaggttgcattggggttcctctgtacagcaagatgtttcttgccttttgttaatgcattgttgtaaagtatttgatgtacattacagattaaagaagaaaagcgcgt

SEQ ID NO: 563185 - DNA, 120 bp, Artificial Sequence
  ENSG00000169862_39 (sequence is synthesized)
tgtgtatattacaccaatgccgccgtgtttcctcatctatggttctaaatattgcttcaatttcaaacttttgaaagatgtatggatttccagtttttctttactttctcccagtatgtt

SEQ ID NO: 563186 - DNA, 120 bp, Artificial Sequence
  ENSG00000169862_40 (sequence is synthesized)
ttaacaaaaaaaaaaaaaagcaggaaaaaaggaatatttagcagtattgttcgttctgatatgtgaatttgtttgtgacaactaaacaaggcattcagcagtttctgacaattaacatac

SEQ ID NO: 563187 - DNA, 120 bp, Artificial Sequence
  ENSG00000169862_41 (sequence is synthesized)
atcattccacactccttgtcaacaaagtgctttttcactgcctaaaattttagatgtagatatttgaaatagattttttcatttataccagttttctttatgatgatacagtgttaaaag

SEQ ID NO: 563188 - DNA, 120 bp, Artificial Sequence
  ENSG00000169862_42 (sequence is synthesized)
aaaataaattacaattgatctgtcatccatatttgctaagaatgtctatttccaagaacctatatcttacaaaatacacattcttgcttgtgtgtctgtgtgtgtgggtgtatgtatgtc

SEQ ID NO: 563189 - DNA, 120 bp, Artificial Sequence
  ENSG00000169862_43 (sequence is synthesized)
cacgtactagaaaaattacctgtgtgagattttattttgacagaagctatttcatttgctgttcatcttgtacaaactttgtttttggttttttagtataaatgtacatcagtttgttcc

SEQ ID NO: 563190 - DNA, 120 bp, Artificial Sequence
  ENSG00000169862_44 (sequence is synthesized)
ttttgtactgtatctattcttctgaccatctagtgactcaggatattaggccagttgaagtggagttataggattttcacacattcacgcatacttggatatcaaccctctctacaggtc

SEQ ID NO: 563191 - DNA, 120 bp, Artificial Sequence
  ENSG00000169862_45 (sequence is synthesized)
cgtttccttacacattttatcccctcagaacacgataaaccatggccaattcagtttcactttggggccaattacttgaagtatccacagaaaatgtaaactgctcgccttattccccca

SEQ ID NO: 563192 - DNA, 120 bp, Artificial Sequence
  ENSG00000169862_46 (sequence is synthesized)
aactttttgttcatgtggcagggagcagtacacaactatggaatagattattaaaactgaacttgaagctaacgttagaatagtggttaacagagctaagaaataaggctaaccatcgaa

SEQ ID NO: 563193 - DNA, 120 bp, Artificial Sequence
  ENSG00000169862_47 (sequence is synthesized)
aagaacatgggccgcgggtaaactagctttgctctttagatgcaagtggctgaggccaataggtgcctagtaaatgttaactgttcttggaaaaaataaaaacatcagtaacaaaagaaa

SEQ ID NO: 563194 - DNA, 120 bp, Artificial Sequence
  ENSG00000169862_48 (sequence is synthesized)
agcctggggaaggagggaagagtaacccttcatctttgggactagtcgtcttgtttgcctagactacagttttcaagtatttaaggaccatttatttcaaaaggaattacagtttgaaag

SEQ ID NO: 563195 - DNA, 120 bp, Artificial Sequence
  ENSG00000169862_49 (sequence is synthesized)
actgtttgcgagtgaaagcagaaattaccataggataattcagcgtcctgactttttcgaggctgttcttcactcccttctcggtttttgagctgctctgtggttccttttagccgtggt

SEQ ID NO: 563196 - DNA, 120 bp, Artificial Sequence
  ENSG00000169862_50 (sequence is synthesized)
attacgatgtttggctagaacaaaatggaaagacttagtcatatgcgtccatggccgtgtcttcaggctcccgcggcttgccagaccctgagcccccttggtctatatttagcggcttcc

SEQ ID NO: 563197 - DNA, 120 bp, Artificial Sequence
  ENSG00000169862_51 (sequence is synthesized)
cagcaagcctttgcagccggcttcacaggtttcgggggcttctgcgtgctgacaatagacagccaggctccagaaagcgccgcctgaaagccaggagctatgcctgttccagaccagcct

SEQ ID NO: 563198 - DNA, 120 bp, Artificial Sequence
  ENSG00000169862_52 (sequence is synthesized)
ggcacctaccgcacgagcacaggtgtgtaatcaggaccccactgggtggcctgtccacagggggtgggctctgcgcgggagcttcaataacactcccaaatgaaaggtgtgtgtctgtgt

SEQ ID NO: 563199 - DNA, 120 bp, Artificial Sequence
  ENSG00000169862_53 (sequence is synthesized)
aaagcgccgcctgaaagccaggtttggaaggctgtgcgtgtgtatgggagatgagcgatgcaaaattggggtgatccgtaattaatggctgaaagcgaagctgcttttttctttttttcc

SEQ ID NO: 563200 - DNA, 120 bp, Artificial Sequence
  ENSG00000169862_54 (sequence is synthesized)
gggactagtcgtcttgtttgcctagactacagttttcaagtatttaaggaccatttatttcaaaaggtacagtaaaggaattacagtttgaaaggctgacccgagagctggaggctgaac

SEQ ID NO: 563201 - DNA, 120 bp, Artificial Sequence
  ENSG00000169862_55 (sequence is synthesized)
caccctgtcgcccaccaagcgcctggtccacgcgtccgagcagtacagcaagcactcgcaggagctgtatgccacggccaccctccagaggccgggcagcctggcaggtaaaggctcgct

SEQ ID NO: 563202 - DNA, 120 bp, Artificial Sequence
  ENSG00000169862_56 (sequence is synthesized)
gccacctggcgcgactcacctgggcgcgtggcggggacgcggaagcagcagcccggcttgagcagaagcgaagccgggcgcgctgtctgccaggttgtagtagttgcaggagacagagaa

SEQ ID NO: 563203 - DNA, 120 bp, Artificial Sequence
  ENSG00000169862_57 (sequence is synthesized)
gaagacacagctgcagggggctcttaaagggagctagagagagaaagatgctgaaagattgggagcccagtattaaaatctagaaaagggaggcttttttagcattctcatttccaattg

SEQ ID NO: 563204 - DNA, 120 bp, Artificial Sequence
  ENSG00000169862_58 (sequence is synthesized)
ctctaattcctctagatttttttttaatgctgaaaagacgaagcgaattcattctgacttagtatttttccctccgtttaacttttcattgtccaaaaagaagaatccacgcgacaatag

SEQ ID NO: 563205 - DNA, 120 bp, Artificial Sequence
  ENSG00000169871_0 (sequence is synthesized)
agttttgtttcttttccaggcacccagcaacggcggcctccaggcctcaggccccctcaccatcctagaggtcaagatcagctctggctagttctcacaggtctgacccaacaagtagca

SEQ ID NO: 563206 - DNA, 120 bp, Artificial Sequence
  ENSG00000169871_1 (sequence is synthesized)
ctgacatttttacgtttgctggatgtacacacggaagtggaggaggaggaggagaaggaggagggcagctccttagctcaagagcaagtggcccaaggcctcagaagactagaaggaagt

SEQ ID NO: 563207 - DNA, 120 bp, Artificial Sequence
  ENSG00000169871_2 (sequence is synthesized)
tcctggccattcagcatggtttcccacgggtcctcgccctccctcctggaggccctgagcagcgacttcctggcctgtaaaatctgcctggagcagctgcgggcacccaagacactgccc

SEQ ID NO: 563208 - DNA, 120 bp, Artificial Sequence
  ENSG00000169871_3 (sequence is synthesized)
tgcctgcatacctactgccaagactgcctggcacagctggcggatggcggccgcgtccgctgccccgagtgccgcgagacagtgcctgtgccgcccgagggtgtggcctccttcaagacc

SEQ ID NO: 563209 - DNA, 120 bp, Artificial Sequence
  ENSG00000169871_4 (sequence is synthesized)
aacttcttcgtcaatgggctgctggacctggtgaaggcccgggcctgtggagacctgcgtgccgggaagccagcctgtgccctgtgtcccctggtgggtggcaccagcaccggggggccg

SEQ ID NO: 563210 - DNA, 120 bp, Artificial Sequence
  ENSG00000169871_5 (sequence is synthesized)
gccacggcccggtgcctggactgtgccgatgacttgtgccaggcctgtgccgacgggcaccgctgcacccgccagacccacacccaccgcgtggtggacctggtgggctacagggccggg

SEQ ID NO: 563211 - DNA, 120 bp, Artificial Sequence
  ENSG00000169871_6 (sequence is synthesized)
tggtatgatgaggaggcccgggagcgccaagcggcccagtgtccccagcaccccggggaggcactgcgcttcctgtgccagccctgctcacagttgctgtgcagagagtgccgcctagac

SEQ ID NO: 563212 - DNA, 120 bp, Artificial Sequence
  ENSG00000169871_7 (sequence is synthesized)
ccccacctggaccacccctgcctgcctctggctgaagctgtgcgtgcccggaggccgggcctggagggactgctggccggtgtggacaataacctggtggagctggaggcagcgcggagg

SEQ ID NO: 563213 - DNA, 120 bp, Artificial Sequence
  ENSG00000169871_8 (sequence is synthesized)
gtggagaaggaggcgctagcccggctgcgggagcaggcggcccgggtggggactcaggtggaggaggcggctgagggcgtcctccgggccctgctggcccagaagcaggaggtgctgggg

SEQ ID NO: 563214 - DNA, 120 bp, Artificial Sequence
  ENSG00000169871_9 (sequence is synthesized)
cagctacgagcccacgtggaggctgccgaagaagctgctcgggagaggctggcggagcttgagggccgggagcaggtggccagggccgcagccgccttcgcccgccgggtactcagcctg

SEQ ID NO: 563215 - DNA, 120 bp, Artificial Sequence
  ENSG00000169871_10 (sequence is synthesized)
gggcgagaggccgagatcctctccctggaaggggcgatcgcacagcggctcaggcagctgcagggctgcccctgggcaccaggcccggccccctgcctgctcccacagctggagctccat

SEQ ID NO: 563216 - DNA, 120 bp, Artificial Sequence
  ENSG00000169871_11 (sequence is synthesized)
cctgggctcctggacaagaactgccaccttcttcggctgtcctttgaggagcagcagccccagaaggatggtgggaaagacggagctggtacccagggaggtgaggagagccagagccgg

SEQ ID NO: 563217 - DNA, 120 bp, Artificial Sequence
  ENSG00000169871_12 (sequence is synthesized)
agggaggatgagccgaagactgagagacagggtggagtccagccccaggctggagatggagcccagaccccaaaagaggaaaaagcccagacaacccgagaagagggagcccagaccttg

SEQ ID NO: 563218 - DNA, 120 bp, Artificial Sequence
  ENSG00000169871_13 (sequence is synthesized)
gaggaggacagggcccagacaccccacgaggatggaggaccccagccccacaggggtggcagacccaacaagaagaaaaagttcaaaggcaggctcaagtcaatttcccgggagcccagc

SEQ ID NO: 563219 - DNA, 120 bp, Artificial Sequence
  ENSG00000169871_14 (sequence is synthesized)
ccagccctggggccgaatctggacggctctggcctcctccccagacccatcttttactgcagtttccccacgcggatgcctggagacaagcggtccccccggatcaccgggctctgtccc

SEQ ID NO: 563220 - DNA, 120 bp, Artificial Sequence
  ENSG00000169871_15 (sequence is synthesized)
ttcggtccccgggagatcctggtggcggatgagcagaaccgggcactgaaacgcttctccctcaacggcgactacaagggcaccgtgccggtccctgagggctgctccccttgcagcgtg

SEQ ID NO: 563221 - DNA, 120 bp, Artificial Sequence
  ENSG00000169871_16 (sequence is synthesized)
gccgccctgcagagcgcggtggccttctccgctagcgcacggctctatctcatcaaccccaacggcgaagtgcagtggcgcagggccctgagcctctcccaggccagccacgcggtggcg

SEQ ID NO: 563222 - DNA, 120 bp, Artificial Sequence
  ENSG00000169871_17 (sequence is synthesized)
gcactgcctagcggggaccgcgtggctgtcagcgtggcgggccacgtggaggtgtacaatatggaaggcagcctggccacccggttcattcctggaggcaaggccagccggggcctgcgg

SEQ ID NO: 563223 - DNA, 120 bp, Artificial Sequence
  ENSG00000169871_18 (sequence is synthesized)
gcgctggtgtttctgaccaccagcccccaggggcatttcgtggggtcggactggcagcagaatagtgtggtaatctgtgatgggctgggccaggtggttggggagtacaaggggccaggc

SEQ ID NO: 563224 - DNA, 120 bp, Artificial Sequence
  ENSG00000169871_19 (sequence is synthesized)
ctgcatggctgccagccgggctccgtgtctgtggataagaagggctacatctttctgacccttcgagaagtcaacaaggtggtgatcctggacccgaaggggtccctccttggagacttc

SEQ ID NO: 563225 - DNA, 120 bp, Artificial Sequence
  ENSG00000169871_20 (sequence is synthesized)
ctgacagcctaccacggcctggaaaagccccgggttaccaccatggtggatggcaggtacctggtcgtgtccctcagtaacgggaccatccacatctttcgggtccgttctccggacagt

SEQ ID NO: 563226 - DNA, 120 bp, Artificial Sequence
  ENSG00000169871_21 (sequence is synthesized)
taaaggggctaggactagggtgagagggagtggggagggagagggcaggaaggaggcagagctgtccgtgggaggtggaggccgaggacattttcctgaagggcaggggttggcaacttt

SEQ ID NO: 563227 - DNA, 120 bp, Artificial Sequence
  ENSG00000169871_22 (sequence is synthesized)
tcaacatggagtgccaaactgctaacccgtcttctagtgtgtgagaatagggaccaaggtggtggcgtgaccttaactctcagaagcagaggaggcaggtgggtggagggggatgctggg

SEQ ID NO: 563228 - DNA, 120 bp, Artificial Sequence
  ENSG00000169871_23 (sequence is synthesized)
agttcacctgcctcttgctttttgtgggtggctgctgccaccaccgccgctgctatatagtttaggtttctgaggtttgtgagcctgtcctgctttgcattcttcaaaaccattcctgat

SEQ ID NO: 563229 - DNA, 120 bp, Artificial Sequence
  ENSG00000169871_24 (sequence is synthesized)
agagtagccgagggagagtcttggggccaagaagggcccagggtgggtcaggcgtgtgcactgtggaacagagctgagaccccggccccccttggactggcacagggtcctacagagtca

SEQ ID NO: 563230 - DNA, 120 bp, Artificial Sequence
  ENSG00000169871_25 (sequence is synthesized)
gaggaggcctgagatttcgaatgggcagtgaatggcctcttctgccagccacaggcaggatgctccttgatcacggcatcccccggcggtagtacagggtgagcttgcaggagggtctgc

SEQ ID NO: 563231 - DNA, 120 bp, Artificial Sequence
  ENSG00000169871_26 (sequence is synthesized)
aagtgcagacagcagctggggccaaagaggtgttaggttcaaaggctgcgaagagaataggctactggaaaaccaaacccaacagaattcacgtccaaaaatccacattctccatcgctt

SEQ ID NO: 563232 - DNA, 89 bp, Artificial Sequence
  ENSG00000169871_27 (sequence is synthesized)
aacagaattcacgtccaaaaatccacattctccatcgcttctcagccttttggctaagattaagtattaaaaaaaaaccaggctctggc

SEQ ID NO: 563233 - DNA, 80 bp, Artificial Sequence
  ENSG00000169871_28 (sequence is synthesized)
aacatagcgagaccccatctctacaaaagattaaaaattagctgcgtgtagtagcatatgcctttcaacggaggagtttg

SEQ ID NO: 563234 - DNA, 77 bp, Artificial Sequence
  ENSG00000169871_29 (sequence is synthesized)
cgcaccactgcattccagaccccatcgcaggttatccatcacttctcagctaagatcaagtgttaaaataaataaat

SEQ ID NO: 563235 - DNA, 88 bp, Artificial Sequence
  ENSG00000169871_30 (sequence is synthesized)
agttatgagtgtcagagcaggggagccctccacgcagccacggagccagtctgagggaagaggtacataggatagaaaaatctctagg

SEQ ID NO: 563236 - DNA, 120 bp, Artificial Sequence
  ENSG00000169871_31 (sequence is synthesized)
gtctgagggaagaggtacataggatagaaaaatctctaggctccaacgcttctgcttcggtgtctttccatttcccagggtctatgtgttgccttctcttcattttccagcaaaattcct

SEQ ID NO: 563237 - DNA, 120 bp, Artificial Sequence
  ENSG00000169871_32 (sequence is synthesized)
tttgagatatgttggccttcactcggctgaactagggggtgaaggaaggttgtcctctgtgggccactattgctggggaaacagctaaaccctgcaggccaagtggaacttggaggtgcc

SEQ ID NO: 563238 - DNA, 120 bp, Artificial Sequence
  ENSG00000169871_33 (sequence is synthesized)
aagaaaacctagaaggtgcaatggggctgcgacggatagaggtgtcaaaccagaagggaggaacccgtcggaggtgggctgtgaccaccggaccttttcataagtggtggcagtggtaga

SEQ ID NO: 563239 - DNA, 120 bp, Artificial Sequence
  ENSG00000169871_34 (sequence is synthesized)
attgagggggcaagtaggcttggagaatgtttttagccaggggctgttgagagatggcagaagggggtcttaatgtggggactgtggacagtggggcattcgtgggaaccagagggattt

SEQ ID NO: 563240 - DNA, 120 bp, Artificial Sequence
  ENSG00000169871_35 (sequence is synthesized)
tggacaagtccagatggaatgtgcagggcataggtagagggaaaagaaaatccctttctgggaaaaccatttcttgtttattgaaacaatgcaggacatcatcaaagtccgggtggacac

SEQ ID NO: 563241 - DNA, 120 bp, Artificial Sequence
  ENSG00000169871_36 (sequence is synthesized)
ccgggtggacacattccattatctacaaattacaaaggtaggcacagcaaagaataatgaagattataagaaaaccaagcgccaggcacggtgactcaagcctgtaatcccagcactctg

SEQ ID NO: 563242 - DNA, 67 bp, Artificial Sequence
  ENSG00000169871_37 (sequence is synthesized)
caacctccacctcccagccgccctctgggaagtgcggagtgtctctgcctggccgcccattgtctgg

SEQ ID NO: 563243 - DNA, 68 bp, Artificial Sequence
  ENSG00000169871_38 (sequence is synthesized)
ggaagtgaggagtgtctctgcccggctgcccatcatctgagatgtggggagcacctcaagtctgggag

SEQ ID NO: 563244 - DNA, 74 bp, Artificial Sequence
  ENSG00000169871_39 (sequence is synthesized)
tgggaaaaccatgcagaattgatttgacgaggaaagccttggtctctaatacatgcaatgactagaacagtatt

SEQ ID NO: 563245 - DNA, 120 bp, Artificial Sequence
  ENSG00000169871_40 (sequence is synthesized)
agccttggtctctaatacatgcaatgactagaacagtatttggtcaaagaaccacataagctctgtaccctggaggaaatgtatgcaggcaaggactagtaaaataaaaaataataataa

SEQ ID NO: 563246 - DNA, 120 bp, Artificial Sequence
  ENSG00000169871_41 (sequence is synthesized)
tgcagcgagccgagttcaccccattgcactccagcctgggtgtcacagtgagactctgtctcaaaaaaataataaataaataattaaatccacttgcagtggtcaaaaataaatgttaaa

SEQ ID NO: 563247 - DNA, 120 bp, Artificial Sequence
  ENSG00000169871_42 (sequence is synthesized)
taaatgggtgagaaatcttgcggagaaatagactcctggcactataaaaatgatcctggagaataatttggctagactttgcaagaatgacaaaaatgattataagaatcagttgtctca

SEQ ID NO: 563248 - DNA, 120 bp, Artificial Sequence
  ENSG00000169871_43 (sequence is synthesized)
ctttggggaatacattctgggaaaataatgtaagagaaaaaatatttgcatacagacatttgaggctgctctgtatattacaggcaagaactggaaactgttcggctgcagggtgacagc

SEQ ID NO: 563249 - DNA, 120 bp, Artificial Sequence
  ENSG00000169871_44 (sequence is synthesized)
taactagattgtggtttattaggggaatgagcctttctttgtgtatgacaactatgaaaactattgagaagaaatagttacgtgatacagtcataatcctcaaaaacggagaatcaggaa

SEQ ID NO: 563250 - DNA, 120 bp, Artificial Sequence
  ENSG00000169871_45 (sequence is synthesized)
ttatgatcaaatagtgatagtaacaaggaaaacatctgtctaaataattactgagtagaaataggttcggaatttgtaaatagtcattaatttgggagattggggttttttttgttttgt

SEQ ID NO: 563251 - DNA, 120 bp, Artificial Sequence
  ENSG00000169871_46 (sequence is synthesized)
tttttgtttgtttttcattattttgtgctattattcatacgtgtacatttctacttcagtttttattatccattacataacatacatgcttgattatttgcttcaaggaaatacaccttt

SEQ ID NO: 563252 - DNA, 120 bp, Artificial Sequence
  ENSG00000169871_47 (sequence is synthesized)
ataagtaatactcaataactactgggtttgagaatgaaggtgtcagaacgaatgagattgtcctatgaaagaagaggcaggagccagggaggaggatcccacccggccggggctcagcca

SEQ ID NO: 563253 - DNA, 120 bp, Artificial Sequence
  ENSG00000169871_48 (sequence is synthesized)
ggaggcagggccattggggcagggtggcagtccaaggaaccgctctgggaaggtttgcaaaggtcggggtcccccctgccaggtgatcgaattatcgtggagtgtctggaaggcggggga

SEQ ID NO: 563254 - DNA, 120 bp, Artificial Sequence
  ENSG00000169871_49 (sequence is synthesized)
agttttgttgagttcaccaaataactcagaccaactggaaaccaagtggagtttctacaggaccaactagaatagggatcagctacatgggggcggggggaggggggcagggaacggtgt

SEQ ID NO: 563255 - DNA, 120 bp, Artificial Sequence
  ENSG00000169871_50 (sequence is synthesized)
ctgtcttcattgcagctctgtctgcagagccagcactgtgatacctcatagtaggtgctcagtgaatgtctgtgaagtgaattactatctagacaaggatgagactggtatgactctcca

SEQ ID NO: 563256 - DNA, 120 bp, Artificial Sequence
  ENSG00000169871_51 (sequence is synthesized)
aagctttcccacctccaaaacctcggcttgtggggaatctccagtagggggcactgtggacacggttcgcatctgcctcccaaggctgggctccgcgtcaaaaaaaaaaaaaaaaaatga

SEQ ID NO: 563257 - DNA, 120 bp, Artificial Sequence
  ENSG00000169871_52 (sequence is synthesized)
gactgagccaggtgcagtggtcactcctgttatctcagcactttgcgtggccaaggcgggaggatgtcttgaggccaggagttcaagactaggctgggcaacatagcaagaccccatctc

SEQ ID NO: 563258 - DNA, 85 bp, Artificial Sequence
  ENSG00000169871_53 (sequence is synthesized)
agcaagaccccatctctacaaaaaaatttttaaattagccagaggtggtggcatgcacccttgctcgagcccaggagttcaaggc

SEQ ID NO: 563259 - DNA, 120 bp, Artificial Sequence
  ENSG00000169871_54 (sequence is synthesized)
tgcactccagcctgagtgacagagcaaaacctggtttcctaagggggggataaaagagggagagatgagatcggggtgtcccgcttctgtgcatgtggagggggtaactgggaaccgtgt

SEQ ID NO: 563260 - DNA, 120 bp, Artificial Sequence
  ENSG00000169871_55 (sequence is synthesized)
aaccgtgtactgtaggggatcgcacaccttggggtggaaacagcagctctccggagttgcatgggagccatgggcagtggtcctggctggtgaaatgattctagccacgtggcccaccca

SEQ ID NO: 563261 - DNA, 120 bp, Artificial Sequence
  ENSG00000169871_56 (sequence is synthesized)
gggggcaaaacaatagaaaccttcagaaatgaaacgtcacctggctgcaagaagatagtcccacaggcgccctagagatggggatgccaagtggcttctcgggaagctgtaagaatccac

SEQ ID NO: 563262 - DNA, 120 bp, Artificial Sequence
  ENSG00000169871_57 (sequence is synthesized)
agggcattgtaagatggagggaaatattaagttttcttcgtaaagaggtgaggggggcgagagcagcaaaggacactggaaaatgagaagcatggatgggaagtgttgcattgagcataa

SEQ ID NO: 563263 - DNA, 120 bp, Artificial Sequence
  ENSG00000169871_58 (sequence is synthesized)
tttggaggtaaaatctccaacaccgtaactgagtggcctggggacctgatagaaagccctgctcaggactaaggcagagttcccagttatatcgcagatacaaagagaccaggaacacgc

SEQ ID NO: 563264 - DNA, 120 bp, Artificial Sequence
  ENSG00000169871_59 (sequence is synthesized)
gagaccctgtctcaaaaagaaaaaaaaaaaagagagaaatcaggaacatcatgaaagatacagcaaaatgttttaccccagcccactgcaccacacctgggattgtgacaattaacttga

SEQ ID NO: 563265 - DNA, 120 bp, Artificial Sequence
  ENSG00000169871_60 (sequence is synthesized)
taacttgataaattgttccttttcctgttcggaactgactaggttgtgcgtggatggaccagtgaaaagaaaatcctgtttgggtagggaagagggaagtagaaaacctctttcgtattc

SEQ ID NO: 563266 - DNA, 120 bp, Artificial Sequence
  ENSG00000169871_61 (sequence is synthesized)
ttggtgtcaagaaatgggaagagaatgagggagcagagacctgggttgagtgttggctctgcactaaacagctgtgtgatcttggtctagtgccttaacctctctgagcctcagtttgta

SEQ ID NO: 563267 - DNA, 120 bp, Artificial Sequence
  ENSG00000169871_62 (sequence is synthesized)
catcagtaacattgggataatgacatccacatgcccacttcacagagctgctgtgaggactggatgagaaatgtagagaagtatttcggacaccataaagctcaaatacaaggtgttggt

SEQ ID NO: 563268 - DNA, 120 bp, Artificial Sequence
  ENSG00000169871_63 (sequence is synthesized)
taggaaaagtttcaactgacttgtacccacctgatacccctccatcagcataagcgtgtatgaggatgttaggtacatgtgttgtgagtgaaagctctggaacacccgagtagagctttc

SEQ ID NO: 563269 - DNA, 120 bp, Artificial Sequence
  ENSG00000169871_64 (sequence is synthesized)
tgcaaatcagcttctccttcagaggagaccattttgttttgctttccagcagttacttgaagaagccttatctgaagtcacaacagtgacttcaggaatagaagggaccaatggccagct

SEQ ID NO: 563270 - DNA, 120 bp, Artificial Sequence
  ENSG00000169871_65 (sequence is synthesized)
tgctgaaatgtaatgccattcttaaaagccagctaagaatcagaccgtattagttaaggacccataagagtagacatttagaaaaagtgaaaaatggcaagagtggcccaatcttttgag

SEQ ID NO: 563271 - DNA, 120 bp, Artificial Sequence
  ENSG00000169871_66 (sequence is synthesized)
agtttagagaaaatatcatttggaaagggagtagctctccttctattttagccttattattacggtatctataaagcaatgccatattctaaatctgcagaaataaaattctaaggggcg

SEQ ID NO: 563272 - DNA, 120 bp, Artificial Sequence
  ENSG00000169871_67 (sequence is synthesized)
aaagtccaaggcagaagtcaaaagttttgcaaggaaaccgatgaggttgctgacctgagctgggcagggttgaacaggcgagtgccaagatcaaggtctctgattgtctctccttgaaag

SEQ ID NO: 563273 - DNA, 120 bp, Artificial Sequence
  ENSG00000169871_68 (sequence is synthesized)
gtaagcagagaactagggctatcccataaattaagtgggagattggaaaggggtgcggacttctgtattggggagaaggtcttggatgaactggggcagagaactgccagagagagtacc

SEQ ID NO: 563274 - DNA, 120 bp, Artificial Sequence
  ENSG00000169871_69 (sequence is synthesized)
taggaatacgttgttagcaggagaaagaccaagttcagatgcagacttgggaaagtaggtaacttgaccaaaggtagcaaaattagactacccaactggattgtgaatgcagtttatgaa

SEQ ID NO: 563275 - DNA, 120 bp, Artificial Sequence
  ENSG00000169871_70 (sequence is synthesized)
atggatcaggacaggagcaaaaatagattttctagaaactgcagactcctgtgattggagcagtatacaaagtacagcaacatcagactagatctcacctgaggtgctgggtgagaaatc

SEQ ID NO: 563276 - DNA, 120 bp, Artificial Sequence
  ENSG00000169871_71 (sequence is synthesized)
ttagggaccagatggaagagggcctgtgtataaagacattaggaaggaggtttgggagggcagcctgacttgtctccagagaaagttagaactggttgacttagcaaccaagggacactg

SEQ ID NO: 563277 - DNA, 120 bp, Artificial Sequence
  ENSG00000169871_72 (sequence is synthesized)
ggtcaaagacgaggaatcaggacgtcggtgcctagtgactgagcgccagcccagcccatttctctacattgccatgggctaaacccagtgtgctgtaaactcttcagttcctttggttat

SEQ ID NO: 563278 - DNA, 120 bp, Artificial Sequence
  ENSG00000169871_73 (sequence is synthesized)
ggattttgtatcttttctgtgtttcttaataaagttcttttgaaaaatgggaacctttctcagatgggaattttgtatctttcctctgtttcttaataaagttcttttgaaaaattggaa

SEQ ID NO: 563279 - DNA, 120 bp, Artificial Sequence
  ENSG00000169871_74 (sequence is synthesized)
gcaagatcctaccccaactggcaggacctaggcatctctgcccactgggatccccgtctgtgtccttactgcctgctcctcgcaccctggcaccctatacagcaggaccccagtacctgt

SEQ ID NO: 563280 - DNA, 120 bp, Artificial Sequence
  ENSG00000169871_75 (sequence is synthesized)
gcacacaggagggcttccaccatgtttgccacaaggcctgtggactggggacactgaggattcgattattagctaaggccagggactcctggtcttgtcagttctcacaggtctgaccca

SEQ ID NO: 563281 - DNA, 120 bp, Artificial Sequence
  ENSG00000169876_0 (sequence is synthesized)
catttcgccagctcctctgggggtgacaggcaagtgagacgtgctcagagctccgatgccaaggccagggaccatggcgctgtgtctgctgaccttggtcctctcgctcttgcccccaca

SEQ ID NO: 563282 - DNA, 120 bp, Artificial Sequence
  ENSG00000169876_1 (sequence is synthesized)
agctgctgcagaacaggacctcagtgtgaacagggctgtgtgggatggaggagggtgcatctcccaaggggacgtcttgaaccgtcagtgccagcagctgtctcagcacgttaggacagg

SEQ ID NO: 563283 - DNA, 120 bp, Artificial Sequence
  ENSG00000169876_2 (sequence is synthesized)
ttctgcggcaaacaccgccacaggtacaacatctacaaatgtcgtggagccaagaatgtatttgagttgcagcaccaaccctgagatgacctcgattgagtccagtgtgacttcagacac

SEQ ID NO: 563284 - DNA, 120 bp, Artificial Sequence
  ENSG00000169876_3 (sequence is synthesized)
tcctggtgtctccagtaccaggatgacaccaacagaatccagaacaacttcagaatctaccagtgacagcaccacacttttccccagttctactgaagacacttcatctcctacaactcc

SEQ ID NO: 563285 - DNA, 120 bp, Artificial Sequence
  ENSG00000169876_4 (sequence is synthesized)
tgaaggcaccgacgtgcccatgtcaacaccaagtgaagaaagcatttcatcaacaatggcttttgtcagcactgcacctcttcccagttttgaggcctacacatctttaacatataaggt

SEQ ID NO: 563286 - DNA, 120 bp, Artificial Sequence
  ENSG00000169876_5 (sequence is synthesized)
tgatatgagcacacctctgaccacttctactcaggcaagttcatctcctactactcctgaaagcaccaccatacccaaatcaactaacagtgaaggaagcactccattaacaagtatgcc

SEQ ID NO: 563287 - DNA, 120 bp, Artificial Sequence
  ENSG00000169876_6 (sequence is synthesized)
tgccagcaccatgaaggtggccagttcagaggctatcacccttttgacaactcctgttgaaatcagcacacctgtgaccatttctgctcaagccagttcatctcctacaactgctgaagg

SEQ ID NO: 563288 - DNA, 120 bp, Artificial Sequence
  ENSG00000169876_7 (sequence is synthesized)
tcccagcctgtcaaactcagctcctagtggaggaagcactccattaacaagaatgcctctcagcgtgatgctggtggtcagttctgaggctagcaccctttcaacaactcctgctgccac

SEQ ID NO: 563289 - DNA, 120 bp, Artificial Sequence
  ENSG00000169876_8 (sequence is synthesized)
caacattcctgtgatcacttctactgaagccagttcatctcctacaacggctgaaggcaccagcataccaacctcaacttatactgaaggaagcactccattaacaagtacgcctgccag

SEQ ID NO: 563290 - DNA, 120 bp, Artificial Sequence
  ENSG00000169876_9 (sequence is synthesized)
caccatgccggttgccacttctgaaatgagcacactttcaataactcctgttgacaccagcacacttgtgaccacttctactgaacccagttcacttcctacaactgctgaagctaccag

SEQ ID NO: 563291 - DNA, 120 bp, Artificial Sequence
  ENSG00000169876_10 (sequence is synthesized)
catgctaacctcaactcttagtgaaggaagcactccattaacaaatatgcctgtcagcaccatattggtggccagttctgaggctagcaccacttcaacaattcctgttgactccaaaac

SEQ ID NO: 563292 - DNA, 120 bp, Artificial Sequence
  ENSG00000169876_11 (sequence is synthesized)
ttttgtgaccactgctagtgaagccagctcatctcccacaactgctgaagataccagcattgcaacctcaactcctagtgaaggaagcactccattaacaagtatgcctgtcagcaccac

SEQ ID NO: 563293 - DNA, 120 bp, Artificial Sequence
  ENSG00000169876_12 (sequence is synthesized)
tccagtggccagttctgaggctagcaacctttcaacaactcctgttgactccaaaactcaggtgaccacttctactgaagccagttcatctcctccaactgctgaagttaacagcatgcc

SEQ ID NO: 563294 - DNA, 120 bp, Artificial Sequence
  ENSG00000169876_13 (sequence is synthesized)
aacctcaactcctagtgaaggaagcactccattaacaagtatgtctgtcagcaccatgccggtggccagttctgaggctagcaccctttcaacaactcctgttgacaccagcacacctgt

SEQ ID NO: 563295 - DNA, 120 bp, Artificial Sequence
  ENSG00000169876_14 (sequence is synthesized)
gaccacttctagtgaagccagttcatcttctacaactcctgaaggtaccagcataccaacctcaactcctagtgaaggaagcactccattaacaaacatgcctgtcagcaccaggctggt

SEQ ID NO: 563296 - DNA, 120 bp, Artificial Sequence
  ENSG00000169876_15 (sequence is synthesized)
ggtcagttctgaggctagcaccacttcaacaactcctgctgactccaacacttttgtgaccacttctagtgaagctagttcatcttctacaactgctgaaggtaccagcatgccaacctc

SEQ ID NO: 563297 - DNA, 120 bp, Artificial Sequence
  ENSG00000169876_16 (sequence is synthesized)
aacttacagtgaaagaggcactacaataacaagtatgtctgtcagcaccacactggtggccagttctgaggctagcaccctttcaacaactcctgttgactccaacactcctgtgaccac

SEQ ID NO: 563298 - DNA, 120 bp, Artificial Sequence
  ENSG00000169876_17 (sequence is synthesized)
ttcaactgaagccacttcatcttctacaactgcggaaggtaccagcatgccaacctcaacttatactgaaggaagcactccattaacaagtatgcctgtcaacaccacactggtggccag

SEQ ID NO: 563299 - DNA, 120 bp, Artificial Sequence
  ENSG00000169876_18 (sequence is synthesized)
ttctgaggctagcaccctttcaacaactcctgttgacaccagcacacctgtgaccacttcaactgaagccagttcctctcctacaactgctgatggtgccagtatgccaacctcaactcc

SEQ ID NO: 563300 - DNA, 120 bp, Artificial Sequence
  ENSG00000169876_19 (sequence is synthesized)
tagtgaaggaagcactccattaacaagtatgcctgtcagcaaaacgctgttgaccagttctgaggctagcaccctttcaacaactcctcttgacacaagcacacatatcaccacttctac

SEQ ID NO: 563301 - DNA, 120 bp, Artificial Sequence
  ENSG00000169876_20 (sequence is synthesized)
tgaagccagttgctctcctacaaccactgaaggtaccagcatgccaatctcaactcctagtgaaggaagtcctttattaacaagtatacctgtcagcatcacaccggtgaccagtcctga

SEQ ID NO: 563302 - DNA, 120 bp, Artificial Sequence
  ENSG00000169876_21 (sequence is synthesized)
ggctagcaccctttcaacaactcctgttgactccaacagtcctgtgaccacttctactgaagtcagttcatctcctacacctgctgaaggtaccagcatgccaacctcaacttatagtga

SEQ ID NO: 563303 - DNA, 120 bp, Artificial Sequence
  ENSG00000169876_22 (sequence is synthesized)
aggaagaactcctttaacaagtatgcctgtcagcaccacactggtggccacttctgcaatcagcaccctttcaacaactcctgttgacaccagcacacctgtgaccaattctactgaagc

SEQ ID NO: 563304 - DNA, 120 bp, Artificial Sequence
  ENSG00000169876_23 (sequence is synthesized)
ccgttcgtctcctacaacttctgaaggtaccagcatgccaacctcaactcctggggaaggaagcactccattaacaagtatgcctgacagcaccacgccggtagtcagttctgaggctag

SEQ ID NO: 563305 - DNA, 120 bp, Artificial Sequence
  ENSG00000169876_24 (sequence is synthesized)
aacactttcagcaactcctgttgacaccagcacacctgtgaccacttctactgaagccacttcatctcctacaactgctgaaggtaccagcataccaacctcgactcctagtgaaggaac

SEQ ID NO: 563306 - DNA, 120 bp, Artificial Sequence
  ENSG00000169876_25 (sequence is synthesized)
gactccattaacaagcacacctgtcagccacacgctggtggccaattctgaggctagcaccctttcaacaactcctgttgactccaacactcctttgaccacttctactgaagccagttc

SEQ ID NO: 563307 - DNA, 120 bp, Artificial Sequence
  ENSG00000169876_26 (sequence is synthesized)
acctcctcccactgctgaaggtaccagcatgccaacctcaactcctagtgaaggaagcactccattaacacgtatgcctgtcagcaccacaatggtggccagttctgaaacgagcacact

SEQ ID NO: 563308 - DNA, 120 bp, Artificial Sequence
  ENSG00000169876_27 (sequence is synthesized)
ttcaacaactcctgctgacaccagcacacctgtgaccacttattctcaagccagttcatcttctacaactgctgacggtaccagcatgccaacctcaacttatagtgaaggaagcactcc

SEQ ID NO: 563309 - DNA, 120 bp, Artificial Sequence
  ENSG00000169876_28 (sequence is synthesized)
actaacaagtgtgcctgtcagcaccaggctggtggtcagttctgaggctagcaccctttccacaactcctgtcgacaccagcatacctgtcaccacttctactgaagccagttcatctcc

SEQ ID NO: 563310 - DNA, 120 bp, Artificial Sequence
  ENSG00000169876_29 (sequence is synthesized)
tacaactgctgaaggtaccagcataccaacctcacctcccagtgaaggaaccactccgttagcaagtatgcctgtcagcaccacgctggtggtcagttctgaggctaacaccctttcaac

SEQ ID NO: 563311 - DNA, 120 bp, Artificial Sequence
  ENSG00000169876_30 (sequence is synthesized)
aactcctgtggactccaaaactcaggtggccacttctactgaagccagttcacctcctccaactgctgaagttaccagcatgccaacctcaactcctggagaaagaagcactccattaac

SEQ ID NO: 563312 - DNA, 120 bp, Artificial Sequence
  ENSG00000169876_31 (sequence is synthesized)
aagtatgcctgtcagacacacgccagtggccagttctgaggctagcaccctttcaacatctcccgttgacaccagcacacctgtgaccacttctgctgaaaccagttcctctcctacaac

SEQ ID NO: 563313 - DNA, 120 bp, Artificial Sequence
  ENSG00000169876_32 (sequence is synthesized)
cgctgaaggtaccagcttgccaacctcaactactagtgaaggaagtactctattaacaagtatacctgtcagcaccacgctggtgaccagtcctgaggctagcacccttttaacaactcc

SEQ ID NO: 563314 - DNA, 120 bp, Artificial Sequence
  ENSG00000169876_33 (sequence is synthesized)
tgttgacactaaaggtcctgtggtcacttctaatgaagtcagttcatctcctacacctgctgaaggtaccagcatgccaacctcaacttatagtgaaggaagaactcctttaacaagtat

SEQ ID NO: 563315 - DNA, 120 bp, Artificial Sequence
  ENSG00000169876_34 (sequence is synthesized)
acctgtcaacaccacactggtggccagttctgcaatcagcatcctttcaacaactcctgttgacaacagcacacctgtgaccacttctactgaagcctgttcatctcctacaacttctga

SEQ ID NO: 563316 - DNA, 120 bp, Artificial Sequence
  ENSG00000169876_35 (sequence is synthesized)
aggtaccagcatgccaaactcaaatcctagtgaaggaaccactccgttaacaagtatacctgtcagcaccacgccggtagtcagttctgaggctagcaccctttcagcaactcctgttga

SEQ ID NO: 563317 - DNA, 120 bp, Artificial Sequence
  ENSG00000169876_36 (sequence is synthesized)
caccagcacccctgggaccacttctgctgaagccacttcatctcctacaactgctgaaggtatcagcataccaacctcaactcctagtgaaggaaagactccattaaaaagtatacctgt

SEQ ID NO: 563318 - DNA, 120 bp, Artificial Sequence
  ENSG00000169876_37 (sequence is synthesized)
cagcaacacgccggtggccaattctgaggctagcaccctttcaacaactcctgttgactctaacagtcctgtggtcacttctacagcagtcagttcatctcctacacctgctgaaggtac

SEQ ID NO: 563319 - DNA, 120 bp, Artificial Sequence
  ENSG00000169876_38 (sequence is synthesized)
cagcatagcaatctcaacgcctagtgaaggaagcactgcattaacaagtatacctgtcagcaccacaacagtggccagttctgaaatcaacagcctttcaacaactcctgctgtcaccag

SEQ ID NO: 563320 - DNA, 120 bp, Artificial Sequence
  ENSG00000169876_39 (sequence is synthesized)
cacacctgtgaccacttattctcaagccagttcatctcctacaactgctgacggtaccagcatgcaaacctcaacttatagtgaaggaagcactccactaacaagtttgcctgtcagcac

SEQ ID NO: 563321 - DNA, 120 bp, Artificial Sequence
  ENSG00000169876_40 (sequence is synthesized)
catgctggtggtcagttctgaggctaacaccctttcaacaacccctattgactccaaaactcaggtgaccgcttctactgaagccagttcatctacaaccgctgaaggtagcagcatgac

SEQ ID NO: 563322 - DNA, 120 bp, Artificial Sequence
  ENSG00000169876_41 (sequence is synthesized)
aatctcaactcctagtgaaggaagtcctctattaacaagtatacctgtcagcaccacgccggtggccagtcctgaggctagcaccctttcaacaactcctgttgactccaacagtcctgt

SEQ ID NO: 563323 - DNA, 120 bp, Artificial Sequence
  ENSG00000169876_42 (sequence is synthesized)
gatcacttctactgaagtcagttcatctcctacacctgctgaaggtaccagcatgccaacctcaacttatactgaaggaagaactcctttaacaagtataactgtcagaacaacaccggt

SEQ ID NO: 563324 - DNA, 120 bp, Artificial Sequence
  ENSG00000169876_43 (sequence is synthesized)
ggccagctctgcaatcagcaccctttcaacaactcccgttgacaacagcacacctgtgaccacttctactgaagcccgttcatctcctacaacttctgaaggtaccagcatgccaaactc

SEQ ID NO: 563325 - DNA, 120 bp, Artificial Sequence
  ENSG00000169876_44 (sequence is synthesized)
aactcctagtgaaggaaccactccattaacaagtatacctgtcagcaccacgccggtactcagttctgaggctagcaccctttcagcaactcctattgacaccagcacccctgtgaccac

SEQ ID NO: 563326 - DNA, 120 bp, Artificial Sequence
  ENSG00000169876_45 (sequence is synthesized)
ttctactgaagccacttcgtctcctacaactgctgaaggtaccagcataccaacctcgactcttagtgaaggaatgactccattaacaagcacacctgtcagccacacgctggtggccaa

SEQ ID NO: 563327 - DNA, 120 bp, Artificial Sequence
  ENSG00000169876_46 (sequence is synthesized)
ttctgaggctagcaccctttcaacaactcctgttgactctaacagtcctgtggtcacttctacagcagtcagttcatctcctacacctgctgaaggtaccagcatagcaacctcaacgcc

SEQ ID NO: 563328 - DNA, 120 bp, Artificial Sequence
  ENSG00000169876_47 (sequence is synthesized)
tagtgaaggaagcactgcattaacaagtatacctgtcagcaccacaacagtggccagttctgaaaccaacaccctttcaacaactcccgctgtcaccagcacacctgtgaccacttatgc

SEQ ID NO: 563329 - DNA, 120 bp, Artificial Sequence
  ENSG00000169876_48 (sequence is synthesized)
tcaagtcagttcatctcctacaactgctgacggtagcagcatgccaacctcaactcctagggaaggaaggcctccattaacaagtatacctgtcagcaccacaacagtggccagttctga

SEQ ID NO: 563330 - DNA, 120 bp, Artificial Sequence
  ENSG00000169876_49 (sequence is synthesized)
aatcaacaccctttcaacaactcttgctgacaccaggacacctgtgaccacttattctcaagccagttcatctcctacaactgctgatggtaccagcatgccaaccccagcttatagtga

SEQ ID NO: 563331 - DNA, 120 bp, Artificial Sequence
  ENSG00000169876_50 (sequence is synthesized)
aggaagcactccactaacaagtatgcctctcagcaccacgctggtggtcagttctgaggctagcactctttccacaactcctgttgacaccagcactcctgccaccacttctactgaagg

SEQ ID NO: 563332 - DNA, 120 bp, Artificial Sequence
  ENSG00000169876_51 (sequence is synthesized)
cagttcatctcctacaactgcaggaggtaccagcatacaaacctcaactcctagtgaacggaccactccattagcaggtatgcctgtcagcactacgcttgtggtcagttctgagggtaa

SEQ ID NO: 563333 - DNA, 120 bp, Artificial Sequence
  ENSG00000169876_52 (sequence is synthesized)
caccctttcaacaactcctgttgactccaaaactcaggtgaccaattctactgaagccagttcatctgcaaccgctgaaggtagcagcatgacaatctcagctcctagtgaaggaagtcc

SEQ ID NO: 563334 - DNA, 120 bp, Artificial Sequence
  ENSG00000169876_53 (sequence is synthesized)
tctactaacaagtatacctctcagcaccacgccggtggccagtcctgaggctagcaccctttcaacaactcctgttgactccaacagtcctgtgatcacttctactgaagtcagttcatc

SEQ ID NO: 563335 - DNA, 120 bp, Artificial Sequence
  ENSG00000169876_54 (sequence is synthesized)
tcctatacctactgaaggtaccagcatgcaaacctcaacttatagtgacagaagaactcctttaacaagtatgcctgtcagcaccacagtggtggccagttctgcaatcagcaccctttc

SEQ ID NO: 563336 - DNA, 120 bp, Artificial Sequence
  ENSG00000169876_55 (sequence is synthesized)
aacaactcctgttgacaccagcacacctgtgaccaattctactgaagcccgttcatctcctacaacttctgaaggtaccagcatgccaacctcaactcctagtgaaggaagcactccatt

SEQ ID NO: 563337 - DNA, 120 bp, Artificial Sequence
  ENSG00000169876_56 (sequence is synthesized)
cacaagtatgcctgtcagcaccatgccggtagttacttctgaggctagcaccctttcagcaactcctgttgacaccagcacacctgtgaccacttctactgaagccacttcatctcctac

SEQ ID NO: 563338 - DNA, 120 bp, Artificial Sequence
  ENSG00000169876_57 (sequence is synthesized)
aactgctgaaggtaccagcataccaacttcaactcttagtgaaggaacgactccattaacaagtatacctgtcagccacacgctggtggccaattctgaggttagcaccctttcaacaac

SEQ ID NO: 563339 - DNA, 120 bp, Artificial Sequence
  ENSG00000169876_58 (sequence is synthesized)
tcctgttgactccaacactcctttcactacttctactgaagccagttcacctcctcccactgctgaaggtaccagcatgccaacctcaacttctagtgaaggaaacactccattaacacg

SEQ ID NO: 563340 - DNA, 120 bp, Artificial Sequence
  ENSG00000169876_59 (sequence is synthesized)
cacacctgtgactacttattctcaagccggttcatctcctacaactgctgacgatactagcatgccaacctcaacttatagtgaaggaagcactccactaacaagtgtgcctgtcagcac

SEQ ID NO: 563341 - DNA, 120 bp, Artificial Sequence
  ENSG00000169876_60 (sequence is synthesized)
catgccggtggtcagttctgaggctagcacccattccacaactcctgttgacaccagcacacctgtcaccacttctactgaagccagttcatctcctacaactgctgaaggtaccagcat

SEQ ID NO: 563342 - DNA, 120 bp, Artificial Sequence
  ENSG00000169876_61 (sequence is synthesized)
accaacctcacctcctagtgaaggaaccactccgttagcaagtatgcctgtcagcaccacgccggtggtcagttctgaggctggcaccctttccacaactcctgttgacaccagcacacc

SEQ ID NO: 563343 - DNA, 120 bp, Artificial Sequence
  ENSG00000169876_62 (sequence is synthesized)
tatgaccacttctactgaagccagttcatctcctacaactgctgaagatatcgtcgtgccaatctcaactgctagtgaaggaagtactctattaacaagtatacctgtcagcaccacgcc

SEQ ID NO: 563344 - DNA, 120 bp, Artificial Sequence
  ENSG00000169876_63 (sequence is synthesized)
agtggccagtcctgaggctagcaccctttcaacaactcctgttgactccaacagtcctgtggtcacttctactgaaatcagttcatctgctacatccgctgaaggtaccagcatgcctac

SEQ ID NO: 563345 - DNA, 120 bp, Artificial Sequence
  ENSG00000169876_64 (sequence is synthesized)
ctcaacttatagtgaaggaagcactccattaagaagtatgcctgtcagcaccaagccgttggccagttctgaggctagcactctttcaacaactcctgttgacaccagcatacctgtcac

SEQ ID NO: 563346 - DNA, 120 bp, Artificial Sequence
  ENSG00000169876_65 (sequence is synthesized)
cacttctactgaaaccagttcatctcctacaactgcaaaagataccagcatgccaatctcaactcctagtgaagtaagtacttcattaacaagtatacttgtcagcaccatgccagtggc

SEQ ID NO: 563347 - DNA, 120 bp, Artificial Sequence
  ENSG00000169876_66 (sequence is synthesized)
cagttctgaggctagcaccctttcaacaactcctgttgacaccaggacacttgtgaccacttccactggaaccagttcatctcctacaactgctgaaggtagcagcatgccaacctcaac

SEQ ID NO: 563348 - DNA, 120 bp, Artificial Sequence
  ENSG00000169876_67 (sequence is synthesized)
tcctggtgaaagaagcactccattaacaaatatacttgtcagcaccacgctgttggccaattctgaggctagcaccctttcaacaactcctgttgacaccagcacacctgtcaccacttc

SEQ ID NO: 563349 - DNA, 120 bp, Artificial Sequence
  ENSG00000169876_68 (sequence is synthesized)
tgctgaagccagttcttctcctacaactgctgaaggtaccagcatgcgaatctcaactcctagtgatggaagtactccattaacaagtatacttgtcagcaccctgccagtggccagttc

SEQ ID NO: 563350 - DNA, 120 bp, Artificial Sequence
  ENSG00000169876_69 (sequence is synthesized)
tgaggctagcaccgtttcaacaactgctgttgacaccagcatacctgtcaccacttctactgaagccagttcctctcctacaactgctgaagttaccagcatgccaacctcaactcctag

SEQ ID NO: 563351 - DNA, 120 bp, Artificial Sequence
  ENSG00000169876_70 (sequence is synthesized)
tgaaacaagtactccattaactagtatgcctgtcaaccacacgccagtggccagttctgaggctggcaccctttcaacaactcctgttgacaccagcacacctgtgaccacttctactaa

SEQ ID NO: 563352 - DNA, 120 bp, Artificial Sequence
  ENSG00000169876_71 (sequence is synthesized)
agccagttcatctcctacaactgctgaaggtatcgtcgtgccaatctcaactgctagtgaaggaagtactctattaacaagtatacctgtcagcaccacgccggtggccagttctgaggc

SEQ ID NO: 563353 - DNA, 120 bp, Artificial Sequence
  ENSG00000169876_72 (sequence is synthesized)
tagcaccctttcaacaactcctgttgataccagcatacctgtcaccacttctactgaaggcagttcttctcctacaactgctgaaggtaccagcatgccaatctcaactcctagtgaagt

SEQ ID NO: 563354 - DNA, 120 bp, Artificial Sequence
  ENSG00000169876_73 (sequence is synthesized)
aagtactccattaacaagtatacttgtcagcaccgtgccagtggccggttctgaggctagcaccctttcaacaactcctgttgacaccaggacacctgtcaccacttctgctgaagctag

SEQ ID NO: 563355 - DNA, 120 bp, Artificial Sequence
  ENSG00000169876_74 (sequence is synthesized)
ttcttctcctacaactgctgaaggtaccagcatgccaatctcaactcctggcgaaagaagaactccattaacaagtatgtctgtcagcaccatgccggtggccagttctgaggctagcac

SEQ ID NO: 563356 - DNA, 120 bp, Artificial Sequence
  ENSG00000169876_75 (sequence is synthesized)
cctttcaagaactcctgctgacaccagcacacctgtgaccacttctactgaagccagttcctctcctacaactgctgaaggtaccggcataccaatctcaactcctagtgaaggaagtac

SEQ ID NO: 563357 - DNA, 120 bp, Artificial Sequence
  ENSG00000169876_76 (sequence is synthesized)
tccattaacaagtatacctgtcagcaccacgccagtggccattcctgaggctagcaccctttcaacaactcctgttgactccaacagtcctgtggtcacttctactgaagtcagttcatc

SEQ ID NO: 563358 - DNA, 120 bp, Artificial Sequence
  ENSG00000169876_77 (sequence is synthesized)
tcctacacctgctgaaggtaccagcatgccaatctcaacttatagtgaaggaagcactccattaacaggtgtgcctgtcagcaccacaccggtgaccagttctgcaatcagcaccctttc

SEQ ID NO: 563359 - DNA, 120 bp, Artificial Sequence
  ENSG00000169876_78 (sequence is synthesized)
aacaactcctgttgacaccagcacacctgtgaccacttctactgaagcccattcatctcctacaacttctgaaggtaccagcatgccaacctcaactcctagtgaaggaagtactccatt

SEQ ID NO: 563360 - DNA, 120 bp, Artificial Sequence
  ENSG00000169876_79 (sequence is synthesized)
aacatatatgcctgtcagcaccatgctggtagtcagttctgaggatagcaccctttcagcaactcctgttgacaccagcacacctgtgaccacttctactgaagccacttcatctacaac

SEQ ID NO: 563361 - DNA, 120 bp, Artificial Sequence
  ENSG00000169876_80 (sequence is synthesized)
tgctgaaggtaccagcattccaacctcaactcctagtgaaggaatgactccattaactagtgtacctgtcagcaacacgccggtggccagttctgaggctagcatcctttcaacaactcc

SEQ ID NO: 563362 - DNA, 120 bp, Artificial Sequence
  ENSG00000169876_81 (sequence is synthesized)
tgttgactccaacactcctttgaccacttctactgaagccagttcatctcctcccactgctgaaggtaccagcatgccaacctcaactcctagtgaaggaagcactccattaacaagtat

SEQ ID NO: 563363 - DNA, 120 bp, Artificial Sequence
  ENSG00000169876_82 (sequence is synthesized)
gcctgtcagcaccacaacggtggccagttctgaaacgagcaccctttcaacaactcctgctgacaccagcacacctgtgaccacttattctcaagccagttcatctcctccaattgctga

SEQ ID NO: 563364 - DNA, 120 bp, Artificial Sequence
  ENSG00000169876_83 (sequence is synthesized)
cggtactagcatgccaacctcaacttatagtgaaggaagcactccactaacaaatatgtctttcagcaccacgccagtggtcagttctgaggctagcaccctttccacaactcctgttga

SEQ ID NO: 563365 - DNA, 120 bp, Artificial Sequence
  ENSG00000169876_84 (sequence is synthesized)
caccagcacacctgtcaccacttctactgaagccagtttatctcctacaactgctgaaggtaccagcataccaacctcaagtcctagtgaaggaaccactccattagcaagtatgcctgt

SEQ ID NO: 563366 - DNA, 120 bp, Artificial Sequence
  ENSG00000169876_85 (sequence is synthesized)
cagcaccacgccggtggtcagttctgaggttaacaccctttcaacaactcctgtggactccaacactctggtgaccacttctactgaagccagttcatctcctacaatcgctgaaggtac

SEQ ID NO: 563367 - DNA, 120 bp, Artificial Sequence
  ENSG00000169876_86 (sequence is synthesized)
cagcttgccaacctcaactactagtgaaggaagcactccattatcaattatgcctctcagtaccacgccggtggccagttctgaggctagcaccctttcaacaactcctgttgacaccag

SEQ ID NO: 563368 - DNA, 120 bp, Artificial Sequence
  ENSG00000169876_87 (sequence is synthesized)
cacacctgtgaccacttcttctccaaccaattcatctcctacaactgctgaagttaccagcatgccaacatcaactgctggtgaaggaagcactccattaacaaatatgcctgtcagcac

SEQ ID NO: 563369 - DNA, 120 bp, Artificial Sequence
  ENSG00000169876_88 (sequence is synthesized)
cacaccggtggccagttctgaggctagcaccctttcaacaactcctgttgactccaacacttttgttaccagttctagtcaagccagttcatctccagcaactcttcaggtcaccactat

SEQ ID NO: 563370 - DNA, 120 bp, Artificial Sequence
  ENSG00000169876_89 (sequence is synthesized)
gcgtatgtctactccaagtgaaggaagctcttcattaacaactatgctcctcagcagcacatatgtgaccagttctgaggctagcacaccttccactccttctgttgacagaagcacacc

SEQ ID NO: 563371 - DNA, 120 bp, Artificial Sequence
  ENSG00000169876_90 (sequence is synthesized)
tgtgaccacttctactcagagcaattctactcctacacctcctgaagttatcaccctgccaatgtcaactcctagtgaagtaagcactccattaaccattatgcctgtcagcaccacatc

SEQ ID NO: 563372 - DNA, 120 bp, Artificial Sequence
  ENSG00000169876_91 (sequence is synthesized)
ggtgaccatttctgaggctggcacagcttcaacacttcctgttgacaccagcacacctgtgatcacttctacccaagtcagttcatctcctgtgactcctgaaggtaccaccatgccaat

SEQ ID NO: 563373 - DNA, 120 bp, Artificial Sequence
  ENSG00000169876_92 (sequence is synthesized)
ctggacgcctagtgaaggaagcactccattaacaactatgcctgtcagcaccacacgtgtgaccagctctgagggtagcaccctttcaacaccttctgttgtcaccagcacacctgtgac

SEQ ID NO: 563374 - DNA, 120 bp, Artificial Sequence
  ENSG00000169876_93 (sequence is synthesized)
cacttctactgaagccatttcatcttctgcaactcttgacagcaccaccatgtctgtgtcaatgcccatggaaataagcacccttgggaccactattcttgtcagtaccacacctgttac

SEQ ID NO: 563375 - DNA, 120 bp, Artificial Sequence
  ENSG00000169876_94 (sequence is synthesized)
gaggtttcctgagagtagcaccccttccataccatctgtttacaccagcatgtctatgaccactgcctctgaaggcagttcatctcctacaactcttgaaggcaccaccaccatgcctat

SEQ ID NO: 563376 - DNA, 120 bp, Artificial Sequence
  ENSG00000169876_95 (sequence is synthesized)
gtcaactacgagtgaaagaagcactttattgacaactgtcctcatcagccctatatctgtgatgagtccttctgaggccagcacactttcaacacctcctggtgataccagcacaccttt

SEQ ID NO: 563377 - DNA, 120 bp, Artificial Sequence
  ENSG00000169876_96 (sequence is synthesized)
gctcacctctaccaaagccggttcattctccatacctgctgaagtcactaccatacgtatttcaattaccagtgaaagaagcactccattaacaactctccttgtcagcaccacacttcc

SEQ ID NO: 563378 - DNA, 120 bp, Artificial Sequence
  ENSG00000169876_97 (sequence is synthesized)
aactagctttcctggggccagcatagcttcgacacctcctcttgacacaagcacaacttttaccccttctactgacactgcctcaactcccacaattcctgtagccaccaccatatctgt

SEQ ID NO: 563379 - DNA, 120 bp, Artificial Sequence
  ENSG00000169876_98 (sequence is synthesized)
atcagtgatcacagaaggaagcacacctgggacaaccatttttattcccagcactcctgtcaccagttctactgctgatgtctttcctgcaacaactggtgctgtatctacccctgtgat

SEQ ID NO: 563380 - DNA, 120 bp, Artificial Sequence
  ENSG00000169876_99 (sequence is synthesized)
aacttccactgaactaaacacaccatcaacctccagtagtagtaccaccacatctttttcaactactaaggaatttacaacacccgcaatgactactgcagctcccctcacatatgtgac

SEQ ID NO: 563381 - DNA, 120 bp, Artificial Sequence
  ENSG00000169876_100 (sequence is synthesized)
catgtctactgcccccagcacacccagaacaaccagcagaggctgcactacttctgcatcaacgctttctgcaaccagtacacctcacacctctacttctgtcaccacccgtcctgtgac

SEQ ID NO: 563382 - DNA, 120 bp, Artificial Sequence
  ENSG00000169876_101 (sequence is synthesized)
cccttcatcagaatccagcaggccgtcaacaattacttctcacaccatcccacctacatttcctcctgctcactccagtacacctccaacaacctctgcctcctccacgactgtgaaccc

SEQ ID NO: 563383 - DNA, 120 bp, Artificial Sequence
  ENSG00000169876_102 (sequence is synthesized)
tgaggctgtcaccaccatgaccaccaggacaaaacccagcacacggaccacttccttccccacggtgaccaccaccgctgtccccacgaatactacaattaagagcaaccccacctcaac

SEQ ID NO: 563384 - DNA, 120 bp, Artificial Sequence
  ENSG00000169876_103 (sequence is synthesized)
tcctactgtgccaagaaccacaacatgctttggagatgggtgccagaatacggcctctcgctgcaagaatggaggcacctgggatgggctcaagtgccagtgtcccaacctctattatgg

SEQ ID NO: 563385 - DNA, 120 bp, Artificial Sequence
  ENSG00000169876_104 (sequence is synthesized)
ggagttgtgtgaggaggtggtcagcagcattgacatagggccaccggagactatctctgcccaaatggaactgactgtgacagtgaccagtgtgaagttcaccgaagagctaaaaaacca

SEQ ID NO: 563386 - DNA, 120 bp, Artificial Sequence
  ENSG00000169876_105 (sequence is synthesized)
ctcttcccaggaattccaggagttcaaacagacattcacggaacagatgaatattgtgtattccgggatccctgagtatgtcggggtgaacatcacaaagctacgtcttggcagtgtggt

SEQ ID NO: 563387 - DNA, 120 bp, Artificial Sequence
  ENSG00000169876_106 (sequence is synthesized)
ggtggagcatgacgtcctcctaagaaccaagtacacaccagaatacaagacagtattggacaatgccaccgaagtagtgaaagagaaaatcacaaaagtgaccacacagcaaataatgat

SEQ ID NO: 563388 - DNA, 120 bp, Artificial Sequence
  ENSG00000169876_107 (sequence is synthesized)
taatgatatttgctcagacatgatgtgtttcaacaccactggcacccaagtgcaaaacattacggtgacccagtacgaccctgaagaggactgccggaagatggccaaggaatatggaga

SEQ ID NO: 563389 - DNA, 120 bp, Artificial Sequence
  ENSG00000169876_108 (sequence is synthesized)
ctacttcgtagtggagtaccgggaccagaagccatactgcatcagcccctgtgagcctggcttcagtgtctccaagaactgtaacctcggcaagtgccagatgtctctaagtggacctca

SEQ ID NO: 563390 - DNA, 120 bp, Artificial Sequence
  ENSG00000169876_109 (sequence is synthesized)
gtgcctctgcgtgaccacggaaactcactggtacagtggggagacctgtaaccagggcacccagaagagtctggtgtacggcctcgtgggggcaggggtcgtgctgatgctgatcatcct

SEQ ID NO: 563391 - DNA, 120 bp, Artificial Sequence
  ENSG00000169876_110 (sequence is synthesized)
ggtagctctcctgatgctcgttttccgctccaagagagaggtgaaacggcaaaagtacagattgtctcagttatacaagtggcaagaagaggacagtggaccagctcctgggaccttcca

SEQ ID NO: 563392 - DNA, 120 bp, Artificial Sequence
  ENSG00000169876_111 (sequence is synthesized)
aaacattggctttgacatctgccaagatgatgattccatccacctggagtccatctatagtaatttccagccctccttgagacacatagaccctgaaacaaagatccgaattcagaggcc

SEQ ID NO: 563393 - DNA, 120 bp, Artificial Sequence
  ENSG00000169876_112 (sequence is synthesized)
tcaggtaatgacgacatcattttaaggcatggagctgagaagtctgggagtgaggagatcccagtccggctaagcttggtggagcattttcccattgagagccttccatgggaactcaat

SEQ ID NO: 563394 - DNA, 120 bp, Artificial Sequence
  ENSG00000169876_113 (sequence is synthesized)
gttcccattgtaagtacaggaaacaagccctgtacttaccaaggagaaagaggagagacagcagtgctgggagattctcaaatagaaacccgtggacgctccaatgggcttgtcatgata

SEQ ID NO: 563395 - DNA, 120 bp, Artificial Sequence
  ENSG00000169876_114 (sequence is synthesized)
tcaggctaggctttcctgctcatttttcaaagacgctccagatttgagggtactctgactgcaacatctttcaccccattgatcgccaggattgatttggttgatctggctgagcaggcg

SEQ ID NO: 563396 - DNA, 120 bp, Artificial Sequence
  ENSG00000169876_115 (sequence is synthesized)
ggtgtccccgtcctccctcactgccccatatgtgtccctcctaaagctgcatgctcagttgaagaggacgagaggacgaccttctctgatagaggaggaccacgcttcagtcaaaggcat

SEQ ID NO: 563397 - DNA, 120 bp, Artificial Sequence
  ENSG00000169876_116 (sequence is synthesized)
acaagtatctatctggacttccctgctagcacttccaaacaagctcagagatgttcctcccctcatctgcccgggttcagtaccatggacagcgccctcgacccgctgtttacaaccatg

SEQ ID NO: 563398 - DNA, 120 bp, Artificial Sequence
  ENSG00000169876_117 (sequence is synthesized)
accccttggacactggactgcatgcactttacatatcacaaaatgctctcataagaattattgcataccatcttcatgaaaaacacctgtatttaaatatagagcatttaccttttggta

SEQ ID NO: 563399 - DNA, 80 bp, Artificial Sequence
  ENSG00000169876_118 (sequence is synthesized)
agagcatttaccttttggtatataagattgtgggtattttttaagttcttattgttatgagttctgattttttccttagt

SEQ ID NO: 563400 - DNA, 120 bp, Artificial Sequence
  ENSG00000169876_119 (sequence is synthesized)
accccatgccctgggacccgacctccatacaagcaacagttcctgccccaccttgatgtgaggccaggaatagggcctcttctgggctgtggtgttttttgttttgttttgttttgtttt

SEQ ID NO: 563401 - DNA, 86 bp, Artificial Sequence
  ENSG00000169876_120 (sequence is synthesized)
ctgggtgcggtgggctcacatagtattacttgaggccaggagctcaagatcagcctgggcaacaacacagcaaaactctatctctt

SEQ ID NO: 563402 - DNA, 120 bp, Artificial Sequence
  ENSG00000169877_0 (sequence is synthesized)
acagagagattcacgcaccctcaagagtgtgggtgagacatatacagcctgttagacctgaaggcagatggctcttcttaaggccaataaggatctcatttccgcaggattgaaggagtt

SEQ ID NO: 563403 - DNA, 120 bp, Artificial Sequence
  ENSG00000169877_1 (sequence is synthesized)
cagcgttctgctgaatcagcaggtcttcaatgatcctctcgtctctgaagaagacatggtgactgtggtggaggactggatgaacttctacatcaactattacaggcagcaggtgacagg

SEQ ID NO: 563404 - DNA, 120 bp, Artificial Sequence
  ENSG00000169877_2 (sequence is synthesized)
aagagcgagacaaggctctgcaggagcttcggcaagagctgaacactctggccaaccctttcctggccaagtacagggacttcctgaagtctcatgagctcccgagtcacccaccgccct

SEQ ID NO: 563405 - DNA, 120 bp, Artificial Sequence
  ENSG00000169877_3 (sequence is synthesized)
cctcctagctcagggacccagcccctcctctctgagaaactctgaccttcatgtccttaggctgtgctcctgccactctaccctgacacctcaataaagaccagtgctggttttgttgga

SEQ ID NO: 563406 - DNA, 120 bp, Artificial Sequence
  ENSG00000169884_0 (sequence is synthesized)
agagccaccctgagctcggtgagagcaaagccagagcccccagtcctttgctcgccggcttgctagctctctcgatcactccctcccttcctccctcccttcctcccggcggccgcggcg

SEQ ID NO: 563407 - DNA, 120 bp, Artificial Sequence
  ENSG00000169884_1 (sequence is synthesized)
gcgctggggaagcggtgaagaggagtggcccggccctggaagaatgcggctctgacaaggggacagaacccagcgcagtctccccacggtttaagcagcactagtgaagcccaggcaacc

SEQ ID NO: 563408 - DNA, 120 bp, Artificial Sequence
  ENSG00000169884_2 (sequence is synthesized)
caaccgtgcctgtctcggaccccgcacccaaaccactggaggtcctgatcgatctgcccaccggagcctccgggcttcgacatgctggaggagccccggccgcggcctccgccctcgggc

SEQ ID NO: 563409 - DNA, 120 bp, Artificial Sequence
  ENSG00000169884_3 (sequence is synthesized)
ctcgcgggtctcctgttcctggcgttgtgcagtcgggctctaagcaatgagattctgggcctgaagttgcctggcgagccgccgctgacggccaacaccgtgtgcttgacgctgtccggc

SEQ ID NO: 563410 - DNA, 120 bp, Artificial Sequence
  ENSG00000169884_4 (sequence is synthesized)
ctgagcaagcggcagctaggcctgtgcctgcgcaaccccgacgtgacggcgtccgcgcttcagggtctgcacatcgcggtccacgagtgtcagcaccagctgcgcgaccagcgctggaac

SEQ ID NO: 563411 - DNA, 120 bp, Artificial Sequence
  ENSG00000169884_5 (sequence is synthesized)
tgctccgcgcttgagggcggcggccgcctgccgcaccacagcgccatcctcaagcgcggtttccgagaaagtgctttttccttctccatgctggctgctggggtcatgcacgcagtagcc

SEQ ID NO: 563412 - DNA, 120 bp, Artificial Sequence
  ENSG00000169884_6 (sequence is synthesized)
acggcctgcagcctgggcaagctggtgagctgtggctgtggctggaagggcagtggtgagcaggatcggctgagggccaaactgctgcagctgcaggcactgtcccgaggcaagagtttc

SEQ ID NO: 563413 - DNA, 120 bp, Artificial Sequence
  ENSG00000169884_7 (sequence is synthesized)
ccccactctctgcccagccctggccctggctcaagccccagccctggcccccaggacacatgggaatggggtggctgtaaccatgacatggactttggagagaagttctctcgggatttc

SEQ ID NO: 563414 - DNA, 120 bp, Artificial Sequence
  ENSG00000169884_8 (sequence is synthesized)
ttggattccagggaagctccccgggacatccaggcacgaatgcgaatccacaacaacagggtggggcgccaggtggtaactgaaaacctgaagcggaaatgcaagtgtcatggcacatca

SEQ ID NO: 563415 - DNA, 120 bp, Artificial Sequence
  ENSG00000169884_9 (sequence is synthesized)
catcttcattgatacccacaaccgcaattctggagccttccagccccgtctgcgtccccgtcgcctctcaggagagctggtctactttgagaagtctcctgacttctgtgagcgagaccc

SEQ ID NO: 563416 - DNA, 120 bp, Artificial Sequence
  ENSG00000169884_10 (sequence is synthesized)
cactatgggctccccagggacaaggggccgggcctgcaacaagaccagccgcctgttggatggctgtggcagcctgtgctgtggccgtgggcacaacgtgctccggcagacacgagttga

SEQ ID NO: 563417 - DNA, 120 bp, Artificial Sequence
  ENSG00000169884_11 (sequence is synthesized)
gcgctgccattgccgcttccactggtgctgctatgtgctgtgtgatgagtgcaaggttacagagtgggtgaatgtgtgtaagtgagggtcagccttaccttggggctggggaagaggact

SEQ ID NO: 563418 - DNA, 120 bp, Artificial Sequence
  ENSG00000169884_12 (sequence is synthesized)
gtgtgagaggggcgccttttcagccctttgctctgatttccttccaaggtcactcttggtccctggaagcttaaagtatctacctggaaacagctttaggggtggtgggggtcaggtgga

SEQ ID NO: 563419 - DNA, 120 bp, Artificial Sequence
  ENSG00000169884_13 (sequence is synthesized)
ctctgggatgtgtagccttctccccaacaattggagggtcttgaggggaagctgccacccctcttctgctccttagacacctgaatggactaagatgaaatgcactgtattgctcctccc

SEQ ID NO: 563420 - DNA, 120 bp, Artificial Sequence
  ENSG00000169884_14 (sequence is synthesized)
acttctcaactccagagcccctttaaccctgattcatactccttttggctggggagtccctatagtttcaccactcctctcccttgagggataaccccaggcactgtttggagccataag

SEQ ID NO: 563421 - DNA, 120 bp, Artificial Sequence
  ENSG00000169884_15 (sequence is synthesized)
atctgtatctagaaagagatcacccactcctatgtactatccccaaactcctttactgcagcctgggctccctcttgtgggataatgggagacagtggtagagaggtttttcttgggaaa

SEQ ID NO: 563422 - DNA, 120 bp, Artificial Sequence
  ENSG00000169884_16 (sequence is synthesized)
gagacagagtgctgaggggcactctcccctgaatcctcagagagttgtctgtccaggcccttagggaagttgtctccttccattcagatgttaatggggaccctccaaaggaaggggttt

SEQ ID NO: 563423 - DNA, 120 bp, Artificial Sequence
  ENSG00000169884_17 (sequence is synthesized)
tcccatgactcttggagcctctttttccttcttcagcaggaagggtgggaagggataatttatcatactgagacttgttcttggttcctgtttgaaactaaaataaattaagttactgga

SEQ ID NO: 563424 - DNA, 120 bp, Artificial Sequence
  ENSG00000169884_18 (sequence is synthesized)
caagtgtttgtgagtctgtgtgtctgagtttgcaagtgagtgtgtgtctgtgtgccgggcgttgtgtctgattgggcaaggttccaggggtgctcgcttgagtcctgagctgggacaacg

SEQ ID NO: 563425 - DNA, 120 bp, Artificial Sequence
  ENSG00000169884_19 (sequence is synthesized)
ccttgactcttcttctttaagacctccaagcctcagggactctgggaatcaaggggtgtttcttcttgttttgtttgaggaggaatgagaagggtcctgatcgatctgcccaccggagcc

SEQ ID NO: 563426 - DNA, 120 bp, Artificial Sequence
  ENSG00000169884_20 (sequence is synthesized)
tctttaagacctccaagcctcagggactctgggaatcaaggggtgtttcttcttgttttgtttgaggaggaatgagaagggtcagtagggtggcaccggtgggttaggagcccgaagaag

SEQ ID NO: 563427 - DNA, 120 bp, Artificial Sequence
  ENSG00000169885_0 (sequence is synthesized)
actgagcaccagctggccaggatgggtcttcaacaagaaatctcactgcagccctggtgtcaccaccctgcagaatcctgtcagacaaccaccgacatgacagagcgcctgtcggctgag

SEQ ID NO: 563428 - DNA, 120 bp, Artificial Sequence
  ENSG00000169885_1 (sequence is synthesized)
cagatcaaggagtacaagggagtctttgagatgttcgacgaagagggcaacggggaggtgaagacgggggagctggagtggctcatgagcctgctgggtatcaaccccaccaagagtgag

SEQ ID NO: 563429 - DNA, 120 bp, Artificial Sequence
  ENSG00000169885_2 (sequence is synthesized)
taatgggagtttaccatgagaaggcccagaaccaggagagcgagctgagggcggcattccgtgtctttgacaaagagggcaagggctacattgactggaacacactcaagtacgtgctaa

SEQ ID NO: 563430 - DNA, 120 bp, Artificial Sequence
  ENSG00000169885_3 (sequence is synthesized)
tgaacgcaggggagcccctcaacgaggtggaggcggagcagatgatgaaggaggccgacaaggatggggacaggaccatcgactatgaggagtttgtggccatgatgacgggggagtcct

SEQ ID NO: 563431 - DNA, 120 bp, Artificial Sequence
  ENSG00000169885_4 (sequence is synthesized)
tcaagctgatccagtaggtgcagctgccgcagccgggggaggcctgcccgggaaggctgctgcccctgccccctggcccccactcccccggctccgtgtaaaataaatgttccagcccaa

SEQ ID NO: 563432 - DNA, 120 bp, Artificial Sequence
  ENSG00000169885_5 (sequence is synthesized)
cctgaatggtggaccctcagcccctcctgtacaagatggtcaagcggtgcctcatgcatttgttcattcgacctgtcctgagagtttgtgacatgctggcacggggccaatgttgagtcc

SEQ ID NO: 563433 - DNA, 120 bp, Artificial Sequence
  ENSG00000169885_6 (sequence is synthesized)
gcacggggaacagcgtgtgtgagggtcccgccatgtctcagccctttcctggcccccgcacttagccttcggtgcccatcttcagggtcaggggaagcccaggccaaagcgggccgggaa

SEQ ID NO: 563434 - DNA, 120 bp, Artificial Sequence
  ENSG00000169885_7 (sequence is synthesized)
ggggccctgtggataaggccgagagcctgtcccaaaatagggccggcaggatttcccacccataaaaggctcttggaatctggaccccggggaccccaggcagccaggcccagctaaaac

SEQ ID NO: 563435 - DNA, 120 bp, Artificial Sequence
  ENSG00000169885_8 (sequence is synthesized)
caccagctggccaggatgggtcttcaacaagaaatctcactggtaagtgatgacagcatgggaccagggtcccatgaagacctgctggagggccgcacctctgggaaggtagacttggag

SEQ ID NO: 563436 - DNA, 120 bp, Artificial Sequence
  ENSG00000169885_9 (sequence is synthesized)
tctctgtgcccgatggagtctctggtgggctggctgggtaggttgagctggaacctggaggtgcaatgacctgccacggagcctgggcaggaaggggctgaggtagaagagggggccaag

SEQ ID NO: 563437 - DNA, 120 bp, Artificial Sequence
  ENSG00000169885_10 (sequence is synthesized)
ccctgctgccaccaacacagcccttgttccggggccagggtggagcagccctttctgaaagctggctcccagatgggcagcagcagtggtggcaggcaggtgtggcccggtgctggactc

SEQ ID NO: 563438 - DNA, 120 bp, Artificial Sequence
  ENSG00000169885_11 (sequence is synthesized)
tccctccggaatgccacacaggctggagcccagggttctgcttcctgggctgtatcccaatcctgggctggaagcctttcccgggccagggctgggctcctccccaccctgctctcggct

SEQ ID NO: 563439 - DNA, 120 bp, Artificial Sequence
  ENSG00000169885_12 (sequence is synthesized)
ccctcgcacgctggctcctgcctgtctggcccttgcccctgttagctgcctggcagagccctgctggccctgcaaacccctggcgtgtgaccccttgtcctggaagcctgctctccgctg

SEQ ID NO: 563440 - DNA, 120 bp, Artificial Sequence
  ENSG00000169885_13 (sequence is synthesized)
ggggcctcctctcttaccactcaccttgaaaggctgccaatggaggaatgggtgcagggggtacctctgacccttccctggacacaggggcagaaggggctcctggtcaggccggtgcgg

SEQ ID NO: 563441 - DNA, 120 bp, Artificial Sequence
  ENSG00000169885_14 (sequence is synthesized)
gtgtcagtgcctacggggggaagaggcaaagcccatggggagtgctgtgccccatcccttgagccccagctgtgccccttgcagacaaagggttcttcaactgcgatggtttcctggcac

SEQ ID NO: 563442 - DNA, 80 bp, Artificial Sequence
  ENSG00000169891_0 (sequence is synthesized)
tgaggccgaggaggcggtggctgtggcggacgcagcagcaccccagctagggacagggctccgccgcgcccccttgctgg

SEQ ID NO: 563443 - DNA, 80 bp, Artificial Sequence
  ENSG00000169891_1 (sequence is synthesized)
gcagcggcagcggcgggcgggggctgtggctccgggccgccgccgctgctgctgagcgagggcgagcagcagtgctactc

SEQ ID NO: 563444 - DNA, 120 bp, Artificial Sequence
  ENSG00000169891_2 (sequence is synthesized)
cccgggtctgggccccccgaggccgccagagtcgcccccggcacggccactgcggccgccggccccgtggctgacctgtttcgggcatcgcagctgcccgccgagacgctgcaccagatc

SEQ ID NO: 563445 - DNA, 120 bp, Artificial Sequence
  ENSG00000169891_3 (sequence is synthesized)
acagaactgtgtggtgcaaagcgggttggttattttggtccaacacagttttacattgccctgaaattaattgctgcagcacaatctggcctcccggtacggatagagagtattaaatgt

SEQ ID NO: 563446 - DNA, 120 bp, Artificial Sequence
  ENSG00000169891_4 (sequence is synthesized)
gaattgcctctgcctcgctttatgatgtcaaagaatgatggtgagatacgatttgggaacccagctgagctgcatggaactaaggttcagattccatatttaactacagaaaaaaattcc

SEQ ID NO: 563447 - DNA, 120 bp, Artificial Sequence
  ENSG00000169891_5 (sequence is synthesized)
ttcaaaagaatggacgatgaggataaacagcaggaaacacagtctcccacgatgtcacccctcgcctcccctccttcttccccgcctcattaccagagggtgcccttgagccatggctac

SEQ ID NO: 563448 - DNA, 120 bp, Artificial Sequence
  ENSG00000169891_6 (sequence is synthesized)
agcaaactgcggagcagcgcagaacagatgcatccagcaccttatgaagctaggcagccccttgtccagcccgagggatcctcatcagggggcccaggaaccaagccccttcggcatcag

SEQ ID NO: 563449 - DNA, 120 bp, Artificial Sequence
  ENSG00000169891_7 (sequence is synthesized)
gcttcccttatccggtccttttcagtggagagggaactacaggataacagcagttaccccgacgaaccctggaggataacagaagaacagcgcgagtactatgtcaatcagttccgatcc

SEQ ID NO: 563450 - DNA, 120 bp, Artificial Sequence
  ENSG00000169891_8 (sequence is synthesized)
cttcagccagacccaagctctttcatttcaggttctgtggccaagaacttcttcaccaaatcaaagctttccattccagaactctcctatatatgggagcttagtgatgctgactgtgat

SEQ ID NO: 563451 - DNA, 120 bp, Artificial Sequence
  ENSG00000169891_9 (sequence is synthesized)
ggagccctgaccctgcctgagttctgtgctgcgtttcatctcattgtggctcggaagaacggctacccattgcctgagggcctccctccaactctgcagccagaatacctgcaggcagct

SEQ ID NO: 563452 - DNA, 120 bp, Artificial Sequence
  ENSG00000169891_10 (sequence is synthesized)
tttcctaagcccaaatgggactgtcaattatttgattcttattctgagtcactgccggcaaatcaacaacctcgtgacttgaatcggatggagaagacatctgttaaagacatggctgac

SEQ ID NO: 563453 - DNA, 120 bp, Artificial Sequence
  ENSG00000169891_11 (sequence is synthesized)
cttcctgtccctaaccaggatgtaactagtgatgacaaacaagctttgaaaagtactatcaatgaagccttaccaaaggacgtgtctgaggatccagcaactcccaaggattccaacagt

SEQ ID NO: 563454 - DNA, 120 bp, Artificial Sequence
  ENSG00000169891_12 (sequence is synthesized)
ctcaaagcaagaccaagatccagatcttactctagcacctccatagaagaggccatgaaaaggggcgaggaccctcccaccccgccacctcggccacagaaaacccattccagagcctcc

SEQ ID NO: 563455 - DNA, 120 bp, Artificial Sequence
  ENSG00000169891_13 (sequence is synthesized)
tccttggatctgaataaagtcttccagcccagtgtgccagctaccaagtcaggattgttacccccaccacctgcgctccctccaagaccttgtccatcacagtctgaacaagtgtcggag

SEQ ID NO: 563456 - DNA, 120 bp, Artificial Sequence
  ENSG00000169891_14 (sequence is synthesized)
gccgagttactcccacagctgagcagagccccatcccaggctgcagaaagtagtccagcaaagaaggatgtactgtattctcagccaccatcaaagcccattcgtaggaaattcagacca

SEQ ID NO: 563457 - DNA, 120 bp, Artificial Sequence
  ENSG00000169891_15 (sequence is synthesized)
gaaaaccaagctacagaaaaccaagagccttccactgctgcaagtgggccagcttctgcggcaaccatgaaaccgcatccaacagtccaaaagcagtcttccaaacagaagaaggccatt

SEQ ID NO: 563458 - DNA, 120 bp, Artificial Sequence
  ENSG00000169891_16 (sequence is synthesized)
caaactgctatccgcaaaaataaagaggcaaacgcagtgctggctcggctgaacagtgagctccagcagcagctcaaggaggttcatcaagaacgaattgcattggaaaaccaattggaa

SEQ ID NO: 563459 - DNA, 120 bp, Artificial Sequence
  ENSG00000169891_17 (sequence is synthesized)
caacttcgtccggtcactgtgttgtgacccccccatggttcaagtgacagtgggtgaccttgtctgccaagatctttcttttgaatgttttgaacccaactacttgtcatagatgtttga

SEQ ID NO: 563460 - DNA, 120 bp, Artificial Sequence
  ENSG00000169891_18 (sequence is synthesized)
ctgtgtcaaaagctgtgagcagcaaaatataatccatatgaccttttctcttgcacttcacttgtatgttttactgtggtggaaaaaatacttcaactgattatcacacttgaaatgcta

SEQ ID NO: 563461 - DNA, 120 bp, Artificial Sequence
  ENSG00000169891_19 (sequence is synthesized)
attatcagtggaatttgtctcctattcttaagtacttctgcaaggtattagatgctgctccttaccaaaaatcagtcttctagcaaataaaaataacttagagcattatttatttaaaga

SEQ ID NO: 563462 - DNA, 120 bp, Artificial Sequence
  ENSG00000169891_20 (sequence is synthesized)
atttatgttttctataaaaccttataaccaagaaccttcaggatgcttgtaaccaagtactttcaggatgctttttgtatgtatatcacatagagtaggttggtttcctgagtaattggg

SEQ ID NO: 563463 - DNA, 120 bp, Artificial Sequence
  ENSG00000169891_21 (sequence is synthesized)
attccaactagatagtcattggtgtgaccataataaaaacaaaagctaaaataaaagcatcagatttagactggcgctgtgccctctaccactatatgccaaaaattgcttctctagtgc

SEQ ID NO: 563464 - DNA, 120 bp, Artificial Sequence
  ENSG00000169891_22 (sequence is synthesized)
cattttgatattatatctagctataaataatacatgactatcgttttctattgaatgtcaaagacttactgggtctttacacctctgtaaagtggaggttttggcaatgagctgtttaac

SEQ ID NO: 563465 - DNA, 120 bp, Artificial Sequence
  ENSG00000169891_23 (sequence is synthesized)
ttggccaagctaggctgtcaacccagacaactcagtcctttcatgtaaatttttgggcaagagaagtctgctttgactgccttgcctgaccaaattaaataaatagttgccagatctcta

SEQ ID NO: 563466 - DNA, 120 bp, Artificial Sequence
  ENSG00000169891_24 (sequence is synthesized)
cttttatcctgcatgggataatatatctgtaaatgcatgagtttggaaaccacccatcaaatatgaaaggctgatgagactgttaggattgataaacatttgttgtttgaacccagctat

SEQ ID NO: 563467 - DNA, 120 bp, Artificial Sequence
  ENSG00000169891_25 (sequence is synthesized)
ccaaactggggaagaaggggaaatggttgttaccaacaatctctagtagttattttaatctttattttaacctggattgcaaatgtatggggtatgaggagataatgaaagaaaagtggt

SEQ ID NO: 563468 - DNA, 120 bp, Artificial Sequence
  ENSG00000169891_26 (sequence is synthesized)
cctcatgctggatatgtgactgttttgttctctgtaaagtgtattcttgggaagtgattggtttatatcagattcagaggagcccaattaactccagtgtaggtaatgtaaaacagtaag

SEQ ID NO: 563469 - DNA, 120 bp, Artificial Sequence
  ENSG00000169891_27 (sequence is synthesized)
ctcaaattgcagaagccagtatcctacagaaatttaagtagctactgcttctcctgaaagcccaagttgaaaatgggaccacaggggcacagggctactgaccctcacagggcatgccag

SEQ ID NO: 563470 - DNA, 120 bp, Artificial Sequence
  ENSG00000169891_28 (sequence is synthesized)
cgttaacaccactttgagagaccaatggcaagaaatgctgtctcttgtgcattttactaatttccccattcttagggtagcagggtgggggtgtatagggtctttttgaagcagttttgg

SEQ ID NO: 563471 - DNA, 120 bp, Artificial Sequence
  ENSG00000169891_29 (sequence is synthesized)
ataggtttgcaatatgtgggattcagcctttgatttcaatagagctgagagcttttagaacaagcaggcatttatttaatgtttccttagtccattggcaagctttatcaatagcttaat

SEQ ID NO: 563472 - DNA, 120 bp, Artificial Sequence
  ENSG00000169891_30 (sequence is synthesized)
ggcagaggataaaggctcaaacagatgatgttttttccacagaaaaacaaattgttgaatctattccgtgcatatttaaggattttgaattgattttgaaaatcatgaaacttgaactat

SEQ ID NO: 563473 - DNA, 120 bp, Artificial Sequence
  ENSG00000169891_31 (sequence is synthesized)
ttttctattccctttttttcttccccatttgctgccttttttgtttttgtgggggaagggttgggagtaagtttaaactcttccgaagattatgaatgggtcagcacaaatttttaggca

SEQ ID NO: 563474 - DNA, 120 bp, Artificial Sequence
  ENSG00000169891_32 (sequence is synthesized)
tgggattacaggcgtgagccacccgcccggctatcagcactgttctgattgcagacgtttcacagcatgtttggcttttggtaaattcaatccaggaaagactagcatgtgcactttatc

SEQ ID NO: 563475 - DNA, 120 bp, Artificial Sequence
  ENSG00000169891_33 (sequence is synthesized)
actagcatgtgcactttatctcataatcttccagtacatatgctctcagttgggatagcagttcatttccattaggcagacgtataaactaaggaatgttagtctgcagtattcatttta

SEQ ID NO: 563476 - DNA, 120 bp, Artificial Sequence
  ENSG00000169891_34 (sequence is synthesized)
aaaatattgacatgcttttcccctcccctccatgaagtcagtgccagagtgagccagattgggaggttggggttttgtttggttggcttggttttcattaagggaaaaaacttgcattgg

SEQ ID NO: 563477 - DNA, 120 bp, Artificial Sequence
  ENSG00000169891_35 (sequence is synthesized)
acaatcaaattcccctgagtttcataatctcatcaatattttaagataggcgagcacacactaataatatctatgcctaccttcttgggtggactcaactgtaaccacagtttattagtt

SEQ ID NO: 563478 - DNA, 120 bp, Artificial Sequence
  ENSG00000169891_36 (sequence is synthesized)
gcttagaagtggatttttaaaaaacagttaaatgtgtgtgcataacacacaagtaatgacacactactattattattacctaagtagtgctcatcctctctttctgtgttttcttaggat

SEQ ID NO: 563479 - DNA, 120 bp, Artificial Sequence
  ENSG00000169891_37 (sequence is synthesized)
gtgcactttaatttaggattgtaacgcctaataatatttctgtgagcctttaatgtgatttataagatggccgaattactgaaatcaccattatacctcttccataaaacgactccaaag

SEQ ID NO: 563480 - DNA, 120 bp, Artificial Sequence
  ENSG00000169891_38 (sequence is synthesized)
ttagacctgcctgttggggagaattctatagacagaaggtcaatgttgtccccatccataggggttgaattaccttgctgttaagtggtcttcccccattgggatcctacagtcccacag

SEQ ID NO: 563481 - DNA, 120 bp, Artificial Sequence
  ENSG00000169891_39 (sequence is synthesized)
atgaaagcacagtagtagctgacagctggcttatttggtccctcggcatctctcgtatgtggcatattgcttttgccactttcctatccagcagacatcaaagcaaaactaaaaggtaga

SEQ ID NO: 563482 - DNA, 120 bp, Artificial Sequence
  ENSG00000169891_40 (sequence is synthesized)
tatctggaatgaatgtatatgttgtaattgaggcagatatttgccttaattggaaggatctaactgctttacaaatattaaacaagtgcttgggcatgattgggagaggaggcagcttag

SEQ ID NO: 563483 - DNA, 120 bp, Artificial Sequence
  ENSG00000169891_41 (sequence is synthesized)
ctggaagctgtgcccatcttactgtcactggagaataggatgtcagagctgggcaggactggtacccatcatttgcagtttgcatgtggggaaaccaaagccctaagaaacaacagttcc

SEQ ID NO: 563484 - DNA, 120 bp, Artificial Sequence
  ENSG00000169891_42 (sequence is synthesized)
tggcccaaaaaatccatagaaagaggtaactagtggcagatttggggcgccaacctgattttatggattttgagttagattctctaccctctatcaatactaaaaatagattaggagggt

SEQ ID NO: 563485 - DNA, 120 bp, Artificial Sequence
  ENSG00000169891_43 (sequence is synthesized)
ttttttttctgtttatcatgttgaatttcattgacttaattagtctttaaatttgaaaacatgttttagggagtttagttctagaaatttctcttagattgaagtgacagaatctgaaag

SEQ ID NO: 563486 - DNA, 120 bp, Artificial Sequence
  ENSG00000169891_44 (sequence is synthesized)
aaaagaatatgattgagctatttgttttcctgaacacctcaccttttatgatgcaataagttactctgagtttcttggcagagtttttgacagctgttgctttcaatggattccattcct

SEQ ID NO: 563487 - DNA, 120 bp, Artificial Sequence
  ENSG00000169891_45 (sequence is synthesized)
gtattccttatgggaggttgtttttaaaatagactactgcgattgaaatgaactcaatatgtagttaagttatagttttcttcaatgtatttttagttacttgggtcacaaatgttcaat

SEQ ID NO: 563488 - DNA, 120 bp, Artificial Sequence
  ENSG00000169891_46 (sequence is synthesized)
ttcagcatattttagggtgagtaatcaaaaatgtgaatttgcctttgatttcctaccactgtctgagctatcataaagcattctctttagttgtgatttgattctatagtctgtttctaa

SEQ ID NO: 563489 - DNA, 120 bp, Artificial Sequence
  ENSG00000169891_47 (sequence is synthesized)
atgacatttgtctgtttcttaaatgatctcacagccatggtaataatagatgtgtactcagaagatcaataaggtaatattggaattcatgtgttttttgcaattaaggcaggcatttgc

SEQ ID NO: 563490 - DNA, 120 bp, Artificial Sequence
  ENSG00000169891_48 (sequence is synthesized)
caatgtcttcttttaagcagtagttggaaacatctcaattacagtgtaacaccttagagctaaaaacatttgttcaacacaaactagaatcacaccttctcactagatatcaccaaggga

SEQ ID NO: 563491 - DNA, 120 bp, Artificial Sequence
  ENSG00000169891_49 (sequence is synthesized)
atgtggttttaaaaataaaaagaaaacaatataacgtatcatggcaaccagagcttcccatattattgacaagtagggatcattaggttctggtttgaacattctgaatgtgaacaaaat

SEQ ID NO: 563492 - DNA, 120 bp, Artificial Sequence
  ENSG00000169891_50 (sequence is synthesized)
gaaatagtagttaagaggtgttttcccactgtgtttaaagagaacactagtaattctggtttttctttctaactgctttactgtttcaagggtattcttttaaaactctgatttcaaagg

SEQ ID NO: 563493 - DNA, 120 bp, Artificial Sequence
  ENSG00000169891_51 (sequence is synthesized)
atcagttgaatttatactttagttatgggtgttttgttactttttttttttttgtatcatgactcagtatggttcaatttcctagtaagaagtggggatttgtgtttttggagtcctcag

SEQ ID NO: 563494 - DNA, 120 bp, Artificial Sequence
  ENSG00000169891_52 (sequence is synthesized)
ctcacatgtcttgttcctccttcagcacaagctaggggagatcctaccaacactgataggtcagtcattgatggcaatttgaatgtgggtattactctgtgagccaccctgcttcgcttg

SEQ ID NO: 563495 - DNA, 120 bp, Artificial Sequence
  ENSG00000169891_53 (sequence is synthesized)
tttgtaaggagaaatgcatctggttatgtgaatttcccgagagcagcagacatggagggccagactttaaaagcaacgcaagcagattcgaagagctgttgccctcttctaaaaaaggct

SEQ ID NO: 563496 - DNA, 120 bp, Artificial Sequence
  ENSG00000169891_54 (sequence is synthesized)
tttggaggctgtgttacatgcatgccctaaagcagtcagtctgttagtatgagcaagacatctgaagtacacagttgcttttaggcttgtatagttattttctacacatgccaacacaca

SEQ ID NO: 563497 - DNA, 120 bp, Artificial Sequence
  ENSG00000169891_55 (sequence is synthesized)
tgatgataaaggaaccttttctaggaggcattgcagggtttcaatacacaggacatgttctagttacagaagccttgctctgctgtcaacaattgggaaatgctcattttttcatgtttt

SEQ ID NO: 563498 - DNA, 120 bp, Artificial Sequence
  ENSG00000169891_56 (sequence is synthesized)
gtgaatactctggtcttgctgtaagctaatgtcatggctgtgggatattagagaagtgggtttatgactctgaagaccagcagacaccagactttaaaagtgcttaaattggaatttgga

SEQ ID NO: 563499 - DNA, 120 bp, Artificial Sequence
  ENSG00000169891_57 (sequence is synthesized)
aactacagtaaagaaaccttcagataccagttccatcctgaagccctctgttgaacaacagggccagatcctaaagctctttcagggagctcttctctggggctggaacagttgattatg

SEQ ID NO: 563500 - DNA, 120 bp, Artificial Sequence
  ENSG00000169891_58 (sequence is synthesized)
caaccccattgtgtggagattggatcaactgagttgtgttatttttgttttaagtcaccttgtgcgagaacctcaaccgcacctatcttgggaaccgggtatacccttttctttagcact

SEQ ID NO: 563501 - DNA, 120 bp, Artificial Sequence
  ENSG00000169891_59 (sequence is synthesized)
gctatcctttttgtcttcagcacaaataagatgttcaagtgagccagaagcaagaagagccattttagtcttcatagctattggctaagagagataatgagctgatggtctattttaacc

SEQ ID NO: 563502 - DNA, 120 bp, Artificial Sequence
  ENSG00000169891_60 (sequence is synthesized)
ttgaaagtaaaaatgtatattttttcactacaagtacattgaacagtaaaaagtgtaacagcaaagtatatatttgatgccttctgtcttttcatgataatgtgctaacaagttgtgtta

SEQ ID NO: 563503 - DNA, 120 bp, Artificial Sequence
  ENSG00000169891_61 (sequence is synthesized)
atattttactcagccagagtctcattcatttgctaagcattgggaacattatgtatattgaccttaaacataggtgtcctatatttggattgtgacttgtagactcaagctaaccttact

SEQ ID NO: 563504 - DNA, 120 bp, Artificial Sequence
  ENSG00000169891_62 (sequence is synthesized)
gcctctttttcacacttgttgaaaagtctgtgaagaacatagttaaagatctccaactttggaaaatatacatgatgtgaaactggggtgctatgttaaaaataaatgtatgataactaa

SEQ ID NO: 563505 - DNA, 120 bp, Artificial Sequence
  ENSG00000169891_63 (sequence is synthesized)
ccttgtgagggcccaaattttcctggcaagatgaaagtattgtaagtggcaattttgcctctctgcctgtgttatctccttttccttcagggcaaatggctagctccttcacccacagac

SEQ ID NO: 563506 - DNA, 120 bp, Artificial Sequence
  ENSG00000169891_64 (sequence is synthesized)
acactttcagtaggtgtggtatgtgattcttttaaaatctccgtaaagagtttctgttgttggtcgcctcagcacagaatggatacatgcagaacttccattatatttatctaaccagct

SEQ ID NO: 563507 - DNA, 120 bp, Artificial Sequence
  ENSG00000169891_65 (sequence is synthesized)
ggaacaggtattggagggagggtgaagacacctgtggacatggccagggactgagacaatgatgctctggacaaactatccttctctgtaaaactttggctttgagaagagccatcactt

SEQ ID NO: 563508 - DNA, 120 bp, Artificial Sequence
  ENSG00000169891_66 (sequence is synthesized)
gcttcaatttctttgtagtgaaattgagggaggtgttgaggacagaaacctgctcctgtcacttgactgcaagtgagcctgaccggtcactaacataaatgctcaagacccatcatgacc

SEQ ID NO: 563509 - DNA, 120 bp, Artificial Sequence
  ENSG00000169891_67 (sequence is synthesized)
ctgcttttggggtcttgcaggtctcagatgctgctgcagattttcttctgcttacacgttgtagaatgaaaagcagcaggttctgtgggagatgttagcaacttgtctttgaagccaaag

SEQ ID NO: 563510 - DNA, 120 bp, Artificial Sequence
  ENSG00000169891_68 (sequence is synthesized)
tcccattctgaatctctgcagccctctccttcagaagattttctttttttcaaatggacaggtccctggtggtatcagtccataaaggaagtatattttgttcatcacattcaccgagaa

SEQ ID NO: 563511 - DNA, 120 bp, Artificial Sequence
  ENSG00000169891_69 (sequence is synthesized)
ctttgaccatcttccagcccctgttaagcctggaaggtgaagaatccctatcagggacaaagatggctcaattttcttccatgttctaccccagcactccactttaatttcagctttatg

SEQ ID NO: 563512 - DNA, 120 bp, Artificial Sequence
  ENSG00000169891_70 (sequence is synthesized)
ttcattttagtcagcagtggcttaacagtctccagagtagatgtcagggcatctggtggagttcatacagagatcttttctttttctcttttttataacagctttattgcaatataattc

SEQ ID NO: 563513 - DNA, 120 bp, Artificial Sequence
  ENSG00000169891_71 (sequence is synthesized)
acatagcatacagttcatgtttttaaatgtacaattcagtggttcttagtttattcacaaagtcatgcaaccatcaccacaatctaacttttgtcatgcctaaaataatatatatccacg

SEQ ID NO: 563514 - DNA, 120 bp, Artificial Sequence
  ENSG00000169891_72 (sequence is synthesized)
cccattagcaatcactccccattctctccttccccctcagcccctggcaaccacgaatctcctttctgtctccatggctttgcatattcttgtcatttcacataaatggaataatgaaac

SEQ ID NO: 563515 - DNA, 120 bp, Artificial Sequence
  ENSG00000169891_73 (sequence is synthesized)
gtggtcttttgtgactggcttctttcacttagcataatattttcaaggtttatccaagttgtagcataaatctgaacttatctttttatggctgaataatattccattgtatggatagac

SEQ ID NO: 563516 - DNA, 120 bp, Artificial Sequence
  ENSG00000169891_74 (sequence is synthesized)
cacattttattcatccattcatcagtcaatggacattttggttatttctgcttttttggctcttaagagtaatgccactatactgtttgtgtacatgtttttgtgtggacttacattttc

SEQ ID NO: 563517 - DNA, 120 bp, Artificial Sequence
  ENSG00000169891_75 (sequence is synthesized)
atttctcttgggtctgtacctaggagtggaattgctaggtcatgtggtaactctgtctttaatatttcgaagaactaccacacttttcatagtggctgcaccattttatgttcccgttgg

SEQ ID NO: 563518 - DNA, 120 bp, Artificial Sequence
  ENSG00000169891_76 (sequence is synthesized)
caacgtatgagggttccaatttctccattttgtcaacacttatcttttttttttattatagccatcctagtgagtgtgaagtgtgatctcatggttttgatttgcatttcttttgtggct

SEQ ID NO: 563519 - DNA, 120 bp, Artificial Sequence
  ENSG00000169891_77 (sequence is synthesized)
acattgatcatcttttcatgtgcctattggccatttgtttatcttctttggagaaatgtgtattcacaccctttgcccacttttaattggattattaatctttttacttttgagttatga

SEQ ID NO: 563520 - DNA, 120 bp, Artificial Sequence
  ENSG00000169891_78 (sequence is synthesized)
attctttatatattctggatacaactcccttgttagatatatgagaaaattgagccctctttgtaaatattttctctcattctgtgggctgtcttttcactttctattttttatttttat

SEQ ID NO: 563521 - DNA, 85 bp, Artificial Sequence
  ENSG00000169891_79 (sequence is synthesized)
ctctgtcacccaggctggggtgcagtagcatgatcatggctcattgtagcctcgaattcctgggctcaagtgatcctttcccagc

SEQ ID NO: 563522 - DNA, 90 bp, Artificial Sequence
  ENSG00000169891_80 (sequence is synthesized)
cctcctgagtagctggaactacaggcatgagccaccattcccagccaatttcattttattttttatagtgatggagtcttactcctcaag

SEQ ID NO: 563523 - DNA, 120 bp, Artificial Sequence
  ENSG00000169891_81 (sequence is synthesized)
tacaggcctgagccactgcacccagccaattatcaatattaatcagatctgtacagtggtcacagtccattctagttcagttgctcttttctagaacctatctcccagtaatggcacata

SEQ ID NO: 563524 - DNA, 120 bp, Artificial Sequence
  ENSG00000169891_82 (sequence is synthesized)
cctatctcccagtaatggcacatatggctgtttttctaggagaacatcagttgctcttttgctctaagaattcggtgtttcttgctgtgggatgaaaggttgtagattatccctgtggta

SEQ ID NO: 563525 - DNA, 120 bp, Artificial Sequence
  ENSG00000169891_83 (sequence is synthesized)
actgcactgatttatcatcccaaccatggacggttttgaaaagtaaagagagtgctaatgtacttatgctggacagacagttttaaatggagactgtaatgggcgcagtaggatgcgtgg

SEQ ID NO: 563526 - DNA, 120 bp, Artificial Sequence
  ENSG00000169891_84 (sequence is synthesized)
tcactctggttatgcgtgttctgtgaatttgttgttaattgggaaatactggtattaaaacgttctgtatttttctcaagagccacagatatatgctggtccatgcacatacacgagtgc

SEQ ID NO: 563527 - DNA, 120 bp, Artificial Sequence
  ENSG00000169891_85 (sequence is synthesized)
acatttatgcacacacacacatatacttaggcattcatgcctaataatacataaggtagaggtaggtagtctggctaagttaatgtagaatttttgctaaaaataatgttcttgtattat

SEQ ID NO: 563528 - DNA, 120 bp, Artificial Sequence
  ENSG00000169891_86 (sequence is synthesized)
tttccttcagacttgttcacaggggacacctgcaggtcttctaagtgctattaattcttacacaaaaagggcattccagttaatatggtttgtcaggaagaaatacttattaaaatgtct

SEQ ID NO: 563529 - DNA, 120 bp, Artificial Sequence
  ENSG00000169891_87 (sequence is synthesized)
tggaataaatggaacacaaatgtttgaaaaggcccatttcacagcttttattcaagttataaaatgggaattacttcaggtgtaaataattcatcccaataaatttgtttcatttggtgt

SEQ ID NO: 563530 - DNA, 120 bp, Artificial Sequence
  ENSG00000169891_88 (sequence is synthesized)
ctatcttcctgaccgcctgtgaatatgagattttatttttggagccctgtgttgttaaccacttgttagtttaacacctctcatgaatcagagttctgaccctcaagggtccagacctct

SEQ ID NO: 563531 - DNA, 120 bp, Artificial Sequence
  ENSG00000169891_89 (sequence is synthesized)
tggacgatgaggataaacaggtaaacagtttgttcagatgtgttcatttgattctgaccatgaaaccgcatgtagcagggcctcgtatctactgttcagcttccagcaaatctcaccatc

SEQ ID NO: 563532 - DNA, 120 bp, Artificial Sequence
  ENSG00000169891_90 (sequence is synthesized)
caaggtgaacaccaaaaagtaaaaagtctgggtaataaaatctacagtagggaaagaaaatgcttctgataacttcagtgaagcttgcagtttcagctaccaagtcaggattgttacccc

SEQ ID NO: 563533 - DNA, 120 bp, Artificial Sequence
  ENSG00000169894_0 (sequence is synthesized)
actttcattacgtgcacgccccagggccacgtccctgccgctgtcttggtcctgaagcctgttctgccccagccccctgcccgctgggcccatgcagctgttggggctcctcggcctcct

SEQ ID NO: 563534 - DNA, 120 bp, Artificial Sequence
  ENSG00000169894_1 (sequence is synthesized)
ctggatgctcaaggcctccccgtgggccacaggaactttatccacggccacatccatctctcaagtgcctttccccagagcagaagcagccagcgctgtgctcagcaattctccacactc

SEQ ID NO: 563535 - DNA, 120 bp, Artificial Sequence
  ENSG00000169894_2 (sequence is synthesized)
cagagacctggctgggtggccacttggtgtcccccagctcgcctctcctgctcctggccacagggaaaatgcacctatgacactcactacctccccccatgacacactcatctctgaaac

SEQ ID NO: 563536 - DNA, 120 bp, Artificial Sequence
  ENSG00000169894_3 (sequence is synthesized)
attgctcaactctccagtcagttccaacacctcaaccaccccgacgtccaagtttgccttcaaggttgaaaccactccacccaccgtgttggtctattcagccaccactgagtgcgtgta

SEQ ID NO: 563537 - DNA, 120 bp, Artificial Sequence
  ENSG00000169894_4 (sequence is synthesized)
tccaacgagctttataatcaccatctcccaccccacctccatctgtgtgaccacgacgcaggtggccttcaccagctcttacacctcgactcccgtgacacagaagccagtgaccaccgt

SEQ ID NO: 563538 - DNA, 120 bp, Artificial Sequence
  ENSG00000169894_5 (sequence is synthesized)
caccagtacttactctatgaccactactgagaaaggaacgtcagccatgacatcttctccctctaccaccactgcaagggaaactcccatagtgacagtgacaccctcctctgtgtcagc

SEQ ID NO: 563539 - DNA, 120 bp, Artificial Sequence
  ENSG00000169894_6 (sequence is synthesized)
cacagacacaaccttccacactacaatctcgtctacaactagaaccacagaaaggactcccctgcccactggaagcatccatacaaccacgtccccaaccccagtatttactactctcaa

SEQ ID NO: 563540 - DNA, 120 bp, Artificial Sequence
  ENSG00000169894_7 (sequence is synthesized)
aacagcagtgacttccacttcccccatcacttcttcaatcacttccacaaatacagtgacttctatgacaacgaccgcctcccagcccacagccactaatacattgtcatcacccactag

SEQ ID NO: 563541 - DNA, 120 bp, Artificial Sequence
  ENSG00000169894_8 (sequence is synthesized)
gaccattttatcttccacacctgtcctgagcacagaaacaatcaccagtggtatcacaaacaccacccccctatccaccttggtgaccacactccccactaccatcagcaggtctacacc

SEQ ID NO: 563542 - DNA, 120 bp, Artificial Sequence
  ENSG00000169894_9 (sequence is synthesized)
tacatctgagaccacctacactacttctcccaccagcactgtcacagactccactaccaaaatcgcctactccacaagtatgacaggtacattgtccacagagacttctctcccacccac

SEQ ID NO: 563543 - DNA, 120 bp, Artificial Sequence
  ENSG00000169894_10 (sequence is synthesized)
ctcttcctctctcccaaccacagaaacagccacgactcctatgacaaacttggtaaccaccaccactgagatctcctcccacagtactcccagcttctcttcatcaaccatctactccac

SEQ ID NO: 563544 - DNA, 120 bp, Artificial Sequence
  ENSG00000169894_11 (sequence is synthesized)
agtcagcacatccacaactgccatctcctcacttccccctacctcaggtactatggtgacttccacaaccatgaccccatcttctctgagtacagacatccctttcacaacaccaacaac

SEQ ID NO: 563545 - DNA, 120 bp, Artificial Sequence
  ENSG00000169894_12 (sequence is synthesized)
tatcacccaccattctgtgggctctaccggtttcctgactacagcaacagacctcacatcaacattcacggtttccagttcctcagcaatgtccacgagtgtcattccatcttcccccag

SEQ ID NO: 563546 - DNA, 120 bp, Artificial Sequence
  ENSG00000169894_13 (sequence is synthesized)
cattcagaatacagaaacctcatcccttgtcagcatgacctctgccactactcccaatgtgagaccaacttttgtaagtacactcagcactcctacaagttccctcctgacgaccttccc

SEQ ID NO: 563547 - DNA, 120 bp, Artificial Sequence
  ENSG00000169894_14 (sequence is synthesized)
agcaacatattcattttcatcttccatgtctgccagcagtgctgggaccactcacacagagagtatctcctcacctccagccagcaccagtacactccacacaacagctgaatccaccct

SEQ ID NO: 563548 - DNA, 120 bp, Artificial Sequence
  ENSG00000169894_15 (sequence is synthesized)
ggcacccactaccaccacctcattcacaacttccacaactatggaaccaccttcaaccactgcagcaactacaggaacaggtcagaccaccttcaccagctctacagccacatttcctga

SEQ ID NO: 563549 - DNA, 120 bp, Artificial Sequence
  ENSG00000169894_16 (sequence is synthesized)
gaccaccacaccgactcctacaactgacatgtccacagaatctctcacaacagccatgacttctcctcccatcacttcatcagtcacttccacaaatacagtgacttctatgacaactac

SEQ ID NO: 563550 - DNA, 120 bp, Artificial Sequence
  ENSG00000169894_17 (sequence is synthesized)
gacctctcctcccacaaccaccaattcttttacatcactgaccagtatgcctctgtcttctacacctgtcccaagcacagaagtagtcaccagtggcaccataaacacaatccctccatc

SEQ ID NO: 563551 - DNA, 120 bp, Artificial Sequence
  ENSG00000169894_18 (sequence is synthesized)
tatcttggtgaccacactccccactccaaatgcttcatctatgactacatctgagaccacctatcctaattctccgactggtcctggtacaaactccacgacggaaatcacctatcccac

SEQ ID NO: 563552 - DNA, 120 bp, Artificial Sequence
  ENSG00000169894_19 (sequence is synthesized)
cactatgacagagacatcatccactgccacctctcttccacccacctctcccttggtctcaactgcaaaaacagccaaaactcctaccacaaacttggtaaccaccaccaccaagaccac

SEQ ID NO: 563553 - DNA, 120 bp, Artificial Sequence
  ENSG00000169894_20 (sequence is synthesized)
ctcacatagtaccaccagcttcacttcttcaaccgtctactccacagccagcacatacacaactgccatcacctcagttcccactacgttgggtaccatggtaacttctacatccatgat

SEQ ID NO: 563554 - DNA, 120 bp, Artificial Sequence
  ENSG00000169894_21 (sequence is synthesized)
ctcatctactgtgagtacaggtatccctacctcacaaccaacaaccatcactccctcatccgtgggcatcagtggttcattacctatgatgacagacctcacctcagtgtacacagtctc

SEQ ID NO: 563555 - DNA, 120 bp, Artificial Sequence
  ENSG00000169894_22 (sequence is synthesized)
taacatgtctgcaaggccaacaactgtcattccctcatctcccactgtccagaatacagaaatctcaatctctgttagcatgacgtctgctaccactcccagtggaggaccaactttcac

SEQ ID NO: 563556 - DNA, 120 bp, Artificial Sequence
  ENSG00000169894_23 (sequence is synthesized)
aagtactgagaacactccaacaaggtccctcctgacaagctttccaatgacacattcattctcttcttctatgtctgaaagtagtgctgggaccactcacacagagagtatctcctcacc

SEQ ID NO: 563557 - DNA, 120 bp, Artificial Sequence
  ENSG00000169894_24 (sequence is synthesized)
tcgaggcaccaccagtacactccacacaacagttgaatccaccccatcacccactaccaccacctcatttaccacatccacaatgatggaaccaccttcatccactgtatcaactacagg

SEQ ID NO: 563558 - DNA, 120 bp, Artificial Sequence
  ENSG00000169894_25 (sequence is synthesized)
cagaggtcagaccacctttcccagctctacagccacattccctgagaccactacactgactcctacaactgacatttctacagtatctctcacaacagccatgacttctcctccccccgt

SEQ ID NO: 563559 - DNA, 120 bp, Artificial Sequence
  ENSG00000169894_26 (sequence is synthesized)
cagttcttcaatcactcccaccaatacaatgacttctatgagaactacaacctattggcccacagccactaatacattatcaccactcaccagtagcattttatcttctacacctgtccc

SEQ ID NO: 563560 - DNA, 120 bp, Artificial Sequence
  ENSG00000169894_27 (sequence is synthesized)
aagcacagaaatgatcaccagtcataccacaaacaccacccctctatccaccttggtgactacactcctcactaccatcaccagatctacacctacatctgagaccacctaccctacttc

SEQ ID NO: 563561 - DNA, 120 bp, Artificial Sequence
  ENSG00000169894_28 (sequence is synthesized)
tcccaccagcattgtctcagactccacgactgaaatcacctattccacaagtataacaggtacattgtccactgccactactctcccacccacctcttcctctctcccaaccacagaaac

SEQ ID NO: 563562 - DNA, 120 bp, Artificial Sequence
  ENSG00000169894_29 (sequence is synthesized)
agccacgatgactcctaccacaaccttgataaccaccacccctaataccacctcccttagtacccccagcttcacttcttcaaccatctactccacagtcagcacatccacaactgccat

SEQ ID NO: 563563 - DNA, 120 bp, Artificial Sequence
  ENSG00000169894_30 (sequence is synthesized)
ctcctcagcttcccctacctcaggtaccatggtaacttccacaaccatgaccccatcttctctgagtacagacaccccttccacaacaccaacaactatcacctacccttctgtgggctc

SEQ ID NO: 563564 - DNA, 120 bp, Artificial Sequence
  ENSG00000169894_31 (sequence is synthesized)
taccggtttcctgactacagcaacagacctcacatcaacattcactgtttccagttcctcagcaatgtccacaagtgtcattccatcttcccccagcatccagaatacagaaacctcatc

SEQ ID NO: 563565 - DNA, 120 bp, Artificial Sequence
  ENSG00000169894_32 (sequence is synthesized)
ccttgtcagcatgacctctgccaccactcccagtttgagaccaactatcacaagtactgacagcactctaacaagttccctcctgacgaccttcccaagtacatattcattttcatcttc

SEQ ID NO: 563566 - DNA, 120 bp, Artificial Sequence
  ENSG00000169894_33 (sequence is synthesized)
catgtctgccagcagtgcagggaccactcacacagagactatttcctcacttccagccagcaccaatacaatccacacaacagctgaatccgccctggcacccactaccaccacctcatt

SEQ ID NO: 563567 - DNA, 120 bp, Artificial Sequence
  ENSG00000169894_34 (sequence is synthesized)
caccacatccccaacgatggaaccaccttcaaccactgtagcgactacaggcacaggtcagaccaccttccccagctctacagccacattccttgagaccaccacactgactcctacaac

SEQ ID NO: 563568 - DNA, 120 bp, Artificial Sequence
  ENSG00000169894_35 (sequence is synthesized)
tgacttttctacagaatctctcacaacagccatgacttctactccccccatcacttcttcaatcactcccaccgatacaatgacttctatgagaactacgacctcttggcccacagccac

SEQ ID NO: 563569 - DNA, 120 bp, Artificial Sequence
  ENSG00000169894_36 (sequence is synthesized)
taatacgttatcaccactcaccagtagcattttatcttctacacctgtcccaagcacagaggtgaccaccagtcataccacaaacaccaatcctgtatccacgttggtgactacactccc

SEQ ID NO: 563570 - DNA, 120 bp, Artificial Sequence
  ENSG00000169894_37 (sequence is synthesized)
cattaccatcaccaggtctacacttacatctgagaccgcctaccctagttctcccacaagcactgtcacagagtccacaactgaaatcacctatcccaccactatgacagagacatcatc

SEQ ID NO: 563571 - DNA, 120 bp, Artificial Sequence
  ENSG00000169894_38 (sequence is synthesized)
tactgccacctctcttccacccacctcttccttggtctcaaccgcagaaacagccaaaactcctaccacaaacttggtaaccaccaccaccaagaccacctcacatagtaccaccagctt

SEQ ID NO: 563572 - DNA, 120 bp, Artificial Sequence
  ENSG00000169894_39 (sequence is synthesized)
cacttcttcaaccatctactccacagccagcacacccaccactgccatcacctcagttcccactaccttgggtaccatggtgacttctacatccatgatcccatctactgtgagtacagg

SEQ ID NO: 563573 - DNA, 120 bp, Artificial Sequence
  ENSG00000169894_40 (sequence is synthesized)
tatccctacctcacaaccaacaactattactccctcatccgtgggcatcagtggttcattacctatgatgacagacctcacctcagtgtacacagtctccagcatgtctgcaaggccaac

SEQ ID NO: 563574 - DNA, 120 bp, Artificial Sequence
  ENSG00000169894_41 (sequence is synthesized)
aagtgtcattccttcatctcccactgtccagaatacagaaacctcaatctttgttagcatgatgtctgctaccactcccagtggaggaccaactttcacaagtactgagaacactccaac

SEQ ID NO: 563575 - DNA, 120 bp, Artificial Sequence
  ENSG00000169894_42 (sequence is synthesized)
aaggtccctcctgacaagctttccagtgacacattcattttcctcttccatgtctgccagcagtgtagggaccactcacacccagagtatctcctcacccccagccatcaccagtacact

SEQ ID NO: 563576 - DNA, 120 bp, Artificial Sequence
  ENSG00000169894_43 (sequence is synthesized)
ccacacaacagctgaatccaccccatcacctacaaccaccatgtcattcacaacatttacaaagatggaaacaccttcatccactgtagcaactacaggcacaggtcagactacattcac

SEQ ID NO: 563577 - DNA, 120 bp, Artificial Sequence
  ENSG00000169894_44 (sequence is synthesized)
cagttcaacagccacatcccctaagaccaccacactgactcctacctctgacatttccacaggatctttcaaaacagccgtgagttctactccccccatcacttcttcaatcacctccac

SEQ ID NO: 563578 - DNA, 120 bp, Artificial Sequence
  ENSG00000169894_45 (sequence is synthesized)
atatacggtgacttcgatgacaactaccacccctctagggcccacagccactaatacgttaccatcatttaccagtagcgtttcatcttctacgcctgtcccaagtacagaagcgatcac

SEQ ID NO: 563579 - DNA, 120 bp, Artificial Sequence
  ENSG00000169894_46 (sequence is synthesized)
acctaccctacttctcttactagtgctctcacagattccacgaccagaaccacctattccaccaatatgacaggtacattgtccactgtgacctctcttcgacccacctcttcctctctc

SEQ ID NO: 563580 - DNA, 120 bp, Artificial Sequence
  ENSG00000169894_47 (sequence is synthesized)
ctcaccacagtaacagccacagttccaacaacaaacttggtaaccacgaccaccaagatcacctcacacagtactcctagcttcacttcttcaatcgcaaccaccgagaccccctcacac

SEQ ID NO: 563581 - DNA, 120 bp, Artificial Sequence
  ENSG00000169894_48 (sequence is synthesized)
agtactcccagattcacttcttcaatcaccactaccgagaccccctcacacagtactcccagattcacttcttcaatcaccaataccaagaccacctcacacagctctcccagcttcact

SEQ ID NO: 563582 - DNA, 120 bp, Artificial Sequence
  ENSG00000169894_49 (sequence is synthesized)
tcttcgatcaccaccaccgagaccacatcccacaatactcccagcctcacttcttcaatcaccaccaccaagaccacctcacacagtactcccagctacacttctttgatcaccacaacc

SEQ ID NO: 563583 - DNA, 120 bp, Artificial Sequence
  ENSG00000169894_50 (sequence is synthesized)
accaccacctcacacagtactcccagcttcacttcttccatcaccaccactgagaccacatcccacaatactcccagcttgacttcttcgatcacaaccaccgagaccacatcccatagt

SEQ ID NO: 563584 - DNA, 120 bp, Artificial Sequence
  ENSG00000169894_51 (sequence is synthesized)
actcccagcttcacttcttcgatcaccaccgagaccacatcccacagtactcccagcttcacttcattgatcaccatcaccgagatcacctcacacagtactctcagctacactacctca

SEQ ID NO: 563585 - DNA, 120 bp, Artificial Sequence
  ENSG00000169894_52 (sequence is synthesized)
atcaccaccaccgagaccccctcacacagtactctcagcttcacttcttcaatcaccaccactgagaccacctcacacagtactcccagcttcacttcctcaatcaccacctctgagatg

SEQ ID NO: 563586 - DNA, 120 bp, Artificial Sequence
  ENSG00000169894_53 (sequence is synthesized)
ccctcacacagtactcccagcttcacttcttcgatcaccaccactgagaacgccacacacagtactcccaacttcacttcttcaatcaccaccaccgagaccacatcccacagtactccc

SEQ ID NO: 563587 - DNA, 120 bp, Artificial Sequence
  ENSG00000169894_54 (sequence is synthesized)
agcttcacttctttgatcaccaccacggagaccacctcacacaggtgggggaccaccgagaccacatcctacagtactcccagcttcacttcttcaaataccatcactgagaccacctca

SEQ ID NO: 563588 - DNA, 120 bp, Artificial Sequence
  ENSG00000169894_55 (sequence is synthesized)
cacagtactcccagctacattacctcaatcaccaccaccgagaccccctcaagcagtactcccagcttcagttcttcgatcaccaccactgagaccacatcccacagtactcccggcttc

SEQ ID NO: 563589 - DNA, 120 bp, Artificial Sequence
  ENSG00000169894_56 (sequence is synthesized)
acttcttcaatcaccaccactgagactacatcccacagtactcccagcttcacttcttcgatcaccaccactgagaccacctcacatgatactcccagcttcacttcttcaatcaccacc

SEQ ID NO: 563590 - DNA, 120 bp, Artificial Sequence
  ENSG00000169894_57 (sequence is synthesized)
agtgagaccccctcacacagtactcccagctccacttctttaatcaccaccaccaagaccacctcacacagtactcccagcttcacttcttcgatcaccaccacggagaccacctcacac

SEQ ID NO: 563591 - DNA, 120 bp, Artificial Sequence
  ENSG00000169894_58 (sequence is synthesized)
agtgctcacagcttcacttcttcgatcaccaccaccgagaccacctcacacaatactcgcagcttcacttcttcgatcaccaccaccgagaccaactctcacagtactaccagcttcact

SEQ ID NO: 563592 - DNA, 120 bp, Artificial Sequence
  ENSG00000169894_59 (sequence is synthesized)
tcttcgatcaccaccaccgagaccacctcacacagtactcccagcttcagttcttcaatcaccaccactgagacccccttacacagtactcctggcctcacttcgtgggtcaccaccacc

SEQ ID NO: 563593 - DNA, 120 bp, Artificial Sequence
  ENSG00000169894_60 (sequence is synthesized)
aagaccacctcacacattactcctggcctcacttcttcaatcaccaccactgagactacctcacacagtactcctggcttcacttcttcaatcaccaccactgagaccacctcagagagt

SEQ ID NO: 563594 - DNA, 120 bp, Artificial Sequence
  ENSG00000169894_61 (sequence is synthesized)
actcccagcctcagttcttcaaccatctactccacagtcagcacatccacaactgccatcacctcacattttactacctcagagactgcggtgactcccacacctgtaaccccatcttct

SEQ ID NO: 563595 - DNA, 120 bp, Artificial Sequence
  ENSG00000169894_62 (sequence is synthesized)
ctgagtacagacatcccgaccacaagcctacgaactctcaccccttcgtctgtgggcaccagcacttcattgactacaaccacagactttccctctatacccactgatatcagtacctta

SEQ ID NO: 563596 - DNA, 120 bp, Artificial Sequence
  ENSG00000169894_63 (sequence is synthesized)
ccaactcgaacacacatcatttcatcttctccctccatccaaagtacagaaacctcatcccttgtgggcaccacctctcccaccatgtccactgtgagaatgaccctcagaattactgag

SEQ ID NO: 563597 - DNA, 120 bp, Artificial Sequence
  ENSG00000169894_64 (sequence is synthesized)
aacaccccaatcagttcctttagcacaagtattgttgttatacctgaaaccccaacacagacccctcctgtactgacgtcagccactgggacccaaacatctcctgcacctactactgtc

SEQ ID NO: 563598 - DNA, 120 bp, Artificial Sequence
  ENSG00000169894_65 (sequence is synthesized)
acctttggaagtacggattcctccacgtccactcttcatactcttactccatcaacagccttgagcacgatcgtgtcaacatcacaggttcctattcctagcacacattcctccaccctt

SEQ ID NO: 563599 - DNA, 120 bp, Artificial Sequence
  ENSG00000169894_66 (sequence is synthesized)
caaacaactccttctactccctcattgcaaacttcactcacatctacaagtgagttcactacagaatctttcactaggggaagtacgtctacaaatgcaatcttgacttcttttagtacc

SEQ ID NO: 563600 - DNA, 120 bp, Artificial Sequence
  ENSG00000169894_67 (sequence is synthesized)
atcatctggtcctcaacacccactattatcatgtcctcttctccatcttctgccagcataactccagtgttttccactaccattcattctgttccttcttcaccatacattttcagtaca

SEQ ID NO: 563601 - DNA, 120 bp, Artificial Sequence
  ENSG00000169894_68 (sequence is synthesized)
gaaaatgtgggctccgcttctatcacaggctttcctagtctctcttcctctgcaactaccagcacttcttcaaccagctcctctctgaccacagctctcactgaaataacccccttttct

SEQ ID NO: 563602 - DNA, 120 bp, Artificial Sequence
  ENSG00000169894_69 (sequence is synthesized)
tatatttcccttccctccaccacaccctgtccaggaactataacaattaccatagtccctgcctcccccactgatccatgtgttgaaatggatcccagcactgaagctacttctcctccc

SEQ ID NO: 563603 - DNA, 120 bp, Artificial Sequence
  ENSG00000169894_70 (sequence is synthesized)
accaccccattaacagtctttccctttactaccgaaatggtcacctgtcctacctccatcagtatccaaactactcttactacatatatggacacttcttccatgatgccagaaagtgag

SEQ ID NO: 563604 - DNA, 120 bp, Artificial Sequence
  ENSG00000169894_71 (sequence is synthesized)
tccagcatctcacccaatgcttccagttccactggcactgggactgtacccacaaacacagttttcacaagtactcgactgcccaccagtgagacctggctgagcaacagttctgtgatc

SEQ ID NO: 563605 - DNA, 120 bp, Artificial Sequence
  ENSG00000169894_72 (sequence is synthesized)
cccctacctcttcctggcgtctctaccatcccgctcaccatgaaaccaagcagtagcctcccgaccatcctgaggacttcaagcaagtcaacacacccctccccacccaccactaggact

SEQ ID NO: 563606 - DNA, 120 bp, Artificial Sequence
  ENSG00000169894_73 (sequence is synthesized)
tcagagacaccagtggccactacccagactcctaccacccttacatcacgcaggacaactcgcatcacttctcagatgaccacacagtccacgttgaccaccactgcaggcacctgtgac

SEQ ID NO: 563607 - DNA, 120 bp, Artificial Sequence
  ENSG00000169894_74 (sequence is synthesized)
aatggtggcacctgggaacagggccagtgtgcttgccttccggggttttctggggaccgctgtcagctccagaccagatgccagaatgggggtcagtgggatggcctcaaatgccagtgc

SEQ ID NO: 563608 - DNA, 120 bp, Artificial Sequence
  ENSG00000169894_75 (sequence is synthesized)
cccagcaccttctatggttccagttgtgagtttgctgtggaacaggtggatctagatgtagtggagaccgaggtgggcatggaagtgtctgtggatcagcagttctcgccggacctcaat

SEQ ID NO: 563609 - DNA, 120 bp, Artificial Sequence
  ENSG00000169894_76 (sequence is synthesized)
gacaacacttcccaggcctacagggatttcaacaagaccttctggaatcagatgcagaagatttttgcagacatgcagggcttcaccttcaagggtgtggagatcctgtccctgaggaat

SEQ ID NO: 563610 - DNA, 120 bp, Artificial Sequence
  ENSG00000169894_77 (sequence is synthesized)
ggcagcatcgtggtggactacctggtcctgctggagatgcccttcagcccccagctggagagcgagtatgagcaggtgaagaccacgctgaaggaggggctgcagaacgccagccaggat

SEQ ID NO: 563611 - DNA, 120 bp, Artificial Sequence
  ENSG00000169894_78 (sequence is synthesized)
gtgaacagctgccaggactcccagaccctgtgttttaagcctgactccatcaaggtgaacaacaacagcaagacagagctgaccccggcagccatctgccgccgcgccgctcccacgggc

SEQ ID NO: 563612 - DNA, 120 bp, Artificial Sequence
  ENSG00000169894_79 (sequence is synthesized)
tatgaagagttctacttccccttggtggaggccacccggctccgctgtgtcaccaaatgcacgtcgggggtggacaacgccatcgactgtcaccagggccagtgcgttctggagacgagc

SEQ ID NO: 563613 - DNA, 120 bp, Artificial Sequence
  ENSG00000169894_80 (sequence is synthesized)
ggtcccacgtgtcgctgctactccaccgacacgcactggttctctggcccgcgctgcgaggtggccgtccactggagggcgctggtcgggggcctgacggccggcgccgcgctgctggtg

SEQ ID NO: 563614 - DNA, 120 bp, Artificial Sequence
  ENSG00000169894_81 (sequence is synthesized)
ctgctgctgctggcgctgggcgtccgggcggtgcgctccggatggtggggcggccagcgccgaggccggtcctgggaccaggacaggaaatggttcgagacctgggatgaggaagtcgtg

SEQ ID NO: 563615 - DNA, 120 bp, Artificial Sequence
  ENSG00000169894_82 (sequence is synthesized)
ggcactttttcaaactggggtttcgaggacgacggaacagacaaggatacaaatttctatgtggccttggagaacgtggacaccactatgaaggtgcacatcaagagacccgagatgacc

SEQ ID NO: 563616 - DNA, 120 bp, Artificial Sequence
  ENSG00000169894_83 (sequence is synthesized)
tcgtcctcagtgtgagccctgcggggccccttcaccaccccctccgccctgccccggacacaagggtctgcattgcgtccatttcaagaggtggccccaggacgcgggcagcccaggctc

SEQ ID NO: 563617 - DNA, 120 bp, Artificial Sequence
  ENSG00000169894_84 (sequence is synthesized)
ctgctgttcttgggcaagatgagactgttcccccaaatcccatccttctccttccaacttggctgaaacccacctggagacgcagttcacgtccaggctcttccactgtggaatcttggg

SEQ ID NO: 563618 - DNA, 120 bp, Artificial Sequence
  ENSG00000169894_85 (sequence is synthesized)
caagtcagtaacgagcctcagtttcctcacctgcaaaacgggtacagcattcctgtatgatagctcacgccgttgttgtgaaaaccacatagacttggtcaattctcggtcctactctgc

SEQ ID NO: 563619 - DNA, 120 bp, Artificial Sequence
  ENSG00000169894_86 (sequence is synthesized)
cctcccgtctcagccctcgtgttgccattgcctctctcggatcctccaatcctcacgtccttcacctggtctctggccctggttcttattttctctcaattccctactgcctgtttctta

SEQ ID NO: 563620 - DNA, 120 bp, Artificial Sequence
  ENSG00000169894_87 (sequence is synthesized)
ctttgaacctggaggcagcctgcagccccatcccatctcctgccctctcctgatctaactccctgctgcatctcttgctctcattccttagacgtcctccccttttgaccccgttccttc

SEQ ID NO: 563621 - DNA, 120 bp, Artificial Sequence
  ENSG00000169894_88 (sequence is synthesized)
atccatcctgcaccccagtcccccagccctaaatcctccctcctctcctcacatcctggtccctagcaaggtatagatagcctctgtgtcttaggatacccaggtgctgttctccccgtc

SEQ ID NO: 563622 - DNA, 120 bp, Artificial Sequence
  ENSG00000169894_89 (sequence is synthesized)
accccgttgcccagttccccgtttctcttgctctcattccttgtatcttctcccttctgagcccgtccattcatcggttctgcccccgactccccctgacctaaataccccagctgctgt

SEQ ID NO: 563623 - DNA, 120 bp, Artificial Sequence
  ENSG00000169894_90 (sequence is synthesized)
tccccccatcaccctgctgcccaattctttattctccacccctttctctcacccctggagccctgcgggtgggggcagggcatgagttccccagtccccaaggaaaggcagccccctcag

SEQ ID NO: 563624 - DNA, 120 bp, Artificial Sequence
  ENSG00000169894_91 (sequence is synthesized)
tctccctcctcctcatttccttcgatccccctcccttcttgcctcccctctgccttttaaacccatcccctccgattcccctcctcccccttctcttcctggtgtcacctggattcctgc

SEQ ID NO: 563625 - DNA, 120 bp, Artificial Sequence
  ENSG00000169894_92 (sequence is synthesized)
agtaactctgagcccttgaaatcctcagtcgccttggcggggaagattggctttggggacaggaagtcggcacatctccaggtcttcatgtgcacaatacagagtttattgtaaaaagca

SEQ ID NO: 563626 - DNA, 120 bp, Artificial Sequence
  ENSG00000169894_93 (sequence is synthesized)
ggtggattcccagccccttgtctagggtggaaccccccgctgccctaggctggagccccgccccctcacccgcccccgcggggcccaggtgcacgggtggaccccgagcccggaggtgaa

SEQ ID NO: 563627 - DNA, 120 bp, Artificial Sequence
  ENSG00000169895_0 (sequence is synthesized)
gttcctccgacttccggacatctccctgggagtcgcgcagagtggagtcaaaggcaaccagtgctcgctgcggtctctggggatcgggaccgcggcggcggcccgcgagcgggatgttcc

SEQ ID NO: 563628 - DNA, 120 bp, Artificial Sequence
  ENSG00000169895_1 (sequence is synthesized)
ggggcttgagcagttggttgggcttgcagcagccggtggcaggcggtgggcagcccaatggagatgctccacccgagcagccgtccgagacggtggctgagtctgcggaggaggagctgc

SEQ ID NO: 563629 - DNA, 120 bp, Artificial Sequence
  ENSG00000169895_2 (sequence is synthesized)
agcaagcgggagaccaggagctcctccaccaggccaaagacttcggcaactatttatttaactttgcatctgctgccacaaaaaagataactgaatcagttgctgaaacagcacaaacaa

SEQ ID NO: 563630 - DNA, 120 bp, Artificial Sequence
  ENSG00000169895_3 (sequence is synthesized)
taaagaaatccgtagaagaaggaaaaatagatggcatcattgacaagacaattataggagattttcagaaggaacagaaaaaatttgttgaagagcaacatacaaagaagtcagaagcag

SEQ ID NO: 563631 - DNA, 120 bp, Artificial Sequence
  ENSG00000169895_4 (sequence is synthesized)
ctgtgcccccatgggttgacactaacgatgaagaaacaattcaacaacaaattttggccttatcagctgacaagaggaatttccttcgtgaccctccggctggcgtgcaatttaatttcg

SEQ ID NO: 563632 - DNA, 120 bp, Artificial Sequence
  ENSG00000169895_5 (sequence is synthesized)
actttgatcagatgtaccccgtggccctggtcatgctccaggaggatgagctgctaagcaagatgagatttgccctcgttcctaaacttgtgaaggaagaagtgttctggaggaactact

SEQ ID NO: 563633 - DNA, 120 bp, Artificial Sequence
  ENSG00000169895_6 (sequence is synthesized)
tttaccgcgtctccctgattaagcagtcagcccagctcacggccctggctgcccaacagcaggccgcagggaaggaggagaagagcaatggcagagagcaagatttgccgctggcagagg

SEQ ID NO: 563634 - DNA, 120 bp, Artificial Sequence
  ENSG00000169895_7 (sequence is synthesized)
cagtacggcccaaaacgccacccgttgtaatcaaatctcagcttaaaactcaagaggatgaggaagaaatttctactagcccaggtgtttctgagtttgtcagtgatgccttcgatgcct

SEQ ID NO: 563635 - DNA, 120 bp, Artificial Sequence
  ENSG00000169895_8 (sequence is synthesized)
gtaacctaaatcaggaagatctaaggaaagaaatggagcaactagtgcttgacaaaaagcaagaggagacagccgtactggaagaggattctgcagattgggaaaaagaactgcagcagg

SEQ ID NO: 563636 - DNA, 120 bp, Artificial Sequence
  ENSG00000169895_9 (sequence is synthesized)
aacttcaagaatatgaagtggtgacagaatctgaaaaacgagatgaaaactgggataaggaaatagagaaaatgcttcaagaggaaaattagctgttcctgaaatagaagaataatcctt

SEQ ID NO: 563637 - DNA, 120 bp, Artificial Sequence
  ENSG00000169895_10 (sequence is synthesized)
aacagtctgcaaactgacattaaattctagatgttgacaattactgaatcagaaggcatgaaagagtataattttatgaaattcaaaattattcttttttcaagttgaaacttgcctctt

SEQ ID NO: 563638 - DNA, 120 bp, Artificial Sequence
  ENSG00000169895_11 (sequence is synthesized)
ctactttaaaaaagtatatagaacagttacttctaataatcagaaagagatgttttatagaacatttctttaatataaagttagagatgtcttcataggcagtatggctatctttgccac

SEQ ID NO: 563639 - DNA, 120 bp, Artificial Sequence
  ENSG00000169895_12 (sequence is synthesized)
agaaacataagtaaaattttagagttctgttttccatgaggtcaaaaatataatttattcctcagtcatggttttctaaatatctgtactccacattccattttaattgatatgagggtg

SEQ ID NO: 563640 - DNA, 120 bp, Artificial Sequence
  ENSG00000169895_13 (sequence is synthesized)
ttaaagtacctacttaatgggttgattactatcaaaatgaccaaattataccaaagaacttaagaggaagcactttcagaactattcacttgccaggtattttctaaaattccacctgaa

SEQ ID NO: 563641 - DNA, 120 bp, Artificial Sequence
  ENSG00000169895_14 (sequence is synthesized)
attccacctgaaagccaaaagataaaataaataagttgattttaatgatataagcatcacacaattttacattaagaaatactgtgcaggccatgcgtggtggctcaggcctgtaatccc

SEQ ID NO: 563642 - DNA, 120 bp, Artificial Sequence
  ENSG00000169895_15 (sequence is synthesized)
aaagctgtgcgaaaatatttgtttttctctggggccttttctttcttttctttttaaactataccagaaattttacatcacagtttttatacaaagtgggaccttccatactttttgtat

SEQ ID NO: 563643 - DNA, 120 bp, Artificial Sequence
  ENSG00000169895_16 (sequence is synthesized)
tacaataaccttcagaagcccattccccttaaagtctgttgttcttgttttaatcatcaccacatataaatgttttagctttgtcttaaactgtgagtcttcataaaattgtgttcctcc

SEQ ID NO: 563644 - DNA, 120 bp, Artificial Sequence
  ENSG00000169895_17 (sequence is synthesized)
gagttcaccttctaggactttattgattaatccttctctttctgctataccagcagacacatattcatagaatatgattatttttaaagaacaaggtgaggaggctgaggcaggagaatt

SEQ ID NO: 563645 - DNA, 120 bp, Artificial Sequence
  ENSG00000169895_18 (sequence is synthesized)
cgaacgaacaaggtggtttaatgtcagaaaacttcctaagcatttgctccccaaacctttcatgtttttcaagaagcctttattacataaaggggaatagaattaaaatgtttctttata

SEQ ID NO: 563646 - DNA, 120 bp, Artificial Sequence
  ENSG00000169895_19 (sequence is synthesized)
agaaaaatatacatatttgtgttcttggccccattaaaactagtcagtagtcctttggcaaagatatagtcaacaagagaactgggtatgagtccaggcattactcctgttcatagttgt

SEQ ID NO: 563647 - DNA, 120 bp, Artificial Sequence
  ENSG00000169895_20 (sequence is synthesized)
ggatgcatgtgtctgagccagactgtctcaactggagtctcttgggttatagcagtaaacccgtgtattccatgaaaccactgggcccatcatcaaaaggtttccacttgtggtgccaca

SEQ ID NO: 563648 - DNA, 120 bp, Artificial Sequence
  ENSG00000169895_21 (sequence is synthesized)
gttgcttattactgagtttgggttccaagatgactggcaacttctgaaataatctcattgaaggaaagagtttcattttttttttaaaagagtttgctggaggaaaagaagcatgttaaa

SEQ ID NO: 563649 - DNA, 120 bp, Artificial Sequence
  ENSG00000169895_22 (sequence is synthesized)
catatcaggatgtgtcggtgcttggctcttagtgaatgcactaaaattcttattgataaatgttgaataaacacacacaaaaaagtatcagagaaagagaaaaaccctacaatggcaata

SEQ ID NO: 563650 - DNA, 120 bp, Artificial Sequence
  ENSG00000169895_23 (sequence is synthesized)
gaggtgtgtgacagttattgctatcaattttacataatatctcatttaaaaacaacctaattatgcattgcctgtgaaaataaaaggataaaataagattttgtacatactgtaagaata

SEQ ID NO: 563651 - DNA, 120 bp, Artificial Sequence
  ENSG00000169895_24 (sequence is synthesized)
cagttgtgctgtatttttatggattcatcaaggagtaaaatgttctgctttagtaaattatataggtaactgaagtgttattcctttaaagagcaaaataatttatcaccatgtttggtg

SEQ ID NO: 563652 - DNA, 120 bp, Artificial Sequence
  ENSG00000169895_25 (sequence is synthesized)
gaaaatttctaagtatttattacatgcctaggggttagccaacaagatataccaagcatgaaaacctgtaaaacttaataaaatgctaaaatatgaacatcacactatggagattatgcc

SEQ ID NO: 563653 - DNA, 120 bp, Artificial Sequence
  ENSG00000169895_26 (sequence is synthesized)
tcactactcaaagagtgtggctcaggaaccagtgtagcttggccatgccctggcagtatgttggaaatgcctgccccagaccagttgatgttactaagaacgcccaggggatgagaatgg

SEQ ID NO: 563654 - DNA, 120 bp, Artificial Sequence
  ENSG00000169895_27 (sequence is synthesized)
actttatttacagtttgggaagcactggtctaatatgctctcagggaagctgaggtttctactgctttttactttttacccttccactagatgtcctttgcagcagtgtttttctagttg

SEQ ID NO: 563655 - DNA, 120 bp, Artificial Sequence
  ENSG00000169895_28 (sequence is synthesized)
gtcctttgcagcagtgtttttctagttggcattacaggtgtctcctctgaggttccagttatttctatactaccaaaattaaaaagacccaagggctgggcatggtggttcacacctgta

SEQ ID NO: 563656 - DNA, 82 bp, Artificial Sequence
  ENSG00000169895_29 (sequence is synthesized)
accagcctgggcaacatagggagacccctgcctctacaaaaatacaaatgagccaggtgtggtagcccacacctgtggtcct

SEQ ID NO: 563657 - DNA, 68 bp, Artificial Sequence
  ENSG00000169895_30 (sequence is synthesized)
ctctgtttcaaaaaagggagggggggcaagtttttagggggatgagaaatattcttggtaaatcgggc

SEQ ID NO: 563658 - DNA, 120 bp, Artificial Sequence
  ENSG00000169895_31 (sequence is synthesized)
gtttcaaaaaagggagggggggcaagtttttagggggatgagaaatattcttggtaaatcgggcatttctttttttgtttgtttttttttcttggagacagaatcttgctctgtcaccca

SEQ ID NO: 563659 - DNA, 74 bp, Artificial Sequence
  ENSG00000169895_32 (sequence is synthesized)
ctgatctcaaatgatccgcacttaattggtaatttttgaaaaaaaaactagagaaacattgtttcagagataaa

SEQ ID NO: 563660 - DNA, 120 bp, Artificial Sequence
  ENSG00000169895_33 (sequence is synthesized)
tttgaaaaaaaaactagagaaacattgtttcagagataaagcagcaattacacttgtactcccagtgatttaagatgcactattgtaatcaagatgatttgctttaatcaaaatattgtt

SEQ ID NO: 563661 - DNA, 120 bp, Artificial Sequence
  ENSG00000169895_34 (sequence is synthesized)
tgttaaaaataggatttcaggacatttaaaaggtttcagcagaaatcttatgattatgtctgacttgcagtattttatttgcctctttgacggctttttttttttttttttttttgagac

SEQ ID NO: 563662 - DNA, 86 bp, Artificial Sequence
  ENSG00000169895_35 (sequence is synthesized)
tttgagacagagtctcacactgttgcctgggctggaatgcaatggcgcagtctcagctcactgcaaacctccggctcccgggttca

SEQ ID NO: 563663 - DNA, 120 bp, Artificial Sequence
  ENSG00000169895_36 (sequence is synthesized)
acaggcgtgagccactgcgcccaaccttaatggctttttggtattaaaaaccaggactctgaatgtgcatcaataattcaaataattttatatagttactctttctagtaatagataccc

SEQ ID NO: 563664 - DNA, 120 bp, Artificial Sequence
  ENSG00000169895_37 (sequence is synthesized)
ctttctagtaatagatacccccctccatttttaagtaaagataaacattttttaattaggaaaattaggcacatttaattttagcaaatttagtttttcaacttttttttttttcttttt

SEQ ID NO: 563665 - DNA, 74 bp, Artificial Sequence
  ENSG00000169895_38 (sequence is synthesized)
catgagccaccatgcccagccagtttttcaacttttaaaaataaaagtggtagaatttttttttttcgtgggat

SEQ ID NO: 563666 - DNA, 81 bp, Artificial Sequence
  ENSG00000169895_39 (sequence is synthesized)
gtctccccatgttgctcaggctgttcttgaacttctgagctcaggtgatctatctgcctcggccttccaaagtgctgggat

SEQ ID NO: 563667 - DNA, 120 bp, Artificial Sequence
  ENSG00000169895_40 (sequence is synthesized)
gagccactgcacctggccaaaagtggcagaaattttgatatggtttataatcagttttattgtggggaagatgggccattttaatgaatgattatttctattggctaaactaccgagtca

SEQ ID NO: 563668 - DNA, 120 bp, Artificial Sequence
  ENSG00000169895_41 (sequence is synthesized)
cgacatgacaaatacacatgaagctttaatcacatgcagttatatacttctcacaaatcatcaaattatttatctggtcttcacactaagggatttacttagataagccatcgatgattt

SEQ ID NO: 563669 - DNA, 120 bp, Artificial Sequence
  ENSG00000169895_42 (sequence is synthesized)
cagttgttaaaagtgtggctttttaaacagcatttattcagtgcatcctgatttatttcaaaatgaaaaattgttacctttttttctgaataaataaagcttacttttagtggcaaggta

SEQ ID NO: 563670 - DNA, 120 bp, Artificial Sequence
  ENSG00000169895_43 (sequence is synthesized)
tgttatgtgctagataccacactgagggtctgagaacacaaaaatgcatatgcaatggccccatcctttgggtagcacaaagactagtgagggagacaaacccataaacttccatgattt

SEQ ID NO: 563671 - DNA, 120 bp, Artificial Sequence
  ENSG00000169895_44 (sequence is synthesized)
aaaggaagggactagattgtttctgggtgagggctgccagtgctggccccactggggagctggctgtgaaaggggcaagtaagctttcagttctgactttctcttttcttttcccccacc

SEQ ID NO: 563672 - DNA, 120 bp, Artificial Sequence
  ENSG00000169896_0 (sequence is synthesized)
ccttctttgctttggtggcttccttgtggttcctcagtggtgcctgcaacccctggttcacctccttccaggttctggctccttccagccatggctctcagagtccttctgttaacagcc

SEQ ID NO: 563673 - DNA, 120 bp, Artificial Sequence
  ENSG00000169896_1 (sequence is synthesized)
ttgaccttatgtcatgggttcaacttggacactgaaaacgcaatgaccttccaagagaacgcaaggggcttcgggcagagcgtggtccagcttcagggatccagggtggtggttggagcc

SEQ ID NO: 563674 - DNA, 120 bp, Artificial Sequence
  ENSG00000169896_2 (sequence is synthesized)
ccccaggagatagtggctgccaaccaaaggggcagcctctaccagtgcgactacagcacaggctcatgcgagcccatccgcctgcaggtccccgtggaggccgtgaacatgtccctgggc

SEQ ID NO: 563675 - DNA, 120 bp, Artificial Sequence
  ENSG00000169896_3 (sequence is synthesized)
ctgtccctggcagccaccaccagcccccctcagctgctggcctgtggtcccaccgtgcaccagacttgcagtgagaacacgtatgtgaaagggctctgcttcctgtttggatccaaccta

SEQ ID NO: 563676 - DNA, 120 bp, Artificial Sequence
  ENSG00000169896_4 (sequence is synthesized)
cggcagcagccccagaagttcccagaggccctccgagggtgtcctcaagaggatagtgacattgccttcttgattgatggctctggtagcatcatcccacatgactttcggcggatgaag

SEQ ID NO: 563677 - DNA, 120 bp, Artificial Sequence
  ENSG00000169896_5 (sequence is synthesized)
gagtttgtctcaactgtgatggagcaattaaaaaagtccaaaaccttgttctctttgatgcagtactctgaagaattccggattcactttaccttcaaagagttccagaacaaccctaac

SEQ ID NO: 563678 - DNA, 120 bp, Artificial Sequence
  ENSG00000169896_6 (sequence is synthesized)
ccaagatcactggtgaagccaataacgcagctgcttgggcggacacacacggccacgggcatccgcaaagtggtacgagagctgtttaacatcaccaacggagcccgaaagaatgccttt

SEQ ID NO: 563679 - DNA, 120 bp, Artificial Sequence
  ENSG00000169896_7 (sequence is synthesized)
aagatcctagttgtcatcacggatggagaaaagtttggcgatcccttgggatatgaggatgtcatccctgaggcagacagagagggagtcattcgctacgtcattggggtgggagatgcc

SEQ ID NO: 563680 - DNA, 120 bp, Artificial Sequence
  ENSG00000169896_8 (sequence is synthesized)
ttccgcagtgagaaatcccgccaagagcttaataccatcgcatccaagccgcctcgtgatcacgtgttccaggtgaataactttgaggctctgaagaccattcagaaccagcttcgggag

SEQ ID NO: 563681 - DNA, 120 bp, Artificial Sequence
  ENSG00000169896_9 (sequence is synthesized)
aagatctttgcgatcgagggtactcagacaggaagtagcagctcctttgagcatgagatgtctcaggaaggcttcagcgctgccatcacctctaatggccccttgctgagcactgtgggg

SEQ ID NO: 563682 - DNA, 120 bp, Artificial Sequence
  ENSG00000169896_10 (sequence is synthesized)
agctatgactgggctggtggagtctttctatatacatcaaaggagaaaagcaccttcatcaacatgaccagagtggattcagacatgaatgatgcttacttgggttatgctgccgccatc

SEQ ID NO: 563683 - DNA, 120 bp, Artificial Sequence
  ENSG00000169896_11 (sequence is synthesized)
atcttacggaaccgggtgcaaagcctggttctgggggcacctcgatatcagcacatcggcctggtagcgatgttcaggcagaacactggcatgtgggagtccaacgctaatgtcaagggc

SEQ ID NO: 563684 - DNA, 120 bp, Artificial Sequence
  ENSG00000169896_12 (sequence is synthesized)
acccagatcggcgcctacttcggggcctccctctgctccgtggacgtggacagcaacggcagcaccgacctggtcctcatcggggccccccattactacgagcagacccgagggggccag

SEQ ID NO: 563685 - DNA, 120 bp, Artificial Sequence
  ENSG00000169896_13 (sequence is synthesized)
gtgtccgtgtgccccttgcccagggggagggctcggtggcagtgtgatgctgttctctacggggagcagggccaaccctggggccgctttggggcagccctaacagtgctgggggacgta

SEQ ID NO: 563686 - DNA, 120 bp, Artificial Sequence
  ENSG00000169896_14 (sequence is synthesized)
aatggggacaagctgacggacgtggccattggggccccaggagaggaggacaaccggggtgctgtttacctgtttcacggaacctcaggatctggcatcagcccctcccatagccagcgg

SEQ ID NO: 563687 - DNA, 120 bp, Artificial Sequence
  ENSG00000169896_15 (sequence is synthesized)
atagcaggctccaagctctctcccaggctccagtattttggtcagtcactgagtgggggccaggacctcacaatggatggactggtagacctgactgtaggagcccaggggcacgtgctg

SEQ ID NO: 563688 - DNA, 120 bp, Artificial Sequence
  ENSG00000169896_16 (sequence is synthesized)
ctgctcaggtcccagccagtactgagagtcaaggcaatcatggagttcaatcccagggaagtggcaaggaatgtatttgagtgtaatgatcaggtggtgaaaggcaaggaagccggagag

SEQ ID NO: 563689 - DNA, 120 bp, Artificial Sequence
  ENSG00000169896_17 (sequence is synthesized)
gtcagagtctgcctccatgtccagaagagcacacgggatcggctaagagaaggacagatccagagtgttgtgacttatgacctggctctggactccggccgcccacattcccgcgccgtc

SEQ ID NO: 563690 - DNA, 120 bp, Artificial Sequence
  ENSG00000169896_18 (sequence is synthesized)
ttcaatgagacaaagaacagcacacgcagacagacacaggtcttggggctgacccagacttgtgagaccctgaaactacagttgccgaattgcatcgaggacccagtgagccccattgtg

SEQ ID NO: 563691 - DNA, 120 bp, Artificial Sequence
  ENSG00000169896_19 (sequence is synthesized)
gctttcgggaacctccggccagtgctggcggaggatgctcagagactcttcacagccttgtttccctttgagaagaattgtggcaatgacaacatctgccaggatgacctcagcatcacc

SEQ ID NO: 563692 - DNA, 120 bp, Artificial Sequence
  ENSG00000169896_20 (sequence is synthesized)
ttcagtttcatgagcctggactgcctcgtggtgggtgggccccgggagttcaacgtgacagtgactgtgagaaatgatggtgaggactcctacaggacacaggtcaccttcttcttcccg

SEQ ID NO: 563693 - DNA, 120 bp, Artificial Sequence
  ENSG00000169896_21 (sequence is synthesized)
cttgacctgtcctaccggaaggtgtccacgctccagaaccagcgctcacagcgatcctggcgcctggcctgtgagtctgcctcctccaccgaagtgtctggggccttgaagagcaccagc

SEQ ID NO: 563694 - DNA, 120 bp, Artificial Sequence
  ENSG00000169896_22 (sequence is synthesized)
tgcagcataaaccaccccatcttcccggaaaactcagaggtcacctttaatatcacgtttgatgtagactctaaggcttcccttggaaacaaactgctcctcaaggccaatgtgaccagt

SEQ ID NO: 563695 - DNA, 120 bp, Artificial Sequence
  ENSG00000169896_23 (sequence is synthesized)
gagaacaacatgcccagaaccaacaaaaccgaattccaactggagctgccggtgaaatatgctgtctacatggtggtcaccagccatggggtctccactaaatatctcaacttcacggcc

SEQ ID NO: 563696 - DNA, 120 bp, Artificial Sequence
  ENSG00000169896_24 (sequence is synthesized)
tcagagaataccagtcgggtcatgcagcatcaatatcaggtcagcaacctggggcagaggagcctccccatcagcctggtgttcttggtgcccgtccggctgaaccagactgtcatatgg

SEQ ID NO: 563697 - DNA, 120 bp, Artificial Sequence
  ENSG00000169896_25 (sequence is synthesized)
gaccgcccccaggtcaccttctccgagaacctctcgagtacgtgccacaccaaggagcgcttgccctctcactccgactttctggctgagcttcggaaggcccccgtggtgaactgctcc

SEQ ID NO: 563698 - DNA, 120 bp, Artificial Sequence
  ENSG00000169896_26 (sequence is synthesized)
atcgctgtctgccagagaatccagtgtgacatcccgttctttggcatccaggaagaattcaatgctaccctcaaaggcaacctctcgtttgactggtacatcaagacctcgcataaccac

SEQ ID NO: 563699 - DNA, 120 bp, Artificial Sequence
  ENSG00000169896_27 (sequence is synthesized)
ctcctgatcgtgagcacagctgagatcttgtttaacgattccgtgttcaccctgctgccgggacagggggcgtttgtgaggtcccagacggagaccaaagtggagccgttcgaggtcccc

SEQ ID NO: 563700 - DNA, 120 bp, Artificial Sequence
  ENSG00000169896_28 (sequence is synthesized)
aaccccctgccgctcatcgtgggcagctctgtcgggggactgctgctcctggccctcatcaccgccgcgctgtacaagctcggcttcttcaagcggcaatacaaggacatgatgagtgaa

SEQ ID NO: 563701 - DNA, 120 bp, Artificial Sequence
  ENSG00000169896_29 (sequence is synthesized)
gggggtcccccgggggccgaaccccagtagcggctccttcccgacagagctgcctctcggtggccagcaggactctgcccagaccacacgtagcccccaggctgctggacacgtcggaca

SEQ ID NO: 563702 - DNA, 120 bp, Artificial Sequence
  ENSG00000169896_30 (sequence is synthesized)
gcgaagtatccccgacaggacgggcttgggcttccatttgtgtgtgtgcaagtgtgtatgtgcgtgtgtgcaagtgtctgtgtgcaagtgtgtgcacatgtgtgcgtgtgcgtgcatgtg

SEQ ID NO: 563703 - DNA, 120 bp, Artificial Sequence
  ENSG00000169896_31 (sequence is synthesized)
cacttgcacgcccatgtgtgagtgtgtgcaagtatgtgagtgtgtccaagtgtgtgtgcgtgtgtccatgtgtgtgcaagtgtgtgcatgtgtgcgagtgtgtgcatgtgtgtgctcagg

SEQ ID NO: 563704 - DNA, 120 bp, Artificial Sequence
  ENSG00000169896_32 (sequence is synthesized)
ggcgtgtggctcacgtgtgtgactcagatgtctctggcgtgtgggtaggtgacggcagcgtagcctctccggcagaagggaactgcctgggctcccttgtgcgtgggtgaagccgctgct

SEQ ID NO: 563705 - DNA, 120 bp, Artificial Sequence
  ENSG00000169896_33 (sequence is synthesized)
gggttttcctccgggagaggggacggtcaatcctgtgggtgaagacagagggaaacacagcagcttctctccactgaaagaagtgggacttcccgtcgcctgcgagcctgcggcctgctg

SEQ ID NO: 563706 - DNA, 120 bp, Artificial Sequence
  ENSG00000169896_34 (sequence is synthesized)
gagcctgcgcagcttggatggagactccatgagaagccgtgggtggaaccaggaacctcctccacaccagcgctgatgcccaataaagatgcccactgaggaatgatgaagcttcctttc

SEQ ID NO: 563707 - DNA, 120 bp, Artificial Sequence
  ENSG00000169896_35 (sequence is synthesized)
tggattcatttattatttcaatgtgactttaattttttggatggataagcttgtctatggtacaaaaatcacaaggcattcaagtgtacagtgaaaagtctccctttccagatattcaag

SEQ ID NO: 563708 - DNA, 120 bp, Artificial Sequence
  ENSG00000169896_36 (sequence is synthesized)
tcacctccttaaaggtagtcaagattgtgttttgaggtttccttcagacagattccaggcgatgtgcaagtgtatgcacgtgtgcacacacaccacacatacacacacacaagctttttt

SEQ ID NO: 563709 - DNA, 120 bp, Artificial Sequence
  ENSG00000169896_37 (sequence is synthesized)
acacaaatggtagcatactttatattggtctgtatcttgctttttttcaccaatatttctcagacatcggttcatattaagacataaattactttttcattcttttataccgctgcatag

SEQ ID NO: 563710 - DNA, 120 bp, Artificial Sequence
  ENSG00000169896_38 (sequence is synthesized)
tattccattgtgtgagtgtaccataatgtatttaaccagtcttcttttgatatactattttcattctcttgttattgcatcaatgctgagttaataaatcaaatatatgtcatttttgca

SEQ ID NO: 563711 - DNA, 120 bp, Artificial Sequence
  ENSG00000169896_39 (sequence is synthesized)
gggtgtgcatttgtgcacgtgtgtgtgagtggcccaaatgggcacgcactgtgtgtccagcacacattggttcccccatccccctgcaccccaccccatctccaccccccaggacttcat

SEQ ID NO: 563712 - DNA, 120 bp, Artificial Sequence
  ENSG00000169896_40 (sequence is synthesized)
acccattacccatgtgcctgttcgctccttacacacttagcctgagacaccctcccagggcacccctcatgttttgtcacctcctgtcccttttttctcccttcagccatggggtctcca

SEQ ID NO: 563713 - DNA, 120 bp, Artificial Sequence
  ENSG00000169896_41 (sequence is synthesized)
acggccctgcgcgttcctctcacctctgttaatgctattgggttttagagccgctccgcccctctcctggacccaggccatctcacctcccgagatgaggccctggcgccttcatctctg

SEQ ID NO: 563714 - DNA, 120 bp, Artificial Sequence
  ENSG00000169896_42 (sequence is synthesized)
ccccctcccttcatcctctcgggcctcgcgctgcagctccgtgcctcggtttccccggcggggctgccagctgtgtgactggggcgagtctgggagcctctctgcgcctcagtctcttag

SEQ ID NO: 563715 - DNA, 120 bp, Artificial Sequence
  ENSG00000169896_43 (sequence is synthesized)
ggagggtggccgggttcatgcgcggggcgcgctgagaacgagtcgccctccttgtagtttctgtttttctccaggccccgacgcggatgtcactcccctcccgccccgccctcctgggtc

SEQ ID NO: 563716 - DNA, 120 bp, Artificial Sequence
  ENSG00000169896_44 (sequence is synthesized)
tgtggatccatcctcccttcaatttgcaaatattattaaaatcaaagtgacatgagagctaatgctagctcatatacaccgtatcagctatctgttgccacatcaatgctgtgtaataaa

SEQ ID NO: 563717 - DNA, 120 bp, Artificial Sequence
  ENSG00000169900_0 (sequence is synthesized)
acaaagccacttctttgctgggaggtgcctgaccatggaatcagttccattcctgcctcaatgacttgcaacctgtttcctcctctgcagattgggaacagcaatccccacctcaacaat

SEQ ID NO: 563718 - DNA, 120 bp, Artificial Sequence
  ENSG00000169900_1 (sequence is synthesized)
ttggcgcccccactctcccaggggaaactgggggaccctctaggcggtgtttgcagagtcccctcccagcaggagccacagggttgaataggagctgccagatcagtctccttcccggga

SEQ ID NO: 563719 - DNA, 120 bp, Artificial Sequence
  ENSG00000169900_2 (sequence is synthesized)
catccccgggggcggcagctccacctgctgcaggaaaggtaggacctgatggctccaggccctcggaggctcagaggcgcagggctgagccatgggaacgaagcgcgaggccatcctgaa

SEQ ID NO: 563720 - DNA, 120 bp, Artificial Sequence
  ENSG00000169900_3 (sequence is synthesized)
gggcgcgctcgggcagctagatatcgtggacctcaccgacaagctggtcgcctcctactacgaggactacgcagccgagctcgtcgtggccgtgctgcgcgacatgcgcatgttggagga

SEQ ID NO: 563721 - DNA, 120 bp, Artificial Sequence
  ENSG00000169900_4 (sequence is synthesized)
ggccgcacggctgcagcgggctgcgtgagggccactctgagctggaggcgggtcaaggcaaaaggagtaatgcaacgcctgtgaagccagccccacgcgcgcaccagtcgcgtaagacaa

SEQ ID NO: 563722 - DNA, 120 bp, Artificial Sequence
  ENSG00000169900_5 (sequence is synthesized)
cagcagtgtctccacctcggggaccaaggacgcctccgtgcctccagaccccgcctcctccagcccctgcacctgtcatttattcttccactgcccaataaatattcatggcagacttta

SEQ ID NO: 563723 - DNA, 120 bp, Artificial Sequence
  ENSG00000169902_0 (sequence is synthesized)
agacgctgctgaggcggcttcggttgcgggtcggaacggcgctgctctgcggggccggtccaggctggcagctgccggcgcttggcggtgagggcgggctcccgagtggccccccaccga

SEQ ID NO: 563724 - DNA, 120 bp, Artificial Sequence
  ENSG00000169902_1 (sequence is synthesized)
aggcggtgggaccagcggctgaggccaggatgccgtccaggcggcgcggcggctcctcactcatcccagatgttggttatctttctgaagtagactgtccatggcctgaacattttccga

SEQ ID NO: 563725 - DNA, 120 bp, Artificial Sequence
  ENSG00000169902_2 (sequence is synthesized)
aaatcattttgagcaaaatatctgtttaataacaagataaccacatcaagatggttggaaagctgaagcagaacttactattggcatgtctggtgattagttctgtgactgtgttttacc

SEQ ID NO: 563726 - DNA, 120 bp, Artificial Sequence
  ENSG00000169902_3 (sequence is synthesized)
tgggccagcatgccatggaatgccatcaccggatagaggaacgtagccagccagtcaaattggagagcacaaggaccactgtgagaactggcctggacctcaaagccaacaaaacctttg

SEQ ID NO: 563727 - DNA, 120 bp, Artificial Sequence
  ENSG00000169902_4 (sequence is synthesized)
cctatcacaaagatatgcctttaatatttattggaggtgtgcctcggagtggaaccacactcatgagggccatgctggacgcacatcctgacattcgctgtggagaggaaaccagggtca

SEQ ID NO: 563728 - DNA, 120 bp, Artificial Sequence
  ENSG00000169902_5 (sequence is synthesized)
ttccccgaatcctggccctgaagcagatgtggtcacggtcaagtaaagagaagatccgcctggatgaggctggtgttactgatgaagtgctggattctgccatgcaagccttcttactag

SEQ ID NO: 563729 - DNA, 120 bp, Artificial Sequence
  ENSG00000169902_6 (sequence is synthesized)
aaattatcgttaagcatggggagccagccccttatttatgtaataaagatccttttgccctgaaatctttaacttacctttctaggttattccccaatgccaaatttctcctgatggtcc

SEQ ID NO: 563730 - DNA, 120 bp, Artificial Sequence
  ENSG00000169902_7 (sequence is synthesized)
gagatggccgggcatcagtacattcaatgatttctcgaaaagttactatagctggatttgatctgaacagctatagggactgtttgacaaagtggaatcgtgctatagagaccatgtata

SEQ ID NO: 563731 - DNA, 120 bp, Artificial Sequence
  ENSG00000169902_8 (sequence is synthesized)
acatcctgaacggtggatgagaacactcttaaagttcctccagattccatggaaccactcagtattgcaccatgaagagatgattgggaaagctgggggagtgtctctgtcaaaagtgga

SEQ ID NO: 563732 - DNA, 120 bp, Artificial Sequence
  ENSG00000169902_9 (sequence is synthesized)
gagatctacagaccaagtaatcaagccagtcaatgtaggagctctatcaaaatgggttgggaagataccgccagatgttttacaagacatggcagtgattgctcctatgcttgccaagct

SEQ ID NO: 563733 - DNA, 120 bp, Artificial Sequence
  ENSG00000169902_10 (sequence is synthesized)
tggatatgacccatatgccaacccacctaactacggaaaacctgatcccaaaattattgaaaacactcgaagggtctataagggagaattccaactacctgactttcttaaagaaaaacc

SEQ ID NO: 563734 - DNA, 120 bp, Artificial Sequence
  ENSG00000169902_11 (sequence is synthesized)
acagactgagcaagtggagtagcagaaccaggagcctcttccatacatgaggaaagattgctgccttttcagcagaagggaaattcctaggattggctgtcccctgccaagcttggtgga

SEQ ID NO: 563735 - DNA, 120 bp, Artificial Sequence
  ENSG00000169902_12 (sequence is synthesized)
gcgtctgcaccttggctgcgccgcctgtgcatttgccagtttcctcccactgagaggatggaggtgtccgcacagctttgggcctcgtgagggatctgcctcctgagcaaagagctcttg

SEQ ID NO: 563736 - DNA, 120 bp, Artificial Sequence
  ENSG00000169902_13 (sequence is synthesized)
atcccgatttcatgcacagccctgcagtaaggagcccagaaggaacatgtgtttcctgttaaaactcctcttgttctcttttcttacattatgacgtttgttttcaaggagagggtttaa

SEQ ID NO: 563737 - DNA, 120 bp, Artificial Sequence
  ENSG00000169902_14 (sequence is synthesized)
aaatgggatcctgtaagcagacttgggcagtctccttttgaaataggttgtctgtacatgttctaatgttttgtagaacacgtgtgcctgtttaagtgtattgatgtgaataatattaaa

SEQ ID NO: 563738 - DNA, 120 bp, Artificial Sequence
  ENSG00000169902_15 (sequence is synthesized)
tatcctaattatttaattcattgtattgtttctgagaagttgggaaattaccattatacatttacaacctaatgacttttgtattttatttttcaaaataaaagctttcaatgtgaagca

SEQ ID NO: 563739 - DNA, 120 bp, Artificial Sequence
  ENSG00000169902_16 (sequence is synthesized)
gctcctcactcatcccagagatgggagtcttgctatgttgcccagattggtcttgaactcctggcttcagatgttggttatctttctgaagtagactgtccatggcctgaacattttccg

SEQ ID NO: 563740 - DNA, 120 bp, Artificial Sequence
  ENSG00000169902_17 (sequence is synthesized)
ggtctataagggagaattccaactacctgactttcttaaagaaaaaccacagactgagcaagtggagtagcagaaccaggagcctcttccatacatgaggaatgatgatggctgcagctt

SEQ ID NO: 563741 - DNA, 120 bp, Artificial Sequence
  ENSG00000169902_18 (sequence is synthesized)
aacctttgtagcatgagagtattaataataatgtatattttcctaagaaagaatcaaatcaatttttggaacaggggtggattgcaaaactttattaataaagacttctgttccaaaggt

SEQ ID NO: 563742 - DNA, 120 bp, Artificial Sequence
  ENSG00000169902_19 (sequence is synthesized)
gcaagtggagtagcagaaccaggagcctcttccatacatgagtatctgtgttctctggagcttcctttaaagaaccttaggatccatttcttcacgtgaggaggaatcagggtgctgacc

SEQ ID NO: 563743 - DNA, 120 bp, Artificial Sequence
  ENSG00000169902_20 (sequence is synthesized)
cctggacacttaaagaaccttaggacccatttcttcacatgaggaggaatcagggtgctgacccctgggacacttaaagaaccttaggacccatttcttcacatgaggaggaatcagggt

SEQ ID NO: 563744 - DNA, 120 bp, Artificial Sequence
  ENSG00000169902_21 (sequence is synthesized)
cttgacccctggacacttaaccttaggacccatttcttcacatgaggaggaatcagggtgctgccccctggacacttaaagaaccttaggacccatttcttcacatgaggaatcagggtg

SEQ ID NO: 563745 - DNA, 120 bp, Artificial Sequence
  ENSG00000169902_22 (sequence is synthesized)
ctgccccctggacacttaaagaaccttaggacccatttcttcacatgaggaggaatcagggtgctgccccctggacacttgaagaaccttaggacccatttcttcacataaggaggaatc

SEQ ID NO: 563746 - DNA, 120 bp, Artificial Sequence
  ENSG00000169903_0 (sequence is synthesized)
atttttgagaagctgaagcaactccaaggacacagttcacagaaatttggttctcagccccaaaatactgattgaattggagacaattacaaggactctctggccaaaaacccttgaaga

SEQ ID NO: 563747 - DNA, 120 bp, Artificial Sequence
  ENSG00000169903_1 (sequence is synthesized)
ggccccgtgaaggaggcagtgaggagcttttgattgctgacctgtgtcgtaccaccccagaatgtgcactgggggctgtgccagatgcctgggggggaccctcattccccttgctttttt

SEQ ID NO: 563748 - DNA, 120 bp, Artificial Sequence
  ENSG00000169903_2 (sequence is synthesized)
tggcttcctggctaacatcctgttattttttcctggaggaaaagtgatagatgacaacgaccacctttcccaagagatctggtttttcggaggaatattaggaagcggtgtcttgatgat

SEQ ID NO: 563749 - DNA, 120 bp, Artificial Sequence
  ENSG00000169903_3 (sequence is synthesized)
cttccctgcgctggtgttcttgggcctgaagaacaatgactgctgtgggtgctgcggcaacgagggctgtgggaagcgatttgcgatgttcacctccacgatatttgctgtggttggatt

SEQ ID NO: 563750 - DNA, 120 bp, Artificial Sequence
  ENSG00000169903_4 (sequence is synthesized)
cttgggagctggatactcgtttatcatctcagccatttcaatcaacaagggtcctaaatgcctcatggccaatagtacatggggctaccccttccacgacggggattatctcaatgatga

SEQ ID NO: 563751 - DNA, 120 bp, Artificial Sequence
  ENSG00000169903_5 (sequence is synthesized)
ggccttatggaacaagtgccgagagcctctcaatgtggttccctggaatctgaccctcttctccatcctgctggtcgtaggaggaatccagatggttctctgcgccatccaggtggtcaa

SEQ ID NO: 563752 - DNA, 120 bp, Artificial Sequence
  ENSG00000169903_6 (sequence is synthesized)
gggagatggacccgtttaaacctccgagatgagctgctcagactctacagcatgacgactacaatttcttttcataaaacttcttctcttcttggaattattaattcctatctgcttcct

SEQ ID NO: 563753 - DNA, 120 bp, Artificial Sequence
  ENSG00000169903_7 (sequence is synthesized)
agctgataaagcttagaaaaggcagttattccttctttccaaccagctttgctcgagttagaattttgttattttcaaataaaaaatagtttggccacttaacaaatttgatttataaat

SEQ ID NO: 563754 - DNA, 120 bp, Artificial Sequence
  ENSG00000169903_8 (sequence is synthesized)
ctttcaaattagttcctttttagaatttaccaacaggttcaaagcatacttttcatgatttttttattacaaatgtaaaatgtataaagtcacatgtactgccatactacttctttgtat

SEQ ID NO: 563755 - DNA, 120 bp, Artificial Sequence
  ENSG00000169903_9 (sequence is synthesized)
ataaagatgtttatatctttggaagttttacataaatcaaaggaagaaagcacatttaaaatgagaaactaagaccaatttctgtttttaagaggaaaaagaatgattgatgtatcctaa

SEQ ID NO: 563756 - DNA, 120 bp, Artificial Sequence
  ENSG00000169903_10 (sequence is synthesized)
gtattgttatttgttgtctttttttgctgccttgcttgagttgcttgtgactgatcttttgaggctgtcatcatggctagggttcttttatgtatgttaaattaaaacctgaattcagag

SEQ ID NO: 563757 - DNA, 120 bp, Artificial Sequence
  ENSG00000169903_11 (sequence is synthesized)
gtaacgtaacaaagattgtgtgtgttttaggaggggggacaaaacgttgaatgaataacaactcatcttttctacaaatgcttcctttgatcaaacaaaaaaaagtttttaaaaaattga

SEQ ID NO: 563758 - DNA, 120 bp, Artificial Sequence
  ENSG00000169905_0 (sequence is synthesized)
gggccgcggcggccgctgggtgcagccgagcggtgtggagcggagagaatactcgaagggctctcctgatactaacagttttacgatttaaaacttcgccagaatttcgacagggtctca

SEQ ID NO: 563759 - DNA, 73 bp, Artificial Sequence
  ENSG00000169905_1 (sequence is synthesized)
ttacgatttaaaacttcgccagaatttcgacagggtctcactgtattgcccaggttggtctcgaactcctggc

SEQ ID NO: 563760 - DNA, 120 bp, Artificial Sequence
  ENSG00000169905_2 (sequence is synthesized)
agtcactgtatatatgccttatttcctgggtccatgggaagcatgagtctgttgggacttgggacaagaagaaaacaagacatcttcacaaggaaaaccaagtactaaaaaaagtatcct

SEQ ID NO: 563761 - DNA, 120 bp, Artificial Sequence
  ENSG00000169905_3 (sequence is synthesized)
cccaactctgaagagatagaacacaaacatggccgacagtggacttagggaacctcaagaggactctcaaaaggatttggaaaatgatccatcagtaaattctcaggcgcaggagaccac

SEQ ID NO: 563762 - DNA, 120 bp, Artificial Sequence
  ENSG00000169905_4 (sequence is synthesized)
aatcatagcaagtaatgctgaagaagctgagatcctacactctgcctgtggtcttagcaaagaccaccaagaggtagagacagaaggtccagaaagtgcagatacaggtgataaatcaga

SEQ ID NO: 563763 - DNA, 120 bp, Artificial Sequence
  ENSG00000169905_5 (sequence is synthesized)
aagtccagatgaagcaaatgtggggaaacatccaaaggataaaacagaagatgagaacaagcagagttttctggatggcggaaaagggcatcacctcccttcagaaaatctgggtaaaga

SEQ ID NO: 563764 - DNA, 120 bp, Artificial Sequence
  ENSG00000169905_6 (sequence is synthesized)
acccttggatccagatcccagccattctccaagtgacaaggtaggaagagcagatgcacacttagggagcagctctgtggccctccctaaggaagcgagtgacggaactggagcatctca

SEQ ID NO: 563765 - DNA, 120 bp, Artificial Sequence
  ENSG00000169905_7 (sequence is synthesized)
ggaaccacctactacagactcccaggaggcccagagtcctggtcattccagtgcagggcaagagggtgaggatacactgaggaggcgactgctggccccagaggctggaagtcatccaca

SEQ ID NO: 563766 - DNA, 120 bp, Artificial Sequence
  ENSG00000169905_8 (sequence is synthesized)
acaaacacaaaaattggaagaaattaaagagaatgcacaggacaccatgagacagattaataaaaagggtttttggagctatggccctgtgattcttgtcgtcctggttgtggctgttgt

SEQ ID NO: 563767 - DNA, 120 bp, Artificial Sequence
  ENSG00000169905_9 (sequence is synthesized)
ggcaagttctgtgaatagctactattcctctccagcccagcaagtgcccaaaaatccagctttggaggcctttttggcccagtttagccaattggaagataaatttccaggccagagttc

SEQ ID NO: 563768 - DNA, 120 bp, Artificial Sequence
  ENSG00000169905_10 (sequence is synthesized)
cttcctgtggcagagaggacggaagtttctccagaagcacctcaatgcttccaaccccactgagccagccaccatcatatttacagcagctcgggagggaagagagaccctgaagtgcct

SEQ ID NO: 563769 - DNA, 120 bp, Artificial Sequence
  ENSG00000169905_11 (sequence is synthesized)
gagccaccatgttgcagatgcctacacctcttcccagaaagtctctcccattcagattgatggggctggaaggacctggcaggacagtgacacggtcaagctgttggttgacctggagct

SEQ ID NO: 563770 - DNA, 120 bp, Artificial Sequence
  ENSG00000169905_12 (sequence is synthesized)
gagctatgggtttgagaatggccagaaggctgctgtggtacaccacttcgaatccttccctgccggctccactttgatcttctataagtattgtgatcatgagaatgctgcctttaaaga

SEQ ID NO: 563771 - DNA, 120 bp, Artificial Sequence
  ENSG00000169905_13 (sequence is synthesized)
tgtggccctggtcctgactgttctgctagaggaggaaacattagaagcaagtgtaggcccaagggaaacggaagaaaaagtgagagacttactctgggccaagtttaccaactctgacac

SEQ ID NO: 563772 - DNA, 120 bp, Artificial Sequence
  ENSG00000169905_14 (sequence is synthesized)
tcccacctccttcaaccacatggactcagacaaattgagtgggctgtggagccgaatttcacacctggtactgccagtccagccagtgagtagcatagaagaacaggggtgccttttcta

SEQ ID NO: 563773 - DNA, 120 bp, Artificial Sequence
  ENSG00000169905_15 (sequence is synthesized)
aagctaagcacagagttggttacagaaggtatatgtttatgaaaaagtttgtttaaagaccttccatttatatggaaggaggttgataaaatagcttgaggaaatagcctgaaaaacaaa

SEQ ID NO: 563774 - DNA, 120 bp, Artificial Sequence
  ENSG00000169905_16 (sequence is synthesized)
gatgagcttattttagaaacaagtttttattttttattccttgtaaaatctttctaatctaagccttgacaaagctaaaaattaacctgactttttttctttggaccaaatcaggtttga

SEQ ID NO: 563775 - DNA, 120 bp, Artificial Sequence
  ENSG00000169905_17 (sequence is synthesized)
aatatcgatgatatatatgagaattttttttaaattctaaaatatagcaacattgcacaggaagatactcttacttcttagagtaactacagagtgattttttttttttcttgagtgaga

SEQ ID NO: 563776 - DNA, 120 bp, Artificial Sequence
  ENSG00000169905_18 (sequence is synthesized)
ctctgaagaaccttttcgataatgtttggacttggactaaagcaattagaattatgaagcaatgataacctttagaaaatttttctatcacatgttgaatattttcaaaccttactttaa

SEQ ID NO: 563777 - DNA, 120 bp, Artificial Sequence
  ENSG00000169905_19 (sequence is synthesized)
taatctaaagttacgggattatatcttatattaattttgcagttttgagtagtatgataaaagaaataagaattcaaaccattaagtacctacctaaatactacatgtaaggcactgtgc

SEQ ID NO: 563778 - DNA, 120 bp, Artificial Sequence
  ENSG00000169905_20 (sequence is synthesized)
ttttatttcattcagctgaggtataagcagctgtactcaaatgttcttaaaaatgagaaccagtggggaaattgtttataatcattggaaatgaagaaattccaattggctatatcttta

SEQ ID NO: 563779 - DNA, 120 bp, Artificial Sequence
  ENSG00000169905_21 (sequence is synthesized)
cttcagcttttcttgaacaatttacagcattgattttcaaactgtgtctactggcacccttcccctttgtatcagagcagttctgcttttaactgttttatatgttggggttctctatga

SEQ ID NO: 563780 - DNA, 120 bp, Artificial Sequence
  ENSG00000169905_22 (sequence is synthesized)
gatttcattggaacaaagagtttcactgatattcgagtttgaaaaccattgattaagtgaaaaaacatcttagaagataggaaatatgtttaaaaaatgaatgtattaaatcttatgagt

SEQ ID NO: 563781 - DNA, 120 bp, Artificial Sequence
  ENSG00000169905_23 (sequence is synthesized)
aggaagatgaaatacaggtttattgtatagatacattatttatgaaggataaagatctatacatgaacagcagaatgtataagctagcatttactagcatgtctctgatgcttttgttca

SEQ ID NO: 563782 - DNA, 120 bp, Artificial Sequence
  ENSG00000169905_24 (sequence is synthesized)
tttctgttaatcgtcatttctgtcccctctgcatggaattttatacttgtctagggtaagagtttgtagactctttcagcagaacagattttaataaccaatttatttgttttattttaa

SEQ ID NO: 563783 - DNA, 120 bp, Artificial Sequence
  ENSG00000169905_25 (sequence is synthesized)
aaatttatttttgaataaccaatttaatagtaaattttatatgaacatttggcataactttaccagtttatttctatgcagtgatggaacattatgtaatgcagctcatttcttgaccaa

SEQ ID NO: 563784 - DNA, 120 bp, Artificial Sequence
  ENSG00000169905_26 (sequence is synthesized)
ctagttatagaagtaccattaggttaaaaattagagaaatctaagagatgttatacttagtgagaggaagcagaaatggtgggtagattctcagaggttttgatgttcagtactgacgga

SEQ ID NO: 563785 - DNA, 120 bp, Artificial Sequence
  ENSG00000169905_27 (sequence is synthesized)
ccatgttctgtgattgtaagaaagattgaaaacagtttgtatggagatagagttgattagcatttgagctctgaaagcagaactctagtaaaatgatctcgacctaacaaagggtctgtt

SEQ ID NO: 563786 - DNA, 120 bp, Artificial Sequence
  ENSG00000169905_28 (sequence is synthesized)
ccattatatagactattaccataatcctggattatttcaactgggttttggcctctccattatatgagatcatatgtatatagctaagaagtctgattaaagtatggaaagattttagga

SEQ ID NO: 563787 - DNA, 120 bp, Artificial Sequence
  ENSG00000169905_29 (sequence is synthesized)
aacactaagaagatacagggatctttactgatacctaaaaagattacaattgagtaattgctcaattgagtgtaggggcatacctgaaggaagaatttgcatttgggacttcgaaggaag

SEQ ID NO: 563788 - DNA, 120 bp, Artificial Sequence
  ENSG00000169905_30 (sequence is synthesized)
cttccaagagatttgggaagagacctgaacaaaaagttaaagcatggtgaatgtgatatcactgtcaatccagtataaaagcagaggaagttgaaggaaaatctgtatcccatatgcaca

SEQ ID NO: 563789 - DNA, 120 bp, Artificial Sequence
  ENSG00000169905_31 (sequence is synthesized)
ttttttctgtctttttagatcttagatgctagcgttacatccacaaaaccagtgttgccttgtataactattatattggcctgctgacctgtgctacctcagatctgtcaaggaaccagt

SEQ ID NO: 563790 - DNA, 120 bp, Artificial Sequence
  ENSG00000169905_32 (sequence is synthesized)
atttttaatttagcctttttaaaaacattttcccttccatgtatagtgcaatcaattgagggtgttgtcagttttctgtctgctatttcaaaagtcttttttttttttttttttttttga

SEQ ID NO: 563791 - DNA, 73 bp, Artificial Sequence
  ENSG00000169905_33 (sequence is synthesized)
ttttttgagatggagtctcactctgactcccaggctgcagtgctgtggcttgatcatagctcactgtagcttt

SEQ ID NO: 563792 - DNA, 87 bp, Artificial Sequence
  ENSG00000169905_34 (sequence is synthesized)
accttagcctcctgagtagccgggactacaagtgcagactaccacaccactctaccacactattttgtatagagacagggtcttact

SEQ ID NO: 563793 - DNA, 90 bp, Artificial Sequence
  ENSG00000169905_35 (sequence is synthesized)
caagtgatcctcccacctcagcgtcccaaagtgtttggattacagatgtgacccaatgcacccaaccaaagaaggtcttgctctgtcacc

SEQ ID NO: 563794 - DNA, 68 bp, Artificial Sequence
  ENSG00000169905_36 (sequence is synthesized)
attgtatttttaatagagacgaggttttgctatgttgtccaggttggtctcgaactcctggcctcaat

SEQ ID NO: 563795 - DNA, 120 bp, Artificial Sequence
  ENSG00000169905_37 (sequence is synthesized)
gctatgttgtccaggttggtctcgaactcctggcctcaattgatccgcctgccttggtctttcaaagtgctaggattataggcacgagccactgcacctggcctcaaaaatcatttttaa

SEQ ID NO: 563796 - DNA, 120 bp, Artificial Sequence
  ENSG00000169905_38 (sequence is synthesized)
aagaagcagtatattagctctgggtcttctcatgactaaaatgactatttttaaacataagaccatattttataaatgtacagataattcaaatctattatctaatgtattaggttaatt

SEQ ID NO: 563797 - DNA, 72 bp, Artificial Sequence
  ENSG00000169905_39 (sequence is synthesized)
gacattttttaaggtttcagattttcttttgtgtgtctagtaattcgtcttttattgtcaaagataatttgc

SEQ ID NO: 563798 - DNA, 120 bp, Artificial Sequence
  ENSG00000169905_40 (sequence is synthesized)
gtgtctagtaattcgtcttttattgtcaaagataatttgcttatttgacttagaaaaatgatttgtgggcatacaatattgtatgtggtacctaaacgttgccatttagttactcttaca

SEQ ID NO: 563799 - DNA, 120 bp, Artificial Sequence
  ENSG00000169905_41 (sequence is synthesized)
gaacaactttcattacactgtatattaatataaattacttcttgagtaatcccagaattgtagaaccaattggtagaatcagaaactgtctttggacttgaggtttttcttcccttaggg

SEQ ID NO: 563800 - DNA, 120 bp, Artificial Sequence
  ENSG00000169905_42 (sequence is synthesized)
taaattttaggttttctggttagtttccaggagttggcggacaagttcatatcactaaaggtgttcatatcactaaaatagtaatgctaatttgtttcatatttctattttaaaaagcaa

SEQ ID NO: 563801 - DNA, 120 bp, Artificial Sequence
  ENSG00000169905_43 (sequence is synthesized)
tcaataaagacatttcaatacatttcatttggaagcccccaagtgtatggtggttaataaggctcagcatgctggtaacccaccattctcttagctagtgactccactaaatagtgctag

SEQ ID NO: 563802 - DNA, 84 bp, Artificial Sequence
  ENSG00000169905_44 (sequence is synthesized)
caccattctcttagctagtgactccactaaatagtgctagccgctgagatggttttgaccctttaacagcatccaggctggggt

SEQ ID NO: 563803 - DNA, 70 bp, Artificial Sequence
  ENSG00000169905_45 (sequence is synthesized)
cacagcttttaattgcttgatttatactttattaaagagaggaagcacaatgagcagtgatactaaaata

SEQ ID NO: 563804 - DNA, 120 bp, Artificial Sequence
  ENSG00000169905_46 (sequence is synthesized)
attaaagagaggaagcacaatgagcagtgatactaaaatataactaatatggcatgtgaaagtgatcattattcagatgatcttcaccaacactgcatttgcatatatctgaccaaactt

SEQ ID NO: 563805 - DNA, 120 bp, Artificial Sequence
  ENSG00000169905_47 (sequence is synthesized)
tatgcgacataggcaggtctctggcacttcaaaaatgaatgttaaatagaaaataataaataatagctgattagggtaatcatttatttaatcagaataaagattatatccataaaattt

SEQ ID NO: 563806 - DNA, 89 bp, Artificial Sequence
  ENSG00000169905_48 (sequence is synthesized)
catttatttaatcagaataaagattatatccataaaatttacttgcagagaagtactttctttttgagctatggtgcagtggcacaatc

SEQ ID NO: 563807 - DNA, 120 bp, Artificial Sequence
  ENSG00000169905_49 (sequence is synthesized)
gatcctcctacttcaggaattatgccaccatgcccggctagttgagaagtactttcaaatagcaacatgaagcctttcctttaccatttgaaaataaaacatagttgtaaacataaacca

SEQ ID NO: 563808 - DNA, 120 bp, Artificial Sequence
  ENSG00000169905_50 (sequence is synthesized)
gtatgtctttgtaaagccaataatatatcattttataggagcattgtcttcttgtgtttttcaagttgactatgtagttcaatgtcagtctccattttaatatcttgtttgtttatcagc

SEQ ID NO: 563809 - DNA, 120 bp, Artificial Sequence
  ENSG00000169905_51 (sequence is synthesized)
ctgagcatatttcattttaaaatgtatttgttgagaagtcatggtggttttttgtttttcacaagtcaagtagcttgaacactatcacttgtccaatgggaaagttgatgcttatcttta

SEQ ID NO: 563810 - DNA, 120 bp, Artificial Sequence
  ENSG00000169905_52 (sequence is synthesized)
tggcaaatgcttggttgaataatatatttgcaaagatgttaattctacagagagctaaataaagttaagatacctgtaaaacagtttctccagatgactttaaaataagccttatttttg

SEQ ID NO: 563811 - DNA, 120 bp, Artificial Sequence
  ENSG00000169905_53 (sequence is synthesized)
taaatttatgttaaattttaggtgttaagttgtgaaatacctaatgatgtgggcctaaatttgcctcattcagactgagacagggctgttaaaattcatttctagctaataaactgtgct

SEQ ID NO: 563812 - DNA, 90 bp, Artificial Sequence
  ENSG00000169905_54 (sequence is synthesized)
ataaactgtgctataacttagtttaagttctgggatacatgtggagaacatgcaggtttgttaacataggtatacacgtgccatggtggt

SEQ ID NO: 563813 - DNA, 120 bp, Artificial Sequence
  ENSG00000169905_55 (sequence is synthesized)
ctatgagtgagaacatgcgatgtttggtaaactgtgctataacttctgtatctctataggccaatccaaatggcctgagaacataatcagtatcccctaatctgcaaaaaggtaaatacc

SEQ ID NO: 563814 - DNA, 120 bp, Artificial Sequence
  ENSG00000169905_56 (sequence is synthesized)
taaataccttagtcttcagtacctttccttccagtattatctgcattatctgtgcccgcttgctgtgatgtcttgaaaagcccataaattggttcttattttggcaaatggtctcctgct

SEQ ID NO: 563815 - DNA, 120 bp, Artificial Sequence
  ENSG00000169905_57 (sequence is synthesized)
tttcctcactgaggcttataaactaaatttgcctttggctaagcgcagttacatgaaccaaaaagaacattttagacttgggaagcaacaggctgagtcacattgtatggggcagagttg

SEQ ID NO: 563816 - DNA, 120 bp, Artificial Sequence
  ENSG00000169905_58 (sequence is synthesized)
gccaagcccccggcagtcacagccctactctctgtgttccttctaggcctgaggacgcatcaacacaaagctccaggcagttgctcctggttcatcagagagcacaggaaatttaaatct

SEQ ID NO: 563817 - DNA, 120 bp, Artificial Sequence
  ENSG00000169905_59 (sequence is synthesized)
atttgcctttcctgtcataaaagaaacagcacactgactttcaaactcaattgcattttgcttatttgtgcttaacaaaaaatatgtgtgctttgccaatactaacgtcccacttctctg

SEQ ID NO: 563818 - DNA, 120 bp, Artificial Sequence
  ENSG00000169905_60 (sequence is synthesized)
cactccctttctgtataacagggattgcttttgtatttgtttcttatagatgctgatgatgtgccttattcagattagttggccattaccagaataaagaataaatctgaatttttttca

SEQ ID NO: 563819 - DNA, 120 bp, Artificial Sequence
  ENSG00000169905_61 (sequence is synthesized)
actctgccaggtttttctgacccctctacattgctataaagtgccaaggccttaagacttgggtacgtgtgttacaacggcaagagtgccagcgccaacaaaagacccattggacctgtc

SEQ ID NO: 563820 - DNA, 120 bp, Artificial Sequence
  ENSG00000169905_62 (sequence is synthesized)
agctcctctgtttcaccaagcagacacaataaccttaccaacaaagcagagtaagccaagtgcctctgtgtgacaccaccagcagctgatgacgcataagaaaaatataactaatttaga

SEQ ID NO: 563821 - DNA, 120 bp, Artificial Sequence
  ENSG00000169905_63 (sequence is synthesized)
agccctatctcttcttgagaagctgggatttgaaggagctatcctgagatctgtactgctagtaagtgactgataacattataaactggatcggtccctgagttcagagactgagttgca

SEQ ID NO: 563822 - DNA, 120 bp, Artificial Sequence
  ENSG00000169905_64 (sequence is synthesized)
attgagtgaaaaatagacaacgaaatcttgaagaattgcacggaggtgcaagccaagtttatttggctctccaaataatattggttgaactaagaaattggtaaacgaaacctgtaatag

SEQ ID NO: 563823 - DNA, 120 bp, Artificial Sequence
  ENSG00000169905_65 (sequence is synthesized)
gactggtgtttgggcgtctctctctgtcactgttgtctcttgctgtcacattgctgtctgtgttgtctttctaggtccagatgttttcagataattcacattgccctgattgtggacaac

SEQ ID NO: 563824 - DNA, 120 bp, Artificial Sequence
  ENSG00000169905_66 (sequence is synthesized)
agtggttccctagtttagaactaggccactggttgtaccaaactgaacttgttgaaaatgaatgttaccaggtattcttagaccgtattaacagagctgattattgtcctgagtgttatc

SEQ ID NO: 563825 - DNA, 120 bp, Artificial Sequence
  ENSG00000169905_67 (sequence is synthesized)
ctgataatcctgctaatagaagccttgttcttccttggtctttcccacttgagtgggctccccagaatctcaccagatggacctttgagaaagcttgccatccatttcttctgggtcctc

SEQ ID NO: 563826 - DNA, 120 bp, Artificial Sequence
  ENSG00000169905_68 (sequence is synthesized)
cactggttagaaaaagaatacatgactctcgagtagctggttttaaccctgcattacagttaatcttgaccagaacagataaaaccttaaacaaaaaactgggccaaaacaaatagcttc

SEQ ID NO: 563827 - DNA, 120 bp, Artificial Sequence
  ENSG00000169905_69 (sequence is synthesized)
tataatagtcaaaattgtcaagtctagaggcttttgtgtaggtagcccaaggaagatggaaaaataattcatttctaagtctgacccagattgtcactactttgggaactgcttaaattg

SEQ ID NO: 563828 - DNA, 120 bp, Artificial Sequence
  ENSG00000169905_70 (sequence is synthesized)
ttggatctgcttccgtggcctatacatattttattcacatgaatttagttagtattccagccagcctgttcatctagactgaggctaatctgttcatctagactgaggctaatccgtatt

SEQ ID NO: 563829 - DNA, 120 bp, Artificial Sequence
  ENSG00000169905_71 (sequence is synthesized)
tcctataaactgttttggaactaacttaccactcctaaaaaaatttctgcaacctaatgagtgtcatatgacaaagtagtcctagaggggaagtcctatactgtgtgcttcatagtggta

SEQ ID NO: 563830 - DNA, 120 bp, Artificial Sequence
  ENSG00000169905_72 (sequence is synthesized)
tttctaatgataacttttgtgggaaagcagcctcgttatagctggatcctagattagtccagtgaattttaataagaaattacactgttgtaaactcacctcttatgcattggtcagtga

SEQ ID NO: 563831 - DNA, 120 bp, Artificial Sequence
  ENSG00000169905_73 (sequence is synthesized)
tgagatatatatataaatagatagatagataaaatttgctcttatatagccatttattcatcattggccctgtttggcccatcctcagtgtggctgtgagattattgataactggtcact

SEQ ID NO: 563832 - DNA, 120 bp, Artificial Sequence
  ENSG00000169905_74 (sequence is synthesized)
gtcagataaatcacattctattaggaaacacctatataggttatgcagaaacatgcagaaatgccacctgtccatacttacgtggctttacataaacaaaagactgtcttgtctttgtgg

SEQ ID NO: 563833 - DNA, 120 bp, Artificial Sequence
  ENSG00000169905_75 (sequence is synthesized)
tgactgaatttacaacgtcctcccctggaaatggaaaagtacctatcaggagatgtatgacaaaagaaattatcaagcctgacttcatatatattatgaacagtctagaggaagcatctt

SEQ ID NO: 563834 - DNA, 120 bp, Artificial Sequence
  ENSG00000169905_76 (sequence is synthesized)
tcttagaactaaggaggtctgctgaacattggccacattctggactttcatgaaaatcatggacccagagttggggttaagccacttagaaaaagctgttgaaaacatctcaaaggccac

SEQ ID NO: 563835 - DNA, 120 bp, Artificial Sequence
  ENSG00000169905_77 (sequence is synthesized)
tgaacaatttttaaattacacttaacatgccaggtatctaggtatctagtgcttttagcaatattatcaatattatcaaggtcccagcttctttgtgtccttcccccttgcgatcctctt

SEQ ID NO: 563836 - DNA, 120 bp, Artificial Sequence
  ENSG00000169905_78 (sequence is synthesized)
tttttttttttttttttttgctttttaaaaaatagtgacagagtcttgctgtatgacccaggctggtctccaactcctaggctcaagccatcctcccacctcggtctcccaaggtgctgg

SEQ ID NO: 563837 - DNA, 120 bp, Artificial Sequence
  ENSG00000169905_79 (sequence is synthesized)
gattacaggcgtgagccaccctacccggcctaggatccatgtttgctttttatcgttaggtttttttttctcaatgagtacaatatgacttcttgttgtaacagacattttaatccctag

SEQ ID NO: 563838 - DNA, 120 bp, Artificial Sequence
  ENSG00000169905_80 (sequence is synthesized)
gaaaggctggaagtagagagcaaaaggctttctttcaagtcagtgttttatttgggaatcaagtctttcccaaaaatccctagcaaatttcttcttacatctcattagaaagtaccagtt

SEQ ID NO: 563839 - DNA, 120 bp, Artificial Sequence
  ENSG00000169905_81 (sequence is synthesized)
taccagtttacaagggagcctgggaaaccttggcaaaggggaatagggttagcattgcctgggtaggccacattgcctccattgaagaaatcagggcttttttttttttttttttttttt

SEQ ID NO: 563840 - DNA, 86 bp, Artificial Sequence
  ENSG00000169905_82 (sequence is synthesized)
gccactgtgcccagccccttgcccaggatggagtgtagtggcacgatctcggcttactgtaacctccacctcctaggttcaagcaa

SEQ ID NO: 563841 - DNA, 120 bp, Artificial Sequence
  ENSG00000169905_83 (sequence is synthesized)
aactcctgacctcagatgatccacctgccctgacctccgacagtgctgggattacaggcatagccaccgtgcctgaccagggctcttttagcaaggaaaacgtgaggaatgaatggctgt

SEQ ID NO: 563842 - DNA, 120 bp, Artificial Sequence
  ENSG00000169905_84 (sequence is synthesized)
tgccttatgtctcttacaatggaggttctctcctgttatattgctgaataaactatgtgaactgctaaattgactgaagactagttagtttatcactaactctttaatgaagaatttcac

SEQ ID NO: 563843 - DNA, 120 bp, Artificial Sequence
  ENSG00000169905_85 (sequence is synthesized)
tatcctacaactcctcctaaaaagtgaaaatttactttgagagagtgctttcgagaatagtattatgatcagtattattgcccctaaattttttaattattagagaatgcttatgttaca

SEQ ID NO: 563844 - DNA, 120 bp, Artificial Sequence
  ENSG00000169905_86 (sequence is synthesized)
aggacatatactaagaaacattctacaaatgtgaaaatttaaatatcagcaaaatagagaaaaggtttttgtttttgttttagtcaatatctccattaaatagtaagatcagattaaaag

SEQ ID NO: 563845 - DNA, 120 bp, Artificial Sequence
  ENSG00000169905_87 (sequence is synthesized)
gatttatatcattgatttctcaaatcaatacctaagcagtacctgtgagagcttgtttaaaaatggagatttcttggtctgctttagaaattttgattcctcaggttgcttgtagggccc

SEQ ID NO: 563846 - DNA, 120 bp, Artificial Sequence
  ENSG00000169905_88 (sequence is synthesized)
tagggcccaggaatctgcatattataaataacacctcatgccgggtgccatggcatgtacctgttaccacagctacttcagaggttgaggcagcaggatcacttgagcccaggagttcaa

SEQ ID NO: 563847 - DNA, 120 bp, Artificial Sequence
  ENSG00000169905_89 (sequence is synthesized)
tgggcaagatagtcagaccactgtctctttcaagaaaaaaaaacaacataaaagatataaatagtacctttggagattctgatgcaggtgctctctagaccatactttgagaaatgctgt

SEQ ID NO: 563848 - DNA, 120 bp, Artificial Sequence
  ENSG00000169905_90 (sequence is synthesized)
agtaatatgtccatagtgtttacttatctggcttaaaaggatgggagcagaatactcatagtactgcaagatagtaccatttatttggtaatactggctatgtaaaaagagatttcatgt

SEQ ID NO: 563849 - DNA, 120 bp, Artificial Sequence
  ENSG00000169905_91 (sequence is synthesized)
cagactgaagatcactgttaataatttaggtcataactcagccacatttttctcattaattaaactaatcaggaatgtttcagtcttcttcacaaacagttttgttcagtgtcattataa

SEQ ID NO: 563850 - DNA, 120 bp, Artificial Sequence
  ENSG00000169905_92 (sequence is synthesized)
actatgtgaatatatgggcaagaaaaatgaatcaaaaatattaattttaatattaagagggttactttgccttcaaacatcacatacctgttatatgataagctgtcagaaatcaacatc

SEQ ID NO: 563851 - DNA, 120 bp, Artificial Sequence
  ENSG00000169905_93 (sequence is synthesized)
atgtagtagagctcataaaattgagcaaaggagaaaattgaggaagcctttgaacaaagcttttcaccttaggtctttctagtatgtcttcatatggcttaaaatattgcaggttattct

SEQ ID NO: 563852 - DNA, 120 bp, Artificial Sequence
  ENSG00000169905_94 (sequence is synthesized)
agaatactccatagttgatatgaataatgaattttattaaaatataaatgctgtgttggtaaaattaattgtaatgacaaatgatctggagggttatccagtgttttaaatagtgtgagc

SEQ ID NO: 563853 - DNA, 120 bp, Artificial Sequence
  ENSG00000169905_95 (sequence is synthesized)
tacactcgtctctatttttatagtgtggaagagttggtaatattgcttatatgttatggtagcatttctaaaatgaccattataactactccctgttattttatggcagtccagggagtg

SEQ ID NO: 563854 - DNA, 120 bp, Artificial Sequence
  ENSG00000169905_96 (sequence is synthesized)
aaaaggttaatggaaacatgcaagggcagaccggaaagaaaatacatccaccaaagaggtggctgttgggggatatgagtgagtgaggtaagattcatctctgagttacaggtgaaggaa

SEQ ID NO: 563855 - DNA, 120 bp, Artificial Sequence
  ENSG00000169905_97 (sequence is synthesized)
gcccaggcaaacaggaaggcagaaatgagtccatggcatccaaagaatatgtggcagtccacatgtcatagctgtctgtaaaagtgagatgagccgcagcccgttcatctctccagtctc

SEQ ID NO: 563856 - DNA, 120 bp, Artificial Sequence
  ENSG00000169905_98 (sequence is synthesized)
cctggcaaccctgagtctccatggaattttggggacacagcttgaaaattgctttttatagaggcaaaataatggccttgcagccagctgggtttctattctaattctgatactattaaa

SEQ ID NO: 563857 - DNA, 120 bp, Artificial Sequence
  ENSG00000169905_99 (sequence is synthesized)
tgaccttaggcattttaacctctctgtatctagtttcttcatctgtgaaaaaggttgtgtaataatacctacctcatactgttgtgaggtttaagtgcaataacatataccaaacatatg

SEQ ID NO: 563858 - DNA, 120 bp, Artificial Sequence
  ENSG00000169905_100 (sequence is synthesized)
tatggcacatactaaatctttaggatgaggaaagatgtagggcaagaaagcaaaagcagaagttagaactggggaataaggtagagtcttacttgttttgttttgtttttttgagacaga

SEQ ID NO: 563859 - DNA, 120 bp, Artificial Sequence
  ENSG00000169905_101 (sequence is synthesized)
catgcccagctaatttttttatttttgtagagatggagtatcgccatgttgcccaagctggtcttgagctcctggcctcaagcgatcctctcacctgggcctcccaaagtgctgggatta

SEQ ID NO: 563860 - DNA, 120 bp, Artificial Sequence
  ENSG00000169905_102 (sequence is synthesized)
attataggcatgagccgccgtgtccaccgagtcttagttttagaactaagccaattgtttgaactgatggctgaattattataaacttattggctggtggctcactgtaattccagcact

SEQ ID NO: 563861 - DNA, 120 bp, Artificial Sequence
  ENSG00000169905_103 (sequence is synthesized)
ggaggatggcttgagcccaggagttcaaaacaagcctgagcaacatagtgagacccccaactctacaaaaaagttttaaaaagaaaaaaattagctggatgtggtggtatgtgcctgtag

SEQ ID NO: 563862 - DNA, 120 bp, Artificial Sequence
  ENSG00000169905_104 (sequence is synthesized)
ggctgaggtgggaggatcacttgagcctcagtgagctatgagcttgaggctgcagtgagctatgatggtactactgccctccagcctgggcaacagagtaaggccctttatctaaaaaca

SEQ ID NO: 563863 - DNA, 120 bp, Artificial Sequence
  ENSG00000169905_105 (sequence is synthesized)
ggcaacagagtaaggccctttatctaaaaacaaaaacaaaaaacttcttaaatctctcctgatgaaggacaggattggtttggggatgaggttgagcctgtagtataagtcagatggtct

SEQ ID NO: 563864 - DNA, 120 bp, Artificial Sequence
  ENSG00000169905_106 (sequence is synthesized)
tgggtgtaaagattaaaaggcctggagggatggatgaccgaaggcagatttttgtcacaatgtttaggcccattttataatcttaattatggtagatataattgctgtatgacttttatc

SEQ ID NO: 563865 - DNA, 120 bp, Artificial Sequence
  ENSG00000169905_107 (sequence is synthesized)
acctgagactttccacaacactgaaataaacaaattcctgaagtggtagttccctgaaaaggaaaaagaagaaatagagaaaagttgaaggatatgtacaaattcactcaggtcatatgt

SEQ ID NO: 563866 - DNA, 120 bp, Artificial Sequence
  ENSG00000169905_108 (sequence is synthesized)
actggagtcacaattcaaacctagatgtaagttttccagagtcagggtgcttgtggtatgcttaatacaagcttttaaaagtgtcatggttaggtcccacagctagactacctgagttca

SEQ ID NO: 563867 - DNA, 120 bp, Artificial Sequence
  ENSG00000169905_109 (sequence is synthesized)
aatcctaactgccctcagtagtcacgtgttcttgggtaacgttcttaacttttctgtatctcagtttcctcatctctaaaatagtaggaatattaatagtctacacctcataagattgtt

SEQ ID NO: 563868 - DNA, 120 bp, Artificial Sequence
  ENSG00000169905_110 (sequence is synthesized)
gtgaagattaaacgagttaataaagtgctgtgaatgatgcctggcacaaagaaggcactcaataaatagtagttcttatagttgttgtatatgctttatttgttactcgttttcatagca

SEQ ID NO: 563869 - DNA, 120 bp, Artificial Sequence
  ENSG00000169905_111 (sequence is synthesized)
ggattgtaactacttgtttcagggccaagataccagtttctttttatccctagagcctaaaatggcatcattcactaaaataaaattgtgtttaaaaataaagatatatacttaattcta

SEQ ID NO: 563870 - DNA, 87 bp, Artificial Sequence
  ENSG00000169905_112 (sequence is synthesized)
gggtgcagccgagcggtgtggagcggagagaatactcgaagggctctcctgatactaacagttttacgatttaaaacttcgccagaa

SEQ ID NO: 563871 - DNA, 85 bp, Artificial Sequence
  ENSG00000169905_113 (sequence is synthesized)
atccctaaacaacacattaattttatatccttttgaaactttatgtaagtggaaagtttatataagaatgtgtgcatgtgtttat

SEQ ID NO: 563872 - DNA, 120 bp, Artificial Sequence
  ENSG00000169905_114 (sequence is synthesized)
taagtggaaagtttatataagaatgtgtgcatgtgtttatttttttccttgtgctacttgcattttttttttaagctcaacattcttgagtttcatctgtgtttagaatgacagtatcct

SEQ ID NO: 563873 - DNA, 120 bp, Artificial Sequence
  ENSG00000169905_115 (sequence is synthesized)
attgtacagcaataccttaatttattcattctcccgttcgtggccattgtggctgttattttgctattacacagtgctaccatgaatatttttattcatgtttttaaatgtacaggtgca

SEQ ID NO: 563874 - DNA, 120 bp, Artificial Sequence
  ENSG00000169905_116 (sequence is synthesized)
gtttctctagggtatgtgcctaagagtgcaactgctgagttataggaaatgcacatcttcagttttactaggtaatgccaattccaaaagtgattgtacagatttatagtcttgtcatta

SEQ ID NO: 563875 - DNA, 120 bp, Artificial Sequence
  ENSG00000169905_117 (sequence is synthesized)
agaaaggtaaaatgtcctgctttcagggagtttatattttagtggagaaaaatagccaaaataaataatatagcaaaatggtacctgttttatgtgaaaaaaataaagcaagcctagtag

SEQ ID NO: 563876 - DNA, 120 bp, Artificial Sequence
  ENSG00000169905_118 (sequence is synthesized)
tacttgttattgcattgctgatagagccatatggggggatttgaggctaaggggatgggatataaccaagaagtcctgtgtttcaggtggtgattgacatgaacagagatataggtatga

SEQ ID NO: 563877 - DNA, 120 bp, Artificial Sequence
  ENSG00000169905_119 (sequence is synthesized)
gattggtcctgatgctttcaagcagataattgaagctgtattgaagctgtgagtgttggggtggggataggggttaggaatcttgccaggagcattttcccaggcccctctcttcactcc

SEQ ID NO: 563878 - DNA, 120 bp, Artificial Sequence
  ENSG00000169905_120 (sequence is synthesized)
tactcatccagtagctctaaggctaaagaatgagtgaggaagctggtaatgggtggtattattttgagcatttggagttctggggccccctggtggctcttgcctacagaggtttaaagg

SEQ ID NO: 563879 - DNA, 120 bp, Artificial Sequence
  ENSG00000169905_121 (sequence is synthesized)
accaggagaggagggaagacttgtctgaaacatatggaacggtggagttctcttgatgcaggaatacttggaattctagtgcttgtttgattcttgaagttgtaaaactgaaggttgggg

SEQ ID NO: 563880 - DNA, 120 bp, Artificial Sequence
  ENSG00000169905_122 (sequence is synthesized)
aatggatggaattattctgagcacttggagctttagggctttctcttgactcctaccaatagagtcctctgggaggagtggtttttgctatagtatgtggaaccccctttgtcagttttt

SEQ ID NO: 563881 - DNA, 120 bp, Artificial Sequence
  ENSG00000169905_123 (sequence is synthesized)
gtagtgtggtagatgtgaaatagtatcttgctgacactacaatagtatcttgttgcatttacttgatttcactctaaaaatgtaaaatctgatcaattaaatgtcagacttttaattttt

SEQ ID NO: 563882 - DNA, 120 bp, Artificial Sequence
  ENSG00000169905_124 (sequence is synthesized)
cacttgaatttcctgaaggaatgtttgcttcaaaaagccttgtctgctttatcactttgaggttgttcactaagtcaactgtgaaggcccataaacttggagattcgacaacttccaaaa

SEQ ID NO: 563883 - DNA, 120 bp, Artificial Sequence
  ENSG00000169905_125 (sequence is synthesized)
aaatttaaagaatgaagaattggctgttttatttaccatttagaattttgattgtgttaaaatttcattaatatttctacatcatatgaactactggattaaactgtgtcctacaagaag

SEQ ID NO: 563884 - DNA, 120 bp, Artificial Sequence
  ENSG00000169905_126 (sequence is synthesized)
gaattcatagggcgatcatatattaccataaattttgcacagaaatcaagcacttgggaataaggaagcgtgtccctaacattggtaatgagcatagactggagtcatagctgggtttga

SEQ ID NO: 563885 - DNA, 120 bp, Artificial Sequence
  ENSG00000169905_127 (sequence is synthesized)
attcctattttgttactgtgtgggctgttttcctctttactaatatttaaaggagctggcacatgatttttttttttttggtgccatggctctggtatgaactgtgcacataattttggt

SEQ ID NO: 563886 - DNA, 120 bp, Artificial Sequence
  ENSG00000169905_128 (sequence is synthesized)
aatcgaaatttctgggaagaaaattcacctataactccactacctcaacaaatcaaattgtttgatttttagagattttccttcagcccttgaccatgagtatctatcatgtaaatgtaa

SEQ ID NO: 563887 - DNA, 120 bp, Artificial Sequence
  ENSG00000169905_129 (sequence is synthesized)
tgacatttttggaaaaagtcaaattttgaaacattggtgtcttctggggttttaattatataaatgaagctgtctggttttgcctttaatagttcaaataataattatttacggtttttg

SEQ ID NO: 563888 - DNA, 120 bp, Artificial Sequence
  ENSG00000169905_130 (sequence is synthesized)
aggacttcttttgtgcccctgtggttgccagtattgcacattatctcatttgatcttcacactgcctctttcatctaagtactattattccattttgtaattaagaaaaccaaggaaaaa

SEQ ID NO: 563889 - DNA, 67 bp, Artificial Sequence
  ENSG00000169905_131 (sequence is synthesized)
tggtggcgggcacctgtaatcccagcttctcgggaggctacgcgccattgcactccagcctgggcga

SEQ ID NO: 563890 - DNA, 120 bp, Artificial Sequence
  ENSG00000169905_132 (sequence is synthesized)
tccatctcaaaaacaaaacaaaaaacaaagaaaaccaagggcatagagagagagagagaaacaccaagtcagaagctggagcagtcattcaggtctaggcagtctgaccttagaggatag

SEQ ID NO: 563891 - DNA, 120 bp, Artificial Sequence
  ENSG00000169905_133 (sequence is synthesized)
tgctatattgggttctatatttgtagatttgctttatggatgttaggtcatatttgtagattggacttgatcctggaggctgacttataactttctttgtataaaagtaacagtatttac

SEQ ID NO: 563892 - DNA, 85 bp, Artificial Sequence
  ENSG00000169905_134 (sequence is synthesized)
tgacttataactttctttgtataaaagtaacagtatttacagttttttgtttgtttcttttttgagataggatctctctctctta

SEQ ID NO: 563893 - DNA, 120 bp, Artificial Sequence
  ENSG00000169905_135 (sequence is synthesized)
gtagctgagactacaggcacacaccaccatacctgactaatttttgtattttttgtatgaacaaggtctcgatatgttgcctaggctggtctctgaaccgttgggctcaagcagtcctct

SEQ ID NO: 563894 - DNA, 120 bp, Artificial Sequence
  ENSG00000169905_136 (sequence is synthesized)
gggattataggcatgagccaccatacctgactacagtatattttgaagtactgtataaaggtactttataactattttttcttttctttttcttttgagacaaggacttgctgtgttgcc

SEQ ID NO: 563895 - DNA, 120 bp, Artificial Sequence
  ENSG00000169905_137 (sequence is synthesized)
tattttttcttttctttttcttttgagacaaggacttgctgtgttgcccaggctggagtatagtggcactatcatggcttactgcaaacttgaactcctgagctcaagcgatcctcccac

SEQ ID NO: 563896 - DNA, 120 bp, Artificial Sequence
  ENSG00000169905_138 (sequence is synthesized)
aataactgagactgcaggcacacactgccacacccagctactttatagtgaacaccagagtcatctggcaaatctgttaaaacataaattcctgtaggaggctctcagagattctggtct

SEQ ID NO: 563897 - DNA, 120 bp, Artificial Sequence
  ENSG00000169905_139 (sequence is synthesized)
agtgggtctaggttggggcctgaatttgtacttttagcaagctcccaggtaatgctagtgattcccagctagtgagtttaatatagtaaggaaacaaacacttgttgtccatattgttga

SEQ ID NO: 563898 - DNA, 120 bp, Artificial Sequence
  ENSG00000169905_140 (sequence is synthesized)
cttgatagttataccccagtagcactgagcattcagatcttggtttttaaaggaactaggactttttagagaagtggctgatttagtgcgggagcagagaaaatacaagatgagcctgaa

SEQ ID NO: 563899 - DNA, 120 bp, Artificial Sequence
  ENSG00000169905_141 (sequence is synthesized)
aaatcttatggtgcttgaaagtaaggaaatgctacaaaaagttagggaccttgtcgaaaggacccaagagccaacttgaaggagttcctggtatccaggttggaacaatttgagcaataa

SEQ ID NO: 563900 - DNA, 120 bp, Artificial Sequence
  ENSG00000169905_142 (sequence is synthesized)
aatgaataatgatagtattggactttaacccataaaataaaatgagttcatactgatattgctgagtgaataaataagtaggggagaagggacaactctaacagaagaattccatttaat

SEQ ID NO: 563901 - DNA, 120 bp, Artificial Sequence
  ENSG00000169905_143 (sequence is synthesized)
cggccgctgggtgcagccgagcggtgtggagcggagagaatactcgaagggctctcctgatactaacagttttacgatttaaaacttcgccagaatttgtatgtgacgcattcccagact

SEQ ID NO: 563902 - DNA, 120 bp, Artificial Sequence
  ENSG00000169906_0 (sequence is synthesized)
aaactcctctttgattcttctagctgtttcactattgggcaaccagacaccagaatgagtactaaaaagtctcctgaggaactgaagaggatttttgaaaaatatgcagccaaagaaggt

SEQ ID NO: 563903 - DNA, 120 bp, Artificial Sequence
  ENSG00000169906_1 (sequence is synthesized)
tcaagaactggacaagaatggagatggagaagttagttttgaagaattccaagtattagtaaaaaagatatcccagtgaaggagaaaacaaaatagaaccctgagcactggaggaagagc

SEQ ID NO: 563904 - DNA, 120 bp, Artificial Sequence
  ENSG00000169906_2 (sequence is synthesized)
gcctgtgctgtggtcttatcctatgtggaatcccccaaagtctctggtttaattctttgcaattataataacctggctgtgaggttcagttattattaataaagaaattattagacatac

SEQ ID NO: 563905 - DNA, 120 bp, Artificial Sequence
  ENSG00000169908_0 (sequence is synthesized)
agtggtgtttgctttctccaccagaagggcacactttcatctaatttggggtatcactgagctgaagacaaagagaagggggagaaaacctagcagaccaccatgtgctatgggaagtgt

SEQ ID NO: 563906 - DNA, 120 bp, Artificial Sequence
  ENSG00000169908_1 (sequence is synthesized)
gcacgatgcatcggacattctctggtggggctcgccctcctgtgcatcgcggctaatattttgctttactttcccaatggggaaacaaagtatgcctccgaaaaccacctcagccgcttc

SEQ ID NO: 563907 - DNA, 120 bp, Artificial Sequence
  ENSG00000169908_2 (sequence is synthesized)
gtgtggttcttttctggcatcgtaggaggtggcctgctgatgctcctgccagcatttgtcttcattgggctggaacaggatgactgctgtggctgctgtggccatgaaaactgtggcaaa

SEQ ID NO: 563908 - DNA, 120 bp, Artificial Sequence
  ENSG00000169908_3 (sequence is synthesized)
cgatgtgcgatgctttcttctgtattggctgctctcattggaattgcaggatctggctactgtgtcattgtggcagcccttggcttagcagaaggaccactatgtcttgattccctcggc

SEQ ID NO: 563909 - DNA, 120 bp, Artificial Sequence
  ENSG00000169908_4 (sequence is synthesized)
cagtggaactacacctttgccagcactgagggccagtaccttctggatacctccacatggtccgagtgcactgaacccaagcacattgtggaatggaatgtatctctgttttctatcctc

SEQ ID NO: 563910 - DNA, 120 bp, Artificial Sequence
  ENSG00000169908_5 (sequence is synthesized)
ttggctcttggtggaattgaattcatcttgtgtcttattcaagtaataaatggagtgcttggaggcatatgtggcttttgctgctctcaccaacagcaatatgactgctaaaagaaccaa

SEQ ID NO: 563911 - DNA, 120 bp, Artificial Sequence
  ENSG00000169908_6 (sequence is synthesized)
tagtgtaacatactccccacagtctacttttacaaacgcctgtaaagactggcatcttcacaggatgtcagtgtttaaatttagtaaacttcttttttgtttgtttatttgtttttgttt

SEQ ID NO: 563912 - DNA, 120 bp, Artificial Sequence
  ENSG00000169908_7 (sequence is synthesized)
ggtaatttacagactgagtgacagtactcagtatatctgagataaactctataatgttttggataaaaataacattccaatcactattgtatatatgtgcatgtattttttaaattaaag

SEQ ID NO: 563913 - DNA, 120 bp, Artificial Sequence
  ENSG00000169908_8 (sequence is synthesized)
atgtctagttgctttttataagaccaagaaggagaaaatccgacaacctggaaagatttttgttttcactgcttgtatgatgtttcccattcatacacctataaatctctaacaagaggc

SEQ ID NO: 563914 - DNA, 120 bp, Artificial Sequence
  ENSG00000169908_9 (sequence is synthesized)
cctttgaactgccttgtgttctgtgagaaacaaatatttacttagagtggaaggactgattgagaatgttccaatccaaatgaatgcatcacaacttacaatgctgctcattgttgtgag

SEQ ID NO: 563915 - DNA, 120 bp, Artificial Sequence
  ENSG00000169908_10 (sequence is synthesized)
tactatgagattcaaatttttctaacatatggaaagccttttgtcctccaaagatgagtactagggatcatgtgtttaaaaaaagaaaggctacgatgactgggcaagaagaaagatggg

SEQ ID NO: 563916 - DNA, 120 bp, Artificial Sequence
  ENSG00000169908_11 (sequence is synthesized)
aaactgaataaagcagttgatcagcatcattggaacatggggacgagtgacggcaggaggaccacgaggaaataccctcaaaactaacttgtttacaacaaaataaagtattcactacca

SEQ ID NO: 563917 - DNA, 120 bp, Artificial Sequence
  ENSG00000169908_12 (sequence is synthesized)
tggccctggtgttaatataccattgttttcatcataaagaaaaaggcaaaaccaaacatgctcgacctaccagcatttattctgatatcatctttgtagcaacacaattatagcattcac

SEQ ID NO: 563918 - DNA, 120 bp, Artificial Sequence
  ENSG00000169908_13 (sequence is synthesized)
tttagctgtcagtaacaagcttcctcgagtctcacagtcacaggattgtcttagttctttgcagttggctctatgtacacaagaacatgctgcccatagacacagcgctcccttcaggat

SEQ ID NO: 563919 - DNA, 120 bp, Artificial Sequence
  ENSG00000169908_14 (sequence is synthesized)
ctaattcactgcctctgctctcgctgcagagacagaaaaaaaagtgatgtctgctctttgtttgctgttatattcccaactagtatacataagtaatagccaaccattcaatgcatcagg

SEQ ID NO: 563920 - DNA, 120 bp, Artificial Sequence
  ENSG00000169908_15 (sequence is synthesized)
cactatgctaaacccatatgactcaaatattaagcaataggcttaagatcacctactcaggaaataacaggcttcaaaccttgagtcgctctgtgcaaaagctcctacttttaacctgta

SEQ ID NO: 563921 - DNA, 120 bp, Artificial Sequence
  ENSG00000169908_16 (sequence is synthesized)
ttccacacttgctgtttggttggattttctgcaattccttcctaataaggagtcataaaaatgcctaagcagtaagtatggagaatcactagcaatctttgaacagcagctcatgaaaag

SEQ ID NO: 563922 - DNA, 120 bp, Artificial Sequence
  ENSG00000169908_17 (sequence is synthesized)
cctttcgttgtgaaagaaaaccaggaagcacttgtttcctggggatatgatttaggagaaaaaaatgcatttgtttgtagcagtgaaagttcttgtttctatatcctcctaaaatatata

SEQ ID NO: 563923 - DNA, 120 bp, Artificial Sequence
  ENSG00000169908_18 (sequence is synthesized)
tattattgaattaatgaaagtccagctttgatcctatctttgagagggttattttatgtcttatatttttcaaaccatttactcctctggtgccagatctgttaactttcttttaaaaat

SEQ ID NO: 563924 - DNA, 120 bp, Artificial Sequence
  ENSG00000169908_19 (sequence is synthesized)
aagacaaaaacctaatgaaaactgaaagcccattgctaccatgaaaaactttgctgaaaataaaaggaaactttctgtaattttgggggaaggttaaaatgaaaatctagttttccttat

SEQ ID NO: 563925 - DNA, 120 bp, Artificial Sequence
  ENSG00000169908_20 (sequence is synthesized)
agtatcctctagggattgctgtcatgcagcttacctttagccttgaatttcatacaaggcagagttcaaagtaagtgattacttgtactaaatgtactcacttagtacgttttggggaca

SEQ ID NO: 563926 - DNA, 120 bp, Artificial Sequence
  ENSG00000169908_21 (sequence is synthesized)
ggcataaagagccaatgaccaaaatggctgaagtgatttggcagggaatgatactctcctctgatttggggtagtaaatacaccaggtttcccagctgagtcactgtagggatggcttct

SEQ ID NO: 563927 - DNA, 120 bp, Artificial Sequence
  ENSG00000169908_22 (sequence is synthesized)
tcccagatactacagggaagatctgttacctttgtttataagacaaaagacactttcaaagggcaggtcttttcatgtagaagagtcaggtccataactcggtagcatttaatttgaaag

SEQ ID NO: 563928 - DNA, 120 bp, Artificial Sequence
  ENSG00000169908_23 (sequence is synthesized)
gttacccacattgagctcataccagtgtgaaacttccatggcattatcttttaaatccctaagattaaaaccccacacaaatgcactcaaagcaacccaatatcagtatcctgcagtttc

SEQ ID NO: 563929 - DNA, 120 bp, Artificial Sequence
  ENSG00000169908_24 (sequence is synthesized)
tatgggccctttctgcagcctttactcatggaagacaagggatctgggtttgtttaggaaacattttgtgagcattgtccaagccctaagtatggttggcctaagctttgctgaagctaa

SEQ ID NO: 563930 - DNA, 120 bp, Artificial Sequence
  ENSG00000169908_25 (sequence is synthesized)
gatcagtctgtttatgtttgcttaaaataggaacttaaaggactaaaatgtcatcattatttatcctgattatagcctaatggtattttattttctctacagcaatatgactgctaaaag

SEQ ID NO: 563931 - DNA, 120 bp, Artificial Sequence
  ENSG00000169914_0 (sequence is synthesized)
gctgcgtagtcgtcgccgggctccgttgcccgcgctgttttaccttcccaacgcttgaggcggacgctggggggtcctgcgcctttccctcctgccgctggggactgcaggctaaggcca

SEQ ID NO: 563932 - DNA, 120 bp, Artificial Sequence
  ENSG00000169914_1 (sequence is synthesized)
gccatgtcccgaaagcaggcggcgaagagccggccgggcagcggcagccggaaagccgaggccgagcgcaagcgggacgagcgggcggcgcgccgggccctggccaaggagcggcggaat

SEQ ID NO: 563933 - DNA, 120 bp, Artificial Sequence
  ENSG00000169914_2 (sequence is synthesized)
cggagtctggcggcggcggcggctgcgaggaggagttcgtcagcttcgccaaccagctgcaggccctggggctgaagctgcgggaggtgccgggggacggcaattgcttgttcagagctc

SEQ ID NO: 563934 - DNA, 120 bp, Artificial Sequence
  ENSG00000169914_3 (sequence is synthesized)
ttggtgatcaattggagggacactcacgaaatcatctcaagcacagacaggagacagtggactacatgataaagcagcgggaagattttgaaccctttgtagaagatgacattccttttg

SEQ ID NO: 563935 - DNA, 120 bp, Artificial Sequence
  ENSG00000169914_4 (sequence is synthesized)
agaagcatgtggccagtttggcaaagcctggtacttttgctggcaatgatgcaattgtagcctttgcaagaaatcatcagttgaatgtagtgattcatcaacttaatgcccctttgtggc

SEQ ID NO: 563936 - DNA, 120 bp, Artificial Sequence
  ENSG00000169914_5 (sequence is synthesized)
agattcgtggtacagagaaaagcagcgtgagggagttacacatcgcatatcggtatggagagcactacgacagtgttcggaggatcaatgacaactcagaggcacctgcacatctccaga

SEQ ID NO: 563937 - DNA, 120 bp, Artificial Sequence
  ENSG00000169914_6 (sequence is synthesized)
cggattttcagatgcttcatcaagatgaatcaaataaaagagaaaagatcaagacaaagggaatggactctgaagacgacctgagagatgaagtagaggatgctgtccagaaagtttgta

SEQ ID NO: 563938 - DNA, 120 bp, Artificial Sequence
  ENSG00000169914_7 (sequence is synthesized)
atgcaactggatgttcagattttaatttaatagtccagaacctggaagctgaaaattataatattgaatctgcaataattgccgtgcttcggatgaaccaagggaagagaaataatgcag

SEQ ID NO: 563939 - DNA, 120 bp, Artificial Sequence
  ENSG00000169914_8 (sequence is synthesized)
aagagaatcttgagcccagtggtcgagtgctgaagcagtgtggccctttgtgggaggagggtggcagtggtgccagaatctttggaaatcagggcttaaatgaaggcaggaccgaaaaca

SEQ ID NO: 563940 - DNA, 120 bp, Artificial Sequence
  ENSG00000169914_9 (sequence is synthesized)
ataaggcacaggccagccctagtgaagaaaacaaagcaaataaaaaccagctcgcaaaggtcacaaacaaacagaggcgagaacagcagtggatggagaagaagaagcggcaggaggaga

SEQ ID NO: 563941 - DNA, 120 bp, Artificial Sequence
  ENSG00000169914_10 (sequence is synthesized)
ggcaccgccacaaagccctggagagcagaggtagccacagggacaataacagaagcgaagcagaggcgaacacgcaggtcaccttggtgaagaccttcgccgctctcaacatctgactct

SEQ ID NO: 563942 - DNA, 120 bp, Artificial Sequence
  ENSG00000169914_11 (sequence is synthesized)
ttggcctcttgggagttgtaagaagcggctggaaaaggattgctgtgtgctagactttccagtgaggccgtccttttataaaacgcaacacaaccaacgaagcccacacatgagctcaca

SEQ ID NO: 563943 - DNA, 120 bp, Artificial Sequence
  ENSG00000169914_12 (sequence is synthesized)
cactgagttagtttcgttcaagctgcctctttttttgttcgaagttttattagtgatatgttggtgttttatgaaaatgcagtgaggccattcatattctgtaatacaaaattaaaatac

SEQ ID NO: 563944 - DNA, 120 bp, Artificial Sequence
  ENSG00000169914_13 (sequence is synthesized)
tgagttttaggggcagatagttaggtcaggaaaaaccttttaagtggtggctttatttgccctgaaaatcagacttcagtgaccctaggatctttccttaacatttggggtgagttttgc

SEQ ID NO: 563945 - DNA, 120 bp, Artificial Sequence
  ENSG00000169914_14 (sequence is synthesized)
tgtaattgttcatgagtagtttagaataattgttagaaattcagaatgacaagtttccttagtttctctttcattctcaaacagatatatagggtagcttataaatgatctccaactcag

SEQ ID NO: 563946 - DNA, 120 bp, Artificial Sequence
  ENSG00000169914_15 (sequence is synthesized)
gaatatgctttgatttacttctaatccaagttactcagaaaataattcaggaattgttttcccaaagttacgtgagggttgtggcctgcagtcaggatggaaattaaccgcatttctctc

SEQ ID NO: 563947 - DNA, 120 bp, Artificial Sequence
  ENSG00000169914_16 (sequence is synthesized)
cttcctgattctgatgttatttcagatgggatgcaggtgctgttagttcatttgcactcaagccatatgataaatgcagctgactgttaattaggcctggccttgttgggaagttgatag

SEQ ID NO: 563948 - DNA, 120 bp, Artificial Sequence
  ENSG00000169914_17 (sequence is synthesized)
tggtgttgggtttttggtatttgtttcctgacagtggggagatggcatgttactgcttgtgatacagttctggaattctgatagtgtgtagagcagggtctatagttgtaacaggagacg

SEQ ID NO: 563949 - DNA, 120 bp, Artificial Sequence
  ENSG00000169914_18 (sequence is synthesized)
aactcctggggttttgcctaagaggagtctaaagaattatgtttttataggagaagcctggaagaataaggtttttcatgttcgcattttaaataacgattttcttcccttctgttgtag

SEQ ID NO: 563950 - DNA, 120 bp, Artificial Sequence
  ENSG00000169914_19 (sequence is synthesized)
acttagatgccttcagagagatacgtggtaacttgaccttataggtcgctaaacttagtattgtggaaattaaatcttataaaatgctacatttatttctttttatttaagccctgtttg

SEQ ID NO: 563951 - DNA, 120 bp, Artificial Sequence
  ENSG00000169914_20 (sequence is synthesized)
gcatttcaaagttgggaaaactccagcatctgctggaagttgttggaccagcagggttggttgacttaggttggaccagcagagaagagaacatactttggttgaggccttcgaatcact

SEQ ID NO: 563952 - DNA, 120 bp, Artificial Sequence
  ENSG00000169914_21 (sequence is synthesized)
cttcagttctgaaatagacagacttgagcagtggagagacgtctttcctaaaactgagttaggtggatgtgaacttaagaactataacgtatgaggcagcccatcttggatcatctttgt

SEQ ID NO: 563953 - DNA, 120 bp, Artificial Sequence
  ENSG00000169914_22 (sequence is synthesized)
cttttgggacctaatacttgggcaaataattgatgctgagttgaaaggtaaattattagttatcttccccacccctcgcatttcagaattataaaaattcggaggcaaattgaaaactaa

SEQ ID NO: 563954 - DNA, 120 bp, Artificial Sequence
  ENSG00000169914_23 (sequence is synthesized)
aatgtttggtaggccctggagtcgccagattgtctttatcaccaggcctttggctttcttcagtttcactggtatcttttggttttgtttttgactttggtggctttttgtagttggagc

SEQ ID NO: 563955 - DNA, 120 bp, Artificial Sequence
  ENSG00000169914_24 (sequence is synthesized)
atcagtagtctcttggaattgctcctaggacattgtggtttaggtttcttcctgggtacagtacattgtaaaatttagcagattaaaaaaagtacacagcattttttttctgtgcacgtc

SEQ ID NO: 563956 - DNA, 120 bp, Artificial Sequence
  ENSG00000169914_25 (sequence is synthesized)
gcagagtcctgagcttgaggctgtgttactctactcattccaaacgaatgaaagatctctgttgccttactctaaggaagtgggatcgagtgcgttaggatctatggttgtcttggtttt

SEQ ID NO: 563957 - DNA, 120 bp, Artificial Sequence
  ENSG00000169914_26 (sequence is synthesized)
caactctgggcagattcctgactggctgagtgtttctgaatgaagatgttttcctgtctgttttgtactgcttgagtgcagaggccagatcctctcagaaagataagattgtatgccaga

SEQ ID NO: 563958 - DNA, 120 bp, Artificial Sequence
  ENSG00000169914_27 (sequence is synthesized)
tgtcagaagtagtagaattgctttatttacttggttaatgaaggtggccttgggccctattgggttttagaagttttagaagctgctaaaaagttattaaagaatattgggaacatttat

SEQ ID NO: 563959 - DNA, 120 bp, Artificial Sequence
  ENSG00000169914_28 (sequence is synthesized)
tttttaaattacctaattctggtaataggcttcagcatttctggagtataataatggtggtttaaaaaactaatcaaacggctttagtaattttactactggtttcacagcttttcagtt

SEQ ID NO: 563960 - DNA, 120 bp, Artificial Sequence
  ENSG00000169914_29 (sequence is synthesized)
acagttggtctgtttagtgtgttaattattaggaatcgggtacatgcatccaacttcagtgataccttctagctaatggtttcaatttagacttcactgcctcagtctcactgggtacat

SEQ ID NO: 563961 - DNA, 120 bp, Artificial Sequence
  ENSG00000169914_30 (sequence is synthesized)
gagaaggttggaatcaacatgcttagttgcctcagtgggcacttgaaaattccttcactggcagcccgagtggaggcccagtatgtctagtcctgggatgactgttgtcagcagctgtta

SEQ ID NO: 563962 - DNA, 120 bp, Artificial Sequence
  ENSG00000169914_31 (sequence is synthesized)
ctctagtacaggtgctcctgtgaactctttattaggaactgaatgtgtcttaacctctgtgttacatcttggctggcagagatttatgttacatgagattgtcttggtagcttgtagtgt

SEQ ID NO: 563963 - DNA, 120 bp, Artificial Sequence
  ENSG00000169914_32 (sequence is synthesized)
ggtcaggagaaaggggatggagcagtggtgcatagctgcttactgctcttataaacggtatataaaggttttacggattttgaaaatatttttttttagaggtcaaaataaataccattt

SEQ ID NO: 563964 - DNA, 120 bp, Artificial Sequence
  ENSG00000169914_33 (sequence is synthesized)
tagtggcaacagctttgaactagagaggtagatgtattaaagcagcatagaaccataacttctagataatgtagttgccactaggagatattagaaagttagaatgtatgtgtgtattta

SEQ ID NO: 563965 - DNA, 120 bp, Artificial Sequence
  ENSG00000169914_34 (sequence is synthesized)
gtttttcaataataatgaacatacactttcaggagcaaagtatggttgagaaattgtggcagaaagaattttaaatgttagtcgaagttgtctgtagtttctttattaagctctgaaaac

SEQ ID NO: 563966 - DNA, 120 bp, Artificial Sequence
  ENSG00000169914_35 (sequence is synthesized)
acttccaatgccagtttgattctgagggcttgggaagtgggatctcccttgtggagcagctggagctggctgggagggagcctctccatgggtaatttattatgcctgccctgcttcccc

SEQ ID NO: 563967 - DNA, 120 bp, Artificial Sequence
  ENSG00000169914_36 (sequence is synthesized)
cagggagctgcttcagtgtgaaatgatgtgattgtcgggggtggggtgggaggagggccaccttcagtcggggagttgctcacatattacacaggtagcatcaggtggacttcagcgctg

SEQ ID NO: 563968 - DNA, 120 bp, Artificial Sequence
  ENSG00000169914_37 (sequence is synthesized)
aactgtactagtagtgagtccctgtagtcaatgtgcaatttctctaattctgagaaactctgtagactctgcctgggttttactgggtcagcatagaatgctatcagtttacctctgtga

SEQ ID NO: 563969 - DNA, 120 bp, Artificial Sequence
  ENSG00000169914_38 (sequence is synthesized)
aatattcagtcagttgaaggaaacttggattcctagtcagaggtgactaaaagttaccctgaccaaaaggatctctgcggggggaagagaatggagcttcctgattttaatgtgttgcgt

SEQ ID NO: 563970 - DNA, 120 bp, Artificial Sequence
  ENSG00000169914_39 (sequence is synthesized)
cagtggccctcttcgactcccgttttgggtagatgcgtagctcttcactttcttacctcaaggctctgtctagccatgttaaatctttagactcagtctgatgccgtttttctgttttgc

SEQ ID NO: 563971 - DNA, 120 bp, Artificial Sequence
  ENSG00000169914_40 (sequence is synthesized)
cattctcattattcacagctttcagaacaagtgttgctaaaactccggggcctttgacagttgttctgaggtgatttaataatggactttttataagttatgttttcctggctctaaagt

SEQ ID NO: 563972 - DNA, 64 bp, Artificial Sequence
  ENSG00000169914_41 (sequence is synthesized)
aatggactttttataagttatgttttcctggctctaaagtaatggtggggcaatctcggctcac

SEQ ID NO: 563973 - DNA, 120 bp, Artificial Sequence
  ENSG00000169914_42 (sequence is synthesized)
tcagcctcccaaagtgctaggattacgggtgtgagcaaccctgcccggccagtaaattgtatttttttaatgacatcattgatttgaagatctagatggcataaattacgacgtctgcca

SEQ ID NO: 563974 - DNA, 120 bp, Artificial Sequence
  ENSG00000169914_43 (sequence is synthesized)
cgacgtctgccatcgcatattagaaaggggacagtcatatttgtaacgtggagagaacacggagcaccagtcaccacgtgcacttaggatgcagagcttaccgcacaccgctgatgggga

SEQ ID NO: 563975 - DNA, 120 bp, Artificial Sequence
  ENSG00000169914_44 (sequence is synthesized)
cctccggaaagagcggtgccttgtggttggcctggaagttctctcccaaggtgaaattcctttaaaacctcaggctctgacctatgtctttgaagcagctgctttgtagagtccctctct

SEQ ID NO: 563976 - DNA, 120 bp, Artificial Sequence
  ENSG00000169914_45 (sequence is synthesized)
ttactgtcctcgttaggactgttttgtggttccatgaaaatgtttagcatccttgcagaattacttgagaaggggctggtaccagtgtaaagaatctatttctgtaaaactacgaacttt

SEQ ID NO: 563977 - DNA, 120 bp, Artificial Sequence
  ENSG00000169914_46 (sequence is synthesized)
tgcatagggaatttattctaagcaggtcatagccgtgatccagagctgctgctgctcactgccagtccttgcggctggcggcgattgccggacagactctctgtggcctggctctcatcc

SEQ ID NO: 563978 - DNA, 120 bp, Artificial Sequence
  ENSG00000169914_47 (sequence is synthesized)
ttggcgtgtcagcctgcggcaggctgccagccatccatgacaatcatgtgagctcagccacagacctcagctggcggtttgatccctggcaggtccctcgagcagtactggtaagaggct

SEQ ID NO: 563979 - DNA, 120 bp, Artificial Sequence
  ENSG00000169914_48 (sequence is synthesized)
tcacacattttcccactcttacagttcatttttcatagtaggaagggcccttggcctccccagtgcctcttccagagcctccaccagcactaagctcagaggaaagaagaaaagggccag

SEQ ID NO: 563980 - DNA, 120 bp, Artificial Sequence
  ENSG00000169914_49 (sequence is synthesized)
gagtcagacgtcacacccgggggctcccctttcccatgtagaagtgttggcatgcgtcagtctcctttacagaggggtggatgtatccgtggaggaggggccttctctctttctaattgc

SEQ ID NO: 563981 - DNA, 120 bp, Artificial Sequence
  ENSG00000169914_50 (sequence is synthesized)
actatacttgttctagcttcagtctggagatacttaagacctccatggggtcgtgatccatagacttagcaagtcttgccttatctatggagctcgatggtgagaattgtgaccattgtc

SEQ ID NO: 563982 - DNA, 120 bp, Artificial Sequence
  ENSG00000169914_51 (sequence is synthesized)
tgatgtccatagttccttccccctagattgtttctttccacggattgtgttcatctgaaccattttattttttatttaccaaagtactgtacttggctatttgcagtgttttcaaaacca

SEQ ID NO: 563983 - DNA, 120 bp, Artificial Sequence
  ENSG00000169914_52 (sequence is synthesized)
aatgtttctttttttgtgtttttaatcttcgatacttggtgcaatagaagctgcaaagatgtgccactttatctatgaaatggagttttgtataccaataaattctagtttaaaaacaaa

SEQ ID NO: 563984 - DNA, 120 bp, Artificial Sequence
  ENSG00000169914_53 (sequence is synthesized)
acaggccagccctagtgaagaaaacaaagcaaataaaaaccagctcgcaaagtgtggaaaatctggggaatgcataaagctacatcaagaagcagaatgacctcacttatcctgtttggt

SEQ ID NO: 563985 - DNA, 120 bp, Artificial Sequence
  ENSG00000169914_54 (sequence is synthesized)
ccctgaaattgtcctcagtgtacaaatgaaaagcctccttttcccacctaacattactgtacatgtgggctcttcccatgtttatccatgttttttataaatgccatgatctgcaatgaa

SEQ ID NO: 563986 - DNA, 120 bp, Artificial Sequence
  ENSG00000169914_55 (sequence is synthesized)
cgccctacaggaaacagattgagagctgtatatctggcgctaaaaaccagtaatgtttttgtagaaagttggcattgagaatctgtgggcctgattttaaaaatattttttatttcttag

SEQ ID NO: 563987 - DNA, 120 bp, Artificial Sequence
  ENSG00000169918_0 (sequence is synthesized)
gttctctcgctcaggtctctgcatgtagttgtcacttgcagctccatttccatcacgtggtaaaatgccctttctcttctttcctgcagatggatggtttctagtgtgcttccaaacccc

SEQ ID NO: 563988 - DNA, 120 bp, Artificial Sequence
  ENSG00000169918_1 (sequence is synthesized)
acctcggctgagtgttgggcagcacttctacatgatcctatgactcttgatatggacgcagtcctgtcagactttgttcggtccacgggggcagaacctggtctggccagagacctgctg

SEQ ID NO: 563989 - DNA, 120 bp, Artificial Sequence
  ENSG00000169918_2 (sequence is synthesized)
gaaggcaaaaactgggacctgacagccgctctgagcgactatgagcagctccgccaggtgcacacagccaatctgccacatgtgttcaatgaagggcggggtcccaagcagccagagcga

SEQ ID NO: 563990 - DNA, 120 bp, Artificial Sequence
  ENSG00000169918_3 (sequence is synthesized)
gagccacagcccgggcacaaggtggagcgaccctgcctgcagaggcaggacgacattgcccaagaaaagcggctttcccgggggatttcccacgccagctcagccatcgtctccctggcc

SEQ ID NO: 563991 - DNA, 120 bp, Artificial Sequence
  ENSG00000169918_4 (sequence is synthesized)
cggtcccacgtggcaagtgaatgcaacaacgagcagttccccctggagatgccaatctacacattccagttgccagacctgagcgtgtacagcgaggatttcaggagcttcatcgagcgg

SEQ ID NO: 563992 - DNA, 120 bp, Artificial Sequence
  ENSG00000169918_5 (sequence is synthesized)
gacttgatcgagcaggcaacaatggtggctttggagcaggcaggtcgcctgaactggtggtccactgtgtgcacgagctgtaaacggcttcttcctctggccacaacaggggatgggaac

SEQ ID NO: 563993 - DNA, 120 bp, Artificial Sequence
  ENSG00000169918_6 (sequence is synthesized)
tgccttttacatgctgcttcactgggaatgtgggggtttcacgaccgggacctggtgttacggaaagctctctataccatgatgaggacgggagctgagagggaagccctgaagcggagg

SEQ ID NO: 563994 - DNA, 120 bp, Artificial Sequence
  ENSG00000169918_7 (sequence is synthesized)
tggaggtggcagcagacgcagcagaataaggaggaggagtgggagcgggagtggacggagctgctgaagctggcctccagcgagccgcgcacacacttcagcaagaatggcggcacgggc

SEQ ID NO: 563995 - DNA, 120 bp, Artificial Sequence
  ENSG00000169918_8 (sequence is synthesized)
gggggtgtggacaactctgaggaccccgtgtacgagagcctggaagagttccacgtttttgtcctagcccatatattaagaaggcccatcgttgttgtggcagatacaatgttaagagac

SEQ ID NO: 563996 - DNA, 120 bp, Artificial Sequence
  ENSG00000169918_9 (sequence is synthesized)
tcaggtggagaagcgttcgcacccatcccattcggagggatctacctgcccttggaggtccctcccaacagatgccactgctcgcctctggttctggcctatgatcaagcccatttctct

SEQ ID NO: 563997 - DNA, 120 bp, Artificial Sequence
  ENSG00000169918_10 (sequence is synthesized)
gcccttgtgtccatggaacagagagaccagcaaagagaacaagccgtgatccccctgacggattctgagcacaagctgctgcctctgcactttgcagtggaccctggcaaggactgggag

SEQ ID NO: 563998 - DNA, 120 bp, Artificial Sequence
  ENSG00000169918_11 (sequence is synthesized)
tgggggaaagacgacaacgataacgcccggctggcccaccttatcctgtcgctagaagccaagctgaaccttctgcacagctacatgaacgtgacgtggatccggatcccctccgagaca

SEQ ID NO: 563999 - DNA, 120 bp, Artificial Sequence
  ENSG00000169918_12 (sequence is synthesized)
cgggcgcccctggcacagccggagtctcccacggcctcggcaggggaggacgtgcagtccctggccgactcgctggactcggaccgcgattcggtgtgcagcaattctaacagcaataac

SEQ ID NO: 564000 - DNA, 120 bp, Artificial Sequence
  ENSG00000169918_13 (sequence is synthesized)
ggcaagaacggcaaggacaaggagaaggagaagcagcgcaaggagaaggacaagacgcgcgccgactccgtggccaacaagctgggcagcttcagcaagacgctgggcatcaagctgaag

SEQ ID NO: 564001 - DNA, 120 bp, Artificial Sequence
  ENSG00000169918_14 (sequence is synthesized)
aaaaacatgggcggcctcggcggcctggtgcacggcaagatgggccgcgccaactccgccaatggcaagaacggggactcggccgagcggggcaaggagaagaaggccaagtcgcgcaag

SEQ ID NO: 564002 - DNA, 120 bp, Artificial Sequence
  ENSG00000169918_15 (sequence is synthesized)
ggcagcaaggaggagtctggtgcgtcggccagcacgtcgccgtcggaaaagaccacgccgtcgcccacagacaaggcagcgggcgcgtcgccggcggagaagggcggtgggccgcggggc

SEQ ID NO: 564003 - DNA, 120 bp, Artificial Sequence
  ENSG00000169918_16 (sequence is synthesized)
gacgcctggaagtacagcacggatgtgaagctgagcctcaacatcctgcgcgccgccatgcagggggagcgcaagttcatcttcgccggcctgctgctcaccagccaccggcaccagttc

SEQ ID NO: 564004 - DNA, 120 bp, Artificial Sequence
  ENSG00000169918_17 (sequence is synthesized)
cacgaggagatgatcggctactacctgacgagcgcgcaggagcgcttcagcgccgagcaggagcagcggcgccgcgacgccgctactgcggccgccgctgccgccgccgccgccgccgcc

SEQ ID NO: 564005 - DNA, 120 bp, Artificial Sequence
  ENSG00000169918_18 (sequence is synthesized)
cgccacggccaagcggccgccgcgcagaccggagacggagggcgtgccggtcccggagcgcgcctctccgggcccacccacgcagctggtgctcaagctcaaggagcggccgagccccgg

SEQ ID NO: 564006 - DNA, 80 bp, Artificial Sequence
  ENSG00000169918_19 (sequence is synthesized)
gaggcgcgcggcgtgcgagcgccagcggaccagtgcctggccgcagccccccggcgccagcgcgccagagcgtcatccac

SEQ ID NO: 564007 - DNA, 120 bp, Artificial Sequence
  ENSG00000169918_20 (sequence is synthesized)
agcgtcatccacgtgcaggcgtcgggcgcgcgggacgaggcgtgcgcgccggccgtgggggcgctgcggccgtgcgccacgtacccgcagcagaaccgctcgctgtcgtcgcagagctac

SEQ ID NO: 564008 - DNA, 120 bp, Artificial Sequence
  ENSG00000169918_21 (sequence is synthesized)
gccgccgccctgcgcaccgtcaacacggtcgagtcgctggcgcgcgcggtgcccggggccctaccgggcgcggcggggacggcgggggcggccgagcacaagtcgcagacctacaccaac

SEQ ID NO: 564009 - DNA, 120 bp, Artificial Sequence
  ENSG00000169918_22 (sequence is synthesized)
gcagacctacaccaacggcttcggcgccctgcgcgacggcctggagttcgccgacgccgacgcgccgaccgcgcgctcgaacggtgagtgcggccgtggcggcccggggccggtgcagcg

SEQ ID NO: 564010 - DNA, 120 bp, Artificial Sequence
  ENSG00000169918_23 (sequence is synthesized)
tgccagcgcgagaactgtgcgttctacgggcgcgccgagaccgagcactactgctcctactgctaccgcgaggagctgcggcggcggcgcgaggcgcgcggggcccggccctgagcggcg

SEQ ID NO: 564011 - DNA, 120 bp, Artificial Sequence
  ENSG00000169918_24 (sequence is synthesized)
cggcgcggcgcgggcggcgaggttctaccttcgaggatttcttttccattgtgtcggtgtcttttttacatgccctggtccaccggaaggccggcgcctcctctgtcagtgccgtgtacg

SEQ ID NO: 564012 - DNA, 120 bp, Artificial Sequence
  ENSG00000169918_25 (sequence is synthesized)
tgtttggtcaaacgttcctaatggtgcctgaacctacactgacgccactcaggtagtagacggataggaaacaagtcatactgttggaagtgggtgtgctagcctagcatctgcctcgta

SEQ ID NO: 564013 - DNA, 120 bp, Artificial Sequence
  ENSG00000169918_26 (sequence is synthesized)
cctgtggaaactcaatagccattgcaagagtatttttgttcctcagtaagagaaataaagaaattcgcagccctttgttttaagaagggagtgttttacatgctttttttgctttttttt

SEQ ID NO: 564014 - DNA, 120 bp, Artificial Sequence
  ENSG00000169918_27 (sequence is synthesized)
ttttctcctaccctagcgatgacctcttccaggtagcggtcccttgtgcgcggttggtagtacccagggcttagagcgagcgcgcacccggggctgcggtggaggctcctctgtgagctc

SEQ ID NO: 564015 - DNA, 120 bp, Artificial Sequence
  ENSG00000169918_28 (sequence is synthesized)
tacctgcctcccatcccgaggcctaggagaaggcgggtacctggccgccagctgacgccctggtggtcactgtggccctttagaaacacacagctccatttcataagcaaaacctcctcc

SEQ ID NO: 564016 - DNA, 120 bp, Artificial Sequence
  ENSG00000169918_29 (sequence is synthesized)
cccagccccggctcaagcaccattcacactgccatccaagccgcgggcggccgtggaaagggcactggaccacccgtctcgcgggcgccgtgaggtacagcgatggctcccagtgccggg

SEQ ID NO: 564017 - DNA, 120 bp, Artificial Sequence
  ENSG00000169918_30 (sequence is synthesized)
cagttcaggtgacaggagctttccaaagacacctagggtccaaaaagcagggttcccatctcacaatttggatttgctcatagaggagcagataggacaggctgctcacatttctccttt

SEQ ID NO: 564018 - DNA, 120 bp, Artificial Sequence
  ENSG00000169918_31 (sequence is synthesized)
gaaggcacttccacagtggactgtcgctggcgggcccctgggcggtgaccatcggtgccccgggagacagcgaggaattgaccctttggtcactgtgtaagcccccactaggctgctgct

SEQ ID NO: 564019 - DNA, 120 bp, Artificial Sequence
  ENSG00000169918_32 (sequence is synthesized)
ctttccaaagggaaggggctgggggaaccaggaaggaagcccacccccacacctgcatctgtctgggttcagccaggtaaagggactcactgtgatcgtggcccctccacggggcaggac

SEQ ID NO: 564020 - DNA, 120 bp, Artificial Sequence
  ENSG00000169918_33 (sequence is synthesized)
gaccctgcctccgtctcgtgacacaatgagggagcagcccgatccctgagcggtctcttttttggtgcctcctacatttcttgaggaaaaaaaaaatgtgtccttagctaccctgttttg

SEQ ID NO: 564021 - DNA, 120 bp, Artificial Sequence
  ENSG00000169918_34 (sequence is synthesized)
agcagcaatatgcagcctcttccttccaagattacctccggagaacaccgttcttggccaaggacactgaggagctaaatctgcctcactaaggaacgagcttgtttccaagaaatgagg

SEQ ID NO: 564022 - DNA, 120 bp, Artificial Sequence
  ENSG00000169918_35 (sequence is synthesized)
ataagatgggtaaaatcctcactaacaaagaatactataaaacctgtgagagccttagaatagcttctaataatcctaggacaggagaaagcgcctggctttgctgtgagtgtatcctca

SEQ ID NO: 564023 - DNA, 120 bp, Artificial Sequence
  ENSG00000169918_36 (sequence is synthesized)
gaaaaagcaggaggtcgaccatctcttcactggagccagcttctcctctagaaacgatgcttttttccctaactaaagagcagcaaaaacaaaaaaaaagggggggcgaggggatttttt

SEQ ID NO: 564024 - DNA, 120 bp, Artificial Sequence
  ENSG00000169918_37 (sequence is synthesized)
ttacttgtttgagaaattataataaaataattgagtatctcctgtgagtaatgcctttttgtttttaattattccacagcaggtggagttttcagtaatttgttcaagttttgcataagt

SEQ ID NO: 564025 - DNA, 120 bp, Artificial Sequence
  ENSG00000169918_38 (sequence is synthesized)
ggttccttaaatcaaaaattatttattaaataggatctttaagaaattttttgaaagttttacttttcctgctgaacaatattttcaatgtgtggtaattactgtactaacatccatgtc

SEQ ID NO: 564026 - DNA, 120 bp, Artificial Sequence
  ENSG00000169918_39 (sequence is synthesized)
cctaatattactggggtttcttttattactcagaaaacaaaagtggttttttaaaaatctcatggagagggtctgtggcagctttctggactgattcttcgtgtcacgctgagcagctgc

SEQ ID NO: 564027 - DNA, 120 bp, Artificial Sequence
  ENSG00000169918_40 (sequence is synthesized)
tttggcatccaaagctgtgggatcacagaaagtgttgcttcaggtgtggatgccagccactcctcatgctcgtcactcttaaaagattgagacacccaaccttaaaaatgctccaataat

SEQ ID NO: 564028 - DNA, 120 bp, Artificial Sequence
  ENSG00000169918_41 (sequence is synthesized)
ccattcagaaaccaaactcatatgcacaagatgtcaaggaggcataaagtcaattcttgcttgtttttttcatttcttaatgtaaaaacagccaaccagaaatttctaaaactggctatg

SEQ ID NO: 564029 - DNA, 90 bp, Artificial Sequence
  ENSG00000169918_42 (sequence is synthesized)
tgtaaaaacagccaaccagaaatttctaaaactggctatgctaattcagatattttctttctcacgctatctgccaggtttgtctaattt

SEQ ID NO: 564030 - DNA, 120 bp, Artificial Sequence
  ENSG00000169918_43 (sequence is synthesized)
agtacgtaattatcaaaacaccaggacctattctacccttgcatttccaagttacctccacccatcaccatctgatgacagatgtgccctaaataagagcctgagataaagccactggct

SEQ ID NO: 564031 - DNA, 120 bp, Artificial Sequence
  ENSG00000169918_44 (sequence is synthesized)
catgacttaggaatagccatttccttttgtgagagagctggatccatccttcctctaaacagtattaaaaatgcaaaagggagagagcggatggtcatattaaatgtgctagtcccgtgc

SEQ ID NO: 564032 - DNA, 120 bp, Artificial Sequence
  ENSG00000169918_45 (sequence is synthesized)
accgacagcatgctccttgagaagaggcgtgtagacctcgtccctggccagagaccaacttcagcaggctggccagaaactattaaaaactgtgttgactgcatgtgggccaagggcttc

SEQ ID NO: 564033 - DNA, 120 bp, Artificial Sequence
  ENSG00000169918_46 (sequence is synthesized)
cctcgtgttccatggcgtgagggccctttgtggagcagggagaaagggaagaaggtgagtcctaccggggtgcatggccctgctgccctagctgaccctgcctgagagcagccttcccca

SEQ ID NO: 564034 - DNA, 120 bp, Artificial Sequence
  ENSG00000169918_47 (sequence is synthesized)
cctgatctggccacacttccctttctaggaaggacaggtgtctccaagggactgcaggtttccagaggatcccagatacttctaaacccctgcgaaggttatttcagaaatttactttac

SEQ ID NO: 564035 - DNA, 120 bp, Artificial Sequence
  ENSG00000169918_48 (sequence is synthesized)
atttcctgcacatttgttatctgggtaaatgatttttttaaaatattgttaagggaaggtgtttttcagtgtattctgttggtagactttatgctgtgttacgttgaaattttacaagcc

SEQ ID NO: 564036 - DNA, 120 bp, Artificial Sequence
  ENSG00000169918_49 (sequence is synthesized)
aagtttaaactgtactataaaaattatttttgtattattttcagaacatgccacagagcaatattttgcacccgttattgccacagggttgtcccttggaagggtaactggaggtgggaa

SEQ ID NO: 564037 - DNA, 120 bp, Artificial Sequence
  ENSG00000169918_50 (sequence is synthesized)
ggagctccactgtgggctccggggggttaaacgctttttgctgcttgttcaaataccttctgaaagtgggaatgtatcagtgtctttttttattgaaagcttgatttccttttttctgtt

SEQ ID NO: 564038 - DNA, 120 bp, Artificial Sequence
  ENSG00000169918_51 (sequence is synthesized)
catggattttggtactgcacctttcctcttaaatgaatactttgtattcactaaattactgtggaccttttcatacctattaccacccagtggcatttgaatctatttacaaatcgaatg

SEQ ID NO: 564039 - DNA, 120 bp, Artificial Sequence
  ENSG00000169918_52 (sequence is synthesized)
ttttcccaaatgatttaatttactacttctcgtagcttactgtcaagaattgggggtgctgaagataaaaggactctccatgccccccaggtgcacacctcagggtgtggacatcctcca

SEQ ID NO: 564040 - DNA, 120 bp, Artificial Sequence
  ENSG00000169918_53 (sequence is synthesized)
tgcagagcccgccctgtctctggggaggggtcatgggcccatcaccccccccccccacttagtgtccacaaacttattttgcgaactattctactttgcaaaaataaacttaaaatatac

SEQ ID NO: 564041 - DNA, 120 bp, Artificial Sequence
  ENSG00000169918_54 (sequence is synthesized)
ttcccattggttaagataaaagggctgtacttatcagtggtgggaaatttgtacaagaaaaaacagacttttccaaatccatgtgtgtaagttccattccatgtgagtcttttatttacg

SEQ ID NO: 564042 - DNA, 120 bp, Artificial Sequence
  ENSG00000169918_55 (sequence is synthesized)
aagagacctggagtaaaagctgaaggcatctactgtatgtttggggctcctttctttatggccatgattttttttctcctcatcttggtgtggactttaaaattaagtacccccagtgtt

SEQ ID NO: 564043 - DNA, 120 bp, Artificial Sequence
  ENSG00000169918_56 (sequence is synthesized)
ctgtcctttttctttcctcagtgcttctaatagataagaagaaatgtgtttctgtggctgagcaagccctgctgggccagacagaccttaccagccctggcttcatcctcgctgggctgc

SEQ ID NO: 564044 - DNA, 120 bp, Artificial Sequence
  ENSG00000169918_57 (sequence is synthesized)
agaggcggcccctgctctagttgagtccggttctgctgccagctgaggacagacacaccgtatgaagggcctagaggtggctggcatgccagggagcaggtggccccttccaaaacgcct

SEQ ID NO: 564045 - DNA, 120 bp, Artificial Sequence
  ENSG00000169918_58 (sequence is synthesized)
taaagtggtggctctctagagatctgaggcaccaccttcccatttactcctgactctaaactctagctggcctgttttagtgtggctggccggggcagtgaccagcgctcagctttgttc

SEQ ID NO: 564046 - DNA, 120 bp, Artificial Sequence
  ENSG00000169918_59 (sequence is synthesized)
ttgtttaattcaagtccaccctgttgcccgtgtcctctccacagctctgggtctgttggcccggagtgtatttctgccagtgctgcctcactgactcgggagtgggtcctgggtagttca

SEQ ID NO: 564047 - DNA, 120 bp, Artificial Sequence
  ENSG00000169918_60 (sequence is synthesized)
cgatagagaggccagcacacgccatggggagagccccccacgctcaccccaggaggccctgcggcacatccaggctggaccactctgcaagcttctgtcacaaaagacagctccgggcac

SEQ ID NO: 564048 - DNA, 120 bp, Artificial Sequence
  ENSG00000169918_61 (sequence is synthesized)
tgtgcaaattggcctgttagcagttatgcaggtcccttctttgccaaaagatctattattcctccccactgcacccccagcagaaaagagcgagggagatgccctgcagggaccccttgg

SEQ ID NO: 564049 - DNA, 120 bp, Artificial Sequence
  ENSG00000169918_62 (sequence is synthesized)
gaacaacagttatgtgcagtctgtgcagtatgaagaacttggccccaccaggctgagccgaagacacacgtagttgcagagtagcactgaagccatcatctccaaccatgctagtaatgt

SEQ ID NO: 564050 - DNA, 120 bp, Artificial Sequence
  ENSG00000169918_63 (sequence is synthesized)
tactgtttctatttattttgccaaatgatttgttgaaaattgcatttttgctattttaatcttgccaaaaaagggggcctcactaatcctaattatgtacatacagaatgatgcacattg

SEQ ID NO: 564051 - DNA, 120 bp, Artificial Sequence
  ENSG00000169918_64 (sequence is synthesized)
cttgcatctttttattcctcccaaagagcatatcaaggatatatatatacataatttgttagtttaacataaggcgaagagtaccatttggttttaagagtaaatataggctgaatttat

SEQ ID NO: 564052 - DNA, 120 bp, Artificial Sequence
  ENSG00000169918_65 (sequence is synthesized)
tcaagaccaaagcaacctatttaatgaggacaaatgagtgaaaccagctgttttagaatttatctgcagacactggagtgctcctttaaacgaagaaacagcctcccatggcagaggaaa

SEQ ID NO: 564053 - DNA, 120 bp, Artificial Sequence
  ENSG00000169918_66 (sequence is synthesized)
agccaggtccttacaaaggcctctcccatcccagtacttcttctgcctgctgctctgccctgggacgtaggccttcctgccgtttctagtcacaggcaccctcctgcctcagggcctttg

SEQ ID NO: 564054 - DNA, 120 bp, Artificial Sequence
  ENSG00000169918_67 (sequence is synthesized)
cacatgccattccttctacctgaacattcttccccagagagccacatggttcacccctcactacctgccagtctttgctccaatgtcacctttcaacgaggccttccctgacttatttaa

SEQ ID NO: 564055 - DNA, 120 bp, Artificial Sequence
  ENSG00000169918_68 (sequence is synthesized)
aaggacaacacaccccaccctccctccctacccacctctctgcatcttcttcttgtgcacctatcaccatctgagtgctgcagatgttaatcattcatccatttatttgattctcgcctc

SEQ ID NO: 564056 - DNA, 120 bp, Artificial Sequence
  ENSG00000169918_69 (sequence is synthesized)
cccatctcccatagactgtaagctccatgtgggcaggaacttttatatgtcttgctcattgctgtatcctggtgcctacaacagtgcctgacacatattaggcactggataagtatttat

SEQ ID NO: 564057 - DNA, 120 bp, Artificial Sequence
  ENSG00000169918_70 (sequence is synthesized)
tgaaaaaaggaaattaaatcagtaaattgaaaactattaagaggccagaaaatgtcaatttcagctttcatcaaatctaggttctattattgtgagaactttagctgacccagtgacctg

SEQ ID NO: 564058 - DNA, 120 bp, Artificial Sequence
  ENSG00000169918_71 (sequence is synthesized)
gctcctatgggtacaagatggttagatacaccgggcagcagcggtggcttctgttcacagacaagtgaatgcctgccctgccgctagccccacctcacaaatatgaggctcactgttcgc

SEQ ID NO: 564059 - DNA, 120 bp, Artificial Sequence
  ENSG00000169918_72 (sequence is synthesized)
aggggagcattttggaaccagctgggatgaagacagttttctgcaggtagcttttgtagccagatgcacagtagtgggttcccatcactccatgaggtcactgtagacctggaccattcc

SEQ ID NO: 564060 - DNA, 120 bp, Artificial Sequence
  ENSG00000169918_73 (sequence is synthesized)
agagaatcctttgtaatcagtctttaggtgtctcccagtccttcccagttcaacacgggtggcagcagatggcccagcccagggaaagtccacctgaccattagaaggactcatcctcca

SEQ ID NO: 564061 - DNA, 120 bp, Artificial Sequence
  ENSG00000169918_74 (sequence is synthesized)
gccaccaaagcaaggctgcagaggaagaggagcttgtcacaaacattaaccggctcagggctgggtaactgcattgacaaatttggaagcagcagggccagagagccaaggcccccgggt

SEQ ID NO: 564062 - DNA, 120 bp, Artificial Sequence
  ENSG00000169918_75 (sequence is synthesized)
atccccattggccactggtggaggtgcactggaaggtcagggccttgacaccacagagccaagcaacacacacctccttgggcccaggccccagcacggtggccctccagtgctggcagg

SEQ ID NO: 564063 - DNA, 120 bp, Artificial Sequence
  ENSG00000169918_76 (sequence is synthesized)
tggcctcacccacagcaggggaggcgtgggtcctccaatgaccttcctgcccctgccagatgattttcacaactacctaactttggtgtttacttctaggtcctttggccaaatgcgttt

SEQ ID NO: 564064 - DNA, 120 bp, Artificial Sequence
  ENSG00000169918_77 (sequence is synthesized)
tcttctaagagttgttggcaaaatactgttacaagcttcttatgggacttttgtcctactgtggcctggttaaaggctttgtcctcctgtttaatccacttccgtggttttgctgtcatt

SEQ ID NO: 564065 - DNA, 120 bp, Artificial Sequence
  ENSG00000169918_78 (sequence is synthesized)
tctcttgatgccatattttcaggtccctcgtgggagggggcataaggtctccatcgtgatgccctctctgcagctgtccagccagcagtgagtgggcccacacatgtgcattcctgtgct

SEQ ID NO: 564066 - DNA, 120 bp, Artificial Sequence
  ENSG00000169918_79 (sequence is synthesized)
tgaattgccaaataaacagtgtccctttcattgctgcccaaacagactggaagcctgctcctgccagcactcagggagggagtgtgtgcttcccaagagcctgcccccttggcccatgca

SEQ ID NO: 564067 - DNA, 120 bp, Artificial Sequence
  ENSG00000169918_80 (sequence is synthesized)
aactttctccatggcaggtgtccgtgaaggtctcccaggccctatgggctgtccagctctttgcacacattcttcccgcttgcaggaatggaatccaaacacctgatacggaatgatgac

SEQ ID NO: 564068 - DNA, 120 bp, Artificial Sequence
  ENSG00000169918_81 (sequence is synthesized)
ttggcagtggggagtggggcagcttgtctccgctaacttaggaccaaaactaggaaactcaccatgagcatgtgttggagatcagctgtggcctccagcccctgtacacacagaggcaag

SEQ ID NO: 564069 - DNA, 120 bp, Artificial Sequence
  ENSG00000169918_82 (sequence is synthesized)
ccccacctctgacagagccagtcaccgttcagtaggagcttgtcttccctgggcccccaggtgggaaaggctgggctcttagtcctacaagtaaaggcgctgttaggagcaaggagcagg

SEQ ID NO: 564070 - DNA, 120 bp, Artificial Sequence
  ENSG00000169918_83 (sequence is synthesized)
cttagctgggtccacagagggactaagctccttagtgacctgttactgcctcatctacggagtttgaactccattcaccatcacctttgagaatttggccttgttttaactaaggattgt

SEQ ID NO: 564071 - DNA, 120 bp, Artificial Sequence
  ENSG00000169918_84 (sequence is synthesized)
tgaagttaattataacaagggaccatcctcaccctgtgtttgctttgttccattaaacgtgcgtttggcctaatgaagtcagtgaatgttcctcttttttcttttttggtttctttgact

SEQ ID NO: 564072 - DNA, 120 bp, Artificial Sequence
  ENSG00000169918_85 (sequence is synthesized)
gatttttggatgatatatgttgctttatttctcccattttctttgattactgtggacaaaggaaaacactgaggcaaaagtaggtcgtcaatcacattactttgacccagttgtgcagaa

SEQ ID NO: 564073 - DNA, 120 bp, Artificial Sequence
  ENSG00000169918_86 (sequence is synthesized)
cccctttctacctgcaggtgttaattccaattcaatgcaaatatccttttcaatccggtccattcttggagaagaaacccattgtaagagctgtcttctgtggttgggatattactttgt

SEQ ID NO: 564074 - DNA, 120 bp, Artificial Sequence
  ENSG00000169918_87 (sequence is synthesized)
aaagtattaaagcactaaaccagtttttgcaatatgtagtaaatcttgctttcattttggaaaacttccagtaatgactactgcactttttatagaagaattgtatttaatttctttctt

SEQ ID NO: 564075 - DNA, 120 bp, Artificial Sequence
  ENSG00000169918_88 (sequence is synthesized)
ttatgaaagattatttcaagtaaaaatagctctgtaatctgtgtgacatggcttctccattacctgacacagagagaagctttgatgcctactcaataaaattaacatgtttgtaaagta

SEQ ID NO: 564076 - DNA, 120 bp, Artificial Sequence
  ENSG00000169918_89 (sequence is synthesized)
agaggagggcgcgcgcccggaggcagcaggcggagccgggaggcgggcgttcgagagaaaatggaagtcgggtagcggcgactgcggcgctgcgggctggcggagcggagcggcgcggcg

SEQ ID NO: 564077 - DNA, 120 bp, Artificial Sequence
  ENSG00000169918_90 (sequence is synthesized)
cggcagagttctcaggcgctgtggtctcaccttccactggggcaacaatgggccatttccagcagggacggcgcagtgttggcctgcatgcctgactgccacacacctccagaatcaggt

SEQ ID NO: 564078 - DNA, 120 bp, Artificial Sequence
  ENSG00000169918_91 (sequence is synthesized)
gtctgaaaagtggcagtgacgaaagaagagactctcccggccgaggccccagtgcatggagagaaggaagaaatcaatttcctaattggtaccatatacatcagatggatggtttctagt

SEQ ID NO: 564079 - DNA, 120 bp, Artificial Sequence
  ENSG00000169918_92 (sequence is synthesized)
gaaagcgttcaagaagcaagacaaactctcttctttggaatgtttaaggagaaaataatgagtccaaaacaaatgtctaaaacagatttaggttcttcctgagacaaagcaatgccagtt

SEQ ID NO: 564080 - DNA, 120 bp, Artificial Sequence
  ENSG00000169918_93 (sequence is synthesized)
tcactcataatcattcacattataaacattgcaaaatcacatatctgggggtttctcaggcacgcatgtggaagatgttatggctgtctcctcaggcccaccacgcccctcccagtggga

SEQ ID NO: 564081 - DNA, 120 bp, Artificial Sequence
  ENSG00000169918_94 (sequence is synthesized)
gccccgcctgcctgcacgggctgacagtgcacatggagcatgtcctcagccagtgggaagccctgctcctgctggggtggggaagcatcgccttccagtgctgacccagccttcagccag

SEQ ID NO: 564082 - DNA, 120 bp, Artificial Sequence
  ENSG00000169918_95 (sequence is synthesized)
ctcttcatgtccactgtggagtggagcctccacttccaaggcttggtccgtggagacgtccccagatgtgtcatcccaggagtttagggctgcagccagcaatgcactgttagggagtag

SEQ ID NO: 564083 - DNA, 120 bp, Artificial Sequence
  ENSG00000169918_96 (sequence is synthesized)
agcttttctcggtgctcggcgaagacccaataaaattaccaagcactttctagagttccagaagaagacaggagagaagtacctgtaggttggtatgattctgatattggtggatggacc

SEQ ID NO: 564084 - DNA, 120 bp, Artificial Sequence
  ENSG00000169918_97 (sequence is synthesized)
ttccaaggagtgggcaggatttaaggacactagtgaaggatactaccgttcctgggactaccctcaggcctggcaaaaagacaagggatgagagtggctgatggagatagccacgggcag

SEQ ID NO: 564085 - DNA, 120 bp, Artificial Sequence
  ENSG00000169918_98 (sequence is synthesized)
taggtgtggcatccgggagagagaagatgctggggaaataaatactctgaccacactcttcctccaccatccaggttctgaccagtgcctcttaatggcagaagggcagattgcggggag

SEQ ID NO: 564086 - DNA, 120 bp, Artificial Sequence
  ENSG00000169918_99 (sequence is synthesized)
ctcactgatgtggtccacgcaggtcaccctctgcatacagagcagcatggagaaggatagacggtagatctgtggggccaatgggaaacatccagaaagtcaatgtgccgggaagtttta

SEQ ID NO: 564087 - DNA, 120 bp, Artificial Sequence
  ENSG00000169918_100 (sequence is synthesized)
ccagacctggcttctgtgtacacgtgtacacctgctttcatgccattgcttgtcattgtttgcccagggctgtcgtcatccaccactttcaagagggaaggcacaagatgcgtttagaca

SEQ ID NO: 564088 - DNA, 120 bp, Artificial Sequence
  ENSG00000169918_101 (sequence is synthesized)
aaggacgagatgtgcctagtggggcttatttgtgttgggcaggcttgcagtcaggtcgtagccacaggactcatagaagcctcaccaatggcatgcttgacattagaacaggctctacat

SEQ ID NO: 564089 - DNA, 120 bp, Artificial Sequence
  ENSG00000169918_102 (sequence is synthesized)
tcccaacagctggatctcatgttgtgactgtggagaaattctcatctcagctgcttcgcagccatcaagagcaatccaatgactggcacccacagccttgctctgtcttacctcagcaag

SEQ ID NO: 564090 - DNA, 120 bp, Artificial Sequence
  ENSG00000169918_103 (sequence is synthesized)
actcaacaaacaaaacaattcagctagattagcaataatctaaaccactcactgtgggggctggctattttaaagacgcttctatatgactaattcagataagatattttcaatagaaaa

SEQ ID NO: 564091 - DNA, 120 bp, Artificial Sequence
  ENSG00000169918_104 (sequence is synthesized)
agctcactattcatagagaagcggaaattagtatttgttaagaaagaaacaagtttcatgggttactctctgttgaatgctacggcggtgtagacctttatacagctcagcactgacgat

SEQ ID NO: 564092 - DNA, 120 bp, Artificial Sequence
  ENSG00000169918_105 (sequence is synthesized)
tgctaatagcttgggtgatcatagcagctgcctgagtgctgtgtttcgtgtgaagcacagtctcatgcaaggttgtaggtagaccccaccatgttaccttctccttgagccctaccatgc

SEQ ID NO: 564093 - DNA, 120 bp, Artificial Sequence
  ENSG00000169918_106 (sequence is synthesized)
ttagcaaaagccttcacttcttttgaacgtcttttctgttatttttttccatattttgcattttaatttttatcacttatattttaccttccagactagcattttaagatgggactctgg

SEQ ID NO: 564094 - DNA, 120 bp, Artificial Sequence
  ENSG00000169918_107 (sequence is synthesized)
cttcatccagtcttgaaaaataccttttaaaaacccaaacttagtgagttaagatgttaaattatgaatagctcattgtttatgttgggcaccacgaagagaaccaactggaagcagaga

SEQ ID NO: 564095 - DNA, 120 bp, Artificial Sequence
  ENSG00000169918_108 (sequence is synthesized)
tcagtgaaggcaggaagctcaggctcccacccagtggtggagaagccatctggtctacactcgcaggaggccttgaggaagtgggtctcactcttcagggagtggtcaaaggtgcttgtg

SEQ ID NO: 564096 - DNA, 120 bp, Artificial Sequence
  ENSG00000169918_109 (sequence is synthesized)
gtgcaattcgcgcctgaagatcagggatctgcctgggacaggagtcctagtagccaacatgtcttcctcgtccctcacgctgaaaaataataaaagtggccaaacgcgatggctcacgcc

SEQ ID NO: 564097 - DNA, 73 bp, Artificial Sequence
  ENSG00000169918_110 (sequence is synthesized)
tcagaagtccgagaccagcttgagcaacatagtaagaccccatctctacaaataataaacaaattagccaagc

SEQ ID NO: 564098 - DNA, 120 bp, Artificial Sequence
  ENSG00000169918_111 (sequence is synthesized)
ggggaggagaggccaccgggaccgcgagcggcagctggggagggggccgcggagcccgagcgggagcaaaacagctgatctggttttcctttaaagcgagagaaaatggaagtcgggtag

SEQ ID NO: 564099 - DNA, 120 bp, Artificial Sequence
  ENSG00000169918_112 (sequence is synthesized)
ctctatgagcaagagaagggcacatgttctcagactctgggcagttttcagttaggattctagatgctgcaccgcacctcctgctctacgggccgacagtgttctagccagcatgggctg

SEQ ID NO: 564100 - DNA, 120 bp, Artificial Sequence
  ENSG00000169918_113 (sequence is synthesized)
gatggaggggccgataactaggtggtgctgaaatctctcgagttttccccttgctcctaaatcccagtcctcctttaaggagaactctatgcttctttgccttgcttctctctttcccca

SEQ ID NO: 564101 - DNA, 120 bp, Artificial Sequence
  ENSG00000169918_114 (sequence is synthesized)
gacaactcctccgtgggtgttgaatgaaagataggaaagaccatgggctttagagaaaacgggagacccgccacttcctgtggacttgggcaagtcaggtgatctctctcagcctcagtt

SEQ ID NO: 564102 - DNA, 120 bp, Artificial Sequence
  ENSG00000169918_115 (sequence is synthesized)
tctccatctgcaaagatgaggagactgctgacccggcaacgctttggggtactaagtgacatgtgctttccatagctgtccattccctgcctgcgcagcctcttccagcttccaggttaa

SEQ ID NO: 564103 - DNA, 120 bp, Artificial Sequence
  ENSG00000169919_0 (sequence is synthesized)
gccgagcgggggaccgggaagcatggcccgggggtcggcggttgcctgggcggcgctcgggccgttgttgtggggctgcgcgctggggctgcagggcgggatgctgtacccccaggagag

SEQ ID NO: 564104 - DNA, 120 bp, Artificial Sequence
  ENSG00000169919_1 (sequence is synthesized)
caggagagcccgtcgcgggagtgcaaggagctggacggcctctggagcttccgcgccgacttctctgacaaccgacgccggggcttcgaggagcagtggtaccggcggccgctgtgggag

SEQ ID NO: 564105 - DNA, 120 bp, Artificial Sequence
  ENSG00000169919_2 (sequence is synthesized)
tcaggccccaccgtggacatgccagttccctccagcttcaatgacatcagccaggactggcgtctgcggcattttgtcggctgggtgtggtacgaacgggaggtgatcctgccggagcga

SEQ ID NO: 564106 - DNA, 120 bp, Artificial Sequence
  ENSG00000169919_3 (sequence is synthesized)
tggacccaggacctgcgcacaagagtggtgctgaggattggcagtgcccattcctatgccatcgtgtgggtgaatggggtcgacacgctagagcatgaggggggctacctccccttcgag

SEQ ID NO: 564107 - DNA, 120 bp, Artificial Sequence
  ENSG00000169919_4 (sequence is synthesized)
gccgacatcagcaacctggtccaggtggggcccctgccctcccggctccgaatcactatcgccatcaacaacacactcacccccaccaccctgccaccagggaccatccaatacctgact

SEQ ID NO: 564108 - DNA, 120 bp, Artificial Sequence
  ENSG00000169919_5 (sequence is synthesized)
gacacctccaagtatcccaagggttactttgtccagaacacatattttgactttttcaactacgctggactgcagcggtctgtacttctgtacacgacacccaccacctacatcgatgac

SEQ ID NO: 564109 - DNA, 120 bp, Artificial Sequence
  ENSG00000169919_6 (sequence is synthesized)
atcaccgtcaccaccagcgtggagcaagacagtgggctggtgaattaccagatctctgtcaagggcagtaacctgttcaagttggaagtgcgtcttttggatgcagaaaacaaagtcgtg

SEQ ID NO: 564110 - DNA, 120 bp, Artificial Sequence
  ENSG00000169919_7 (sequence is synthesized)
gcgaatgggactgggacccagggccaacttaaggtgccaggtgtcagcctctggtggccgtacctgatgcacgaacgccctgcctatctgtattcattggaggtgcagctgactgcacag

SEQ ID NO: 564111 - DNA, 120 bp, Artificial Sequence
  ENSG00000169919_8 (sequence is synthesized)
acgtcactggggcctgtgtctgacttctacacactccctgtggggatccgcactgtggctgtcaccaagagccagttcctcatcaatgggaaacctttctatttccacggtgtcaacaag

SEQ ID NO: 564112 - DNA, 120 bp, Artificial Sequence
  ENSG00000169919_9 (sequence is synthesized)
ccgctgctggtgaaggacttcaacctgcttcgctggcttggtgccaacgctttccgtaccagccactacccctatgcagaggaagtgatgcagatgtgtgaccgctatgggattgtggtc

SEQ ID NO: 564113 - DNA, 120 bp, Artificial Sequence
  ENSG00000169919_10 (sequence is synthesized)
atcgatgagtgtcccggcgtgggcctggcgctgccgcagttcttcaacaacgtttctctgcatcaccacatgcaggtgatggaagaagtggtgcgtagggacaagaaccaccccgcggtc

SEQ ID NO: 564114 - DNA, 120 bp, Artificial Sequence
  ENSG00000169919_11 (sequence is synthesized)
gtgatgtggtctgtggccaacgagcctgcgtcccacctagaatctgctggctactacttgaagatggtgatcgctcacaccaaatccttggacccctcccggcctgtgacctttgtgagc

SEQ ID NO: 564115 - DNA, 120 bp, Artificial Sequence
  ENSG00000169919_12 (sequence is synthesized)
aactctaactatgcagcagacaagggggctccgtatgtggatgtgatctgtttgaacagctactactcttggtatcacgactacgggcacctggagttgattcagctgcagctggccacc

SEQ ID NO: 564116 - DNA, 120 bp, Artificial Sequence
  ENSG00000169919_13 (sequence is synthesized)
cagtttgagaactggtataagaagtatcagaagcccattattcagagcgagtatggagcagaaacgattgcagggtttcaccaggatccacctctgatgttcactgaagagtaccagaaa

SEQ ID NO: 564117 - DNA, 120 bp, Artificial Sequence
  ENSG00000169919_14 (sequence is synthesized)
agtctgctagagcagtaccatctgggtctggatcaaaaacgcagaaaatacgtggttggagagctcatttggaattttgccgatttcatgactgaacagtcaccgacgagagtgctgggg

SEQ ID NO: 564118 - DNA, 120 bp, Artificial Sequence
  ENSG00000169919_15 (sequence is synthesized)
aataaaaaggggatcttcactcggcagagacaaccaaaaagtgcagcgttccttttgcgagagagatactggaagattgccaatgaaaccaggtatccccactcagtagccaagtcacaa

SEQ ID NO: 564119 - DNA, 120 bp, Artificial Sequence
  ENSG00000169919_16 (sequence is synthesized)
tgtttggaaaacagcctgtttacttgagcaagactgataccacctgcgtgtcccttcctccccgagtcagggcgacttccacagcagcagaacaagtgcctcctggactgttcacggcag

SEQ ID NO: 564120 - DNA, 120 bp, Artificial Sequence
  ENSG00000169919_17 (sequence is synthesized)
accagaacgtttctggcctgggttttgtggtcatctattctagcagggaacactaaaggtggaaataaaagattttctattatggaaataaagagttggcatgaaagtggctactgaaaa

SEQ ID NO: 564121 - DNA, 120 bp, Artificial Sequence
  ENSG00000169919_18 (sequence is synthesized)
tttccaattctggccatttcaattgtaagaatattggaaacaaagttggggaagctggtttaatccatgtaggttgcgttgagaattttctaggaaaagtaagttgtgtttaggaagtag

SEQ ID NO: 564122 - DNA, 90 bp, Artificial Sequence
  ENSG00000169919_19 (sequence is synthesized)
cctggcttcagcaggagcccaagacaggtggatgggcaggcatggtcctctgagctttctgatgtttctcacccttggtgggaggcccat

SEQ ID NO: 564123 - DNA, 66 bp, Artificial Sequence
  ENSG00000169919_20 (sequence is synthesized)
cccaggctggagtgcaatggcctgatcacagctcactgcagccttgaactctcagcctgcagcagt

SEQ ID NO: 564124 - DNA, 120 bp, Artificial Sequence
  ENSG00000169919_21 (sequence is synthesized)
tgcactccagcctgggggacagactgagactgtctcagaagaaaaacattttttttttatagagatggggtctcagtctgtcagcaggctggtcttcaactcctggactcaagtgatcct

SEQ ID NO: 564125 - DNA, 120 bp, Artificial Sequence
  ENSG00000169919_22 (sequence is synthesized)
cctgccttagcctcccaaagtgtgggaactccaggcatgagccaccttgtcttgtcaaagggaaggccatgttttgaagggcaggttcccagggtcagccagggtagggcagaacctctg

SEQ ID NO: 564126 - DNA, 120 bp, Artificial Sequence
  ENSG00000169919_23 (sequence is synthesized)
attgctgcatctctgcttacaggcccagaggcagctgctggggtgcacgaggggccttcctgctggagggcaggccggatggggctcaggctgtcggggtgctcacacctggtgctttgg

SEQ ID NO: 564127 - DNA, 120 bp, Artificial Sequence
  ENSG00000169919_24 (sequence is synthesized)
tgcggacgtgtgttggggctcctgggtccttgtcggggctgcttctggtcaccctccactttcgccttccctgtgtcctgcagttgagggcagctcagggcaatgaggcaaatggctcca

SEQ ID NO: 564128 - DNA, 120 bp, Artificial Sequence
  ENSG00000169919_25 (sequence is synthesized)
aatggagagggggctcatggggtggctctccagggtcctggctctcagaggaagtgcagcttcgacagggacaggggtcacttggctctgctatctcctagatccgagggaagggcttcg

SEQ ID NO: 564129 - DNA, 120 bp, Artificial Sequence
  ENSG00000169919_26 (sequence is synthesized)
gagcccgtcgcgggagtgcaaggagctggacggcctctggagcttccgcgccgacttctctgacaaccgacgccggggcttcgaggagcagtggtaccggcggccgctgtgggagggctg

SEQ ID NO: 564130 - DNA, 120 bp, Artificial Sequence
  ENSG00000169919_27 (sequence is synthesized)
gcgatctcggggcagggccgggaggcgcccgaaagcccggcggtgggagtaggggagcccgggccccccgcagacttcttcccctgggcgtctccgagctggggcccgcaggaggttaaa

SEQ ID NO: 564131 - DNA, 120 bp, Artificial Sequence
  ENSG00000169919_28 (sequence is synthesized)
agtacaggagggaaagaggagggggctgggtgccagtgtgcaccccactcacagtgtcctaagcaaagctccccccattcctccaaccagccttcctccctgtgacaggcagtggccatc

SEQ ID NO: 564132 - DNA, 120 bp, Artificial Sequence
  ENSG00000169925_0 (sequence is synthesized)
attatgctgccggggccggcgagccaaagaggagccggccgcgcgggccgggaggggacggccgccggagccgcgaggccaactgtcgcctggttgggcccggaaatgggacgtcgcgct

SEQ ID NO: 564133 - DNA, 120 bp, Artificial Sequence
  ENSG00000169925_1 (sequence is synthesized)
ttctcagggagcgtagaagcagccagggcctctccaagccgctgctgtgacagaaagtgagtgagctgccggaggatgtccaccgccacgacagtcgcccccgcggggatcccggcgacc

SEQ ID NO: 564134 - DNA, 120 bp, Artificial Sequence
  ENSG00000169925_2 (sequence is synthesized)
ccgggccctgtgaacccaccccccccggaggtctccaaccccagcaagcccggccgcaagaccaaccagctgcagtacatgcagaatgtggtggtgaagacgctctggaaacaccagttc

SEQ ID NO: 564135 - DNA, 120 bp, Artificial Sequence
  ENSG00000169925_3 (sequence is synthesized)
gcctggcccttctaccagcccgtggacgcaatcaaattgaacctgccggattatcataaaataattaaaaacccaatggatatggggactattaagaagagactagaaaataattattat

SEQ ID NO: 564136 - DNA, 120 bp, Artificial Sequence
  ENSG00000169925_4 (sequence is synthesized)
tggagtgcaagcgaatgtatgcaggacttcaacaccatgtttacaaattgttacatttataacaagcccacagatgacatagtgctaatggcccaagctttagagaaaatttttctacaa

SEQ ID NO: 564137 - DNA, 120 bp, Artificial Sequence
  ENSG00000169925_5 (sequence is synthesized)
aaagtggcccagatgccccaagaggaagttgaattattaccccctgctccaaagggcaaaggtcggaagccggctgcgggagcccagagcgcaggtacacagcaagtggcggccgtgtcc

SEQ ID NO: 564138 - DNA, 120 bp, Artificial Sequence
  ENSG00000169925_6 (sequence is synthesized)
tctgtctccccagcgaccccctttcagagcgtgccccccaccgtctcccagacgcccgtcatcgctgccacccctgtaccaaccatcactgcaaacgtcacgtcggtcccagtcccccca

SEQ ID NO: 564139 - DNA, 120 bp, Artificial Sequence
  ENSG00000169925_7 (sequence is synthesized)
gctgccgccccacctcctcctgccacacccatcgtccccgtggtccctcctacgccgcctgtcgtcaagaaaaagggcgtgaagcggaaagcagacacaaccactcccacgacgtcggcc

SEQ ID NO: 564140 - DNA, 120 bp, Artificial Sequence
  ENSG00000169925_8 (sequence is synthesized)
atcactgccagccggagtgagtcgcccccgccgttgtcagaccccaagcaggccaaagtggtggcccggcgggagagtggtggccgccccatcaagcctcccaagaaggacctggaggac

SEQ ID NO: 564141 - DNA, 120 bp, Artificial Sequence
  ENSG00000169925_9 (sequence is synthesized)
ggcgaggtgccccagcacgcaggcaagaagggcaagctgtcggagcacctacgctactgcgacagcatcctcagggagatgctatccaagaagcacgcggcctacgcctggcccttctac

SEQ ID NO: 564142 - DNA, 120 bp, Artificial Sequence
  ENSG00000169925_10 (sequence is synthesized)
aagccagtggatgccgaggccctggagctgcacgactaccacgacatcatcaagcacccgatggacctcagcaccgtgaaaaggaagatggatggccgagagtacccagacgcacagggc

SEQ ID NO: 564143 - DNA, 120 bp, Artificial Sequence
  ENSG00000169925_11 (sequence is synthesized)
tttgctgctgatgtccggctgatgttctcgaattgctacaaatacaatcccccagaccacgaggttgtggccatggcccggaagctccaggacgtgtttgagatgaggtttgccaagatg

SEQ ID NO: 564144 - DNA, 120 bp, Artificial Sequence
  ENSG00000169925_12 (sequence is synthesized)
ccagatgagcccgtggaggcaccggcgctgcctgcccccgcggcccccatggtgagcaagggcgctgagagcagccgtagcagtgaggagagctcttcggactcaggcagctcggactcg

SEQ ID NO: 564145 - DNA, 120 bp, Artificial Sequence
  ENSG00000169925_13 (sequence is synthesized)
gaggaggagcgggccaccaggctggcggagctgcaggagcagctgaaggccgtgcacgagcagctggccgccctgtctcaggccccagtaaacaaaccaaagaagaagaaggagaagaag

SEQ ID NO: 564146 - DNA, 120 bp, Artificial Sequence
  ENSG00000169925_14 (sequence is synthesized)
gagaaggagaagaagaagaaggacaaggagaaggagaaggagaagcacaaagtgaaggccgaggaagagaagaaggccaaggtggctccgcctgccaagcaggctcagcagaagaaggct

SEQ ID NO: 564147 - DNA, 120 bp, Artificial Sequence
  ENSG00000169925_15 (sequence is synthesized)
cctgccaagaaggccaacagcacgaccacggccggcagacagctgaagaaaggcggcaagcaggcatctgcctcctacgactcagaggaagaggaggagggcctgcccatgagctacgat

SEQ ID NO: 564148 - DNA, 120 bp, Artificial Sequence
  ENSG00000169925_16 (sequence is synthesized)
gaaaagcgccagcttagcctggacatcaaccggctgcccggggagaagctgggccgggtagtgcacatcatccaatctcgggagccctcgctcagggactccaaccccgacgagatagaa

SEQ ID NO: 564149 - DNA, 120 bp, Artificial Sequence
  ENSG00000169925_17 (sequence is synthesized)
attgactttgagactctgaaacccaccactttgcgggaactggagagatatgtcaagtcttgtttacagaaaaagcaaaggaaaccgttctcagcaagcgggaagaaacaggcagccaag

SEQ ID NO: 564150 - DNA, 120 bp, Artificial Sequence
  ENSG00000169925_18 (sequence is synthesized)
tcgaaagaggagctagctcaggaaaagaagaaggagctggaaaagcgtctgcaggatgtcagcgggcagctgagcagcagcaagaagcccgcccggaaagagaagcccggctcagcaccc

SEQ ID NO: 564151 - DNA, 120 bp, Artificial Sequence
  ENSG00000169925_19 (sequence is synthesized)
tcagggggcccgtccaggctcagcagcagcagctcctccgagtctgggagcagcagctccagcgggtccagctctgacagcagtgactcagaatgaactggcttcggacagaacaggaca

SEQ ID NO: 564152 - DNA, 120 bp, Artificial Sequence
  ENSG00000169925_20 (sequence is synthesized)
gatggatgtcgcacacgccgagactctgccgtacccctctgtggttcatattactacttctgttccatggtgtgcaggtctgcttcttaattcagtgttatgatatcttccagtttttgc

SEQ ID NO: 564153 - DNA, 120 bp, Artificial Sequence
  ENSG00000169925_21 (sequence is synthesized)
tttcataggtcagagatctatcttgtgtgtgcgttagacttgatgagaaggtgtgaactctgcagaaagtctcttcttcatcactgaattcagtcacttggagatgacaacttcaaatgc

SEQ ID NO: 564154 - DNA, 120 bp, Artificial Sequence
  ENSG00000169925_22 (sequence is synthesized)
taacccgatgaccccagaaaaccgtgtgagattcgtaccgaagaaccttgtggaatccctttgcttaggcccaacctggtcgatagctcgagaaagaattttttccaaggaaatgtctcg

SEQ ID NO: 564155 - DNA, 120 bp, Artificial Sequence
  ENSG00000169925_23 (sequence is synthesized)
agctgttagctttgtcaacacgcattgtccttgtcatttgggccccgagctctgaccctcgtgtctgacgcggccacctctttctggaggggctgaggacagatgtgcctgcttgtggag

SEQ ID NO: 564156 - DNA, 120 bp, Artificial Sequence
  ENSG00000169925_24 (sequence is synthesized)
accaggctgggcctaagcgaagggtcatcgcagccccagcccggagcgtggagcccttggggggtggtcgggtgggatgtgcgttctccgctcgtggtgatgtcaggagctcctcggagg

SEQ ID NO: 564157 - DNA, 120 bp, Artificial Sequence
  ENSG00000169925_25 (sequence is synthesized)
gaacagagcggctgtgtatgcagcctgcaggtttccatacactgaagcttttacctcaactttaaaaaaaaaaaaagaagaaaagatttaaaaaaaaaaaaaaaggagactttttttgta

SEQ ID NO: 564158 - DNA, 120 bp, Artificial Sequence
  ENSG00000169925_26 (sequence is synthesized)
aggttcggcaattttctacggaagtccagcccgctgtgagtccccgcctggctagcgctgcccctgctgctgctgccgcgccacccttgggaaccacttcccgagcttatgtgtatataa

SEQ ID NO: 564159 - DNA, 120 bp, Artificial Sequence
  ENSG00000169925_27 (sequence is synthesized)
atagttatttattaacatcattggtcatttttaaaaaaaagaaaataagaaaaaaccgcagaagaaatgcattcacacagtcgcagagatgcaggccttgccagtggtgtgccgggcgcg

SEQ ID NO: 564160 - DNA, 120 bp, Artificial Sequence
  ENSG00000169925_28 (sequence is synthesized)
ggtcctgtctggcggcggcctgtcgtctccaggtgctaactcctgccaccgcgcggtgctcacccacgtctgttcgcgcgctcgcccctgggtttgttgggttttttggtttttttcttt

SEQ ID NO: 564161 - DNA, 120 bp, Artificial Sequence
  ENSG00000169925_29 (sequence is synthesized)
gtggtttttttttttttttttttttgtatgaaacttggaggcttacaggtatagacagctttcagctacagcacattctaattttttattttgtttagttcttttgtattcacttctggt

SEQ ID NO: 564162 - DNA, 120 bp, Artificial Sequence
  ENSG00000169925_30 (sequence is synthesized)
ctctttaagactgttttaaaagaaatcaatttagggaaccccagttatataatataaactttgtaatctgagagaaaaaatgtatagtaaatctaagtcttgatttttaactttctattg

SEQ ID NO: 564163 - DNA, 120 bp, Artificial Sequence
  ENSG00000169925_31 (sequence is synthesized)
taaaaaataataatatacagagtttaatagaaggtgatgttttggttttgttttcccagaggctgccatatggtctttgagtacggggatgtcccaaactggcccaccaatgagcatggc

SEQ ID NO: 564164 - DNA, 120 bp, Artificial Sequence
  ENSG00000169925_32 (sequence is synthesized)
ggctccggccaggaatgccagagttagcctcccaggcttgcgggtggacatgcctgctccctgccagcctccagtggcctggccaggccctcccgagcctgtctgccctccccaggggtg

SEQ ID NO: 564165 - DNA, 120 bp, Artificial Sequence
  ENSG00000169925_33 (sequence is synthesized)
gaggagtctctgggccccaggaggattccctcccggagactcgcacggtgctccctgctcacgcgttgtcacagttagtccggaaatgactgaaaccaggcattctcccggacctcagcg

SEQ ID NO: 564166 - DNA, 120 bp, Artificial Sequence
  ENSG00000169925_34 (sequence is synthesized)
tgggggagcctccaggcagacgctgggtatggagctgtggtgtggtctgtcctgtatggtggccagtgctttctgccagcatttctggatggatatagggactatcattagtatcctaat

SEQ ID NO: 564167 - DNA, 120 bp, Artificial Sequence
  ENSG00000169925_35 (sequence is synthesized)
acacggtgattttaaaacaaccataaaattgattcagagtccactgacccttacagatgtaggtatacccttactggagagggaactctgatgaggagatgctggtaaattatcattttt

SEQ ID NO: 564168 - DNA, 120 bp, Artificial Sequence
  ENSG00000169925_36 (sequence is synthesized)
taaattgctggtgagtctgacacttggtgagttttcagccagtttgttaaacttttaattaagttttgtttataataaaaatataaatggatttgaaagtttccattttttaaagttacc

SEQ ID NO: 564169 - DNA, 120 bp, Artificial Sequence
  ENSG00000169925_37 (sequence is synthesized)
ctcgttttcaaaggtattttctaaacagatctttaatggactatttaaaccgaatttaaggaattcacacacgacagttgacaggtcttcacgcaggctggttggtaacgtgctgccagc

SEQ ID NO: 564170 - DNA, 120 bp, Artificial Sequence
  ENSG00000169925_38 (sequence is synthesized)
acagggctgggtgatacgtacaccctaagccgggggtgcctggggctggggggcgctccttgcaatgcccctccagccacagggcagtgaggtgctgcctgtgtgagccgtcgggggagc

SEQ ID NO: 564171 - DNA, 120 bp, Artificial Sequence
  ENSG00000169925_39 (sequence is synthesized)
ggccggctgtgggggcagcgcagcaggagcatcgtggggcctttccttctcggctggttctctgtgacggtggcgtcggctcgcctctgctcctttcatctagaaagaagccactgaccc

SEQ ID NO: 564172 - DNA, 120 bp, Artificial Sequence
  ENSG00000169925_40 (sequence is synthesized)
tgacagcccacggcgggtacactgagcagctgcattggtgctgtcacttttttaaggctttctgtccagacttcaacactggtttcttttcagagtttcgaaggattaatgacttcctca

SEQ ID NO: 564173 - DNA, 120 bp, Artificial Sequence
  ENSG00000169925_41 (sequence is synthesized)
gcgcccttgctggcgggctgagggtgacagtcacgtccgtttcttctgtattagaaggctgcggtgattcaattagattgtcccactgctgagacctgtagggcagcttctaacatgctt

SEQ ID NO: 564174 - DNA, 120 bp, Artificial Sequence
  ENSG00000169925_42 (sequence is synthesized)
ttttcaaggggagaggagtagtgacaagtcgtgtgtcggaattggatttgagaacactctgaatgacccctggaggccgagggggcaggcttcgggcgtgaactgaactccagacccctc

SEQ ID NO: 564175 - DNA, 120 bp, Artificial Sequence
  ENSG00000169925_43 (sequence is synthesized)
tttgtgttgggcagtgtcatcttgcttacaaactgtaagacacatttttttgtgtgtttgtttttgttgttgttcttttgcagcactcacgcctctgacagtcttttgggaaagagtaac

SEQ ID NO: 564176 - DNA, 120 bp, Artificial Sequence
  ENSG00000169925_44 (sequence is synthesized)
acccacatacagaatttgtcacatccagagtagcactgttccttaatactggcataatgcttccaggaagtttttcttttttatatttaaaatgttacttttctgtatgatgtgcatgca

SEQ ID NO: 564177 - DNA, 120 bp, Artificial Sequence
  ENSG00000169925_45 (sequence is synthesized)
agtttaccgtaacttttcttaaactttttagtgccgtttctagtatattcctgtaaatgtcagttactgaaaatgagtccaatgtaagtagtttagcttgtttattgcaatgctggcctc

SEQ ID NO: 564178 - DNA, 120 bp, Artificial Sequence
  ENSG00000169925_46 (sequence is synthesized)
ctggcctcaacacaacagaataaaaatggtagaaagtactctttgatgtttctggtaatcatggacccttctcctggggcatttgttttgttttcataataaaaagcaaaaaaaaaaaaa

SEQ ID NO: 564179 - DNA, 120 bp, Artificial Sequence
  ENSG00000169925_47 (sequence is synthesized)
gacatcatcaagcacccgatggacctcagcaccgtgaaagtacgtggccgcgcggcaggccctgctctgcccatgtcctgcggctctgccgtgggtgctgatgtcttgtgccggctgagt

SEQ ID NO: 564180 - DNA, 120 bp, Artificial Sequence
  ENSG00000169925_48 (sequence is synthesized)
actgcttggcctcgctcaagggcaccacctccccgcaccgtgtttgggtctgcaaacgtccgtgttgtgccggccccacttcccctggctgtgttgggcccgcaccgtggctgtccacgc

SEQ ID NO: 564181 - DNA, 120 bp, Artificial Sequence
  ENSG00000169925_49 (sequence is synthesized)
atgggtcactcttcagtacattgttgtggccaagctgtcagagcccagtagcaacgagtcgaccccacgagtgggtggttggtgggcagaaggctgccagtggctgagtcccttggcaca

SEQ ID NO: 564182 - DNA, 120 bp, Artificial Sequence
  ENSG00000169925_50 (sequence is synthesized)
gcactccggtgtccatggctggagctgggctccttctcagtctccggtttgaaacagtggtcaggtggttggaagtgggtggcttagagggcctgatctggccaggcgtgggatcctgac

SEQ ID NO: 564183 - DNA, 120 bp, Artificial Sequence
  ENSG00000169925_51 (sequence is synthesized)
ggcagcataagcaggcccccatgttgagctgtgaccgtccatcctcatgcttggaggaagctggcctgcagcctgggagccttcctttgtgccctgaccacccccacatccccaaagctg

SEQ ID NO: 564184 - DNA, 120 bp, Artificial Sequence
  ENSG00000169925_52 (sequence is synthesized)
ccaggctaattaggcgcgcggtttgtttacaaacacgggctcccggcaggtgcgcgccgccccgcccgtgcgcggccggggttcgagggtggctcccgcgggcctcggggtgcccggacg

SEQ ID NO: 564185 - DNA, 120 bp, Artificial Sequence
  ENSG00000169925_53 (sequence is synthesized)
ggggctgcggtgctggctgcgtgcccgcttcttccatgccgtcctggggcaccggaaaatccgccgccaggcgctgtccccgacacgggctgtcgcctggttgggcccggaaatgggacg

SEQ ID NO: 564186 - DNA, 120 bp, Artificial Sequence
  ENSG00000169925_54 (sequence is synthesized)
tgccaagaaggccaacagcacgaccacggccggcagagatcatttcttgacctgtggagtttgagacgcctatggggtgtagagaggaacgaacctctgtaattgtttcctggccaaggg

SEQ ID NO: 564187 - DNA, 120 bp, Artificial Sequence
  ENSG00000169925_55 (sequence is synthesized)
ctggaaaccccgcagctgggagcgacttttctaaccttggattttctgccttggggcaccactttgggaagaaagcttggtcccagagagcagcctgctgttgggaggaaggggtgtgtg

SEQ ID NO: 564188 - DNA, 120 bp, Artificial Sequence
  ENSG00000169926_0 (sequence is synthesized)
acacggagccgcggcgcgcacggcagctgtcccgcctgccacaatgcgcggcgaagctgcggccgcgacttggcgaggtggtccctaacgttgccgctcggcatccttagaaccggccgc

SEQ ID NO: 564189 - DNA, 120 bp, Artificial Sequence
  ENSG00000169926_1 (sequence is synthesized)
cgttgccgctcggcatccttagaaccggccgcccctgacgccgcgcggggaccccagtcgcccgcgcgccccatgcgctcactcttcggtgcccggccgggccggcgcctcgcagacgcg

SEQ ID NO: 564190 - DNA, 80 bp, Artificial Sequence
  ENSG00000169926_2 (sequence is synthesized)
cgcgcccccgccccccgcccgctctcccgaggccgtgggtgcggatgcgcggctgacgactcgcagcaagagcaccgccg

SEQ ID NO: 564191 - DNA, 120 bp, Artificial Sequence
  ENSG00000169926_3 (sequence is synthesized)
ccggccccagcccgcagcatggcagccgccgcctatgtggaccacttcgccgccgagtgcctcgtgtccatgtcgagccgcgcggtcgtgcacgggccgcgggaggggccggagtcccgg

SEQ ID NO: 564192 - DNA, 120 bp, Artificial Sequence
  ENSG00000169926_4 (sequence is synthesized)
cccgagggcgcggccgtggccgccacccccacgctgccccgcgtcgaggagcgccgcgacggtaaggacagcgcctcgctcttcgtggtggcgcggatcctagcggacctcaaccagcaa

SEQ ID NO: 564193 - DNA, 80 bp, Artificial Sequence
  ENSG00000169926_5 (sequence is synthesized)
tagcggacctcaaccagcaagcgccggcgcccgccccggcggagcgcagggagggcgccgcggcccggaaggcgaggacc

SEQ ID NO: 564194 - DNA, 80 bp, Artificial Sequence
  ENSG00000169926_6 (sequence is synthesized)
ggagcccgaggcggggctggagcccgagcgggagccggggcccgcggggagcggcgagcccggcctcagacaaagggtcc

SEQ ID NO: 564195 - DNA, 120 bp, Artificial Sequence
  ENSG00000169926_7 (sequence is synthesized)
cgaagtcgcgccgacctcgagtccccgcagaggaagcacaagtgccactacgcgggctgcgagaaagtttacgggaaatcttcgcacctcaaggcgcacctgagaactcacacaggtgag

SEQ ID NO: 564196 - DNA, 120 bp, Artificial Sequence
  ENSG00000169926_8 (sequence is synthesized)
aggcccttcgcctgcagctggcaggactgcaacaagaagttcgcgcgctccgacgagctggcgcggcactaccgcacacacacgggcgagaagaagttcagctgccccatctgcgagaag

SEQ ID NO: 564197 - DNA, 120 bp, Artificial Sequence
  ENSG00000169926_9 (sequence is synthesized)
cgcttcatgcgcagcgaccacctgaccaagcacgcgcgccgccacgccaacttccacccgggaatgctgcagcggcgcggcgggggctcgcggaccggctccctcagcgactacagccgc

SEQ ID NO: 564198 - DNA, 120 bp, Artificial Sequence
  ENSG00000169926_10 (sequence is synthesized)
tccgacgccagcagccccaccatcagcccggccagctcgccctgagcccgccacagccatgagcagccgctcccaccccctcgtgagtccctggcctttccttttgtaataagaaagaag

SEQ ID NO: 564199 - DNA, 120 bp, Artificial Sequence
  ENSG00000169926_11 (sequence is synthesized)
agagagaacttgatgcaaagtccacgaaaaaacaatttttttcacctcaggtgtcaaagtaaatttgttaaaaaaacaaaaaaaacacaaaaatttcaaaaaacaccacccaccaaattg

SEQ ID NO: 564200 - DNA, 120 bp, Artificial Sequence
  ENSG00000169926_12 (sequence is synthesized)
cacaatagatacacccacaaagttgagattcagcgttgttgaaccccctttctcagggatggacacgtttcacgaggtcagtgaggacaccccttcctgccgccttactctgtacataga

SEQ ID NO: 564201 - DNA, 120 bp, Artificial Sequence
  ENSG00000169926_13 (sequence is synthesized)
tttgcactctggagttttctgttaggttcgggaacacgctggggacagagcaggccagccagtctggtggagctcagcgtctggctggctggccagcctgtgggtctgttgggagcagat

SEQ ID NO: 564202 - DNA, 120 bp, Artificial Sequence
  ENSG00000169926_14 (sequence is synthesized)
gtgctcactgacgtttgtgcctccagggcagattcctaagcagctggcctgacctcttcctgcccagcccccaacccagtctctggcctctgcccaacgagcctggctgggcttgcaacg

SEQ ID NO: 564203 - DNA, 120 bp, Artificial Sequence
  ENSG00000169926_15 (sequence is synthesized)
cagctgattctgagacaggcccctgcagagggatgccttaaagctgtccctggctggaggagcactccaccttggggatagtggagggggccttcagccctctgcaccctgcctgcctca

SEQ ID NO: 564204 - DNA, 120 bp, Artificial Sequence
  ENSG00000169926_16 (sequence is synthesized)
caccccgccttcaggagccctctcctacggcgctagggagcactggaagcagagatgccagccctggctgagcgtagcactgcaccgtccgacctccgaggcaggggccggggtcacacc

SEQ ID NO: 564205 - DNA, 120 bp, Artificial Sequence
  ENSG00000169926_17 (sequence is synthesized)
tgccaggactccgcttctccgtgtcccagcagaaggcatgcaggaccctgtcactactatacctgggcctctgatggggaattctggtcttctaaaaagatgttagaaattcctggtggc

SEQ ID NO: 564206 - DNA, 120 bp, Artificial Sequence
  ENSG00000169926_18 (sequence is synthesized)
acatccagttccgagtttgcccgcacgggcacttttgttggaaacagtgggcaggtcatggggcctcctcatcagagggtctgtgtgagcggctgtgcatgtggcagcgcaccatgcttc

SEQ ID NO: 564207 - DNA, 120 bp, Artificial Sequence
  ENSG00000169926_19 (sequence is synthesized)
acagagaccattctgtagcaagagaccggaacattgtgacttggaccttttcaggagtggcgcggatgttacaggaaatgctgtcggagagcgcgcattctatttcctccgcagggaatg

SEQ ID NO: 564208 - DNA, 120 bp, Artificial Sequence
  ENSG00000169926_20 (sequence is synthesized)
ccagatagaaagttgcgggcaacacttttctcagacccaccatgtccccaactcagacttagcaaacctccagcctctccgtttcccctggactcctcctcccttttcctcctgcttctc

SEQ ID NO: 564209 - DNA, 120 bp, Artificial Sequence
  ENSG00000169926_21 (sequence is synthesized)
cttgtcctgcctggaggctccaggccacacccagctggtggggctgctccagtgccccatcaccggccttctcctggcaggagaggaggagcagagagctgggtcctgggctgggattcg

SEQ ID NO: 564210 - DNA, 120 bp, Artificial Sequence
  ENSG00000169926_22 (sequence is synthesized)
agccctgggcgggggtcagtcaagccgtggtccagcaaactcctctgcagatggctggagtgttgacccaggcttgtggcccaggtatcaccttcccttcctcctgagagttgaggcctg

SEQ ID NO: 564211 - DNA, 120 bp, Artificial Sequence
  ENSG00000169926_23 (sequence is synthesized)
taaatacaagggcccaggacagagtgtgtgcgtgcgtgtgggtgtgtgcgcgcgtgagcacacacgcgtgtgttggggggggtggggggattggggtggactcagggtatcttgccagag

SEQ ID NO: 564212 - DNA, 120 bp, Artificial Sequence
  ENSG00000169926_24 (sequence is synthesized)
atacctgttttgatgagtacctattttgatgcaaaggaacggccctgggacctcagagggccacagatgggcttcctgggcctagcgtgccttggttgtggccatcctgcttctactcag

SEQ ID NO: 564213 - DNA, 120 bp, Artificial Sequence
  ENSG00000169926_25 (sequence is synthesized)
ccctgccatgctatggggtgcagcacaaacccaggacccaggcctagccactgcccacagctgatggtcactgttttggctggctccagagtggacaggtacgctctgtccacagcagct

SEQ ID NO: 564214 - DNA, 120 bp, Artificial Sequence
  ENSG00000169926_26 (sequence is synthesized)
gctcaggcacagtatgccgtcaggtgcccgcttcttaccactgtgtgtcagctgggattggccgacagcgtggtggtgacttctaggtagaccgatggaccctaaattgggcagtggcat

SEQ ID NO: 564215 - DNA, 120 bp, Artificial Sequence
  ENSG00000169926_27 (sequence is synthesized)
tgtttctgctgtggtgggaactggcagggagagggtcacctccactctggttggatgcggagctggtccctctggctgccatgctgtgttggggctctctgacctccctgcttgcattgg

SEQ ID NO: 564216 - DNA, 120 bp, Artificial Sequence
  ENSG00000169926_28 (sequence is synthesized)
ggagagagagtggaatatttggtagggaccttgacagaagagagccctgggtgcttgtggtgcaaagatcttcatgcccagttccaaagtgaggtccctcccaaagttgttttcgtgtga

SEQ ID NO: 564217 - DNA, 120 bp, Artificial Sequence
  ENSG00000169926_29 (sequence is synthesized)
ggcagagaaagccacactctgaatacattttatgtctcaggaattcacattccaggttcaggaattttattccaaagtcctttggtgcactcaccgtccaccgttccccaaggcagggag

SEQ ID NO: 564218 - DNA, 120 bp, Artificial Sequence
  ENSG00000169926_30 (sequence is synthesized)
agggagtggcccgtccctgggaggctggcaaagtgctctccagggaggggtcagacgtccttgtgatctgcccagggtgtcacggaaggagattttctagctccacatctgtctgcacat

SEQ ID NO: 564219 - DNA, 120 bp, Artificial Sequence
  ENSG00000169926_31 (sequence is synthesized)
aggaaggaaaagataggactctaaacctagtcatcttggaataaaaagaagagctggtttgttttagagcagggcggggggtgggggagggaagcgggtgttggctgtttccaaagagag

SEQ ID NO: 564220 - DNA, 120 bp, Artificial Sequence
  ENSG00000169926_32 (sequence is synthesized)
cacttaatttaatttttcctttaaatgacccagggctgttccgtctgatagatggaagggtaacattgccttaaaacagaaatatgcaggcgttggctatttttggcataagagcgtgtc

SEQ ID NO: 564221 - DNA, 120 bp, Artificial Sequence
  ENSG00000169926_33 (sequence is synthesized)
ttcattcccaaagtggttctcgtttaatggcagggtgcggtccttaggccccggcctggactgggaaatgggggtagggcaccaggagagaaatcctcctgggtactcctggccagaccc

SEQ ID NO: 564222 - DNA, 120 bp, Artificial Sequence
  ENSG00000169926_34 (sequence is synthesized)
tcctgaatcatctgcggcttaaactcatctcgcttgaagggcagggagaaacccatgaatctcaggcacggttcacaggggtcctcaagggcaggtttccatttcatcatgaagtgaggg

SEQ ID NO: 564223 - DNA, 120 bp, Artificial Sequence
  ENSG00000169926_35 (sequence is synthesized)
actcctgtggaagagggtggtgggccttggaacgctgcctccactgaggcgggcacacaaggcggaccctcctgaaacagcctccattttcttcaaacatgcagaatgttttcccagact

SEQ ID NO: 564224 - DNA, 120 bp, Artificial Sequence
  ENSG00000169926_36 (sequence is synthesized)
gcgtctatttcagggtcttccatttttgtggtttatggccatgcttgccagttttggtggggttgaggaacccataggactcatagaaataatagtgaaaactcaaacccttattttggg

SEQ ID NO: 564225 - DNA, 120 bp, Artificial Sequence
  ENSG00000169926_37 (sequence is synthesized)
acttcagttctcgtggtccataggggcagagatgtcaaagtgaaggttgcctgagtgaagggagagttcccctataaaaggcctaaaattgatctggggctcagccatcaaggggctggt

SEQ ID NO: 564226 - DNA, 120 bp, Artificial Sequence
  ENSG00000169926_38 (sequence is synthesized)
gttgctcctgtcccagacaaggaagcccctctttacatcagccatattaggggaacggttgtcagctccccaaatgcctactggatcctacagccatacaggaaaacagacggacacagc

SEQ ID NO: 564227 - DNA, 120 bp, Artificial Sequence
  ENSG00000169926_39 (sequence is synthesized)
cctttccttaaagagccctggggtcctgtcctgcaggatgctgcataggaatgggcagagatgtcctggatgggaacatggtcctggaggtgccctacctgcatcctgctgcacccccac

SEQ ID NO: 564228 - DNA, 120 bp, Artificial Sequence
  ENSG00000169926_40 (sequence is synthesized)
ccacgacactcgagtgcaagatcgcctcactcctaaccctgactttattcccaggccccacaccgaggcaggtgcaggattcgccatggtgcagcctccgggtacaaacatctgaggcac

SEQ ID NO: 564229 - DNA, 120 bp, Artificial Sequence
  ENSG00000169926_41 (sequence is synthesized)
tggcgatcccagtccttgcagcaccctgaacacagctcagaccagtgaggggtgattcagaggtggggatgggcagagagggctggccactctgcctcaggacttgacctcaagtgttct

SEQ ID NO: 564230 - DNA, 120 bp, Artificial Sequence
  ENSG00000169926_42 (sequence is synthesized)
gtctccccacccggtgtgtccagaagaccagcctctttcttgccagaagcaggtgctaagatggactgcacagggtcccggcactccctcgggacccattcaggatctcagctgggcagg

SEQ ID NO: 564231 - DNA, 120 bp, Artificial Sequence
  ENSG00000169926_43 (sequence is synthesized)
ggtgccacccaacaggaagatgtgatctgagcaatagtgtggccttgtttctccgcttctggttgtggctgtgtgtacagggctacctattttgacttctgacaggtgtcactgattttc

SEQ ID NO: 564232 - DNA, 120 bp, Artificial Sequence
  ENSG00000169926_44 (sequence is synthesized)
tttcccccatttaaaaaaggtcatttagtcaaagacacagtgctagaggtttaaagggtgtaatgtgttggtcacatcacaaccagtaagaaacgcttggtaggttatccacatcttttg

SEQ ID NO: 564233 - DNA, 120 bp, Artificial Sequence
  ENSG00000169926_45 (sequence is synthesized)
ctgactgtttccatatacaattctggtcaccatattttccaaagctaaaatctgaggcgtgggctgatggtttttgaaatcaggattaccccaggaagaaccaggtcctattactaattt

SEQ ID NO: 564234 - DNA, 120 bp, Artificial Sequence
  ENSG00000169926_46 (sequence is synthesized)
tcctgattctgaggctctgaaggcttgtctgagacacattccggagacctttgtaccagaacttggatgcatagtccaccttactactgatacacgcctgagcaccctttagggcgaggc

SEQ ID NO: 564235 - DNA, 120 bp, Artificial Sequence
  ENSG00000169926_47 (sequence is synthesized)
gccgcctcctgcctgctgtcctgtccctcagcatcagaagagttgaattcagcaggagacgggagcccggtgtccatgagggaagaggggtcgcgcttggtttctactgacccccatgaa

SEQ ID NO: 564236 - DNA, 120 bp, Artificial Sequence
  ENSG00000169926_48 (sequence is synthesized)
gatttcagacttgcagtgcggccacctggccctgccctgcctctctctttctcatacagctttaaaactttactacttttatttaaaaatgaactggatgggagagaagtagcgtcccct

SEQ ID NO: 564237 - DNA, 120 bp, Artificial Sequence
  ENSG00000169926_49 (sequence is synthesized)
accctacaagtcacacattccggggaggggggtggggggtggaggcaggaagtcatgggggtgggggtgggagcacgggaacagctttcttaaggcctcagggtcctgttttccctggcc

SEQ ID NO: 564238 - DNA, 120 bp, Artificial Sequence
  ENSG00000169926_50 (sequence is synthesized)
tcttctagagggcccgtggacaggtcgcagtgcgtgcttatttggaaaccaggtgtgtgagccgaatgcctgccaggccatgcactcagcagaggagcccttgtacctggctgccctgag

SEQ ID NO: 564239 - DNA, 120 bp, Artificial Sequence
  ENSG00000169926_51 (sequence is synthesized)
aggagcaagaggccacctcccatgtggctctagacaccacgtgggctcattagccccagcgtctgtgccggctccaggtgcctgcctctgggtgtgtgagtgggagactttgctccctgg

SEQ ID NO: 564240 - DNA, 120 bp, Artificial Sequence
  ENSG00000169926_52 (sequence is synthesized)
cctcatcctagagaggcccctggtgcctagtgctgaggcctctggggctggaaagcctcagcagaaaggaggcactactgagcaactatgcattgtcattgtcgggtttggggctttcgg

SEQ ID NO: 564241 - DNA, 120 bp, Artificial Sequence
  ENSG00000169926_53 (sequence is synthesized)
tggttccttggtgactgggaattgcttgtgtgcatgtgttgggtgcatgcttccgggtctcagctgccccaggcccgcacaggcaaccccttcccatccaaagccattggtggagcttct

SEQ ID NO: 564242 - DNA, 120 bp, Artificial Sequence
  ENSG00000169926_54 (sequence is synthesized)
ctggaatcatttgccaaaagcccaaggcagaatccaagggtccaagaccatttccatggagctcatgtttttcttttctgtaggaacttttttttaaccagcacccaccataattccgaa

SEQ ID NO: 564243 - DNA, 120 bp, Artificial Sequence
  ENSG00000169926_55 (sequence is synthesized)
ggccacgtttcatctttcctggatcactacagtgaagtattacagttgtacagttcccagtctggccttggcttgctcggataaaactttgtatgtattttgtatggcatagattctata

SEQ ID NO: 564244 - DNA, 120 bp, Artificial Sequence
  ENSG00000169926_56 (sequence is synthesized)
ttgtaatgatgtcctatgcaaaaagaaaaattaacgaaattgtaaattttattgttttaacgtgtatgcatgtttagtgacgtttacattttgaaataaaatttatgattcattatttta

SEQ ID NO: 564245 - DNA, 120 bp, Artificial Sequence
  ENSG00000169926_57 (sequence is synthesized)
gggctcaacccccgctgtgctctgcggtcgcagctgcagccgcttcggtgctccaagaccagagaggaagcaaagacagagctttcccagccaggcatcgctgctttggccttgaaggtg

SEQ ID NO: 564246 - DNA, 120 bp, Artificial Sequence
  ENSG00000169926_58 (sequence is synthesized)
caaggtcacagacccacggttttccgccccctagggtccaagctctttcctggacatctgcaggcaatgtcgacacgccctccagtgtctgtggcgggcaaaggatgtgtctccaccccc

SEQ ID NO: 564247 - DNA, 120 bp, Artificial Sequence
  ENSG00000169926_59 (sequence is synthesized)
agaccttccgatcctgtgctgaaagtgtccctcagcctgtttcctgagaagcccaggggcttttggcttgttactttttctttctcttgaagtaaacagaataaaagagagttgctcaga

SEQ ID NO: 564248 - DNA, 120 bp, Artificial Sequence
  ENSG00000169926_60 (sequence is synthesized)
gacgcttccgggaggtctaggcggctgccgtgagccggtccgaaacggctctaggtgcactgtccggctccagccaggtccgctacgcctggagagcatggaggcaagttctgccggctc

SEQ ID NO: 564249 - DNA, 120 bp, Artificial Sequence
  ENSG00000169926_61 (sequence is synthesized)
cacctgcaaagcagagcccctttccacgactgtgcagcaccgctcgctccagccccaccatacccgcctggacggagaccgaccgcagcctgggagagcctccaagcctggaggcgggcg

SEQ ID NO: 564250 - DNA, 120 bp, Artificial Sequence
  ENSG00000169926_62 (sequence is synthesized)
cgcgagccctttccaaggagaacccacagcggcttcccctcttgctccaggggcctctagatcccaccccacctggcacctgcgtctctcccagaactcggcctgcccctaccttcccgc

SEQ ID NO: 564251 - DNA, 120 bp, Artificial Sequence
  ENSG00000169926_63 (sequence is synthesized)
cagcccccaccctgctggggctactgggacctcctagcggcatgcagcgttcaggctcaacccccgctgtgctctgcggtcgcagctgcagccgcttcggtgctccaagaccagagagga

SEQ ID NO: 564252 - DNA, 120 bp, Artificial Sequence
  ENSG00000169926_64 (sequence is synthesized)
agcaaagacagagctttcccagccaggcatcgctgctttggccttgaagctcagcgtgtggctacctggaccaattctgtctgatggggtgtgcagtagtgtcatgaactacttctatcc

SEQ ID NO: 564253 - DNA, 120 bp, Artificial Sequence
  ENSG00000169926_65 (sequence is synthesized)
caggaagtaacttgtaaatgagtggatgagccaattctccttctttctcttcctgctggctgaagtgtggacatgatggcaggagctgcagcagtcacattggaccatgggtcatcgtgg

SEQ ID NO: 564254 - DNA, 120 bp, Artificial Sequence
  ENSG00000169926_66 (sequence is synthesized)
gaatggaagtcacacaagggtatttaaagccacacaaggataatgagcactggatagatggagcccgagtccccatcacagtgtagcccctgtaacagatctagacttcctgcctcccac

SEQ ID NO: 564255 - DNA, 120 bp, Artificial Sequence
  ENSG00000169926_67 (sequence is synthesized)
tattatgttaggattttttcaacccatagtcagagatagtcctaactgattcaccaccctcagagagtttacagccaattatgtttctcatgaaaaaggttagccagtggttgtaagtga

SEQ ID NO: 564256 - DNA, 120 bp, Artificial Sequence
  ENSG00000169926_68 (sequence is synthesized)
tcccggactggagcgccagctgcactaaggcagttcgtctgtgggatggctctgtccttgtcagggagaggacccctcctacacactggcatgttaccacaagtacagtggtaactaagc

SEQ ID NO: 564257 - DNA, 120 bp, Artificial Sequence
  ENSG00000169926_69 (sequence is synthesized)
aggtcggcataggtgcccacagagcagactgaacaccccgtttgcttccctctcctctccgaactccctggacatggccaagtagcataagccaagcagaggtgagaaggagagtggggc

SEQ ID NO: 564258 - DNA, 120 bp, Artificial Sequence
  ENSG00000169926_70 (sequence is synthesized)
acaggcaagttaccagtgggcccgcggctatcatggacttccagaaaataaaaaacaggcatgatggtgttggtttataaaccaaagcagagggcactggagccccgtaagtgtgcagga

SEQ ID NO: 564259 - DNA, 120 bp, Artificial Sequence
  ENSG00000169926_71 (sequence is synthesized)
gtgaatgtatgtggcagggagaagggtagaagggaggaggttgggtagaaggctacctctaccagctggaaatgagtggtgaagtcagctggacttctgggtggggcggggacttggaga

SEQ ID NO: 564260 - DNA, 120 bp, Artificial Sequence
  ENSG00000169926_72 (sequence is synthesized)
acttttctgtcttacaaagggattgtaaaatgcacaaatcagcactctgtagataggattgtaaaacgcaccaatcagctctctgtggctagctagaggtttctaaaatggaccaatcag

SEQ ID NO: 564261 - DNA, 120 bp, Artificial Sequence
  ENSG00000169926_73 (sequence is synthesized)
aggtttctaaaatggaccaatcagtgctttgtaaagtggaccaatcagaacactgtaaaatggaccaattagtgctctgtaaaatggaccaatcagaccaatcagcactctgtaaaatgg

SEQ ID NO: 564262 - DNA, 89 bp, Artificial Sequence
  ENSG00000169926_74 (sequence is synthesized)
ccagtcagcagcaggcaacccactgggtccccatccctgttgtggtgtatttgttattttgctcttggcaataaatcttgctgctgctc

SEQ ID NO: 564263 - DNA, 120 bp, Artificial Sequence
  ENSG00000169926_75 (sequence is synthesized)
cggccatgcagcctggtacccgaagagtcccccctctgcttggcacctgtaggacccccaaaccccagcatggcttagcccctctcccagctccccacagttcccccaaccctcctacag

SEQ ID NO: 564264 - DNA, 120 bp, Artificial Sequence
  ENSG00000169926_76 (sequence is synthesized)
cctcccttcagggctccagggcacctagtgcccctccaggcttgaccccagcccccttcctctcaccaagtcttctcacaaggcctaaccccgccttgtcccacggcccccaccccatgc

SEQ ID NO: 564265 - DNA, 120 bp, Artificial Sequence
  ENSG00000169933_0 (sequence is synthesized)
gggaggcagctgcagtgctgcgaggggtgcgtgcgcgtgtgcccagctcgcctgccgtctcccggctccgtctgcgctcctcggtgcgtggggcacgagggtccgagggccgggaagcca

SEQ ID NO: 564266 - DNA, 120 bp, Artificial Sequence
  ENSG00000169933_1 (sequence is synthesized)
gtccgagggccgggaagccagagcagcgcctctcgcccaggcctcgctttctctggacgcccggcagtccccggggctagagcgcacggggcggggcgcgagacccgggccgcgctcccc

SEQ ID NO: 564267 - DNA, 120 bp, Artificial Sequence
  ENSG00000169933_2 (sequence is synthesized)
gcctggctccctctccattgagttttcctgcctcgggtgcctatcaatggtcctgctcggggatgcacacgcagctcgcggccggaggggggtagcagccgccgcctccaggtgcaggtt

SEQ ID NO: 564268 - DNA, 120 bp, Artificial Sequence
  ENSG00000169933_3 (sequence is synthesized)
ctctccggccgccgccgccacccgctgtcgccgcgactcgagccccgggcgcactgaggtcttggccatggggctgcggaggctgctgttgctggcgtgagaaggggcgacggagttgtc

SEQ ID NO: 564269 - DNA, 120 bp, Artificial Sequence
  ENSG00000169933_4 (sequence is synthesized)
gcgctcgggggtccccagctgcctgcatggatgtcttcagctttgtgaagattgcaaagctttcgagccacaggacgaagtcttcaggctggccgcctccctcgggaacctggggcttga

SEQ ID NO: 564270 - DNA, 120 bp, Artificial Sequence
  ENSG00000169933_5 (sequence is synthesized)
gccaggtgccgccctatggatgggagatgacggcaaaccgagatgggcgagactacttcatcaatcacatgacacaggcaatcccttttgacgaccctcggttagagagctgccaaatca

SEQ ID NO: 564271 - DNA, 120 bp, Artificial Sequence
  ENSG00000169933_6 (sequence is synthesized)
tccctccggctcctcggaaggtggagatgagaagggaccccgtgctgggatttggttttgtggcaggcagtgaaaagccagtggtcgttcgctcagtaacaccaggtggcccctctgaag

SEQ ID NO: 564272 - DNA, 120 bp, Artificial Sequence
  ENSG00000169933_7 (sequence is synthesized)
gcaagctgatcccgggagatcagattgtaatgattaatgatgaaccggtcagcgctgcacccagagagcgggtcatcgatctggtcagaagctgcaaagaatcgatactcctcactgtca

SEQ ID NO: 564273 - DNA, 120 bp, Artificial Sequence
  ENSG00000169933_8 (sequence is synthesized)
ttcagccttacccttctcccaaatcagcatttattagtgctgcaaaaaaggcaagattaaagtccaatcctgtcaaagtacgcttctctgaggaggtcatcatcaacggccaagtgtcgg

SEQ ID NO: 564274 - DNA, 120 bp, Artificial Sequence
  ENSG00000169933_9 (sequence is synthesized)
aaactgttaaggacaactcacttctttttatgccaaatgttttgaaagtctatctggaaaatgggcagaccaaatcatttcgttttgactgcagcacttccattaaggatgtcatcttaa

SEQ ID NO: 564275 - DNA, 120 bp, Artificial Sequence
  ENSG00000169933_10 (sequence is synthesized)
cccttcaagagaagctctccatcaaaggcattgaacacttctctctcatgctggagcagaggacagaaggggctggaacgaagctgctcttgcttcatgaacaggagactctaactcagg

SEQ ID NO: 564276 - DNA, 120 bp, Artificial Sequence
  ENSG00000169933_11 (sequence is synthesized)
tgacacagaggcccagctcccataagatgagatgtcttttccgaattagcttcgtcccaaaagatccaattgaccttttaaggagagatccagttgctttcgagtatctctatgttcaga

SEQ ID NO: 564277 - DNA, 120 bp, Artificial Sequence
  ENSG00000169933_12 (sequence is synthesized)
gttgtaacgatgtggttcaggagcgatttgggccggagctgaaatatgacatagccctgcggctggccgcattacaaatgtacattgcaaccgttaccaccaagcaaacgcagaaaatct

SEQ ID NO: 564278 - DNA, 120 bp, Artificial Sequence
  ENSG00000169933_13 (sequence is synthesized)
ccctcaaatacatcgaaaaagaatggggattagagacttttcttccctctgctgtgctgcaaagcatgaaagagaagaacataaagaaagcactttcacaccttgtcaaagcaaatcaaa

SEQ ID NO: 564279 - DNA, 120 bp, Artificial Sequence
  ENSG00000169933_14 (sequence is synthesized)
acttggtaccaccgggtaaaaagctctctgcactacaagccaaggtccattatctcaagttcctcagtgacctacgattgtatgggggccgtgtgttcaaggcaacattagtgcaggcag

SEQ ID NO: 564280 - DNA, 120 bp, Artificial Sequence
  ENSG00000169933_15 (sequence is synthesized)
aaaagcgctcggaagtgactctcctggttgggccccggtatggcataagccatgtcatcaacaccaaaaccaatctggtggctcttttagccgactttagccacgtcaacaggatcgaaa

SEQ ID NO: 564281 - DNA, 120 bp, Artificial Sequence
  ENSG00000169933_16 (sequence is synthesized)
tgttttccgaggaggagagcttggtgcgggtagaactccacgtgctagatgtgaagcctatcacgcttctgatggaatcctcagatgccatgaacctggcctgcttgacggctggatact

SEQ ID NO: 564282 - DNA, 120 bp, Artificial Sequence
  ENSG00000169933_17 (sequence is synthesized)
accggctgcttgttgattccaggaggtcgatatttaacatggccaacaagaaaaacacagcgacccaggaaacaggacctgaaaacaaggggaagcataacctccttggcccagattgga

SEQ ID NO: 564283 - DNA, 120 bp, Artificial Sequence
  ENSG00000169933_18 (sequence is synthesized)
actgtataccccaaatgaccacctttattggcgaaggggaacaagaagcccagataacatacatagattcaaagcagaagacggtggagatcacagacagcaccatgtgtccaaaagagc

SEQ ID NO: 564284 - DNA, 120 bp, Artificial Sequence
  ENSG00000169933_19 (sequence is synthesized)
accggcacttgtacatagacaatgcctatagttcagatggacttaaccagcagctgagccagcccggggaggccccctgtgaggcagactacagaagtctagctcagcggtccctattga

SEQ ID NO: 564285 - DNA, 120 bp, Artificial Sequence
  ENSG00000169933_20 (sequence is synthesized)
ccctctcaggaccagaaactctgaagaaagcacaggaatctccgagaggagctaaagtgtcctttatttttggagacttcgccttggatgatggtattagtcccccaacccttggctatg

SEQ ID NO: 564286 - DNA, 120 bp, Artificial Sequence
  ENSG00000169933_21 (sequence is synthesized)
aaacgctactagatgagggtcctgaaatgctggagaagcagagaaatctctacattggcagtgccaatgacatgaagggcctggatctcactccagaggcagagggcatccagtttgtgg

SEQ ID NO: 564287 - DNA, 120 bp, Artificial Sequence
  ENSG00000169933_22 (sequence is synthesized)
aaaattctgtttatgcaaacataggcgatgtgaagagcttccaggccgcggaggggatcgaggaacccctcttgcatgacatctgttatgcagaaaacactgatgacgcggaggacgagg

SEQ ID NO: 564288 - DNA, 120 bp, Artificial Sequence
  ENSG00000169933_23 (sequence is synthesized)
acgaggtgagctgcgaggaggacctcgtggtgggggagatgaaccagccggccatcctcaacctgtctgggtcaagcgatgacatcattgacctcacatccctgccccctccagaaggtg

SEQ ID NO: 564289 - DNA, 120 bp, Artificial Sequence
  ENSG00000169933_24 (sequence is synthesized)
atgacaatgaggatgacttcctgttgcgttccttgaacatggccattgccgcacccccacctggctttagagacagttcagatgaagaggactctcagagccaggcagcttccttccccg

SEQ ID NO: 564290 - DNA, 120 bp, Artificial Sequence
  ENSG00000169933_25 (sequence is synthesized)
aggacaaggagaaaggcagcagcctgcaaaatgatgagatccccgtgtccctcattgacgctgtgcccaccagcgccgaaggcaagtgtgagaagggactggataatgccgtcgtctcca

SEQ ID NO: 564291 - DNA, 120 bp, Artificial Sequence
  ENSG00000169933_26 (sequence is synthesized)
cgctgggagctctagaggctctatccgtgtcagaagaacagcagaccagtgacaattcaggtgtagccatcttgcgggcttatagtcctgagtcttcgtcagactcgggcaatgaaacta

SEQ ID NO: 564292 - DNA, 120 bp, Artificial Sequence
  ENSG00000169933_27 (sequence is synthesized)
actcttctgaaatgactgagagttctgaactggccacagcacaaaaacagtcagaaaacctctcccgcatgttcttggccactcacgaaggctaccacccccttgcagaagagcagaccg

SEQ ID NO: 564293 - DNA, 120 bp, Artificial Sequence
  ENSG00000169933_28 (sequence is synthesized)
agttcccggcctccaagacccccgctgggggcttgcctccaaagtcctcgcacgccctggctgctaggccagcaaccgacctcccgcccaaagttgtgccttccaagcagttacttcact

SEQ ID NO: 564294 - DNA, 120 bp, Artificial Sequence
  ENSG00000169933_29 (sequence is synthesized)
cagaccacatggagatggagcctgaaactatggagactaagtcggtcactgactattttagcaaactgcacatggggtcggtggcatactcctgcactagcaaaaggaaaagcaagctgg

SEQ ID NO: 564295 - DNA, 120 bp, Artificial Sequence
  ENSG00000169933_30 (sequence is synthesized)
ccgatggtgaggggaaggcaccccctaatgggaacacaacaggaaaaaaacagcaggggaccaaaacggcagagatggaggaggaggccagtggtaaatttggtactgtgtcttcacgag

SEQ ID NO: 564296 - DNA, 120 bp, Artificial Sequence
  ENSG00000169933_31 (sequence is synthesized)
acagtcaacacctgagcacttttaatctggagagaactgcctttcgcaaggacagtcaaagatggtatgtggccactgaaggtgggatggctgaaaaaagtggattagaagcagcaacag

SEQ ID NO: 564297 - DNA, 120 bp, Artificial Sequence
  ENSG00000169933_32 (sequence is synthesized)
ggaaaacctttccaagagcttctggtcttggggcaagggaggccgaagggaaggaagaaggagctcctgatggagaaaccagtgatggctcaggacttggtcaaggggaccgcttcttaa

SEQ ID NO: 564298 - DNA, 120 bp, Artificial Sequence
  ENSG00000169933_33 (sequence is synthesized)
ctgacgtgacctgtgcatcttcagccaaagacttagataacccagaggacgctgactcgtccacctgcgaccatccttccaagcttcctgaggctgatgagagtgtggcccgcctttgtg

SEQ ID NO: 564299 - DNA, 120 bp, Artificial Sequence
  ENSG00000169933_34 (sequence is synthesized)
actaccacttggccaagcggatgtcatcactgcaaagcgagggccatttttctctgcagagctcccaaggctcttcagtggatgcaggctgtggcacaggcagcagtggcagtgcctgtg

SEQ ID NO: 564300 - DNA, 120 bp, Artificial Sequence
  ENSG00000169933_35 (sequence is synthesized)
aaaggcgtgaattacattccttcagaggagagagcccctgggcttcccaaccacggagccacctttaaggaactgcacccacagacagaagggatgtgtccacggatgacagtgcctgct

SEQ ID NO: 564301 - DNA, 120 bp, Artificial Sequence
  ENSG00000169933_36 (sequence is synthesized)
ctgcacacagccattaacaccgaacccctgtttggcacattgagagatggatgccatcggctccccaagattaaggaaaccacagtgtagctttgacagagcctgggaaggagagacgag

SEQ ID NO: 564302 - DNA, 120 bp, Artificial Sequence
  ENSG00000169933_37 (sequence is synthesized)
gaggcatgccttcagcttggtctcaacatcctgaagctgatcccatcctgctaccatcaaacattcactcggaatcaaaggtgccaattccaaatcaagaccctaatgatttctcccaag

SEQ ID NO: 564303 - DNA, 120 bp, Artificial Sequence
  ENSG00000169933_38 (sequence is synthesized)
caaatcaggcatacggagaggctgtgagctggcggccaccggatctgagaggggggagcctcaggacacctcccagccagaaggctctgagacatagcagcagtatcctctccggatctg

SEQ ID NO: 564304 - DNA, 120 bp, Artificial Sequence
  ENSG00000169933_39 (sequence is synthesized)
tcgatttggagaccttccgagagagaaccaagggtgcagtcagcttaaagtgtccaggcatcacagaagcacaggaggccagttctgaaaggcgagcagaactccccctggggaggaagc

SEQ ID NO: 564305 - DNA, 120 bp, Artificial Sequence
  ENSG00000169933_40 (sequence is synthesized)
tcaccaaaagtttttcccaaagctcaatgcacttgagctctgaggggaggtttcacaaaaggtccccagtggctcataaagactcaaagctgtataggacattacccttgcggaagctgg

SEQ ID NO: 564306 - DNA, 120 bp, Artificial Sequence
  ENSG00000169933_41 (sequence is synthesized)
agggcagcaattggagatgccggggacccttcagctattgcttcctgaaccgagggcaggatgaagatggtgaggaagaagaggagaggggagaggccaccgtccaggtctcttgcctct

SEQ ID NO: 564307 - DNA, 120 bp, Artificial Sequence
  ENSG00000169933_42 (sequence is synthesized)
atagaccacagatgactcaagccatgccagaaccaagcagcccatgcctggctgtggcgattcagaagcaacgaggggagctatccagagggtcagtgctgaaggtctgggcagaagacc

SEQ ID NO: 564308 - DNA, 120 bp, Artificial Sequence
  ENSG00000169933_43 (sequence is synthesized)
tgcgagacccagatgacttggacttcagcaacctggcttttgatgcccggattgcaagaataaatgccctaaaggagagcacatatgcaatgcctgatgggttccttgcagcccaaaatg

SEQ ID NO: 564309 - DNA, 120 bp, Artificial Sequence
  ENSG00000169933_44 (sequence is synthesized)
atgccaatgagctgctctgtctcgtcagggcaaccaaggagaagagggaggagtcacgccctgaagcgtacgaccttacactttctcagtacaagcaactgttatccattgagtccagac

SEQ ID NO: 564310 - DNA, 120 bp, Artificial Sequence
  ENSG00000169933_45 (sequence is synthesized)
agttgggaagtgcctgtaggaaaatggcgatggctgagaaaagcccggaggagatgctcctagctatgacttccagctttcaagtgctctgttgcctaacagaagcttgcatgcgattag

SEQ ID NO: 564311 - DNA, 120 bp, Artificial Sequence
  ENSG00000169933_46 (sequence is synthesized)
ttaaagtcgtgaactcagaaacacagcggcaggaaattgtagggaagatcgatgaagtggtcataaattacatttgtctactgaaagctgccgaagcagccactggaaagaaccctgggg

SEQ ID NO: 564312 - DNA, 120 bp, Artificial Sequence
  ENSG00000169933_47 (sequence is synthesized)
accctaatgttggactctcggcgcgacactcaaccaccatggccgctctcgtaagcacactgacacgttctctcaagaggcttttaaacaaataaatatggaagtcacgtcataatctac

SEQ ID NO: 564313 - DNA, 120 bp, Artificial Sequence
  ENSG00000169933_48 (sequence is synthesized)
ctttgcaaagccatacatgaacttttatttactttgtgtgtatgatgaacagatgtctcctttcttctctctgtatattttgttattttatataaaataggagataaaagtcacattgat

SEQ ID NO: 564314 - DNA, 120 bp, Artificial Sequence
  ENSG00000169933_49 (sequence is synthesized)
gaaatgttgaaatgtactaatcagatgtattctgtttatattatacatatatatacacgtaaaagaaatatccaagaaagtgatgacatttggctatttttcatatagttaaaactccag

SEQ ID NO: 564315 - DNA, 120 bp, Artificial Sequence
  ENSG00000169933_50 (sequence is synthesized)
gtatatgatgtgaaattttaaattctaccatgttagagcaaaacaatgaatcctatcccctttctttccaagtagctacttggaaaccatatcattcatatttagaagtaaaacacaaaa

SEQ ID NO: 564316 - DNA, 120 bp, Artificial Sequence
  ENSG00000169933_51 (sequence is synthesized)
caaaaaagagagagaaaagaaaagaaatcacaatgtatataaaacagtacttatgttttaaaattatgatttttaagcattggaaatagcaaaaagacatttaaaattcaagaagctatt

SEQ ID NO: 564317 - DNA, 120 bp, Artificial Sequence
  ENSG00000169933_52 (sequence is synthesized)
atgaattactagagaatatatctgtaataaattaattttttgctcatagtatttggttactggatgctttcttccaagaatcccacatatttaatttgggtttttgctactggggctaca

SEQ ID NO: 564318 - DNA, 120 bp, Artificial Sequence
  ENSG00000169933_53 (sequence is synthesized)
aattggtggggatggattctactgtgtcagcacaaatgctcttcacagtggttctagcatttaaaaaacttcccggggagaagaacagaggggatgatgggcagtttcctaggtaacacc

SEQ ID NO: 564319 - DNA, 120 bp, Artificial Sequence
  ENSG00000169933_54 (sequence is synthesized)
tagagttatagaatatctcattacataaaatgtatggaattaataataccaaaattaattatttgatggaaagatctgctttgactaaatgtcaaaaatctgcaaaccaaagacattatc

SEQ ID NO: 564320 - DNA, 120 bp, Artificial Sequence
  ENSG00000169933_55 (sequence is synthesized)
ttcccctcatcccaactcaactacgaaacttaaaattccctttagagtgataggacatttagtaaagtatttgcaaacttaaaaaaaggaacatttaatgatcatcaaaattaagtacag

SEQ ID NO: 564321 - DNA, 120 bp, Artificial Sequence
  ENSG00000169933_56 (sequence is synthesized)
attcagtaatgtagaccagaccacacaccagcacctgtgagtctcatctcagatcacagctctcagcatagggcttcatgcatcaccgcctctacagaggctaaggctgccagtcaaatt

SEQ ID NO: 564322 - DNA, 120 bp, Artificial Sequence
  ENSG00000169933_57 (sequence is synthesized)
tggaattatagcgtagtactgggacaaaatctcaaatcttggatgttccagaaaatcagggagagatggctactgtaatcatgggagccatgagtaaatagttaagtatttattaaataa

SEQ ID NO: 564323 - DNA, 120 bp, Artificial Sequence
  ENSG00000169933_58 (sequence is synthesized)
atacttaatctggattggctgataaaaatatgaaatctgaaaaaaaaaagaaagaaatggaagtggtatatttgaccagttcaagtgaaaccaatggaatgcaaagaactttccaggact

SEQ ID NO: 564324 - DNA, 120 bp, Artificial Sequence
  ENSG00000169933_59 (sequence is synthesized)
gtcacatctctaaaagtaccctgcagtcataaaataaaatcgatatgtatatatgtatttcctgggtcattcagtgctcaagttacatgcactcctacttagacaggtggctccttaaga

SEQ ID NO: 564325 - DNA, 120 bp, Artificial Sequence
  ENSG00000169933_60 (sequence is synthesized)
acatgatgggagtacaccaggtgcaaatatttctacttttgtagcctgctgagaaggagtcataacacagtccacaattgcaatctctctctagtcagccattccacagggactcaacaa

SEQ ID NO: 564326 - DNA, 120 bp, Artificial Sequence
  ENSG00000169933_61 (sequence is synthesized)
caaaagccgcacgtggttatggatggcagcaaaggaaaggagtttaggtgtgtgttattataaataatgtttaactaaataataaaacattatttcattacaattataattataaatatt

SEQ ID NO: 564327 - DNA, 120 bp, Artificial Sequence
  ENSG00000169933_62 (sequence is synthesized)
ggtgttttgatattgagagatattagtggtgtttactgtggaaaatcttagtaaatatcattctgtgtactaaaatcctaacctattaataggatgtgtgccctatgtcagacagtgtgc

SEQ ID NO: 564328 - DNA, 120 bp, Artificial Sequence
  ENSG00000169933_63 (sequence is synthesized)
taagcatattaactatattatctcatttaatcatcacaacaatctgctggtttggacactattctctctggaggcaatatggatgagttcttacggatatggggtttggggtcagaaaca

SEQ ID NO: 564329 - DNA, 120 bp, Artificial Sequence
  ENSG00000169933_64 (sequence is synthesized)
tcttgattaaaattttgactctgccattttctagcccttttatgttgggaaagctactttttctagtctcaatttcctcataataaaatgaaaatcaattataagatcgatttccatagg

SEQ ID NO: 564330 - DNA, 120 bp, Artificial Sequence
  ENSG00000169933_65 (sequence is synthesized)
gttgtcatgagttttgagtaaaaatgtgtatgtaaagttcttaccacaatacctggcagagagtaagtattcaattaatgttagctattattatcatcataatcgttgtgttaaatatat

SEQ ID NO: 564331 - DNA, 120 bp, Artificial Sequence
  ENSG00000169933_66 (sequence is synthesized)
tgcccaagataatatgtgggggaatgtttgttttatatgcatattgtatcctgactgtgtgcagaacacattatgtgtattgcatatatgtaaaagaagtgtacaaggaagtggccatcc

SEQ ID NO: 564332 - DNA, 120 bp, Artificial Sequence
  ENSG00000169933_67 (sequence is synthesized)
ttgttcaagttacgtatctagttagaacaacttcccagtccattggagttctttgagaagcctcagggaagtagctctgggtccttctaatcaacctcccattactgcgccagtaagttt

SEQ ID NO: 564333 - DNA, 120 bp, Artificial Sequence
  ENSG00000169933_68 (sequence is synthesized)
ctgtttcttataaataaactctttgctattcagaaaacctcaaggggcccccacattcactaagcatggggctcctaactggggtccaggtccatagagtgtaggaagaacatattagaa

SEQ ID NO: 564334 - DNA, 120 bp, Artificial Sequence
  ENSG00000169933_69 (sequence is synthesized)
agaacaatacttgtgcttatttttatctagcttttttatgtttgtgtatgttttataatggcataatagtacaatggtacatgtacataattttaaataaataaatgaatgaatgaataa

SEQ ID NO: 564335 - DNA, 120 bp, Artificial Sequence
  ENSG00000169933_70 (sequence is synthesized)
gaaatatgattggcctctcagcatcgattcctcctctccttcctctctctctcttcctggatagcagttgttatgatacaatcattcttcttataaaagaataaagaagaggttctctct

SEQ ID NO: 564336 - DNA, 120 bp, Artificial Sequence
  ENSG00000169933_71 (sequence is synthesized)
ttccatccttaggaaaaggtgggctgttttggcttcctaccatggaggaggaccttgaaggagaaaactggcagaccttctccattccctggtgcttcagcagggcagctgaggatgaag

SEQ ID NO: 564337 - DNA, 120 bp, Artificial Sequence
  ENSG00000169933_72 (sequence is synthesized)
ggaacactggctggatcttccaacatttctgggggtgctctctgttctttgcggtggccctgccgccaggtgaacgctgccggtgggagagcacacacttagtgcggccagctgaccttc

SEQ ID NO: 564338 - DNA, 120 bp, Artificial Sequence
  ENSG00000169933_73 (sequence is synthesized)
acagtctggggggaaattttaaaggattgtggagaagaggccttgagacttcaagaggaagaagaaaaaggggcccaatgaagcctgagcctcccaggaggtagaactgagttaatgaac

SEQ ID NO: 564339 - DNA, 120 bp, Artificial Sequence
  ENSG00000169933_74 (sequence is synthesized)
agggctgattatccaaggtaattatgtaaaagagaaggctaggaggagttctagatggctgcaacttggagtttactctgcctaagccacaggacgaagtcttcaggctggccgcctccc

SEQ ID NO: 564340 - DNA, 120 bp, Artificial Sequence
  ENSG00000169933_75 (sequence is synthesized)
gcactctgctgttttatgagacaggcattagtgtccccacttacagttaaggaaactgaggcacagagcagttcagtggcatgaggtcacacagctgccacaggacgaagtcttcaggct

SEQ ID NO: 564341 - DNA, 120 bp, Artificial Sequence
  ENSG00000169933_76 (sequence is synthesized)
agttttaacgggagcgaagcatcaccagcagcagtgttcgcttgctctctagtcatgtgctgtgaggaataaagactctgtagggcagtgaacctgaacttggcctattcatccatactg

SEQ ID NO: 564342 - DNA, 120 bp, Artificial Sequence
  ENSG00000169933_77 (sequence is synthesized)
cattgagtgattgcatggagtggagtcaaatgccacttgggggtgaagagcactcatcatcttgcattcctgctggatatattaggaaggacccttgacagaatccagtaattcaaagcc

SEQ ID NO: 564343 - DNA, 120 bp, Artificial Sequence
  ENSG00000169933_78 (sequence is synthesized)
atagaaaggggagttcagtgagaagaggaagtctaaggaggctggaagtgactctttgctcagcaaaaactgccttagagagcaggagaaaatggcagtgtgcaagatggggaaaggatg

SEQ ID NO: 564344 - DNA, 120 bp, Artificial Sequence
  ENSG00000169933_79 (sequence is synthesized)
gggtcacacaaagaaaaagagctagagttgacctcttttccactctgggaatgagatgtaagccaggaggcaagcctgaggctgagactccaccagggatggcagaatctcctgaaggat

SEQ ID NO: 564345 - DNA, 120 bp, Artificial Sequence
  ENSG00000169933_80 (sequence is synthesized)
tggaggtggtggccagggcagaggccaaggtcttgacagaggccactgacgaggtgaatgaaaaagagaccaagtgaaaaaataagttgatttagtgacctgaatgtatcccatagagtg

SEQ ID NO: 564346 - DNA, 120 bp, Artificial Sequence
  ENSG00000169933_81 (sequence is synthesized)
agatagaagtcacaggacatcagaattgcaagaactctcaaggccttgcctgagcccggtggaaatggacactgtgcacccaggatcacacagctgggatttctgccacaggacgaagtc

SEQ ID NO: 564347 - DNA, 120 bp, Artificial Sequence
  ENSG00000169946_0 (sequence is synthesized)
cggagtatccgtcccgcacgccggggcgaggggcgagcgagcgcgctcctcctcccgcgccctgcgcccccgcgctccccctctcctcgctgctcgctctcccgtccctccctccttctc

SEQ ID NO: 564348 - DNA, 120 bp, Artificial Sequence
  ENSG00000169946_1 (sequence is synthesized)
ctctcctcgctgctcgctctcccgtccctccctccttctcttccttctttccgtgttatttttctcttctctttccccttttctctctccctgaccgttcgcttgtacattcccattctc

SEQ ID NO: 564349 - DNA, 120 bp, Artificial Sequence
  ENSG00000169946_2 (sequence is synthesized)
cccccgtcgctctcctctccccctcccctcctcactgtcacactctctgtgcccccgtctctcttctctcatttgcttgctcatctccgaacgtgaatccgcggctcccggaggagccca

SEQ ID NO: 564350 - DNA, 80 bp, Artificial Sequence
  ENSG00000169946_3 (sequence is synthesized)
gtgaatccgcggctcccggaggagcccagcgcccggagcacctggagtccggccggcggcgggccgagcctggccagcgg

SEQ ID NO: 564351 - DNA, 120 bp, Artificial Sequence
  ENSG00000169946_4 (sequence is synthesized)
ccagcggcagcagccgccgccgagatgtcccggcgaaagcaaagcaaaccccggcagatcaaacggccgcttgaagatgccattgaagatgaggaagaagaatgtccatcagaggaaaca

SEQ ID NO: 564352 - DNA, 120 bp, Artificial Sequence
  ENSG00000169946_5 (sequence is synthesized)
gacatcatctccaaaggagactttccattggaggaaagcttttccacagaatttgggcctgaaaatctgagctgcgaagaagtggaatacttttgtaacaaaggtgatgatgaaggaatc

SEQ ID NO: 564353 - DNA, 120 bp, Artificial Sequence
  ENSG00000169946_6 (sequence is synthesized)
caggagacagcagaatcagatggggacacacagtcagagaaaccggggcaacctggagttgagacagacgactgggatggaccaggagagctggaggtgtttcagaaagatggggaacga

SEQ ID NO: 564354 - DNA, 120 bp, Artificial Sequence
  ENSG00000169946_7 (sequence is synthesized)
aaaattcagagtcgacagcaacttccagtgggaacaacctgggggccgtttcctgggaagatggacttgaataataattctttgaagacaaaggctcaggtcccaatggtgctgactgct

SEQ ID NO: 564355 - DNA, 120 bp, Artificial Sequence
  ENSG00000169946_8 (sequence is synthesized)
ggtcccaagtggttgctggatgtgacttggcaaggagtggaagacaacaaaaacaactgcattgtgtacagcaaagggggtcagctttggtgtacaactacgaaggccatctctgagggt

SEQ ID NO: 564356 - DNA, 120 bp, Artificial Sequence
  ENSG00000169946_9 (sequence is synthesized)
gaagagctaattgcctttgtggtggattttgactcaaggctacaagctgccagtcagatgactctcacagaagggatgtaccctgcacgcctgctggactcaattcagctgcttcctcag

SEQ ID NO: 564357 - DNA, 120 bp, Artificial Sequence
  ENSG00000169946_10 (sequence is synthesized)
caagctgccatggcttctattttgcccacagctattgtcaataaggatatattcccttgcaagtcctgtggcatctggtatcggagtgagcggaatctgcaggcccatttgatgtactac

SEQ ID NO: 564358 - DNA, 120 bp, Artificial Sequence
  ENSG00000169946_11 (sequence is synthesized)
tgcagtgggaggcaaagagaagctgctccggtgtcagaggaaaatgaagacagtgcccatcagatttccagcctgtgccccttcccacagtgcaccaagagcttttcaaatgctcgagct

SEQ ID NO: 564359 - DNA, 120 bp, Artificial Sequence
  ENSG00000169946_12 (sequence is synthesized)
ctagaaatgcacctgaattcacacagtggagtgaaaatggaagaattcctgccccctggtgctagtctaaaatgcaccgtctgtagctacactgctgattccgtgatcaactttcaccaa

SEQ ID NO: 564360 - DNA, 120 bp, Artificial Sequence
  ENSG00000169946_13 (sequence is synthesized)
cacctgttctcccatctcactcaagctgccttccgatgtaatcactgccatttcggcttccagactcagagggagttattgcagcaccaggagctccatgtccctagcggcaaacttccc

SEQ ID NO: 564361 - DNA, 120 bp, Artificial Sequence
  ENSG00000169946_14 (sequence is synthesized)
agagaaagtgacatggaacactctccaagtgcaactgaagacagcttacagccagccacagacttattgaccagaagcgaacttccccagagccaaaaggccatgcagactaaagatgcg

SEQ ID NO: 564362 - DNA, 120 bp, Artificial Sequence
  ENSG00000169946_15 (sequence is synthesized)
agctctgacacagagctggacaagtgtgagaaaaagactcagctctttctcacgaaccagagaccagagatacagcctacaacaaataaacaaagcttttcttacacaaaaataaagtct

SEQ ID NO: 564363 - DNA, 120 bp, Artificial Sequence
  ENSG00000169946_16 (sequence is synthesized)
gagccctctagcccaagacttgcctcatctccagttcagcctaatattgggccttctttccctgtgggccctttcctatctcagttttctttcccccaagatatcaccatggtccctcaa

SEQ ID NO: 564364 - DNA, 120 bp, Artificial Sequence
  ENSG00000169946_17 (sequence is synthesized)
gcttcagagatcttagctaagatgtctgaactggtgcatcggcgactgaggcatggcagtagtagctaccctcccgtcatttacagccctttgatgcccaagggggctacttgttttgag

SEQ ID NO: 564365 - DNA, 120 bp, Artificial Sequence
  ENSG00000169946_18 (sequence is synthesized)
tgtaacataacattcaataatttggataattatctagtgcacaaaaagcattattgcagcagccgatggcagcagatggctaagtccccagagttccctagtgtgtcagaaaagatgcct

SEQ ID NO: 564366 - DNA, 120 bp, Artificial Sequence
  ENSG00000169946_19 (sequence is synthesized)
gaagctttgagtcccaacactggccaaacctccataaaccttctcaacccagctgctcattctgctgatcctgagaatccacttcttcaaacatcttgcatcaattcttccactgtctta

SEQ ID NO: 564367 - DNA, 120 bp, Artificial Sequence
  ENSG00000169946_20 (sequence is synthesized)
ttccactcaaactaagaagctctccacctccagtaacaatgatgacaaaattaatggaaaacctgttgatgtgaaaaatcccagtgtccccttagtggatggggaaagtgacccaaataa

SEQ ID NO: 564368 - DNA, 120 bp, Artificial Sequence
  ENSG00000169946_21 (sequence is synthesized)
gactacctgtgaagcttgcaacattaccttcagccggcacgaaacatacatggtccacaaacagtattactgtgctacacgccacgaccctccactgaagaggtctgcttccaacaaagt

SEQ ID NO: 564369 - DNA, 120 bp, Artificial Sequence
  ENSG00000169946_22 (sequence is synthesized)
gcctgccatgcagagaaccatgcgcacacgcaagcgcagaaagatgtatgagatgtgcctacctgagcaggaacaaaggcctccactggttcagcagagatttcttgacgtagccaacct

SEQ ID NO: 564370 - DNA, 120 bp, Artificial Sequence
  ENSG00000169946_23 (sequence is synthesized)
caataatccttgtacctccactcaagaacccacagaagggctaggagagtgctaccacccaagatgtgatatctttccaggaattgtctctaaacacttggaaacttctctgacgatcaa

SEQ ID NO: 564371 - DNA, 120 bp, Artificial Sequence
  ENSG00000169946_24 (sequence is synthesized)
caagtgtgttccagtttccaaatgtgatactactcattccagtgtttcctgcctagagatggacgtgcccatagatctcagcaaaaagtgtttatctcagtctgagcggacgaccacgtc

SEQ ID NO: 564372 - DNA, 120 bp, Artificial Sequence
  ENSG00000169946_25 (sequence is synthesized)
tcccaaaaggctgctggactatcacgagtgcactgtgtgcaagatcagtttcaataaggtagaaaactatctggcccacaagcagaatttctgcccggttactgcacatcagcgtaatga

SEQ ID NO: 564373 - DNA, 120 bp, Artificial Sequence
  ENSG00000169946_26 (sequence is synthesized)
cctgggtcaactggacggcaaagtgtttccgaatccagaaagcgaacgaaacagccctgatgtcagctacgaaagaagcataataaaatgtgagaaaaatgggaatttgaagcagccttc

SEQ ID NO: 564374 - DNA, 120 bp, Artificial Sequence
  ENSG00000169946_27 (sequence is synthesized)
ccccaatggaaacttattttcatcccacctagcaaccctgcaaggcttgaaggtctttagtgaagctgctcagctcattgctacaaaagaagaaaacagacatttgtttcttccacaatg

SEQ ID NO: 564375 - DNA, 120 bp, Artificial Sequence
  ENSG00000169946_28 (sequence is synthesized)
cctttaccctggagcaataaagaaagcaaaaggagccgaccagctttctccatattatggaatcaagccaagtgattatatttctggttctcttgtcatccataacactgacatcgagca

SEQ ID NO: 564376 - DNA, 120 bp, Artificial Sequence
  ENSG00000169946_29 (sequence is synthesized)
aagcagaaatgcagaaaatgaatctcctaaaggccaggcttcctcaaatgggtgtgctgcgctgaagaaagattctctgccattgttgcccaaaaatcgaggaatggtaatagtgaatgg

SEQ ID NO: 564377 - DNA, 120 bp, Artificial Sequence
  ENSG00000169946_30 (sequence is synthesized)
tggactgaaacaagatgagagacctgctgccaacccacagcaagagaacatttcccagaatcctcagcacgaagacgaccacaaatctccctcgtggatctctgagaacccattagctgc

SEQ ID NO: 564378 - DNA, 120 bp, Artificial Sequence
  ENSG00000169946_31 (sequence is synthesized)
caatgagaatgtctcaccaggaattccctcagcagaggaacagttgtctagtatagcaaaaggtgtgaatggttccagccaggctccaaccagtgggaaatattgccggctatgtgatat

SEQ ID NO: 564379 - DNA, 120 bp, Artificial Sequence
  ENSG00000169946_32 (sequence is synthesized)
ccagttcaacaacctttcaaactttataactcacaagaagttttattgctcatcacatgcagcagaacatgtcaaatgaactaactaaacatcagtcacctttggtatcagtgtttagta

SEQ ID NO: 564380 - DNA, 120 bp, Artificial Sequence
  ENSG00000169946_33 (sequence is synthesized)
tgttgttctaaccagtccagaaaaaaaaataagctgtttgaattacatctgggcaatcaggagataattcattatggctgagttgaagacttaaggtgtaatttcattacagtccattag

SEQ ID NO: 564381 - DNA, 120 bp, Artificial Sequence
  ENSG00000169946_34 (sequence is synthesized)
taaagtgtattattggtgccattttcaaaaaaattaatttattttaccagcagtattcatagctgtggttatgttattttttatttaaaaactttatattaaagtcatttgtaatgttat

SEQ ID NO: 564382 - DNA, 120 bp, Artificial Sequence
  ENSG00000169946_35 (sequence is synthesized)
tgtatagttattgtgtagcacatatggtttgcactgtatagtagcttttaaagaaaatagtcacaatacagaaaagcattttagaaatagcttcaaaagcacttgtgtatcttgattttt

SEQ ID NO: 564383 - DNA, 120 bp, Artificial Sequence
  ENSG00000169946_36 (sequence is synthesized)
tcttatatgctgttgcagatatatgtatatgctaaaatataacttgcaaagatgttctaaatacacatgctataagttcgccttaagatttcaattcttggataatcaggctctgtttgc

SEQ ID NO: 564384 - DNA, 120 bp, Artificial Sequence
  ENSG00000169946_37 (sequence is synthesized)
actttatattttagcagatacagtctcttagtcactaggctttgcatttgtatgtagctgtatgtttccgtccattttcttaatcctgaacctgtatgttaaatgaagatggcaattttt

SEQ ID NO: 564385 - DNA, 120 bp, Artificial Sequence
  ENSG00000169946_38 (sequence is synthesized)
ttcttgtatagtacttgtattttctttcgctgatgcagctctgtctcaatttttaaacctttgctgttaaatgcaatactttataaagaatgaacaaaattactggaagcagtattgtaa

SEQ ID NO: 564386 - DNA, 120 bp, Artificial Sequence
  ENSG00000169946_39 (sequence is synthesized)
gtaatgaggtagtattaatcagttttatcttttgaaaggcacagtctaaatcgaaaccctaaactcaatgctgcaagtatgaatttaattcatatataagatctatttaaatataagagt

SEQ ID NO: 564387 - DNA, 120 bp, Artificial Sequence
  ENSG00000169946_40 (sequence is synthesized)
agcaatactgcacctggtgatcacaaagataatgttctacttctgatagaaataatttctcaacaaatgttgttactatgcatgtatatggatggaataaaattccagattgttggagaa

SEQ ID NO: 564388 - DNA, 120 bp, Artificial Sequence
  ENSG00000169946_41 (sequence is synthesized)
agattcttagaagacccttcagagtctgaagtaaagaaagttttgaacctgttttttcattctactgtagggcttctgaaaacaaggagagctggaggtgtttcagaaagatggggaacg

SEQ ID NO: 564389 - DNA, 120 bp, Artificial Sequence
  ENSG00000169946_42 (sequence is synthesized)
gtgcttctttcctctctctgcctccttcacatctcccttcaaagatgagactgggaaaagcgggtgattcatcaagaaagacatctgagatgtatgaatatcctgtaagactgacccaaa

SEQ ID NO: 564390 - DNA, 120 bp, Artificial Sequence
  ENSG00000169946_43 (sequence is synthesized)
tcctgctggcttggtgagctcatctcccagttgcctgattatcttagaacattgaagagctccagtgaagatgaagatatgtttgtttattcgaacaggatgcagtccagtcttgctgac

SEQ ID NO: 564391 - DNA, 120 bp, Artificial Sequence
  ENSG00000169946_44 (sequence is synthesized)
aagagccattatcaactagagtatcatctaaaggcaatgggaacatggaatgcagtggaggaaggatgttaaggctaccaactaagttctcaccttcagctacaagaatgagaactataa

SEQ ID NO: 564392 - DNA, 120 bp, Artificial Sequence
  ENSG00000169946_45 (sequence is synthesized)
aagggccgcttgaagatgccattgaagatgaggaagaagaatgtccatcagaggaaacagacatcatctccaaaggagactttccattggaggaaagcttttccacagaatttgggcctg

SEQ ID NO: 564393 - DNA, 120 bp, Artificial Sequence
  ENSG00000169946_46 (sequence is synthesized)
gctattgtcaataaatgacacttcatatgacacaaaatcagtcgtctggagtcccaagatctgtgttctagccatatctgatttttatctagctctatgaaaacacatgagtagcagaca

SEQ ID NO: 564394 - DNA, 120 bp, Artificial Sequence
  ENSG00000169946_47 (sequence is synthesized)
catcttaagaggagaatagattctgaagttagtagaaatatcagattccacatgtctaacgtgaacatgtgccactgtttgcctggcttagtcccattgtacatttttatctggcatccc

SEQ ID NO: 564395 - DNA, 120 bp, Artificial Sequence
  ENSG00000169946_48 (sequence is synthesized)
atcaacatgacttcgaagctggttagcaaagcagaatggtgggatttgcctcagacccactgacacagaatctctgtgtgtggatcctaggatgctgtggagtaagtaacaggttcccca

SEQ ID NO: 564396 - DNA, 120 bp, Artificial Sequence
  ENSG00000169946_49 (sequence is synthesized)
gatcattgaaacaaccaccaaatgaaaaatcatccgatatacccaccttaggcccagattgcacagcgcagctgttggtactgactagatgaaaagcttcactgtacattgggctgtcca

SEQ ID NO: 564397 - DNA, 67 bp, Artificial Sequence
  ENSG00000169946_50 (sequence is synthesized)
agctggcttcacccagtggatcccgcattggggcgcaggtggagctgcctgccagtctcgtagagca

SEQ ID NO: 564398 - DNA, 83 bp, Artificial Sequence
  ENSG00000169946_51 (sequence is synthesized)
gggtggtcgatgggactgggcgccgtagagcaggcggcagcgctcgtcggggaggctccggctgcgcaggagcccacagcgtg

SEQ ID NO: 564399 - DNA, 120 bp, Artificial Sequence
  ENSG00000169946_52 (sequence is synthesized)
ggcccaggtgctaagcccctcactgcctagggcgggcggggccggctggctggccgctctgagtgcagggcccgtggagcccacgcccacccggaactggcactgacccgcaagcgctgt

SEQ ID NO: 564400 - DNA, 87 bp, Artificial Sequence
  ENSG00000169946_53 (sequence is synthesized)
gcagggcccgtggagcccacgcccacccggaactggcactgacccgcaagcgctgtgcgcagccgcggttcctgcccgcgcctctac

SEQ ID NO: 564401 - DNA, 90 bp, Artificial Sequence
  ENSG00000169946_54 (sequence is synthesized)
gccaaagtgggagcccaggcagaggaggactcgagaacgagcaagggctgcgagcactcaaactgtgtttacagagcatcagagaaaaaa

SEQ ID NO: 564402 - DNA, 120 bp, Artificial Sequence
  ENSG00000169946_55 (sequence is synthesized)
cacagctattgtcaatagtaagtgctcagtgctgtgtagcccagctttagaggtgatgggaatttatgggagaaaaaaatgtctactgacaagaaaccaggaacagacctttttccttca

SEQ ID NO: 564403 - DNA, 84 bp, Artificial Sequence
  ENSG00000169946_56 (sequence is synthesized)
ccacctcagcctcccaagtagctgggcctacaagtcttcttggcttcaagtcttcttcctcagcgctgcgatctcggctcactg

SEQ ID NO: 564404 - DNA, 120 bp, Artificial Sequence
  ENSG00000169946_57 (sequence is synthesized)
ggcccaagcgatcctcccaccacagcctcctgagtggctgggactagaggaaacattcaaatcagttgacaaagaatggctgatgctgaaatgacttgctgtctcggtgtggagtggaaa

SEQ ID NO: 564405 - DNA, 120 bp, Artificial Sequence
  ENSG00000169946_58 (sequence is synthesized)
caatcctgctaaatttcatattgcagtgacaccaaagcaaaggacagatctcaagacaacttttattgaaatggaaaacagttaattttaactaaagaataagagaaatgccaacagaaa

SEQ ID NO: 564406 - DNA, 120 bp, Artificial Sequence
  ENSG00000169946_59 (sequence is synthesized)
taaaagacccagaaatcagaggacaatgtgcgaaactctatatactgagacacacaaattgaaacaacccaaataaatgccaaatgcacaagaaaataaatgtaacttatcagaggttaa

SEQ ID NO: 564407 - DNA, 120 bp, Artificial Sequence
  ENSG00000169946_60 (sequence is synthesized)
gtaaaagttcgcgcctctgcggcgggcggccgtgcgtctctgccctgcgggcgcgggctggtggctggcaggtcgtgtcctgggacttcgggcgggtccggctcacgccgccaggacgct

SEQ ID NO: 564408 - DNA, 120 bp, Artificial Sequence
  ENSG00000169946_61 (sequence is synthesized)
cagccgagcggggattcgggtggtgtctggccctggtggcgcgcggagtcctccctgggaggggccgccagtcacttcccagcgcggaagctggccgcttgaagatgccattgaagatga

SEQ ID NO: 564409 - DNA, 120 bp, Artificial Sequence
  ENSG00000169946_62 (sequence is synthesized)
ctggagttgagacagacgactgggatggaccagacatgcaggagaatgccttgtggagataaaggcagagaccccagtgatacttctacatgccaaggaaagctaaagattgccagtaaa

SEQ ID NO: 564410 - DNA, 120 bp, Artificial Sequence
  ENSG00000169946_63 (sequence is synthesized)
ccaccagaagctagaggagagagacatggaaccgatacttcgtcatggccctcggagggaaccattgccgttgacaccttgatcttggacttttaacctccagaactgtgaaacaatgaa

SEQ ID NO: 564411 - DNA, 120 bp, Artificial Sequence
  ENSG00000169951_0 (sequence is synthesized)
ctttctcgggcgcaggaggttccgcaggcccaggccaggccaggggaggcagccgatccgtcgtcggggttgacagttaccatggcgccgcctctggccccgctccctccccgggaccca

SEQ ID NO: 564412 - DNA, 120 bp, Artificial Sequence
  ENSG00000169951_1 (sequence is synthesized)
aacggggccggacccgagtggagggagccgggggctgtgagcttcgcggacgtggccgtgtacttctgccgggaggagtggggctgcttgcggccagcgcagagggccctgtaccgggac

SEQ ID NO: 564413 - DNA, 120 bp, Artificial Sequence
  ENSG00000169951_2 (sequence is synthesized)
gtgatgcgggagacctacggccacctgagcgctctcggaatcggaggcaacaagccagctctcatctcctgggtggaggaggaggccgaactgtggggtccggctgcccaggatccggag

SEQ ID NO: 564414 - DNA, 120 bp, Artificial Sequence
  ENSG00000169951_3 (sequence is synthesized)
gtggcgaaatgtcagacacaaacggacccagcagattccagaaacaagaaaaaggaaagacaaagggaagggacgggagccctggagaagcccgaccctgtggccgccgggtctcctggg

SEQ ID NO: 564415 - DNA, 120 bp, Artificial Sequence
  ENSG00000169951_4 (sequence is synthesized)
ctgaagtctccccaagccccctcggccgggcccccttatggttgggagcagctgtccaaggcaccgcaccggggacgcccctccctctgtgcccacccccctgtcccccgagctgaccag

SEQ ID NO: 564416 - DNA, 120 bp, Artificial Sequence
  ENSG00000169951_5 (sequence is synthesized)
cgtcatggctgctacgtgtgcgggaagagctttgcctggcgctccacactggtggagcacgtctacagtcacactggcgagaagcccttccactgcactgactgcggcaagggcttcggc

SEQ ID NO: 564417 - DNA, 120 bp, Artificial Sequence
  ENSG00000169951_6 (sequence is synthesized)
cacgcttcctccctgagcaaacaccgggccatccatcgtggggagcggccccaccgctgtctggagtgtggccgggccttcacgcagcgctcggcgctgacttcgcacctgcgcgtccac

SEQ ID NO: 564418 - DNA, 120 bp, Artificial Sequence
  ENSG00000169951_7 (sequence is synthesized)
accggcgagaaaccctatggctgcgccgactgtggccgccgcttcagccagagctctgccctctaccagcaccggcgcgtgcacagcggcgagacccccttcccctgcccggactgtggc

SEQ ID NO: 564419 - DNA, 120 bp, Artificial Sequence
  ENSG00000169951_8 (sequence is synthesized)
cgcgccttcgcctacccctcggacctgcggcgccacgtgcgcacccacaccggcgagaagccctacccgtgcccggactgcgggcgctgcttccgccagagctcggagatggcagcccac

SEQ ID NO: 564420 - DNA, 120 bp, Artificial Sequence
  ENSG00000169951_9 (sequence is synthesized)
aggcgcacccacagcggcgagaagccctacccctgcccgcagtgcggccgccgctttggccagaagtcagccgtggccaaacaccagtgggttcatcggcccggggccgggggccacagg

SEQ ID NO: 564421 - DNA, 120 bp, Artificial Sequence
  ENSG00000169951_10 (sequence is synthesized)
ggccgggtcgccgggcgtctgtctgtgaccctgacccctggccacggagacctggacccgcccgtgggcttccagctgtacccggagatattccaggagtgtgggtgacggccttaaaag

SEQ ID NO: 564422 - DNA, 120 bp, Artificial Sequence
  ENSG00000169951_11 (sequence is synthesized)
ccctggggtgcggacagtctgatcttgggcccttagcagcctcctctgccagcaccttgctccccactgcccagggctctccaaggccccctctactgaggcagggctgagttgagaacc

SEQ ID NO: 564423 - DNA, 120 bp, Artificial Sequence
  ENSG00000169951_12 (sequence is synthesized)
cccagacctacataaggggaaccaaaagctgtttctcagcccagaggtgctaagaggactgaggtagaggagaaccttgttttacccattgtctttttaaattttttatcattattttta

SEQ ID NO: 564424 - DNA, 120 bp, Artificial Sequence
  ENSG00000169951_13 (sequence is synthesized)
attttttatcattatttttattcttgtgaccctcccagaacacaatactcattgtctttttatttatttatttatttatttctgagacagcttcctgctctgtcacccaggctggagtgc

SEQ ID NO: 564425 - DNA, 120 bp, Artificial Sequence
  ENSG00000169951_14 (sequence is synthesized)
ctgcagcctcaacctgcagtgctcaaggaatcctctcccatcagccttccaaatatctgagactacaggcgggcaacactacggccagctaatttttaaattttacatagagatgaggtt

SEQ ID NO: 564426 - DNA, 120 bp, Artificial Sequence
  ENSG00000169951_15 (sequence is synthesized)
tttttaaattttacatagagatgaggttctcactgttgtccaggctggtctcaaactccttggctgaagtgatcctgtcgtctcggcttccgcaagtgctgggattacaggcgtgagcta

SEQ ID NO: 564427 - DNA, 65 bp, Artificial Sequence
  ENSG00000169951_16 (sequence is synthesized)
aggcgtgagctaccaccatgcctggcttccattgtctttgtgtgtgtgtgtgtgcactgcaacct

SEQ ID NO: 564428 - DNA, 120 bp, Artificial Sequence
  ENSG00000169951_17 (sequence is synthesized)
tagctgggactacaggcacccaccacctccattgtctttttactgcccaagttaaaatcctgtgactgtgtactggatctggcctgcggttgtcatatttattgatctgagtccaggcag

SEQ ID NO: 564429 - DNA, 120 bp, Artificial Sequence
  ENSG00000169951_18 (sequence is synthesized)
gcagtgtttttaagtgatatgagttagtagtgaaaattgaaaaggatattttacaaccaaatacaggttttctggtgtcttttgaaaaatccaaagatttggcaactcgacctaggctcc

SEQ ID NO: 564430 - DNA, 120 bp, Artificial Sequence
  ENSG00000169951_19 (sequence is synthesized)
gacaaaaccacagttgttgggagctgagccggagccagaactcacaattcaccgtggcccggccacccatccccaccactcccgtgggctcctgaccaagcaccacgtgccattcatcat

SEQ ID NO: 564431 - DNA, 120 bp, Artificial Sequence
  ENSG00000169951_20 (sequence is synthesized)
ggcttgcttttagtgtttttggtgtttatcttaaagtacagcgaagaagaaagggaagtatttcttagacccatgtctctgtccaaataggcctttccatctggcatttcccgctcattt

SEQ ID NO: 564432 - DNA, 120 bp, Artificial Sequence
  ENSG00000169951_21 (sequence is synthesized)
atatgacttgctgagttcctatggtcatttgagtttgcaaacagtggtctgtagcactcaggttttctggagttggagagaaagggtggcaagagagaagtaaaagttggttttatttta

SEQ ID NO: 564433 - DNA, 120 bp, Artificial Sequence
  ENSG00000169951_22 (sequence is synthesized)
attttggatgagggtacggagagaacgcggactggagataccgggggcgttgtcttgggcacgactgcgtaggggcaaaggtcgagtacccgcgccgccgccattttttatgagggcata

SEQ ID NO: 564434 - DNA, 120 bp, Artificial Sequence
  ENSG00000169951_23 (sequence is synthesized)
gctcgcctgagccctgcgcccccacaggccctgccgcgcctctgggagctgcgcgtgaagttgggggccccggggccgggcaggtggcctccccgcagcgtggggtttgcgttcttcttc

SEQ ID NO: 564435 - DNA, 120 bp, Artificial Sequence
  ENSG00000169953_0 (sequence is synthesized)
aaccattgtgatggtctagataagtgtacatgcttaggccttctgaagcagcatttgaagctgcagtcctgaaaaccatgcaggccggaagagtagataaagaaatatttatttgagatg

SEQ ID NO: 564436 - DNA, 120 bp, Artificial Sequence
  ENSG00000169953_1 (sequence is synthesized)
gcacatgtttcttcagaaactcaagatgtttcccccaaagatgaattaactgcttcagaagcctccactaggtctccattgtgtgaacacaccttccctggggactcagacttacggtca

SEQ ID NO: 564437 - DNA, 120 bp, Artificial Sequence
  ENSG00000169953_2 (sequence is synthesized)
atgattgaagaacatgcttttcaggttttgtcacaaggatccttgttagaaagtccaagttacacagtttgtgtctctgagccagataaagatgatgattttctttctctgaactttccc

SEQ ID NO: 564438 - DNA, 120 bp, Artificial Sequence
  ENSG00000169953_3 (sequence is synthesized)
aggaaactttggaaaatagtggaaagtgaccaattcaagtctatttcatgggatgagaatggaacttgcatagtgattaatgaagaactcttcaagaaagaaattttggaaacaaaggct

SEQ ID NO: 564439 - DNA, 120 bp, Artificial Sequence
  ENSG00000169953_4 (sequence is synthesized)
ccttacagaatatttcaaactgatgctatcaaaagttttgttcgacagctcaacctttatggatttagtaaaattcaacagaattttcaaagatctgcctttctagccacctttctgtca

SEQ ID NO: 564440 - DNA, 120 bp, Artificial Sequence
  ENSG00000169953_5 (sequence is synthesized)
gaagagaaagaatcgtctgtcttaagcaagttaaagttctattataatccaaatttcaagcgtggctatccccaacttttagtaagagtgaagagaagaattggtgttaaaaatgcttca

SEQ ID NO: 564441 - DNA, 120 bp, Artificial Sequence
  ENSG00000169953_6 (sequence is synthesized)
tatctactttattcaacgaagatttcaacaagaagcattttagagcaggggctaacatggagaatcataattctgccttagctgctgaagctagtgaagaaagtttattttcagcctcta

SEQ ID NO: 564442 - DNA, 120 bp, Artificial Sequence
  ENSG00000169953_7 (sequence is synthesized)
aaaatttaaatatgcctctaacaagggaatcttctgtcagacagataattgcaaattcatctgtccccattagaagtggtttccctcctccttcaccttcaacctcagttggaccatcag

SEQ ID NO: 564443 - DNA, 120 bp, Artificial Sequence
  ENSG00000169953_8 (sequence is synthesized)
aacaaattgcaacagatcaacatgctattttaaatcagttgaccactattcatatgcactctcatagtacctacatgcaagcaaggggccacattgtgaattttattacaaccacaactt

SEQ ID NO: 564444 - DNA, 120 bp, Artificial Sequence
  ENSG00000169953_9 (sequence is synthesized)
ctcaataccacatcatatctcccttacaaaatggttattttgggctgacagtggaaccatctgctgttcccacacgatatcctctggtatcagtcaatgaggctccatatcgtaacatgc

SEQ ID NO: 564445 - DNA, 120 bp, Artificial Sequence
  ENSG00000169953_10 (sequence is synthesized)
taccagcaggcaacccgtggttgcaaatgcctacgatcgctgatagatcagctgcccctcattccaggctagctcttcaaccatcaccactggacaaatatcaccctaattacaactgat

SEQ ID NO: 564446 - DNA, 120 bp, Artificial Sequence
  ENSG00000169953_11 (sequence is synthesized)
ctgccattaaaagaggaccagattatgaatgacaacagagactaacatttacattgacaaaaaaccctaaaaatttctgcaattatcttattgaacaataaaattgcatgtttacttcta

SEQ ID NO: 564447 - DNA, 120 bp, Artificial Sequence
  ENSG00000169953_12 (sequence is synthesized)
acatttaaaagatgagtcgaattactcataatccttagaagttagcttgtccgcatctgaaaattcacttttaccttgaagttcaatctgtctctgggaaagactagattggaagaataa

SEQ ID NO: 564448 - DNA, 120 bp, Artificial Sequence
  ENSG00000169953_13 (sequence is synthesized)
aattcaagaatgtgatgttttagtaatggaaaagccaagagcgtcaggtggcaaaagtccttctgttactcaagaaaatgctctgaaaaattccttttctcttttttttttgtaaagatt

SEQ ID NO: 564449 - DNA, 120 bp, Artificial Sequence
  ENSG00000169953_14 (sequence is synthesized)
aactccacctcaccaccacaatgaggtatttttctcagcaattgacacctgtttactcagttactccctgtaactatgttatgctgtgaagtaggcaatacagttgttaaagaagaataa

SEQ ID NO: 564450 - DNA, 120 bp, Artificial Sequence
  ENSG00000169953_15 (sequence is synthesized)
ggctcccatttctacttggagtggagattcctggttgctgtgatgaaatgggatacactggggatccagctgcacaacttttcggaagcagcattcactgtggatttggtatattatgca

SEQ ID NO: 564451 - DNA, 120 bp, Artificial Sequence
  ENSG00000169953_16 (sequence is synthesized)
gcttttggtgtcacaggctaaggtctgacaagattcaccatgcagttttctgggatagcagaaaatgaacatggatttggacagccagattcctcaggatggaaacctagtggtgccatc

SEQ ID NO: 564452 - DNA, 120 bp, Artificial Sequence
  ENSG00000169953_17 (sequence is synthesized)
taaccatatacgtatatttccaagttgtgcataagtagaaaaagtttagaatccatcatctaaaaagggaatcctgatttcctttcctggcagaccatgacagaaagacaaaggtcattt

SEQ ID NO: 564453 - DNA, 120 bp, Artificial Sequence
  ENSG00000169953_18 (sequence is synthesized)
cacctatatccacatgctattaactttttagttctcaaactgggttttcagaaggtagtgtgatagacatggttaaatggttaacaggaagaatgtttaaaaaaaaaattccggctgggg

SEQ ID NO: 564454 - DNA, 80 bp, Artificial Sequence
  ENSG00000169953_19 (sequence is synthesized)
ttaacaggaagaatgtttaaaaaaaaaattccggctggggtggtggctcaggcctgtaatcacagcattttgggaggcca

SEQ ID NO: 564455 - DNA, 120 bp, Artificial Sequence
  ENSG00000169953_20 (sequence is synthesized)
gtgacagagtaagacttcatcttaaagaaatccacaacaataaaaaggctaatgccagacacaataaaaaatgaaaagaataacttgggtgaacagcaaggcaagaaagaaaaaaggaaa

SEQ ID NO: 564456 - DNA, 120 bp, Artificial Sequence
  ENSG00000169953_21 (sequence is synthesized)
ctccctcacataaatgcaattaatatccgtgcgtgatatatataaagcaaacataagactgaaggatggagcaagaagataaactgattgaagcatgtctatagggagccttcctgaacc

SEQ ID NO: 564457 - DNA, 120 bp, Artificial Sequence
  ENSG00000169953_22 (sequence is synthesized)
acctttcttgagctctgattatgtggcagaaagggaagatttttgaaatttgatacgcttcaccaaaatgaaactttccagatcttcaacttatgaaaacaggtatttatgttgcaactt

SEQ ID NO: 564458 - DNA, 120 bp, Artificial Sequence
  ENSG00000169955_0 (sequence is synthesized)
gttttcaaggccggcgcctgtagccgcaacggccattttggattagggcaaggagagaactgggcctggagcgggggcgcggggaggggggcgtcgtcgtgggtacaattgcgcaggggc

SEQ ID NO: 564459 - DNA, 120 bp, Artificial Sequence
  ENSG00000169955_1 (sequence is synthesized)
aaaggtcgagaggtcgcgctgccgccgttttatttgaagacatcgtccagttctgaccatggactcgcagccatcggcccttagtttccatcccctctagtgggccttcgggggctctac

SEQ ID NO: 564460 - DNA, 120 bp, Artificial Sequence
  ENSG00000169955_2 (sequence is synthesized)
tgacgtccctccttcccttggtaccgggccggggaagtgttctcgggcgcgggaggttccgcatgcccaggcctggccaggggagatgaccgatccgtcgctggggctgacagtccccat

SEQ ID NO: 564461 - DNA, 120 bp, Artificial Sequence
  ENSG00000169955_3 (sequence is synthesized)
ggcgccgcctctggccccgctccctccccgggacccaaacggggcgggatccgagtggagaaagcccggggccgtgagcttcgccgacgtggccgtgtacttctcccgggaggagtgggg

SEQ ID NO: 564462 - DNA, 120 bp, Artificial Sequence
  ENSG00000169955_4 (sequence is synthesized)
ctgcctgcggcccgcgcagagggccctgtaccgggacgtgatgcgggagacctacggccacctgggcgcgctcggagtcggaggcagcaagccggcgctcatctcctgggtggaggagaa

SEQ ID NO: 564463 - DNA, 120 bp, Artificial Sequence
  ENSG00000169955_5 (sequence is synthesized)
ggccgaactgtgggatccggctgcccaggatccggaggtggcgaagtgtccgacagaagcggacccagattccagaaacaaggaagaggaaagacaaagggaagggacgggagccctgga

SEQ ID NO: 564464 - DNA, 120 bp, Artificial Sequence
  ENSG00000169955_6 (sequence is synthesized)
agctgtccaaggcccggcgccggagtcgcccccgcttttttgcccacccccctgtcccccgagctgaccagcgtcacggctgctacgtgtgcgggaagagcttcgcctggcgctccacac

SEQ ID NO: 564465 - DNA, 120 bp, Artificial Sequence
  ENSG00000169955_7 (sequence is synthesized)
tggtggagcacatttacagccacaggggcgagaagcccttccactgcgcagactgcggcaagggcttcggccacgcttcctccctgagcaaacaccgggccatccatcgtggggagcggc

SEQ ID NO: 564466 - DNA, 120 bp, Artificial Sequence
  ENSG00000169955_8 (sequence is synthesized)
cccaccgctgtcccgagtgtggtcgggccttcatgcgccgcacggcgctgacttctcacctgcgcgttcacactggcgagaagccctaccgctgcccgcagtgtggccgctgcttcggcc

SEQ ID NO: 564467 - DNA, 120 bp, Artificial Sequence
  ENSG00000169955_9 (sequence is synthesized)
tgaagaccggcatggccaagcaccaatgggtccatcggcccgggggcgaggggcgtaggggccggcgccctggggggctgtctgtgaccctgactcctgtccgcggggacctggacccgc

SEQ ID NO: 564468 - DNA, 120 bp, Artificial Sequence
  ENSG00000169955_10 (sequence is synthesized)
ctgtgggcttccagctgtatccagagatattccaggaatgtgggtgacggcctaaaaagtgaccatctagacattgtgggcggcccgagatgggctcaggggcccgaacctctgcagcgg

SEQ ID NO: 564469 - DNA, 120 bp, Artificial Sequence
  ENSG00000169955_11 (sequence is synthesized)
cctgcagggaggtcccagaatccaccgcaagagctggcctggggtgcggacagtctgatcttgggctctcagcagcctcttctgccagcaccttgctccccgctgccctgggctctccaa

SEQ ID NO: 564470 - DNA, 120 bp, Artificial Sequence
  ENSG00000169955_12 (sequence is synthesized)
cctgcttgcctgggccctgcgcctccacaggccctgccgcgcctctgggagctgcgtgtggagttgggggccccggggccgggcaggcggcctcctcgcagcgtggggtttgcgttcttc

SEQ ID NO: 564471 - DNA, 120 bp, Artificial Sequence
  ENSG00000169955_13 (sequence is synthesized)
acaggcgtgagccacctcacctggccttttcttttttattctttgaccttcccacaagacaatacccattgtctgttttttttgtttatttatttacttattaagacagcatcttgctcc

SEQ ID NO: 564472 - DNA, 120 bp, Artificial Sequence
  ENSG00000169955_14 (sequence is synthesized)
tttatttatttacttattaagacagcatcttgctcctcacccaggctggaatgcagtggtgtgaactgggctcactgcagcctagacctgctgggctcaaggaatcctcctgccccagcc

SEQ ID NO: 564473 - DNA, 120 bp, Artificial Sequence
  ENSG00000169955_15 (sequence is synthesized)
tctcagatggctgtgactacaggtgggcaacactatgcctggctaatttttaaatttttttgcagagatggggttcccactatgttgatcaggctggtctcaaactcctcggttcaagca

SEQ ID NO: 564474 - DNA, 120 bp, Artificial Sequence
  ENSG00000169955_16 (sequence is synthesized)
ctcccaaagtgctgggattacaggggagccactgcactggccttcattgtctttttgctgcacaacctaaaaaaccagtgaccctgtattggatctcgcctgcagttgctgtattgattt

SEQ ID NO: 564475 - DNA, 120 bp, Artificial Sequence
  ENSG00000169955_17 (sequence is synthesized)
gttgctgtattgatttgggcccaggcagtgtttttaagtgataagaattagtgatgaagatctaaagggatattttgcaccaaaatccaggtttctggcatctcttgaaaaatccaaaga

SEQ ID NO: 564476 - DNA, 120 bp, Artificial Sequence
  ENSG00000169955_18 (sequence is synthesized)
tttcgcaagttcacctaggctctcagaaagtcgcagttgttgggagttgggccggagccagaactcccaacttactgtggtccggccactcatcccatcagctcctgaccaagcatgagt

SEQ ID NO: 564477 - DNA, 120 bp, Artificial Sequence
  ENSG00000169955_19 (sequence is synthesized)
agccattcatcatggcttgcttttagtgtttttggtgtttatcttaaagtacagcaaagaagaaagggaagtatttcttgaacccatgtctgtgtcaaaacagtccttgcatctttcctg

SEQ ID NO: 564478 - DNA, 120 bp, Artificial Sequence
  ENSG00000169955_20 (sequence is synthesized)
tctttaggtacgcaccatctttgctgtctttaagtatgtgccatcatgggcagagggggctaggccaggaacacctggtgttagatttgtagccagtggcaaccgtacccatctgtatcc

SEQ ID NO: 564479 - DNA, 120 bp, Artificial Sequence
  ENSG00000169955_21 (sequence is synthesized)
ccaagttctacacggaatccctccagcacttcacgactccattatccagctaccactaattcctttgtgggcagagtccagccacgggcagcccctgccctgcctctggtcaggacaaca

SEQ ID NO: 564480 - DNA, 120 bp, Artificial Sequence
  ENSG00000169955_22 (sequence is synthesized)
cctgcccaaggagagcaagggcctgtgacctctgctggcctgtgcgccctcacctgtcacccagctcagccctgtgtctggcctacccagggaggaaggaaccagatttatcagcctgaa

SEQ ID NO: 564481 - DNA, 120 bp, Artificial Sequence
  ENSG00000169955_23 (sequence is synthesized)
aggaggtagaagttttggagaaaagacactgttcgggtgtcaagtaatgaactgactttattcgaacctcatctccaatccaatcccaccgtggtctctctctccctcagcttttctggg

SEQ ID NO: 564482 - DNA, 120 bp, Artificial Sequence
  ENSG00000169955_24 (sequence is synthesized)
gcgggttgactcgtgtgtcactttatcacaggggcacatggggtgagaagaggaaccttggcagtaggagatacctttgtaccaggttttaatttccagtgtacatctcagtcccctccc

SEQ ID NO: 564483 - DNA, 120 bp, Artificial Sequence
  ENSG00000169955_25 (sequence is synthesized)
ctaaccctcaacacagcctggggaaagcccagcttgcaacaccagttctcagcccagactgacagccagatagatcttggccctgagtttgccaattaaagatgccgtgattattaccta

SEQ ID NO: 564484 - DNA, 120 bp, Artificial Sequence
  ENSG00000169955_26 (sequence is synthesized)
aaaactaagctatgcccagaccaccttgggcacatgtcgtgaggacttcctgaggctgtcacgcgcgcgtcctcaaccttggcaagtaattgagatctgtctcggaatttctgggttcac

SEQ ID NO: 564485 - DNA, 120 bp, Artificial Sequence
  ENSG00000169955_27 (sequence is synthesized)
actttttgctctcaacattgggaagaggctgctgtcgccgtttctgaggacaaaacgagacagtgatgggctgaagtccgattataaaaaggtccagagacgaaaactaacttctgagtt

SEQ ID NO: 564486 - DNA, 120 bp, Artificial Sequence
  ENSG00000169955_28 (sequence is synthesized)
gggctgaggtgagaaccccccagacctccatacagggaagcaaaagctgtttctcctcccagagatgctaagaggattgaggtagagaagaaccttgttttctctgttgtctttttcttt

SEQ ID NO: 564487 - DNA, 80 bp, Artificial Sequence
  ENSG00000169957_0 (sequence is synthesized)
cgcggctcggggcaaccgaggccgggtcgcgggatcggccgccatcgccgccgccgctgcactgggagcccgcggggatg

SEQ ID NO: 564488 - DNA, 120 bp, Artificial Sequence
  ENSG00000169957_1 (sequence is synthesized)
tcgccgccgccgctgcactgggagcccgcggggatggagcgggaggcgttgccgtggggcctcgagccccaggatgtgcagagttctgacgaaatgaggagccccgaagggtacctcaga

SEQ ID NO: 564489 - DNA, 120 bp, Artificial Sequence
  ENSG00000169957_2 (sequence is synthesized)
ggcaacatgagtgagaatgaggaagaggaaatttctcagcaagaaggcagtggggactatgaagtcgaagagataccatttgggcttgaaccccagagccctgggtttgagccacaaagc

SEQ ID NO: 564490 - DNA, 120 bp, Artificial Sequence
  ENSG00000169957_3 (sequence is synthesized)
ccagagtttgaaccccaaagccccagatttgagcctgaaagcccggggtttgagtcccgaagccctgggcttgtgcccccaagccctgagtttgcacccagaagccctgaatcagattct

SEQ ID NO: 564491 - DNA, 120 bp, Artificial Sequence
  ENSG00000169957_4 (sequence is synthesized)
cagagccctgagtttgaatcccagagccctaggtatgaaccccaaagccctggctatgaacctcggagccccgggtatgaaccccggagccctggctatgaatctgagagctctagatat

SEQ ID NO: 564492 - DNA, 120 bp, Artificial Sequence
  ENSG00000169957_5 (sequence is synthesized)
gaatcccagaacactgagctcaaaacccaaagcccagaatttgaagctcaaagttccaaattccaggaaggtgcggagatgcttctgaaccccgaggaaaagagtcctttgaatatctcc

SEQ ID NO: 564493 - DNA, 120 bp, Artificial Sequence
  ENSG00000169957_6 (sequence is synthesized)
gtaggagttcaccccctggactccttcactcaggggtttggggagcagcccacaggggacctgcccatagggccaccttttgagatgcccacaggggccctgctgtctacaccgcagttt

SEQ ID NO: 564494 - DNA, 120 bp, Artificial Sequence
  ENSG00000169957_7 (sequence is synthesized)
gagatgcttcagaatcccctgggtctcacaggagcccttcgaggtccaggtcggcggggtggccgggccaggggtgggcagggccctcggcctaacatctgtggcatctgcgggaagagc

SEQ ID NO: 564495 - DNA, 120 bp, Artificial Sequence
  ENSG00000169957_8 (sequence is synthesized)
ttcgggcggggctccaccctgatccagcaccagcgcatccacaccggtgagaagccctacaaatgtgaggtctgcagcaaggccttctcccagagctctgacctcatcaaacaccagcgc

SEQ ID NO: 564496 - DNA, 120 bp, Artificial Sequence
  ENSG00000169957_9 (sequence is synthesized)
ggcgagcggccctacaaatgtccccgttgcggcaaggccttcgccgacagctcttacctgcttcgccaccagcgcactcactctggccagaagccctacaagtgcccacattgtggcaag

SEQ ID NO: 564497 - DNA, 120 bp, Artificial Sequence
  ENSG00000169957_10 (sequence is synthesized)
gccttcggcgacagctcctacctcctgcgacaccagcgcacccacagccacgagcggccctacagctgcaccgagtgcggcaagtgctatagccagaactcgtccctgcgcagccatcag

SEQ ID NO: 564498 - DNA, 120 bp, Artificial Sequence
  ENSG00000169957_11 (sequence is synthesized)
agggtgcacaccggtcagaggcccttcagctgtggcatctgcggcaagagcttctcccagcggtcggcccttatcccccatgcccgcagccacgcccgggagaagcccttcaagtgccct

SEQ ID NO: 564499 - DNA, 120 bp, Artificial Sequence
  ENSG00000169957_12 (sequence is synthesized)
gagtgcggcaagcgctttggccagagctcggtgctggccatccacgcccgcacccacctgccaggccgcacctacagctgccccgactgcggcaagaccttcaatcgctcctccactctc

SEQ ID NO: 564500 - DNA, 120 bp, Artificial Sequence
  ENSG00000169957_13 (sequence is synthesized)
atccagcaccagcgctcccacacgggcgagcggccctacaggtgcgccgtgtgcggcaagggcttctgccgctcctccacgcttctgcagcatcaccgggtccacagtggcgagcggcct

SEQ ID NO: 564501 - DNA, 120 bp, Artificial Sequence
  ENSG00000169957_14 (sequence is synthesized)
tacaagtgcgatgactgcggaaaggccttctcccagagctccgacctcatccgccaccagcggacccacgcggcgggccggcgctgacctggggccccagcaggggtgggaggtgtgggc

SEQ ID NO: 564502 - DNA, 120 bp, Artificial Sequence
  ENSG00000169957_15 (sequence is synthesized)
agaagataaggggccagggagctagaggaacctttagggaggatagtggagaagccgcaggagaatggaggagctgaggatgctggaagaagagaaccagggtggaggaagtgacatgcc

SEQ ID NO: 564503 - DNA, 120 bp, Artificial Sequence
  ENSG00000169957_16 (sequence is synthesized)
ctggagacttgtgggaagtgggttggagggaggccaggccggcagcgggaggccctgggagaaatggagagaggtcagcggagggctggcctcagccgcggctccttggtgggtgcctgg

SEQ ID NO: 564504 - DNA, 120 bp, Artificial Sequence
  ENSG00000169957_17 (sequence is synthesized)
cttggcaactgctagagcagggaggggggagggcaggggattacctaattagagtgggttagcttagattggtagctgctgaaactctcgttgagtcaggagcgggtaaaaggtaggtgg

SEQ ID NO: 564505 - DNA, 120 bp, Artificial Sequence
  ENSG00000169957_18 (sequence is synthesized)
ggtggggagtggggccccggggtggggcctgggcctctgcgtgcaaaccccagcctccctcttcttcctcaggctttggagcccctgagtttgagttcaataaaaactttatgtggtaaa

SEQ ID NO: 564506 - DNA, 120 bp, Artificial Sequence
  ENSG00000169962_0 (sequence is synthesized)
gctcactccatgtgaggccccagtcggggcagccacctgccgtgcctgttggaagttgcctctgccatgctgggccctgctgtcctgggcctcagcctctgggctctcctgcaccctggg

SEQ ID NO: 564507 - DNA, 120 bp, Artificial Sequence
  ENSG00000169962_1 (sequence is synthesized)
acgggggccccattgtgcctgtcacagcaacttaggatgaagggggactacgtgctgggggggctgttccccctgggcgaggccgaggaggctggcctccgcagccggacacggcccagc

SEQ ID NO: 564508 - DNA, 120 bp, Artificial Sequence
  ENSG00000169962_2 (sequence is synthesized)
agccctgtgtgcaccaggttctcctcaaacggcctgctctgggcactggccatgaaaatggccgtggaggagatcaacaacaagtcggatctgctgcccgggctgcgcctgggctacgac

SEQ ID NO: 564509 - DNA, 120 bp, Artificial Sequence
  ENSG00000169962_3 (sequence is synthesized)
ctctttgatacgtgctcggagcctgtggtggccatgaagcccagcctcatgttcctggccaaggcaggcagccgcgacatcgccgcctactgcaactacacgcagtaccagccccgtgtg

SEQ ID NO: 564510 - DNA, 120 bp, Artificial Sequence
  ENSG00000169962_4 (sequence is synthesized)
ctggctgtcatcgggccccactcgtcagagctcgccatggtcaccggcaagttcttcagcttcttcctcatgccccaggtcagctacggtgctagcatggagctgctgagcgcccgggag

SEQ ID NO: 564511 - DNA, 120 bp, Artificial Sequence
  ENSG00000169962_5 (sequence is synthesized)
accttcccctccttcttccgcaccgtgcccagcgaccgtgtgcagctgacggccgccgcggagctgctgcaggagttcggctggaactgggtggccgccctgggcagcgacgacgagtac

SEQ ID NO: 564512 - DNA, 120 bp, Artificial Sequence
  ENSG00000169962_6 (sequence is synthesized)
ggccggcagggcctgagcatcttctcggccctggccgcggcacgcggcatctgcatcgcgcacgagggcctggtgccgctgccccgtgccgatgactcgcggctggggaaggtgcaggac

SEQ ID NO: 564513 - DNA, 120 bp, Artificial Sequence
  ENSG00000169962_7 (sequence is synthesized)
gtcctgcaccaggtgaaccagagcagcgtgcaggtggtgctgctgttcgcctccgtgcacgccgcccacgccctcttcaactacagcatcagcagcaggctctcgcccaaggtgtgggtg

SEQ ID NO: 564514 - DNA, 120 bp, Artificial Sequence
  ENSG00000169962_8 (sequence is synthesized)
gccagcgaggcctggctgacctctgacctggtcatggggctgcccggcatggcccagatgggcacggtgcttggcttcctccagaggggtgcccagctgcacgagttcccccagtacgtg

SEQ ID NO: 564515 - DNA, 120 bp, Artificial Sequence
  ENSG00000169962_9 (sequence is synthesized)
aagacgcacctggccctggccaccgacccggccttctgctctgccctgggcgagagggagcagggtctggaggaggacgtggtgggccagcgctgcccgcagtgtgactgcatcacgctg

SEQ ID NO: 564516 - DNA, 120 bp, Artificial Sequence
  ENSG00000169962_10 (sequence is synthesized)
cagaacgtgagcgcagggctaaatcaccaccagacgttctctgtctacgcagctgtgtatagcgtggcccaggccctgcacaacactcttcagtgcaacgcctcaggctgccccgcgcag

SEQ ID NO: 564517 - DNA, 120 bp, Artificial Sequence
  ENSG00000169962_11 (sequence is synthesized)
gaccccgtgaagccctggcagctcctggagaacatgtacaacctgaccttccacgtgggcgggctgccgctgcggttcgacagcagcggaaacgtggacatggagtacgacctgaagctg

SEQ ID NO: 564518 - DNA, 120 bp, Artificial Sequence
  ENSG00000169962_12 (sequence is synthesized)
tgggtgtggcagggctcagtgcccaggctccacgacgtgggcaggttcaacggcagcctcaggacagagcgcctgaagatccgctggcacacgtctgacaaccagaagcccgtgtcccgg

SEQ ID NO: 564519 - DNA, 120 bp, Artificial Sequence
  ENSG00000169962_13 (sequence is synthesized)
tgctcgcggcagtgccaggagggccaggtgcgccgggtcaaggggttccactcctgctgctacgactgtgtggactgcgaggcgggcagctaccggcaaaacccagacgacatcgcctgc

SEQ ID NO: 564520 - DNA, 120 bp, Artificial Sequence
  ENSG00000169962_14 (sequence is synthesized)
gcctggcgctgggccttgtgctggctgctttggggctgttcgttcaccatcgggacagcccactggttcaggcctcgggggggcccctggcctgctttggcctggtgtgcctgggcctgg

SEQ ID NO: 564521 - DNA, 120 bp, Artificial Sequence
  ENSG00000169962_15 (sequence is synthesized)
tctgcctcagcgtcctcctgttccctggccagcccagccctgcccgatgcctggcccagcagcccttgtcccacctcccgctcacgggctgcctgagcacactcttcctgcaggcggccg

SEQ ID NO: 564522 - DNA, 120 bp, Artificial Sequence
  ENSG00000169962_16 (sequence is synthesized)
agatcttcgtggagtcagaactgcctctgagctgggcagaccggctgagtggctgcctgcgggggccctgggcctggctggtggtgctgctggccatgctggtggaggtcgcactgtgca

SEQ ID NO: 564523 - DNA, 120 bp, Artificial Sequence
  ENSG00000169962_17 (sequence is synthesized)
cctggtacctggtggccttcccgccggaggtggtgacggactggcacatgctgcccacggaggcgctggtgcactgccgcacacgctcctgggtcagcttcggcctagcgcacgccacca

SEQ ID NO: 564524 - DNA, 120 bp, Artificial Sequence
  ENSG00000169962_18 (sequence is synthesized)
atgccacgctggcctttctctgcttcctgggcactttcctggtgcggagccagccgggctgctacaaccgtgcccgtggcctcacctttgccatgctggcctacttcatcacctgggtct

SEQ ID NO: 564525 - DNA, 120 bp, Artificial Sequence
  ENSG00000169962_19 (sequence is synthesized)
cctttgtgcccctcctggccaatgtgcaggtggtcctcaggcccgccgtgcagatgggcgccctcctgctctgtgtcctgggcatcctggctgccttccacctgcccaggtgttacctgc

SEQ ID NO: 564526 - DNA, 120 bp, Artificial Sequence
  ENSG00000169962_20 (sequence is synthesized)
tcatgcggcagccagggctcaacacccccgagttcttcctgggagggggccctggggatgcccaaggccagaatgacgggaacacaggaaatcaggggaaacatgagtgacccaaccctg

SEQ ID NO: 564527 - DNA, 120 bp, Artificial Sequence
  ENSG00000169962_21 (sequence is synthesized)
tgatctcagccccggtgaacccagacttagctgcgatcccccccaagccagcaatgacccgtgtctcgctacagagaccctcccgctctaggttctgaccccaggttgtctcctgaccct

SEQ ID NO: 564528 - DNA, 120 bp, Artificial Sequence
  ENSG00000169962_22 (sequence is synthesized)
gaccccacagtgagccctaggcctggagcacgtggacacccctgtgaccatctgggccccagagccaagctgtgtccctgtccctctgtgcccagaccaggcctgcccaggtaacccaga

SEQ ID NO: 564529 - DNA, 120 bp, Artificial Sequence
  ENSG00000169962_23 (sequence is synthesized)
cccactgttctggaaagaggcccggagggctcccagggtacccgcaacccacaccgtgagctcaggaaaaggacgcagggaggccccggccagatggctggaagcccaaatcaggccctg

SEQ ID NO: 564530 - DNA, 120 bp, Artificial Sequence
  ENSG00000169962_24 (sequence is synthesized)
ccgacctgaccatgtcccaccagggcccccatcctgcaccctgccaggcaccacagcagtgggaggccaggtgggggcacacaggcatatgcccagggcagagcccgccgaggtaggggt

SEQ ID NO: 564531 - DNA, 120 bp, Artificial Sequence
  ENSG00000169962_25 (sequence is synthesized)
ggcacccagcttcctactctgccctttgcccagtgggtagacagcatcatgactgtcaccagtaccagggacagagcccaggtggggtgggggcggggtccagcaccacggccagcaccg

SEQ ID NO: 564532 - DNA, 120 bp, Artificial Sequence
  ENSG00000169962_26 (sequence is synthesized)
accaccaggaccccggagccagcaccatggacagaaaactgcccaccaggatctgacgccagcacgccgccaggcccacacagggtctccggtcagagtcccagggtcagctcccagcag

SEQ ID NO: 564533 - DNA, 120 bp, Artificial Sequence
  ENSG00000169962_27 (sequence is synthesized)
ggcctaggggaggctggaccagctccctgtgcctcattccaaggcagcccagccggagagaaggggcacaggccacacatctgtcccataaaattaaacgctttttagtgtttaaaataa

SEQ ID NO: 564534 - DNA, 120 bp, Artificial Sequence
  ENSG00000169964_0 (sequence is synthesized)
gtcagcaggcaacatggccgagaggccggggcctccgggcggcgccgtgtccgcgaccgcgtaccctgacacccccgcggaattccctccgcacctccaggcgggtgcgatgcggcgccg

SEQ ID NO: 564535 - DNA, 120 bp, Artificial Sequence
  ENSG00000169964_1 (sequence is synthesized)
cttttggggcgtattcaactgtctgtgcgccggcgcgttcggggccctggccgccgcctccgccaagctggccttcggcagcgaggtgagcatgggtttatgcgtcttaggcattattgt

SEQ ID NO: 564536 - DNA, 120 bp, Artificial Sequence
  ENSG00000169964_2 (sequence is synthesized)
gatggcgagcaccaattctctgatgtggaccttctttagccggggcctcagtttctccatgtcttcagccattgcatctgtcacagtgactttttcaaatatcctcagctcggccttcct

SEQ ID NO: 564537 - DNA, 120 bp, Artificial Sequence
  ENSG00000169964_3 (sequence is synthesized)
gggctatgtgctgtatggagagtgccaggaggtcttgtggtggggaggagtgttccttattctctgcggactcaccctaatccacaggaagctcccacccacctggaagccccttccaca

SEQ ID NO: 564538 - DNA, 120 bp, Artificial Sequence
  ENSG00000169964_4 (sequence is synthesized)
acttggctagacggaccagctggaaagatcatgatggtggcccagccttgggatgtcatgtgggactgtatcctagggcgatccagttgtgcagccttctgaccatcagccaagggaagc

SEQ ID NO: 564539 - DNA, 120 bp, Artificial Sequence
  ENSG00000169964_5 (sequence is synthesized)
aggcctctgatggagcaggctctggctctgtaaggagaggtgcagctgcagcagtgttctaccggaagtgttttgatcatctgtacagtgctttggattcttcctcccaggcctacccca

SEQ ID NO: 564540 - DNA, 120 bp, Artificial Sequence
  ENSG00000169964_6 (sequence is synthesized)
gtgagccttcgcagatgctggagatcctggggttggtctgctttgtgtatggtacttgaaaccacgctgtaattattgtcctgttgccaaacaaaagccagtcatgtaactctagaagca

SEQ ID NO: 564541 - DNA, 120 bp, Artificial Sequence
  ENSG00000169964_7 (sequence is synthesized)
gtgactggtggggctttctgacagttccatgctgatgtatcaggccatctgtgtcatgcttatgtattatggcaagaagaggaaaactggattaataaatacgttttttgtaagttaaaa

SEQ ID NO: 564542 - DNA, 80 bp, Artificial Sequence
  ENSG00000169964_8 (sequence is synthesized)
cttcggcagcgaggtcgagcccggggcgctgttggtgctgctgctgcgggcgggcgggcggggcgccgctgggcggagga

SEQ ID NO: 564543 - DNA, 120 bp, Artificial Sequence
  ENSG00000169964_9 (sequence is synthesized)
ccgccggggccccgggccgcgggcggcgctgcggtcagctggggtggcagagagtgtttcgcctctaatcacgccaaaccctcgtccagtgtaggtggtaagagacgtcggggactgagg

SEQ ID NO: 564544 - DNA, 120 bp, Artificial Sequence
  ENSG00000169964_10 (sequence is synthesized)
cctcttcccttaccagggacctaaaaccttttctccggttgggctagttcgctctcggggaagaactacacctcctacatccaccctctacctctcattttaagtcccttgtgcctgagc

SEQ ID NO: 564545 - DNA, 120 bp, Artificial Sequence
  ENSG00000169964_11 (sequence is synthesized)
atttctctccacgtgactcttaaggtgagaagcctcttgcccatccctttactccgtaattaacgggtgttgtgaccagatgaccagtctgccccactaccaggaaaattgggagtttgg

SEQ ID NO: 564546 - DNA, 120 bp, Artificial Sequence
  ENSG00000169964_12 (sequence is synthesized)
gatactgtaggcataagaggatactgacagagacgttctggatgttttcctgacgctgagaactcctaaacttgcatcctggcgtctgctaaggtgtatctctgcctctccctcccacgt

SEQ ID NO: 564547 - DNA, 120 bp, Artificial Sequence
  ENSG00000169964_13 (sequence is synthesized)
cgtagaccagcctctgcttgctataggggtttcattgcgtctgcagcccaaggttagcctctgacctggacagtggtcactgattatttagggttaagcctatttagggctaatccagta

SEQ ID NO: 564548 - DNA, 120 bp, Artificial Sequence
  ENSG00000169964_14 (sequence is synthesized)
gtagctgccatgcttcaggttagtatcccattgggtgtagttcatggggtaagtggtcgaaagtaaaatgaataactttgtatgggccgtgaagtttgttgtcaggaactagaccttcat

SEQ ID NO: 564549 - DNA, 120 bp, Artificial Sequence
  ENSG00000169964_15 (sequence is synthesized)
aaccctttaagcaggttgccactggcccatatgctgctttgtgtaagacaaggttgtccaactcgcggcccaacgcaaatttgcaaatttaaaacatgaatttttttgcgatttattatt

SEQ ID NO: 564550 - DNA, 120 bp, Artificial Sequence
  ENSG00000169964_16 (sequence is synthesized)
ttaaaacatgaatttttttgcgatttattattttttttttagctcatcatatatcattagtgttagtgtattatatgtgtgacccaagacagttcttccagtgtggcccagggaagccaa

SEQ ID NO: 564551 - DNA, 120 bp, Artificial Sequence
  ENSG00000169964_17 (sequence is synthesized)
agcacctttttctcaagacactatgtgttcagctgctgagaaaccattacaagtaataagtatatttagattccgcaccccccccccccgccgccttgtctccaggcaggtttctaactc

SEQ ID NO: 564552 - DNA, 120 bp, Artificial Sequence
  ENSG00000169964_18 (sequence is synthesized)
ttctcctttaaaaaaaaagaaagaaaatacctgcaagttctccaagggatgtctgggatcactaaatagtctgaggtggtgtttccctcaggcaaggctgtgccctagttaagagcatgg

SEQ ID NO: 564553 - DNA, 120 bp, Artificial Sequence
  ENSG00000169964_19 (sequence is synthesized)
aggtacactgcctgcttgtgaagcctggtggctctcaccgctgtagcactttaggaaggttacttaatgcccctggctctttatctgtaaaatgaagttaaggaataaatgagaatgctt

SEQ ID NO: 564554 - DNA, 120 bp, Artificial Sequence
  ENSG00000169964_20 (sequence is synthesized)
aaacacagcccaggacctaacacagagtaaaagctcaagaatacccagagggggtcagccttagtgggctgtaacttgtataggatttgggggtgggaatacagagcagacattgctaat

SEQ ID NO: 564555 - DNA, 120 bp, Artificial Sequence
  ENSG00000169964_21 (sequence is synthesized)
tcatgctttgcctgatctcaagaaataagaactctaccctaggcttactacctacggagtaagaactacttggccctctgggactgatcttcaagcactggtcattgtgggaccaataag

SEQ ID NO: 564556 - DNA, 120 bp, Artificial Sequence
  ENSG00000169964_22 (sequence is synthesized)
gggccggtgttcagtagaaaatactggctttggattagcattttgcttcttcccaagatcatatggccagcaaggtggccaaatgagtatcttctctgaatttgctttatttgtaagatg

SEQ ID NO: 564557 - DNA, 120 bp, Artificial Sequence
  ENSG00000169964_23 (sequence is synthesized)
ggtctgctgcccactgagggttaagtgaagccctgtgcaggaaagctctgaggccctctgagctgtagtgggagctcagtaggagcctgggtgccagcaaccacagtcctgggtgtgctt

SEQ ID NO: 564558 - DNA, 120 bp, Artificial Sequence
  ENSG00000169967_0 (sequence is synthesized)
ttttattaatatgctgatctgttttatcttctcaggccataaagaatgctgatgggagaaccattttcctaattttcaaattgttgagctgtttgccataatggatgatcagcaagcttt

SEQ ID NO: 564559 - DNA, 120 bp, Artificial Sequence
  ENSG00000169967_1 (sequence is synthesized)
gaactcaatcatgcaagatttggctgtccttcataaggccagtcgaccagcattatccttgcaggaaaccagaaaagcaaaatcttcatcaccaaaaaaacagaatgatgtccgagtcaa

SEQ ID NO: 564560 - DNA, 120 bp, Artificial Sequence
  ENSG00000169967_2 (sequence is synthesized)
atttgaacatagaggagaaaaaagaatccttcagttccccagaccagttaaactggaagatctgagatctaaagctaaaattgcctttggacagtctatggatctacattataccaataa

SEQ ID NO: 564561 - DNA, 120 bp, Artificial Sequence
  ENSG00000169967_3 (sequence is synthesized)
cgagttggtaattccattaactactcaagatgacttggacaaagctgtggaactgctggatcgtagtattcatatgaagagcctcaagatattacttgtaataaatggaagtacacaggc

SEQ ID NO: 564562 - DNA, 120 bp, Artificial Sequence
  ENSG00000169967_4 (sequence is synthesized)
tactaatttagaaccattgccatcactagaagatttggataatacagtatttggagcagagaggaaaaaacggctatctataataggtcctactagtagagatagaagttctcctccccc

SEQ ID NO: 564563 - DNA, 120 bp, Artificial Sequence
  ENSG00000169967_5 (sequence is synthesized)
aggttacattccagatgaattacaccaggttgcccggaatgggtcattcactagtatcaacagtgaaggagagttcattccagagagcatggaccaaatgctggatccattatctttaag

SEQ ID NO: 564564 - DNA, 120 bp, Artificial Sequence
  ENSG00000169967_6 (sequence is synthesized)
cagccctgaaaattctggctcaggaagttgtccatcacttgatagtcctttggatggagagagctatccaaaatcacgaatgcctagggctcagagctacccagataatcatcaggaatt

SEQ ID NO: 564565 - DNA, 120 bp, Artificial Sequence
  ENSG00000169967_7 (sequence is synthesized)
ttcagactatgataaccctatctttgagaaatttggaaaaggaggaacatatccaagaaggtatcatgtttcatatcatcatcaagagtataatgatggtcgtaaaacttttccaagagc

SEQ ID NO: 564566 - DNA, 120 bp, Artificial Sequence
  ENSG00000169967_8 (sequence is synthesized)
cagagtatgatgatagtcgaataagaagaaggggaagtgacatagacaatcctactttgaccgtaatggacatcagcccacccagccgttcacctcgagctccgaccaactggagattgg

SEQ ID NO: 564567 - DNA, 120 bp, Artificial Sequence
  ENSG00000169967_9 (sequence is synthesized)
gcaaactgcttggccaaggagcctttggaagggtctacctctgttatgatgttgatacaggaagagaattggctgttaagcaagttcaatttgaccccgatagtcctgagaccagcaagg

SEQ ID NO: 564568 - DNA, 120 bp, Artificial Sequence
  ENSG00000169967_10 (sequence is synthesized)
aagtaaatgcacttgagtgtgaaattcagttgctgaaaaacttgctacatgagcgaattgttcagtattatggctgtttgagggatccccaggaaaaaacactttccatatttatggaat

SEQ ID NO: 564569 - DNA, 120 bp, Artificial Sequence
  ENSG00000169967_11 (sequence is synthesized)
atatgccagggggttcaattaaggaccaattaaaagcatatggcgctcttactgagaatgtgactaggaaatacacccgtcagattctggagggtgtccattatttgcacagtaatatga

SEQ ID NO: 564570 - DNA, 120 bp, Artificial Sequence
  ENSG00000169967_12 (sequence is synthesized)
ttgtccatagagatatcaaaggcgcaaatatcctgcgagattcaacaggcaacgtcaaactaggagattttggggccagcaaacggcttcagaccatctgtctctcagggacaggaatga

SEQ ID NO: 564571 - DNA, 120 bp, Artificial Sequence
  ENSG00000169967_13 (sequence is synthesized)
agtctgtcacgggcacaccatactggatgagccctgaagtcatcagtggagaaggctatggaagaaaagcagacatctggagtgttgcatgtactgtggtagaaatgctaactgaaaagc

SEQ ID NO: 564572 - DNA, 120 bp, Artificial Sequence
  ENSG00000169967_14 (sequence is synthesized)
cgccttgggctgaatttgaagcaatggctgccatctttaaaatcgccactcagccaacaaacccaaagctgccacctcatgtctcagactatactcgagatttcctcaaacggatttttg

SEQ ID NO: 564573 - DNA, 120 bp, Artificial Sequence
  ENSG00000169967_15 (sequence is synthesized)
tagaggccaaactgagaccttcagctgatgaactcttaaggcacatgtttgtgcattatcactagcagccagtaacctctcctgtgcctctacctagctcccatctattcattcaccttc

SEQ ID NO: 564574 - DNA, 120 bp, Artificial Sequence
  ENSG00000169967_16 (sequence is synthesized)
tctctgactgcacttttcttttttataaaaaaagagagatgggggagaaaaaagacaagagggaaagtatttctcttgattcttggttaaatttgtttaataataataatatcctaaatt

SEQ ID NO: 564575 - DNA, 120 bp, Artificial Sequence
  ENSG00000169967_17 (sequence is synthesized)
tttctaaagtccctcaggaaaaaaattctgaaacttgagccacaaattaagaggcagacggcttttctccttgcaaatgacctgccacacagtccgtcactgcctctgctagctctgcta

SEQ ID NO: 564576 - DNA, 120 bp, Artificial Sequence
  ENSG00000169967_18 (sequence is synthesized)
cccttgggccctgtccacagcccacgtgggagaccttttcacgggatctactcggatgtctgggatctggccactaccgcaggctcgagacaacccaggccataaagaatgctgatggga

SEQ ID NO: 564577 - DNA, 120 bp, Artificial Sequence
  ENSG00000169967_19 (sequence is synthesized)
agataaagcactttagtacatagtcactctttttagtacaaacaaatcatttggaatacctaaagattgtagagtcattccctctatcactgacacatcagtgacgatgggaagacatgg

SEQ ID NO: 564578 - DNA, 120 bp, Artificial Sequence
  ENSG00000169967_20 (sequence is synthesized)
aaaacaaggagaagaaaatgatgtataatttgtagtttttagtgatagtatttaaaatatatcctcatttgtggggttgagccctaaactttagtttagggtaggtactcaacttaaaga

SEQ ID NO: 564579 - DNA, 120 bp, Artificial Sequence
  ENSG00000169967_21 (sequence is synthesized)
atataggtttcttcttatatctgtattctttagatcctaacctctgtctaccaacctttttgctcagtaggagtcttgatagaagatatgaatctctgagaggtatgtttatttgttaat

SEQ ID NO: 564580 - DNA, 120 bp, Artificial Sequence
  ENSG00000169967_22 (sequence is synthesized)
ttatttgttaatcctaaccagtataataagcaaatacactataatagatccacgttactggaatctgtaaaccttgagggatagctttctgcttaaaaacacacacacacacacacacac

SEQ ID NO: 564581 - DNA, 120 bp, Artificial Sequence
  ENSG00000169967_23 (sequence is synthesized)
cctttattttaaagtcaagttgtgagcaaatagaaataaaagacaaaaggacatcactcttatcaaatgtgtgagcagtagaagagaccacatttacagtcaatagaaataatgaaaaaa

SEQ ID NO: 564582 - DNA, 120 bp, Artificial Sequence
  ENSG00000169967_24 (sequence is synthesized)
aattaggtgtttagtgtattttaaacagttttgttttgttttacttgagggggacgtcccaaaattaaaggaatggagaaataatcaaaatcatgtataccatcttctatttccagctcc

SEQ ID NO: 564583 - DNA, 120 bp, Artificial Sequence
  ENSG00000169967_25 (sequence is synthesized)
tgattccccataggtaacatcccttaggagcgaagagttcaattagtaatgtttatgtgttatgtcaggagatgaaacccttgttcttaggatcacagaatactaaagcacctcaaaaaa

SEQ ID NO: 564584 - DNA, 120 bp, Artificial Sequence
  ENSG00000169967_26 (sequence is synthesized)
acaggtatcatgtgaaacagtggttgccaaaagtggagcgaggatgatttcactaggcatttggcaattcttagagacatttccggttgtcacaattggagggatactagtaacatgaat

SEQ ID NO: 564585 - DNA, 120 bp, Artificial Sequence
  ENSG00000169967_27 (sequence is synthesized)
tgggtagaggccagggatgttgctaaatagattataatacacaaggaaagcagcctcaaagaattacccctcccaaaatgtcagaagtgctgaggctgagaaaccctgatgtaaagatca

SEQ ID NO: 564586 - DNA, 120 bp, Artificial Sequence
  ENSG00000169967_28 (sequence is synthesized)
gtcccagttataaactgaaaacagctatttacaaagcagtaaatgcaagaaagaaaaggaagtcgcaaagagaaagtgatgtaatgcaaattgaggattttacaagatcagatactgctg

SEQ ID NO: 564587 - DNA, 120 bp, Artificial Sequence
  ENSG00000169967_29 (sequence is synthesized)
ctttaagtcaagggtgaataatctcaacaaacagcaaatagcaatcactttaccagctgcatattgcacccacataggtaactcttcattttaggaacaaactgaatttgaacactgagc

SEQ ID NO: 564588 - DNA, 120 bp, Artificial Sequence
  ENSG00000169967_30 (sequence is synthesized)
cttttgaactcagccatctctatatattctttccttaaaattcatgattttgggcaaaaaaaaaaaaaaaagcatatcaaaacaaaattttaactactaatgggaaggttaaaaagctgc

SEQ ID NO: 564589 - DNA, 120 bp, Artificial Sequence
  ENSG00000169967_31 (sequence is synthesized)
cacgtatttctagtacaatgtatccaataagagcaaggacattgttaaatggaacaagacagctgggaaaggccccactatctctaatagaattgtgctactataaaacatgaagatatc

SEQ ID NO: 564590 - DNA, 120 bp, Artificial Sequence
  ENSG00000169967_32 (sequence is synthesized)
agcaatttggccacttgcagtttttttcagcatgttaaagcaagtgctaagtactttattagtactttatttagtactttattttaaaggtctagaaaacaacagtcttcctggaggccc

SEQ ID NO: 564591 - DNA, 120 bp, Artificial Sequence
  ENSG00000169967_33 (sequence is synthesized)
cagaatccctttcatgggattcataagggactcaggtattcttattttctgccaaaaggtgtgcttatttagggactcttttacgatactttgtttctgaagttaggtagatcttggttt

SEQ ID NO: 564592 - DNA, 120 bp, Artificial Sequence
  ENSG00000169967_34 (sequence is synthesized)
actgtgccaaggtcctacctagcattccctgtaggaatatttgaaattccactagctagtctaagaagtcaaagcacaaaattaattgtcaacgcttctctcatattcttaaaattgaag

SEQ ID NO: 564593 - DNA, 120 bp, Artificial Sequence
  ENSG00000169967_35 (sequence is synthesized)
cagtttgcagggaagaacaagaatgaggtgtccctgccttggtaaagcaactgccaaattttgttctagaaagaatccccaagtgtgtggatctattataatttctttatcttttatgaa

SEQ ID NO: 564594 - DNA, 120 bp, Artificial Sequence
  ENSG00000169967_36 (sequence is synthesized)
tgagggcatcttttctacttgagcaagatcatggtccttgaccagtgggcttttccttcatatctgtcttgtgtagttgtgcttttcctttggctcgtttttggtctgtcagggtaacca

SEQ ID NO: 564595 - DNA, 120 bp, Artificial Sequence
  ENSG00000169967_37 (sequence is synthesized)
gcagtgcacaatatgagacaaatgctctttagagagaaatctggtgagactgtagaacccagagcaaaactgtttttttttcagtctctgttttcttttctaaatgctatagaaaataaa

SEQ ID NO: 564596 - DNA, 120 bp, Artificial Sequence
  ENSG00000169967_38 (sequence is synthesized)
ggcacctgaaaagaaactactactttaacactgctgtggaaggcctttgctttataagaaaaatattattagctatgggaaagtaatgttctttatgtaaagacttaaaaatagactaat

SEQ ID NO: 564597 - DNA, 120 bp, Artificial Sequence
  ENSG00000169967_39 (sequence is synthesized)
agtttacagagttattatataaaatacgatgtgaatttatttcaaacaagttgtgaaggtaccaaaaaccacaataaaagttaatatatataaaaactactagaacaaaaaagcttgaag

SEQ ID NO: 564598 - DNA, 120 bp, Artificial Sequence
  ENSG00000169967_40 (sequence is synthesized)
gtgtgggggtggagggtatggaagaccaaaagtaaatttaaaaaagaaatttttgaaaggaaacagctttatcaggggaagttaaatataacactccgtttttttcttctttctaataat

SEQ ID NO: 564599 - DNA, 120 bp, Artificial Sequence
  ENSG00000169967_41 (sequence is synthesized)
gatatggatcaacaaatgcaatttgaactttttaagataactctaaatgtgttttgtttcttaaatgcacaattgattcttctatactgtaatgcttctttgctgacgctggaaaatggt

SEQ ID NO: 564600 - DNA, 120 bp, Artificial Sequence
  ENSG00000169967_42 (sequence is synthesized)
cagactgctgactttgtgcctttaaaatgcattctgctttgacagtggcagactttttggtgctggagaagattcactagcagtcttatatgtgcttttcaggaaatatctttctactta

SEQ ID NO: 564601 - DNA, 120 bp, Artificial Sequence
  ENSG00000169967_43 (sequence is synthesized)
aggccttgagagattcaaagtggcatgacttaggcttggaccaaatataagatcttttacattgcaaacaaaatgttgtattgaataaaagggttaaaaaaatcataatgactagtggaa

SEQ ID NO: 564602 - DNA, 120 bp, Artificial Sequence
  ENSG00000169967_44 (sequence is synthesized)
tgaaaattttcagcacttttccttgtttacaaaacatctttctaacttaaaaaaatgactattgccttagaaagttttaaaaggcacagttacccttacataacatatataaggaattaa

SEQ ID NO: 564603 - DNA, 120 bp, Artificial Sequence
  ENSG00000169967_45 (sequence is synthesized)
aatattaatgcatttgctgaactgtaaaagaaaattttaaaccttgatttcagagtgaattggattggctttcacttgagagagtctttaccttattcccaaagaaactgcattaaaaag

SEQ ID NO: 564604 - DNA, 120 bp, Artificial Sequence
  ENSG00000169967_46 (sequence is synthesized)
atgaaactatttctttagactaagtctctgctactccagctcatatatatgtcagatctgctctgtagtatttctgacatggagttgttataagatatgtgaaatcacttagaaaataaa

SEQ ID NO: 564605 - DNA, 120 bp, Artificial Sequence
  ENSG00000169967_47 (sequence is synthesized)
atcagatgtgaatagtttagcaggatgaccaagccagatgcagactccttggcctatggcaaagttctgtgccagtgattttatttggagtctgggaactgatagcttgatataaaatca

SEQ ID NO: 564606 - DNA, 120 bp, Artificial Sequence
  ENSG00000169967_48 (sequence is synthesized)
cctggtgtcaattaaatatacaaatctatcttttttaatagaatgaatcttctttgtttgttcaataattgtaacttattatgtcaggtactaaattaacatccttaaggaggtcacaat

SEQ ID NO: 564607 - DNA, 120 bp, Artificial Sequence
  ENSG00000169967_49 (sequence is synthesized)
ctaggaggaacatgggcaaacagttacttattttatggcatacgctaactctgaaagttcagcaatgatgttttaaaatgttattttttattaagggaaaagcaattttaggtaatcatt

SEQ ID NO: 564608 - DNA, 120 bp, Artificial Sequence
  ENSG00000169967_50 (sequence is synthesized)
ggctgttataaacggaaatgtcactgacaacagggattagagtaaaagtatctccaaactagagggatcccctccccaaccaggtcacatagcatctctctcaggaccccctcttactgc

SEQ ID NO: 564609 - DNA, 120 bp, Artificial Sequence
  ENSG00000169967_51 (sequence is synthesized)
aaaacccagcctctactcaacagttctggtgatggggagcatttattccataacagtgtttttttgttcttttttttttttttccccagtgtctcttttaaagaaaacatactttatttt

SEQ ID NO: 564610 - DNA, 120 bp, Artificial Sequence
  ENSG00000169967_52 (sequence is synthesized)
ggtctaaattgtgaaaatacccaaaacatttgatagaaattgaactctgtcaacagtgttatttatactaagatcaggacagttccttgagatcatactgttttattactaagtttggcc

SEQ ID NO: 564611 - DNA, 120 bp, Artificial Sequence
  ENSG00000169967_53 (sequence is synthesized)
tttgttttacaaatgtaatgttcatatttatttgaattttaagattggttaaatgttaatgaaaagcaatccaattgttaatttttagtagtgccttttctctgtatgccttaattttat

SEQ ID NO: 564612 - DNA, 120 bp, Artificial Sequence
  ENSG00000169967_54 (sequence is synthesized)
tttatattaataattcaagttacccaccaaaatgaagattttttccaaaatcagtaggcttcacaagttcatttggccttagactgtgtattggtccttaaatgtttcttaatgcctgcc

SEQ ID NO: 564613 - DNA, 120 bp, Artificial Sequence
  ENSG00000169967_55 (sequence is synthesized)
tcctcctacccttttctacctcctttttaaaaaaataaataaataaataaataaatgttaggagagaaacattaggatttgtctgtgatagacatgctgcagcttccactagacatgaat

SEQ ID NO: 564614 - DNA, 120 bp, Artificial Sequence
  ENSG00000169967_56 (sequence is synthesized)
tcccaacacaagcatagaaagaggtattctcgttctaaagagacatgtaaatgttttctgggttgaatatttgattttcaatcacattggcactgtccaagttcttggcatattatagtt

SEQ ID NO: 564615 - DNA, 120 bp, Artificial Sequence
  ENSG00000169967_57 (sequence is synthesized)
cagttatgattttcatggtagagttacaatacttgtttttgccctaaagaagtcattcacatggtttacaaatgttaaggcaatgagataggacagtgagtaggaaatccagggatagca

SEQ ID NO: 564616 - DNA, 120 bp, Artificial Sequence
  ENSG00000169967_58 (sequence is synthesized)
gattctagtccttaattctcagctaacattttgggtaatactcacagaaaagttacttttctgtgaagtgtgtgcatgtgtgcatgtatgtgtgcgtttgcatgcatgtgtgtgtgtgtg

SEQ ID NO: 564617 - DNA, 120 bp, Artificial Sequence
  ENSG00000169967_59 (sequence is synthesized)
tgtgtgtggttagagttggaggcagggatgggaaggaagaaggggaaaggtatgagtgttcaattaggtcagtttctggttttggaagaacaactcaaatgtatgacctactgatgacat

SEQ ID NO: 564618 - DNA, 120 bp, Artificial Sequence
  ENSG00000169967_60 (sequence is synthesized)
acagtgagtgtagtcatccttgggtaggaacaccagtacattttccagaagtagctagtacaaatgattgtataataatattgattgtaaattgccatactcttggttgctaaaggtaga

SEQ ID NO: 564619 - DNA, 120 bp, Artificial Sequence
  ENSG00000169967_61 (sequence is synthesized)
ttaaaattcaatttgtgtatatgtaaaataatcttatatataattcttaaatagaaagtaattgattttacatagttcttcctgaactttttggaactgaaattctgccaaacattatca

SEQ ID NO: 564620 - DNA, 120 bp, Artificial Sequence
  ENSG00000169967_62 (sequence is synthesized)
aaataagcttccttagcttaccaagtattcacaaggaaattctcttgtacctctttttggttggctaggggaagcatgctgtgaagcagctattcctacttatagttgtctttggcttgg

SEQ ID NO: 564621 - DNA, 120 bp, Artificial Sequence
  ENSG00000169967_63 (sequence is synthesized)
ctttgacttctgccatggtttggacaggatgccatggtaggtgtgggaagtatcagggcctcccatcttcccatactcaccttccagagctgttgatggaaatgagctcttgggggagcc

SEQ ID NO: 564622 - DNA, 120 bp, Artificial Sequence
  ENSG00000169967_64 (sequence is synthesized)
tagagattcttttttcagtggtcctgtaagcattcaaggttgagcttcagaaagatgagggaggagtcatagctacagtaaagaaaagaatagattttatctgttgcctgtatacagtct

SEQ ID NO: 564623 - DNA, 120 bp, Artificial Sequence
  ENSG00000169967_65 (sequence is synthesized)
catagaattcttatttttcataattgtgcattttaattgatagtcatatggtatttttgttaataacagcaaaggcattaaatcagtaccattgttccttctgcctgatgacttcttgtt

SEQ ID NO: 564624 - DNA, 120 bp, Artificial Sequence
  ENSG00000169967_66 (sequence is synthesized)
tgtaacacaatctgtattatcagaatcactttaaaccaaagcttttatattccctgtacacatagccaaaataattagcactgttacttctgtccacttgtaagctaatagtataaaaat

SEQ ID NO: 564625 - DNA, 120 bp, Artificial Sequence
  ENSG00000169967_67 (sequence is synthesized)
tataaagcagatactagtagaatttgtattctggtatatccttcaaggaaaaggacaggtgatcagtgcatttagacatccagaagttacttccactattgaggaactatgtagacatga

SEQ ID NO: 564626 - DNA, 120 bp, Artificial Sequence
  ENSG00000169967_68 (sequence is synthesized)
atttaagcttgtacatgtgccaatcttgttaatgtcacttgaccactgattcacatagacagacattaacgtctgatgcctcaggttgatggcgaactttcttcctagtgtcttaacatt

SEQ ID NO: 564627 - DNA, 120 bp, Artificial Sequence
  ENSG00000169967_69 (sequence is synthesized)
tatgaacttatgtttgacttgaggggcatttcagcaaagctgtgaggaaaagtaggttctggactgatgtctgctttgtgccatagacattttggaacataaggaagtatctgcttctac

SEQ ID NO: 564628 - DNA, 120 bp, Artificial Sequence
  ENSG00000169967_70 (sequence is synthesized)
tatatgtacaggacttgtccccaaataatttctgaatcccttaatgcagttgagaatcccttaatgcagttgagaacagtaaagttcatgaccataccgaaaagcacttttaagttcact

SEQ ID NO: 564629 - DNA, 120 bp, Artificial Sequence
  ENSG00000169967_71 (sequence is synthesized)
tctttttaaatatttttttagaatttattttttaaaagcatatgtaactagtgatgattttagcattagctttacttggaggggagaagaaacaaaattacaccttaaactctattagat

SEQ ID NO: 564630 - DNA, 120 bp, Artificial Sequence
  ENSG00000169967_72 (sequence is synthesized)
agactacaaaatggatttgatgtattcttacttttccaaagaattttttccacctggaataagaagagaggactagttgaaacatttgagctggagaggcttatgggcaatatgaagtgg

SEQ ID NO: 564631 - DNA, 120 bp, Artificial Sequence
  ENSG00000169967_73 (sequence is synthesized)
gccaaattcttgcaatacaccctattcaattgaaagtacagtgtctaaggataagaatacttctttaaagaccaacaattgttttaatgcaatcttaattagtaaatggtttacattttt

SEQ ID NO: 564632 - DNA, 120 bp, Artificial Sequence
  ENSG00000169967_74 (sequence is synthesized)
tctattgttattggttttaaaatttgctaccctgaattctgaaatattataagagttaataccaaaaatacttttaatgtctgacatctcttacatttcacatggttctttttattcatt

SEQ ID NO: 564633 - DNA, 120 bp, Artificial Sequence
  ENSG00000169967_75 (sequence is synthesized)
gtaaataaaagtaaacttggataaatttgagaataaactttgaattgttgcaaactatgattatcaatttgtaaatttaccctttgacataataatgtacatttttaaatgtagccatta

SEQ ID NO: 564634 - DNA, 120 bp, Artificial Sequence
  ENSG00000169967_76 (sequence is synthesized)
aattctctatatttaacctattggtttctctctaaatgtttttaatctcagttgaatgctgggcagtttataattatgtacaaagggtttttttcctattaagattgacatttttgcaca

SEQ ID NO: 564635 - DNA, 120 bp, Artificial Sequence
  ENSG00000169967_77 (sequence is synthesized)
tttttggaaatgtttaatttgtacactgatttactactctgaccaataattgttgatgagtgtatgagcatcatgaatgcgtgcattgaactactgtctgtgtctttatgttttaacttc

SEQ ID NO: 564636 - DNA, 120 bp, Artificial Sequence
  ENSG00000169967_78 (sequence is synthesized)
tttcaagatgtagccatcagttactgcactgctattactgacttaaatggacctttttgcttttacaaactatacttatctatggttctttgttgaagaactcaggagttcgacattaat

SEQ ID NO: 564637 - DNA, 120 bp, Artificial Sequence
  ENSG00000169967_79 (sequence is synthesized)
agaaattagaaaattttataatgtattataaaatccattactaagttgaaagtatgcttttaactgtgtatcaggggatgtatgtttgtgtggagatgtttttttctgtctgtaggcaca

SEQ ID NO: 564638 - DNA, 120 bp, Artificial Sequence
  ENSG00000169967_80 (sequence is synthesized)
tgtatatatcccagtaagttcttattttcatttcatttctacatttttatgaacttgttttataagggtactgtttagttgtgataattaaatatatataaaagctttctgagagattat

SEQ ID NO: 564639 - DNA, 120 bp, Artificial Sequence
  ENSG00000169967_81 (sequence is synthesized)
ttactatatgaatatattttcagctggctgatcaaaagtatttttaaaattttgtttttagccattcaaaatgtatttgtattttcagaattgaatgcaagtcatacttagagctcaatt

SEQ ID NO: 564640 - DNA, 120 bp, Artificial Sequence
  ENSG00000169967_82 (sequence is synthesized)
aaaatactcttgcaagaaaaagcattaaattctctttgagaattccgtgaaatgcaaattaagggaaaaataggttttaagcagtagcaaaaacacaccgctaaaaatggcctttgaatt

SEQ ID NO: 564641 - DNA, 120 bp, Artificial Sequence
  ENSG00000169967_83 (sequence is synthesized)
ctcagagctatggaaaaatgtgagaaactaaattgtctcgagatgtcaagatttttctatctccagttgctattggcctgtcctactgttgtctttgaatatttcctgtattccacccca

SEQ ID NO: 564642 - DNA, 120 bp, Artificial Sequence
  ENSG00000169967_84 (sequence is synthesized)
aaagatttcaacttttagtttttctatcactgggcaaggtcagactgggtttataaaacaatatattggcatattgtgattctttgtaattgactataaattggttttgaaatgtccaaa

SEQ ID NO: 564643 - DNA, 120 bp, Artificial Sequence
  ENSG00000169967_85 (sequence is synthesized)
catacgttgtgtgtctttatattgtactgtgtgttttaagtaactggcagaaaaagaattggaaatgaaatttccaatcagacaatgtagtattaaagaaaactttgttttaaatatgcg

SEQ ID NO: 564644 - DNA, 120 bp, Artificial Sequence
  ENSG00000169967_86 (sequence is synthesized)
gtaccatgtaaaattactcgtgttaggaataaagtccactgttgaagttgaatgtcactaagcttattatgttaaaaggaaccagtgtgattaggaaaacctaccagaagccagatacag

SEQ ID NO: 564645 - DNA, 120 bp, Artificial Sequence
  ENSG00000169967_87 (sequence is synthesized)
tgtggtacgtgcaacatttcatgcacattttgattttgtttgtcattcaaaattgtgcttgtaaaaatgtatacaatttctgagttttataatttctaggtacttgttttttcttgctgg

SEQ ID NO: 564646 - DNA, 120 bp, Artificial Sequence
  ENSG00000169967_88 (sequence is synthesized)
taaatagcttttttttaaaaaaaaatctaatataaaagaaaccatgtttatattttgttagtgatcaatgactttgtttatatggaaatttgtatattgttggcacacattttgttgagg

SEQ ID NO: 564647 - DNA, 120 bp, Artificial Sequence
  ENSG00000169967_89 (sequence is synthesized)
tttacgtgcatgaaggcctgcaataattagcacaatgaaaactgctttttcttacatgttcatttttttgaaagattgtggtgcaaaggcttactctaataagtaaccttctggactatg

SEQ ID NO: 564648 - DNA, 120 bp, Artificial Sequence
  ENSG00000169967_90 (sequence is synthesized)
gcggcggcgcctgacgagggtgccgcggccgctgggcgcagcgttcgggggttgcacggcccgcggcggcgacgaaaacaacgaccaggacgctcggcgcccctgtccgcagagtcgcca

SEQ ID NO: 564649 - DNA, 120 bp, Artificial Sequence
  ENSG00000169967_91 (sequence is synthesized)
ctcccgcctcttctccggtctctagcgacgcgggcccgcggcttcctcctttcctgcccagttcccgcgggcctcggggttgcagcggctagaagtgccgaggagcgccaggaggacccg

SEQ ID NO: 564650 - DNA, 80 bp, Artificial Sequence
  ENSG00000169967_92 (sequence is synthesized)
cggtgacaggccgcgctggggcggaggggcgggctcggcgggggcggcccctccttgggcctgcggctctctacgtccct

SEQ ID NO: 564651 - DNA, 120 bp, Artificial Sequence
  ENSG00000169972_0 (sequence is synthesized)
attcctgcgctggaggccgcctctgacgccaccggctgggctccgccatgagttcggcgccggcctcaggctccgtgcgcgcgcgctatcttgtgtacttccagtacgtgggcaccgact

SEQ ID NO: 564652 - DNA, 120 bp, Artificial Sequence
  ENSG00000169972_1 (sequence is synthesized)
ttaacggggtcgcggccgtcaggggcactcagcgcgccgtcggggtccagaactacctggaggaggccgccgagcggctgaattccgtggagccggtcaggttcaccatctccagccgca

SEQ ID NO: 564653 - DNA, 120 bp, Artificial Sequence
  ENSG00000169972_2 (sequence is synthesized)
cggacgccggggtccacgccctgagcaacgcggcgcacctggacgtccagcgccgctcaggccggccgcccttcccgcccgaggtcctggccgaggccctcaacacacacctgcggcacc

SEQ ID NO: 564654 - DNA, 120 bp, Artificial Sequence
  ENSG00000169972_3 (sequence is synthesized)
cggccatcagggtcctgcgggccttccgagtgcccagcgacttccacgctcgtcacgcagccacgtcccggacctacctgtaccgcctggccactggctgtcaccggcgtgatgagctgc

SEQ ID NO: 564655 - DNA, 120 bp, Artificial Sequence
  ENSG00000169972_4 (sequence is synthesized)
cggtgtttgaacgcaacctatgctggactctcccggcagactgcctggatatggtcgccatgcaggaagccgcccagcacctcctcggcacacacgacttcagcgccttccagtccgctg

SEQ ID NO: 564656 - DNA, 120 bp, Artificial Sequence
  ENSG00000169972_5 (sequence is synthesized)
aagccagccccttggtcacccccgaggagagcaggaagctgcggttctggaacctggagtttgagagccagtctttcctgtatagacaggtacggaggatgacggctgtgctggtggccg

SEQ ID NO: 564657 - DNA, 120 bp, Artificial Sequence
  ENSG00000169972_6 (sequence is synthesized)
tggggctgggggctttggcacctgcccaggtgaagacgattctggagagccaagatcccctgggcaagcaccagacacgtgtagccccagcccacggcttattcctcaagtcagtgctgt

SEQ ID NO: 564658 - DNA, 120 bp, Artificial Sequence
  ENSG00000169972_7 (sequence is synthesized)
acgggaacctcggtgctgcctcctgcaccctgcaggggccacagttcgggagccacggatgaccctggacactcaagccaaagttaggccacaccaggcccaaccctgtgctggtcaagc

SEQ ID NO: 564659 - DNA, 120 bp, Artificial Sequence
  ENSG00000169972_8 (sequence is synthesized)
cagggcagtcacagctgcttggggcccacagcactgctgcctggtctccacagtagcctccctgcccgggtcccagcaccctggatgcccgtctctgtcccaggcgggatggggcacagt

SEQ ID NO: 564660 - DNA, 120 bp, Artificial Sequence
  ENSG00000169972_9 (sequence is synthesized)
gcaggacacagccatgtacaccaagaagagagtaccaagtagtcttttgttcagcttttactggaaactgctgtctaggaccacctgccctaaccaggaataaaggcaagacagcctgga

SEQ ID NO: 564661 - DNA, 120 bp, Artificial Sequence
  ENSG00000169972_10 (sequence is synthesized)
ggccgcctctgacgccaccggctgggctccgccatgagttcggcgccggcctcaggctccgtgcgcgcgcgctatcttgtgtacttccagtacgtgggcaccgactttaagaggccgccg

SEQ ID NO: 564662 - DNA, 120 bp, Artificial Sequence
  ENSG00000169972_11 (sequence is synthesized)
cgggcaggcggatgtctctggacgcgggttccaaacgttcggggaaggaagcggccctggcctcagacggcggcggagaccccagggcagggcgcccccggtaacctccgcccgcttctg

SEQ ID NO: 564663 - DNA, 120 bp, Artificial Sequence
  ENSG00000169972_12 (sequence is synthesized)
agagtgagtgtggccctgacagcggggagggggcgggcaggccggccccaccctcctgacggtcaccctggtccctgaagctgcctggatatggtcgccatgcaggaagccgcccagcac

SEQ ID NO: 564664 - DNA, 120 bp, Artificial Sequence
  ENSG00000169972_13 (sequence is synthesized)
agccccgtgcgaacgctgcgccgggtctccgtttccccaggctggggagcggagaacagggaaggctgcttgtctctgaaaaacccctgccatgcctgatggaagaatgttggcagctac

SEQ ID NO: 564665 - DNA, 120 bp, Artificial Sequence
  ENSG00000169972_14 (sequence is synthesized)
tggaaaggtctcactggtgccagtggttctggtggggtggtttctgctgcccccagcactgtcccgagggccacccaccaggtggcagcttctgaccagaacctcccctattggggtgag

SEQ ID NO: 564666 - DNA, 120 bp, Artificial Sequence
  ENSG00000169972_15 (sequence is synthesized)
ccctgaaggggggaagaacttctgccagccccagacttctgtggcagagcagcaggtacaggactgggggtctctggcacccgcaccagccacgttcccagaccctgcaccaggacccta

SEQ ID NO: 564667 - DNA, 120 bp, Artificial Sequence
  ENSG00000169972_16 (sequence is synthesized)
ggtgagggcccagggcaagcccctctgggatggccaggctacctgcccagcctccagggtcctgctgcctccttgcccaagcattgtttctctggttttaagcccctccaatgggcctca

SEQ ID NO: 564668 - DNA, 120 bp, Artificial Sequence
  ENSG00000169972_17 (sequence is synthesized)
ggctgaggatggcaaacactgccccacagacacctacaggtacgtatttttccaggaagctgcggttctggaacctggagtttgagagccagtctttcctgtatagacaggtaggctctg

SEQ ID NO: 564669 - DNA, 120 bp, Artificial Sequence
  ENSG00000169972_18 (sequence is synthesized)
ttctggggccgtccccagggggtggggctgagggtgggcaggcccctgtgcagtcttggctctgggtcgtgggcggctctgggtcacaggtacggaggatgacggctgtgctggtgggtc

SEQ ID NO: 564670 - DNA, 120 bp, Artificial Sequence
  ENSG00000169972_19 (sequence is synthesized)
acgggcggctctgggtcacaggtacggaggatgacggctgtgctggtgggtcacgggcggctctgggtcacaggtggctctgggtcacaggtacggaggatgacggctgtgctggtggcc

SEQ ID NO: 564671 - DNA, 120 bp, Artificial Sequence
  ENSG00000169976_0 (sequence is synthesized)
actctcctgtaaaacgctagagcggcgagttgttacctgcgtcctctgacctgagagcgaaggggaaagcggcgagatgactgaccgctacaccatccatagccagctggagcacctgca

SEQ ID NO: 564672 - DNA, 120 bp, Artificial Sequence
  ENSG00000169976_1 (sequence is synthesized)
gtccaagtacatcggcacgggccacgccgacaccaccaagtgggagtggctggtgaaccaacaccgcgactcgtactgctcctacatgggccacttcgaccttctcaactacttcgccat

SEQ ID NO: 564673 - DNA, 120 bp, Artificial Sequence
  ENSG00000169976_2 (sequence is synthesized)
gaactgagactctgccttaccaccgcagtgcggggcacctctcccagcgtttctccggtttgccaatcctcttaagtattcctgtctccaaaggaccggctctccatggctcctgcgcct

SEQ ID NO: 564674 - DNA, 120 bp, Artificial Sequence
  ENSG00000169976_3 (sequence is synthesized)
cgtgctttccgcgtacagaagtgcttgcccggggagtcccgcctgacctgccttcatgtggacccttagaacagcactgggagaccagcaggactcctgagaactgtgctggtggagagg

SEQ ID NO: 564675 - DNA, 120 bp, Artificial Sequence
  ENSG00000169976_4 (sequence is synthesized)
tcctagagccggcgagcgtttgagaagagggcatggcgctggagtgagatgggatttggcgtctcgtttttggctaattgattgtcattggctttttccataaagtttagaaatcgttca

SEQ ID NO: 564676 - DNA, 120 bp, Artificial Sequence
  ENSG00000169981_0 (sequence is synthesized)
ctgtccggtcattgttctcgtgccggtagaagctgaagtaccggtcagccagcctcctgctgcagagccagtgaactcaggtcgggcttctcagctgcgcacataggcagtactcatctt

SEQ ID NO: 564677 - DNA, 120 bp, Artificial Sequence
  ENSG00000169981_1 (sequence is synthesized)
ggccctgggaagaaactcaagaagaagcttttgaaacataaagcttggatggggtttgacctctgcagggcagcgcccagctataggagttcccctgctgagcagagaagatgactgcag

SEQ ID NO: 564678 - DNA, 120 bp, Artificial Sequence
  ENSG00000169981_2 (sequence is synthesized)
aattgagagaagccatggccctagccccatggggcccagtgaaggtgaaaaaggaggaggaagaagaagaaaacttcccaggtcaggcatccagccaacaagtgcactccgagaacatca

SEQ ID NO: 564679 - DNA, 120 bp, Artificial Sequence
  ENSG00000169981_3 (sequence is synthesized)
aagtctgggccccagtgcagggtcttcagacaggccttgatggatcagaagaggaagaaaagggtcagaacatatcctgggatatggcggtagtcctgaaagcaactcaggaggcacctg

SEQ ID NO: 564680 - DNA, 120 bp, Artificial Sequence
  ENSG00000169981_4 (sequence is synthesized)
ctgcttcaacccttggcagctactcattaccagggactctggccaagagtgagatactggagactcatgggaccatgaactttctaggtgctgaaaccaagaacctacagttactggttc

SEQ ID NO: 564681 - DNA, 120 bp, Artificial Sequence
  ENSG00000169981_5 (sequence is synthesized)
caaaaactgagatatgtgaggaagctgaaaaacccctcatcatatcagaaagaatccagaaagctgatcctcaaggacctgagttaggagaagcttgtgaaaagggaaacatgttaaaga

SEQ ID NO: 564682 - DNA, 120 bp, Artificial Sequence
  ENSG00000169981_6 (sequence is synthesized)
ggcagagaataaagagagaaaagaaagatttcagacaagtgatagtgaatgactgtcacttacctgaaagcttcaaagaagaggaaaaccagaaatgtaagaaatctggaggaaaatata

SEQ ID NO: 564683 - DNA, 120 bp, Artificial Sequence
  ENSG00000169981_7 (sequence is synthesized)
gccttaattctggcgctgttaaaaatccaaaaacccagcttggacaaaagccttttacgtgtagcgtgtgtgggaaaggatttagtcagagtgcaaacctcgttgtgcatcagcgaatcc

SEQ ID NO: 564684 - DNA, 120 bp, Artificial Sequence
  ENSG00000169981_8 (sequence is synthesized)
acactggagagaaaccctttgaatgtcatgagtgtgggaaggccttcattcagagtgcaaacctcgttgtgcatcagagaatccacactggacagaaaccttatgtttgctcaaaatgtg

SEQ ID NO: 564685 - DNA, 120 bp, Artificial Sequence
  ENSG00000169981_9 (sequence is synthesized)
ggaaagccttcactcagagttcaaatctgactgtacatcaaaaaatccactccttagaaaaaacttttaagtgcaatgaatgtgagaaagcctttagttacagctcacaacttgctcggc

SEQ ID NO: 564686 - DNA, 120 bp, Artificial Sequence
  ENSG00000169981_10 (sequence is synthesized)
accagaaagtccacattacggaaaaatgctatgaatgtaatgaatgtgggaaaacatttactaggagctcaaacctcattgtccaccagaggatccacactggggagaagccctttgcct

SEQ ID NO: 564687 - DNA, 120 bp, Artificial Sequence
  ENSG00000169981_11 (sequence is synthesized)
cctttacccagagtgcaaatcttattgtacatcagcgaagccatactggtgagaagccatatgagtgtaaagagtgtgggaaagcctttagttgtttttcacaccttattgtgcaccaga

SEQ ID NO: 564688 - DNA, 120 bp, Artificial Sequence
  ENSG00000169981_12 (sequence is synthesized)
gaattcacactgcagagaaaccttacgactgcagcgaatgtgggaaagccttcagtcagctctcttgccttattgtccaccagagaattcacagtggagatcttccttacgtgtgtaatg

SEQ ID NO: 564689 - DNA, 120 bp, Artificial Sequence
  ENSG00000169981_13 (sequence is synthesized)
aatgtgggaaggccttcacatgtagctcatacctacttattcatcagagaattcataatggagaaaaaccttacacatgtaatgagtgtgggaaggccttcagacagaggtcgagcctca

SEQ ID NO: 564690 - DNA, 120 bp, Artificial Sequence
  ENSG00000169981_14 (sequence is synthesized)
ccgtgcaccagagaacccacactggggagaagccctatgaatgtgagaagtgtggtgcagctttcatttccaactcacacctcatgcgacaccatagaacccatcttgttgaataacaag

SEQ ID NO: 564691 - DNA, 120 bp, Artificial Sequence
  ENSG00000169981_15 (sequence is synthesized)
taaggaagaggaagacctccagcattggtcataaccttctgcctccctaatgagacacctctttgctgttttcttcctcctctataaaagtgagggctgtgtccttaaaagttatagttt

SEQ ID NO: 564692 - DNA, 120 bp, Artificial Sequence
  ENSG00000169981_16 (sequence is synthesized)
tcaggaatgcagcagaagacacaagaaaagcatttcagaggctaatttaaaacaaaaagtaagcacctaaaggcaaggactttgttttaactgtaccttaagcggtcatgttctctgaag

SEQ ID NO: 564693 - DNA, 120 bp, Artificial Sequence
  ENSG00000169981_17 (sequence is synthesized)
tggaatgtggctttcctaggaatgggtcgtacaaagctaagtggtaatgatgctatttggggaaaggtcttttttgcttaattttgttttttaaaactctgatgattgcttgagcaacag

SEQ ID NO: 564694 - DNA, 120 bp, Artificial Sequence
  ENSG00000169981_18 (sequence is synthesized)
gcaggttatctgcctggttgaattctggttgaaccgtgtattctaatatttctggttaagtggtgactgggtaaggaaaccacttggggtagcagttcaacaattcacttacgaatgttt

SEQ ID NO: 564695 - DNA, 120 bp, Artificial Sequence
  ENSG00000169981_19 (sequence is synthesized)
ataagctttccatttcctaggtaattttttaaaagccagtcaaaacaaaaactttactgaaaatggacagaaataggaaatggactttttccttactgtctatacctcctgaaccttggt

SEQ ID NO: 564696 - DNA, 120 bp, Artificial Sequence
  ENSG00000169981_20 (sequence is synthesized)
attgtaaagatctggggacctctgggtctgttctgaccattccctagtctccatggccaagcactcaaggattgatggacaccacacaccagctatattcatttgccaagatcaacagct

SEQ ID NO: 564697 - DNA, 120 bp, Artificial Sequence
  ENSG00000169981_21 (sequence is synthesized)
ccttctccaaacaactcaagcccccaattcccatcgcattccatttgggtgagatgcaactaacagccccttcctggatgaaggagtcaaagaataaagcttgcctagaggcatgcccca

SEQ ID NO: 564698 - DNA, 120 bp, Artificial Sequence
  ENSG00000169989_0 (sequence is synthesized)
ggccagaggcaccggctagagctgggagcttgcggaagggcgcccctgcctggtcttgagaggtcgaaggtctccaggaggcctccgcctccctctttttcattcacacaccctagcctc

SEQ ID NO: 564699 - DNA, 120 bp, Artificial Sequence
  ENSG00000169989_1 (sequence is synthesized)
acacgttaggaggacccccccaacagaccgtgagctggtgccgggagggtggaggtagatgtacctcacctccacgctaccacagaagagcgaaagctgctttctcagccaccggagagc

SEQ ID NO: 564700 - DNA, 120 bp, Artificial Sequence
  ENSG00000169989_2 (sequence is synthesized)
acgaagaagaagaagatatactggcaagttctagaaggattctaccattttcttctttaccatgaacaaacttgaaaattaatgggtaatagttgcatgaaaacttttgaacgttttttc

SEQ ID NO: 564701 - DNA, 120 bp, Artificial Sequence
  ENSG00000169989_3 (sequence is synthesized)
ttatctctgaggccttctatggagaattaataggaggttgaatgtgtgcatggataaaatggatcatcttaaaggattgaagttccaaaaatacatcagcaggactggacaggttttata

SEQ ID NO: 564702 - DNA, 120 bp, Artificial Sequence
  ENSG00000169989_4 (sequence is synthesized)
taatgagatttctattttagcttgacttctacaactctgaataagctataaactgagctatacaaggtactaggaaggaagtttctcttctaaaatattctagttgcatataatattttt

SEQ ID NO: 564703 - DNA, 120 bp, Artificial Sequence
  ENSG00000169989_5 (sequence is synthesized)
cttcagatctttgaaaaagcatattttgtcatcaagttcctacaaaataagactattagacaccaacttttagtgtataaagtaggatagaaagcagcaatctatattatactggaaaac

SEQ ID NO: 564704 - DNA, 120 bp, Artificial Sequence
  ENSG00000169989_6 (sequence is synthesized)
aaatttaattaaagaaacagtcaccaggaagttaagaagagtaatctctacataagcactggctgagatggcagaagcttctgtggatgcctcaactctgcctgtaacagtgaagaaaaa

SEQ ID NO: 564705 - DNA, 120 bp, Artificial Sequence
  ENSG00000169989_7 (sequence is synthesized)
gaaaagcctatccattgaggaaaagatcgacatcataaatgcagtggaaagtggcaagaaaaaagcagagattgctgctgaatatggaataaagaaaaattcattgtcttctattatgaa

SEQ ID NO: 564706 - DNA, 120 bp, Artificial Sequence
  ENSG00000169989_8 (sequence is synthesized)
gaataaagacaaagttctagaagcctttgaatctctaagatttgatccaaagagaaaaagactgagaactgctttttacacagatctggaagaggcattaatgagatggtatcgaattgc

SEQ ID NO: 564707 - DNA, 120 bp, Artificial Sequence
  ENSG00000169989_9 (sequence is synthesized)
tcagtgtctaaatgtaccagttaatggtccgatgttacgtctaaaagctaatgattttgcccagaaactgggccataatgattttaagtgcagtaatggttggctggatcgttttaaatc

SEQ ID NO: 564708 - DNA, 120 bp, Artificial Sequence
  ENSG00000169989_10 (sequence is synthesized)
ctacaggtgtaccagtagacccttcgactgtctggtaccaaaatgtacttccttattatttaaatgattatcatcctaaaaatgtttttaatataaaagagactgggctgctttatcgaa

SEQ ID NO: 564709 - DNA, 120 bp, Artificial Sequence
  ENSG00000169989_11 (sequence is synthesized)
tgttacctaccaatacatttgcatttaaaggcgaaacatgttcagttggaaagttatgcaaagacagaataactctggtggttggcacaaacatggatggctcagagaaacttcctttgc

SEQ ID NO: 564710 - DNA, 120 bp, Artificial Sequence
  ENSG00000169989_12 (sequence is synthesized)
ttgtcattggaaaaaagagaactccacattgtttcaaaggtttaaaatcattgcctgtgtgttatgaagctaacagaatggcatggatgacctccgatgtatttgaacaatggatgcgaa

SEQ ID NO: 564711 - DNA, 120 bp, Artificial Sequence
  ENSG00000169989_13 (sequence is synthesized)
agcttgatgaggaatttcaagcccagcaacgaagagtggtgatttttgttgagtcttttccagcacatccagaggtaaagaacctaaaatccattgagttagcattctttccatcatgtt

SEQ ID NO: 564712 - DNA, 120 bp, Artificial Sequence
  ENSG00000169989_14 (sequence is synthesized)
tatcttccaaatgtatagctatgaaacaaggtgttattaaaagccttaaaatcaaatatcgacactgtcttatcaagaaatttttaagctctgttgaaggtagcaaagaatttacatttt

SEQ ID NO: 564713 - DNA, 120 bp, Artificial Sequence
  ENSG00000169989_15 (sequence is synthesized)
cactactagatgcagttgatacattgcatctttgctggagggctgtaaccccagagactattgttaaaagctatgaagaggcaggattcaaatctcaaaagggagaaagtgacataacaa

SEQ ID NO: 564714 - DNA, 120 bp, Artificial Sequence
  ENSG00000169989_16 (sequence is synthesized)
atgcagagaaggatactggtctggatttggttgctgatgctctgggggcaggagtagaatttcctgaaggtttatctatagaagaatatgctgccctggatgatgatttggagacatgtg

SEQ ID NO: 564715 - DNA, 120 bp, Artificial Sequence
  ENSG00000169989_17 (sequence is synthesized)
aagcagcaccaaatggtgattccatatgcaccaaagaaagtaaatcggatgaaactggattttacacttctgatgaagaggatgatgatggatctccaggaactgaactccctttaccat

SEQ ID NO: 564716 - DNA, 120 bp, Artificial Sequence
  ENSG00000169989_18 (sequence is synthesized)
caaaatctgaggcaataactgctttagatactctgaaaaaatttctcagaagtcaagatatgaatgacggacttcaaaattctttagcagaccttgaaaattttattaactctttatcac

SEQ ID NO: 564717 - DNA, 120 bp, Artificial Sequence
  ENSG00000169989_19 (sequence is synthesized)
ctaagtaactatgtattgtacatctaaagagtaatagcttttcctgatacattttattatataaggtatgtaaaggagttgtaccacaccacttaaacataaaaaatggaaaactgctaa

SEQ ID NO: 564718 - DNA, 120 bp, Artificial Sequence
  ENSG00000169991_0 (sequence is synthesized)
agtgccggccgagagtcctctgcgtgcggctgccgcggcccctccacagcgtctctgacagcccgggcggtgagacccgcgacccttctggccccgcgcagataccgcggcctccaccgc

SEQ ID NO: 564719 - DNA, 120 bp, Artificial Sequence
  ENSG00000169991_1 (sequence is synthesized)
gtcccgaggagcggccgagtgccctctctcgcctcggcgcccgcatccggggccatccgtcctgccgtctctgcggaggccgcatctggcgcgcatctggaaccgcccggccggccgcgc

SEQ ID NO: 564720 - DNA, 120 bp, Artificial Sequence
  ENSG00000169991_2 (sequence is synthesized)
gcgccgggagccctgcccggagctggagccgcacctggagccgcgggcccggggccctgagccgcgcagccggcgcatggtgaactcgctgctgttcggggagatggccttggccttcgg

SEQ ID NO: 564721 - DNA, 80 bp, Artificial Sequence
  ENSG00000169991_3 (sequence is synthesized)
tgaactcgctgctgttcggggagatggccttggccttcggctgcccgccgggcggcggcggcgggggctgccctggcggg

SEQ ID NO: 564722 - DNA, 120 bp, Artificial Sequence
  ENSG00000169991_4 (sequence is synthesized)
tgcgggacgacctgggctccaacatccacctcttgaaggggctcaacgtgcgcttccgctgcttcctggctaaggtgcacgagctggagcggcgcaaccggctgctggagaagcagctgg

SEQ ID NO: 564723 - DNA, 120 bp, Artificial Sequence
  ENSG00000169991_5 (sequence is synthesized)
agcagcagcagagcgagcgcgagcggcggctgcgctacaagaccttctcccgcgagcaggccgtgcagaccgggcccgagttgctgcggcccccggcgcccggcggcgggcacggcctca

SEQ ID NO: 564724 - DNA, 80 bp, Artificial Sequence
  ENSG00000169991_6 (sequence is synthesized)
cctgggcggcctgccccccggcggcggctcgcacccgcagcactacggccgcctgcccgggaccatctggagctacacgc

SEQ ID NO: 564725 - DNA, 120 bp, Artificial Sequence
  ENSG00000169991_7 (sequence is synthesized)
aggtgcggcgcacgggcggcggcggcgtggagaccgtgcagggccccggcgtgtcgtgggtgcaccccgacggcgtgggcgtgcagatcgacaccatcacgccggagatccgcgcgctct

SEQ ID NO: 564726 - DNA, 120 bp, Artificial Sequence
  ENSG00000169991_8 (sequence is synthesized)
acaacgtgctggccaaggtgaagcgcgagcgcgacgagtataagcggaggtgggaggaggagctcgccaagcgcatgaaccttcagaccatggtggacacgctgcaggaggcagcacagg

SEQ ID NO: 564727 - DNA, 120 bp, Artificial Sequence
  ENSG00000169991_9 (sequence is synthesized)
aggctgatgccatccaggaggagatgaatgagaagatcgagcggctcaaggccgagctggtggtgtttaaggggcttatgagtgaccccatgacagacctggacacaaagatccaagaaa

SEQ ID NO: 564728 - DNA, 120 bp, Artificial Sequence
  ENSG00000169991_10 (sequence is synthesized)
aggccatgaaggtggacatggacatctgccgccgaatcgatatcacggccaagctgtgcgatgtcgcacagcagcggaactcagaagacgtgtccaagatcttccaggtggtccccaaaa

SEQ ID NO: 564729 - DNA, 120 bp, Artificial Sequence
  ENSG00000169991_11 (sequence is synthesized)
agaaagagcgtaaggtggcttccgatgatgacatctctgagcaggacggggaggtgaaccggttctcggacgatgaggtcggctccatgaacatcaccgatgagatgaagcgcatgttta

SEQ ID NO: 564730 - DNA, 120 bp, Artificial Sequence
  ENSG00000169991_12 (sequence is synthesized)
accagctgcgggagacctttgactttgacgacgactgtgacagcctgacgtgggaagagaatgaagacacgctgctgctctgggaggatttcaccaactgcaatccgaccatcgacctgc

SEQ ID NO: 564731 - DNA, 120 bp, Artificial Sequence
  ENSG00000169991_13 (sequence is synthesized)
agggcgagcaagaggaaaacttgggcaacttgatccatgagaccgaatccttcttcaagacgagagacaaggagtaccaggaaacgataggtcagatcgagctcgagctggccacagcca

SEQ ID NO: 564732 - DNA, 120 bp, Artificial Sequence
  ENSG00000169991_14 (sequence is synthesized)
aaagtgacatgaaccgacacctgcacgagtacatggagatgtgcagcatgaagcgaggcctggacgtgcagatggagacctgccgccggctcatcaaaggctccgcagacaggaattcac

SEQ ID NO: 564733 - DNA, 120 bp, Artificial Sequence
  ENSG00000169991_15 (sequence is synthesized)
cgtcccccagctccgtggccagcagcgactcaggaagtacagatgagatccaggatgagttcgagcgcgaggcggatgtggagcccatggtcagctgatgactgaggccctgcgagcctg

SEQ ID NO: 564734 - DNA, 120 bp, Artificial Sequence
  ENSG00000169991_16 (sequence is synthesized)
gtggtcttggtgatggggccctgccacctctcctcatggggccaggaaggcccctcggagtggggttcgaagccacaccacacagactttctctgccctcccttctctggaggccctgag

SEQ ID NO: 564735 - DNA, 120 bp, Artificial Sequence
  ENSG00000169991_17 (sequence is synthesized)
ggactgctgcttccttccttccttccacaccaccaacgggtgccccgtctccatcccccacccacccaaggaatggtgctgtcaatttctattgttctccacattacaaatgcagacttc

SEQ ID NO: 564736 - DNA, 120 bp, Artificial Sequence
  ENSG00000169991_18 (sequence is synthesized)
tgtgcggactttgcagtgttaactgtgccttctcccttaagctgagccactttgagctccaaagaattattcctagcaggtgtttttatacagaactctaagctgagggccgggccaacc

SEQ ID NO: 564737 - DNA, 120 bp, Artificial Sequence
  ENSG00000169991_19 (sequence is synthesized)
ggccgtggtgtaatgtggtttctgccgtccgtcccacctgctcctctgattggccatgggctatgccctcccttcctcctgagccagcccagactcggcctggagcttggggtgctctgc

SEQ ID NO: 564738 - DNA, 120 bp, Artificial Sequence
  ENSG00000169991_20 (sequence is synthesized)
caacccccaggaaggagccgcttgcctctgtgagctttctaggcctgggtagggaccaccccaattttctcactccctgaaggagagaaaggtggaaggaagggaaggaggacacatttt

SEQ ID NO: 564739 - DNA, 120 bp, Artificial Sequence
  ENSG00000169991_21 (sequence is synthesized)
aattttttggggggatcgagtggcaaagttgaagggacaaggcactgtgaggggaaggcagagcctcactgtgtttaaactactatgcaaaaaacaaaacaaacaacaaaagcagcttgc

SEQ ID NO: 564740 - DNA, 120 bp, Artificial Sequence
  ENSG00000169991_22 (sequence is synthesized)
cttatatcattgtggaaggcaggacctctcctgggctcctggcttccccctggagctgggagagaggccggggttagggtgatctgtgtggcagcactgactgggtagtgtgggtttggc

SEQ ID NO: 564741 - DNA, 120 bp, Artificial Sequence
  ENSG00000169991_23 (sequence is synthesized)
cgaggttggtcatgaggctggggttcccgcaaggcactggcctccctgaccgcttgcttccttccggacctctgggttcagggcgggggcggagggatccttgatttccctgataacttg

SEQ ID NO: 564742 - DNA, 120 bp, Artificial Sequence
  ENSG00000169991_24 (sequence is synthesized)
atgttcttccctccctcgccagccaacaatagaggcttagagatctgtaatttctctgtgagaaagtctgaaggggccaggcctggtctctgctcccttctacccgccttgggttaggac

SEQ ID NO: 564743 - DNA, 120 bp, Artificial Sequence
  ENSG00000169991_25 (sequence is synthesized)
agtgcaggagctggagtgagggccatcctctttctgctcctcgacacacgcaagccgctctcagcagttccctcgactggccagtcggggtattgatctgagccagcatcccccaagact

SEQ ID NO: 564744 - DNA, 120 bp, Artificial Sequence
  ENSG00000169991_26 (sequence is synthesized)
tgaatggcttgagtgggactgcgttgaagggcactgtgtggcccccttccaaatctcagcttggagccagctgagcaggctttgctttattattattttttaagcctactgcagtgggtc

SEQ ID NO: 564745 - DNA, 120 bp, Artificial Sequence
  ENSG00000169991_27 (sequence is synthesized)
tgttgccaattttaattttttattgtcccaggagctccctctagtggtcaaggtagcaaaatgtgcccaaggactagaacttgggtccctctgccttgcctggaggcagaaggagggggc

SEQ ID NO: 564746 - DNA, 120 bp, Artificial Sequence
  ENSG00000169991_28 (sequence is synthesized)
tctgggtttgactgggattgtggtccccaggggtccgtggcctttaaggctcttctctcttttctgtttcccccacctgtgttacagtcttaaaaatactgtacataaaagatatatgta

SEQ ID NO: 564747 - DNA, 120 bp, Artificial Sequence
  ENSG00000169991_29 (sequence is synthesized)
gagagagagagagagcgtgagaatgtgttagtgactatgtgtgatgtaatttatcacgatttggtggccttcgtcatgagttttttcctttgttttcttttgctgggggcacctcccacg

SEQ ID NO: 564748 - DNA, 120 bp, Artificial Sequence
  ENSG00000169991_30 (sequence is synthesized)
ggtcccctgtggcagtctggctgtgacacttccatagtcagcatctcttgttagccaaacagttccctttgacaggtacttggagggacaatggttttggaagagagacggcccttctct

SEQ ID NO: 564749 - DNA, 120 bp, Artificial Sequence
  ENSG00000169991_31 (sequence is synthesized)
ctcctcactcacccttgttctaaaggttacagggttcaaacatacctgattcttgttgttattgttgttgaatttttattttaaccaaaggttatcagagccagttgggcttggacctca

SEQ ID NO: 564750 - DNA, 120 bp, Artificial Sequence
  ENSG00000169991_32 (sequence is synthesized)
gctgctaaaaagattttccgtttcctcgagggcaggaaaacatccaccctcgtgggtctcctccgtccagggccgagggaggcattggacaatgtggtatgggagtttcgtgggcagcgt

SEQ ID NO: 564751 - DNA, 120 bp, Artificial Sequence
  ENSG00000169991_33 (sequence is synthesized)
ggaagccggccctgggttgttccccaaggtggtgggagggtgacagatatatctttagacttaagactgtaaggcagcagtgttagcatgggagtaactaaggttactgtggttatcggt

SEQ ID NO: 564752 - DNA, 120 bp, Artificial Sequence
  ENSG00000169991_34 (sequence is synthesized)
gtccggcggtattatttttactttcctccttgtatacataggtcatttgtctttgaggactagggtactctagggagtttgaaaactgcaggagccagaaagagatcctggcctgagagt

SEQ ID NO: 564753 - DNA, 120 bp, Artificial Sequence
  ENSG00000169991_35 (sequence is synthesized)
cccttctggctggcttttaatatctgctctcctcttgggagtgaggacttggggcaggtgggtaggagagggaaagccagagtgtgatgggcctgcctcctgggctggttcctgggtccg

SEQ ID NO: 564754 - DNA, 120 bp, Artificial Sequence
  ENSG00000169991_36 (sequence is synthesized)
gcctgcctgcctgcctgcctgcctctccaccacatgcttttttcagttaatgtcagtgggccctgcttgtcccctcaccatgagcccacagcttgccaagaaagaccccaacgctcgctg

SEQ ID NO: 564755 - DNA, 120 bp, Artificial Sequence
  ENSG00000169991_37 (sequence is synthesized)
gggcagcaccagtcctagctgggacgaattggtccatcctttgtaaagctgtaaatacttaattttgactttctatttctaagcccagtgtcatattgacactggtattttagaattttc

SEQ ID NO: 564756 - DNA, 120 bp, Artificial Sequence
  ENSG00000169991_38 (sequence is synthesized)
tcagatgggctctcctgcgctgccctctgtctcctgtttttgggggttttatacaaacagaggattggggagggataggaagactagcatccttttggctccctggttggttgtgaaata

SEQ ID NO: 564757 - DNA, 120 bp, Artificial Sequence
  ENSG00000169991_39 (sequence is synthesized)
cacacacacacacacacacacactcgcactcctctgagactccgaacagagaaaaaaattattggcaaatcaacacatttttctttctcgtcttgagaaaatgtcttgaggtccctgaag

SEQ ID NO: 564758 - DNA, 120 bp, Artificial Sequence
  ENSG00000169991_40 (sequence is synthesized)
ccctgaagggccaaatccatcgtggactaactctgtgggtagagctcagatgacctagggagaattaaaccacttaagcttggagtgggaggagagggggtggggtgggggagaatataa

SEQ ID NO: 564759 - DNA, 120 bp, Artificial Sequence
  ENSG00000169991_41 (sequence is synthesized)
gatgtaacttaagctaaatgtaatctatttataaagcaagagactctcatctatttttatgaaaggaagggttttttaatctagggtaggcagttgtggtagcccagcattttcctgtgg

SEQ ID NO: 564760 - DNA, 120 bp, Artificial Sequence
  ENSG00000169991_42 (sequence is synthesized)
acgagacatggtgcatgttgttgctggattgaatggaacccattcctgtcccccggcctcgtcttctgtcctcacttttggtcatccacacccatgagcagcttcagcagagtgtaggtc

SEQ ID NO: 564761 - DNA, 120 bp, Artificial Sequence
  ENSG00000169991_43 (sequence is synthesized)
ccacttcaccccattctcctctcctctgacccctcagctccttggaagtcttggggtggggatctgagggggtgggtgggctgcaggaaattcagaaatgtggtgggtgggggaagggac

SEQ ID NO: 564762 - DNA, 120 bp, Artificial Sequence
  ENSG00000169991_44 (sequence is synthesized)
aaggcgcattagggagggaacaagctgggctctggggataggctctgattaattagttactctgactctggtctgccgagatccatttccaacccagttgcgttgggagagggttgggag

SEQ ID NO: 564763 - DNA, 120 bp, Artificial Sequence
  ENSG00000169991_45 (sequence is synthesized)
gcagcagagcatgggtgacagtgggagcacacgacttccttggagcctgggcctttgcgggtcccaggtggtcaggcagctggagcagaagtggaaatggcttaagatgctcatagccca

SEQ ID NO: 564764 - DNA, 120 bp, Artificial Sequence
  ENSG00000169991_46 (sequence is synthesized)
gccccggctgtgtctactccaggccaagcctgggctgcagtccttgctatgttccccccagggccctggggggagggatcagggtgctgggggtttcctaggacaggggtcttccccctt

SEQ ID NO: 564765 - DNA, 120 bp, Artificial Sequence
  ENSG00000169991_47 (sequence is synthesized)
gagacaccaagctctggctctagaagagctctctcctggagtggggagtctggaggggactgggtgggtgcaggtaaagccagattctctctggaagggaattttctatgaatggatgat

SEQ ID NO: 564766 - DNA, 120 bp, Artificial Sequence
  ENSG00000169991_48 (sequence is synthesized)
ttccaggctcagggtgggctgtgtgttagttctgagcaaatccctcaccaagacccttccctcccaagccctcaaagaaatgaggcaaagcccttccctgcaagaccccttgtggatgtt

SEQ ID NO: 564767 - DNA, 120 bp, Artificial Sequence
  ENSG00000169991_49 (sequence is synthesized)
tttgcatctacctgatttttagccccacccagggagactttataccccatgatcctgccccaccgttgctgttgtctgccagctgggtctagcatcacagggaagggggggatttatact

SEQ ID NO: 564768 - DNA, 120 bp, Artificial Sequence
  ENSG00000169991_50 (sequence is synthesized)
catggaaagactactgatcctaccggaaaccaacctgtttactgtactgttgtaaatatcatgccctttatatcctgtatattggcttcttttaaataaagtgaaatgtcttagaactga

SEQ ID NO: 564769 - DNA, 120 bp, Artificial Sequence
  ENSG00000169992_0 (sequence is synthesized)
gcaacttggtctgaattccaggtcactaaccacttgtctcttctgtttccccattcctttctgtctgccccatccaatttcccttgccctcttccacctctgtatttttctgtctgtccg

SEQ ID NO: 564770 - DNA, 120 bp, Artificial Sequence
  ENSG00000169992_1 (sequence is synthesized)
tctgtctgtatcctgcctccctgcccctctcgctccaccccccgcaggtcgggcctgccttcaccttctcccatttccttccccttccccaccccgtgccccctccatggagaggaacag

SEQ ID NO: 564771 - DNA, 120 bp, Artificial Sequence
  ENSG00000169992_2 (sequence is synthesized)
accccttctctgtccagtctaacccaggtccctccccaaccccctcctccctcctttccccccgcccctcctccctcctggggcgaggggggcctccctccctctcccccccttctctct

SEQ ID NO: 564772 - DNA, 120 bp, Artificial Sequence
  ENSG00000169992_3 (sequence is synthesized)
ctctccgaggggggggggtcccagggagggagggggggtcccccgatcagcatgtggctcctggcgctgtgtctggtggggctggcgggggctcaacgcgggggagggggtcccggcggc

SEQ ID NO: 564773 - DNA, 120 bp, Artificial Sequence
  ENSG00000169992_4 (sequence is synthesized)
ggcgccccgggcggccccggcctgggcctcggcagcctcggcgaggagcgcttcccggtggtgaacacggcctacgggcgagtgcgcggtgtgcggcgcgagctcaacaacgagatcctg

SEQ ID NO: 564774 - DNA, 120 bp, Artificial Sequence
  ENSG00000169992_5 (sequence is synthesized)
aacgagatcctgggccccgtcgtgcagttcttgggcgtgccctacgccacgccgcccctgggcgcccgccgcttccagccgcctgaggcgcccgcctcgtggcccggcgtgcgcaacgcc

SEQ ID NO: 564775 - DNA, 120 bp, Artificial Sequence
  ENSG00000169992_6 (sequence is synthesized)
cccgcctgcccgcagaacctgcacggggcgctgcccgccatcatgctgcctgtgtggttcaccgacaacttggaggcggccgccacctacgtgcagaaccagagcgaggactgcctgtac

SEQ ID NO: 564776 - DNA, 120 bp, Artificial Sequence
  ENSG00000169992_7 (sequence is synthesized)
ctcaacctctacgtgcccaccgaggacggtccgctcacaaaaaaacgtgacgaggcgacgctcaatccgccagacacagatatccgtgaccctgggaagaagcctgtgatgctgtttctc

SEQ ID NO: 564777 - DNA, 120 bp, Artificial Sequence
  ENSG00000169992_8 (sequence is synthesized)
catggcggctcctacatggaggggaccggaaacatgttcgatggctcagtcctggctgcctatggcaacgtcattgtagccacgctcaactaccgtcttggggtgctcggttttctcagc

SEQ ID NO: 564778 - DNA, 120 bp, Artificial Sequence
  ENSG00000169992_9 (sequence is synthesized)
accggggaccaggctgcaaaaggcaactatgggctcctggaccagatccaggccctgcgctggctcagtgaaaacatcgcccactttgggggcgaccccgagcgtatcaccatctttggt

SEQ ID NO: 564779 - DNA, 120 bp, Artificial Sequence
  ENSG00000169992_10 (sequence is synthesized)
tccggggcaggggcctcctgcgtcaaccttctgatcctctcccaccattcagaagggctgttccagaaggccatcgcccagagtggcaccgccatttccagctggtctgtcaactaccag

SEQ ID NO: 564780 - DNA, 120 bp, Artificial Sequence
  ENSG00000169992_11 (sequence is synthesized)
ccgctcaagtacacgcggctgctggcagccaaggtgggctgtgaccgagaggacagcgctgaagctgtggagtgtctgcgccggaagccctcccgggagctggtggaccaggacgtgcag

SEQ ID NO: 564781 - DNA, 120 bp, Artificial Sequence
  ENSG00000169992_12 (sequence is synthesized)
cctgcccgctaccacatcgcctttgggcccgtggtggatggcgacgtggtccccgatgaccctgagatcctcatgcagcagggagaattcctcaactacgacatgctcatcggcgtcaac

SEQ ID NO: 564782 - DNA, 120 bp, Artificial Sequence
  ENSG00000169992_13 (sequence is synthesized)
cagggagagggcctcaagttcgtggaggactctgcagagagcgaggacggtgtgtctgccagcgcctttgacttcactgtctccaactttgtggacaacctgtatggctacccggaaggc

SEQ ID NO: 564783 - DNA, 120 bp, Artificial Sequence
  ENSG00000169992_14 (sequence is synthesized)
aaggatgtgcttcgggagaccatcaagtttatgtacacagactgggccgaccgggacaatggcgaaatgcgccgcaaaaccctgctggcgctctttactgaccaccaatgggtggcacca

SEQ ID NO: 564784 - DNA, 120 bp, Artificial Sequence
  ENSG00000169992_15 (sequence is synthesized)
gctgtggccactgccaagctgcacgccgactaccagtctcccgtctacttttacaccttctaccaccactgccaggcggagggccggcctgagtgggcagatgcggcgcacggggatgaa

SEQ ID NO: 564785 - DNA, 120 bp, Artificial Sequence
  ENSG00000169992_16 (sequence is synthesized)
ctgccctatgtctttggcgtgcccatggtgggtgccaccgacctcttcccctgtaacttctccaagaatgacgtcatgctcagtgccgtggtcatgacctactggaccaacttcgccaag

SEQ ID NO: 564786 - DNA, 120 bp, Artificial Sequence
  ENSG00000169992_17 (sequence is synthesized)
actggggaccccaaccagccggtgccgcaggataccaagttcatccacaccaagcccaatcgcttcgaggaggtggtgtggagcaaattcaacagcaaggagaagcagtatctgcacata

SEQ ID NO: 564787 - DNA, 120 bp, Artificial Sequence
  ENSG00000169992_18 (sequence is synthesized)
ggcctgaagccacgcgtgcgtgacaactaccgcgccaacaaggtggccttctggctggagctcgtgccccacctgcacaacctgcacacggagctcttcaccaccaccacgcgcctgcct

SEQ ID NO: 564788 - DNA, 120 bp, Artificial Sequence
  ENSG00000169992_19 (sequence is synthesized)
ccccgggcacacgccggcccccgccgcctgccaccctgcctcccgagcccgagcccgagcccggcccaagggcctatgaccgcttccccggggactcacgggactactccacggagctga

SEQ ID NO: 564789 - DNA, 120 bp, Artificial Sequence
  ENSG00000169992_20 (sequence is synthesized)
gcctccctcctcttcctcaacatcctggcctttgctgccctctactacaagcgggaccggcggcaggagctgcggtgcaggcggcttagcccacctggcggctcaggctctggcgtgcct

SEQ ID NO: 564790 - DNA, 120 bp, Artificial Sequence
  ENSG00000169992_21 (sequence is synthesized)
ggtgggggccccctgctccccgccgcgggccgtgagctgccaccagaggaggagctggtgtcactgcagctgaagcggggtggtggcgtcggggcggaccctgccgaggctctgcgccct

SEQ ID NO: 564791 - DNA, 120 bp, Artificial Sequence
  ENSG00000169992_22 (sequence is synthesized)
gactacaccctggccctgcgccgggcaccggacgatgtgcctctcttggcccccggggccctgaccctgctgcccagtggcctggggccaccgccacccccaccgcccccctcccttcat

SEQ ID NO: 564792 - DNA, 120 bp, Artificial Sequence
  ENSG00000169992_23 (sequence is synthesized)
ccctcccttcatcccttcgggcccttccccccgccccctcccaccgccaccagccacaacaacacgctaccccacccccactccaccactcgggtatagggggtgggtggggaggccctc

SEQ ID NO: 564793 - DNA, 120 bp, Artificial Sequence
  ENSG00000169992_24 (sequence is synthesized)
ctccccggccctccctggcccggccactccgaaggcagggaggaggacttggcaactggcttttctcctgtggagtcgtcacacgccatccagcagcgctaaggtggacatgggattcct

SEQ ID NO: 564794 - DNA, 120 bp, Artificial Sequence
  ENSG00000169992_25 (sequence is synthesized)
ccctgcgatgcgtgtctttcccacgcagagaagcccagtctcttctctggatctgggcctttgaacaactggggggcgttttctcccccccattgggacaccagtcttcggtgtgtggaa

SEQ ID NO: 564795 - DNA, 120 bp, Artificial Sequence
  ENSG00000169992_26 (sequence is synthesized)
tgtggtattttcccgcgtggaggtgtgctttctcacaacggggtgtgttttcccatgtgcagggtgaggtttttttttgccaccctggacacatgttggccccctcaaagaatttctgtg

SEQ ID NO: 564796 - DNA, 120 bp, Artificial Sequence
  ENSG00000169992_27 (sequence is synthesized)
gggatttgtaccccagaatcctgttcccccatcccttctcccacctcctcccctctccctccccctggagaccctggaagtggtgtgttcacatacagtgacccttggccaccagaccac

SEQ ID NO: 564797 - DNA, 120 bp, Artificial Sequence
  ENSG00000169992_28 (sequence is synthesized)
agaggatggagcctgggaagcagcgaggaaatcacagccccctcgcccctgcctcccttgcccctaccccggcgaagcatgttccccccgacgccccccttggcacaagtcagatgaagc

SEQ ID NO: 564798 - DNA, 120 bp, Artificial Sequence
  ENSG00000169992_29 (sequence is synthesized)
acgttctgccggggaggccctcaccttccagagaggacagacacagatttcctgctgggggagggaggagtccacgcatcctgatgctgcctggaagcttattttcccgtggccaggacg

SEQ ID NO: 564799 - DNA, 120 bp, Artificial Sequence
  ENSG00000169992_30 (sequence is synthesized)
catttctctgagtggaaacaggttcttgcatgtggatgtgtgtttccccaggcagacggcccctctcttcccagcacttccctgcctcccccaggcctcaggcccagcacccagttcctc

SEQ ID NO: 564800 - DNA, 120 bp, Artificial Sequence
  ENSG00000169992_31 (sequence is synthesized)
ctcacatggcaggtgagcacagacttctagttggcaggagctgaggagggtgaacaaaccccgagggaggcccggcccttgctcccgagttggggggagggggtgtggcaacgtgccccc

SEQ ID NO: 564801 - DNA, 120 bp, Artificial Sequence
  ENSG00000169992_32 (sequence is synthesized)
cgcagaggccacgcatgtttgaccaaagccctcattgtggtccgaggacagccttttccccaggcctcagagcattgctcatccgtgccaaactgggtaggtggatttgagcggaaagac

SEQ ID NO: 564802 - DNA, 120 bp, Artificial Sequence
  ENSG00000169992_33 (sequence is synthesized)
tcccaaaatgtgccaagaatttcccagtcccaggcagggcaggggaaactaagggcaagcaggatacagggcgagggatgtggcaggtgagggggctcccgcctgtgccccttctcctca

SEQ ID NO: 564803 - DNA, 120 bp, Artificial Sequence
  ENSG00000169992_34 (sequence is synthesized)
ccatgtctcccccaccctgcctcagttctccgttccccttcatctccgtccccctctttgaagctgtccccatctcagtgtcagaccagccttctcctcagctgaccaccctcctctgac

SEQ ID NO: 564804 - DNA, 120 bp, Artificial Sequence
  ENSG00000169992_35 (sequence is synthesized)
ccacgccccctccttgtctgaaagaaaggagccttgaatggtggagggaggcagtggggagaaaggtctcaccggacaggttgggagaatgaggtcagcggtgctggggaacagatggag

SEQ ID NO: 564805 - DNA, 120 bp, Artificial Sequence
  ENSG00000169992_36 (sequence is synthesized)
ggggcagtggggacagggcttgggcagacaccagcaggaataatttgaaatgtgtgaggtgactccccggagggccttgggcttgggcatttgggaaaagaatgatgtctggaagggctt

SEQ ID NO: 564806 - DNA, 120 bp, Artificial Sequence
  ENSG00000169992_37 (sequence is synthesized)
aagggacacagtggacgaggggagagtcctcatctgctggcattttgtggggtgttagtgccaaacttgaataggggctggggtgctgtcttccactgacacccaaatccagaatccctg

SEQ ID NO: 564807 - DNA, 120 bp, Artificial Sequence
  ENSG00000169992_38 (sequence is synthesized)
gtcttgagtccccagaactttgcctcttgactgtcccttctcttcctacctccatccatggaaaattagttattttctgatcctttcccctgcctggtctagctcctctccaaacagcca

SEQ ID NO: 564808 - DNA, 120 bp, Artificial Sequence
  ENSG00000169992_39 (sequence is synthesized)
tgccctccaaatgctagagacctgggccctgaaccctgtagacagatgccctcagaattggggcatgggaggggggctgggggaccccatgattcagccacggactccaatgcccagctc

SEQ ID NO: 564809 - DNA, 120 bp, Artificial Sequence
  ENSG00000169992_40 (sequence is synthesized)
ctctccccaaaacaatcccgacaatcccttatccctaccccaaccctttgcggctctgtacacatttttaaacctggcaaaagatgaagagaatattgtaaatataaaagtttaactgtt

SEQ ID NO: 564810 - DNA, 120 bp, Artificial Sequence
  ENSG00000169992_41 (sequence is synthesized)
gggctgctgcggctgctccgccggcggatcatcactctcgggctgggatggacgcggggcgggccggccctggcgcgcggagccaggagtccgggcctcccggctgctgagcgtccctcg

SEQ ID NO: 564811 - DNA, 120 bp, Artificial Sequence
  ENSG00000169992_42 (sequence is synthesized)
gtccctcgaagcctcccctcacccccgccttccctcctaggatccgcgctgacccccgccccggggctctggactcggctcccgccctcctctgactccccggacctccccctcacgccc

SEQ ID NO: 564812 - DNA, 120 bp, Artificial Sequence
  ENSG00000169992_43 (sequence is synthesized)
gccctcgggatcgactagatccctccccctccccgaggattccggctggatccctgcccctgcaccgcggatcctgcgctcccgggccccgggcccctggggattaacgtggactcctcc

SEQ ID NO: 564813 - DNA, 120 bp, Artificial Sequence
  ENSG00000169992_44 (sequence is synthesized)
tccagcacccgatccttaggatcctccgcctggaccgccttctggtccctcgaagccggcccacggaaccagcggatcctcaatctagtcctgtcccgttgccccctcctttctctatcg

SEQ ID NO: 564814 - DNA, 120 bp, Artificial Sequence
  ENSG00000169992_45 (sequence is synthesized)
tccctactgcggggttccctgttctcgggctccccctgatcccatcccctagctctccttttcccggggatcgactggatcccggccccgccccccggggctggggcgatccccctcccc

SEQ ID NO: 564815 - DNA, 120 bp, Artificial Sequence
  ENSG00000169992_46 (sequence is synthesized)
gccgcgggggctcagaggccgccgccccctcccgaaggcctttcgccccccactcggagccctggatggaggcaccacggccccagggctgagccaggtcgggcctgccttcaccttctc

SEQ ID NO: 564816 - DNA, 120 bp, Artificial Sequence
  ENSG00000169994_0 (sequence is synthesized)
tccatacaggcttgtggaactgctgactcaggatgtcggggttcaggctgggtgaccacgtgtggctggagcctccctccacccacaagaccggcgtggccatcgggggcatcatcaaag

SEQ ID NO: 564817 - DNA, 120 bp, Artificial Sequence
  ENSG00000169994_1 (sequence is synthesized)
aggcaaagccaggcaaagtcttggttgaagatgacgagggcaaggaacactggatccgagcagaggactttggtgtcctcagtcccatgcaccccaactcagtccagggtgtggacgaca

SEQ ID NO: 564818 - DNA, 120 bp, Artificial Sequence
  ENSG00000169994_2 (sequence is synthesized)
tgatccgcctgggggacctgaacgaggcaggcatggtgcacaacctcctgatccgctaccagcagcacaagatctatacatacacaggctccatcctggtggccgtcaacccgttccagg

SEQ ID NO: 564819 - DNA, 120 bp, Artificial Sequence
  ENSG00000169994_3 (sequence is synthesized)
tgctgccgctctacaccctggagcaggtacagctctactacagccgccatatgggcgagctgcccccgcatgtctttgccatcgccaacaactgctacttcagcatgaagaggaacaaga

SEQ ID NO: 564820 - DNA, 120 bp, Artificial Sequence
  ENSG00000169994_4 (sequence is synthesized)
gggaccagtgctgcatcatcagcggcgagtctggggctggcaagacggagaccaccaagctcatcctgcagttcctggccaccatcagtggccagcattcgtggattgagcagcaggtcc

SEQ ID NO: 564821 - DNA, 120 bp, Artificial Sequence
  ENSG00000169994_5 (sequence is synthesized)
tggaagccaaccccatcctggaggcctttggaaatgccaagacaatccgcaacgacaactcaagccgctttgggaagtacattgacatctactttaaccccagcggggtgatcgagggcg

SEQ ID NO: 564822 - DNA, 120 bp, Artificial Sequence
  ENSG00000169994_6 (sequence is synthesized)
cgcgcatcgagcaatttctcctggagaagtcccgggtctgccggcaggctcccgaggagcggaactaccatatcttctactgcatgctcatgggggtgagtgctgaggacaagcagctgc

SEQ ID NO: 564823 - DNA, 120 bp, Artificial Sequence
  ENSG00000169994_7 (sequence is synthesized)
tgagcctgggcacgccctccgagtaccactacctgaccatggggaactgcacttcctgtgaggggctcaacgacgccaaggactacgcccacatccgctcggccatgaagatcctccagt

SEQ ID NO: 564824 - DNA, 120 bp, Artificial Sequence
  ENSG00000169994_8 (sequence is synthesized)
tctccgactccgagagctgggacgtcatcaagctgctggctgccattctccacctggggaatgtggggttcatggcttcggtcttcgagaacctggacgcctcagacgtgatggagacgc

SEQ ID NO: 564825 - DNA, 120 bp, Artificial Sequence
  ENSG00000169994_9 (sequence is synthesized)
ccgcctttcccaccgtgatgaagttactggaggtgcagcaccaggagctccgggactgtctgatcaagcacaccatcctcatccgaggggaatttgtcaccaggtccctgaacattgccc

SEQ ID NO: 564826 - DNA, 120 bp, Artificial Sequence
  ENSG00000169994_10 (sequence is synthesized)
aggctgctgaccggagggacgcctttgtcaagggcatctatgggcacctcttcctgtggattgtcaagaagatcaatgccgccatcttcacaccaccagcccaggaccccaaaaatgtgc

SEQ ID NO: 564827 - DNA, 120 bp, Artificial Sequence
  ENSG00000169994_11 (sequence is synthesized)
ggagggccatcggcctcctggacatatttggctttgaaaatttcgagaacaatagcttcgagcagctctgcatcaacttcgccaacgagcacctgcagcagttctttgtgcagcacgtgt

SEQ ID NO: 564828 - DNA, 120 bp, Artificial Sequence
  ENSG00000169994_12 (sequence is synthesized)
tcaccatggagcaagaggagtaccgctcggagaacatctcctgggactatatccactacaccgacaatcggcccaccctggacctgctggccctcaagcccatgagcatcatctccctcc

SEQ ID NO: 564829 - DNA, 120 bp, Artificial Sequence
  ENSG00000169994_13 (sequence is synthesized)
tggacgaagaaagccgcttcccgcaggggacagatctcaccatgctgcaaaagctgaacagcgtccatgccaacaacaaggccttcctacagcccaagaacatccacgatgccagatttg

SEQ ID NO: 564830 - DNA, 120 bp, Artificial Sequence
  ENSG00000169994_14 (sequence is synthesized)
gcattgcccattttgccggcgaggtgtactaccaagcagaaggcttcctggagaagaaccgagacgtgctgagcacagatatcctcaccctggtttactcctccaaaaacaagtttctga

SEQ ID NO: 564831 - DNA, 120 bp, Artificial Sequence
  ENSG00000169994_15 (sequence is synthesized)
gggagatattcaacttggagttagcagagaccaagctgggccatgggaccatccgccaggcaaaggcaggaaaccatctcttcaagtctgcagactcaaataaacggccctccaccttag

SEQ ID NO: 564832 - DNA, 120 bp, Artificial Sequence
  ENSG00000169994_16 (sequence is synthesized)
gaagccagttcaaacagtctctggaccagctgatgaaaatcctgaccaactgccagccttacttcatccgctgcatcaaacctaatgagtacaagaagccgctgctgttcgaccgggagc

SEQ ID NO: 564833 - DNA, 120 bp, Artificial Sequence
  ENSG00000169994_17 (sequence is synthesized)
tgtgcctgcggcagctgcgatactcgggcatgatggagaccgtgcacatccgcaagtcgggcttccccatccgctacacgttcgaggagttctcgcagaggttcggcgtgttgctgccca

SEQ ID NO: 564834 - DNA, 120 bp, Artificial Sequence
  ENSG00000169994_18 (sequence is synthesized)
acgccatgcggatgcagctgcaaggcaagctccgccagatgaccctgggcatcactgacgtgtggctgcggacagacaaagactggaaagcggggaagacaaaaattttcctgagggatc

SEQ ID NO: 564835 - DNA, 120 bp, Artificial Sequence
  ENSG00000169994_19 (sequence is synthesized)
atcaggacactctgctggaggtacagagaagccaggtgctagacagagcggcgctcagcatccagaaagtccttcggggctacagatacaggaaggagttcctgaggcagaggcgggcag

SEQ ID NO: 564836 - DNA, 120 bp, Artificial Sequence
  ENSG00000169994_20 (sequence is synthesized)
ctgtgaccctgcaggcctggtggagaggctactgcaacaggaggaatttcaagctgatcctcgtgggctttgagcgcctgcaggctattgcccggagccagccgctggcgaggcagtacc

SEQ ID NO: 564837 - DNA, 120 bp, Artificial Sequence
  ENSG00000169994_21 (sequence is synthesized)
aggccatgcggcagaggacagtccagctgcaggccctgtgcaggggatacctggtgcgccagcaagtccaggccaagaggagggcagtggtggtcattcaggcccatgccaggggcatgg

SEQ ID NO: 564838 - DNA, 120 bp, Artificial Sequence
  ENSG00000169994_22 (sequence is synthesized)
ctgcccggcgcaacttccagcaaaggaaggccaatgcgccgctggtcatcccggccgaggggcagaaaagccaaggcgctctccctgccaagaagcgcagatccatctacgacaccgtca

SEQ ID NO: 564839 - DNA, 120 bp, Artificial Sequence
  ENSG00000169994_23 (sequence is synthesized)
ctgacacggagatggtggagaaggtgttcggcttcctccctgccatgattgggggccaggagggccaggcctcgccgcactttgaggatctggaatcgaagacccagaagctgcttgagg

SEQ ID NO: 564840 - DNA, 120 bp, Artificial Sequence
  ENSG00000169994_24 (sequence is synthesized)
ttgacctggacacagtccccatggcggaggagcctgaggaggatgtggatggcctggccgagtacaccttccccaagtttgctgtgacttacttccagaaatcagccagccacacacaca

SEQ ID NO: 564841 - DNA, 120 bp, Artificial Sequence
  ENSG00000169994_25 (sequence is synthesized)
tccggcggcccctccgatacccgttgctttaccacgaagatgacactgactgcttggccgccctggtcatatggaacgtcatcctgaggttcatgggtgatctcccagagccagtgctgt

SEQ ID NO: 564842 - DNA, 120 bp, Artificial Sequence
  ENSG00000169994_26 (sequence is synthesized)
atgccaggagcagccagcagggcagctcagtgatgcggcagatccatgacacgctgggcagggagcacggtgcccaggttccacagcacagtagatctgcacaggtggccagccagctga

SEQ ID NO: 564843 - DNA, 120 bp, Artificial Sequence
  ENSG00000169994_27 (sequence is synthesized)
cctgcggcccagcctcagggatgagatttactgccagatctgcaagcagctctcggagaacttcaaaacaagcagcctggcccggggctggatcctgctcagcctctgcctcggctgctt

SEQ ID NO: 564844 - DNA, 120 bp, Artificial Sequence
  ENSG00000169994_28 (sequence is synthesized)
cccaccctcagagaggttcatgaagtatctactgaacttcatcggccaagggccggcgacctacggccccttctgtgccgagcgcctgagacgcacctatgccaatggggtgcgtgcgga

SEQ ID NO: 564845 - DNA, 120 bp, Artificial Sequence
  ENSG00000169994_29 (sequence is synthesized)
gccccccacctggctggagctgcaggctgtcaagtccaagaagcacatccccatccaagtcatcttggccactggagagagcctaaccgtccccgtggactcagcctccacatctcggga

SEQ ID NO: 564846 - DNA, 120 bp, Artificial Sequence
  ENSG00000169994_30 (sequence is synthesized)
aatgtgcatgcacatcgctcacaagcagggcctcagcgaccacctgggcttctccctccaggtcgccgtgtacgacaagttctggtccctgggcagcgggcgcgaccacatgatggatgc

SEQ ID NO: 564847 - DNA, 120 bp, Artificial Sequence
  ENSG00000169994_31 (sequence is synthesized)
catcgcccggtgtgagcagatggcccaggagaggggcgagagccagcgccagtcaccctggcgcatctacttccggaaggaattcttcaccccctggcacgactcccgggaggaccctgt

SEQ ID NO: 564848 - DNA, 120 bp, Artificial Sequence
  ENSG00000169994_32 (sequence is synthesized)
cagcaccgagcttatttaccgccaagtcctccgaggagtctggtctggcgagtacagcttcgagaaggaggaagagctggttgagctgctggcccggcactgctacgtgcagctcggcgc

SEQ ID NO: 564849 - DNA, 120 bp, Artificial Sequence
  ENSG00000169994_33 (sequence is synthesized)
ctcagcagagagcaaggctgtccaggagctgctgcccagctgcatcccccacaagctgtacaggaccaagcccccagacaggtgggcgagcctcgtcactgccgcctgcgccaaggcccc

SEQ ID NO: 564850 - DNA, 120 bp, Artificial Sequence
  ENSG00000169994_34 (sequence is synthesized)
atacactcagaagcaagtcacaccactggccgtgcgagagcaggtggtggacgccgcccgcctgcagtggccgctgctcttctcccggctcttcgaagtcatcacactctcaggcccccg

SEQ ID NO: 564851 - DNA, 120 bp, Artificial Sequence
  ENSG00000169994_35 (sequence is synthesized)
cctgcccaagacgcagctgatcttggctgttaactggaaggggctttgcttcctggaccagcaggagaagatgctgctggaactctctttcccagaggtcatgggtctggccaccaacag

SEQ ID NO: 564852 - DNA, 120 bp, Artificial Sequence
  ENSG00000169994_36 (sequence is synthesized)
ggaggcccagggcgggcagaggctgctgctctccacgatgcatgaggagtacgagtttgtgtcacccagcagtgtggccatcgctgagctggtggccctgttcctggagggcctgaagga

SEQ ID NO: 564853 - DNA, 120 bp, Artificial Sequence
  ENSG00000169994_37 (sequence is synthesized)
gaggtccattttcgccatggccctgcaggacaggaaggccacagatgacaccaccctcctggccttcaagaagggggacctgttggtcctcacaaagaagcaggggctgctggcctctga

SEQ ID NO: 564854 - DNA, 120 bp, Artificial Sequence
  ENSG00000169994_38 (sequence is synthesized)
gaactggaccctcggccagaacgacaggacaggcaagacggggctggtgcccatggcctgcctctacaccatccccacggtcactaagccctcggcacagctgctgagcttgcttgccat

SEQ ID NO: 564855 - DNA, 120 bp, Artificial Sequence
  ENSG00000169994_39 (sequence is synthesized)
gtcaccagagaagaggaagctggcggctcaggaggggcagttcacagagccacgtcctgaggagccacccaaggaaaagctgcacaccctggaggagttctcctatgagttcttcagggc

SEQ ID NO: 564856 - DNA, 120 bp, Artificial Sequence
  ENSG00000169994_40 (sequence is synthesized)
tccagagaaggacatggtgagcatggccgtgctgcccctggcccgtgcccgtggccacctgtgggcctattcctgcgagccgctgcgacagccgctgctcaagcgagtccacgccaacgt

SEQ ID NO: 564857 - DNA, 120 bp, Artificial Sequence
  ENSG00000169994_41 (sequence is synthesized)
cgacctctgggacatcgcctgccagatctttgtcgccatcctccggtacatgggcgactacccttctcggcaggcctggcccaccctggagctcaccgaccagatcttcacactggccct

SEQ ID NO: 564858 - DNA, 120 bp, Artificial Sequence
  ENSG00000169994_42 (sequence is synthesized)
gcagcacccggccctccaggacgaggtctactgccagatcctgaagcagctgacgcacaactccaacaggcacagcgaagagcggggctggcagctgctgtggctgtgcacgggcctctt

SEQ ID NO: 564859 - DNA, 120 bp, Artificial Sequence
  ENSG00000169994_43 (sequence is synthesized)
cccgcccagcaaggggctgctgccccatgcccagaagtttatagacactcggagggggaagctgctggcccccgactgcagccgccgaatccagaaggtcctgaggacggggccccggaa

SEQ ID NO: 564860 - DNA, 120 bp, Artificial Sequence
  ENSG00000169994_44 (sequence is synthesized)
gcagcccccgcaccaggtggaggtggaggccgcagagcagaacgtctcccgcatctgccacaagatctacttccccaatgacaccagtgagatgctggaggtggttgccaacacacgggt

SEQ ID NO: 564861 - DNA, 120 bp, Artificial Sequence
  ENSG00000169994_45 (sequence is synthesized)
gcgggatgtgtgtgacagcattgccaccaggctgcagctggcctcctgggagggctgcagcctcttcatcaagatttcagacaaggtcatcagccagaaggagggagacttcttctttga

SEQ ID NO: 564862 - DNA, 120 bp, Artificial Sequence
  ENSG00000169994_46 (sequence is synthesized)
ttccttgagggaggtgtctgactgggtgaagaagaacaagccccagaaagaaggggcccccgtgacgctcccctaccaggtgtacttcatgcggaaattgtggctcaacatatctccagg

SEQ ID NO: 564863 - DNA, 120 bp, Artificial Sequence
  ENSG00000169994_47 (sequence is synthesized)
gaaggatgtgaatgcagacaccatactccattaccaccaggagctgcccaagtacctgcgcggattccacaagtgttcgcgggaggatgccatccacctggcgggcctcatctacaaggc

SEQ ID NO: 564864 - DNA, 120 bp, Artificial Sequence
  ENSG00000169994_48 (sequence is synthesized)
ccagttcaacaacgaccggtcccagctggctagtgtccccaagatcctgagggaactggtgcctgagaacctcacacgcctgatgtcctcggaggagtggaaaaagagcatccttctagc

SEQ ID NO: 564865 - DNA, 120 bp, Artificial Sequence
  ENSG00000169994_49 (sequence is synthesized)
ctatgacaagcataaggacaagacagtggaggaggccaaggtggccttcctgaagtggatctgccggtggcccaccttcggatccgccttcttcgaggtgaagcaaacctcggagccttc

SEQ ID NO: 564866 - DNA, 120 bp, Artificial Sequence
  ENSG00000169994_50 (sequence is synthesized)
ctacccggacgtcatcctcatcgccatcaaccgacatggggttctgctcatccaccccaagaccaaggacctgctcaccacctatcccttcaccaagatctccagctggagcagcggcag

SEQ ID NO: 564867 - DNA, 120 bp, Artificial Sequence
  ENSG00000169994_51 (sequence is synthesized)
cacctacttccacatggcgctggggagcctgggccgtggcagccgcctgctgtgcgagacctccctgggctataagatggatgacctgctgacctcatatgtgcagcagctcctgagtgc

SEQ ID NO: 564868 - DNA, 120 bp, Artificial Sequence
  ENSG00000169994_52 (sequence is synthesized)
catgaacaagcagcggggctccaaggccccagccctggccagcacctagcagcggatgctggcgtgtctgctcaggcgcccttcccgacctctagcctggcggcaccttcccaggccctc

SEQ ID NO: 564869 - DNA, 120 bp, Artificial Sequence
  ENSG00000169994_53 (sequence is synthesized)
tcaacccagggcctgtccttggcgggcagccttccatgctgccccccatacaaagcccactcagccccgcaggcggccccctctgtcctgggcgctgcccagggaggccaaaagacgggc

SEQ ID NO: 564870 - DNA, 120 bp, Artificial Sequence
  ENSG00000169994_54 (sequence is synthesized)
ccagaatggggtcgggagtctcggacccccaggctattggtggatgactgactgacaggacacctcccaaccccaccccaccccaccagaatgttcaataaaaactcctggagcaggaga

SEQ ID NO: 564871 - DNA, 120 bp, Artificial Sequence
  ENSG00000169994_55 (sequence is synthesized)
agagaaatgactgtaatcaccgtgagactggggatcccgcacatctgggagcagatgggctgtgcaaagggcgcggctgctgaggacagggctgtggctggagaacctgctgcttcctga

SEQ ID NO: 564872 - DNA, 120 bp, Artificial Sequence
  ENSG00000169994_56 (sequence is synthesized)
aggaatcgagtagggatgcagagcctggtggcactgtcctgagagaggaggaggctgggcagggccccggcgctggagaggtgccctgcatatgggacctctcagagggatgagatttac

SEQ ID NO: 564873 - DNA, 120 bp, Artificial Sequence
  ENSG00000169994_57 (sequence is synthesized)
gcctcagcctaccaggggcacccatgctggaccaggctgcacggccagggctgctgggacagaggtaggtggggtcctggagcagagccagctccacacgccaatagcccacgcacagcc

SEQ ID NO: 564874 - DNA, 120 bp, Artificial Sequence
  ENSG00000169994_58 (sequence is synthesized)
gactccagcgcagcacccaggccgtaggcggccactggaccagaacccagcaggttctcaggaggacagtccccggaagccacccaacttccctgtaccttccccttccccaggtcatca

SEQ ID NO: 564875 - DNA, 120 bp, Artificial Sequence
  ENSG00000169994_59 (sequence is synthesized)
ggtgggtcgagggggcactggcggcctctgtgcggcccatgcccattcatccatccattcgttcccgtgtgtccctgggttgtgggaacaaccaggccctggggcccggcggtgagggcc

SEQ ID NO: 564876 - DNA, 120 bp, Artificial Sequence
  ENSG00000169994_60 (sequence is synthesized)
agctcaggcagaaacaggtggctgcaccttggagtgatgaaggatgccccagggctgaggggcatgaccctcatgggctgggagtgcgagtccaggaatgttcctggagaaggcagcctc

SEQ ID NO: 564877 - DNA, 120 bp, Artificial Sequence
  ENSG00000169994_61 (sequence is synthesized)
tacactaatattgaaggaaaatgtggggactggggaggaagaagcgtgggggctttcgaggcagggaggtggcaggcgcagtgtggggggtggcagggggtcagggctggtgtacctgct

SEQ ID NO: 564878 - DNA, 120 bp, Artificial Sequence
  ENSG00000169994_62 (sequence is synthesized)
gggacaggcttggtgcccactgctggccctcgcccaggggcccccgtgacgctcccctaccaggtgtacttcatgcggaaattgtggctcaacatatctccagggaaggatgtgaatgca

SEQ ID NO: 564879 - DNA, 120 bp, Artificial Sequence
  ENSG00000169994_63 (sequence is synthesized)
gacaccatactccattaccaccaggtaccgggcaggctgccctggtgggcactggggccacccccatcttcccacacctgttctgaggctgtagaagccagcaggccagggcagggccag

SEQ ID NO: 564880 - DNA, 120 bp, Artificial Sequence
  ENSG00000169994_64 (sequence is synthesized)
cctcagccctgggtaccagcccatgtggtaggcagaccaagcccctgagggctctggaaccaggagcagagggcagcaatgtttggggacagtgactgcactggcacctgcagcatgact

SEQ ID NO: 564881 - DNA, 120 bp, Artificial Sequence
  ENSG00000169994_65 (sequence is synthesized)
tggagagggtgggacagagggtcctgtgacccatggagcagtggccgtggcctgcagggccaaccacatgggtggagcaggccatcacctccacgcagatgtcagggggccctgccctga

SEQ ID NO: 564882 - DNA, 120 bp, Artificial Sequence
  ENSG00000169994_66 (sequence is synthesized)
ctcagggtcattcccctggcctgaaactctctaccctgctcagtccgtcctggatggagtgggctaagccccagttccccaccatctgagcgggaaagaggttgggggcgggtgggccgc

SEQ ID NO: 564883 - DNA, 120 bp, Artificial Sequence
  ENSG00000169994_67 (sequence is synthesized)
tagatctgcacagagatctggctgcaaggacaaggggaccaaggatatctcctccatgaagctgaagcggtcctcccggatcacaggccaggtggccagccagctgaacattggagagga

SEQ ID NO: 564884 - DNA, 120 bp, Artificial Sequence
  ENSG00000169994_68 (sequence is synthesized)
cagccgcctgctgtgcgagacctccctggtgagctcaggttctttctcccatccaagatgcataggacagagctgctggagactgggttccccaccctcacccctttcaagtggctcact

SEQ ID NO: 564885 - DNA, 120 bp, Artificial Sequence
  ENSG00000169994_69 (sequence is synthesized)
aagagggctcagtcacagggcccaggcggggccagcagatctggagagggcctgggtgcatccccaggaccagcagccaaggtggcaaggccaggcgggaccccctgcgcccttggccca

SEQ ID NO: 564886 - DNA, 120 bp, Artificial Sequence
  ENSG00000169994_70 (sequence is synthesized)
ttccaaggagggagggagacccagctccagcagggcaagcagaaatgacggccccaatggcaggagcccgccttccctttctccatgccctgcactgctggttgctgaggaagagaaggt

SEQ ID NO: 564887 - DNA, 120 bp, Artificial Sequence
  ENSG00000169994_71 (sequence is synthesized)
ggtccctgagtccaggacccccacctgccctctgcacccacagcctctgacccccccgtcccctgtccagggctataagatggatgacctgctgacctcatatgtgcagcagctcctgag

SEQ ID NO: 564888 - DNA, 120 bp, Artificial Sequence
  ENSG00000170004_0 (sequence is synthesized)
agagccacaggatggcttcccctctgagggacgaggaggaggaggaggaggagatggtggtgtcggaggaggaagaagaggaggaagaagagggcgacgaggaggaggaggaggaggtgg

SEQ ID NO: 564889 - DNA, 120 bp, Artificial Sequence
  ENSG00000170004_1 (sequence is synthesized)
aggcggccgacgaggacgatgaggaggacgacgacgagggagtactcgggcgcgggccgggccacgaccggggccgcgaccgccacagcccccccggctgccacctcttcccgccgccgc

SEQ ID NO: 564890 - DNA, 120 bp, Artificial Sequence
  ENSG00000170004_2 (sequence is synthesized)
cgccgccgccgccaccgctgcccccgccgccgccgcccccgccgccagataaggatgacattcggctgctgccgtcagcattgggtgtgaagaagagaaaacgaggacccaagaagcaga

SEQ ID NO: 564891 - DNA, 120 bp, Artificial Sequence
  ENSG00000170004_3 (sequence is synthesized)
aggagaacaagccaggaaaaccccgaaaacgcaagaagcgtgacagtgaggaggaatttggttctgagcgagatgagtaccgggagaagtcagagagtgggggcagtgaatatggaaccg

SEQ ID NO: 564892 - DNA, 120 bp, Artificial Sequence
  ENSG00000170004_4 (sequence is synthesized)
gaccgggtcggaaacgaagaaggaagcaccgagaaaaaaaggagaagaagacaaagcggcggaaaaagggggagggagatggggggcaaaagcaagtggaacagaagtcatcagcaactc

SEQ ID NO: 564893 - DNA, 120 bp, Artificial Sequence
  ENSG00000170004_5 (sequence is synthesized)
tgcttctgacctggggcctggaggatgtggagcatgtgttctctgaggaggattaccacacgctcaccaactacaaagccttcagccagttcatgaggcccctaattgctaagaagaatc

SEQ ID NO: 564894 - DNA, 120 bp, Artificial Sequence
  ENSG00000170004_6 (sequence is synthesized)
ctaagatcccaatgtctaagatgatgaccatccttggggccaaatggagagagttcagtgccaacaaccccttcaaggggtcagcagctgctgtggcggcggcagcggcagcagcagcag

SEQ ID NO: 564895 - DNA, 120 bp, Artificial Sequence
  ENSG00000170004_7 (sequence is synthesized)
cagctgtagctgagcaggtgtcagctgctgtctcgtcggccacccccatagcaccctccggaccccccgcccttccaccaccccctgctgctgatatccagcccccacccatccgaagag

SEQ ID NO: 564896 - DNA, 120 bp, Artificial Sequence
  ENSG00000170004_8 (sequence is synthesized)
ccaaaaccaaagagggcaaaggtccaggccataagaggcggagtaagagcccccgagtgcctgatggacgcaagaagcttcggggaaagaaaatggcaccactcaaaataaaactagggc

SEQ ID NO: 564897 - DNA, 120 bp, Artificial Sequence
  ENSG00000170004_9 (sequence is synthesized)
ttctgggtggcaagaggaagaaaggaggctcgtatgtttttcagagcgacgaaggtcctgaaccagaggctgaggaatcagacctggacagtggcagtgtccacagtgcctcaggccggc

SEQ ID NO: 564898 - DNA, 120 bp, Artificial Sequence
  ENSG00000170004_10 (sequence is synthesized)
ctgatggccctgtccgcaccaagaaactaaagagaggccggccaggaaggaagaagaagaaggtcctgggctgtcctgcagtggccggggaggaggaggttgatggctacgagacggatc

SEQ ID NO: 564899 - DNA, 120 bp, Artificial Sequence
  ENSG00000170004_11 (sequence is synthesized)
accaggattactgtgaggtgtgccagcagggtggggaaattattctgtgtgacacctgccctcgtgcctaccacctcgtctgccttgatcctgagcttgaccgggctccagagggcaaat

SEQ ID NO: 564900 - DNA, 120 bp, Artificial Sequence
  ENSG00000170004_12 (sequence is synthesized)
ggagctgccctcactgtgagaaggagggggtccagtgggaggccaaggaggaagaagaagaatacgaagaggagggagaggaagaaggggagaaggaggaggaggatgatcacatggagt

SEQ ID NO: 564901 - DNA, 120 bp, Artificial Sequence
  ENSG00000170004_13 (sequence is synthesized)
actgccgcgtatgcaaggacggcggggagctcctgtgctgtgacgcgtgcatctcctcctaccacattcattgtctaaaccctcccctgcctgacattcccaatggtgaatggctgtgtc

SEQ ID NO: 564902 - DNA, 120 bp, Artificial Sequence
  ENSG00000170004_14 (sequence is synthesized)
cccgatgcacatgccccgtgctgaagggtcgagtgcagaagatcctacattggcggtggggggagccacctgtagcagtgccagcccctcaacaggcagatggaaatccagatgtcccac

SEQ ID NO: 564903 - DNA, 120 bp, Artificial Sequence
  ENSG00000170004_15 (sequence is synthesized)
ccccccgtcctcttcaaggcagatcagagcgagagttctttgtcaagtgggtaggactatcctactggcactgctcctgggccaaggagcttcagctggaaatcttccatttggttatgt

SEQ ID NO: 564904 - DNA, 120 bp, Artificial Sequence
  ENSG00000170004_16 (sequence is synthesized)
atcgaaactaccagcggaagaatgacatggatgagcccccacccctggactatggctccggcgaggatgatgggaagagcgacaagcgtaaagtgaaagacccgcactatgctgagatgg

SEQ ID NO: 564905 - DNA, 120 bp, Artificial Sequence
  ENSG00000170004_17 (sequence is synthesized)
aggagaagtactatcgttttggcatcaagccagagtggatgaccgtccaccgcatcatcaaccacagtgtggataaaaaggggaattaccactatctagtaaaatggagggacttaccat

SEQ ID NO: 564906 - DNA, 120 bp, Artificial Sequence
  ENSG00000170004_18 (sequence is synthesized)
atgaccagtccacgtgggaggaagatgaaatgaatatccctgaatacgaagaacataagcaaagctactggagacaccgagaactaattatgggggaagaccctgcccagccccgcaagt

SEQ ID NO: 564907 - DNA, 120 bp, Artificial Sequence
  ENSG00000170004_19 (sequence is synthesized)
ataagaagaagaagaaggagctacagggtgatgggcctcccagttctcccactaatgatcctaccgtgaaatatgagactcagccacggtttatcacagccactggaggcaccctgcaca

SEQ ID NO: 564908 - DNA, 120 bp, Artificial Sequence
  ENSG00000170004_20 (sequence is synthesized)
tgtatcagttggaagggctgaactggctacgcttctcctgggcccagggcactgacaccattctagctgatgagatggggctaggcaagaccatacaaaccatcgtcttcctctactcac

SEQ ID NO: 564909 - DNA, 120 bp, Artificial Sequence
  ENSG00000170004_21 (sequence is synthesized)
tctacaaggagggccacacaaaaggtcccttcctggtgagtgccccactctctaccatcattaactgggagcgggagttccagatgtgggcacccaaattctatgtggtgacatacacgg

SEQ ID NO: 564910 - DNA, 120 bp, Artificial Sequence
  ENSG00000170004_22 (sequence is synthesized)
gtgacaaggacagccgggccatcattcgtgagaatgaattctcctttgaggacaatgccatcaaagggggcaagaaagcttttaagatgaagagggaggcacaggtgaagttccatgttc

SEQ ID NO: 564911 - DNA, 120 bp, Artificial Sequence
  ENSG00000170004_23 (sequence is synthesized)
tcctgacatcgtatgagctgatcaccattgatcaggcagcacttggttccatccgctgggcctgtcttgtggtagatgaggcccatcgactcaagaacaaccagtccaagtttttcaggg

SEQ ID NO: 564912 - DNA, 120 bp, Artificial Sequence
  ENSG00000170004_24 (sequence is synthesized)
ttctcaatggttacaagatagatcataagttgctgctgacaggaaccccattgcagaataatctggaggagctcttccatctcctgaacttcctcaccccagagagatttaacaacttgg

SEQ ID NO: 564913 - DNA, 120 bp, Artificial Sequence
  ENSG00000170004_25 (sequence is synthesized)
agggcttcctggaggagtttgctgacatatccaaagaggaccagatcaagaaactgcatgatttgctggggccacacatgctgcggagactcaaggcagatgtctttaagaacatgccag

SEQ ID NO: 564914 - DNA, 120 bp, Artificial Sequence
  ENSG00000170004_26 (sequence is synthesized)
ccaagacagagctcatcgttcgggtggagctaagccccatgcagaagaaatactacaaatacatcctgactcgaaattttgaggccttgaattcacgaggtggtgggaaccaggtgtcgc

SEQ ID NO: 564915 - DNA, 120 bp, Artificial Sequence
  ENSG00000170004_27 (sequence is synthesized)
tgcttaatatcatgatggatcttaagaagtgctgcaaccatccatacctttttcccgtggctgctatggagtcccccaaactccccagtggggcttatgagggtggggcacttattaagt

SEQ ID NO: 564916 - DNA, 120 bp, Artificial Sequence
  ENSG00000170004_28 (sequence is synthesized)
cgtctgggaagctcatgctgctccagaagatgctgcgaaagctgaaggagcaaggacaccgagtgctcatcttctcgcagatgaccaaaatgttagacttgcttgaggacttcttagact

SEQ ID NO: 564917 - DNA, 120 bp, Artificial Sequence
  ENSG00000170004_29 (sequence is synthesized)
atgaaggctacaagtatgagcgcatcgatggtggtatcacgggtgccctgaggcaggaggccatcgatcggtttaatgctcctggggcccaacaattctgcttcctcctgtccacccgag

SEQ ID NO: 564918 - DNA, 120 bp, Artificial Sequence
  ENSG00000170004_30 (sequence is synthesized)
atcatctttgattctgactggaacccccataatgacatccaggcctttagccgggctcatcggattggccaggccaacaaagtgatgatttaccggtttgtgactcgcgcgtcagtggaa

SEQ ID NO: 564919 - DNA, 120 bp, Artificial Sequence
  ENSG00000170004_31 (sequence is synthesized)
gagcgaatcacacaagtggccaagagaaagatgatgctgacacacctggttgtgcggcctgggctgggctccaaggcaggctccatgtccaagcaggagcttgacgacattctcaaattt

SEQ ID NO: 564920 - DNA, 120 bp, Artificial Sequence
  ENSG00000170004_32 (sequence is synthesized)
ggcactgaagagctattcaaggatgaaaacgagggggagaacaaggaggaggacagcagtgtgattcattatgacaatgaggccatcgctcggctgttggaccggaaccaggatgcaact

SEQ ID NO: 564921 - DNA, 120 bp, Artificial Sequence
  ENSG00000170004_33 (sequence is synthesized)
gaggacactgacgtgcagaacatgaatgagtatctcagctccttcaaggtggcacagtacgtcgtgcgggaagaagacaagattgaggaaattgagcgagagatcatcaagcaggaggag

SEQ ID NO: 564922 - DNA, 120 bp, Artificial Sequence
  ENSG00000170004_34 (sequence is synthesized)
aatgtggaccctgactactgggagaagctgctgaggcatcactatgagcaacagcaggaagacctagcccggaatctaggcaagggcaagcgggttcgcaagcaagttaactacaatgat

SEQ ID NO: 564923 - DNA, 120 bp, Artificial Sequence
  ENSG00000170004_35 (sequence is synthesized)
gctgctcaggaagaccaagacaaccagtcagagtactcggtgggttcagaggaggaggatgaagacttcgatgaacgtcctgaagggcgtagacagtcaaagaggcagctccggaatgag

SEQ ID NO: 564924 - DNA, 120 bp, Artificial Sequence
  ENSG00000170004_36 (sequence is synthesized)
aaagataagccactgcctccactgctggcccgagtcgggggcaacattgaggtgctgggcttcaacacccgtcagcggaaggctttcctcaatgctgtgatgcgctgggggatgccacca

SEQ ID NO: 564925 - DNA, 120 bp, Artificial Sequence
  ENSG00000170004_37 (sequence is synthesized)
caggatgccttcaccacacagtggctggtgcgggacctgaggggcaagactgagaaggagtttaaggcctatgtgtctttgttcatgcgccatctgtgtgagcctggggcagacggctct

SEQ ID NO: 564926 - DNA, 120 bp, Artificial Sequence
  ENSG00000170004_38 (sequence is synthesized)
gaaacctttgccgatggggtccctcgggagggactgagtcgccagcaggtgttgacccgcattggagtcatgtctctcgtcaaaaagaaggtgcaggagtttgagcacatcaatgggcgt

SEQ ID NO: 564927 - DNA, 120 bp, Artificial Sequence
  ENSG00000170004_39 (sequence is synthesized)
tggtcaatgccggaactgatgcctgaccccagcgccgattctaagcgctcctccagagcctcctctcctaccaaaacgtctcccaccactcctgaggcttctgctaccaacagtccctgc

SEQ ID NO: 564928 - DNA, 120 bp, Artificial Sequence
  ENSG00000170004_40 (sequence is synthesized)
acctctaaacctgctactccagctccaagtgagaaaggagaaggcataaggacacctcttgagaaggaggaagctgaaaaccaggaggaaaagccagagaagaacagcagaattggggag

SEQ ID NO: 564929 - DNA, 120 bp, Artificial Sequence
  ENSG00000170004_41 (sequence is synthesized)
aagatggagacagaggctgatgcccccagcccagccccatcacttggggagcggctggagccaaggaagattcctctagaggatgaggtgccaggggtgcctggagagatggagcctgaa

SEQ ID NO: 564930 - DNA, 120 bp, Artificial Sequence
  ENSG00000170004_42 (sequence is synthesized)
cctgggtaccgtggggacagagagaagtcagccacagagtcgacgccaggagaaaggggggaggagaagccgttggatggacaggaacacagggagaggccggagggggaaacaggggat

SEQ ID NO: 564931 - DNA, 120 bp, Artificial Sequence
  ENSG00000170004_43 (sequence is synthesized)
ttgggcaagagagaagatgtaaaaggtgaccgggagcttcgaccagggcctcgagatgagccacggtccaatgggcgacgagaggaaaagacagagaagccccggttcatgttcaatatc

SEQ ID NO: 564932 - DNA, 120 bp, Artificial Sequence
  ENSG00000170004_44 (sequence is synthesized)
gccgatggtggcttcacagagcttcacacactgtggcagaatgaggaacgggcagctatttcctcggggaaactcaatgagatctggcacagaagacatgactattggcttctggctggg

SEQ ID NO: 564933 - DNA, 120 bp, Artificial Sequence
  ENSG00000170004_45 (sequence is synthesized)
attgtcctccatggctatgcacggtggcaggacatccagaatgatgctcaatttgccattatcaacgagccatttaaaactgaagccaataaggggaactttctggagatgaaaaataag

SEQ ID NO: 564934 - DNA, 120 bp, Artificial Sequence
  ENSG00000170004_46 (sequence is synthesized)
ttcctggcccggaggttcaagctcctggagcaggcgctggtgattgaggagcagctgcggcgggcggcctacctgaacctgtcgcaggagccggcgcaccccgccatggccctccacgcc

SEQ ID NO: 564935 - DNA, 120 bp, Artificial Sequence
  ENSG00000170004_47 (sequence is synthesized)
cgcttcgccgaggccgagtgcctggccgagagccaccagcacctctccaaggagtcgctggcggggaacaagccggccaacgccgtcctgcacaaggttctgaaccagctggaggagttg

SEQ ID NO: 564936 - DNA, 120 bp, Artificial Sequence
  ENSG00000170004_48 (sequence is synthesized)
ctgagcgacatgaaggcggacgtgacccgcctgccagccacgctgtcccgaataccccccatcgcagcccgccttcagatgtccgagcgcagcatcctcagccggctggccagcaagggc

SEQ ID NO: 564937 - DNA, 120 bp, Artificial Sequence
  ENSG00000170004_49 (sequence is synthesized)
acggagcctcaccccacaccggcctacccgccgggtccctacgctacacctccggggtacggggcggccttcagcgccgcacccgtaggggccctggccgccgcaggcgccaattacagc

SEQ ID NO: 564938 - DNA, 120 bp, Artificial Sequence
  ENSG00000170004_50 (sequence is synthesized)
cagatgcctgcagggtccttcatcacagccgccaccaacggccctccagtgcttgtgaagaaggagaaggaaatggtgggggcattggtgtcagacgggctggatcggaaggagccccga

SEQ ID NO: 564939 - DNA, 120 bp, Artificial Sequence
  ENSG00000170004_51 (sequence is synthesized)
gccggggaggtgatctgtatagacgactgactggatcccaggcctgcccttcacccaggccccgtccccgaggccgacccccagctcaagcgctggggcctgctgccagccctccacctt

SEQ ID NO: 564940 - DNA, 120 bp, Artificial Sequence
  ENSG00000170004_52 (sequence is synthesized)
ccccaccccttgggccatcactgggctaggaacccctttgcccctctctgcagctcctctcttcaagaagggccctttgtctttctccactcccacacacctttcccaccaagccttgaa

SEQ ID NO: 564941 - DNA, 120 bp, Artificial Sequence
  ENSG00000170004_53 (sequence is synthesized)
gactgtgctggtgagaagaagtctgggtgggagatggctggcagggtcttccaagtaccttcctcccacactgccaagtatacacaacttcccagtaaatggttgtggggaggaaagagg

SEQ ID NO: 564942 - DNA, 120 bp, Artificial Sequence
  ENSG00000170004_54 (sequence is synthesized)
tggagcctccccagccgtttccctgcagaatcagctctgtctcatgtggaagtggagaatcagccttgcctggcctttaggaacttttgtggggaagagagctttgaagagaggaggggg

SEQ ID NO: 564943 - DNA, 120 bp, Artificial Sequence
  ENSG00000170004_55 (sequence is synthesized)
actttagagagggatgaaaatgagccctgggagggaggaagggacgaggaggggtggctgcatgttaccgtcccctacctctccccacgtggagggtggagcagttatgagggaggaagt

SEQ ID NO: 564944 - DNA, 120 bp, Artificial Sequence
  ENSG00000170004_56 (sequence is synthesized)
caactgctgttcagcctcagaataaaggtgccgttcactggctcagttacctcctgtgtaccggcatcttgtgttgggaatgttcccccctccctagggaccaaggaccacccctacaaa

SEQ ID NO: 564945 - DNA, 120 bp, Artificial Sequence
  ENSG00000170004_57 (sequence is synthesized)
aagagtaatggttgggtgatactccctcaagccaaagaggagctccccaacctgttctagggacccaggtaacctagaagggtgggagagaatacaatgggccagatgtggtggaagccc

SEQ ID NO: 564946 - DNA, 120 bp, Artificial Sequence
  ENSG00000170004_58 (sequence is synthesized)
agctctggggctcaggttcctggaagacttctactaccctccctcctcaaggcctggatacagactaaatttgtataagtcaggcaggggacctagtcagggtcttgggagctaccttgt

SEQ ID NO: 564947 - DNA, 120 bp, Artificial Sequence
  ENSG00000170004_59 (sequence is synthesized)
cgttgggaccagagcaaaatagtggagggcaggctagggaaatgtgggcacatcccccctcccaggaggggccggggagagtggcagtttgcatggcgaaccccccacttcctctttgct

SEQ ID NO: 564948 - DNA, 120 bp, Artificial Sequence
  ENSG00000170004_60 (sequence is synthesized)
gccccttcactttcttgctgcccctttcccagtctctcttcacacccactcctggtctgtcctgatcccctcttctgtatcaggtttattggttgtacatataaattatactttcctttc

SEQ ID NO: 564949 - DNA, 120 bp, Artificial Sequence
  ENSG00000170004_61 (sequence is synthesized)
atatctttgtttgggtctcccatactgcgtatagatgaatgggtcaggatatctggaacaaaatatggaggtgaagggtgagatcgggaaacaaagggtatggccccctagttcccaaag

SEQ ID NO: 564950 - DNA, 120 bp, Artificial Sequence
  ENSG00000170004_62 (sequence is synthesized)
ggagcagggagatgggaatagaattgaaggtaggttttaggctacttgggaggaggaatatttaggtaattgtggagactttctcctgtgtgatgaaggcggcagacactgtgatcctgt

SEQ ID NO: 564951 - DNA, 120 bp, Artificial Sequence
  ENSG00000170004_63 (sequence is synthesized)
ttcacttaccctcttcctgcccccagatggctggacttcttagtaacagatgtccgagtgtctaggatcctaatgtattcctttctcccacaatcaacatttctgaaactggagtgtcct

SEQ ID NO: 564952 - DNA, 120 bp, Artificial Sequence
  ENSG00000170004_64 (sequence is synthesized)
gcaccaagaaactaaagagaggccggccaggaaggaagaagaagaaggtggccggggaggaggaggttgatggctacgagacggatcaccaggattactgtgaggtgtgccagcagggtg

SEQ ID NO: 564953 - DNA, 120 bp, Artificial Sequence
  ENSG00000170004_65 (sequence is synthesized)
tacgtcgtgcgggaagaagacaaggtgagactggacttcagagagaaacgtaggcacagacagtactggtaaacacagaagggtaccttctgagacagtgcaggagaaacactgtcagag

SEQ ID NO: 564954 - DNA, 120 bp, Artificial Sequence
  ENSG00000170004_66 (sequence is synthesized)
ggattagaggagagatttagaaaacatgaggagagcacattgcaggtaagagatggcatggaacatgcgcaatgtccagaaaatgtatgcagagccacgaagctgcaggagtggggagac

SEQ ID NO: 564955 - DNA, 120 bp, Artificial Sequence
  ENSG00000170004_67 (sequence is synthesized)
cggattgggctgacgcagcagagtagggatttccttgcagtggaaggattagcaaagaaggagacccccagtgttcattcattctgttgcccttcagattgaggaaattgagcgagagat

SEQ ID NO: 564956 - DNA, 120 bp, Artificial Sequence
  ENSG00000170004_68 (sequence is synthesized)
agagggaaagaaaggccgtcaggtcctgccaggggcttggcagcgctcacctatttgtattgggacttggagtctggggtggggtggtgtgggtcccggatctgggtacgttggggagag

SEQ ID NO: 564957 - DNA, 120 bp, Artificial Sequence
  ENSG00000170004_69 (sequence is synthesized)
aagcgtgaaaggatccgaggttgagatgggtctttgtgtcaacccggcctcccctttccctcttggctttctgaatagaccagaagagacgtcagaggctgcttacattttacaactgaa

SEQ ID NO: 564958 - DNA, 120 bp, Artificial Sequence
  ENSG00000170004_70 (sequence is synthesized)
atgaaaacccacctcccctctccccctgggcaatttttatctccctttcagccctccaagtcgaatgagtgacccagatacaccccctcagatgactttcggagataaggatgacattcg

SEQ ID NO: 564959 - DNA, 120 bp, Artificial Sequence
  ENSG00000170004_71 (sequence is synthesized)
agcgttgaggaggaatttggttctgagcgagatgagtaccgggagaagtcagagagtgggggcagtgaatatggaaccggaccgggtcggaaacgaagaaggaagcaccgagaaaaaaag

SEQ ID NO: 564960 - DNA, 120 bp, Artificial Sequence
  ENSG00000170004_72 (sequence is synthesized)
gtcctgaaggtggcatctgtgttcctgactctacctcacctcttcccgttttattttccagtttgctttaagcccactgtttttatacaagtaaaaaagtcttcgtgtgtgtgtggaaaa

SEQ ID NO: 564961 - DNA, 120 bp, Artificial Sequence
  ENSG00000170004_73 (sequence is synthesized)
gtcccccgaggtgacaagtcacccggcggcactctctgggcggcgctctccagaccgctgcgccgcgtcaggcgcccagcggtgtccccctcagaccaccctcctagtggagtgatttct

SEQ ID NO: 564962 - DNA, 120 bp, Artificial Sequence
  ENSG00000170004_74 (sequence is synthesized)
tggagagatggagcctgaacctgggtaccgtggggacagagagaagtcaggtgggtgcatggccttaggagtgatgggggattagaatttgggatttccctcttctggggtcaggggatg

SEQ ID NO: 564963 - DNA, 120 bp, Artificial Sequence
  ENSG00000170004_75 (sequence is synthesized)
agggtaacatcctcccttcctatcccctaccccctcccacagccacagagtcgacgccaggagaaaggggggaggagaagccgttggatggacaggaacacagggagaggccggaggggg

SEQ ID NO: 564964 - DNA, 120 bp, Artificial Sequence
  ENSG00000170004_76 (sequence is synthesized)
aaacaggggatttgggcaagagaggtaatgggtggaagggaccggacacctgggtcccagagggcatcaggggaggtggagtctggggaaccgaatgcttgggtcctgggcgggtagctg

SEQ ID NO: 564965 - DNA, 120 bp, Artificial Sequence
  ENSG00000170004_77 (sequence is synthesized)
ttagcctctaggacttgtgcaagccaaccctcatccatgtctgatagcattcacatccgtgcccaatagagggacctgccccagcctctgtgtcccctccacacagtggggcctcttcac

SEQ ID NO: 564966 - DNA, 120 bp, Artificial Sequence
  ENSG00000170004_78 (sequence is synthesized)
tggcagtggaactgcatgcctgccatactgcttaacatcatccagttaggggccttggactgtgaatgcaccatacagatccctggctgtgatcaaacaaatcacattccctcacatgtg

SEQ ID NO: 564967 - DNA, 120 bp, Artificial Sequence
  ENSG00000170004_79 (sequence is synthesized)
tttcaccccataaggcagaaactaccacccatccaaccctctggccttaccccatgaaacttccctttgaccttcgacctttcctcctaccccctctcaccttgccattgatagagatta

SEQ ID NO: 564968 - DNA, 120 bp, Artificial Sequence
  ENSG00000170004_80 (sequence is synthesized)
tatcccaaagccctctaaccatctaatcctgcctggtgtagtcactgactcctggcccctttgatccctgttctaattccttgaatctgtaatactgaccttctaacctccctctcccct

SEQ ID NO: 564969 - DNA, 120 bp, Artificial Sequence
  ENSG00000170004_81 (sequence is synthesized)
tacatattaaaaccgtgattccttaaagctttgacacttaccacctcccatgcctcctgactatttcctccccatcatccccaaccccaaaccttgctcttccagtatgagatgttctga

SEQ ID NO: 564970 - DNA, 120 bp, Artificial Sequence
  ENSG00000170004_82 (sequence is synthesized)
caactccccgcccccatgtcttccaatgtccccccatcttcctttcctccatgctccctttttctttcttctttctctccatctgtcttctgtggtaatctggtctctctgtctcttttc

SEQ ID NO: 564971 - DNA, 120 bp, Artificial Sequence
  ENSG00000170004_83 (sequence is synthesized)
ctgacactttttcttttcccctgagttgcttctgttttccatctacttcttttactttcttgatctctggttctttgacatctgtgttctcctctctcgctctttttctgcctgtatctg

SEQ ID NO: 564972 - DNA, 120 bp, Artificial Sequence
  ENSG00000170004_84 (sequence is synthesized)
gaccgagataaggatgacattcggctgctgccgtcagcattgggtgtgaagaagagaaaacgaggacccaagaagcagaaggagaacaagccaggaaaaccccgaaaacgcaagaagcgt

SEQ ID NO: 564973 - DNA, 120 bp, Artificial Sequence
  ENSG00000170006_0 (sequence is synthesized)
acgtttcagagaggctgcagcccggcgcagcatcctgagcgcgcctctgccgaggcgagcggacatgcaggctccccgcgcagccctagtcttcgccctggtgatcgcgctcgttcccgt

SEQ ID NO: 564974 - DNA, 120 bp, Artificial Sequence
  ENSG00000170006_1 (sequence is synthesized)
cggccggggtaattatgaggaattagaaaactcaggagatacaactgtggaatctgaaagaccaaataaagtgactattccaagcacatttgctgcagtgaccatcaaagaaacattaaa

SEQ ID NO: 564975 - DNA, 120 bp, Artificial Sequence
  ENSG00000170006_2 (sequence is synthesized)
tgcaaatataaattctaccaactttgctccggatgaaaatcagttagagtttatactgatggtgttaatcccattgattttattggtcctcttacttttatccgtggtattccttgcaac

SEQ ID NO: 564976 - DNA, 120 bp, Artificial Sequence
  ENSG00000170006_3 (sequence is synthesized)
atactataaaagaaaaagaactaaacaagaaccttctagccaaggatctcagagtgctttacagacatatgaactgggaagtgaaaacgtgaaagtccctatttttgaggaagatacacc

SEQ ID NO: 564977 - DNA, 120 bp, Artificial Sequence
  ENSG00000170006_4 (sequence is synthesized)
ctctgttatggaaattgaaatggaagagcttgataaatggatgaacagcatgaatagaaatgccgactttgaatgtttacctaccttgaaggaagagaaggaatcaaatcacaacccaag

SEQ ID NO: 564978 - DNA, 120 bp, Artificial Sequence
  ENSG00000170006_5 (sequence is synthesized)
tgacagtgaatcctaaacctgaatggcgctcatgttttccaagagaagcagcccctgagggagtctgctgaggctgccaacagaggatgaagaggatacaaatttaattaatttcaaatc

SEQ ID NO: 564979 - DNA, 120 bp, Artificial Sequence
  ENSG00000170006_6 (sequence is synthesized)
aacatagacacaagaaccttttgctgtttcttccaacgcccactcttcctaatgatggcatcacttgcacttggaagaatgtgcaattgagaagtactaggaaaaggcctggctgccatc

SEQ ID NO: 564980 - DNA, 120 bp, Artificial Sequence
  ENSG00000170006_7 (sequence is synthesized)
catcgctgcctctgagggtggagaaggaggcgggtgatgtgctcacttctgatcaacatgtgttgcctcctctcagccaacttctagctcactgaactcactctggtcatgataaatgtt

SEQ ID NO: 564981 - DNA, 120 bp, Artificial Sequence
  ENSG00000170006_8 (sequence is synthesized)
cgtcacctttctgcttcattccttagggcctaaatcaggaagctgttttatcgatggtttccttttgggtcagtaaccagctttggataatttcctctgattattcaagtcgtgggacag

SEQ ID NO: 564982 - DNA, 120 bp, Artificial Sequence
  ENSG00000170006_9 (sequence is synthesized)
gtaaactacattcagcaggaacttttctcgaggagtgttatgtcatggaaaagacaccaaacacagcaagtattttaatgaatacaccatcccagggggtcagtaagctctgcctgccaa

SEQ ID NO: 564983 - DNA, 120 bp, Artificial Sequence
  ENSG00000170006_10 (sequence is synthesized)
gaagacacagtgagaggggtccacagtcctgatgaggtggcgtttggtaacttgtagaccctagcatggccaggtctggtcacccttaagaacttctcagagaaactaggaatcttcagt

SEQ ID NO: 564984 - DNA, 120 bp, Artificial Sequence
  ENSG00000170006_11 (sequence is synthesized)
gaaagaactaatgttctcctcagctgaaattcccttgcttgtcagcatttctgcaaagctcacacttgtttcaccatacctcccttggatgtgacatgtaggtaggaagtatgtgcaggt

SEQ ID NO: 564985 - DNA, 120 bp, Artificial Sequence
  ENSG00000170006_12 (sequence is synthesized)
gggagtcatctgtcagccttctatgtttcagagatcctgaaggtggtttgaaacaaacagaagaggagcaggaaatatccgtgcctgtggcagatctcactcatcatgcttagcattctc

SEQ ID NO: 564986 - DNA, 120 bp, Artificial Sequence
  ENSG00000170006_13 (sequence is synthesized)
tcccgccaagctgggataagcctcatgtcctaacacagcacaacaggaggtctctgtcagtccatcagagatgacattctatgtgatatttttgacatccttgtgctaaaagcaatggca

SEQ ID NO: 564987 - DNA, 120 bp, Artificial Sequence
  ENSG00000170006_14 (sequence is synthesized)
caaaatggaaaagggcctattgaccacacctactccagtaaaattgttcttcatttattccttaattttctaaatctgacccctttaaagcaatctagcaaattgagaatcctcagctct

SEQ ID NO: 564988 - DNA, 120 bp, Artificial Sequence
  ENSG00000170006_15 (sequence is synthesized)
ccttggatacctgatattttatttcaagaaagagacaaagaaggaaaattttatttattttactacccacatataaaccgaagggagatgggactacccaaacatttgctgctcaatttt

SEQ ID NO: 564989 - DNA, 120 bp, Artificial Sequence
  ENSG00000170006_16 (sequence is synthesized)
gtgtcttgtgcttgaaagtctgccctaatgcataacaaaaactacttgtctcctaccttttgggatccctttaacaagtatttgccttctgaactacgtggataatttcaaaggcagagt

SEQ ID NO: 564990 - DNA, 120 bp, Artificial Sequence
  ENSG00000170006_17 (sequence is synthesized)
tccagaccagagaggtctttccatacaatgaaagctataactagctggttgtgtttaaccactgctatcacgctatcctgggactgcatagaactttgacaaaagacagacttcatggta

SEQ ID NO: 564991 - DNA, 120 bp, Artificial Sequence
  ENSG00000170006_18 (sequence is synthesized)
cacaacttcaacagattttctgtcatattctcaccagcacatctgaatgaggctttgtgttttccttgctctcttgcatgttccttttcaactcatggcccacagtgactctcagatatt

SEQ ID NO: 564992 - DNA, 120 bp, Artificial Sequence
  ENSG00000170006_19 (sequence is synthesized)
tatgccaaaattgcatacaattgttttctgaatcataacttgtctatttttctgcctatgtgtgctactttcagtttgtttctcatcaacattttgactctcagaagagcctccatttgc

SEQ ID NO: 564993 - DNA, 120 bp, Artificial Sequence
  ENSG00000170006_20 (sequence is synthesized)
ccctttctctctttaggtatctaagatctttgaacacctgggcctttacatttgatccaaccctatcaaataatgaacttctcagagaggcatctggggtcctggaacttcatgttgatg

SEQ ID NO: 564994 - DNA, 120 bp, Artificial Sequence
  ENSG00000170006_21 (sequence is synthesized)
aagtcatattatataatatgataaaaatattctcatgcagtattttaaataatttcaaattctagaagaagcaaatttcagcgacatgtcattgagtttttatttggtaaagctataatt

SEQ ID NO: 564995 - DNA, 120 bp, Artificial Sequence
  ENSG00000170006_22 (sequence is synthesized)
gtgcagtgtacaaagcactttttaaaaagatagtttattctgtcagggtatatgaagttagtatacagccagaacagccaagcctcaattcttgtaccttgtgtctttttattactgttt

SEQ ID NO: 564996 - DNA, 120 bp, Artificial Sequence
  ENSG00000170006_23 (sequence is synthesized)
aatcaatagatatcatatgtttatgacagtttcaagaattgtttttaaacccaaacttaattttatgtttcagactattgttaaaaaaacaaaacaaaaaccaaaaaaaccctcactaat

SEQ ID NO: 564997 - DNA, 120 bp, Artificial Sequence
  ENSG00000170006_24 (sequence is synthesized)
ttgccctaattggatagggcaatcagaacaaaatctgactttcgaatatttaaaagatatgtaagtttgattgcattttcgtacattttaagcaaactaggttaacaacaacatagccta

SEQ ID NO: 564998 - DNA, 120 bp, Artificial Sequence
  ENSG00000170006_25 (sequence is synthesized)
gtcaaacttctcaggaaacttgttttaataaatatgtaaaaatacccattcatgactcttgacccaatggtgtgactcctccctctgggaagggctttgttacccaatgcaagaccacag

SEQ ID NO: 564999 - DNA, 120 bp, Artificial Sequence
  ENSG00000170006_26 (sequence is synthesized)
cctggatccaccttgatgtaggtggctcctggataacccacatcaaacaaatgtgataaagatgagtaaaactggtcttgggaaaataatttcatagtttttttttctcctagttatgct

SEQ ID NO: 565000 - DNA, 120 bp, Artificial Sequence
  ENSG00000170006_27 (sequence is synthesized)
ggaaaataatttcatagtttttttttctcctagttatgctgtataatacaggagaaccaaaagctgtaaaattattttattttattttttaaagacagggtctcactatgttgcccaggc

SEQ ID NO: 565001 - DNA, 81 bp, Artificial Sequence
  ENSG00000170006_28 (sequence is synthesized)
ggattacaggcatgagccactgagcccgaccagctgtaaaattattatattcattttcactatgtgctacttcttctcacc

SEQ ID NO: 565002 - DNA, 120 bp, Artificial Sequence
  ENSG00000170006_29 (sequence is synthesized)
caaagtgctggattacaattgtgagccactgtgtctggccacacactgactttcactgtaatatctggatgttttatgtaacatatctgggcaatagggcttatggcagaattggccctc

SEQ ID NO: 565003 - DNA, 120 bp, Artificial Sequence
  ENSG00000170006_30 (sequence is synthesized)
gtggtgtaggccttccaagttccaagtctcatttttagtattcctccgttccaacccctggatccaccagttccaacagcctggatccaccttgatattgacagccaggcagatgcttct

SEQ ID NO: 565004 - DNA, 120 bp, Artificial Sequence
  ENSG00000170006_31 (sequence is synthesized)
gctgatcaccgcagctctagcaatggaaatggatatgttaagaaaatacttgtctattcttttattttggtggtttaaactattaattcacaccatctctgaaaaaaggccttatgttga

SEQ ID NO: 565005 - DNA, 120 bp, Artificial Sequence
  ENSG00000170006_32 (sequence is synthesized)
ctaaagaaaacataggctttagtttcagcttctgtcagaattagtaccaattctgaatctggtggagtgataagacatggtttcatgctgggaagacactgctgaaatcctccttgtggg

SEQ ID NO: 565006 - DNA, 120 bp, Artificial Sequence
  ENSG00000170006_33 (sequence is synthesized)
agaacatggaaattttatactgaattaaattaacgcatgtgacttttcacattcagagacattcaggatgaattctggggtttccatttaatagctataacaggcagtccagaacaactt

SEQ ID NO: 565007 - DNA, 120 bp, Artificial Sequence
  ENSG00000170006_34 (sequence is synthesized)
cacatatagcagcatttctgctatgtgacaatgaccaaaagagttcctgtatattagtgtctagtggaatatttcaaattgcagaacccagacaaccaattgcctgaattattattattt

SEQ ID NO: 565008 - DNA, 120 bp, Artificial Sequence
  ENSG00000170006_35 (sequence is synthesized)
tttgtttttagcaactctttggctttatcttgatactgtcttgtctggcaccaaagttttatttccttcttagtcctcttggggatagtttttgggtgtttttttttatttttctttttt

SEQ ID NO: 565009 - DNA, 89 bp, Artificial Sequence
  ENSG00000170006_36 (sequence is synthesized)
ggggatagtttttgggtgtttttttttatttttctttttttgagacggggtctcatgctgatgcccaggctggagtgcaatggtgtgat

SEQ ID NO: 565010 - DNA, 120 bp, Artificial Sequence
  ENSG00000170006_37 (sequence is synthesized)
ctactggtgtgcactactaggactggctaattttttgtatcttttgtacagatagggtttcaccgtgttgctcaggctggttttgaacttctaggttcaagcaatcctcccaccacagcc

SEQ ID NO: 565011 - DNA, 120 bp, Artificial Sequence
  ENSG00000170006_38 (sequence is synthesized)
tcctgggattacaggtgtgagccaccataactggctggaattatttgtacctggaccttgtgttttgtttttttgccctactatcttttctaaataacatatcatgttcctgagatagca

SEQ ID NO: 565012 - DNA, 120 bp, Artificial Sequence
  ENSG00000170006_39 (sequence is synthesized)
agatagcagtatatacaattatgtaaaatagagctttatatgaactctgtacatgctctaagctctttttgaatgatattttaagaagtttctaaaccaaagtgcttaagaaaacatgaa

SEQ ID NO: 565013 - DNA, 120 bp, Artificial Sequence
  ENSG00000170006_40 (sequence is synthesized)
gatgttaatttcatgaagactgtacaagtttagaagtacaatgtagacctgtttaagacaaaggtggatgggctttggggttttttttacaattggacttcaggtacagaaggcttgggt

SEQ ID NO: 565014 - DNA, 77 bp, Artificial Sequence
  ENSG00000170006_41 (sequence is synthesized)
taagtaactggacttttatgaaaagcatattcttaacagtttcccatttcctttttttttttttttaagatagtgtt

SEQ ID NO: 565015 - DNA, 120 bp, Artificial Sequence
  ENSG00000170006_42 (sequence is synthesized)
aagtgatccgcccacctcagcctcccaacatgttgggattataggcataagccaccatgcccagccagttttcatttctttggtctgcatgtaaaggactaaagaatgatatgtagctac

SEQ ID NO: 565016 - DNA, 120 bp, Artificial Sequence
  ENSG00000170006_43 (sequence is synthesized)
ctactacactgcagcaaacaacatttttccagtgtacaaatcagtggagagtaagcaatgtattactctgatgtcggtgaaacacctcaaattataaataatgccaggaacatgtgaaaa

SEQ ID NO: 565017 - DNA, 120 bp, Artificial Sequence
  ENSG00000170006_44 (sequence is synthesized)
ctccacatgtttaataaatgccagctttcagaaaaagcagagattataggtattcaacaagttaaacaataatctggtagattagtaataatttaacacatgtgtatcttgtatttaaag

SEQ ID NO: 565018 - DNA, 120 bp, Artificial Sequence
  ENSG00000170006_45 (sequence is synthesized)
ttaactgaaaattatgtaaaaaaaaaaaacactgtgtttgactttcttttgttttacaagtgatgcagagtatctgctgagaaggtcagttagatcatctgatgtcatatttgccactta

SEQ ID NO: 565019 - DNA, 120 bp, Artificial Sequence
  ENSG00000170006_46 (sequence is synthesized)
gcttttgtcccagcagcatataaattctaccttgtaagcctcatattagaagtggtcccagccaggcacagtggcttacttcccaacactttgggagtccacggctggtggattgcctga

SEQ ID NO: 565020 - DNA, 120 bp, Artificial Sequence
  ENSG00000170006_47 (sequence is synthesized)
cctggccaacatggtgaaaccccatttttacaaaaatgcaaaaattagccaggtgtggtagtacacacctgtaatcccacctactcggggggctgaggcccaagaatcacttgaacccag

SEQ ID NO: 565021 - DNA, 84 bp, Artificial Sequence
  ENSG00000170006_48 (sequence is synthesized)
gtacacacctgtaatcccacctactcggggggctgaggcccaagaatcacttgaacccaggaggcggctcctgggtgacagagc

SEQ ID NO: 565022 - DNA, 120 bp, Artificial Sequence
  ENSG00000170006_49 (sequence is synthesized)
tgctacggattagaactaatttgtaaaactatcagaattttaagactgattaaaggttttaggtgtttttctcctactttgcatactgagaataatatgtatagtatttttccagtatga

SEQ ID NO: 565023 - DNA, 120 bp, Artificial Sequence
  ENSG00000170006_50 (sequence is synthesized)
tttacaattttataaatgtcagtatacatatgtatatataaattattctcaactccatttttttttaaataaaataagtacatgtttgtgtgctaaattgctcatttggcagtgatagat

SEQ ID NO: 565024 - DNA, 120 bp, Artificial Sequence
  ENSG00000170006_51 (sequence is synthesized)
attgctcatttggcagtgatagattgaaaaacatttataaatttaaaaataaagcactataagatatgaggaatgaatagcttctatgtgaatttctatgtaattaatatcaatatttag

SEQ ID NO: 565025 - DNA, 120 bp, Artificial Sequence
  ENSG00000170006_52 (sequence is synthesized)
atatttgtttactaaaatgttttatttactaagagtagaggtgaattatgcatctttctaaggaaaagttcttttaatttctgtgtctatgaaaaagaattcataattcataattcttaa

SEQ ID NO: 565026 - DNA, 120 bp, Artificial Sequence
  ENSG00000170006_53 (sequence is synthesized)
ttgccctcttttgatccatataattctttaaataaacgaaacaataccaattcaaaaaggggcctgctttgtataaaattgtctaacctaaaaattaagtagactttctgcatatctaaa

SEQ ID NO: 565027 - DNA, 120 bp, Artificial Sequence
  ENSG00000170006_54 (sequence is synthesized)
atatattattacacattcttgtctttattcttccttacaaaacatttttaaatgaaggaatgaaattttaattgtttatgagaatataacttttaaaaatatttctagtaggccaggcat

SEQ ID NO: 565028 - DNA, 64 bp, Artificial Sequence
  ENSG00000170006_55 (sequence is synthesized)
tttgcagtgagtgccaagactgagccactgcactgcaggctgggtgacagagtgaaactccatc

SEQ ID NO: 565029 - DNA, 120 bp, Artificial Sequence
  ENSG00000170006_56 (sequence is synthesized)
tgaaactccatctcaaaaaaaaaaaaaattctagtaaaaatggaaaaatccacaagaaaacctctttttttcctgattactcacttttcttcatgcctttaattttaacctcatctcaca

SEQ ID NO: 565030 - DNA, 120 bp, Artificial Sequence
  ENSG00000170006_57 (sequence is synthesized)
aattttaacctcatctcacaccttgatattagaagaaagtaaggctgaaaggcagattcataagttgtagataacatgaagacttccttgaataaggatttattctttcggctcacaaag

SEQ ID NO: 565031 - DNA, 120 bp, Artificial Sequence
  ENSG00000170006_58 (sequence is synthesized)
accagtcagtattattgacaaacaacaggcaggaagatttctcctaaaagtctcaactaaagttaaacctggtccattatggcatcaatctacccctagaaactgatgcagagtctattt

SEQ ID NO: 565032 - DNA, 120 bp, Artificial Sequence
  ENSG00000170006_59 (sequence is synthesized)
cctccctgttttaactagaacttagccagactggagacagcatggacccaaagagcatgcagtcccacagagttagggaaaggatgcatcttgaccagcattcatcatgtggatcagtta

SEQ ID NO: 565033 - DNA, 120 bp, Artificial Sequence
  ENSG00000170006_60 (sequence is synthesized)
ggaattaagttcctgattcaaggtgagctcatatggccgctccctggtcatctaggacacaagttccttctaactcttccccaccttcattagtacagggcttctttcctgtgttgccac

SEQ ID NO: 565034 - DNA, 120 bp, Artificial Sequence
  ENSG00000170006_61 (sequence is synthesized)
atgatccaaaatggtggttgtaactccagcatgatattcacaagaaggaaagagagggaaccagcacaagggtgagcctcccaagtaggtcagccacttttaaatagctttcctgccagc

SEQ ID NO: 565035 - DNA, 120 bp, Artificial Sequence
  ENSG00000170006_62 (sequence is synthesized)
ccagtgaagcaactctgcttacatctcattggccaatctctgcaaggcagcagggaacagtcatctctatggttggtacattatcactttcaacaataagggattctgtctcacaaagtg

SEQ ID NO: 565036 - DNA, 120 bp, Artificial Sequence
  ENSG00000170006_63 (sequence is synthesized)
gtggaagaatattgggtatctgaagaggtagccaccctggccagaaggtgctaaacactaaacatacatcatctcattttaatcctagtaattacttatgaggtaggtttagagaactta

SEQ ID NO: 565037 - DNA, 120 bp, Artificial Sequence
  ENSG00000170006_64 (sequence is synthesized)
taccttgttccatgtctttccaactccaaagcacaagtttttaatcactgcactgcactgcatccccaataactagccgtaggaaagtgttttaaaaggcatcacttggcggggtgcagt

SEQ ID NO: 565038 - DNA, 120 bp, Artificial Sequence
  ENSG00000170006_65 (sequence is synthesized)
aaacaacaaaaaaacaaacaaaaaaaagtttcagtcattgtcaaggatgccttaaggtgagcatagcctgagataagaagtaacagaggctgcaggctgagataagaaggaacagaggca

SEQ ID NO: 565039 - DNA, 120 bp, Artificial Sequence
  ENSG00000170006_66 (sequence is synthesized)
agaaggaacagaggcagtgaaggcaggaccctaggcccagaagtaatggtctatcatgctgagaaaaaagccagggcttagaataggggtgataagtaaaaagcctagttttaaaatcta

SEQ ID NO: 565040 - DNA, 120 bp, Artificial Sequence
  ENSG00000170006_67 (sequence is synthesized)
agtgctggtaaaggtttggtcactaggtgaaaaaataaagttcccacttactagagctgacataaacagcatatgatcctctttaaggttgcagtggagaggcatgtccagggactctca

SEQ ID NO: 565041 - DNA, 120 bp, Artificial Sequence
  ENSG00000170006_68 (sequence is synthesized)
agttagagacaggtgtgtttagtgctagaattggaaagacattcaagcagactggcatgttgcctcttcacagccatagtcgtgctggcttgcaggatactccagcctagaatgtatata

SEQ ID NO: 565042 - DNA, 120 bp, Artificial Sequence
  ENSG00000170006_69 (sequence is synthesized)
ggagtgtggagaacagcaaaatcagcattgcttgggattcagcctgagctcaagtggcccacccctggaggcatccagtgttcacacttcccaagagagaaaacctgattggatgggtgt

SEQ ID NO: 565043 - DNA, 120 bp, Artificial Sequence
  ENSG00000170006_70 (sequence is synthesized)
ttcagcagtctattgctgcttaaacacctcaaaacttagcagcttaaaacaacaacactcaatttatttttcacacaaatctgcaatttgcatgaggctcagtgcaaatggttcaactct

SEQ ID NO: 565044 - DNA, 120 bp, Artificial Sequence
  ENSG00000170006_71 (sequence is synthesized)
ctcccacacggcattggctgggcagttcaactggatctgggggtcccactttcagatgactcacatggctggcaagtttgttctggctgtcggataggagcccagccaagcctgtggtcc

SEQ ID NO: 565045 - DNA, 120 bp, Artificial Sequence
  ENSG00000170006_72 (sequence is synthesized)
agcggccttggcttttatgatgtgggcctctccatagactccttgggcttcttcacagcatggcagctgagttccaagagcaagtgtcccaagagagcaaagtagaaatgcatagtattt

SEQ ID NO: 565046 - DNA, 120 bp, Artificial Sequence
  ENSG00000170006_73 (sequence is synthesized)
ttataatttagactcagaaatcacatcacatcacttctgccatactttattgtttgagacagttacaaagtctacctaggttcaaggtggaaaggacataaaccccacttgtccttggag

SEQ ID NO: 565047 - DNA, 120 bp, Artificial Sequence
  ENSG00000170006_74 (sequence is synthesized)
gcgtgtcaaagccacattatgagaagagcaagtgggataagggatttgttgcaggcaccgttggaaaatgtgatctgcccaaattggtgtgtcttcatgcaatatcgaggaaatatatta

SEQ ID NO: 565048 - DNA, 120 bp, Artificial Sequence
  ENSG00000170006_75 (sequence is synthesized)
ggtagtttcgtgtcaaggaacattgtggatatttgacctccctgaatcccagtgcctatgtgctctttggcttggacatagacccctggtccagtagtctgtagtaggtggtagaactag

SEQ ID NO: 565049 - DNA, 120 bp, Artificial Sequence
  ENSG00000170006_76 (sequence is synthesized)
ttttaccaactacatgagtcatgagccatgggactgaatgggttgtaggtggatcagacacatagaaatgtatgactactctcaaagcatgaggttaaaatgggagcagattagactgag

SEQ ID NO: 565050 - DNA, 120 bp, Artificial Sequence
  ENSG00000170006_77 (sequence is synthesized)
caccttgaggatagggatcagtcttactcatctctgtatcctgaaaagtgcttggcgctactgcacgctccataataacagaaaaaccaattatttaatgagctaggagttacatatcat

SEQ ID NO: 565051 - DNA, 120 bp, Artificial Sequence
  ENSG00000170006_78 (sequence is synthesized)
ctttccttaagtacctaatcagtctttatcatcagtgagtgcagaactcaaatatggtattgttcatcttccatcaccattttctcccaagtttcctggtttaattgcattttcctcact

SEQ ID NO: 565052 - DNA, 120 bp, Artificial Sequence
  ENSG00000170006_79 (sequence is synthesized)
ttccatctaatggatcctgatgtcattctttatctttatttcatattgtcctattgtgtgtattgtattgtatttttagctacattaaatccaatatggaaggaagcagagaacgatcat

SEQ ID NO: 565053 - DNA, 120 bp, Artificial Sequence
  ENSG00000170006_80 (sequence is synthesized)
aattgaactaacaagcaagtggaggtggagagaaagtggccccaatttggaaggtgaaggaaaactggggatggagcctaactgatcattaaaatgctcgaagcagctctttccaaccca

SEQ ID NO: 565054 - DNA, 120 bp, Artificial Sequence
  ENSG00000170006_81 (sequence is synthesized)
gaactcatgaccataggaagatcagctgttttcccactttacccaattctttcctaccgtgcaatctgatggaaatcattctgcagacacgttggaacctcaggcgaagccatcttattc

SEQ ID NO: 565055 - DNA, 120 bp, Artificial Sequence
  ENSG00000170006_82 (sequence is synthesized)
cactgtctatcctgagacatgcagattctagcttttggagcactggggtgctgcagggacagaataaccaagcagtgatgaattgtgtcctttccagtgtcagaggcatgttgaagtttt

SEQ ID NO: 565056 - DNA, 120 bp, Artificial Sequence
  ENSG00000170006_83 (sequence is synthesized)
gcatctgtgttattagtgctttttccatttcaagagccttgacatcattaatcttttcatcactatcactccttggtgaggccatttttgtgcaagtaaccacgcagatcagagaactat

SEQ ID NO: 565057 - DNA, 120 bp, Artificial Sequence
  ENSG00000170006_84 (sequence is synthesized)
aacaagaaccttctagccaaggatctcagagtgctttacagacatacctcctggtatgaaatttgcagtgtcttgatgtgtgaggtctctctgaaagagctgcagggaaaacagcgggcg

SEQ ID NO: 565058 - DNA, 120 bp, Artificial Sequence
  ENSG00000170006_85 (sequence is synthesized)
ataaactacccctttaaacaggctgtggctacatgatgcctggcttactcagtaaatcttctggaaagagactctttctcttgctcactgctcagcgtggaaacaagaaaaggaagccag

SEQ ID NO: 565059 - DNA, 120 bp, Artificial Sequence
  ENSG00000170006_86 (sequence is synthesized)
aggctcctgtagctcctgccctcccctagcctccaccagacaaccccactatcgaatgcacagaggagaggatctgagaggagagtactgtcaggctaagtgggggggaagtaggaactg

SEQ ID NO: 565060 - DNA, 120 bp, Artificial Sequence
  ENSG00000170006_87 (sequence is synthesized)
aaggaggaggacaaagtgggttggaggagatgaaatggaaggattgttggagggaaaatggaataggggtttgagatggagctttgtaagagctgcatttgcctcctggttgcaaaggga

SEQ ID NO: 565061 - DNA, 120 bp, Artificial Sequence
  ENSG00000170011_0 (sequence is synthesized)
gcgcctccctcgcagccgctgctgccgacgccgctgcgctcccgcctcctgtcggttcccgggttcccgctgcggctgcggttctggcagccgagcccccgcggtgctgcagcccagctt

SEQ ID NO: 565062 - DNA, 120 bp, Artificial Sequence
  ENSG00000170011_1 (sequence is synthesized)
gagcccccgcggtgctgcagcccagctttagcgcgcagaccgacccgcgccccttcttcgccgccggcagcctctaatccacgcggcgcgttgcggcaggtgccctgggcgtactgaggc

SEQ ID NO: 565063 - DNA, 120 bp, Artificial Sequence
  ENSG00000170011_2 (sequence is synthesized)
gcggtggcctgagcccggccgccatcgatgaccccggtcgcggacttgcttcaggctggccaccccccgtcttgtttcatcatctgtgttgagtaaccatggggaggaagctggacctgt

SEQ ID NO: 565064 - DNA, 120 bp, Artificial Sequence
  ENSG00000170011_3 (sequence is synthesized)
ctggtttgactgatgatgaaacagagcatgttcttcaggtggttcaaagagacttcaatcttcgcaaaaaagaagaagaacgactaagtgagctgaagcagaagctggatgaggaaggca

SEQ ID NO: 565065 - DNA, 120 bp, Artificial Sequence
  ENSG00000170011_4 (sequence is synthesized)
gcaagtgcagcatcctctcgaagcaccagcagtttgtggagcactgctgcatgcgctgctgctcgcccttcaccttcctcgtcaacaccaagcgccagtgtggagattgcaaattcaatg

SEQ ID NO: 565066 - DNA, 120 bp, Artificial Sequence
  ENSG00000170011_5 (sequence is synthesized)
tctgcaagagctgctgctcctaccagaagcacgaaaaggcctgggtctgctgcgtctgccagcaagcgaggcttctgagggcccaatctctggaatggttctacaataatgtgaagagcc

SEQ ID NO: 565067 - DNA, 120 bp, Artificial Sequence
  ENSG00000170011_6 (sequence is synthesized)
gcttcaagcgctttggcagtgccaaggttctgaagaacctgtacaggaagcaccggctggagagtggcgcgtgcttcgacattctaggaggaagcctttttgagtcaaacctggagaatg

SEQ ID NO: 565068 - DNA, 120 bp, Artificial Sequence
  ENSG00000170011_7 (sequence is synthesized)
aaggaagcatttctggcagtgattcaacattttataggcagtcagaaggacatagtgtgatggacaccttggctgtggccctacgggtggctgaagaggccattgaggaagcaatttcca

SEQ ID NO: 565069 - DNA, 120 bp, Artificial Sequence
  ENSG00000170011_8 (sequence is synthesized)
aagcagaggcatatggggacagcctggacaagcaaaatgaggccagttacctgcgggaccacaaggaggagctaactgaggaactggccacgacaatcctgcagaagattatacgaaaac

SEQ ID NO: 565070 - DNA, 120 bp, Artificial Sequence
  ENSG00000170011_9 (sequence is synthesized)
agaagagcaaaagtgagcagcaagtggaagaagagccaggatggccacatccccagagttgcagcacaaaggtggcagatgaggggacctcagcatcccctggaggctaccgtgctcccg

SEQ ID NO: 565071 - DNA, 120 bp, Artificial Sequence
  ENSG00000170011_10 (sequence is synthesized)
ctgccctctggaggtcccagtctgccttctcaatcactggagaagaagccctgaagacccctccagtggaggctccatcgaggcagccaagggaccaaggccaacacccgagagcagagt

SEQ ID NO: 565072 - DNA, 120 bp, Artificial Sequence
  ENSG00000170011_11 (sequence is synthesized)
ctgctctgcccagctggaagagtgtggacaggctggatgaaacaaacctggccccagttttgcagagccccgacgggaactgggtggccctgaaggatggcgctccaccccccacccgac

SEQ ID NO: 565073 - DNA, 120 bp, Artificial Sequence
  ENSG00000170011_12 (sequence is synthesized)
tactggccaaacctaagagcgggacgtttcaggccctggaggtggcctccagtgtggcatctgcctacgatgagatgggctccgatagcgaggaagactttgactggagtgaggccttga

SEQ ID NO: 565074 - DNA, 120 bp, Artificial Sequence
  ENSG00000170011_13 (sequence is synthesized)
gcaagctgtgtcccaggtcccgggccctgcccaggaacccccagcctcagcccacacaggcccagagctctgaccaaggccccatagctgcctccccatcctctgcactctcccccaacc

SEQ ID NO: 565075 - DNA, 120 bp, Artificial Sequence
  ENSG00000170011_14 (sequence is synthesized)
ctgaggccatgtgctctgactcggagacctcctccgcaggctcttcccgagaagttgggcaccaggccagactgtcctggttgcagaggaaggcccccaggaaccctgcagctgagaaga

SEQ ID NO: 565076 - DNA, 120 bp, Artificial Sequence
  ENSG00000170011_15 (sequence is synthesized)
tgcgcttgcatggagagctggacgtgaacttcaacccccagttggccagcagggagacctcggacagcagcgagccggaggaggccccccacaccacagaccggcgggccaggaggtgga

SEQ ID NO: 565077 - DNA, 120 bp, Artificial Sequence
  ENSG00000170011_16 (sequence is synthesized)
gaagagcccgactgggctcagaagagccaagcaaagaaccatcttcccccagcgcccagctccgggatctagacacacatcaggtgtcggatgatttatcagagacagacatcagcaatg

SEQ ID NO: 565078 - DNA, 120 bp, Artificial Sequence
  ENSG00000170011_17 (sequence is synthesized)
aggctcgggatccccagactctcacagacaccacagaggagaaacggagaaacaggctgtacgagttagcaatgaaaatgagtgaaaaggagacttcttcaggggaggatcaggagtctg

SEQ ID NO: 565079 - DNA, 120 bp, Artificial Sequence
  ENSG00000170011_18 (sequence is synthesized)
agcccaagacagaatctgagaaccagaaggaaagtctgtcctctgaagacaacagccagagtgtccaggaagagctgaagaagaagttttctgctgtttctctctgcaacatctccacag

SEQ ID NO: 565080 - DNA, 120 bp, Artificial Sequence
  ENSG00000170011_19 (sequence is synthesized)
aagtcctgaaagtcatcaatgccacagaggagttgatagcaggatctacagggccctgggagtccccacaagtccctcctgacagacagaaggggatgtttcctcgtgggacagaccaag

SEQ ID NO: 565081 - DNA, 120 bp, Artificial Sequence
  ENSG00000170011_20 (sequence is synthesized)
tgagactggatgagcagctgacttccctggaagaaaatgtatacctggcagcaggcactgtgtatggactggagacccagctgactgagctagaagatgccgcccgctgcatccacagtg

SEQ ID NO: 565082 - DNA, 120 bp, Artificial Sequence
  ENSG00000170011_21 (sequence is synthesized)
accaggtggccacggctgcagcccaagtccaccatgctgaactccagatttcagatattgagagccggatttcagccctgaccattgcaggattaaacatagcaccatgtgtgcgcttca

SEQ ID NO: 565083 - DNA, 120 bp, Artificial Sequence
  ENSG00000170011_22 (sequence is synthesized)
caagaagacgggatcagaagcaaaggacccaggtacaaaccatagatacatcaaggcagcaaaggaggaaactgcctgctccaccggtgaaagctgaaaaaattgagacatcttcagtga

SEQ ID NO: 565084 - DNA, 120 bp, Artificial Sequence
  ENSG00000170011_23 (sequence is synthesized)
ctaccattaaaacatttaaccacaacttcattctccaaggctcctcaacaaacaggactaaggaaaggaaaggcaccaccaaggatttgatggagcctgctctggagtcagctgtgatgt

SEQ ID NO: 565085 - DNA, 120 bp, Artificial Sequence
  ENSG00000170011_24 (sequence is synthesized)
actgacaccatggaattccactgccagtgacccactgcctccggccgtacacgacagtgccttgacccaacagccatcgagtactgtatgtatttccacctgaggagaaggcctggggag

SEQ ID NO: 565086 - DNA, 120 bp, Artificial Sequence
  ENSG00000170011_25 (sequence is synthesized)
gccacagtgcaccattgcacagggctgtcctgatacctcatccagaaagccgtctcagacttcagcactgcggtcttgcccactctctgccttaggctcccaggggaatccaagacagaa

SEQ ID NO: 565087 - DNA, 120 bp, Artificial Sequence
  ENSG00000170011_26 (sequence is synthesized)
aatgaagacactggcttccaacagcagcgctccatgtttaagatacatattttccctgtttgctttgctactgtatgttgactttaagatctttttttaaatacatttgattcagctagt

SEQ ID NO: 565088 - DNA, 120 bp, Artificial Sequence
  ENSG00000170011_27 (sequence is synthesized)
attccatgtcaacaatttgtccaaaggaaaactgctggagggaggtggagggaggaaggtgggaattattatttaatacatcattaatgcttattaatctctcacaagcatctttgtctt

SEQ ID NO: 565089 - DNA, 120 bp, Artificial Sequence
  ENSG00000170011_28 (sequence is synthesized)
gcaaatcctaagggaaaagcaagtccctgcagtgagcactagggacagtctaatttggggattgctcaaccatcaagactgcaggtctcccttcagccacctccttcctgctaaaagctt

SEQ ID NO: 565090 - DNA, 120 bp, Artificial Sequence
  ENSG00000170011_29 (sequence is synthesized)
agcctaccacactaccagtcattcccatcgctttgcaatcacaagccacaggatgagaagttctgactcactcatgccatgcccagggctatctgaaacaatgtctcattaagaatttag

SEQ ID NO: 565091 - DNA, 120 bp, Artificial Sequence
  ENSG00000170011_30 (sequence is synthesized)
ggttcttccatgggcttactgacagttgcccagatctgaaggggaaagggtcttgagaaagaccatcactggctcaactttagggcactgtccagagtcaacatgatgtggtttagcagt

SEQ ID NO: 565092 - DNA, 120 bp, Artificial Sequence
  ENSG00000170011_31 (sequence is synthesized)
gatcacatctaaacaaagtttaggtaaatgaattatcgcagagaaaaaccacatgagaaaatttttgtactccaaatttacttcccaataaatattcagcaaagtagtaaaatgacctta

SEQ ID NO: 565093 - DNA, 120 bp, Artificial Sequence
  ENSG00000170011_32 (sequence is synthesized)
aagataaaaatgattagggaatagccttagaaaatttataggtataaaaaattcaaggacaaactgtgcatttaatggacacaagaattgactctaactccatgtctgtggtttctttga

SEQ ID NO: 565094 - DNA, 120 bp, Artificial Sequence
  ENSG00000170011_33 (sequence is synthesized)
acccatatcaaatgtatgactatttagagtgtttataagagataatggaactgaactttcactcaattaattgggcattaacaaccttcttttatgtttgttcctgatatagtctgaatc

SEQ ID NO: 565095 - DNA, 120 bp, Artificial Sequence
  ENSG00000170011_34 (sequence is synthesized)
ttaggaagaaggtaaaagaaaggaggcaagagaatagttatgatgaatatgtgttaagtgcctgctctgaaggaggcaatgttcttctcatttgaatccttatggcaaccttattcaata

SEQ ID NO: 565096 - DNA, 120 bp, Artificial Sequence
  ENSG00000170011_35 (sequence is synthesized)
ggttttcccatatttcagatttaataactgaaggccagagagattaatttgccaaagccacacctttatgctaattatgattggaatgcatcacaaaagcctaactctgttgttttcaac

SEQ ID NO: 565097 - DNA, 120 bp, Artificial Sequence
  ENSG00000170011_36 (sequence is synthesized)
ctctacgttattttgctgctatgtgcatttccagatctgattttctgctaacttgtgtgctatgatccactcctgatgggggtctacattaatcttccagtactccttgctgatgctgtg

SEQ ID NO: 565098 - DNA, 120 bp, Artificial Sequence
  ENSG00000170011_37 (sequence is synthesized)
ttatgtgtcatctaacagaaatgactcctttgaaataagtaaatctttggctttttgttctgttggtgtgattcaaagcaaaacaaacaaacaaaaacaaattttaagaacacaacaaaa

SEQ ID NO: 565099 - DNA, 120 bp, Artificial Sequence
  ENSG00000170011_38 (sequence is synthesized)
aagatttgacttccgaatagaatgttttctttaagaggcatgaaaagcaactattgttgtgttacagtgttaaaaatattcagttttctttgacaaaaatgtgtactgtgtaagccttgc

SEQ ID NO: 565100 - DNA, 120 bp, Artificial Sequence
  ENSG00000170011_39 (sequence is synthesized)
aaacaaaaaacaacaaaaaagaagcagcagcagcagcctgctgtgtggcatctgaacttttataaaggtttccttgtgccaaataagtgcaaagatttaatttactattaaaaaccataa

SEQ ID NO: 565101 - DNA, 120 bp, Artificial Sequence
  ENSG00000170011_40 (sequence is synthesized)
gttccagaagaattattttgtcatcaagtgattttgatctttagtgtcaatatttatatttagattaatttttataaatgaaaatattttaatggtttaagaaaatgaggacaacaggat

SEQ ID NO: 565102 - DNA, 120 bp, Artificial Sequence
  ENSG00000170011_41 (sequence is synthesized)
ggacaacaggataatatctttgatgacttctgaaagttatgcttcccttcatgttatatgcacattgccaagaattactgtcaagagaaatgataagtaaaagtcatttatgaaaataaa

SEQ ID NO: 565103 - DNA, 120 bp, Artificial Sequence
  ENSG00000170011_42 (sequence is synthesized)
aacccggcggttccgcagctgtgtttgggagacttgggggcgcattagcctggacagctccctgatcggtcttgtttcatcatctgtgttgagtaaccatggggaggaagctggacctgt

SEQ ID NO: 565104 - DNA, 120 bp, Artificial Sequence
  ENSG00000170011_43 (sequence is synthesized)
agaaacgagcagtagcactgtgctgttccttcactctggtattgctctctacccagagccctgtgtcttttcttaagaagactacctggcttatcctctgtctgggcttttctggccatg

SEQ ID NO: 565105 - DNA, 120 bp, Artificial Sequence
  ENSG00000170011_44 (sequence is synthesized)
aggacatggagtgaagattttggagctctgtgccctgtgtcctggcgtttaattatttctcaagacacgtgagctaaatttgagtagaagagcttggcagaaagaaaaccaccagttacg

SEQ ID NO: 565106 - DNA, 120 bp, Artificial Sequence
  ENSG00000170011_45 (sequence is synthesized)
agcttcatcccgggttcctcctcatactccctttccgccacagccgccagacttgaagaggtagggagccaatcccagggggctctacatagatttggaggtaacggcggaggatcttcc

SEQ ID NO: 565107 - DNA, 120 bp, Artificial Sequence
  ENSG00000170011_46 (sequence is synthesized)
tgatggacgcgtggagcggaaagattcagtggtgggaaccccaagacctgcggctttttggagcacttgctccccttcttgttccttaatttactgacgtcttggcagggtcttgtttca

SEQ ID NO: 565108 - DNA, 120 bp, Artificial Sequence
  ENSG00000170011_47 (sequence is synthesized)
aagttggagtaatagaaacacctacaggtacaggtactgccagggtcccccagatgcattgttaccccagatgcaactatctactactgtgtgtgagtctccctgggtcacttattattg

SEQ ID NO: 565109 - DNA, 120 bp, Artificial Sequence
  ENSG00000170011_48 (sequence is synthesized)
attttgatgtcctcaactgcagtaggagccatctccctgacttgttctgacctgacttgttccctaccgtaatctcctggatgcagaagtccctcaggcccatcgggcttctgagggccc

SEQ ID NO: 565110 - DNA, 120 bp, Artificial Sequence
  ENSG00000170017_0 (sequence is synthesized)
agagcagcccggagaccgctgccgccgctgccgctgctaccaccgctgccacctgaggagacccgccgcccccccgtcgccgcctcctgcgagtccttcttagcacctggcgtttcatgc

SEQ ID NO: 565111 - DNA, 120 bp, Artificial Sequence
  ENSG00000170017_1 (sequence is synthesized)
acattgccactgccattattattatcattccaatacaaggaaaataaaagaagataccagcgaaaagaaccgcttacacctttccgaattactcaagtgtctcctggaaacagagggtcg

SEQ ID NO: 565112 - DNA, 120 bp, Artificial Sequence
  ENSG00000170017_2 (sequence is synthesized)
ttgtccccggaggagcagccgaagggcccgtgggctggtgttgaccgggagggaggaggagttgggggcattgcgtggtggaaagttgcgtgcggcagagaaccgaaggtgcagcgccac

SEQ ID NO: 565113 - DNA, 120 bp, Artificial Sequence
  ENSG00000170017_3 (sequence is synthesized)
agcccaggggacggtgtgtctgggagaagacgctgcccctgcgtcgggacccgccagcgcgcgggcaccgcggggcccgggacgacgccccctcctgcggcgtggactccgtcagtggcc

SEQ ID NO: 565114 - DNA, 120 bp, Artificial Sequence
  ENSG00000170017_4 (sequence is synthesized)
caccaagaaggaggaggaatatggaatccaagggggccagttcctgccgtctgctcttctgcctcttgatctccgccaccgtcttcaggccaggccttggatggtatactgtaaattcag

SEQ ID NO: 565115 - DNA, 120 bp, Artificial Sequence
  ENSG00000170017_5 (sequence is synthesized)
catatggagataccattatcataccttgccgacttgacgtacctcagaatctcatgtttggcaaatggaaatatgaaaagcccgatggctccccagtatttattgccttcagatcctcta

SEQ ID NO: 565116 - DNA, 120 bp, Artificial Sequence
  ENSG00000170017_6 (sequence is synthesized)
caaagaaaagtgtgcagtacgacgatgtaccagaatacaaagacagattgaacctctcagaaaactacactttgtctatcagtaatgcaaggatcagtgatgaaaagagatttgtgtgca

SEQ ID NO: 565117 - DNA, 120 bp, Artificial Sequence
  ENSG00000170017_7 (sequence is synthesized)
tgctagtaactgaggacaacgtgtttgaggcacctacaatagtcaaggtgttcaagcaaccatctaaacctgaaattgtaagcaaagcactgtttctcgaaacagagcagctaaaaaagt

SEQ ID NO: 565118 - DNA, 120 bp, Artificial Sequence
  ENSG00000170017_8 (sequence is synthesized)
tgggtgactgcatttcagaagacagttatccagatggcaatatcacatggtacaggaatggaaaagtgctacatccccttgaaggagcggtggtcataatttttaaaaaggaaatggacc

SEQ ID NO: 565119 - DNA, 120 bp, Artificial Sequence
  ENSG00000170017_9 (sequence is synthesized)
cagtgactcagctctataccatgacttccaccctggagtacaagacaaccaaggctgacatacaaatgccattcacctgctcggtgacatattatggaccatctggccagaaaacaattc

SEQ ID NO: 565120 - DNA, 120 bp, Artificial Sequence
  ENSG00000170017_10 (sequence is synthesized)
attctgaacaggcagtatttgatatttactatcctacagagcaggtgacaatacaagtgctgccaccaaaaaatgccatcaaagaaggggataacatcactcttaaatgcttagggaatg

SEQ ID NO: 565121 - DNA, 120 bp, Artificial Sequence
  ENSG00000170017_11 (sequence is synthesized)
gcaaccctcccccagaggaatttttgttttacttaccaggacagcccgaaggaataagaagctcaaatacttacacactgacggatgtgaggcgcaatgcaacaggagactacaagtgtt

SEQ ID NO: 565122 - DNA, 120 bp, Artificial Sequence
  ENSG00000170017_12 (sequence is synthesized)
ccctgatagacaaaaaaagcatgattgcttcaacagctatcacagttcactatttggatttgtccttaaacccaagtggagaagtgactagacagattggtgatgccctacccgtgtcat

SEQ ID NO: 565123 - DNA, 120 bp, Artificial Sequence
  ENSG00000170017_13 (sequence is synthesized)
gcacaatatctgctagcaggaatgcaactgtggtatggatgaaagataacatcaggcttcgatctagcccgtcattttctagtcttcattatcaggatgctggaaactatgtctgcgaaa

SEQ ID NO: 565124 - DNA, 120 bp, Artificial Sequence
  ENSG00000170017_14 (sequence is synthesized)
ctgctctgcaggaggttgaaggactaaagaaaagagagtcattgactctcattgtagaaggcaaacctcaaataaaaatgacaaagaaaactgatcccagtggactatctaaaacaataa

SEQ ID NO: 565125 - DNA, 120 bp, Artificial Sequence
  ENSG00000170017_15 (sequence is synthesized)
tctgccatgtggaaggttttccaaagccagccattcaatggacaattactggcagtggaagcgtcataaaccaaacagaggaatctccttatattaatggcaggtattatagtaaaatta

SEQ ID NO: 565126 - DNA, 120 bp, Artificial Sequence
  ENSG00000170017_16 (sequence is synthesized)
tcatttcccctgaagagaatgttacattaacttgcacagcagaaaaccaactggagagaacagtaaactccttgaatgtctctgctataagtattccagaacacgatgaggcagacgaga

SEQ ID NO: 565127 - DNA, 120 bp, Artificial Sequence
  ENSG00000170017_17 (sequence is synthesized)
taagtgatgaaaacagagaaaaggtgaatgaccaggcaaaactaattgtgggaatcgttgttggtctcctccttgctgcccttgttgctggtgtcgtctactggctgtacatgaagaagt

SEQ ID NO: 565128 - DNA, 120 bp, Artificial Sequence
  ENSG00000170017_18 (sequence is synthesized)
caaagactgcatcaaaacatgtaaacaaggacctcggtaatatggaagaaaacaaaaagttagaagaaaacaatcacaaaactgaagcctaagagagaaactgtcctagttgtccagaga

SEQ ID NO: 565129 - DNA, 120 bp, Artificial Sequence
  ENSG00000170017_19 (sequence is synthesized)
gaagcatgaacgtggattgtatttaagacataaacaaagacattgacagcaattcatggttcaagtattaagcagttcattctaccaagctgtcacaggttttcagagaattatctcaag

SEQ ID NO: 565130 - DNA, 120 bp, Artificial Sequence
  ENSG00000170017_20 (sequence is synthesized)
taaaacaaatgaaatttaattacaaacaataagaacaagttttggcagccatgataataggtcatatgttgtgtttggttcaattttttttccgtaaatgtctgcactgaggatttcttt

SEQ ID NO: 565131 - DNA, 120 bp, Artificial Sequence
  ENSG00000170017_21 (sequence is synthesized)
ttggtttgccttttatgtaaattttttacgtagctatttttatacactgtaagctttgttctgggagttgctgttaatctgatgtataatgtaatgtttttatttcaattgtttatatgg

SEQ ID NO: 565132 - DNA, 120 bp, Artificial Sequence
  ENSG00000170017_22 (sequence is synthesized)
ataatctgagcaggtacatttctgattctgattgctatcagcaatgccccaaactttctcataagcacctaaaacccaaaggtggcagcttgtgaagattggggacactcatattgccct

SEQ ID NO: 565133 - DNA, 120 bp, Artificial Sequence
  ENSG00000170017_23 (sequence is synthesized)
aattaaaaactgtgatttttatcacaagggaggggaggccgagagtcagactgatagacaccataggagccgactctttgatatgccaccagcgaactctcagaaataaatcacagatgc

SEQ ID NO: 565134 - DNA, 120 bp, Artificial Sequence
  ENSG00000170017_24 (sequence is synthesized)
atatagacacacatacataatggtactcccaaactgacaattttacctattctgaaaaagacataaaacagaatttggtagcacttacctctacagacacctgctaataaattattttct

SEQ ID NO: 565135 - DNA, 120 bp, Artificial Sequence
  ENSG00000170017_25 (sequence is synthesized)
gtcaaaagaaaaaacacaagcatgtgtgagagacagtttggaaaaatcatggtcaacattcccattttcatagatcacaatgtaaatcactataattacaaattggtgttaaatcctttg

SEQ ID NO: 565136 - DNA, 120 bp, Artificial Sequence
  ENSG00000170017_26 (sequence is synthesized)
ggttatccactgccttaaaattatacctatttcatgtttaaaaagatatcaatcagaattggagtttttaacagtggtcattatcaaagctgtgttattttccacagaatatagaatata

SEQ ID NO: 565137 - DNA, 120 bp, Artificial Sequence
  ENSG00000170017_27 (sequence is synthesized)
tatttttttcgtgtgtgtttttgttaactaccctacagatattgaatgcaccttgagataatttagtgtttttaactgatacataatttatcaagcagtacatgaaagtgtaataataaa

SEQ ID NO: 565138 - DNA, 120 bp, Artificial Sequence
  ENSG00000170017_28 (sequence is synthesized)
atgtctatgtatctttagttacattcaaatttgtaactttataaacatgttttatgcttgaggaaatttttaaggtggtagtataaatggaaactttttgaagtagaccagatatgggct

SEQ ID NO: 565139 - DNA, 120 bp, Artificial Sequence
  ENSG00000170017_29 (sequence is synthesized)
acttgtgactagacttttaaactttgctctttcaagcagaagcctggtttctgggagaacactgcacagcgatttctttcccaggatttacacaactttaaagggaagataaatgaacat

SEQ ID NO: 565140 - DNA, 120 bp, Artificial Sequence
  ENSG00000170017_30 (sequence is synthesized)
cagatttctaggtatagaactatgttattgaaaggaaaaggaaaactggtgtttgtttcttagactcatgaaataaaaaattatgaaggcaatgaaaaataaattgaaaattaaagtcag

SEQ ID NO: 565141 - DNA, 120 bp, Artificial Sequence
  ENSG00000170017_31 (sequence is synthesized)
atgagaataggaataatactttgccacttctgcattatttagaaacatacgttattgtacatttgtaaaccatttactgtctgggcaatagtgactccgtttaataaaagcttccgtagt

SEQ ID NO: 565142 - DNA, 120 bp, Artificial Sequence
  ENSG00000170017_32 (sequence is synthesized)
gcattggtatggattaaatgcataaaatattcttagactcgatgctgtataaaatattatgggaaaaaaagaaaatacgttattttgcctctaaacttttattgaagttttatttggcag

SEQ ID NO: 565143 - DNA, 120 bp, Artificial Sequence
  ENSG00000170017_33 (sequence is synthesized)
gaaaaaaaattgaatcttggtcaacatttaaaccaaagtaaaaggggaaaaaccaaagttatttgttttgcatggctaagccattctgttatctctgtaaatactgtgatttctttttta

SEQ ID NO: 565144 - DNA, 120 bp, Artificial Sequence
  ENSG00000170017_34 (sequence is synthesized)
ttttctctttagaattttgttaaagaaattctaaaatttttaaacacctgctctccacaataaatcacaaacactaaaataaaattacttccatataaatattattttctcttttggtgt

SEQ ID NO: 565145 - DNA, 120 bp, Artificial Sequence
  ENSG00000170017_35 (sequence is synthesized)
gggagatcaaaggtttaaagtctaacttctaagatatatttgcagaaagaagcaacatgacaatagagagagttatgctacaattatttcttggtttccacttgcaatggttaattaagt

SEQ ID NO: 565146 - DNA, 120 bp, Artificial Sequence
  ENSG00000170017_36 (sequence is synthesized)
ccaaaaacagctgtcagaacctcgagagcagaacatgagaaactcagagctctggaccgaaagcagaaagtttgccgggaaaaaaaaagacaacattattaccatcgattcagtgcctgg

SEQ ID NO: 565147 - DNA, 120 bp, Artificial Sequence
  ENSG00000170017_37 (sequence is synthesized)
ataaagaggaaagcttacttgtttaatggcagccacatgcacgaagatgctaagaagaaaaagaattccaaatcctcaacttttgaggtttcggctctccaatttaactctttggcaaca

SEQ ID NO: 565148 - DNA, 120 bp, Artificial Sequence
  ENSG00000170017_38 (sequence is synthesized)
ggaaacaggttttgcaagttcaaggttcactccctatatgtgattataggaattgtttgtggaaatggattaacatacccgtctatgcctaaaagataataaaactgaaatatgtcttca

SEQ ID NO: 565149 - DNA, 120 bp, Artificial Sequence
  ENSG00000170017_39 (sequence is synthesized)
tgggagaaaatacaatgtgctaattttgctcactccagtcgtgcatataatttatacaataaggaagatgtatccccaaatcaggttgattatatattttgtttcaactaattttgacta

SEQ ID NO: 565150 - DNA, 120 bp, Artificial Sequence
  ENSG00000170017_40 (sequence is synthesized)
atcaatagcctgaattcaattatttgattttttcagtgcttgagtgaattttttaaagcgtatacttcctaaaggtcaacaaccatagactttttggttgaagttggagaagattcatta

SEQ ID NO: 565151 - DNA, 120 bp, Artificial Sequence
  ENSG00000170017_41 (sequence is synthesized)
aaagtacctagtacatcttgtagggactgccaggtgtctttgcagtgacacatctggccagcaatgaaactgctgctgaggtaggaatatcttattgttattactcccatattctagtta

SEQ ID NO: 565152 - DNA, 120 bp, Artificial Sequence
  ENSG00000170017_42 (sequence is synthesized)
gttgactttgatccatataagagtctatatcagagaaaatcatgtcattatgtcaacttgagtttttaaaaatggattaaagtaccaacactacattaaaaatgctttagagatgttaaa

SEQ ID NO: 565153 - DNA, 120 bp, Artificial Sequence
  ENSG00000170017_43 (sequence is synthesized)
agtcattatttgaatggtttgtgcaattgacatatgcctcagtttttgtttttgttttttaaccaataagcatggaaaaaaaaaacctcctatgttagtttcttatttttcatatataga

SEQ ID NO: 565154 - DNA, 120 bp, Artificial Sequence
  ENSG00000170017_44 (sequence is synthesized)
ttaatcaattgctcctgaagtctttattaaaatttatgtttcttagaactacctatatttaaaatgtttttgtccatcatctcaggttccacatttgaaagattttctcacatttacact

SEQ ID NO: 565155 - DNA, 120 bp, Artificial Sequence
  ENSG00000170017_45 (sequence is synthesized)
ttgggacttagtagctgtacaataaatacttgttcagttgagttggaattttctcatacagatcagactatgacagtaagatttttataaagattgttttccatcaactggatgagaaat

SEQ ID NO: 565156 - DNA, 120 bp, Artificial Sequence
  ENSG00000170017_46 (sequence is synthesized)
ggaatagcactttttaaaaatatctgctgctatagtaaattctctctgaagaaacacaactactatctcatggtttttcaatttatcacctgctgtctaaagatgcttgattttccaaca

SEQ ID NO: 565157 - DNA, 120 bp, Artificial Sequence
  ENSG00000170017_47 (sequence is synthesized)
tttatgccttactgtctctttatataatatttacctagtcatcatctttattttcttccagaagtgacttaagatttttttttcttaaggtgataggccctaggggaatatttatatccc

SEQ ID NO: 565158 - DNA, 120 bp, Artificial Sequence
  ENSG00000170017_48 (sequence is synthesized)
ctcaaaatatcaatcacgttaactgcaaataaatggataatcaattagattgaccactctcttgtctaaactagtctcaaggctggcttgaaaaactaggctaatcatgctatagtccaa

SEQ ID NO: 565159 - DNA, 120 bp, Artificial Sequence
  ENSG00000170017_49 (sequence is synthesized)
ttattttagtcatataaatcagttctgaatgttcaaatgcagttagaagaaatttattttctttcatcttttcttctccaaaatattttgactatcttacatttcagagttagcactttg

SEQ ID NO: 565160 - DNA, 120 bp, Artificial Sequence
  ENSG00000170017_50 (sequence is synthesized)
agtaccagaccatgttctttagaaagaagactgaactctctgtagtgtctctatagcaggtatctatataaggggacttaaagagatcttcattctgctcatatatactatcagcaaaga

SEQ ID NO: 565161 - DNA, 120 bp, Artificial Sequence
  ENSG00000170017_51 (sequence is synthesized)
aaacaaagagtatgaaattcaaataggagatttgcagtgaggaactaaaataatattctctgttactttgtcatgtaaaaatgtcgtgagctatgaagtactactactgataactagcag

SEQ ID NO: 565162 - DNA, 120 bp, Artificial Sequence
  ENSG00000170017_52 (sequence is synthesized)
gtgatcttaatttttactgacatgtacaaataagtgttgtgtgatacatacatagatatatgatatatatgtaatcatgtatatcacgcatacatatacatgtatttggctgaaccaaat

SEQ ID NO: 565163 - DNA, 120 bp, Artificial Sequence
  ENSG00000170017_53 (sequence is synthesized)
gaaattgccattttgctgcataataaaaaaatataagcaaattcaaactatattttaacagaggtataaattttccatttatatatatccacatatataaatatcccatatatatccaca

SEQ ID NO: 565164 - DNA, 120 bp, Artificial Sequence
  ENSG00000170017_54 (sequence is synthesized)
tacaaatattttatatattatatatattagagatatagatacatttccatcctgacctttattgactggttattgatttagatttcaaaaagtattcacttgctttagaaaattgtccta

SEQ ID NO: 565165 - DNA, 120 bp, Artificial Sequence
  ENSG00000170017_55 (sequence is synthesized)
aaattaaaaaaactcactataccctgaatgcttatgtgggatacaccaaggggagaaagtagagtagtgatggaagaagagaaaattgtagaagaaacttggaataattatagtcactat

SEQ ID NO: 565166 - DNA, 120 bp, Artificial Sequence
  ENSG00000170017_56 (sequence is synthesized)
gacaaaattactttgcctaatgatagcatatagttaatgttactgtgcaaataactgtgcaaatgaatgacttgagaagttataattaaagtatttcatcttttaaaactcaaataaaaa

SEQ ID NO: 565167 - DNA, 120 bp, Artificial Sequence
  ENSG00000170027_0 (sequence is synthesized)
gcagccgcctcgcgcccggtcccgcggtcgcagctccagccgcctcctccgcgcagccgccgcctcagctgctcgctctgtgggtcggtcctctccggcacttgggctccagtcgcgccc

SEQ ID NO: 565168 - DNA, 120 bp, Artificial Sequence
  ENSG00000170027_1 (sequence is synthesized)
tccaagcccttcaggccgccccagtgtcctcctccttctccggccagacccagccccgcgaagatggtggaccgcgagcaactggtgcagaaagcccggctggccgagcaggcggagcgc

SEQ ID NO: 565169 - DNA, 120 bp, Artificial Sequence
  ENSG00000170027_2 (sequence is synthesized)
tacgacgacatggccgcggccatgaagaacgtgacagagctgaatgagccactgtcgaatgaggaacgaaaccttctgtctgtggcctacaagaacgttgtgggggcacgccgctcttcc

SEQ ID NO: 565170 - DNA, 120 bp, Artificial Sequence
  ENSG00000170027_3 (sequence is synthesized)
tggagggtcatcagtagcattgagcagaagacatctgcagacggcaatgagaagaagattgagatggtccgtgcgtaccgggagaagatagagaaggagttggaggctgtgtgccaggat

SEQ ID NO: 565171 - DNA, 120 bp, Artificial Sequence
  ENSG00000170027_4 (sequence is synthesized)
gtgctgagcctgctggataactacctgatcaagaattgcagcgagacccagtacgagagcaaagtgttctacctgaagatgaaaggggactactaccgctacctggctgaagtggccacc

SEQ ID NO: 565172 - DNA, 120 bp, Artificial Sequence
  ENSG00000170027_5 (sequence is synthesized)
ggagagaaaagggcgacggtggtggagtcctccgagaaggcctacagcgaagcccacgagatcagcaaagagcacatgcagcccacccaccccatccgattaggcctggctcttaactac

SEQ ID NO: 565173 - DNA, 120 bp, Artificial Sequence
  ENSG00000170027_6 (sequence is synthesized)
tccgtcttctactatgagatccagaacgccccagagcaagcgtgccacttggccaagaccgcgttcgacgacgccatcgccgagcttgacaccctcaacgaggactcctacaaggactcc

SEQ ID NO: 565174 - DNA, 120 bp, Artificial Sequence
  ENSG00000170027_7 (sequence is synthesized)
acgctcatcatgcagctcctccgcgacaacctcacgctctggacgagcgaccagcaggacgacgatggcggcgaaggcaacaattaaggccccaggggaactggcagcgcacgcggatgc

SEQ ID NO: 565175 - DNA, 120 bp, Artificial Sequence
  ENSG00000170027_8 (sequence is synthesized)
tactactgcagtctttatttttttcccatgagttgggggtcgggtgggggagggaaagggagggatgaccttcccagggagaaacccacgacctgtcctgtctttgatcgcctctttgac

SEQ ID NO: 565176 - DNA, 120 bp, Artificial Sequence
  ENSG00000170027_9 (sequence is synthesized)
atttttgccaaaataccactagtggaaagtcaggctagctgtgctggtattggaatagcagcctcacactggcgtctggactgttctgtagattcatgcaagtggagctgtctgtctcta

SEQ ID NO: 565177 - DNA, 120 bp, Artificial Sequence
  ENSG00000170027_10 (sequence is synthesized)
atttaacttattgctagataatagggttttcagatgaaaagaaaacttaaagaggaatggccctcattcagtaagttctgtggttccagtaaggatttttatgtacatacgctctcgtct

SEQ ID NO: 565178 - DNA, 120 bp, Artificial Sequence
  ENSG00000170027_11 (sequence is synthesized)
ctcgttttgggtactttctatctcatctgtctcggctctgcatgttttccagggtgtagcctacagacatggaacagtgtaaatcccagactgacagacttagaacctgaggtctcattc

SEQ ID NO: 565179 - DNA, 120 bp, Artificial Sequence
  ENSG00000170027_12 (sequence is synthesized)
atccttatggtttaggccttgccagttttccgaagtctctgattagttgacagtattaacactaaattgcagtttacagtatttctacattacagccatatgtaacatcaagccatcgat

SEQ ID NO: 565180 - DNA, 120 bp, Artificial Sequence
  ENSG00000170027_13 (sequence is synthesized)
tgtgtacttttcctttgctagttgtttgggctttaacatccttattcagccttatccaggttggttttgctgttgatcggtctcctaggctaaatgagaatgaaagcgacttcaggtcag

SEQ ID NO: 565181 - DNA, 120 bp, Artificial Sequence
  ENSG00000170027_14 (sequence is synthesized)
gtggctgtgggattttttttttttggtccttctttcctcttaacgtaaatccaccaccaaaattattaatcctcttgagagaaacgtgaaacgccacaaaaatagagaaaattcaggtct

SEQ ID NO: 565182 - DNA, 120 bp, Artificial Sequence
  ENSG00000170027_15 (sequence is synthesized)
cgtttcctactgcgcctcgtgctggcggacgcagctgggtgcagaagctgtggggtcggagaggcgtttggagaaggtctgtggtgcagtgtgtgaaaattcaggtgctagaagcctact

SEQ ID NO: 565183 - DNA, 120 bp, Artificial Sequence
  ENSG00000170027_16 (sequence is synthesized)
ggtagaaaaacccaaaaggaagagctatatccttaaccattctgtccaatttcgggagccttgtcagtgtgtcagtttttcctccccgaagacactccttccccaagtaattgtaggaag

SEQ ID NO: 565184 - DNA, 120 bp, Artificial Sequence
  ENSG00000170027_17 (sequence is synthesized)
ataaaaaaactgttaccagataacaaacactgaactcctatttgaccagaactttttcctctcgagatagttttttctttttaatgaaaaaagcataggaattggagattggcttgtctc

SEQ ID NO: 565185 - DNA, 120 bp, Artificial Sequence
  ENSG00000170027_18 (sequence is synthesized)
acgcagccagtgcacatttggaattgacggaaacaacgttgctatttccacccatttgttttcggcagccttaaggccctcattctcatttcgggtgaatctgtctatctgtgaacgtgg

SEQ ID NO: 565186 - DNA, 120 bp, Artificial Sequence
  ENSG00000170027_19 (sequence is synthesized)
cccgcatgtgcattcttttttttatatatataaagtcagtgacgaggaactcccgagacgtgtaatgacaccacacttgttttctttgtttctttgttttatttaggcaagaagaggtgt

SEQ ID NO: 565187 - DNA, 120 bp, Artificial Sequence
  ENSG00000170027_20 (sequence is synthesized)
gagtaattgaggaaaaactgacagatgcttttgctaataccaaaattgagcttacaattaggaactgagtatgtgtaacaggatacaggtgacagtgaagatagaagaaccacgatgacc

SEQ ID NO: 565188 - DNA, 120 bp, Artificial Sequence
  ENSG00000170027_21 (sequence is synthesized)
acagactcaatgtgctctgtaacatcgcacagtttacccagcatgactttccttaggaggccccctcctcacgctagagtaaaagtcccagttaagtgaagcctaccagaagaactagta

SEQ ID NO: 565189 - DNA, 120 bp, Artificial Sequence
  ENSG00000170027_22 (sequence is synthesized)
tgaagcctaccagaagaactagtagaagaagctttgccgcttttgtgcctctcacaggcgcctaaagtcattgccatgggaggaagacgatttggggggggaggggggggggggcagggt

SEQ ID NO: 565190 - DNA, 120 bp, Artificial Sequence
  ENSG00000170027_23 (sequence is synthesized)
ttcatgtccagtgagcagtgttgcgtttttccttgtagcatttggaaatgatttactggaattacaaaacctatttttcctttaaatttcagctttggctctggctgctttttagaataa

SEQ ID NO: 565191 - DNA, 120 bp, Artificial Sequence
  ENSG00000170027_24 (sequence is synthesized)
tgcaagataaaaatcacacctgagggctgaaaacggagagggaatgggagacttgatatttaagcagcttgaatggtttttcttttctttatttttaaagaaatgcacttgcctatgata

SEQ ID NO: 565192 - DNA, 120 bp, Artificial Sequence
  ENSG00000170027_25 (sequence is synthesized)
ctgtctctccagtgaaatgattactcctccattactctattgatacaatattgtgcatgctagtgttgtatttctatacagtagcttgaaattgattaacttatactgtaggtgttatgt

SEQ ID NO: 565193 - DNA, 120 bp, Artificial Sequence
  ENSG00000170027_26 (sequence is synthesized)
attcctatgacaaaaaaaattaagtcttcaaattttttaaaggttttttttttttaatttaatttttccttttgggggtaaagtttgctctaccaaatagtgattgtaacaaattgatct

SEQ ID NO: 565194 - DNA, 120 bp, Artificial Sequence
  ENSG00000170027_27 (sequence is synthesized)
gttttggatgttgctatagtgacatgcagttatatattttgtttttaaaagggggggagcaaaagaaacaccagtgttagcttaatcttaatgtctggtgtttgtcatggtgaaattata

SEQ ID NO: 565195 - DNA, 120 bp, Artificial Sequence
  ENSG00000170027_28 (sequence is synthesized)
actattacagtgttggagaacaacaaatatgttctctgaatgagcctttgtgctttttgtcatgttatgcagtgaactatttttaaggtctaatcagtgattatttttccagctccgtgt

SEQ ID NO: 565196 - DNA, 120 bp, Artificial Sequence
  ENSG00000170027_29 (sequence is synthesized)
ttctctaaggaattatttcacacacggaccatctttagcagtttcctcagtgatggaatatcatgaatgtgagtcattatgtagctgtcgtacattgagcaaataaacttacagatctga

SEQ ID NO: 565197 - DNA, 80 bp, Artificial Sequence
  ENSG00000170035_0 (sequence is synthesized)
gcaggggccagcccgccgggtccccgccgcgctctttgtcctggccgcgcgcgggcggacgcgtgcacccccagggtgag

SEQ ID NO: 565198 - DNA, 120 bp, Artificial Sequence
  ENSG00000170035_1 (sequence is synthesized)
ctcgcgcccgccgggcgtcggcggcgcgcgcccctccgccagttttccaagagataacttcaccaagatgtccagtgataggcaaaggtccgatgatgagagccccagcaccagcagtgg

SEQ ID NO: 565199 - DNA, 120 bp, Artificial Sequence
  ENSG00000170035_2 (sequence is synthesized)
cagttcagatgcggaccagcgagacccagccgctccagagcctgaagaacaagaggaaagaaaaccttctgccacccagcagaagaaaaacaccaaactctctagcaaaaccactgctaa

SEQ ID NO: 565200 - DNA, 120 bp, Artificial Sequence
  ENSG00000170035_3 (sequence is synthesized)
gttatccactagtgctaaaagaattcagaaggagctagctgaaataacccttgatcctcctcctaattgcagtgctgggcctaaaggagataacatttatgaatggagatcaactatact

SEQ ID NO: 565201 - DNA, 120 bp, Artificial Sequence
  ENSG00000170035_4 (sequence is synthesized)
tggtccaccgggttctgtatatgaaggtggtgtgttttttctggatatcacattttcatcagattatccatttaagccaccaaaggttactttccgcaccagaatctatcactgcaacat

SEQ ID NO: 565202 - DNA, 120 bp, Artificial Sequence
  ENSG00000170035_5 (sequence is synthesized)
catccttaaagacaactggagtcccgctttgactatttcaaaggttttgctgtctatttgttcccttttgacagactgcaaccctgcggatcctctggttggaagcatagccactcagta

SEQ ID NO: 565203 - DNA, 120 bp, Artificial Sequence
  ENSG00000170035_6 (sequence is synthesized)
tttgaccaacagagcagaacacgacaggatagccagacagtggaccaagagatacgcaacataattcacataatttgtatgcagtgtgaaggagcagaaggcatcttctcactgtgctgc

SEQ ID NO: 565204 - DNA, 120 bp, Artificial Sequence
  ENSG00000170035_7 (sequence is synthesized)
aaatctttatagcctttacaatacggacttctgtgtatatgttatactgattctactctgcttttatcctttggagcctgggagactccccaaaaaggtaaatgctatcaagagtagaac

SEQ ID NO: 565205 - DNA, 120 bp, Artificial Sequence
  ENSG00000170035_8 (sequence is synthesized)
tttgtagctgtagattagttatgtttaaaacgcctacttgcaagtcttgcttctttgggatatcaaaatgtattttgtgatgtactaaggatactggtcctgaagtctaccaaatattat

SEQ ID NO: 565206 - DNA, 120 bp, Artificial Sequence
  ENSG00000170035_9 (sequence is synthesized)
agtgcattttagcctaattcattatctgtatgaagttataaaagtagctgtagatggctaggaattatgtcatttgtattaaacccagatctatttctgagtatgtggttcatgctgttg

SEQ ID NO: 565207 - DNA, 120 bp, Artificial Sequence
  ENSG00000170035_10 (sequence is synthesized)
tgaaaaatgttttaccttttacctttgtcagtttgtaatgagaggatttccttttaccctttgtagctcagagagcacctgatgtatcatctcaaacacaataaacatgctcctgaaggc

SEQ ID NO: 565208 - DNA, 80 bp, Artificial Sequence
  ENSG00000170035_11 (sequence is synthesized)
ggaacttgctgactgcgcggccgggaggagccgagccgggcggcggcggcgggaggctacagcgcgcgggggtctcccgc

SEQ ID NO: 565209 - DNA, 120 bp, Artificial Sequence
  ENSG00000170035_12 (sequence is synthesized)
cgagctcccacccccgcttttttccgaaggcgctgggcggcgccaccctccggccggagcccggcactgcacaaccccctccgactttcaatgttccacactccccggccagagcctcct

SEQ ID NO: 565210 - DNA, 120 bp, Artificial Sequence
  ENSG00000170035_13 (sequence is synthesized)
cggcttctttttttccctccccccccttcccccccccacagctgcctccatttccttaaggaagggtttttttctctctccctcccccacaccgtagcggcgcgcgagcgggccgggcgg

SEQ ID NO: 565211 - DNA, 120 bp, Artificial Sequence
  ENSG00000170035_14 (sequence is synthesized)
cgctacccgcggcccccgcgcggccctccccacaaagggccgcggagctgcgtggccgccgccgccggccgtggctcgcctccgcgggcgcggaaatttgttgcacttcttggggctttg

SEQ ID NO: 565212 - DNA, 120 bp, Artificial Sequence
  ENSG00000170035_15 (sequence is synthesized)
tttgttgcacttcttggggctttgtttatttgtttgttttttctctgggtttcttatttttttcgttattttggacaaaatgtcggtccgtgatataaaaattgagcgaggaaccttggt

SEQ ID NO: 565213 - DNA, 120 bp, Artificial Sequence
  ENSG00000170035_16 (sequence is synthesized)
ggcattgggagctttgcagaaggtgcagtttgaattctgcttttcccagggtggcagctcggtcttggccggatgaatcttcgctgctggccgtggaaacagctagagcagctcttttcc

SEQ ID NO: 565214 - DNA, 120 bp, Artificial Sequence
  ENSG00000170035_17 (sequence is synthesized)
cagcccgccgggtccccgccgcgctctttgtcctggccgcgcgcgggcggacgcgtgcacccccaggcggcgcgcgagcgggccgggcgggcggccgagttttccaagagataacttcac

SEQ ID NO: 565215 - DNA, 120 bp, Artificial Sequence
  ENSG00000170035_18 (sequence is synthesized)
caatatgaagagctacggccaagttcatgcagtcacaggcaatgacaactatatcaccaatgctgcctggctgagagtgatttaagacatcattgattggaagttttccaagagataact

SEQ ID NO: 565216 - DNA, 120 bp, Artificial Sequence
  ENSG00000170035_19 (sequence is synthesized)
cacagcagtacaaatataaattctttattccagcttccagaattcctcctcttcagccttgcctgctcactggaataatgaagcaattaaacagtggtgtaaagaagttccatccagtgg

SEQ ID NO: 565217 - DNA, 120 bp, Artificial Sequence
  ENSG00000170035_20 (sequence is synthesized)
ttgaagttcaatagaaaacaaggaaataggctgatgtatatcaaatacaccatcggcactctgagtccttcccaggttccctaaagggggaggaggggacaccgttttagatttaatttg

SEQ ID NO: 565218 - DNA, 120 bp, Artificial Sequence
  ENSG00000170035_21 (sequence is synthesized)
gaatgaagaacttgtcctttcagtctcttcttccctatcaatatgagataaaaacataataaaatcacttgtaaatctagagaaatagaaagtgatttttttttccacataccaattttg

SEQ ID NO: 565219 - DNA, 120 bp, Artificial Sequence
  ENSG00000170037_0 (sequence is synthesized)
acagtgggcgggaggctgccaacggttttgagcgtagggggaggcgtgagagggggatctcaggggaggaggtcaatcgcttgccccccactttggcaaattggggactgaggactggaa

SEQ ID NO: 565220 - DNA, 120 bp, Artificial Sequence
  ENSG00000170037_1 (sequence is synthesized)
gggtggagagtaggcggaaccaggtggtcgtcggggcagaggatctcgggctaggcttgagggcggcgtgcttcttagggacgacttagggcgtgactgagggttcacaaggtttctttt

SEQ ID NO: 565221 - DNA, 120 bp, Artificial Sequence
  ENSG00000170037_2 (sequence is synthesized)
ggggtggtcgggagggagagattctagggaacaaggaagctcgctatggctttcttgccaggaggggtcgaagggaaagtacaagggagctggagctgaccctgggtagaacgggtgaag

SEQ ID NO: 565222 - DNA, 120 bp, Artificial Sequence
  ENSG00000170037_3 (sequence is synthesized)
ggatgggggagcgtgaggttccgccctctcttgagactggaaccaattgagggactagtagggcagggggacagaaattgggctcctagtggatttgggtccgtttccgttgggacgttt

SEQ ID NO: 565223 - DNA, 120 bp, Artificial Sequence
  ENSG00000170037_4 (sequence is synthesized)
tgggtgtgagaacttaagagctcagttgaccggggatagcctgtgccggagttgatctgcagcttccagcactcgtagtcgggaagaggagcttcagcagcgctgttgtcccacagtagg

SEQ ID NO: 565224 - DNA, 120 bp, Artificial Sequence
  ENSG00000170037_5 (sequence is synthesized)
tcttctgtccgcacccgctctgcgctgcaccctcttaacgctgttcccaggagctggggaaagggatgcttttgcccactcccatggcccctggaactggtggaaacctttcctctaacc

SEQ ID NO: 565225 - DNA, 120 bp, Artificial Sequence
  ENSG00000170037_6 (sequence is synthesized)
agaaagcctcgatatccttaattcaccaaggatccttggcgtggagtcttcctcccttctcccaagtctttctccgtgaacttttcctcctggactttgctaaagcagaacctcccagct

SEQ ID NO: 565226 - DNA, 120 bp, Artificial Sequence
  ENSG00000170037_7 (sequence is synthesized)
ctttgctgtctccggttgtctcttccctgtattcatggcaacatcagctgacagccccagttcacccctcggggcggaggatctcctgagtgattcatcagaaccccctgggctcaacca

SEQ ID NO: 565227 - DNA, 120 bp, Artificial Sequence
  ENSG00000170037_8 (sequence is synthesized)
agtgtcgtctgaagtgacctcccagctctatgcttctttgcgcctcagccggcaggcggaggccacggcccgagcccagctgtatttaccctccacctccccgcctcatgaagggttaga

SEQ ID NO: 565228 - DNA, 120 bp, Artificial Sequence
  ENSG00000170037_9 (sequence is synthesized)
cggcttcgcccaagaattgagtcgaagcttgtcagtcggattggaaaagaacttgaagaaaaaggatggttctaagcatatctttgagatggaaagtgttcggggtcagctccagaccat

SEQ ID NO: 565229 - DNA, 120 bp, Artificial Sequence
  ENSG00000170037_10 (sequence is synthesized)
gctccaaacctcacgtgatacagcctatcgggatcctctcattcctggcgctggctcagagagacgggaagaggactcctttgacagtgatagcacagccaccttgctcaacacccggcc

SEQ ID NO: 565230 - DNA, 120 bp, Artificial Sequence
  ENSG00000170037_11 (sequence is synthesized)
cctgcaagacttgtctccatctagctcagcccaagccctggaggagctgtttccccgctacaccagccttcggccagggcctccactcaatcccccagattttcaggggctgagagatgc

SEQ ID NO: 565231 - DNA, 120 bp, Artificial Sequence
  ENSG00000170037_12 (sequence is synthesized)
attggattcagagcatacccgccgcaagcattgtgagcgccatattcagagcctgcagacccgagtgttagagctacagcaacaattagccgtggctgtggctgccgaccgcaagaaaga

SEQ ID NO: 565232 - DNA, 120 bp, Artificial Sequence
  ENSG00000170037_13 (sequence is synthesized)
taccatgattgaacaactggacaagaccctggcccgtgtggtggagggctggaaccggcatgaggctgagcggacagaggttctcaggggacttcaagaggaacaccaggcagcagagct

SEQ ID NO: 565233 - DNA, 120 bp, Artificial Sequence
  ENSG00000170037_14 (sequence is synthesized)
caccagaagcaagcagcaggagacagtaacccgcctggaacaaagcctttctgaggccatggaggccctgaatcgtgagcaggaaagtgccagactgcagcaacgggaaagagagacact

SEQ ID NO: 565234 - DNA, 120 bp, Artificial Sequence
  ENSG00000170037_15 (sequence is synthesized)
ggaggaggaaaggcaagctctgactctgaggttggaggcagaacagcagcggtgctgtgtcctgcaggaagagcgggatgcagctcgggctgggcaactgagtgagcatcgagagttgga

SEQ ID NO: 565235 - DNA, 120 bp, Artificial Sequence
  ENSG00000170037_16 (sequence is synthesized)
ctgggcccagcaagagcaccagcttaaggaacactaccaggcgctgcaggaggagagccaggctcagctggaaagggagaaggagaagagccagagggaagcccaggccgcctgggagac

SEQ ID NO: 565236 - DNA, 120 bp, Artificial Sequence
  ENSG00000170037_17 (sequence is synthesized)
ccagcaccagttggcattggtgcagtctgaggtgcggcggctggaaggagagctggatacagctcggagagagagagatgccctgcagctggaaatgagcttggtgcaggcccggtatga

SEQ ID NO: 565237 - DNA, 120 bp, Artificial Sequence
  ENSG00000170037_18 (sequence is synthesized)
aagccagcggatccagctggagtcggagctggctgtgcagctggagcagcgggtgacagagcggctggcgcaggctcaggagagcagcctacggcaagcagcctccctcagggaacatca

SEQ ID NO: 565238 - DNA, 120 bp, Artificial Sequence
  ENSG00000170037_19 (sequence is synthesized)
caggaagcagctgcaggacctgagtggacagcaccagcaggagctggccagtcagctagctcagttcaaggtggaaatggcagaacgagaggaacggcaacagcaggtggctgaggacta

SEQ ID NO: 565239 - DNA, 120 bp, Artificial Sequence
  ENSG00000170037_20 (sequence is synthesized)
cgagctcagactggcccgggagcaagcgcgagtgtgcgaactgcagagtgggaaccagcagctggaggagcagcgggtggagctggtggaaagactgcaggccatgctgcaggcccactg

SEQ ID NO: 565240 - DNA, 120 bp, Artificial Sequence
  ENSG00000170037_21 (sequence is synthesized)
ggatgaggccaaccagctgctcagcaccactctcccgccgcccaaccctccagctcctcctgctggaccctccagccccgggcctcaggagcccgagaaggaggagaggagggtctggac

SEQ ID NO: 565241 - DNA, 120 bp, Artificial Sequence
  ENSG00000170037_22 (sequence is synthesized)
tatgcctcccatggccgtggccctgaagcctgtattgcagcagagccgggaagcaagggacgagctacctggagcgcctcctgttctttgcagttcctcctcagatcttagcctcctgtt

SEQ ID NO: 565242 - DNA, 120 bp, Artificial Sequence
  ENSG00000170037_23 (sequence is synthesized)
gggcccctcttttcagagccagcattctttccagcccctggagcccaaaccagacctcacttcatccacagctggggccttctctgcacttggggccttccatcccgatcatagggcaga

SEQ ID NO: 565243 - DNA, 120 bp, Artificial Sequence
  ENSG00000170037_24 (sequence is synthesized)
aaggccattccctgaggaagatcctggacctgacggggagggcctcctaaagcaagggctgccgcctgctcagctggagggcctcaagaattttttgcaccagttgctggagacagtgcc

SEQ ID NO: 565244 - DNA, 120 bp, Artificial Sequence
  ENSG00000170037_25 (sequence is synthesized)
ccagaacaatgagaacccttctgtcgacctgttgccccctaagtctggtcctctgactgtcccatcttgggaggaagcccctcaagtgccacgtattccaccgcctgtccacaaaaccaa

SEQ ID NO: 565245 - DNA, 120 bp, Artificial Sequence
  ENSG00000170037_26 (sequence is synthesized)
agttcccttagccatggcatccagtcttttccgggtccctgagcctccctcctcccattcacaaggcagtggtcccagcagtggttccccagagagaggtggagatgggcttacattccc

SEQ ID NO: 565246 - DNA, 120 bp, Artificial Sequence
  ENSG00000170037_27 (sequence is synthesized)
aaggcagctgatggaggtgtctcaactgttgcgactctaccaggctcggggctggggggctctgcctgctgaggatctcctgctctacctgaagaggctggaacacagcgggactgatgg

SEQ ID NO: 565247 - DNA, 120 bp, Artificial Sequence
  ENSG00000170037_28 (sequence is synthesized)
ccgaggggataatgtccccagaaggaacacagactcccgcttgggtgagatcccccggaaagagattccctcccaggctgtccctcgccgccttgctacagcccccaagactgaaaaacc

SEQ ID NO: 565248 - DNA, 120 bp, Artificial Sequence
  ENSG00000170037_29 (sequence is synthesized)
tcccgcacggaagaaaagtgggcaccctgccccgagtagcatgaggagccgggggggagtctggagatgagcccccctaccctctctcctctttgttctctcattgttgttattttaata

SEQ ID NO: 565249 - DNA, 120 bp, Artificial Sequence
  ENSG00000170037_30 (sequence is synthesized)
aatgctcattagtctgtatcagagtctctggctcataggaatttggaaaatagaggttttgtagggaatcacttcgtaaagaaaccacatttggttgagtactttttttatatgttacat

SEQ ID NO: 565250 - DNA, 120 bp, Artificial Sequence
  ENSG00000170037_31 (sequence is synthesized)
gtttatatgtcatttcctgtgggaaaagacatgaatgctttggaagacggtctatgacaagatttggaaagttggggcggctaagattcagtggacaaagctaaaacctgcagagcaatg

SEQ ID NO: 565251 - DNA, 120 bp, Artificial Sequence
  ENSG00000170037_32 (sequence is synthesized)
aactctgggtggtagtggaattatgggtgattcttagttttttaatacgtttctgtattttccaaattttctaaaacaagtatatgttactttaataatcagaacagacccaaactttaa

SEQ ID NO: 565252 - DNA, 90 bp, Artificial Sequence
  ENSG00000170037_33 (sequence is synthesized)
aaattaggatattttaattttaattttatttatttatatacttatcatttatttaagcgctcaagcaatcttccttcctcagcttcctga

SEQ ID NO: 565253 - DNA, 120 bp, Artificial Sequence
  ENSG00000170037_34 (sequence is synthesized)
gacaaggtctcactctgttgcccagagcgctcaagcaatcttccttcctcagcttcctgagtagctgggactacacacacgtgccattgcccccagctaatttttaaattttttgtagag

SEQ ID NO: 565254 - DNA, 120 bp, Artificial Sequence
  ENSG00000170037_35 (sequence is synthesized)
ggattacaggtgtgagccactgcatccggaaatttataatcttattaaagtgtttgtaccatgtcttatctctttaaacctactgtgctttgacccttctttctgcctctctcctggtca

SEQ ID NO: 565255 - DNA, 120 bp, Artificial Sequence
  ENSG00000170037_36 (sequence is synthesized)
tgtccttttctggggaggaaagtgaaggatgagaggtggatccacagatcttctctaactgccccacacttttcttttatctcctcctttctattgcttttttcttctaaacaaaaaaat

SEQ ID NO: 565256 - DNA, 120 bp, Artificial Sequence
  ENSG00000170037_37 (sequence is synthesized)
cttttccccgggtctctctaccttcgtttttttcctctttacccctcagctcaaaactcagaatcctagacttttgactagctagtgtaactcgttatttacttccactaatgtctcctc

SEQ ID NO: 565257 - DNA, 120 bp, Artificial Sequence
  ENSG00000170037_38 (sequence is synthesized)
ccagttgatgcccaggtctatcgagtttgatcttattcttaagagatagaattggggagtagttcttccatccagtattgggtaaccggggggacggagatccccatcctcatacctttg

SEQ ID NO: 565258 - DNA, 120 bp, Artificial Sequence
  ENSG00000170037_39 (sequence is synthesized)
atttgtgtagcaggactgatggccgaggggataatgtccccagaaggaacacagactcccgcttggattccctcccaggctgtccctcgccgccttgctacagcccccaagactgaaaaa

SEQ ID NO: 565259 - DNA, 120 bp, Artificial Sequence
  ENSG00000170037_40 (sequence is synthesized)
catgggtagagcccaaactgggaacggtgaagagctgctcccttgattgatctgtcctcctctacatgggccccagctcctttcagaatatcagatgtccaacatttcccttctggctct

SEQ ID NO: 565260 - DNA, 120 bp, Artificial Sequence
  ENSG00000170037_41 (sequence is synthesized)
tcttgtttttttctcctctctaaaatttgagggtccgtatcttgtttgtcttagtactggctgcctaaggtctagaatatacataacacagaaacactctgtgtttgtcgaatggacaca

SEQ ID NO: 565261 - DNA, 120 bp, Artificial Sequence
  ENSG00000170037_42 (sequence is synthesized)
aactctgctagcttgtgcacaggatttacagctactggtgatatactgagctttatctctgtgagcctctgccttagtgtctgaaggggacagagaaatagacaaaggagaggaaaagtc

SEQ ID NO: 565262 - DNA, 120 bp, Artificial Sequence
  ENSG00000170037_43 (sequence is synthesized)
aaaatcactggttgccatttttggaagcctctctttctccatgttaaaccccttggcatgaatgaaaggctttcccctttatccttgctgtgtttattcattgtgtccaatgagcttctg

SEQ ID NO: 565263 - DNA, 120 bp, Artificial Sequence
  ENSG00000170037_44 (sequence is synthesized)
gggatttttactcaggagatccaggaaaaggaggagcctggaatctaagcacttatctcctgaaaaggtacagaaacatgttggagatcttgagcctcaaggtgcttgcttcagaatttt

SEQ ID NO: 565264 - DNA, 120 bp, Artificial Sequence
  ENSG00000170037_45 (sequence is synthesized)
cctgattctccctctccagacctattctgttcttgggacccaagcttcttggctccagcccactcccccactagaggagctggaaagtttggtgctgtggtcataccaaagatgggcaac

SEQ ID NO: 565265 - DNA, 120 bp, Artificial Sequence
  ENSG00000170037_46 (sequence is synthesized)
gggataatgtccccagaaggaacacagactcccgcttgggtgagatcccccggaaagaggtgagggaaagtcaggcagggaccaggggagaaaagggctctcactgaccagctccttcac

SEQ ID NO: 565266 - DNA, 120 bp, Artificial Sequence
  ENSG00000170037_47 (sequence is synthesized)
ctctgcacactcctggctggcccctccattccacccctgcattctgtagcatggcctttcctccctgcagactcatctggccctctccacgtgcatttcctcagtggggtggggaattga

SEQ ID NO: 565267 - DNA, 120 bp, Artificial Sequence
  ENSG00000170043_0 (sequence is synthesized)
agttccggtgagtccgtgggtggggtccccacctggttggaaggctgtgggtccgggaacccgagcccaaggagtgggggcggccccggagcgaggctcacactccctgccctgcagatg

SEQ ID NO: 565268 - DNA, 120 bp, Artificial Sequence
  ENSG00000170043_1 (sequence is synthesized)
actgtccacaacctgtacctgtttgaccggaatggagtgtgtctgcactacagcgaatggcaccgcaagaagcaagcagggattcccaaggaggaggagtataagctgatgtacgggatg

SEQ ID NO: 565269 - DNA, 120 bp, Artificial Sequence
  ENSG00000170043_2 (sequence is synthesized)
ctcttctctatccgctcgtttgtcagcaagatgtccccgctagacatgaaggatggcttcctggccttccaaactagccgttacaaactccattactacgagacgcccactgggatcaaa

SEQ ID NO: 565270 - DNA, 120 bp, Artificial Sequence
  ENSG00000170043_3 (sequence is synthesized)
tcccctgtgcccgctgggccaaactgtgcaaagtgagctctttcgctcccgactggactcctatgttcgctctctgcccttcttctccgcccgggctggctgaagcaacctacctcaagt

SEQ ID NO: 565271 - DNA, 120 bp, Artificial Sequence
  ENSG00000170043_4 (sequence is synthesized)
ctcaggagaattcatgtctgcctggggcccttccgaacctgtgccaactaagggcccccactgtaagcccccgcacccccaccccctgcccagagcaacagcctaaaggcctgccctgat

SEQ ID NO: 565272 - DNA, 120 bp, Artificial Sequence
  ENSG00000170043_5 (sequence is synthesized)
gctctcctcctaccagagtgaagcccacagagtccctccacctccacaccaggccctctctccagttttatcccctgcctaatgctgcgagaagcacagaataaactttttgtcactctc

SEQ ID NO: 565273 - DNA, 120 bp, Artificial Sequence
  ENSG00000170043_6 (sequence is synthesized)
gggaaactttctgaagtggaaggagcattggcctccagaggggggaaagggtacttaagagaggctgagtccggagcgagagtgctggagctggcaggagtgggggtggggagggtctga

SEQ ID NO: 565274 - DNA, 120 bp, Artificial Sequence
  ENSG00000170043_7 (sequence is synthesized)
cgagcgcctggccgcgcgtgcgcggctccggtggccacagattggctgagggagggaggcggagtctgacaagcagcactggagcggagttaatgcccagccgcggccgagcgagaaccc

SEQ ID NO: 565275 - DNA, 120 bp, Artificial Sequence
  ENSG00000170044_0 (sequence is synthesized)
tcccccaatcccatacaattcaatttcagaaaagtatttagggactgtgctaaaatagcatctccaagcttgctatggcaagatgatgctcaggttttccatgtgcaggggaaatgatga

SEQ ID NO: 565276 - DNA, 120 bp, Artificial Sequence
  ENSG00000170044_1 (sequence is synthesized)
aggatacacctctgtgttggggacaacagtgtgggtctagagtttccaatgtcttccaggagttcttgggacccatcatgagaaggaagtggtggagcatggagcatggaataaatgttt

SEQ ID NO: 565277 - DNA, 120 bp, Artificial Sequence
  ENSG00000170044_2 (sequence is synthesized)
tgcaatggaacaaatatggttgctgctgcttctaacaattagagtgcttccggggtctgctcagttcaacggctacaactgtgatgccaacctccacagtagatttcctgctgaaagaga

SEQ ID NO: 565278 - DNA, 120 bp, Artificial Sequence
  ENSG00000170044_3 (sequence is synthesized)
catcagtgtctattgtggagtgcaggctattacgatgaagattaatttttgcacggtacttttctcgggttattcggaaacagatctggcactgaatggaaggcatggggactcccactg

SEQ ID NO: 565279 - DNA, 120 bp, Artificial Sequence
  ENSG00000170044_4 (sequence is synthesized)
cagagggttcatcaataacaacacctttccagcagtggtcatttttatcatcaatctcagcaccttggagggctgtggaaacaacctggtggtatccacaattcctggagtcagtgctta

SEQ ID NO: 565280 - DNA, 120 bp, Artificial Sequence
  ENSG00000170044_5 (sequence is synthesized)
tggaaatgcaacttcagtgcaagtaggaaatatttcaggatatattgatactccagacccaccaacaatcatcagctatctacctgggcttctttacaaatttagttgtagttatccatt

SEQ ID NO: 565281 - DNA, 120 bp, Artificial Sequence
  ENSG00000170044_6 (sequence is synthesized)
ctgctcctttataacgattcaacctacaaccagcagttaattatccccagtataggattacctttgaaaaccaaagtatttgcagctgtccaagccactaatttggatggcagatggaat

SEQ ID NO: 565282 - DNA, 120 bp, Artificial Sequence
  ENSG00000170044_7 (sequence is synthesized)
gttttaatggattattgctatactaccccatcaggaaacccaaatgatgacattcgatatgatcttttccttagctgtgacaaggaccctcagaccaccgtcattgagaatggccgaagc

SEQ ID NO: 565283 - DNA, 120 bp, Artificial Sequence
  ENSG00000170044_8 (sequence is synthesized)
cagcggggccggttttcttttgaagtgttccgatttgtgaaacacaagaatcagaaaatgtccactgtcttcttgcactgcgttaccaagctctgcagagcagatgactgccccttcctt

SEQ ID NO: 565284 - DNA, 120 bp, Artificial Sequence
  ENSG00000170044_9 (sequence is synthesized)
atgccgatttgcagccacagagaaaggagagatgctgggaggaggacgacttggagcccccagagctcttctggcagcgcggtgctctctgctggtcccatcattactcggagtgatgag

SEQ ID NO: 565285 - DNA, 120 bp, Artificial Sequence
  ENSG00000170044_10 (sequence is synthesized)
actccaaccaacaattcgcaacttggttctccaagtatgcctcccttccagctgaacgccatcaccagcgcactgatatcaggaatggtcattctgggagttacgagcttttctcttctt

SEQ ID NO: 565286 - DNA, 120 bp, Artificial Sequence
  ENSG00000170044_11 (sequence is synthesized)
ctgtgctcactggcccttctgcacaggaagggacccacaagtttagtgttgaatggcataagaaacccagtctttgactgactataacagattcctgctctctggagaaggcttcactga

SEQ ID NO: 565287 - DNA, 120 bp, Artificial Sequence
  ENSG00000170044_12 (sequence is synthesized)
attaagctgtcacccggtggctgtgtaactagctgcttttgtgactgttacagccgcaaaagccttaacagacctgcagttacagactcagggaaaagcttgtactgttgtttgtggatc

SEQ ID NO: 565288 - DNA, 120 bp, Artificial Sequence
  ENSG00000170044_13 (sequence is synthesized)
gcagggaagccagagttgcagctgactttctgtccacgagatggcggtagaggagcacagaaaaaagaaaccatcttgggctgttaatcatgttgactgttgagaagctaagagggaagc

SEQ ID NO: 565289 - DNA, 120 bp, Artificial Sequence
  ENSG00000170044_14 (sequence is synthesized)
cgatctgtcattagggtgaaaaaaaaagtcactgtaacaggagtcaagaaggggcttagaacctagtcatgtgaatattttcaagtttttcttgccttgtgttttttcatcaaatgaggt

SEQ ID NO: 565290 - DNA, 120 bp, Artificial Sequence
  ENSG00000170044_15 (sequence is synthesized)
tcagtgaattcgggactcagtaactccattagtgactgcacccacatagacctttttctaaaagtctccacatttgtccagttgtttcctccttggtccaatgccaacgctccgtcaatg

SEQ ID NO: 565291 - DNA, 120 bp, Artificial Sequence
  ENSG00000170044_16 (sequence is synthesized)
ctattgccacccccattctgcctcttccaaaagcctgcatcagtcatggagtcctcttcacctgaaataagcacttagtataaaccgatgcaactggttttgtgctggaagacaagctta

SEQ ID NO: 565292 - DNA, 120 bp, Artificial Sequence
  ENSG00000170044_17 (sequence is synthesized)
gcaacgacatttcaaaaagagcagctcttctctcatttgaagccttgactcttttctgaaaaagtttggtaaggtcaggcatttgaacactcagtcacatgcggcagaacctagcacatg

SEQ ID NO: 565293 - DNA, 120 bp, Artificial Sequence
  ENSG00000170044_18 (sequence is synthesized)
ctatgtgtgactgcagtcagtgttccgtctgaatttcatgtcagtccacattcaatatttgtaggtttgataaatttcacagtatagcttgtcagcataatgatagtgaaagaagtttat

SEQ ID NO: 565294 - DNA, 120 bp, Artificial Sequence
  ENSG00000170044_19 (sequence is synthesized)
tatattgctattgtcacttatgtacgtggcgagccgtatttttatgccaccagtgaatatattgacaataagtgaaaaatattcaggacttagggcttacaggatcagtaatatttcatt

SEQ ID NO: 565295 - DNA, 120 bp, Artificial Sequence
  ENSG00000170044_20 (sequence is synthesized)
ttatttcagttttcttttgattgttggttaaaagataaaaggtgggagtagacaaaaaatgaaatgtgttgcatttcccccttaagcattaatggcatttagatttgcacacgtggtcct

SEQ ID NO: 565296 - DNA, 120 bp, Artificial Sequence
  ENSG00000170044_21 (sequence is synthesized)
gttttaatccggatattcccagcttcaggatgtgttttaataggactggccaatttggatacctgagatttaactactcattctatgacctcctgtgtttttggccgattttcatgtctg

SEQ ID NO: 565297 - DNA, 120 bp, Artificial Sequence
  ENSG00000170044_22 (sequence is synthesized)
accatattcattttaaaagaaactcttgggacatatctcttaacctggggcacccttttgtgtagaagatagtgaaaatagttgttagcttccaaggctactgctaagtggccctagatc

SEQ ID NO: 565298 - DNA, 120 bp, Artificial Sequence
  ENSG00000170044_23 (sequence is synthesized)
attattcattagaataggaatggctgcgatcagttttcttcttctggttcaggtgagaacaccagcacatgttaactctcctcccaggtaaacagttcagctgctgttgcagctgtgctt

SEQ ID NO: 565299 - DNA, 120 bp, Artificial Sequence
  ENSG00000170044_24 (sequence is synthesized)
ccagcagtgaggtaactatgcaaagattatttttaattcaagaatcatcacatgtgaaaacaagctgtagttgtgaaaagagttcctagaagggtttttaacaatttagattcccttttt

SEQ ID NO: 565300 - DNA, 120 bp, Artificial Sequence
  ENSG00000170044_25 (sequence is synthesized)
cctaaaacaaaaaggaaacttaggttaagtgtagtttgcagaacattgttggaatctacataaaaagatattccttcccccatattttcgatgccaggcaataatcaggagagggtttct

SEQ ID NO: 565301 - DNA, 120 bp, Artificial Sequence
  ENSG00000170044_26 (sequence is synthesized)
ttttaaggtatcttcttgtaggtgtcataattgccatgaataaacaatattttcctctaacagtaaactgcaagaagcttctgatcctttatcagttttgcaaaaaagcaagctttaagc

SEQ ID NO: 565302 - DNA, 120 bp, Artificial Sequence
  ENSG00000170044_27 (sequence is synthesized)
agcccatgttcttacaaaaaaaatcaacattctctttgtttaagctacctatgcactgaacaaacaaaacaatttaatagccaacaccaaaacccagcatgtgaagttactagaattgcc

SEQ ID NO: 565303 - DNA, 120 bp, Artificial Sequence
  ENSG00000170044_28 (sequence is synthesized)
atgttaactataagcaattgctgtaatcactaatttctattcaacatttgtgacccattagtccggacttaatttactatactgcatgcaaatcatcaagcaattgcttcaaaggaaatg

SEQ ID NO: 565304 - DNA, 120 bp, Artificial Sequence
  ENSG00000170044_29 (sequence is synthesized)
tctacaatgtgagttaataattaaatcaatcctcaagttgaaaaacactttttctccaatttgcctgaatatttcaggaggaagtgtttatattataataattagctatataattgcatc

SEQ ID NO: 565305 - DNA, 120 bp, Artificial Sequence
  ENSG00000170044_30 (sequence is synthesized)
aactttttatttcaaggtatagttgccaagtaaagtgggatctggaaagtctctggataatttctttacaaaaaaagtttaaatcacataaaaagccaatctactcttccctgtgttact

SEQ ID NO: 565306 - DNA, 120 bp, Artificial Sequence
  ENSG00000170044_31 (sequence is synthesized)
ttaaaataactttgaagtgactattctgagctttatctgtgttaacatgattaactgaccatactactaatgtgaccctgtatatacatggatagtattgaaatatgctggtaaatctat

SEQ ID NO: 565307 - DNA, 120 bp, Artificial Sequence
  ENSG00000170044_32 (sequence is synthesized)
ttcagatactttaagtgaattgccattgattctacgattaagttctgtgaataggacattatatcatttaagctgttttgtcaatttgatttttatgcttttggaacggctgctgtttca

SEQ ID NO: 565308 - DNA, 120 bp, Artificial Sequence
  ENSG00000170044_33 (sequence is synthesized)
gctgttggccttttcaattctatactccattttatagaattgaataatggacacatgtcacttgggaagcaacgtaagtatcacattattttttgccaccctttcatcataaatggaaga

SEQ ID NO: 565309 - DNA, 120 bp, Artificial Sequence
  ENSG00000170044_34 (sequence is synthesized)
atcagagttataatgagataaaccaggtctgttttttacaactttgttcttataaatctgcagttatatggagtatttagttatactgaattttacagttattatagtgtgaaaaacctt

SEQ ID NO: 565310 - DNA, 120 bp, Artificial Sequence
  ENSG00000170044_35 (sequence is synthesized)
acaaaatatgtgcaaatgtttcttcagttttaatacctcaaactgttttttgcacttcaggggtaaggtctgatgacatgtaaaagatgatcgtttaataaaataattgtttaaaatgtt

SEQ ID NO: 565311 - DNA, 120 bp, Artificial Sequence
  ENSG00000170044_36 (sequence is synthesized)
aagtagaactgaggctggtacctagactatggtgggctgattcgtagaggctggtttggactgaatggagaagaggtaaaactgtgagaaagagagtgaaaaacatgaaaatccatgagt

SEQ ID NO: 565312 - DNA, 120 bp, Artificial Sequence
  ENSG00000170044_37 (sequence is synthesized)
caatatgggccaaacctagggcaaatgtgtggagatttcaggaagacacatgttatctcatcaaaaagaaagagttcttggttgtctgagctgcactgagcctcatggagagtaagtctt

SEQ ID NO: 565313 - DNA, 120 bp, Artificial Sequence
  ENSG00000170044_38 (sequence is synthesized)
tcaagtatccagctgaacttgaggatgtgtaagatatattcagtagagataagttgtgtcggcagatgggggctgctaggagaaagcacattttcactgatttcagggccagcccaacat

SEQ ID NO: 565314 - DNA, 120 bp, Artificial Sequence
  ENSG00000170044_39 (sequence is synthesized)
tagaattctttctcatgaaccgcactgctgggatacaatttaagagtattctcatttacctggtctggctctgtgaaacctgcgtaatgtaactcagatcacctggaatttttgtgaagc

SEQ ID NO: 565315 - DNA, 120 bp, Artificial Sequence
  ENSG00000170049_0 (sequence is synthesized)
atgcaggtgtctatcgcgtgtaccgagcagaaccttcgcagccggagcagtgaggaccgtctgtgtggaccccggccgggccccgggggcggtaatggtgggccggccggcggggggcac

SEQ ID NO: 565316 - DNA, 120 bp, Artificial Sequence
  ENSG00000170049_1 (sequence is synthesized)
gggaatcctccggggggtggagggtctggccccaaggcccgagctgcactggttccccgacccccagcgcccgctggggccctccgagagagcaccggccgaggcactggcatgaaatac

SEQ ID NO: 565317 - DNA, 120 bp, Artificial Sequence
  ENSG00000170049_2 (sequence is synthesized)
aggaacctagggaagtctggtcttcgggtatcctgtcttggcctaggtacctgggtcacatttggttctcagatctcagatgagacagcagaggatgtgctgactgtagcctatgagcat

SEQ ID NO: 565318 - DNA, 120 bp, Artificial Sequence
  ENSG00000170049_3 (sequence is synthesized)
ggtgtaaacctgtttgacaccgccgaagtgtacgcagcaggaaaggctgaaagaaccctagggaacatcctcaagagcaaaggttggaggagatcaagctatgtcatcactaccaagatt

SEQ ID NO: 565319 - DNA, 120 bp, Artificial Sequence
  ENSG00000170049_4 (sequence is synthesized)
ttttggggaggacaggcagaaaccgagcgaggtttaagccgaaagcacatcattgagggcttgcgaggatccctggaacgcctccagctgggatacgtggacattgtctttgccaatcgc

SEQ ID NO: 565320 - DNA, 120 bp, Artificial Sequence
  ENSG00000170049_5 (sequence is synthesized)
tcagaccccaactgtcctatggaggagattgtgcgagccatgacctatgtcatcaaccagggcctggccctatactgggggacatcccgatggggggctgcagaaatcatggaggcctac

SEQ ID NO: 565321 - DNA, 120 bp, Artificial Sequence
  ENSG00000170049_6 (sequence is synthesized)
tccatggccagacagttcaatctgattcctccagtgtgtgaacaagcggagcaccatctgtttcagagggagaaggtggagatgcagctgccagagctctaccacaagattggagttgga

SEQ ID NO: 565322 - DNA, 120 bp, Artificial Sequence
  ENSG00000170049_7 (sequence is synthesized)
tcagtcacttggtaccctctagcctgtggtctcattactagcaagtatgatgggcgagtcccagatacttgcagggcctccatcaagggctaccagtggctcaaggacaaagtgcagagt

SEQ ID NO: 565323 - DNA, 120 bp, Artificial Sequence
  ENSG00000170049_8 (sequence is synthesized)
gaagatggcaagaagcaacaagccaaagtcatggaccttcttcctgtcgctcaccagctgggctgcaccgtggcccagcttgctattgcgtggtgtctccgcagtgagggtgtcagctct

SEQ ID NO: 565324 - DNA, 120 bp, Artificial Sequence
  ENSG00000170049_9 (sequence is synthesized)
gtcttgctgggggtgtcgagtgcggagcagttgatagaacacctgggcgcgctacaggtgctgagccagctgaccccgcagacagtgatggaaatagacgggctcctgggaaacaagccg

SEQ ID NO: 565325 - DNA, 120 bp, Artificial Sequence
  ENSG00000170049_10 (sequence is synthesized)
cccgagccccgctcctcgcagccgcctctcccgctccggatccctccacgcagcggccggagccagactagccccgcccaccaacgagtcccggcttcgagtagtgatacgcatgaacaa

SEQ ID NO: 565326 - DNA, 120 bp, Artificial Sequence
  ENSG00000170049_11 (sequence is synthesized)
agccatatccttttgcagtggggtcgagagagaaagtagcacgcccgccccctgctgcgtctttctaggcccttcttgcaaatcccgggcatgagctactcgccgtcggctctctgccac

SEQ ID NO: 565327 - DNA, 120 bp, Artificial Sequence
  ENSG00000170049_12 (sequence is synthesized)
ttcgtctcgctccctactctcctccccttattcccgaggcccagaaaagaaaacaaaaacaaaaacccagcacatacaagaaacatacagtgtacctcaaaaggggcccttgaaatgtca

SEQ ID NO: 565328 - DNA, 120 bp, Artificial Sequence
  ENSG00000170049_13 (sequence is synthesized)
tcaaagggtaataacctagtgagtgagttgtgatgtcatctggaacataggaaatggggctcttagcgtattcggtacgaaggaagccaggctggtcctggcaggaagtaaatgataatc

SEQ ID NO: 565329 - DNA, 120 bp, Artificial Sequence
  ENSG00000170049_14 (sequence is synthesized)
tttgggaaaccaggaccctgcctcccagcccagaggtggaggagggcggtcagggtggggtctacagtggcacagcactgacaaaggtagagggaaatgtaatagcacatctacgctgca

SEQ ID NO: 565330 - DNA, 120 bp, Artificial Sequence
  ENSG00000170049_15 (sequence is synthesized)
gtctggtgaaagtggccggggtggtccttggaaaacagttgggctgttcttggcaggaattagtgacagcctttccgtcacgggcagggacgccttgatttaaaaaaaataaataaataa

SEQ ID NO: 565331 - DNA, 120 bp, Artificial Sequence
  ENSG00000170049_16 (sequence is synthesized)
aacgtctgggtatagacttttgagccttgagcagggcctcctacctggcagtggggaactgcagtcttcctcctggcaataaacctaaagcaataatgatggccccttctctgtaagact

SEQ ID NO: 565332 - DNA, 120 bp, Artificial Sequence
  ENSG00000170049_17 (sequence is synthesized)
tcccaggtaactgtaaataaacctcagcttgatcctcacagtgtctaaagttgcaggggcttgggaggttagggtcacagtctcacttgtctggccctctcgccccctaacattagaaat

SEQ ID NO: 565333 - DNA, 120 bp, Artificial Sequence
  ENSG00000170049_18 (sequence is synthesized)
ctgctagcattagctttctctccattgctcattcaccttggtgacccaggcatcgggctcctagtcactgttctcatcaaggaccaagacaccagataccccaggccccagttttcttcc

SEQ ID NO: 565334 - DNA, 120 bp, Artificial Sequence
  ENSG00000170049_19 (sequence is synthesized)
ttcagctaccacattccttagaacccagaaatctggcttcataattttgttcctcctctttctatgaaagacttagctatctgcctttatttgtttgtatttaaagtaatattagccata

SEQ ID NO: 565335 - DNA, 120 bp, Artificial Sequence
  ENSG00000170049_20 (sequence is synthesized)
gtccttttgagaaaattcctaggacctctgctctggagatagcacttgcccaatcttataggcccactgggtctaatttctttggactgagacacctgagggcttctcagtctggaagga

SEQ ID NO: 565336 - DNA, 120 bp, Artificial Sequence
  ENSG00000170049_21 (sequence is synthesized)
gccgaagtgtacgcagcaggaaagtaaggactggggtgaaagagctaagctccatttggaaggctgagaggaccccagggattatcttctcgttttccctctaaagaaccctgggacttc

SEQ ID NO: 565337 - DNA, 120 bp, Artificial Sequence
  ENSG00000170049_22 (sequence is synthesized)
tgagaacgtgaagttccaaccttttggcggagggacccgaaagcactgtaggagctacagtcccaacattagtccctctctggcttagaagtcaatgggcgtactgtgcagctacattaa

SEQ ID NO: 565338 - DNA, 120 bp, Artificial Sequence
  ENSG00000170049_23 (sequence is synthesized)
agcttgctattggtgagacattgcaccctgcaggggccctgtctcctcctgacatgctcccaagcccatcctaaaactggtttgtccctagggaggacgcttgtcttcagagacacttct

SEQ ID NO: 565339 - DNA, 120 bp, Artificial Sequence
  ENSG00000170049_24 (sequence is synthesized)
atgcaggtgtctatcgcgtgtaccgagcagaaccttcgcagccggagcagtgaggaccgtctgtgtggaccccggccgggccccgggggcggtcctcaatctgcctttcctccaggccca

SEQ ID NO: 565340 - DNA, 120 bp, Artificial Sequence
  ENSG00000170049_25 (sequence is synthesized)
tctgcctagcctagccagggacccctgtctgtctgaatgcctgaacttgacttggtttacctcttccaacctgccatctaccatttggcacagcactctgcctgagggcctggtctcaca

SEQ ID NO: 565341 - DNA, 120 bp, Artificial Sequence
  ENSG00000170049_26 (sequence is synthesized)
aactcaccacaatcaaacaaaattcctcccagcccctcactgcacacaacccacagatgactcaaacacagacaagaccccagaagaaggacaaaccagactgcacgtcttcaatgtgat

SEQ ID NO: 565342 - DNA, 120 bp, Artificial Sequence
  ENSG00000170049_27 (sequence is synthesized)
tctcaaactcctgacctcaggcttgcgaggatccctggaacgcctccagctgggatacgtggacattgtctttgccaatcgctcagaccccaactgtcctatggagggtaaaagcagcac

SEQ ID NO: 565343 - DNA, 120 bp, Artificial Sequence
  ENSG00000170049_28 (sequence is synthesized)
accttacagtccttcaaaactgagcacttccttgctgggtgcggtggctcattcctgtaatcccaggacgttgggaggccaaggcaggaggatcacttggggcctggagttcgagaacag

SEQ ID NO: 565344 - DNA, 120 bp, Artificial Sequence
  ENSG00000170049_29 (sequence is synthesized)
agcaagaccctgtctctacaaaaaatgttttaaaattagctggctgtggtggtgtgtgccttgtactcccagctgttcaggaggctgaggcaggaggatcattcaagcccaggagtttga

SEQ ID NO: 565345 - DNA, 89 bp, Artificial Sequence
  ENSG00000170049_30 (sequence is synthesized)
ccagctgttcaggaggctgaggcaggaggatcattcaagcccaggagtttgaggccacagtgagctatgattgcaccactgaactacat

SEQ ID NO: 565346 - DNA, 120 bp, Artificial Sequence
  ENSG00000170049_31 (sequence is synthesized)
cgcgctgaagtggcatctctctcccgccccgcttccccctgggtccttatcctccgagacctttacctcatcctcgacctttaccctcatccatttccccctcctaatccttgctcctgt

SEQ ID NO: 565347 - DNA, 120 bp, Artificial Sequence
  ENSG00000170049_32 (sequence is synthesized)
gtcccccgtaactgaatatctccactcctggcgccccccacgtttcttccctcccgccgcaaacctcgcgacctccagcagcccgcccccgcgggcccgatcctgcctggcggctcccgc

SEQ ID NO: 565348 - DNA, 120 bp, Artificial Sequence
  ENSG00000170049_33 (sequence is synthesized)
cgcagcctcctcagccttcccgctctgccggggttcgccccactacgcccccggtcgtcagccctcgggcttccctgctcccccctcccgtcccctcggagccccctcccccgcctcggc

SEQ ID NO: 565349 - DNA, 120 bp, Artificial Sequence
  ENSG00000170054_0 (sequence is synthesized)
cagctggagggagaggagagattaaagtgaggagagagctacaaccaagtaagcaagtgtcagggctcaccaaccatgcaaggacagggcaggagaagaggaacctgcaaagacatattt

SEQ ID NO: 565350 - DNA, 120 bp, Artificial Sequence
  ENSG00000170054_1 (sequence is synthesized)
tgttccaaaatggcatcttacctttatggagtactctttgctgttggcctctgtgctccaatctactgtgtgtccccggccaatgcccccagtgcatacccccgcccttcctccacaaag

SEQ ID NO: 565351 - DNA, 120 bp, Artificial Sequence
  ENSG00000170054_2 (sequence is synthesized)
agcacccctgcctcacaggtgtattccctcaacaccgactttgccttccgcctataccgcaggctggttttggagaccccgagtcagaacatcttcttctcccctgtgagtgtctccact

SEQ ID NO: 565352 - DNA, 120 bp, Artificial Sequence
  ENSG00000170054_3 (sequence is synthesized)
tccctggccatgctctcccttggggcccactcagtcaccaagacccagattctccagggcctgggcttcaacctcacacacacaccagagtctgccatccaccagggcttccagcacctg

SEQ ID NO: 565353 - DNA, 120 bp, Artificial Sequence
  ENSG00000170054_4 (sequence is synthesized)
gttcactcactgactgttcccagcaaagacctgaccttgaagatgggaagtgccctcttcgtcaagaaggagctgcagctgcaggcaaatttcttgggcaatgtcaagaggctgtatgaa

SEQ ID NO: 565354 - DNA, 120 bp, Artificial Sequence
  ENSG00000170054_5 (sequence is synthesized)
gcagaagtcttttctacagatttctccaacccctccattgcccaggcgaggatcaacagccatgtgaaaaagaagacccaagggaaggttgtagacataatccaaggccttgaccttctg

SEQ ID NO: 565355 - DNA, 120 bp, Artificial Sequence
  ENSG00000170054_6 (sequence is synthesized)
acggccatggttctggtgaaccacattttctttaaagccaagtgggagaagccctttcaccctgaatatacaagaaagaacttcccattcctggtgggcgagcaggtcactgtgcatgtc

SEQ ID NO: 565356 - DNA, 120 bp, Artificial Sequence
  ENSG00000170054_7 (sequence is synthesized)
tacaagggagatgccgtggccttctttgtcctccctagcaagggcaagatgaggcaactggaacaggccttgtcagccagaacactgagaaagtggagccactcactccagaaaaggtgg

SEQ ID NO: 565357 - DNA, 120 bp, Artificial Sequence
  ENSG00000170054_8 (sequence is synthesized)
atagaggtgttcatccccagattttccatttctgcctcctacaatctggaaaccatcctcccgaagatgggcatccaaaatgtctttgacaaaaatgctgatttttctggaattgcaaag

SEQ ID NO: 565358 - DNA, 120 bp, Artificial Sequence
  ENSG00000170054_9 (sequence is synthesized)
agagactccctgcaggtttctaaagcaacccacaaggctgtgctggatgtcagtgaagagggcactgaggccacagcagctaccaccaccaagttcatagtccgatcgaaggatggcccc

SEQ ID NO: 565359 - DNA, 120 bp, Artificial Sequence
  ENSG00000170054_10 (sequence is synthesized)
tcttacttcactgtctccttcaataggaccttcctgatgatgattacaaataaagccacagacggtattctctttctagggaaagtggaaaatcccactaaatcctaggtgggaaatggc

SEQ ID NO: 565360 - DNA, 120 bp, Artificial Sequence
  ENSG00000170054_11 (sequence is synthesized)
ctgttaactgatggcacattgctaatgcacaagaaataacaaaccacatccctctttctgttctgagggtgcatttgaccccagtggagctggattcgctggcagggatgccacttccaa

SEQ ID NO: 565361 - DNA, 120 bp, Artificial Sequence
  ENSG00000170054_12 (sequence is synthesized)
ggctcaatcaccaaaccatcaacagggaccccagtcacaagccaacacccattaaccccagtcagtgcccttttccacaaattctcccaggtaactagcttcatgggatgttgctgggtt

SEQ ID NO: 565362 - DNA, 120 bp, Artificial Sequence
  ENSG00000170054_13 (sequence is synthesized)
accatatttccattccttggggctcccaggaatggaaatacgccaacccaggttaggcacctctattgcagaattacaataacacattcaataaaactaaaatatgaattcatctgtcaa

SEQ ID NO: 565363 - DNA, 120 bp, Artificial Sequence
  ENSG00000170054_14 (sequence is synthesized)
atagtatgagtatctccaataaaccagaagtggagcagaagcataagaatgtgtgaggcaggcaagagatcctgtagccagagtcctaagaggatcccagaaaggcctggacatagcagg

SEQ ID NO: 565364 - DNA, 120 bp, Artificial Sequence
  ENSG00000170054_15 (sequence is synthesized)
agaggctccatggaggagtatggacttgggagaaggctccatcttgatgggcccatggggatctactcctggctggttgctactccagcaggcttggttttatgaatttggggagaaatg

SEQ ID NO: 565365 - DNA, 120 bp, Artificial Sequence
  ENSG00000170054_16 (sequence is synthesized)
gggtgaagggtaggaagaggaagcacacagccctccccactctcaagtcttctcatctttccctggaaaatctgattaggtagttctgcatgggacctggaaatttgcattttaatgaga

SEQ ID NO: 565366 - DNA, 120 bp, Artificial Sequence
  ENSG00000170054_17 (sequence is synthesized)
gcccaattacgcttgacatattttgttccaaaatggcatcttacctttatggagtactctttgctgttggcctctgtgctccaatctactgtgtgtccccggccaatgcccccagtgcat

SEQ ID NO: 565367 - DNA, 120 bp, Artificial Sequence
  ENSG00000170054_18 (sequence is synthesized)
tggagggagaggagagattaaagtgaggagagagctacaaccaagtaagcaagtgtcagggctcaccaaccatgcaaggacagggcaggagaagaggaacctgcaaagtccatgaagcag

SEQ ID NO: 565368 - DNA, 120 bp, Artificial Sequence
  ENSG00000170074_0 (sequence is synthesized)
atgggatgtgtttatagttgttgccttgaagtgtgttgtggcgaggatgaaatagtgtatcctaggatgccaggggaatccaccgtctgccaccgcgagcgtgagaagccaatcacctat

SEQ ID NO: 565369 - DNA, 120 bp, Artificial Sequence
  ENSG00000170074_1 (sequence is synthesized)
cactggtatcactggcatcccggccatatataccctagaattgcatcaatggaagattacgatgaggacctggtgcaggaagcttcatctgaagatgtcctgggcgttcatatggtggac

SEQ ID NO: 565370 - DNA, 120 bp, Artificial Sequence
  ENSG00000170074_2 (sequence is synthesized)
aaagacacagagagagacattgagatgaaacggcaactacggcgactacgggagctccacctatacagcacatggaagaagtaccaagaggcgatgaagacatccttgggagttccacaa

SEQ ID NO: 565371 - DNA, 120 bp, Artificial Sequence
  ENSG00000170074_3 (sequence is synthesized)
tgtgagcgtgacgaaggctccttgggcaagccattgtgtccacccgagatactctcggagacgttgccaggctctgtgaagaaaagggtatgctttccatcagaagatcatctagaggag

SEQ ID NO: 565372 - DNA, 120 bp, Artificial Sequence
  ENSG00000170074_4 (sequence is synthesized)
tttatagcagaacatctccctgaagcatccaatcagagtctcctcactgttgcccatgcagacgcaggcacccaaaccaacggtgacctggaagacctggaggagcatgggccagggcag

SEQ ID NO: 565373 - DNA, 120 bp, Artificial Sequence
  ENSG00000170074_5 (sequence is synthesized)
acagtctctgaggaagccacagaagttcacacgatggagggggacccagacacactggccgaatttctgatcagggatgtacttcaggagctgtccagttacaacggtgaggaggaggac

SEQ ID NO: 565374 - DNA, 120 bp, Artificial Sequence
  ENSG00000170074_6 (sequence is synthesized)
ccagaggaggtgaagacatccttgggagttccacaacgtggtgacctggaagacctggaggagcatgtgccagggcagacagtctctgaggaagccacaggggttcacatgatgcaggtg

SEQ ID NO: 565375 - DNA, 120 bp, Artificial Sequence
  ENSG00000170074_7 (sequence is synthesized)
cactggcaaagcaattggaagactccaccattacaggcagccaccagcagatgtcagcaagtccttcctctgcacctgcagaagaagcaacagaaaagaccaaagtggaagaggaagtga

SEQ ID NO: 565376 - DNA, 120 bp, Artificial Sequence
  ENSG00000170074_8 (sequence is synthesized)
aaaccagaaagcccaagaagaaaaccaggaagcccagcaagaaaagccggtggaatgtcctgaaatgttgggacatttttaatatattttagagacctctgaaggcaagtgaaggatgcc

SEQ ID NO: 565377 - DNA, 120 bp, Artificial Sequence
  ENSG00000170074_9 (sequence is synthesized)
ctgagaacatgctccaggaaacagacacccactccatagcagcccctgagcctgctgggctgagccctccacaggctgcttagtgagggagacactgaggtgctggtcgcacccccatgt

SEQ ID NO: 565378 - DNA, 120 bp, Artificial Sequence
  ENSG00000170074_10 (sequence is synthesized)
gcaggactccaagggctttgcactgtgttgtctgcagtaactcttcagctcaccaacatctcatttggggggacctagctctgtcttcccagccccttgaggacaacagggagcatcact

SEQ ID NO: 565379 - DNA, 120 bp, Artificial Sequence
  ENSG00000170074_11 (sequence is synthesized)
agttcatcctgaggagacactagggttgacatgaatccccctggttcaggcctcctgggaaaggtgtgagagggatggaggcacccccaggctccttgtcacacaagcgagcagcccacc

SEQ ID NO: 565380 - DNA, 120 bp, Artificial Sequence
  ENSG00000170074_12 (sequence is synthesized)
cgacccagtattgcaggccagcaggccctcagtaggtcctggtgtcaagcaggggacacggcaggatccaagaagcactgaaatgtgtccagtcccaggagtccttcagcctctgggggg

SEQ ID NO: 565381 - DNA, 120 bp, Artificial Sequence
  ENSG00000170074_13 (sequence is synthesized)
tctgggggcctccagttccaggggtccttcagcctctgtgggggcctggggtggcctcatggccccctttttcaagatgaggttggaggcttctgtatgtagagggcactggcttgggcc

SEQ ID NO: 565382 - DNA, 120 bp, Artificial Sequence
  ENSG00000170074_14 (sequence is synthesized)
aaatgccaacaaaacaaacccttgaagacatttcagggccatgctcacttgggagggtttgaggacatgatttagcgagcctctgttttttaaatatattttccaatcttgaaataaggt

SEQ ID NO: 565383 - DNA, 120 bp, Artificial Sequence
  ENSG00000170074_15 (sequence is synthesized)
atgagtctcatcctgtggattgcccagcgccagggatcaggatccggagaggtgtccaggaggagcagaccctcagaccagaattcgacaccaaattttggaacttaaaaagaagattct

SEQ ID NO: 565384 - DNA, 120 bp, Artificial Sequence
  ENSG00000170074_16 (sequence is synthesized)
taaaacttacaatccagcccagggcttcccagctgtcttcatccaggcctgcgccggtgttcacagtggtcctcatctaagccagccaagaagatctctgtcatccacgtgacagccagc

SEQ ID NO: 565385 - DNA, 120 bp, Artificial Sequence
  ENSG00000170074_17 (sequence is synthesized)
gcccaggtgtccacacctgtccccattgagcctagccctggtgttcatggcttttgtcacaggacttctcccagttgtttccagcagtttccatggtcccaggccagggtttcacagaca

SEQ ID NO: 565386 - DNA, 120 bp, Artificial Sequence
  ENSG00000170074_18 (sequence is synthesized)
tcctcaatggggacagcccatctgttcaccgttgtcttaattaggcccagtgcagatgttcacacgtgtcttcctttggctcagccaaaatgaacagaactcctgagcgcataccagcgg

SEQ ID NO: 565387 - DNA, 120 bp, Artificial Sequence
  ENSG00000170074_19 (sequence is synthesized)
tttctagctgtccacattggggccagcccaggtgttcgtagccctacgttctgggcccatcccagttattccaagctgtcctcttgggcctagcccaggtgtccacagccatcctccttg

SEQ ID NO: 565388 - DNA, 120 bp, Artificial Sequence
  ENSG00000170074_20 (sequence is synthesized)
aatgcgtatgcccgttacccttcaattccattatactaaaatacccttgggaaatagagatacatgcactttgtttttcacagcacttattttaaaaagaacccatagaatggatcttat

SEQ ID NO: 565389 - DNA, 120 bp, Artificial Sequence
  ENSG00000170074_21 (sequence is synthesized)
aagtaaatttcagttgcatccataggatgcaataatatgtgaccatcaaaggtgacaatagatatagaagtacgttgatgtgcgaagatgtattttgttttagccagcgaggaaaaaaga

SEQ ID NO: 565390 - DNA, 120 bp, Artificial Sequence
  ENSG00000170074_22 (sequence is synthesized)
aagaatcagtttgattacacatttaccaaacattaagaatttaatatggtaacttttatttcagtattaaaatagcaattttatttattacttttttatatacagaattcgacaccaaat

SEQ ID NO: 565391 - DNA, 120 bp, Artificial Sequence
  ENSG00000170074_23 (sequence is synthesized)
ttttctggagagccactctggtttgaacttcctgccagaaatgtggttcaagcacttttgtcttgacaagtgaagaacctggtcaagaaatgtgactgttgactctggtgcttggaagga

SEQ ID NO: 565392 - DNA, 120 bp, Artificial Sequence
  ENSG00000170074_24 (sequence is synthesized)
acagggtcatttggatagaagagggtgttgtgaatcagagttgggaggtatggaggaatgactcaatgtggaatgattgtgaatgtctctgcgagtttgtgtgcttttccccagaaaata

SEQ ID NO: 565393 - DNA, 120 bp, Artificial Sequence
  ENSG00000170074_25 (sequence is synthesized)
attcttatgaacagaaatctagggttagcatcaaggttcactctgtgttgtccagcctatgggttttgacaaactgacaatgtcttttgtcaccctgacggaataatttcacatcctaaa

SEQ ID NO: 565394 - DNA, 120 bp, Artificial Sequence
  ENSG00000170074_26 (sequence is synthesized)
ttgattttggtgactagagttgtagatgctggaagctttgccactaacattgatgaaccagatgcatgtcaccagcccatcacggtgattcttaatgccggcaccatgggccggcactgc

SEQ ID NO: 565395 - DNA, 120 bp, Artificial Sequence
  ENSG00000170074_27 (sequence is synthesized)
aaggaacctgccagagctcctgcggaagctgctcctcgggcgatggagtccctttgctgctaggcccttcttcagtcaccacaggatgcctgccattcatgaacaggaaggagaggacgg

SEQ ID NO: 565396 - DNA, 120 bp, Artificial Sequence
  ENSG00000170074_28 (sequence is synthesized)
gctttgaataaaaaacaggatccaggaaatatttgtgaggccatttggacttcagtgtgaaatggtgttaaaagatgaagtcatttattcaagaagtaaacctctgccacctggactgtg

SEQ ID NO: 565397 - DNA, 120 bp, Artificial Sequence
  ENSG00000170074_29 (sequence is synthesized)
aggctcactaggtctgagaggtcggaggccgccagtgtcgctgctgaagggtggaccaggcgggatcgcggattctgggctagatcgcagacttgaattcgacaccaaattttggaactt

SEQ ID NO: 565398 - DNA, 120 bp, Artificial Sequence
  ENSG00000170074_30 (sequence is synthesized)
taacagctctgatttctcatggctcacactcgtctgaaatgactcgggtagaggctgaggaaggctgtgttgtttgtctacctgggactacacctactgaaagaagttctcaagttctga

SEQ ID NO: 565399 - DNA, 120 bp, Artificial Sequence
  ENSG00000170074_31 (sequence is synthesized)
gctttgaataaaaaacaggaatatccagccactggtgcacagccattgccacttgtgcccccaggggatcttgtcaactccagtatgtccccccagcactgtgttatctggcataataaa

SEQ ID NO: 565400 - DNA, 120 bp, Artificial Sequence
  ENSG00000170074_32 (sequence is synthesized)
attctggcaactgaacgttggcagtaaacgcagcttagttgtctcagaggactcacaatgggatgtgtttatagttgttgccttgaagattacgatgaggacctggtgcaggaagcttca

SEQ ID NO: 565401 - DNA, 120 bp, Artificial Sequence
  ENSG00000170074_33 (sequence is synthesized)
atacatcgtgttgaaaaggaagagtggaaggacaaataagctaagtgcgggtcatttttaaatggtaggataattgagtattttcaaatcttggtttaattctgtttgactcaaaggttc

SEQ ID NO: 565402 - DNA, 120 bp, Artificial Sequence
  ENSG00000170074_34 (sequence is synthesized)
gtgggccgcgcgcctgcgattttccgtccgtggtcctggggcagccctggccagcccaggagaacccgcgagcccagcggcgcctgcacctgcggcttccgggagccgggcggctttgcg

SEQ ID NO: 565403 - DNA, 120 bp, Artificial Sequence
  ENSG00000170074_35 (sequence is synthesized)
gctttgcgaggctcactaggtctgagagaattcgacaccaaattttggaacttaaaaagaagattcttaaaacttacaatccagattctgggagttctgatgaatatgcagtcagcccag

SEQ ID NO: 565404 - DNA, 120 bp, Artificial Sequence
  ENSG00000170074_36 (sequence is synthesized)
aggacctggtgcaggaagcttcatctgaagatgtcctgggcgttcatatggtggacaaagacacagagagagacagtacgtattctggaatcacccctatgctgaggaaaaattctagtg

SEQ ID NO: 565405 - DNA, 120 bp, Artificial Sequence
  ENSG00000170074_37 (sequence is synthesized)
ctccaggaagctatgcatgttcaacgtgcagctcttctccaggaagctatgcatgttcaacgtgcagctcttctccaggaagctatgcatgttcaacgtgcagctcttctccaggaagct

SEQ ID NO: 565406 - DNA, 120 bp, Artificial Sequence
  ENSG00000170074_38 (sequence is synthesized)
atgcatattcaacgtgcagctcttccgtctggatggcacagaggatctgggtggcaaggcagggtcaccacccccaccctgtgtcatgagacctcctgctcctcttagggcccaggggca

SEQ ID NO: 565407 - DNA, 120 bp, Artificial Sequence
  ENSG00000170074_39 (sequence is synthesized)
atcctgattcctcgaccaccaggaagggccccgacgtggggatgtcaacatggctcagacttgatgtggatcgtgatcatttcgggaaatgtgttactccaaaaacttttataatctttg

SEQ ID NO: 565408 - DNA, 120 bp, Artificial Sequence
  ENSG00000170074_40 (sequence is synthesized)
cgaaaagctctcacctaaaactgtccgttttacatccgtatccacctgtgtagatcggttctttactgaaggttcttagaaggaaacttggaagtgggagaattcgacaccaaattttgg

SEQ ID NO: 565409 - DNA, 120 bp, Artificial Sequence
  ENSG00000170074_41 (sequence is synthesized)
cttaaaacttacaatccaggttgttcaggctgagaaggaagagaggttggtcttgctgtctctgggttgcagaggcagaagaaaatctgcatataaatgaactcctgcagctcaaaccct

SEQ ID NO: 565410 - DNA, 120 bp, Artificial Sequence
  ENSG00000170074_42 (sequence is synthesized)
tgctgttcaagggtgaactgtattacctgttaatttgtgtcactaaggaagtatctttagaaccgggaactcaacaatccctttctcgtagaataaataaatggcagtaagaactgtaaa

SEQ ID NO: 565411 - DNA, 120 bp, Artificial Sequence
  ENSG00000170074_43 (sequence is synthesized)
aaaaaaaaaaaaagaacaaaaaaattctgactttaacctctgtttttcagagggcacaaattgttcttgtattgtttccattttacatttttttcttgaagttattttccaattgttttc

SEQ ID NO: 565412 - DNA, 120 bp, Artificial Sequence
  ENSG00000170074_44 (sequence is synthesized)
tttcattctttctgaagttttgtttactcggttttaagtttttgtaattttgatagacttcttttgtgctttcattttcttaatgacttttacctcatttttaaaacaaatccatagtat

SEQ ID NO: 565413 - DNA, 120 bp, Artificial Sequence
  ENSG00000170074_45 (sequence is synthesized)
ggatgatattgatgatgaaatgtcttacgatgatcatttagaggtttatttcgaacaactggcaattccaggaatgatggaataaagcatacgaagtagaaggactggaacctccagaaa

SEQ ID NO: 565414 - DNA, 120 bp, Artificial Sequence
  ENSG00000170074_46 (sequence is synthesized)
aagtactttaagttacctacaggtgatcctagtcaggtatgaattgataagaaatgcctgcaccttccctccttcctatctttcccttgcctacagaaaattaaaaggcaaaacaatgga

SEQ ID NO: 565415 - DNA, 120 bp, Artificial Sequence
  ENSG00000170074_47 (sequence is synthesized)
catctacatattcttcattcagatcaaccagtggctagcatttgccaccttttgcagtttctttctctttccataagtactttcttctctgaatcatttgaaagcaaatgaaaacagtag

SEQ ID NO: 565416 - DNA, 120 bp, Artificial Sequence
  ENSG00000170074_48 (sequence is synthesized)
gatggacaagatggacacatagtccattatttggtattgtttgtgtatgggagcggaccacaaattaatgtttggagaacaattttgtcataacacactgttgaggctcagttgtacaga

SEQ ID NO: 565417 - DNA, 120 bp, Artificial Sequence
  ENSG00000170074_49 (sequence is synthesized)
actggaaaagtctttcagcttggcacatgtcctgattcagcctttgtttaacatacattccaatccggattctatcttcactggctacaaagaccacctgatacgtgcaccacgacacag

SEQ ID NO: 565418 - DNA, 120 bp, Artificial Sequence
  ENSG00000170074_50 (sequence is synthesized)
gagctgctggagagggggtagtgttatcacctcaaacccacagccatatttttcaaaagccagcttagagagaggtgtactgatagctgcatagagaacatgcagtccatccattcttcc

SEQ ID NO: 565419 - DNA, 120 bp, Artificial Sequence
  ENSG00000170074_51 (sequence is synthesized)
cagtgatgtacatttctcaatcagtaaccacgtggtataccagccttgagtgtcacatctcccaaccataccaaatggatcacctaactggaggtggggggggcccctcagaaatgagat

SEQ ID NO: 565420 - DNA, 120 bp, Artificial Sequence
  ENSG00000170074_52 (sequence is synthesized)
agatttcgtatttactgtaaaattgccttattttttcttttgaggtggagtctcactctgttgcctgggctggagtgcaatggtgtgatcactgctcactgcaacctccgcctcctgggt

SEQ ID NO: 565421 - DNA, 120 bp, Artificial Sequence
  ENSG00000170074_53 (sequence is synthesized)
cttggcctcccaaagttctgggattaaaggtacgagccaccgcaactggctgagaatctttttatttgctgatttgtctcttgtgtattttctttgttcagatgtctcttcagatctttt

SEQ ID NO: 565422 - DNA, 120 bp, Artificial Sequence
  ENSG00000170074_54 (sequence is synthesized)
tttgttcagatgtctcttcagatctttttctcacttttaaattgtttttttaattgttaagaattttctgtctagtttagatataagccctttatcagacatgtgttttgcaaatatttt

SEQ ID NO: 565423 - DNA, 120 bp, Artificial Sequence
  ENSG00000170074_55 (sequence is synthesized)
ctcctagtctgtggcttgtattctgtctcttaacagtcattttatttttacttttgaaactaaagaagaagaatggtcagctttccgttattcttgtaacagtaatggcagaaccaagtc

SEQ ID NO: 565424 - DNA, 120 bp, Artificial Sequence
  ENSG00000170074_56 (sequence is synthesized)
tgctaatgctacattgagcaaagaaagtcacctggtcaagtccaacattaatgaaatggggtagtacatgcaggcggcgttggggttggggagggaacaaatgcttcttgagagtaatat

SEQ ID NO: 565425 - DNA, 120 bp, Artificial Sequence
  ENSG00000170074_57 (sequence is synthesized)
aatctgccataccatccaggaacctacaatggctatctattaccttattctctggtttgtttaatgttcaaatctttcctaaagatccttcaacttttctggaagaatctaatctgataa

SEQ ID NO: 565426 - DNA, 120 bp, Artificial Sequence
  ENSG00000170074_58 (sequence is synthesized)
caccatcaaaaacacattacttcttttggcataatttaaattgtaagacatcattcacatttatcaatgttacatatataagaactcacccaccatattcctccttgaggaattacagca

SEQ ID NO: 565427 - DNA, 120 bp, Artificial Sequence
  ENSG00000170074_59 (sequence is synthesized)
tgtaattctataaccatttttataatcgtctaacaattttataatggattggctgctatcaattttttaaaagtcatggcttctccagtcatttcttgcttatcaaaattatttcatgag

SEQ ID NO: 565428 - DNA, 120 bp, Artificial Sequence
  ENSG00000170074_60 (sequence is synthesized)
atgggtctatccttgtatatttgaaaatgaggtttgcttccttctacttaaaaaacaacttgaacatacctgtttggatcacatggtcttgtcctgataacttggaagaggttgcttcag

SEQ ID NO: 565429 - DNA, 120 bp, Artificial Sequence
  ENSG00000170074_61 (sequence is synthesized)
cattattcttattgttgtggtggttattattaacattgtttcatattccgtttaaaaaattaaaattttacacaagaccaatgtcttcttttcaattccagtacagtcttcagaagtaac

SEQ ID NO: 565430 - DNA, 120 bp, Artificial Sequence
  ENSG00000170074_62 (sequence is synthesized)
taatgctattggctttgtgcattataatttcagaccattgtatatgtctttagttatatgtacagtatacacacatatgtgtcatattattccattttttctagcattaaacattgctat

SEQ ID NO: 565431 - DNA, 120 bp, Artificial Sequence
  ENSG00000170075_0 (sequence is synthesized)
gcactcacctgctcttcctgggctggctgtctcctgctcatccagccatgcggtggctgtggcccctggctgtctctcttgctgtgattttggctgtggggctaagcagggtctctgggg

SEQ ID NO: 565432 - DNA, 120 bp, Artificial Sequence
  ENSG00000170075_1 (sequence is synthesized)
gtgcccccctgcacctgggcaggcacagagccgagacccaggagcagcagagccgatccaagaggggcaccgaggatgaggaggccaagggcgtgcagcagtatgtgcctgaggagtggg

SEQ ID NO: 565433 - DNA, 120 bp, Artificial Sequence
  ENSG00000170075_2 (sequence is synthesized)
cggagtacccccggcccattcaccctgctggcctgcagccaaccaagcccttggtggccaccagccctaaccccggcaaggatgggggcaccccagacagtgggcaggaactgaggggca

SEQ ID NO: 565434 - DNA, 120 bp, Artificial Sequence
  ENSG00000170075_3 (sequence is synthesized)
atctgacaggagcaccagggcagaggctacagatccagaaccccctgtatccggtgaccgagagctcctacagtgcctatgccatcatgcttctggcgctggtggtgtttgcggtgggca

SEQ ID NO: 565435 - DNA, 120 bp, Artificial Sequence
  ENSG00000170075_4 (sequence is synthesized)
ttgtgggcaacctgtcggtcatgtgcatcgtgtggcacagctactacctgaagagtgcctggaactccatccttgccagcctggccctctgggattttctggtcctctttttctgcctcc

SEQ ID NO: 565436 - DNA, 120 bp, Artificial Sequence
  ENSG00000170075_5 (sequence is synthesized)
ctattgtcatcttcaacgagatcaccaagcagaggctactgggtgacgtttcttgtcgtgccgtgcccttcatggaggtctcctctctgggagtcacgactttcagcctctgtgccctgg

SEQ ID NO: 565437 - DNA, 120 bp, Artificial Sequence
  ENSG00000170075_6 (sequence is synthesized)
gcattgaccgcttccacgtggccaccagcaccctgcccaaggtgaggcccatcgagcggtgccaatccatcctggccaagttggctgtcatctgggtgggctccatgacgctggctgtgc

SEQ ID NO: 565438 - DNA, 120 bp, Artificial Sequence
  ENSG00000170075_7 (sequence is synthesized)
ctgagctcctgctgtggcagctggcacaggagcctgcccccaccatgggcaccctggactcatgcatcatgaaaccctcagccagcctgcccgagtccctgtattcactggtgatgacct

SEQ ID NO: 565439 - DNA, 120 bp, Artificial Sequence
  ENSG00000170075_8 (sequence is synthesized)
accagaacgcccgcatgtggtggtactttggctgctacttctgcctgcccatcctcttcacagtcacctgccagctggtgacatggcgggtgcgaggccctccagggaggaagtcagagt

SEQ ID NO: 565440 - DNA, 120 bp, Artificial Sequence
  ENSG00000170075_9 (sequence is synthesized)
gcagggccagcaagcacgagcagtgtgagagccagctcaacagcaccgtggtgggcctgaccgtggtctacgccttctgcaccctcccagagaacgtctgcaacatcgtggtggcctacc

SEQ ID NO: 565441 - DNA, 120 bp, Artificial Sequence
  ENSG00000170075_10 (sequence is synthesized)
tctccaccgagctgacccgccagaccctggacctcctgggcctcatcaaccagttctccaccttcttcaagggcgccatcaccccagtgctgctcctttgcatctgcaggccgctgggcc

SEQ ID NO: 565442 - DNA, 120 bp, Artificial Sequence
  ENSG00000170075_11 (sequence is synthesized)
aggccttcctggactgctgctgctgctgctgctgtgaggagtgcggcggggcttcggaggcctctgctgccaatgggtcggacaacaagctcaagaccgaggtgtcctcttccatctact

SEQ ID NO: 565443 - DNA, 120 bp, Artificial Sequence
  ENSG00000170075_12 (sequence is synthesized)
tccacaagcccagggagtcacccccactcctgcccctgggcacaccttgctgaggccccagtaggggtggggagggagggagaggccgccacccccgccggtgtctgctgttctttcccc

SEQ ID NO: 565444 - DNA, 120 bp, Artificial Sequence
  ENSG00000170075_13 (sequence is synthesized)
ataggtcttgctttgttgcctgtcttgctgtctagggatggacttggttcctcttgtcaaggtttgggaatgtcaaagccccctccccacacagggcctttcctgtcccttgtggggcct

SEQ ID NO: 565445 - DNA, 120 bp, Artificial Sequence
  ENSG00000170075_14 (sequence is synthesized)
tccaaccctgtcctttccactggtgggcggtgatgcttctaggtccttagaactgcccagaaactctgagtcccagcagctgggagccagaactttgcctgccctcccttggttccagtc

SEQ ID NO: 565446 - DNA, 120 bp, Artificial Sequence
  ENSG00000170075_15 (sequence is synthesized)
tctcttctctctctctgccttggaacctgaccatactttagttgtgcccttcccaggcatcatcctcctaccaccaacctggggccccatcttggaatgggggctccttggggccagccc

SEQ ID NO: 565447 - DNA, 80 bp, Artificial Sequence
  ENSG00000170075_16 (sequence is synthesized)
cagccccagtacactcttctctggaccagatctgtcccagtcctggatgcctcctcctactggtgccttcttttcttcca

SEQ ID NO: 565448 - DNA, 120 bp, Artificial Sequence
  ENSG00000170075_17 (sequence is synthesized)
tcctggatgcctcctcctactggtgccttcttttcttccagaggatttctctctccttcctcctcctttctttgggatccctgggttgccctgtcccaacctccttgttaggtgctttcc

SEQ ID NO: 565449 - DNA, 120 bp, Artificial Sequence
  ENSG00000170075_18 (sequence is synthesized)
cataggaggcccttcttgagaaacaataaactaggtagaactacccctatgcccatccactttcttgtgccacattctggcagggcccagatgcagctgggccttcctggcctggcagtg

SEQ ID NO: 565450 - DNA, 120 bp, Artificial Sequence
  ENSG00000170075_19 (sequence is synthesized)
cctaggagaatttctcctgacctggcctggcctgtggctgatgttcagaacagccttgtggccgatgttcagaacagccttgtggccctggcgactccaagggttttatggcttttgagg

SEQ ID NO: 565451 - DNA, 120 bp, Artificial Sequence
  ENSG00000170075_20 (sequence is synthesized)
gacagagaggatggagggcttggggagccggaggacctaagtcctcatcctggcctaaaccccatgctccttgggaagtcaaaagcctggaaaatatctcctctggagccttcatctctg

SEQ ID NO: 565452 - DNA, 120 bp, Artificial Sequence
  ENSG00000170075_21 (sequence is synthesized)
ctatgccctctctccacaaagccccccttggagggagtccagtggtctttcctctgtgagccccagggcttcccagcctttgtcactctgagagctgctcttgttcagtttcttagaatg

SEQ ID NO: 565453 - DNA, 120 bp, Artificial Sequence
  ENSG00000170075_22 (sequence is synthesized)
gactgttttgcctgtagacggcccagctgcctgccctggcctgcccccacccagcccccactgcaccacccttcccgccagagctcccactgcccccggcagacccttcatgcagcttct

SEQ ID NO: 565454 - DNA, 120 bp, Artificial Sequence
  ENSG00000170075_23 (sequence is synthesized)
cctgtggggtcttgcccttgaagtgccacttcccccagccccacctctggtcccttccagagggcacccttagccttgtaggtccctgggaagctggcacagcatcaaccagaagtgatg

SEQ ID NO: 565455 - DNA, 120 bp, Artificial Sequence
  ENSG00000170075_24 (sequence is synthesized)
cctcagccaggccaccagtcgctccccgcctgggagctcagctttcctcagaaccaccccccctgtctgaagctctgtcctgggtcccaccagacttctgcccaccaggcctacctacag

SEQ ID NO: 565456 - DNA, 120 bp, Artificial Sequence
  ENSG00000170075_25 (sequence is synthesized)
gggcagggtttccaagcgcctggggctccattctcctctgtccacccacccacaccccttggcctcagcctgccctgtacccaagcttccctccccctctcctggggatcttaacggcct

SEQ ID NO: 565457 - DNA, 120 bp, Artificial Sequence
  ENSG00000170075_26 (sequence is synthesized)
tgttctctctccctggcacccacccccagggcgggtgatgccgccaagagagagggaggccgttgctaggtgatggcgccgccatgcacacaccctttgtgctggggagtgacacccacc

SEQ ID NO: 565458 - DNA, 120 bp, Artificial Sequence
  ENSG00000170075_27 (sequence is synthesized)
cgtttctcagcagacctgttgccacggtgactgaagcccccagctctgtctgtagaaacttcagatgggtgggggagcaggttggagaggggaccaaaggcaggcctgtcgtgctgaagc

SEQ ID NO: 565459 - DNA, 120 bp, Artificial Sequence
  ENSG00000170075_28 (sequence is synthesized)
tcttggggaccgtttcctcggcatttccccaactccttctccacccccctgccaggcccggaagtaccaccagcttcctaagggatgcaggaaggggccgggtgaactgaggtgaagtcc

SEQ ID NO: 565460 - DNA, 120 bp, Artificial Sequence
  ENSG00000170075_29 (sequence is synthesized)
agggcaggggagtcagacccctcaacatcctgtttaggggtcctcctccacaaagggtgccctccacctctccctcctgctggttggccggctcagagatgaagggggagagatggtggc

SEQ ID NO: 565461 - DNA, 120 bp, Artificial Sequence
  ENSG00000170075_30 (sequence is synthesized)
tccaaggctctgccaccgccacctcccaagcctgccaacgtgaatggcttgcagaatcagtcagcaggccagcggccttgggaaagagccactgtcctcgcagcctgggccagctggggg

SEQ ID NO: 565462 - DNA, 120 bp, Artificial Sequence
  ENSG00000170075_31 (sequence is synthesized)
aacaatgtagggtttgttgcttaggggtcccaggcttgcgggggggttggcacatggtgggcagtggacttgagctgggatggtctgagggggcactgacacgctcacccgagggcagac

SEQ ID NO: 565463 - DNA, 120 bp, Artificial Sequence
  ENSG00000170075_32 (sequence is synthesized)
ttcagaccagccctcagatcctgatgccaggttacagggctgaggggagcctgaaatccactgggtctccctgctccacttgggagtcaccttctcatcacctatcctggaactgaatgc

SEQ ID NO: 565464 - DNA, 120 bp, Artificial Sequence
  ENSG00000170075_33 (sequence is synthesized)
aattacttaaactcagtctcagcttcctcatctgtaaaatgggaataatctgtccttcacagaggattatggtcatttaatgagacaagatacataaagcactttgcatggtgccccgaa

SEQ ID NO: 565465 - DNA, 120 bp, Artificial Sequence
  ENSG00000170075_34 (sequence is synthesized)
ccttttattccttcctctcctttgggaattcaattctctagtgttaggagcaggcttggcccagggattcttaaatgcatccaggttttggcatcaaagggccccaaacatgacaattta

SEQ ID NO: 565466 - DNA, 120 bp, Artificial Sequence
  ENSG00000170075_35 (sequence is synthesized)
aagggccccaaacatgacaatttacctatactcatggtctgttcccattcaactttaataggttatgtgtgttttttttttcttaagagctgggtgggggggtctcactatgttgcccag

SEQ ID NO: 565467 - DNA, 120 bp, Artificial Sequence
  ENSG00000170075_36 (sequence is synthesized)
ctcctgagtagctgggactacaagtgtgtaccaccatgcctggctgaacacttttttttttttgagacaagatcccactcagtcactcaagctgagtgctgtggtgtgatcacagctcat

SEQ ID NO: 565468 - DNA, 73 bp, Artificial Sequence
  ENSG00000170075_37 (sequence is synthesized)
tttgagacaagatcccactcagtcactcaagctgagtgctgtggtgtgatcacagctcattgcagcctccact

SEQ ID NO: 565469 - DNA, 89 bp, Artificial Sequence
  ENSG00000170075_38 (sequence is synthesized)
ttttgcccaggctggtctcaaactcccagactcaagtcattctcctacctcgggacctggcccctgaacaaattctttaagtcatatta

SEQ ID NO: 565470 - DNA, 120 bp, Artificial Sequence
  ENSG00000170075_39 (sequence is synthesized)
gaacaaattctttaagtcatattagcacctgctgcacgccggcactgtggaaggaggatgcttgcttgcttcctggtaaccagctctcttatctcaaacctcaatcctcagtgaggatca

SEQ ID NO: 565471 - DNA, 120 bp, Artificial Sequence
  ENSG00000170075_40 (sequence is synthesized)
caggatctgagaaaggcaccttggcctggaaacagccccagatgagtgagattgctggtcctctcccgggatcccaggcccaggaaaacctagccatgcttgcagtcaggagagggcagg

SEQ ID NO: 565472 - DNA, 120 bp, Artificial Sequence
  ENSG00000170075_41 (sequence is synthesized)
ggatagagccctggctcccattcaacctccttagccaggaggacatgtcccattttgcttaggagttgggaggtaccctagaatcacttagcttcagatgccaaattccatccacattct

SEQ ID NO: 565473 - DNA, 120 bp, Artificial Sequence
  ENSG00000170075_42 (sequence is synthesized)
ttcctccaactctctggcagtggggaactgcctctccaggcagggaactgctctgacaggtctgatgactgcctccaggaggaagccctgggcaccaatgaaggtgaggggctggagggc

SEQ ID NO: 565474 - DNA, 120 bp, Artificial Sequence
  ENSG00000170075_43 (sequence is synthesized)
ccaggacggggagtcaaggtccccactcccaggactaagggacagtttggctcctttttcctgcagtgggaggggtgagaagggctggggtgttctgcaagggcctgctccattttccag

SEQ ID NO: 565475 - DNA, 120 bp, Artificial Sequence
  ENSG00000170075_44 (sequence is synthesized)
ggtgaaggagaggccgagggaggtggagcgggaggaggtggggcttactgtgaaactgggtcaagatggcctcggatttgagcaggcagggtcaccaggctctgaggcagcagctgtgag

SEQ ID NO: 565476 - DNA, 120 bp, Artificial Sequence
  ENSG00000170075_45 (sequence is synthesized)
cagtgccgagggaggaccagctctgacggtgaggtcgggtgggggactagaatccagcagaggagcgagggcagggctcctaccaggaaacccatagcattgacactaactgagaggcag

SEQ ID NO: 565477 - DNA, 120 bp, Artificial Sequence
  ENSG00000170075_46 (sequence is synthesized)
caaaggcggtgacactcccccaggctctgtgggcccagccctacccctgaagcacagttaactggttctggggtaggaactgggggccggagggacagggttctggttctggctcaacct

SEQ ID NO: 565478 - DNA, 120 bp, Artificial Sequence
  ENSG00000170075_47 (sequence is synthesized)
tggctgctggtgagatccagggcctgggaaagaggggctgaggcctgaactgggcctaaggagagtgcagctcagttcgcacacaacagcacccagccctgtccccttgctgcctctacc

SEQ ID NO: 565479 - DNA, 120 bp, Artificial Sequence
  ENSG00000170075_48 (sequence is synthesized)
cagccctgggcagttccctcaacagagctctgcagccccaagtggcagctgctggctcaaagctgggactacatgaaagtctgaaaagagaatgagaaggaggtggcgcaagagcctgga

SEQ ID NO: 565480 - DNA, 120 bp, Artificial Sequence
  ENSG00000170075_49 (sequence is synthesized)
cgcacgtgtgggaggccgttttgtgcagcgccattgtgctccccgggcgggcatgtgctcgcgctccgtggctctgttggtgcccagcgtgcgggggtgtgctggtggccctgtgggcct

SEQ ID NO: 565481 - DNA, 120 bp, Artificial Sequence
  ENSG00000170075_50 (sequence is synthesized)
gtagggcaacccatgccaactgcggaaaagtaaccagcaccatacaccccccccaacacaaaactggtcatttattttttttgttgtcattgttattaggaagcaaaaaaatgtacagtt

SEQ ID NO: 565482 - DNA, 120 bp, Artificial Sequence
  ENSG00000170075_51 (sequence is synthesized)
acaagaatcattttccaaacagaggttaaatatgagctgaaaagtgtaaaaaaggaagaggaacatcactttacaaatcattaaattaaacaaataaacaaacagaacccaaagaaccaa

SEQ ID NO: 565483 - DNA, 120 bp, Artificial Sequence
  ENSG00000170085_0 (sequence is synthesized)
gtggcccgggttgtagccgccgccgctgccgccgccccgccgccgccacctcagaagcaggaaccgaagtcgtcgccgccgccgccactgcctgggtcttcggtcggggcccgcagccat

SEQ ID NO: 565484 - DNA, 120 bp, Artificial Sequence
  ENSG00000170085_1 (sequence is synthesized)
tcttcggtcggggcccgcagccatggaggatttcatcgtgatctcggacgacagcggctctgagagctccgggggcgcccgcccgggccggtcgcggaggccgcgccgggccctgtcgcg

SEQ ID NO: 565485 - DNA, 120 bp, Artificial Sequence
  ENSG00000170085_2 (sequence is synthesized)
aacctccggcgcgctgccccgccggaccgtgaacaagggtcaaaaattagaacccatccctcatcgaagactaagaatggtaacaaataccattgaagagaattttcctctggggactgt

SEQ ID NO: 565486 - DNA, 120 bp, Artificial Sequence
  ENSG00000170085_3 (sequence is synthesized)
gcagtttttgatggactttgtgtcaccccagcattacccaccaagagaaatcgtggctcacatcatccagaaaatcttgctcagtggctctgagactgtggatgtcctaaaggaggccta

SEQ ID NO: 565487 - DNA, 120 bp, Artificial Sequence
  ENSG00000170085_4 (sequence is synthesized)
catgcttctcatgaaaattcaacagctacatccagccaatgccaagacagtggagtgggactggaaactgctcacctatgtcatggaggaagagggacaaactctgcctgggcgagtcct

SEQ ID NO: 565488 - DNA, 120 bp, Artificial Sequence
  ENSG00000170085_5 (sequence is synthesized)
tttcctgcgttatgtcgttcagaccctagaagatgactttcagcagaccctgaggaggcaacggcagcacctgcagcaatccattgcaaacatggtgctttcctgtgacaagcagcccca

SEQ ID NO: 565489 - DNA, 120 bp, Artificial Sequence
  ENSG00000170085_6 (sequence is synthesized)
caatgtcagggatgttatcaagtggctggtcaaagcagtaactgaagatggattgactcagcccccaaatggaaatcaaacgtcttcaggaacaggaatcttgaaagccagcagtagcca

SEQ ID NO: 565490 - DNA, 120 bp, Artificial Sequence
  ENSG00000170085_7 (sequence is synthesized)
cccttcttcccagcccaacctgacaaagaacaccaatcagctgattgtgtgccagcttcagaggatgctctccatagccgtagaggtggacaggacccccacctgcagctccaataaaat

SEQ ID NO: 565491 - DNA, 120 bp, Artificial Sequence
  ENSG00000170085_8 (sequence is synthesized)
gggtttgtgctggacattcctgagaggagccagagagaaatgttctttactaccatggaaagccaccttctgcgctgcaaagtgttagaaatcatattcctccacagctgtgagacaccc

SEQ ID NO: 565492 - DNA, 120 bp, Artificial Sequence
  ENSG00000170085_9 (sequence is synthesized)
acccgcctgcctctgtctctggcccaggccctctactttctgaataattctacgtcactgctcaagtgtcagtcagataaaagccagtggcagacttgggacgaattggttgagcatctg

SEQ ID NO: 565493 - DNA, 120 bp, Artificial Sequence
  ENSG00000170085_10 (sequence is synthesized)
cagtttctgctgtccagttatcaacatgttttaagagaacacttaaggagttccgtgatcgaccgaaaggacttaataatcaaaaggattaagcccaaaccccagcaaggagatgacatc

SEQ ID NO: 565494 - DNA, 120 bp, Artificial Sequence
  ENSG00000170085_11 (sequence is synthesized)
acagtggtagacgtagagaagcagattgaggccttccgcagccgcctgatccagatgctgggggagcctcttgtcccccaactccaagacaaagtgcacttgttgaagctcctgctcttc

SEQ ID NO: 565495 - DNA, 120 bp, Artificial Sequence
  ENSG00000170085_12 (sequence is synthesized)
tatgctgcggacttgaaccctgatgcagagccctttcaaaagggctggagcggctcctgagggcctgccaagcactgaatgccaagaatacctcctgaactctctctccaactgctcaga

SEQ ID NO: 565496 - DNA, 120 bp, Artificial Sequence
  ENSG00000170085_13 (sequence is synthesized)
agctctaaaagcatgaaaagtggttaaaatcttacaggaccaaacctgcattatttaatcagtaggttgtaatttctaactctagtaaatatctttttttaaataatcctatcctagcct

SEQ ID NO: 565497 - DNA, 120 bp, Artificial Sequence
  ENSG00000170085_14 (sequence is synthesized)
gttctcaaatatggcttaaatatacaaggtatatatattttttaataaattatttatctatacttttttgaaacaggttaatactctgtgcatcacatgtttaacattttcattcaagat

SEQ ID NO: 565498 - DNA, 120 bp, Artificial Sequence
  ENSG00000170085_15 (sequence is synthesized)
gtggaaaaaatccctctgctgaacctagtctatacaccaatattatgtcattcaaggtaccgacaacctgtttcaggagagagacgttcatttttccctaatgaaatgcaagcattctgt

SEQ ID NO: 565499 - DNA, 120 bp, Artificial Sequence
  ENSG00000170085_16 (sequence is synthesized)
tagacctattatattgcctgttaatttgactgtaatgaatagggggtagaaacaaaaggatcaagtgtgttataaaacatttgatgttaaaaggagacaataaaaaggcaatggtttttc

SEQ ID NO: 565500 - DNA, 120 bp, Artificial Sequence
  ENSG00000170085_17 (sequence is synthesized)
ggatcatttcacctgtaacagaatacccaactcaggcttggcccaacagtcaagttgagccaagccaacagacttggctcaatcagctcgcatgactggaagttcatcagtagagtggac

SEQ ID NO: 565501 - DNA, 120 bp, Artificial Sequence
  ENSG00000170085_18 (sequence is synthesized)
atcatggcggtttgatctagcagcacaggagtcattaaagaaccagtttctctttctctgttttgccatctgtagttttgggtatatcctgaggttgataggttcagtgagagggagaga

SEQ ID NO: 565502 - DNA, 120 bp, Artificial Sequence
  ENSG00000170085_19 (sequence is synthesized)
ttgacttcccatggctgcctcttaaatcaaatgatctacaatcctagagattccagtagatatctgattgcagcttaggtgttagaaaattataattatctgcagatgcctagatccttt

SEQ ID NO: 565503 - DNA, 120 bp, Artificial Sequence
  ENSG00000170085_20 (sequence is synthesized)
cagaccaaggacaaaagatcgcagtggactgtatgtgattgacctgacaagagctgagggagaaaatagacctattgccactcttgacttaactttagaacctgtcactccttcccagaa

SEQ ID NO: 565504 - DNA, 120 bp, Artificial Sequence
  ENSG00000170085_21 (sequence is synthesized)
ggagccaaccagtcttcagacatgtgccagcctctctggcaaagcggtgatggaagggcacgtggacagaagctctcagcctacagcacggagaatcattaacagtgatcctgtagattt

SEQ ID NO: 565505 - DNA, 120 bp, Artificial Sequence
  ENSG00000170085_22 (sequence is synthesized)
ggacctagtggaagaaaacacctttgtaggtcccccacccgctacatccatcagtggaggctctgtttatccaacagagcctaattgtagctcagccacattcacaggtaacctcagctt

SEQ ID NO: 565506 - DNA, 120 bp, Artificial Sequence
  ENSG00000170085_23 (sequence is synthesized)
cttggcaagtctacagctgtcttcagatgttagctccctctccccaacaagcaataatagtaggagcagcagcagcagcagcaatcaaaaagcacccttgccatgcccacagcaagatgt

SEQ ID NO: 565507 - DNA, 120 bp, Artificial Sequence
  ENSG00000170085_24 (sequence is synthesized)
atctcgcccaccacaggccttgccgtgccccctgcgacctttgccatgcccaccgagagcctcaccatgtccaccacgagcctcctcatgcccaccacgagccttgtcatgcccatcaca

SEQ ID NO: 565508 - DNA, 120 bp, Artificial Sequence
  ENSG00000170085_25 (sequence is synthesized)
aaccatgcagtgccaactaccagctctaactcacccacctcaagaagtgccatgccctcggcagaatatcccaggcccacctcaagactctctgggcctacctcaagatgtgccagggct

SEQ ID NO: 565509 - DNA, 120 bp, Artificial Sequence
  ENSG00000170085_26 (sequence is synthesized)
gcctcaaagcatattacatccacaagatgtggcatacctgcaagacatgccacggtcaccaggagatgtgccacagtcaccaagtgatgtttcaccgtcaccagatgcaccacagtcacc

SEQ ID NO: 565510 - DNA, 120 bp, Artificial Sequence
  ENSG00000170085_27 (sequence is synthesized)
agggggcatgccacacttaccgggagatgtgttacattcacctggagacatgccacactcatcaggggacgtgacacactcacctagagacatccctcacttaccaggagacaggcctga

SEQ ID NO: 565511 - DNA, 120 bp, Artificial Sequence
  ENSG00000170085_28 (sequence is synthesized)
ctttacccagaatgatgtacagaaccgtgacatgcctatggatatctcagctctgtcctctccaagctgctctcccagcccacagtctgaaactcccttagagaaagttccttggctctc

SEQ ID NO: 565512 - DNA, 120 bp, Artificial Sequence
  ENSG00000170085_29 (sequence is synthesized)
tgtcatggaaaccccagccagaaaagaaatatcactgtcagagcctgccaaacctgggtctgcccacgtacaatcacgaacaccacaaggtgggttgtacaacagaccatgcctgcatag

SEQ ID NO: 565513 - DNA, 120 bp, Artificial Sequence
  ENSG00000170085_30 (sequence is synthesized)
gaggccgcgccgggccctgtcgcgaacctccggcgcgctgccccgccggaccgtgacggtgtcttgctgtgtcactcaggctggagtgcagtcgcacaacctcagctcactgcaacctct

SEQ ID NO: 565514 - DNA, 120 bp, Artificial Sequence
  ENSG00000170085_31 (sequence is synthesized)
aagaagcatggcaccagcatctgcttctggtgaggacctcaggaagcttccaaccatggcagaggtgaatggggagcaggacttcattgacttaactagagagaccagaccaaggacaaa

SEQ ID NO: 565515 - DNA, 120 bp, Artificial Sequence
  ENSG00000170085_32 (sequence is synthesized)
gaatagaaccctccagcatttgtcccccaagcaagaacaccaacttgaacaactatccacacaagaaagcactttcagaagaactaaaactcaggacttcattgacttaactagagagac

SEQ ID NO: 565516 - DNA, 80 bp, Artificial Sequence
  ENSG00000170085_33 (sequence is synthesized)
gtttgggggcgcgcgtcttcgcgaccctcggctgggcccgccgcccgcttcccgcccctggcgcctcacagctgcagcca

SEQ ID NO: 565517 - DNA, 120 bp, Artificial Sequence
  ENSG00000170085_34 (sequence is synthesized)
gagcgcggcgggccggggcaggggccagggcagggaccggggaggccgggcctcccaggctcagcgctgaagcccgagaggactgcggctggaaagcggccgagcacatggacgagctcc

SEQ ID NO: 565518 - DNA, 120 bp, Artificial Sequence
  ENSG00000170085_35 (sequence is synthesized)
tgctcacctatgtcatggaggaagaggtaacaacaattataagattatatcttctgtaggggaagttttaactataaagaaaagtgatatcaggtgccatggctcacacctgtaatccca

SEQ ID NO: 565519 - DNA, 120 bp, Artificial Sequence
  ENSG00000170085_36 (sequence is synthesized)
ggagttcaaggccagcctgggcaacaaaatgagaccctgtctctacaaaaataaaaataaaatatttagccaggcatagtgatgcatgcctgtggtcccagctacacagaaggctgaggc

SEQ ID NO: 565520 - DNA, 83 bp, Artificial Sequence
  ENSG00000170085_37 (sequence is synthesized)
gatgcatgcctgtggtcccagctacacatcaaggctatagtgatccatgatcacaacattgtactccagcctgggtgacagag

SEQ ID NO: 565521 - DNA, 120 bp, Artificial Sequence
  ENSG00000170085_38 (sequence is synthesized)
ttaacagatgctgaagaagcatttgacaaaatgtaatagctcttcccaatttaaactctgagtaaactaggaaaagaagagaacttccttaaaggcatctgtgaaaaccccacagctaga

SEQ ID NO: 565522 - DNA, 120 bp, Artificial Sequence
  ENSG00000170085_39 (sequence is synthesized)
agaaagtgagcaagagcatggaggataatggaggataggaagaggcttcttccttctatcaccttcagatcctatcccttcttccgctaaattctccataattctaattgatttcacttg

SEQ ID NO: 565523 - DNA, 120 bp, Artificial Sequence
  ENSG00000170085_40 (sequence is synthesized)
ctcttggggtttagtgttttagagagaacaacaccaatccctaagagcagcttcccccaaattaacaagatcttagaacataggctgatgcttattcaagacttagtttaactagaggct

SEQ ID NO: 565524 - DNA, 120 bp, Artificial Sequence
  ENSG00000170085_41 (sequence is synthesized)
aaatttctgatttcaaaggcagaacaaaaccaggtgctttcacccctaaaatgaataggacttcacaaagtgaatacgaagtcacaacgcagatgcaaaacaaatgctagaggacactgc

SEQ ID NO: 565525 - DNA, 120 bp, Artificial Sequence
  ENSG00000170085_42 (sequence is synthesized)
ccttcacttcctgcatttcaggagacagtaaagggttacagctcctcatcacttcagatatctgttgccatagagaaggagtggtgtgtagtgtgagttttgttaacctcgagtcctcaa

SEQ ID NO: 565526 - DNA, 120 bp, Artificial Sequence
  ENSG00000170088_0 (sequence is synthesized)
agaaggtggcgagtttcgcggccagaggcttacaggtccaggtggagaggccgggctggccagggcttcggcctccggcgtcgggaaatggcggcggggggcaggatggaggacggttcc

SEQ ID NO: 565527 - DNA, 120 bp, Artificial Sequence
  ENSG00000170088_1 (sequence is synthesized)
ttggatatcacccagagtattgaagacgacccacttctggatgcccagcttctcccacaccactcattacaagctcactttagaccccgattccatcctcttcctacagtcatcatagtg

SEQ ID NO: 565528 - DNA, 120 bp, Artificial Sequence
  ENSG00000170088_2 (sequence is synthesized)
aatcttctgtggtttattcatctcgtgtttgttgttttagcatttttaacaggtgtgctttgttcttatcctaatccaaatgaggacaagtgcccaggaaattacacaaacccattgaaa

SEQ ID NO: 565529 - DNA, 120 bp, Artificial Sequence
  ENSG00000170088_3 (sequence is synthesized)
gttcagacggttataatccttgggaaagttattttgtggattctccatttactccttgaatgctacatccagtatcaccacagcaaaatcagaaaccgaggctataacttgatctaccga

SEQ ID NO: 565530 - DNA, 120 bp, Artificial Sequence
  ENSG00000170088_4 (sequence is synthesized)
tcaacaaggcatctcaagagacttgcgttgatgatacagtcctctggcaacacagtgcttctcctcatactgtgcatgcagcactccttcccagagcctggcagattgtatcttgacctc

SEQ ID NO: 565531 - DNA, 120 bp, Artificial Sequence
  ENSG00000170088_5 (sequence is synthesized)
attctggccatcttggcactggaactcatctgttccctgatatgtctcctcatttacacagtgaaaatccggagatttaataaagctaaaccagagcctgatatacttgaagaagaaaaa

SEQ ID NO: 565532 - DNA, 120 bp, Artificial Sequence
  ENSG00000170088_6 (sequence is synthesized)
atctatgcttaccccagcaatattacctcggagactggattcagaactatttcaagcctagaagaaattgttgaaaagcaaggagacaccattgaatacctgaagcgacacaatgcgctg

SEQ ID NO: 565533 - DNA, 120 bp, Artificial Sequence
  ENSG00000170088_7 (sequence is synthesized)
ctgagtaagcgattgttggctctcacttcctcagacctgggctgtcagccaagtagaacgtgagaggctcacggtcatgacagcaattgcagaggaacccagagtaattgagactgactg

SEQ ID NO: 565534 - DNA, 120 bp, Artificial Sequence
  ENSG00000170088_8 (sequence is synthesized)
accacctgacaagctgccacggggaactgcagcttttgctgaatagcattttacagtgtttgttggaaacctgaatttggttctgacttctgtggctgtttaaaatatagggcttgtggg

SEQ ID NO: 565535 - DNA, 120 bp, Artificial Sequence
  ENSG00000170088_9 (sequence is synthesized)
tcacttgaaaagtacctgtagaagcccggataacttgaggggaatgtctgtttgtacttttggaaattatttaactgcttggtttatcctaggatcagaggctaaacaactccatagtca

SEQ ID NO: 565536 - DNA, 120 bp, Artificial Sequence
  ENSG00000170088_10 (sequence is synthesized)
acacttttccacctgacattagaaccctgtaatgatttcattatggataggggaagtctaacaagacaatcgattttaaacagggttttaatcaaataagttcttcccacttttaagctg

SEQ ID NO: 565537 - DNA, 120 bp, Artificial Sequence
  ENSG00000170088_11 (sequence is synthesized)
atgaaagaagtcattatttcttgtgaatattttttcctggagagccttatcatgtattttatatgcttatgtggtgttggatgacatcatggaccatatagcttttatagagaatttttc

SEQ ID NO: 565538 - DNA, 120 bp, Artificial Sequence
  ENSG00000170088_12 (sequence is synthesized)
aatttttctcaccataggactgaggtctcaccaggtgatctactatgcaaattcctacagttttctattcttaagaaataagggctgggcacggcggatcatgaggtcaggaaattgaga

SEQ ID NO: 565539 - DNA, 120 bp, Artificial Sequence
  ENSG00000170088_13 (sequence is synthesized)
tacttggaccagtgttagaccgacctgtgttagacgaacctgtgttgcctattatattggcagcaccttccattagcaatagctgaaaaattcagagaagaatttagaactttcacttta

SEQ ID NO: 565540 - DNA, 120 bp, Artificial Sequence
  ENSG00000170088_14 (sequence is synthesized)
tttttgccattcttcaagaagttgctgtatatttcagtctggttataccttcaattgatcaataacttcaattataggaaaggcatcttctataattttaaattactgtaaaaaaaagat

SEQ ID NO: 565541 - DNA, 120 bp, Artificial Sequence
  ENSG00000170088_15 (sequence is synthesized)
accttttaaagccttggattatacttaaaaattgtaatggaagaaatgcatattaagttatatgcagatattaaacatatctgattctgaagataaaactgaagtatttttcagagcaaa

SEQ ID NO: 565542 - DNA, 120 bp, Artificial Sequence
  ENSG00000170088_16 (sequence is synthesized)
tggcattatttctccatttttcctagtatgcccctttaatttgtcagtttgctgttagcactgttatatgctgccttagaaagacttttggttgaaggctgaatatgaggggaggggata

SEQ ID NO: 565543 - DNA, 120 bp, Artificial Sequence
  ENSG00000170088_17 (sequence is synthesized)
tttatgactgtgttaatcttttttgatcattagctgaatattcaatatttgatatgtaaccatatagggatgtgttcgatataactatataggcaagggatatattgatttggccacatc

SEQ ID NO: 565544 - DNA, 120 bp, Artificial Sequence
  ENSG00000170088_18 (sequence is synthesized)
tatttgacttatggagggcaaatacctgtttcttttagatacagccattgccggggcattctaaaagttttctactaagataaagatgattgtgtatggctgggagcagttgctcatgcc

SEQ ID NO: 565545 - DNA, 86 bp, Artificial Sequence
  ENSG00000170088_19 (sequence is synthesized)
ctctgagacactgtctctcaaaaaaaaaaaaaaaagatcgtgtgtcacctgcacacaacattcacaaactaaagccaaattgtatt

SEQ ID NO: 565546 - DNA, 120 bp, Artificial Sequence
  ENSG00000170088_20 (sequence is synthesized)
acctgcacacaacattcacaaactaaagccaaattgtatttttaaaatttcctttctcccttccgtttttttttgttttttgggggtttttttttttgttgttgtttttgagacagagtc

SEQ ID NO: 565547 - DNA, 63 bp, Artificial Sequence
  ENSG00000170088_21 (sequence is synthesized)
tcctttctttttaataagtgtatgtatctcaaagccattgccttctctagaaatctgtttctc

SEQ ID NO: 565548 - DNA, 120 bp, Artificial Sequence
  ENSG00000170088_22 (sequence is synthesized)
gtatctcaaagccattgccttctctagaaatctgtttctctgttctggaagagcctataaactttgccttcagttgtttttcttttcaaaagggaacaccagtggtagatgattaactct

SEQ ID NO: 565549 - DNA, 120 bp, Artificial Sequence
  ENSG00000170088_23 (sequence is synthesized)
tatttatttttaaaatttaatttggatctatagtcagtatctgagatttataggatgaactttggtttacaaggaacagtgtagttaaaaagttagggtgcctatgttcttatgtaatca

SEQ ID NO: 565550 - DNA, 120 bp, Artificial Sequence
  ENSG00000170088_24 (sequence is synthesized)
tcaacatgtttgttgtataatcatcaacatttttctgaatgcaatgatgaacatttcaaacaataaatgaaaatgaaactaagtatcagaagtagcaaaacagctgatgcagtggcttac

SEQ ID NO: 565551 - DNA, 120 bp, Artificial Sequence
  ENSG00000170088_25 (sequence is synthesized)
aacagagctagactcgatctcaaaaaaaaaagaagtaacaaaacagaaaaatgaacaaaacaatttaaatgttaaacattctattcaccaggctggtaattgtgctagcactgaggatac

SEQ ID NO: 565552 - DNA, 120 bp, Artificial Sequence
  ENSG00000170088_26 (sequence is synthesized)
aaaaattaaagactctggttggcagcttacattctaaagagagcgaggaatagatttccagactctgtgctaagtgcagtaatgacagtaggcccaacatgctgtaggagctccacgtca

SEQ ID NO: 565553 - DNA, 120 bp, Artificial Sequence
  ENSG00000170088_27 (sequence is synthesized)
gggggtaccctgggggcaggagggtagagggttttaagaatgtcagacagaacaatgagtaaagtaggaaggcaaatagctacaaaatatcacaagcactgtgtatagctggaaccaaaa

SEQ ID NO: 565554 - DNA, 120 bp, Artificial Sequence
  ENSG00000170088_28 (sequence is synthesized)
gtgtgaggcaggacctgggtggagaggtagacagggtcagagcttggagggccttgatactatgctggaagactgcactttatcttgttgataatgggatcctctgaagcatttcaagca

SEQ ID NO: 565555 - DNA, 120 bp, Artificial Sequence
  ENSG00000170088_29 (sequence is synthesized)
aggaagtgacaatgtcagttttagtttcagcaggatcagatggtagttcaatatggaggaaatatgtgtggcagaaagatatggccctgaactagggcaggtatagtaaaccttttatta

SEQ ID NO: 565556 - DNA, 120 bp, Artificial Sequence
  ENSG00000170088_30 (sequence is synthesized)
tatgtatgtgtataggtatatagatagatataggtatatatgtatgtatatgtattccaaatgacaacagtatcatgacttattataaagttaaaagctcattttttaaaaaatggcaat

SEQ ID NO: 565557 - DNA, 120 bp, Artificial Sequence
  ENSG00000170088_31 (sequence is synthesized)
caatatggaaaaatataaagcaaaacaattatttgaaatctcactaccaagggattataccaatgtacactttttttgttttgtttttttttttagtctcatctgtctcccaggctggag

SEQ ID NO: 565558 - DNA, 77 bp, Artificial Sequence
  ENSG00000170088_32 (sequence is synthesized)
tactacagatgcatgccactattttttagtacaaaaatattaaaaatttgggtcgggtgtggtagcttacgcctgta

SEQ ID NO: 565559 - DNA, 70 bp, Artificial Sequence
  ENSG00000170088_33 (sequence is synthesized)
tagtactacagatgcatgccactattttttagtacaaaaatattaaaaatttgggtcgggtgtggtagct

SEQ ID NO: 565560 - DNA, 74 bp, Artificial Sequence
  ENSG00000170088_34 (sequence is synthesized)
ccgaggcggacagatcacgaggtcagcagatcgaggccatattagcaacattagctgggtgtggtggtgcgcgc

SEQ ID NO: 565561 - DNA, 120 bp, Artificial Sequence
  ENSG00000170088_35 (sequence is synthesized)
aatgctgggattataggcatgagccagctcacctggtctccatacccttaccaatagtgggtgttaccttatttaagtcttgacccatctgatgagtgtgtcattgtttcaaattgtatt

SEQ ID NO: 565562 - DNA, 120 bp, Artificial Sequence
  ENSG00000170088_36 (sequence is synthesized)
ctgatgagtgtgtcattgtttcaaattgtatttctttggatactaatgaagtgttaaacattttttccaaattatatggtcttttataaatcttttatgacatgtatattcaagtccttt

SEQ ID NO: 565563 - DNA, 120 bp, Artificial Sequence
  ENSG00000170088_37 (sequence is synthesized)
cttttataaatcttttatgacatgtatattcaagtcctttgcttattattgtcccaggatattctttttcttaacaactagaatcttctggttgggcgtggtggctcccgcctgtaatcc

SEQ ID NO: 565564 - DNA, 120 bp, Artificial Sequence
  ENSG00000170088_38 (sequence is synthesized)
ataaataaatcttgaatacaaaactcacatctggtaaactcttgagttcttgaagaatcaaactttgaatatgtgacaatcacaaatttgagatctcaaaacattctctaggtttcctaa

SEQ ID NO: 565565 - DNA, 120 bp, Artificial Sequence
  ENSG00000170088_39 (sequence is synthesized)
ggaaaattgtttcattcgcaaaccagggaagcctatctctaattcttctcccttcctctctatccagtctcacctttcactctactactctactgaaactgttcttggcaaggtcaccaa

SEQ ID NO: 565566 - DNA, 120 bp, Artificial Sequence
  ENSG00000170088_40 (sequence is synthesized)
tagcttccttccacattgcttaaattggagatgaatgcatacgtctcctcttttaacttatcagcaacacttggctcagttgattgagggggggtctgcccctccacacctgtgggtatt

SEQ ID NO: 565567 - DNA, 120 bp, Artificial Sequence
  ENSG00000170088_41 (sequence is synthesized)
aaagaaataagacacagagacaaagtataaagaaagaacagtgggcccaggggaccagcacacccagcatgcgaggacctgcaccggcgccggtctcttgagttctgttagtatttattg

SEQ ID NO: 565568 - DNA, 120 bp, Artificial Sequence
  ENSG00000170088_42 (sequence is synthesized)
gtctcttgagttctgttagtatttattgatcattatttttaatatcttgacgaggggagtgtagcggggcaacaggtggggagaaggtcagcagggaaacgtgagcaaaggaatctgtat

SEQ ID NO: 565569 - DNA, 74 bp, Artificial Sequence
  ENSG00000170088_43 (sequence is synthesized)
ccggatgtgcatgtaggctagatttacgtttctctttacacaaacatttcagtgtagcaaagagtaacagagca

SEQ ID NO: 565570 - DNA, 120 bp, Artificial Sequence
  ENSG00000170088_44 (sequence is synthesized)
atctcgcctccagccacagggcagttttctcctatctcagaatagaacgaatgggaatggtcagctttacaccgagacattccattcccagggacgagcaggagacagaagccttcctct

SEQ ID NO: 565571 - DNA, 78 bp, Artificial Sequence
  ENSG00000170088_45 (sequence is synthesized)
tggtaaggcctttcctttcccacgaggccgtatctcaggctgtctcagtgggaggaaaccttggacaatacccaggct

SEQ ID NO: 565572 - DNA, 68 bp, Artificial Sequence
  ENSG00000170088_46 (sequence is synthesized)
atcgagaatggagaaaggcgatgacttttaccaagcataccacctgcaaacatattgttaacaaggca

SEQ ID NO: 565573 - DNA, 63 bp, Artificial Sequence
  ENSG00000170088_47 (sequence is synthesized)
cctggttaatcgagaatggagaaaggcgatgacttttaccaagcataccgatccaatacagca

SEQ ID NO: 565574 - DNA, 120 bp, Artificial Sequence
  ENSG00000170088_48 (sequence is synthesized)
gatcaaaatggagtttcttatgtcttctttttctacatagacacagtaacaatctgatctctctcttttccccacagttgatcacttcctccttgactctttatttcagcttggcttcca

SEQ ID NO: 565575 - DNA, 120 bp, Artificial Sequence
  ENSG00000170088_49 (sequence is synthesized)
atcacttcctccttgactctttatttcagcttggcttccaggacactacattctcctcattttcttctacttcactagcttcttcttttgtctgctttgcaagttgctttttgttggtat

SEQ ID NO: 565576 - DNA, 120 bp, Artificial Sequence
  ENSG00000170088_50 (sequence is synthesized)
tctccagggctcaacccctgggcctcttggcttctccatcagcgttcactctcttggtggtctcacacaatctcatgactttgatagaatttatgagctgataatttccaaatgtgaatc

SEQ ID NO: 565577 - DNA, 120 bp, Artificial Sequence
  ENSG00000170088_51 (sequence is synthesized)
ttcagccaggccttcctccctgaactccagacttatgtgtccaactgccccttctagatcactacttgggtatataaaaaaacacctcaaacagaacatgtccccagctgagctatctgc

SEQ ID NO: 565578 - DNA, 120 bp, Artificial Sequence
  ENSG00000170088_52 (sequence is synthesized)
cacagtctcttccacccctgtaatggcagctcctctttctctcaaaccctatagacagttaatcagcaaatcctgctggcttttcctttaaaacatacccagagtccaaccaattcttgg

SEQ ID NO: 565579 - DNA, 120 bp, Artificial Sequence
  ENSG00000170088_53 (sequence is synthesized)
cacccccaatgctacttccccagccactataatcttcacctggactattataatagtctttcggttttttggttttgttttttttttttgggggagggagtctcgctctgttgcccaggc

SEQ ID NO: 565580 - DNA, 88 bp, Artificial Sequence
  ENSG00000170088_54 (sequence is synthesized)
cccaaagtgctgcaattacaggcatgagtcactgtgcctggccctattataatagtgcttgagatggagtctcactcgtgtcgcacag

SEQ ID NO: 565581 - DNA, 61 bp, Artificial Sequence
  ENSG00000170088_55 (sequence is synthesized)
gcagtggcgcagtctcggctcactacaacctccgctctttttttatttttagtagagacga

SEQ ID NO: 565582 - DNA, 70 bp, Artificial Sequence
  ENSG00000170088_56 (sequence is synthesized)
aagagtcttttaagtgatctttctgcttctcactacctctccaccctgaccccccagccccatgcacaca

SEQ ID NO: 565583 - DNA, 120 bp, Artificial Sequence
  ENSG00000170088_57 (sequence is synthesized)
cactacctctccaccctgaccccccagccccatgcacacacacaaaaagcagccaacaatatccttctaaaacactactctgatggttccctttttcattcagtaaaagccaaagcctgg

SEQ ID NO: 565584 - DNA, 120 bp, Artificial Sequence
  ENSG00000170088_58 (sequence is synthesized)
acagtggccttcagggacctagaaaatctccacttcccaccccaccccacctcctctctcctactcttcctttgtgtaccctgcgtcggtcacactgtggcttttggattgctaagcaca

SEQ ID NO: 565585 - DNA, 120 bp, Artificial Sequence
  ENSG00000170088_59 (sequence is synthesized)
ttcttacctgaggacctttgcggttgctgttccctctgcctggaaggatcaactcccatatatctttttcaagtctttgttcaaatgtcacttgtggccaggtgtggtggctaacccctg

SEQ ID NO: 565586 - DNA, 62 bp, Artificial Sequence
  ENSG00000170088_60 (sequence is synthesized)
gctgtactccagcctgggtgacaagagtgagaatccgtcccccccccaaaaaaaaaaaatcc

SEQ ID NO: 565587 - DNA, 120 bp, Artificial Sequence
  ENSG00000170088_61 (sequence is synthesized)
gtgagccaagatcgcacagctgtactccagcctgggtgacaagagtgagaatccgtcccccccccaaaaaaaaaaaatcctcccacttcagtcagcctcctgagtagctgggattataga

SEQ ID NO: 565588 - DNA, 120 bp, Artificial Sequence
  ENSG00000170088_62 (sequence is synthesized)
ttgctataattattctattttgttattaatgttgttactctctgtgcctaatttataaatttaactttattgtagttatgtgtggataggaaaaaatatagtgttcgtagggtttagtac

SEQ ID NO: 565589 - DNA, 120 bp, Artificial Sequence
  ENSG00000170088_63 (sequence is synthesized)
tatctgtggctccaggcatcacctgaggtcttgcaatgattcccctgcagacctgtggctccaggcatcacctgaggtcttgtaatgtttcccctgtagataaggggaaaatactgcatg

SEQ ID NO: 565590 - DNA, 120 bp, Artificial Sequence
  ENSG00000170088_64 (sequence is synthesized)
taacttacttgtttactttgtctgtgtctcctgatagaatgtaagctctatcttttgcttactactgtgtccttcatacatagaacagtgtctggcacaaagtaggcactcaatatacgt

SEQ ID NO: 565591 - DNA, 120 bp, Artificial Sequence
  ENSG00000170088_65 (sequence is synthesized)
tgatgaattaatgtcactaacttcagtgatttcactactggaattgtagtagaaaaactatgctcacacatgctcaaagcctgttcctgtaatccagctgtaacctgggctctgttttca

SEQ ID NO: 565592 - DNA, 120 bp, Artificial Sequence
  ENSG00000170088_66 (sequence is synthesized)
ctttctgtttatgatgtcctgaactgagagattatttttttaaggtcttgtttaaaagtttatgtctaggatacactaaaaaataacaacatatcagaaataaaagagataagactgcta

SEQ ID NO: 565593 - DNA, 120 bp, Artificial Sequence
  ENSG00000170088_67 (sequence is synthesized)
accaaagaaaaaagacacctgtgcctggcaggtcgatacgctactaatttgcccgaggtacgaacgaaacagaagatgctgatttctggataaaacgttctgcagtgccaggctgcagtg

SEQ ID NO: 565594 - DNA, 120 bp, Artificial Sequence
  ENSG00000170088_68 (sequence is synthesized)
tggcgagtttcgcggccagaggcttacaggtccaggtggagaggccgggctggccagggcttcggcctccggcgtcgggaaatggcggcggggggcaggatggaggacttgagaaaatgg

SEQ ID NO: 565595 - DNA, 120 bp, Artificial Sequence
  ENSG00000170091_0 (sequence is synthesized)
agaagctccgatccagacacacgcgaggcgctgtcctttcagcaccacaagctcgggctgaggagggaggactcctggccgtcctcctcctcttcaaattggcttgaatctgctctgacc

SEQ ID NO: 565596 - DNA, 120 bp, Artificial Sequence
  ENSG00000170091_1 (sequence is synthesized)
ccccacgagtgcagcacagtctgggaagaaaggcgtaaggatggtgaagctgaacagtaaccccagcgagaagggaaccaagccgccttcagttgaggatggcttccagaccgtccctct

SEQ ID NO: 565597 - DNA, 120 bp, Artificial Sequence
  ENSG00000170091_2 (sequence is synthesized)
catcactcccttggaggttaatcacttacagctgcctgctccagaaaaggtgattgtgaagacaagaacggaatatcagccggaacagaagaacaaagggaagttccgggtgccgaaaat

SEQ ID NO: 565598 - DNA, 120 bp, Artificial Sequence
  ENSG00000170091_3 (sequence is synthesized)
cgctgaatttacggtcaccatccttgtcagcctggccctagctttccttgcgtgcatcgtgttcctggtggtttacaaagccttcacctatgatcacagctgcccagagggattcgtcta

SEQ ID NO: 565599 - DNA, 120 bp, Artificial Sequence
  ENSG00000170091_4 (sequence is synthesized)
taagcacaaacgctgtatcccagcctccctggatgcttactactcctcccaggaccccaattccagaagccgcttctacacagtcatcagccactacagcgtggccaagcagagcactgc

SEQ ID NO: 565600 - DNA, 120 bp, Artificial Sequence
  ENSG00000170091_5 (sequence is synthesized)
ccgggccatcgggccgtggctgtcagcagccgctgtcatccatgagcccaagccgcccaagacccagggccactagaggcctgccccagccagaatggggggcggggtggagaggaggac

SEQ ID NO: 565601 - DNA, 120 bp, Artificial Sequence
  ENSG00000170091_6 (sequence is synthesized)
ccccattggctaagccaagctccagttacaagacaacactgtactcctgggatatgggggcgggggcggggcagggcagggtggggggaagaacgcaccaaaaacgtggtgtgtgctgga

SEQ ID NO: 565602 - DNA, 120 bp, Artificial Sequence
  ENSG00000170091_7 (sequence is synthesized)
gttgtctgaaccgatatttctttttgttccttggtattgttgattcgtcgccgagtcaggctcatgtacaaaggcatgtttcgtgttgattgttcccatgtaagatatttttaaagccac

SEQ ID NO: 565603 - DNA, 120 bp, Artificial Sequence
  ENSG00000170091_8 (sequence is synthesized)
tgcttattctttgttaggaaaatgtaacagcagaaaaggaaagaaacaaagaacatgaacaaaaagcattaaactggctccatcagaagacgttgaagggcagtgaagagcacagactct

SEQ ID NO: 565604 - DNA, 120 bp, Artificial Sequence
  ENSG00000170091_9 (sequence is synthesized)
ccgggactattccattagcctgtggtctgcagggtaggcccgcaggaaatgaggaatggccgagctggagagaagagctgattttggcattactaagcccagaacgcacataacccatag

SEQ ID NO: 565605 - DNA, 120 bp, Artificial Sequence
  ENSG00000170091_10 (sequence is synthesized)
tgaaatgtgctggcctctggtgcattttgcaagatgagcacaaactttctgggcctccatcctaggacctgggcagacccacatggcctgggctctgaatgcccaccctgcgacggtggg

SEQ ID NO: 565606 - DNA, 120 bp, Artificial Sequence
  ENSG00000170091_11 (sequence is synthesized)
ttctgcatcagcaaacgctgaggagtgggcagattttctttgtcttttgcttgcattttctagatccacacctggatactgcccatgttgacgagacagcagcagggggagagggaggga

SEQ ID NO: 565607 - DNA, 120 bp, Artificial Sequence
  ENSG00000170091_12 (sequence is synthesized)
aggaaggtgcggctgcaagaaggaaggcacgggacaggcatgtgacactaggccacaagcgataagcacaggcacctgacttttaagtttttgtttgtttgttgtttcccaaagtgctga

SEQ ID NO: 565608 - DNA, 120 bp, Artificial Sequence
  ENSG00000170091_13 (sequence is synthesized)
taacaataacaacaacaataggattccaaccaggagcctcaagtgacagccaggaagagacctgaaggttggggccaccacaatgccaaatcgtttctaaaggaagctgaaaaatgggac

SEQ ID NO: 565609 - DNA, 120 bp, Artificial Sequence
  ENSG00000170091_14 (sequence is synthesized)
tgtcttttgcccacttcgttgtgttaaaaggggacatttgtccaaactccccaaccgagttctagaagctcctgacaaggaggcagcatccagccttgaccaggcctcccagttccctgg

SEQ ID NO: 565610 - DNA, 120 bp, Artificial Sequence
  ENSG00000170091_15 (sequence is synthesized)
aaccgtatcaggcattcgcctgcctctcacaaatgtttcagggaggccagttctgcagggtgtcagctccaggacccacagggccagaaccagctgggagaattggttatttgagatgtg

SEQ ID NO: 565611 - DNA, 120 bp, Artificial Sequence
  ENSG00000170091_16 (sequence is synthesized)
gtactgcttcctcacaagtctcccacaggccatgtaaagggtatttttttgtggcttgctgtgttgctgagatcatcgtatgcaacagctgggtaataagactagcatagctcaaactat

SEQ ID NO: 565612 - DNA, 120 bp, Artificial Sequence
  ENSG00000170091_17 (sequence is synthesized)
cctgccaaacgctctcatctgatttttcctcccttctcccccaacctccaatcaccctgagtcacctgtaaattcatttgtcattcaaagcggaataacaagttgtccctagcaaaaccg

SEQ ID NO: 565613 - DNA, 120 bp, Artificial Sequence
  ENSG00000170091_18 (sequence is synthesized)
ctgagcgctttataattttgtggtgtatttttgtcagtaggtagcagaggcggaagtattttttggtgtaattcttgaaattttctgacaggaaacaaataaagatagatgtgtctgaga

SEQ ID NO: 565614 - DNA, 120 bp, Artificial Sequence
  ENSG00000170091_19 (sequence is synthesized)
gctggctccagccagctcagcacacctcgtgcttggagcaagtactgctgtgggtggggaaatgatgcaggctatttctggaggatttcttgaagccatacagtctggccactgagttta

SEQ ID NO: 565615 - DNA, 120 bp, Artificial Sequence
  ENSG00000170091_20 (sequence is synthesized)
agttgtgcgcctctgactggagccgagatctgcacggatggccctctgggctgagggggatagtctggccctgctatggggcctgtctcttggggttggatggagcaactagatgtcacc

SEQ ID NO: 565616 - DNA, 120 bp, Artificial Sequence
  ENSG00000170091_21 (sequence is synthesized)
cctcctgcagaggggcagggatgctggaccagttccagtcaatgaaatgtggatggaagtgatcgtaaattgaaaacactatgaggacactgaggcacaggaagtcaagaaacctgcaca

SEQ ID NO: 565617 - DNA, 120 bp, Artificial Sequence
  ENSG00000170091_22 (sequence is synthesized)
aagccatgcaacaaccagccagtatctgagtcatgaccaaagcccagagcccagtctgccttcttgtctgaggtcctttcgacagcctgcattgcttatcttctaggacaatctggccct

SEQ ID NO: 565618 - DNA, 120 bp, Artificial Sequence
  ENSG00000170091_23 (sequence is synthesized)
tttctctctgagaccatgtttgcttctgtttctcaagccaagttaattctctcctagaacaacgccagttagaaatgggggaagctactgaaatacctttggtggcttgtcttgcatcga

SEQ ID NO: 565619 - DNA, 120 bp, Artificial Sequence
  ENSG00000170091_24 (sequence is synthesized)
tattattttctcccactgaggagttagagggtttctggttatgtgctatgtaaattctttggctcattcttttttttccatccttccctccatggtccatcaggaaaatcatggttaaat

SEQ ID NO: 565620 - DNA, 120 bp, Artificial Sequence
  ENSG00000170091_25 (sequence is synthesized)
gagtgagtaaaagcttatgatttgcccgtccacgtcccaacttccttcttcctttagacctttttgtgtgacatgtattttctttgaccctgattttttatttatagcttctactttatt

SEQ ID NO: 565621 - DNA, 120 bp, Artificial Sequence
  ENSG00000170091_26 (sequence is synthesized)
gaaagcactcttgtaagctgcctctattcctttgtggattgaaacagagtgtaaggaaataaaatattatctttttttcagaaaaagaacattttggaaaatgaaagtgtattttccgtg

SEQ ID NO: 565622 - DNA, 120 bp, Artificial Sequence
  ENSG00000170091_27 (sequence is synthesized)
tttgttttgttttgtgatagaaacagaagataagggaaggattatccaattctacaagctttgtgctctggggaatacaggactgatgcttgatattaaatgtatgtgctacagtgtaaa

SEQ ID NO: 565623 - DNA, 120 bp, Artificial Sequence
  ENSG00000170092_0 (sequence is synthesized)
atggacagaacggagactaggttccgtaagaggggacagattacggaaaagatcacgaccagccgtcaaccgcaaccccagaatgagcagagtccccagcggagcacctcggggtacccc

SEQ ID NO: 565624 - DNA, 83 bp, Artificial Sequence
  ENSG00000170092_1 (sequence is synthesized)
tggctggaaaaggaagagggagtggtcagatgaatctgcggaggagccggagaaggagctcgcccctgaacctgaggagacct

SEQ ID NO: 565625 - DNA, 120 bp, Artificial Sequence
  ENSG00000170092_2 (sequence is synthesized)
gagccggagaaggagctcgcccctgaacctgaggagacctgggtagtggagatgctgtgtgggctcaagatgaagctgaagcaacagcgagtgtcacccatcctccctgagcaccacaag

SEQ ID NO: 565626 - DNA, 120 bp, Artificial Sequence
  ENSG00000170092_3 (sequence is synthesized)
ggcttcaacagtcagcttgcccctggggtagatcccagccccccgcataggtccttttgctggaaaaggaagatggagtggtgggacgaatctgaggagtcgttggaggaggagccacgg

SEQ ID NO: 565627 - DNA, 120 bp, Artificial Sequence
  ENSG00000170092_4 (sequence is synthesized)
gagtcgttggaggaggagccacggaaggtgctcgcccctgagcctgaggagatctgggtggcggagatgctgtgtggcctcaagatgaagctgaagcgacggcgagtgtcgctcgtgctc

SEQ ID NO: 565628 - DNA, 120 bp, Artificial Sequence
  ENSG00000170092_5 (sequence is synthesized)
caacgcattcatttcttcctggctctctacctggccaatgacatggaggaggacgacgaggactccaaacaaaacatcttccacttcctgtatgggaagaaccgctctcgcatacccttg

SEQ ID NO: 565629 - DNA, 120 bp, Artificial Sequence
  ENSG00000170092_6 (sequence is synthesized)
ctccgtaagcgttggttccagttaggccgttccatgaacccgagggccaggaagaagcgctctcgcatacccttgctccgtaagcgtcggttccagttaggccgttccatgaacccgagg

SEQ ID NO: 565630 - DNA, 120 bp, Artificial Sequence
  ENSG00000170092_7 (sequence is synthesized)
gccaggaagaaccgctctcgcatacccttgctccgtaagcgtcggttccagttaggccgttccatgaacctgagggccaggaagaaccgctctcagatagtcctgttccagaaacgtcgg

SEQ ID NO: 565631 - DNA, 120 bp, Artificial Sequence
  ENSG00000170092_8 (sequence is synthesized)
aaccgctctcagatagtcctgttccagaaacgtcggttccagttcttctgttccatgagcggcagggcttgggtttccccggaggagttggaggagatccaggcttatgacccagagcac

SEQ ID NO: 565632 - DNA, 61 bp, Artificial Sequence
  ENSG00000170092_9 (sequence is synthesized)
ccccaacatggagtccctgaagatgcttttggacaatggtctgaggttgggacagtggcag

SEQ ID NO: 565633 - DNA, 120 bp, Artificial Sequence
  ENSG00000170092_10 (sequence is synthesized)
gttggcatgagcgatgacatcagagattccgaccatcctgattggagggaccggactccgtggtgcctggagatcagttggacaacagtatcttctcagagctgttctccactcctgact

SEQ ID NO: 565634 - DNA, 81 bp, Artificial Sequence
  ENSG00000170092_11 (sequence is synthesized)
ggggaggggaaggagcggcacatggggttgagcagaggagaaaatcagaaagatggcttagagaagccagcagtctgcgag

SEQ ID NO: 565635 - DNA, 78 bp, Artificial Sequence
  ENSG00000170092_12 (sequence is synthesized)
tggaccattcttgatggagctgaatacagtgatcacgttgtcctcctaggagcaggggtggggggaggggggtggggt

SEQ ID NO: 565636 - DNA, 120 bp, Artificial Sequence
  ENSG00000170092_13 (sequence is synthesized)
cggaacctggaggtcctgtttcttatggacttggttaccacagtccagaagcatttgaaggcacaatgcaggggctcagattggcacagatttcttctgtgaaatatcagtgccacagat

SEQ ID NO: 565637 - DNA, 120 bp, Artificial Sequence
  ENSG00000170092_14 (sequence is synthesized)
atttgaaggcacaatgcaggggctcagattggcacagatttcttctgtgaaatatcagtgccacagattgtaacagatagcttcatgcacactctgcattttattggtttgtttggaaaa

SEQ ID NO: 565638 - DNA, 78 bp, Artificial Sequence
  ENSG00000170092_15 (sequence is synthesized)
caatctttgtatctattattacacgtgttgctgaagggagcatggtttttatctgtagttcccctaaattcttgtaaa

SEQ ID NO: 565639 - DNA, 72 bp, Artificial Sequence
  ENSG00000170092_16 (sequence is synthesized)
tgtatatatgtttgaaatgtgagaattcaggtgtaattttttaccttgttttggcatgtttgtatgttactt

SEQ ID NO: 565640 - DNA, 120 bp, Artificial Sequence
  ENSG00000170099_0 (sequence is synthesized)
actgtacacatgctagggtccaggacagcaggaccaagccagcagaaacagcctgagcccaccgcagactggcctggctatactggacaatgccactcctcctgtacacctgtcttctct

SEQ ID NO: 565641 - DNA, 120 bp, Artificial Sequence
  ENSG00000170099_1 (sequence is synthesized)
ggctgcccaccagcggcctctggaccgtccaggccatggatcctaacgctgcttatgtgaacatgagtaaccatcaccggggcctggcttcagccaacgttgactttgccttcagcctgt

SEQ ID NO: 565642 - DNA, 120 bp, Artificial Sequence
  ENSG00000170099_2 (sequence is synthesized)
ataagcacctagtggccttgagtcccaaaaagaacattttcatctcccctgtgagcatctccatggccttagctatgctgtccctgggcacctgtggccacacacgggcccagcttctcc

SEQ ID NO: 565643 - DNA, 120 bp, Artificial Sequence
  ENSG00000170099_3 (sequence is synthesized)
agggcctgggtttcaacctcactgagaggtctgagactgagatccaccagggtttccagcacctgcaccaactctttgcaaagtcagacaccagcttagaaatgaccatgggcaatgcct

SEQ ID NO: 565644 - DNA, 120 bp, Artificial Sequence
  ENSG00000170099_4 (sequence is synthesized)
tgtttcttgatggcagcctggagttgctggagtcattctcagcagacatcaagcactactatgagtcagaggtcttggctatgaatttccaggactgggcaacagccagcagacagatca

SEQ ID NO: 565645 - DNA, 120 bp, Artificial Sequence
  ENSG00000170099_5 (sequence is synthesized)
acagctatgtcaagaataagacacaggggaaaattgtcgacttgttttcagggctggatagcccagccatcctcgtcctggtcaactatatcttcttcaaaggcacatggacacagccct

SEQ ID NO: 565646 - DNA, 120 bp, Artificial Sequence
  ENSG00000170099_6 (sequence is synthesized)
ggacgagacaactgtggtgaaggtgcccatgatgttgcagtcgagcaccatcagttaccttcatgactcggagctcccctgccagctggtgcagatgaactacgtgggcaatgggactgt

SEQ ID NO: 565647 - DNA, 120 bp, Artificial Sequence
  ENSG00000170099_7 (sequence is synthesized)
cttcttcatccttccggacaaggggaagatgaacacagtcatcgctgcactgagccgggacacgattaacaggtggtccgcaggcctgaccagcagccaggtggacctgtacattccaaa

SEQ ID NO: 565648 - DNA, 120 bp, Artificial Sequence
  ENSG00000170099_8 (sequence is synthesized)
ggtcaccatctctggagtctatgacctcggagatgtgctggaggaaatgggcattgcagacttgttcaccaaccaggcaaatttctcacgcatcacccaggacgcccagctgaagtcatc

SEQ ID NO: 565649 - DNA, 120 bp, Artificial Sequence
  ENSG00000170099_9 (sequence is synthesized)
aaaggtggtccataaagctgtgctgcaactcaatgaggagggtgtggacacagctggctccactggggtcaccctaaacctgacgtccaagcctatcatcttgcgtttcaaccagccctt

SEQ ID NO: 565650 - DNA, 120 bp, Artificial Sequence
  ENSG00000170099_10 (sequence is synthesized)
catcatcatgatcttcgaccacttcacctggagcagccttttcctggcgagggttatgaacccagtgtaagagaccacccacccagagcctcagcactgtctgactttgggaaccaggga

SEQ ID NO: 565651 - DNA, 120 bp, Artificial Sequence
  ENSG00000170099_11 (sequence is synthesized)
tcccacagaaatgttttggagagcgggaggtttcccccaatctcctccaagttcttctccctccaaccagagttgtgtctaactttaggcatcttttaataaatgtcattgcgactctga

SEQ ID NO: 565652 - DNA, 120 bp, Artificial Sequence
  ENSG00000170099_12 (sequence is synthesized)
ccacccaggaagctggcaaacaaaatttaacaggcagcatccaccgcaggcttactgtacacatgctagggtccaggacagcaggaccaagccagcagaaacagcctgagcccaccgcag

SEQ ID NO: 565653 - DNA, 120 bp, Artificial Sequence
  ENSG00000170099_13 (sequence is synthesized)
actatgaggaaactgaagtccagcgccctctgtgatgtgctccaggtcacacagccagtgtggaggaaggaactggggcttgaatggggtcttttgcctgcctcctcttgcactacgccc

SEQ ID NO: 565654 - DNA, 120 bp, Artificial Sequence
  ENSG00000170099_14 (sequence is synthesized)
aagtctttgattctgtaaagcacatacacatctgggaatctccatcttcaccacaatcctgctgggcacatggacacagccctttgacctggcaagcaccagggaggagaacttctatgt

SEQ ID NO: 565655 - DNA, 120 bp, Artificial Sequence
  ENSG00000170100_0 (sequence is synthesized)
acagctgatccggttcttgcggcggtgcgtgctggcgccggagagttccgcgcgtgtcctcgggctgtccgcggggaagctggtccgggagtgggcgcccgcccgcctgcctcgcgcctt

SEQ ID NO: 565656 - DNA, 120 bp, Artificial Sequence
  ENSG00000170100_1 (sequence is synthesized)
gcgcccccggcaccgcttccagaagggaaagtcgccgccgctcgcggtagacccgggcagcgcttccattccgcggagctggaaatagggatccagccatccgtgggtcaggaggaatgg

SEQ ID NO: 565657 - DNA, 120 bp, Artificial Sequence
  ENSG00000170100_2 (sequence is synthesized)
agactgtaccttccacatagattcacaagctgccctgcagtggccttggcttcaggaaaggagcattcagacgcttccgtcagcctcccaggatggcagcccctgacctggcccacggag

SEQ ID NO: 565658 - DNA, 120 bp, Artificial Sequence
  ENSG00000170100_3 (sequence is synthesized)
gtcatgtttctagggactcagtctgccttcatgaagaacagacacaggcagcagggatggtggctggctggctgataaattgttaccaggacgcggtgacctttgacgacgtggctgtgg

SEQ ID NO: 565659 - DNA, 120 bp, Artificial Sequence
  ENSG00000170100_4 (sequence is synthesized)
acttcacccaggaggaatggactttactggacccatctcagagagacctctacagagatgtgatgctggaaaactacgagaacctggcctcagtagaatggcgacttaaaaccaaagggc

SEQ ID NO: 565660 - DNA, 120 bp, Artificial Sequence
  ENSG00000170100_5 (sequence is synthesized)
cagcacttcggcaggatagatcttggttcagagcatcaaatgagacacagacggcaagaagccacaatggagggcagctctgtgaccgcacgcagtgtggagaagctttcagtgaacact

SEQ ID NO: 565661 - DNA, 120 bp, Artificial Sequence
  ENSG00000170100_6 (sequence is synthesized)
caggcctcagcacacacgtgagaactcaaaatacaggagacagttgtgtgtctaatcattatgaaagggacttttttattccatgccagaaaaccttgttcaaaattggagagcagtttt

SEQ ID NO: 565662 - DNA, 120 bp, Artificial Sequence
  ENSG00000170100_7 (sequence is synthesized)
ccgtgttgggtcagtgtggaaaagccttcagctctactccaaatgttgtttcccagcaagcatgcactcgggacagatctcttgactacagcagctgtggggaagtgttccttaatcagt

SEQ ID NO: 565663 - DNA, 120 bp, Artificial Sequence
  ENSG00000170100_8 (sequence is synthesized)
cataccttcaggcacgtgcgggaagtcacaacggagaagaaacatggaaatggaagccgtgtgggaaagctctaactcactccatgggctgcgccacacctgttgaaatgcatgccgtca

SEQ ID NO: 565664 - DNA, 120 bp, Artificial Sequence
  ENSG00000170100_9 (sequence is synthesized)
ggaatccccacgtatgtagggaatgtgggaaggcctttaggtacactgcctaccttactggtcgcgtgcaagtccaccctggggaaaagccctgtgaattggaagaatgtggaaaagcct

SEQ ID NO: 565665 - DNA, 120 bp, Artificial Sequence
  ENSG00000170100_10 (sequence is synthesized)
cccctgtttcttccagcctaactcaacatgtaagaattcatgctgcagagaaaccctgtgaatgtaaagaatgcggaaaagccttcactggactctcaggtctttctaaacacgtccaaa

SEQ ID NO: 565666 - DNA, 120 bp, Artificial Sequence
  ENSG00000170100_11 (sequence is synthesized)
cagaccctggacagaagccctatgaatgtaaggactgtgggaaagcctgcggtgggttttatctactgaatgagcatggaaaaactcacacgagggagaagccctttgcatgtgtggttt

SEQ ID NO: 565667 - DNA, 120 bp, Artificial Sequence
  ENSG00000170100_12 (sequence is synthesized)
gcggaaaatattttagaaattcctcatgccttaataatcatgttcgaattcacactggaataaaaccctatacatgcagctactgtgggaaggccttcactgtgcgctgtggccttacta

SEQ ID NO: 565668 - DNA, 120 bp, Artificial Sequence
  ENSG00000170100_13 (sequence is synthesized)
gacacgtacgaacacacacgggcgagaagccatacacgtgtaaggactgcgggaaagccttctgtacatcctcgggccttactgagcatgtaaggactcacactggagagaaaccatatg

SEQ ID NO: 565669 - DNA, 120 bp, Artificial Sequence
  ENSG00000170100_14 (sequence is synthesized)
aatgtaaagattgtgggaaatccttcactgtttcttcaagcctgactgagcacgcgagaatccataccggagagaaaccctacgaatgtaagcagtgtggcaaagccttcacagggcgct

SEQ ID NO: 565670 - DNA, 120 bp, Artificial Sequence
  ENSG00000170100_15 (sequence is synthesized)
caggcctcactaaacacatgcggacacacaccggggagaagccctatgaatgtaaggactgtgggaaagcctacaatagggtttatctactgaatgagcatgtgaaaactcacacagagg

SEQ ID NO: 565671 - DNA, 120 bp, Artificial Sequence
  ENSG00000170100_16 (sequence is synthesized)
agaagccctttatatgtacggtatgcaggaaatccttcagaaattcctcgtgcctgaataagcacattcagattcacactggaataaaaccttatgaatgtaaggactgtgggaaaacat

SEQ ID NO: 565672 - DNA, 120 bp, Artificial Sequence
  ENSG00000170100_17 (sequence is synthesized)
tcactgtttcttcgagcctaaccgagcacatacgaactcacactggagagaaaccttatgaatgtaaagtatgcggaaaggccttcaccacatcctcacaccttatcgtgcacataagaa

SEQ ID NO: 565673 - DNA, 120 bp, Artificial Sequence
  ENSG00000170100_18 (sequence is synthesized)
cccacaccggtgagaaaccctacatatgtaaggagtgtgggaaagcctttgcttcctcctcacaccttatcgaacacagaaggactcacacaggagagaaaccttacatatgtaacgagt

SEQ ID NO: 565674 - DNA, 120 bp, Artificial Sequence
  ENSG00000170100_19 (sequence is synthesized)
gtgggaaagccttccgtgcctcctctcacctgcataaacatggaagaattcacactgggcagaaaccctataaatgtaaggaatgtgggaaagcatacaataggttttatctactaaaag

SEQ ID NO: 565675 - DNA, 120 bp, Artificial Sequence
  ENSG00000170100_20 (sequence is synthesized)
aacatttaaaaacttacactgaagagcaggtttttgtatgtaaggactgtggaaaatcttttaagaattcctcatgccttaaccatcacactcaaattcacactgatgagaaacctttct

SEQ ID NO: 565676 - DNA, 120 bp, Artificial Sequence
  ENSG00000170100_21 (sequence is synthesized)
aatgtaaagaatgtggggaagctgtcagctacactcattcacgttgaagacatgaaagacctctcgttctccagatgtccatgacttgaggaatgtggctaggcaatcagcatctcatca

SEQ ID NO: 565677 - DNA, 120 bp, Artificial Sequence
  ENSG00000170100_22 (sequence is synthesized)
caacccggcaggcaggaactcaccctggagccctatgcagcagacacagagaaagccctcagtgttctctaaggtcttgctgaatatggatggtatccagtagagagaactctattgatg

SEQ ID NO: 565678 - DNA, 120 bp, Artificial Sequence
  ENSG00000170100_23 (sequence is synthesized)
tgtgatatgcagcagcattgttgctgttctgctcagtactttgatgatcccttgtgatctcacaatgaagaaaaaccttaggagggtgagaattgttgggaagtcattttttacattaca

SEQ ID NO: 565679 - DNA, 120 bp, Artificial Sequence
  ENSG00000170100_24 (sequence is synthesized)
tctttcctcaccctttagtaaacgtggtgattgacacttgaagtgttgtgaatgtatggaagatagcagtcgcttccctgtgttctaaaaccttgtgggctaacttgagacatgtctttc

SEQ ID NO: 565680 - DNA, 120 bp, Artificial Sequence
  ENSG00000170100_25 (sequence is synthesized)
tgggggttctgtagacgtattttgaatctttatgatgctgcactgatcattcttggagtgaggactctgttccctgtagaaatcctccagtctggttgctacagtgtccacgtcgcagcc

SEQ ID NO: 565681 - DNA, 120 bp, Artificial Sequence
  ENSG00000170100_26 (sequence is synthesized)
tggctaacagtaggccttgaggactcagatgtgatcctgtgtgagcagtgtaggctctggttggttagtcttgaggatccagatgtgattctttgagcagcgtaggctctggttggttag

SEQ ID NO: 565682 - DNA, 120 bp, Artificial Sequence
  ENSG00000170100_27 (sequence is synthesized)
tcttgaggatccagatgtgattctgtgagcagtgtaagctctggttggttagtcttcaggatccagatgtgatcttgtgtgagcactgtaggctctggttggttagtcttgaggatccag

SEQ ID NO: 565683 - DNA, 120 bp, Artificial Sequence
  ENSG00000170100_28 (sequence is synthesized)
atgtgattctgtgagcagtgtaggctctggttggttagtcttgaggatgcagatgtgattctgtgtgagcagcgtaggctctggttggttagtcttgaggatccagatgtgattctgtga

SEQ ID NO: 565684 - DNA, 120 bp, Artificial Sequence
  ENSG00000170100_29 (sequence is synthesized)
gcagcataggctctggttggttagtcttgaggatccagatgtgattctgtgagcagcgtaggctctggttggttagtcttgaggatccagatgtgattctgtgagcagcgtaggctctgc

SEQ ID NO: 565685 - DNA, 120 bp, Artificial Sequence
  ENSG00000170100_30 (sequence is synthesized)
ttggttagtcttgaggatccagatgtgatcctgcgtgagcagcgtaggctctggttggttagtcttgaggatccagatgtgatcctgtgtgagcagcgtaggctctggttggttagtctt

SEQ ID NO: 565686 - DNA, 120 bp, Artificial Sequence
  ENSG00000170100_31 (sequence is synthesized)
gaggatccagatgtgattctgtgagcagtgtaggctctggttggttagtcttaggtatccagatgtgatcctgtgtgagcagcgtaggctctggttggttagtcttgaggatccagatgt

SEQ ID NO: 565687 - DNA, 120 bp, Artificial Sequence
  ENSG00000170100_32 (sequence is synthesized)
gatcctgtgtgagcagcgtaggctctggttggttagtgttgaggatccagatgtgattctgtgagcagtgtaggctctggttggttagtcttgaggatccagatgtgatcctgtgtgagc

SEQ ID NO: 565688 - DNA, 120 bp, Artificial Sequence
  ENSG00000170100_33 (sequence is synthesized)
agtgtaggctctggttggttagtcttaagtatccagatgggatcctgtatgagcagcgtaggctctggttggttagtcatgctcttaggcatgacccacctgtagggtcccacactggcc

SEQ ID NO: 565689 - DNA, 120 bp, Artificial Sequence
  ENSG00000170100_34 (sequence is synthesized)
aatgttggggcataacacagctctacattttatgaaaatgcccttgttcctctcccatacctgatcccttcagataaaacaccagggtgcaaggaggggcagagtggagaggggcgaggt

SEQ ID NO: 565690 - DNA, 120 bp, Artificial Sequence
  ENSG00000170100_35 (sequence is synthesized)
ctgtaccctgagatgcccccgtttcatggccgtggagggagaaccaccaccccccacgtggggaggagggaattcctgtaccttaggcagtgccggacgggtgagagccctgagtgtcct

SEQ ID NO: 565691 - DNA, 120 bp, Artificial Sequence
  ENSG00000170100_36 (sequence is synthesized)
tgttgacctccagatcctcttcacagcatgcagagcggtcctggcagctgctgcaatctggcactcctggggcagctgctgcgatccggcactgatgaggcagctgctgtgatccggcat

SEQ ID NO: 565692 - DNA, 120 bp, Artificial Sequence
  ENSG00000170100_37 (sequence is synthesized)
tcatggggcagctgctgcgacccggcactcctggggcagctgctgcttgtgtgtgtgctgctcctttgtgtaccatgaaaacagaccagggacacggctggtcctgatgttctgtggcgc

SEQ ID NO: 565693 - DNA, 120 bp, Artificial Sequence
  ENSG00000170100_38 (sequence is synthesized)
ttggccctgtcactggcgcttcttggatgaggcccttaaacacacacagtggcagagcaagacttcatgtgagtgacacgaatgtgtgtcctctggctgcagcaatcctgggttatgttt

SEQ ID NO: 565694 - DNA, 120 bp, Artificial Sequence
  ENSG00000170100_39 (sequence is synthesized)
tttgtggccatcagggcagcagctgcttggtgactgtttctgtggtgttgaatccccacggtataaaggtaatctacaacgaggtgaacaataaatcctggatggacagacccgtgcacc

SEQ ID NO: 565695 - DNA, 120 bp, Artificial Sequence
  ENSG00000170100_40 (sequence is synthesized)
ttcatattacgtgtttgaaatcctggatggacagacccgtccaccttcatgtcacgtgtttgaaattctggatggacagacccatgcaccttcatgttacgtgtttaaaattctggatgg

SEQ ID NO: 565696 - DNA, 120 bp, Artificial Sequence
  ENSG00000170100_41 (sequence is synthesized)
acagacccgtgcaccttcctgtcacatgtttgaaatcctggatggacagacctgtgcaccttcatgtcacgtgtttgaaattctggatggacagagccatgcaccttcatgttacgtgtt

SEQ ID NO: 565697 - DNA, 120 bp, Artificial Sequence
  ENSG00000170100_42 (sequence is synthesized)
tgttgtggagaggagtgggttgtgccatgtttctcttgtgggattgagtgtggctatttagctcatctgttgccacctttaattgttggcattgacactaaaggtcatcagattagcggg

SEQ ID NO: 565698 - DNA, 120 bp, Artificial Sequence
  ENSG00000170100_43 (sequence is synthesized)
aaccagcttgtggggttgtagcggctcctggactggtctcaggtgacatcctgattggctgaaataagtcctgcaggtctctgctagaactgactcacagttgcctgagtccagaacttg

SEQ ID NO: 565699 - DNA, 120 bp, Artificial Sequence
  ENSG00000170100_44 (sequence is synthesized)
tgggtcacaggtgacgccaggactgcatcatcctggtgctcggactcctagtgacagcatcctgagcaggcggtagcccagacaccaccctgcctgatatgcccactgttggtggagaca

SEQ ID NO: 565700 - DNA, 120 bp, Artificial Sequence
  ENSG00000170100_45 (sequence is synthesized)
tggactggggttcctaaggcacaaatttgatatttgagattctgtgatgagctgagcttgctgtccgctaacccgtgatcctggtgtaatctcaaccaaaacccacagccctgcacccct

SEQ ID NO: 565701 - DNA, 120 bp, Artificial Sequence
  ENSG00000170100_46 (sequence is synthesized)
tgcctgtaggaaaatctggtaggagttagtagtgtctgtgaagtctcaataattgataccaaaatgttttgtttcaccaggaggtgcccgcctcctatcagcctctgggaaggccactgt

SEQ ID NO: 565702 - DNA, 120 bp, Artificial Sequence
  ENSG00000170100_47 (sequence is synthesized)
ctccccagtgccttctcctccgctgcagctttccatctcatctccttactcccttgacttggcttcacacagagcctcttctttacacatactaactgtttgcttcataccctcctgcag

SEQ ID NO: 565703 - DNA, 120 bp, Artificial Sequence
  ENSG00000170100_48 (sequence is synthesized)
cagaactacagacctgccatcctgataattgtcaaactcatccctttatcacctttataactcctcaaggatattatcattggacccccaacatttcaaagtgattttcttgagtaatac

SEQ ID NO: 565704 - DNA, 120 bp, Artificial Sequence
  ENSG00000170100_49 (sequence is synthesized)
catatgctgtgatgtggatgtgattggtttgccctcatcaagtctcatgttgagctttgaccctcagtgtggcagtgctgggagggggcctggtgggggtttgggtcatgggggcaccct

SEQ ID NO: 565705 - DNA, 120 bp, Artificial Sequence
  ENSG00000170100_50 (sequence is synthesized)
cctgaatggttggataccattcattcttgctgtgtcaagcctggattggtttgtaggggaatgcactagttactgggagcatggttgtgataaagccaagccgtccctcgggtttggctc

SEQ ID NO: 565706 - DNA, 120 bp, Artificial Sequence
  ENSG00000170100_51 (sequence is synthesized)
actgcccttgaccttctctgccctgtttgacacagcaaatagtcctcaccagaagcaggtcagatgccagtgctatgcttgcacagcctgctgaaccatgagccaaataagcctctttct

SEQ ID NO: 565707 - DNA, 120 bp, Artificial Sequence
  ENSG00000170100_52 (sequence is synthesized)
aagttacccacagcctcagatatgtagcaacacagacagactaagacaccaagcatgatggaaaactgggttatgggcaggactgcaagtactggttaggcagatacctgtatttctctt

SEQ ID NO: 565708 - DNA, 120 bp, Artificial Sequence
  ENSG00000170100_53 (sequence is synthesized)
cctaactctcagaacgtgttctgtgtcacttagggcaacttatgccctcctgtgtgaaaatctccactcccaatgtctgagggttcctcagagtaagataaaatattaaaggaccaattg

SEQ ID NO: 565709 - DNA, 120 bp, Artificial Sequence
  ENSG00000170100_54 (sequence is synthesized)
tattaattatgttttttttttttttgttagggtacattttcatcctggggtcttgctgtgggggctagaccgtccctctcaggctagatcattcctaaagatggtaaacaacttgctgga

SEQ ID NO: 565710 - DNA, 120 bp, Artificial Sequence
  ENSG00000170100_55 (sequence is synthesized)
aacatgcactgcatatacaaatcaactcactgcatatgcacatcaactcactgcatatgcaactcaactcacaccgtatatgcaactcaactcacaccgtgtatgcaaatcaactcgcac

SEQ ID NO: 565711 - DNA, 120 bp, Artificial Sequence
  ENSG00000170100_56 (sequence is synthesized)
tgcgtatgcaactcaactcgcactgcgtatgcaactcaactcgcactgcgtatgcgaatccactcactgcctatgcaactcagctcgctctgcgtatgcaactgagctcgctctgcgtat

SEQ ID NO: 565712 - DNA, 120 bp, Artificial Sequence
  ENSG00000170100_57 (sequence is synthesized)
gcaacccagctcgctctgcgtatgcaactcaagtcgcactgcgtatgcaactcagctcgctctgcgtatgcaactcagctcgcactgcgtatgcaactcagctcgcactgcgtatgcaag

SEQ ID NO: 565713 - DNA, 120 bp, Artificial Sequence
  ENSG00000170100_58 (sequence is synthesized)
tcagctcgctctgcgtatgcaactcagctcgctctgcgtatgcaactcagctcgcactgcgtatgcaactcagctcgcactgcgtatgcaactcagctcgctctgcgtatgcaactcagc

SEQ ID NO: 565714 - DNA, 120 bp, Artificial Sequence
  ENSG00000170100_59 (sequence is synthesized)
tcgctctgcgtatgcaactcagctcgctctgcgtatgcaactcagctcgcactgcgtatgcaactcagctcgctctgcgtatgcaactcagctcgctctgcgtatgcaactcagctcgca

SEQ ID NO: 565715 - DNA, 120 bp, Artificial Sequence
  ENSG00000170100_60 (sequence is synthesized)
ctgcgtatgcaactcgcactgcgtatgcaactcaactcgcactgcgtatgcaactcaactcgcactgcgtatgcaactcaactcgcactgcgtgtgcaactcaactcgcactgcgtgtgc

SEQ ID NO: 565716 - DNA, 120 bp, Artificial Sequence
  ENSG00000170100_61 (sequence is synthesized)
aactcaactcacactgcgtatgcaactcagcttgctctgtgtatgcaactcaactcgcactgcgtatgcaaatcaactcactgcatatgcaactcagctcgcactgcatatgcaacgcaa

SEQ ID NO: 565717 - DNA, 120 bp, Artificial Sequence
  ENSG00000170100_62 (sequence is synthesized)
ctcaactcatactgcatatgcaactcaactcacactgtatgcaactcagctcgctctgcatatgcaattcaactcgcactgcgtatgcaaatcaacttactgcatatgcaactcaactca

SEQ ID NO: 565718 - DNA, 120 bp, Artificial Sequence
  ENSG00000170100_63 (sequence is synthesized)
ctgcgtatgcaactcaactcgcactgcatatgcaactcaactcgcactgcgtatgcaactcaactcgcactgcgtatgcaactcagctcgcactgcgtatgcaactcaactgttgcaagt

SEQ ID NO: 565719 - DNA, 120 bp, Artificial Sequence
  ENSG00000170100_64 (sequence is synthesized)
acttatttccggccacttcctttttctaactaccacaccaagccagtatttctcctccctgaagtcagcccaggatgaggcactagacagcaggacatgctgtatgcccttgggcctgct

SEQ ID NO: 565720 - DNA, 120 bp, Artificial Sequence
  ENSG00000170100_65 (sequence is synthesized)
ggaagtatgcagactagccagccccagacttcatcctgccctgtcctgcctttcctgtgaaaaccctgtggcctctgcctcccctggctctgacttctgcctcctgcccagctctgcagc

SEQ ID NO: 565721 - DNA, 120 bp, Artificial Sequence
  ENSG00000170100_66 (sequence is synthesized)
tccccttgggccctgcctggagtgatgtgccgccttctcttgacactgtgagtgataaactttccatgtcaggaacctgtgtgtgtcactcactcaccttgacgagtccgcgtctaggcc

SEQ ID NO: 565722 - DNA, 120 bp, Artificial Sequence
  ENSG00000170100_67 (sequence is synthesized)
ccaccagtggtgtggttttcctcatagtctctctacctaagcacatgtctgtgacaaggtcttacccagcccagggattcttgaactatctgtaggaactgccatgttgactcctgggca

SEQ ID NO: 565723 - DNA, 120 bp, Artificial Sequence
  ENSG00000170100_68 (sequence is synthesized)
gttttattctttctctctactcgttcaaccttcttagggagtgacgttttttccaaagtggttgtgaaacagcatctccttggggtgttggtttgcacttctcttcattactgatagtat

SEQ ID NO: 565724 - DNA, 120 bp, Artificial Sequence
  ENSG00000170100_69 (sequence is synthesized)
gaacatggttttgcttacgctggctattttcctttttggatgaagtacctggtcttgttttttcctggtttgtttgatctttgttcttttttagaaatagtgaggctgttgtgaggtgag

SEQ ID NO: 565725 - DNA, 120 bp, Artificial Sequence
  ENSG00000170100_70 (sequence is synthesized)
gaggtgagtcaccacttgtgacttagaagattgcagtggtttccacttcacctgtttccacttttgtgatgatgccttaaggaaaaagattgtgccaggtgtggtggctcaggcctgtaa

SEQ ID NO: 565726 - DNA, 68 bp, Artificial Sequence
  ENSG00000170100_71 (sequence is synthesized)
agaaaaattggctagatgtggtggtgcatgggaagcacagattgcagtgaaccgagatcgcgccactg

SEQ ID NO: 565727 - DNA, 120 bp, Artificial Sequence
  ENSG00000170100_72 (sequence is synthesized)
ctcaaaaaaaaaggaaaaatatttcttaattttggcatactcaaatttatacaacctttcctttatcttcatcagaaatttcttttctcctaaggccttaaatatgctgtactattttgg

SEQ ID NO: 565728 - DNA, 120 bp, Artificial Sequence
  ENSG00000170100_73 (sequence is synthesized)
cttccacagtttctatgttttatcccaagttgcttaatccatttggagttgatttttgttgaccgtatctgtagagtgtaatgtcatttttcccactatggacataaaaatttttgcaag

SEQ ID NO: 565729 - DNA, 120 bp, Artificial Sequence
  ENSG00000170100_74 (sequence is synthesized)
gcctcttttttttaatgaagaaaagaggtttattttgttcacaattctgaaggcctggagggtcccagaagcttggcaccagcacccactaggctccagatcggggcctcatgctgactt

SEQ ID NO: 565730 - DNA, 120 bp, Artificial Sequence
  ENSG00000170100_75 (sequence is synthesized)
ccgttttcacacaacgagtgggaaacaggtgtcctaacactgtgagagaaaaaatccgaaagtttagtttttcccattcgcttgccctggcctccaggcagtcctgcagcagcaaacaca

SEQ ID NO: 565731 - DNA, 120 bp, Artificial Sequence
  ENSG00000170100_76 (sequence is synthesized)
tcatcagccttaggagctggcctgtgaggttgaccactctgtaggtggacgagcctcgcccgagaagagacatgagcagttctgcgtaggctttaagacagaatcaacatggaaagcacg

SEQ ID NO: 565732 - DNA, 120 bp, Artificial Sequence
  ENSG00000170100_77 (sequence is synthesized)
acccacatggtttcaatagaacttgcctcctgaacctgactaggttactcgcctgatgaaccagtatctccatcacccgtgggactgacagacccagagtgtcataacctaaaattcaga

SEQ ID NO: 565733 - DNA, 120 bp, Artificial Sequence
  ENSG00000170100_78 (sequence is synthesized)
agtgtagactataatcttaaattattcagcatatgtgcaacagccttggggagcagtgttatgataccaaatggctaacattcatgacctcagtatcctggaagaaaaggagaaagtgtg

SEQ ID NO: 565734 - DNA, 120 bp, Artificial Sequence
  ENSG00000170100_79 (sequence is synthesized)
atgtagtaaaaccacttgaaaaaataatgatgaaacatttctcatatttggtgtaagataaaaacttaagtttgaagaggttccatgagccccagacaggataaacctaaagaaaaccaa

SEQ ID NO: 565735 - DNA, 86 bp, Artificial Sequence
  ENSG00000170100_80 (sequence is synthesized)
gaaagaaaagaaaaccaagcccctgccaccacgaagctgccgaaagctacagagtgaaagtcttggaaggaggctgagaaagtgga

SEQ ID NO: 565736 - DNA, 120 bp, Artificial Sequence
  ENSG00000170100_81 (sequence is synthesized)
ctacagagtgaaagtcttggaaggaggctgagaaagtggacacagtgcttccagaagaacaattcaattgaccgggtttctcgtcggaagccatagaggccaacaggaaatgtaggagca

SEQ ID NO: 565737 - DNA, 120 bp, Artificial Sequence
  ENSG00000170100_82 (sequence is synthesized)
tttttcaagttctgaaataaaaagaaatgccaacccagattgctatatccaacaaaatatcctttaggaatgaaacagaagtaacgatgaggcaatacaaagaattgcctgcagacctgg

SEQ ID NO: 565738 - DNA, 120 bp, Artificial Sequence
  ENSG00000170100_83 (sequence is synthesized)
tttaaataaatggttacagaaaactcttaaggaaacctggaacaaaggaaaagcaatagaagagtaaatacctgagtaaatagatcagatcattctactcttgagttctttaaaatatat

SEQ ID NO: 565739 - DNA, 120 bp, Artificial Sequence
  ENSG00000170100_84 (sequence is synthesized)
attattgtcaaaagcaaaaattatcacatggggtttcaactgatgtatatttaatacataagacaactacaacatgaaggtgaggggcaacgtggctggacggcgtggaggttccgtgct

SEQ ID NO: 565740 - DNA, 120 bp, Artificial Sequence
  ENSG00000170100_85 (sequence is synthesized)
gtggaggttccgtgctccatttcagtggcaaaataccattccagaaggactggaaaagctaagtctgtatattttaattactaaagaagtgtacagctgggtgtggtggctcacgcctgt

SEQ ID NO: 565741 - DNA, 61 bp, Artificial Sequence
  ENSG00000170100_86 (sequence is synthesized)
atacaaaaattagctgtgtgtggttgggggcacctgtaatctcagcttctcaggaggctga

SEQ ID NO: 565742 - DNA, 120 bp, Artificial Sequence
  ENSG00000170100_87 (sequence is synthesized)
aaaggaaatgtagttcctgttcacgggtaggtttgtcatcccctgcctgagcctcttccatcgatgtctctttccctgtgtacaggacatcacctgttccaacccagtgtgatctattgg

SEQ ID NO: 565743 - DNA, 80 bp, Artificial Sequence
  ENSG00000170113_0 (sequence is synthesized)
cggccggggagggggcgcgtagcccgagccccgccgccgtgtcgctcggcctgggcgtggccgtcgtgtcgagcctggtg

SEQ ID NO: 565744 - DNA, 120 bp, Artificial Sequence
  ENSG00000170113_1 (sequence is synthesized)
cgtgtcgagcctggtgaacgggtccacgttcgtgctacagaagaagggcatcgtgcgtgccaagcggcgaggtacttcctatttaacagacattgtgtggtgggctggcacaatcgcaat

SEQ ID NO: 565745 - DNA, 120 bp, Artificial Sequence
  ENSG00000170113_2 (sequence is synthesized)
ggctgttggccagattggaaacttcctggcttacacggcggtccccacggtcctggtaacccccctgggcgcccttggagtaccgttcgggtccattttagcttcctatctcctgaagga

SEQ ID NO: 565746 - DNA, 120 bp, Artificial Sequence
  ENSG00000170113_3 (sequence is synthesized)
aaagctcaacatcttgggcaagttggggtgcctgctaagctgtgcaggctccgtcgtgctgattatccactccccaaagtctgagagtgtgacaactcaggctgagctggaggaaaagct

SEQ ID NO: 565747 - DNA, 120 bp, Artificial Sequence
  ENSG00000170113_4 (sequence is synthesized)
gaccaatccagtgtttgtgggctacctgtgcatcgtgctgctcatgctgctgctgctcatcttctggatcgcgccggcccatgggcccaccaacatcatggtctacatcagcatctgctc

SEQ ID NO: 565748 - DNA, 120 bp, Artificial Sequence
  ENSG00000170113_5 (sequence is synthesized)
cttgctgggcagtttcaccgtgccttccaccaagggcatcgggctggcggcccaagacatcttgcataacaacccgtccagtcagagagccctctgcctgtgcctggtactcctggccgt

SEQ ID NO: 565749 - DNA, 120 bp, Artificial Sequence
  ENSG00000170113_6 (sequence is synthesized)
gctcggctgcagcatcatcgtccagttcaggtacatcaacaaggcgctggagtgcttcgactcctcggtgttcggggccatctactacgtcgtgtttaccacgctggtcctgctggcctc

SEQ ID NO: 565750 - DNA, 120 bp, Artificial Sequence
  ENSG00000170113_7 (sequence is synthesized)
agccatcctcttccgggagtggagcaacgtgggcctggtggacttcttggggatggcctgtggattcacgaccgtctccgtggggattgtccttatacaggtgttcaaagagttcaattt

SEQ ID NO: 565751 - DNA, 120 bp, Artificial Sequence
  ENSG00000170113_8 (sequence is synthesized)
caaccttggggagatgaacaaatctaatatgaaaacagactagattgcaataggagcttggatggttcgaggaataggcattggaggtggtttctggccgtgattggatgtgaagtagaa

SEQ ID NO: 565752 - DNA, 120 bp, Artificial Sequence
  ENSG00000170113_9 (sequence is synthesized)
gaggtcctcgatcatggtgttagaattgactggatagtaacaggtggtctggtggatagcggggagcatggctcagcaccagagcagaggcccagccagccctctgcagcccaaacgtcc

SEQ ID NO: 565753 - DNA, 120 bp, Artificial Sequence
  ENSG00000170113_10 (sequence is synthesized)
ccaacggttgcctggcaccatctctctctgatgagacgaatctcattttcatttccattaacctggaagctttcatgaatattctcttcttttaaaacattttaacattatttaaacaga

SEQ ID NO: 565754 - DNA, 120 bp, Artificial Sequence
  ENSG00000170113_11 (sequence is synthesized)
aaaagatgggctctttctggttagttgttacatgatagcagagatatttttacttagattactttgggaatgagagattgttgtcttgaactctggcactgtacagtgaatgtgtctgta

SEQ ID NO: 565755 - DNA, 120 bp, Artificial Sequence
  ENSG00000170113_12 (sequence is synthesized)
gttgtgttagtttgcattaagcatgtataacattcaagtatgtcatccaaataagaggcatatacattgaattgtttttaatcctctgacaagttgactcttcgacccccacccccaccc

SEQ ID NO: 565756 - DNA, 120 bp, Artificial Sequence
  ENSG00000170113_13 (sequence is synthesized)
aagacattttaatagtaaatagagagagagagaagagttaatgaacatgaggtagtgttccactggcaggatgacttttcaatagctcaaatcaatttcagtgcctttatcacttgaatt

SEQ ID NO: 565757 - DNA, 120 bp, Artificial Sequence
  ENSG00000170113_14 (sequence is synthesized)
attaacttaatttgactcttaatgtgtatatgttcttagattagaataatgcaacttcgagtatgctttaatatttcaatattcaagttacaaatgtataaggcagttagaaataataca

SEQ ID NO: 565758 - DNA, 120 bp, Artificial Sequence
  ENSG00000170113_15 (sequence is synthesized)
gtcacatgtcacttaatgatagggaaacattctgagaaatgcattgtaaggtgactttattgtgtgaacatcatggagtgcacttatacaaacctagatgggacacctatgacccaccca

SEQ ID NO: 565759 - DNA, 120 bp, Artificial Sequence
  ENSG00000170113_16 (sequence is synthesized)
ggccagatggtacagcctgttgctcctgggccacacacctgtacagcatgtgaccgcactgaataccgcaggcaattgtaacacagtggtgagtatttgtgtttacaaacataggaaagg

SEQ ID NO: 565760 - DNA, 120 bp, Artificial Sequence
  ENSG00000170113_17 (sequence is synthesized)
tacagtaaaactatggtattacaatgttatgggaccaccgtcatgtaagtggtatgtctttgacagaaacatggttacgtggttcatgactgtatattcactggaagatagtcaagacta

SEQ ID NO: 565761 - DNA, 120 bp, Artificial Sequence
  ENSG00000170113_18 (sequence is synthesized)
aagacacattagagcaaattgacccctttaacatgtgattattgtccaattaaagacagttgatttaagtagcatgaggtattattttatttgtattcgatctgtgttacctgggatcca

SEQ ID NO: 565762 - DNA, 120 bp, Artificial Sequence
  ENSG00000170113_19 (sequence is synthesized)
gtatcaaatatatccacattctttatcagcaagcattcatggccattcagaagaaataaattaggtaacttgataataaggctaagtgggagagtacctgttcaatagctcatatatcga

SEQ ID NO: 565763 - DNA, 120 bp, Artificial Sequence
  ENSG00000170113_20 (sequence is synthesized)
gtaccctgtcatacaggaacaagttaaaggacacaattgaggttaggctagcttctacaaattgcaatatgcagtttttgaaagattttctaacaaaaagccaataaatgtagccatctc

SEQ ID NO: 565764 - DNA, 120 bp, Artificial Sequence
  ENSG00000170113_21 (sequence is synthesized)
cttgttgtttgcaatggcagagcatcctagagttcctcagctaacctctcattatgtgtcttaaatgcaaaagagccattaattatgccagtatttgaatcaaagaggtcattctctgtc

SEQ ID NO: 565765 - DNA, 120 bp, Artificial Sequence
  ENSG00000170113_22 (sequence is synthesized)
tatagtgttcccatccatgtgttccaaatgggagcatagcatgaagtgatgcacatatttcaccacggtatcatgtacttcatggccagtgttttatctcagcagggaactacgccaagt

SEQ ID NO: 565766 - DNA, 120 bp, Artificial Sequence
  ENSG00000170113_23 (sequence is synthesized)
tgaaagatggggttgggtaaagtagattaggtgaagtagaacataaaattgaatagtacccaattaaagttcctcagtaagaaaaaaaatgtgtttttgtaggcaaaaagaacatttcta

SEQ ID NO: 565767 - DNA, 120 bp, Artificial Sequence
  ENSG00000170113_24 (sequence is synthesized)
aagtctcaaggaatagcttcctaaagtgttgagtaaagaggctaaataaaatgagactagtttaatatagagagaaaaatacctttatggagtaaacgtgtacatgatgatcatgggttg

SEQ ID NO: 565768 - DNA, 120 bp, Artificial Sequence
  ENSG00000170113_25 (sequence is synthesized)
tcagtgatttgtgaactgagagcagcaacaacattattttttaaaaatcttaaatcctctcaatggatggttaacaaatgctcaaagtccattactctttttattggctcttgcaggttt

SEQ ID NO: 565769 - DNA, 120 bp, Artificial Sequence
  ENSG00000170113_26 (sequence is synthesized)
tgtgttttatcatcagtgcttttagaaatgcaggccttaacttactgaactgaactttctgaaaacgtaatgtagcagtatcaatatacttttgggcataaaaatagtttcctaggtaag

SEQ ID NO: 565770 - DNA, 120 bp, Artificial Sequence
  ENSG00000170113_27 (sequence is synthesized)
tcatgtttgtgttgctacagcttttgtgggaaatttagtttaaaggcagctcttggtgtaccttagtatattttaatccacaattataccattgatactgagaggtgatacccgatgatc

SEQ ID NO: 565771 - DNA, 120 bp, Artificial Sequence
  ENSG00000170113_28 (sequence is synthesized)
ttctctataatattcttagagtaaaacaaaatctcaaaagtattaatagctcttctacccttgaaggtgactggtcctgggacagttagaatctttcaggtttacctctgttcagcagat

SEQ ID NO: 565772 - DNA, 120 bp, Artificial Sequence
  ENSG00000170113_29 (sequence is synthesized)
acttcagtaggatacatagcttttcttccagtgaaacaaagttcatatcatccattgtttttcaagcacgtgacaccagcctcaaagtaaatgacatgaccagtggttgaacagtctaat

SEQ ID NO: 565773 - DNA, 120 bp, Artificial Sequence
  ENSG00000170113_30 (sequence is synthesized)
tttcaaatttaatatagagcatataacttctgatttgatagtatttattttaaaaaattatgttttcatcattcatttgaaaatgaaaaagccccaaagtgagaactttgggggagggcc

SEQ ID NO: 565774 - DNA, 120 bp, Artificial Sequence
  ENSG00000170113_31 (sequence is synthesized)
tagaacatggatagatctcttagtggtctttccaaaagtacatgtacttgaaatattttcattatcatactattctttgaaaaaaaagatgcttactgtatacttgttttcaagcatcct

SEQ ID NO: 565775 - DNA, 120 bp, Artificial Sequence
  ENSG00000170113_32 (sequence is synthesized)
ctaaaatcaaaggttttgatcacaatatgcagatttctcttgatagatacttaaataggctatttctctcctcttcttgggcaatgccttgttttctcctctgaatatttgcatttgaaa

SEQ ID NO: 565776 - DNA, 120 bp, Artificial Sequence
  ENSG00000170113_33 (sequence is synthesized)
ggattgcttcctgttctgctcattgatcaaaggtagggccaattaaggattctaaccctaacccagcaccacaaagcccccctggagcatcttcccggctggcaggaccatgccatctct

SEQ ID NO: 565777 - DNA, 120 bp, Artificial Sequence
  ENSG00000170113_34 (sequence is synthesized)
gtggagaaggtgctggggagggaagtccttccagtgccacatggagtgaggccctgcccatgctggggactttggggaggaatttggtattctggtggccttgctcagctctcattgaga

SEQ ID NO: 565778 - DNA, 120 bp, Artificial Sequence
  ENSG00000170113_35 (sequence is synthesized)
tcttttcctatcagaatgttagtgaatatacttcgcagctctttgttcagcaataaggaatattctttcaattcctgctcttcaagccaatttactacacccagttgtctttccagaagt

SEQ ID NO: 565779 - DNA, 120 bp, Artificial Sequence
  ENSG00000170113_36 (sequence is synthesized)
tcatcccagcggtaatatgttggtgtttgttcttctttggatttcacatctgttttctggtagaagtgagcactgttcacttgtgcagtcgtcttattttccttcttcctagatgactca

SEQ ID NO: 565780 - DNA, 120 bp, Artificial Sequence
  ENSG00000170113_37 (sequence is synthesized)
gctctttgtaaatgttgtgctcaacttctaggggccagttctagactttggagatgcagtgtctcccaggtgtgcacggacacctggtccgtggaaacaggtgtgatgggcacaggctgc

SEQ ID NO: 565781 - DNA, 120 bp, Artificial Sequence
  ENSG00000170113_38 (sequence is synthesized)
tgcccttctgtctggtcgggggattcctcttcttcaagctgctcagctaacccagaagaggggagagagtactccggtggttcccagagcccctcccgttgtgccgcttcgacctgacac

SEQ ID NO: 565782 - DNA, 120 bp, Artificial Sequence
  ENSG00000170113_39 (sequence is synthesized)
ctgctcgatgctgacttaggcttcctgccaccaagcaggaaactagaaagagaacatttcagtgtaaggtctgttcccgacagcatggattagcttccgtgttctgaagttgttcttttc

SEQ ID NO: 565783 - DNA, 120 bp, Artificial Sequence
  ENSG00000170113_40 (sequence is synthesized)
atggtgtctgacaccgagggcgttgttcgtccatcaggcgggattggatggagtcttggtgttttgccttctcagggaccaaaaatgtatcattgactccttaacagtgaccttcctccc

SEQ ID NO: 565784 - DNA, 120 bp, Artificial Sequence
  ENSG00000170113_41 (sequence is synthesized)
aaggacatatccgtgttcatttttcataggttttactcatattcataggtagattctgttaatgtgagttggaaagaaaagaccaatttgtacaccagtcacaccacaagacagtttatc

SEQ ID NO: 565785 - DNA, 120 bp, Artificial Sequence
  ENSG00000170113_42 (sequence is synthesized)
atataaaatacctcaattttttgtattcctcatttccacctcacaattgtactggtgatgaattttaagggtctgtcctttagcttataggtgatgtttcacatctggccagattcttat

SEQ ID NO: 565786 - DNA, 120 bp, Artificial Sequence
  ENSG00000170113_43 (sequence is synthesized)
acctccattgtatacttgaaaaggttcagaattacaggaacagcagtgagaatttggcccactaccacgactcatttgtttcattcacattcctcacgtgcaacaacataattatatttt

SEQ ID NO: 565787 - DNA, 120 bp, Artificial Sequence
  ENSG00000170113_44 (sequence is synthesized)
aagaaaatgtaactttgttacatcaaaatatgttgtctagtaaaaagttgatattcagtagaacaaggatcatgtaaataaacatctatttcacatgtacccaaaagcatttaaaaagca

SEQ ID NO: 565788 - DNA, 120 bp, Artificial Sequence
  ENSG00000170113_45 (sequence is synthesized)
gaatccagggcccagagcatgagccagggaggaggatgtttttcttcttttctctatttttccctaaattgtgcaaacataggtgagtctcttaacctttctgtgcctcagtttttctac

SEQ ID NO: 565789 - DNA, 120 bp, Artificial Sequence
  ENSG00000170113_46 (sequence is synthesized)
ctctaaaggggtgggatggttcttcaaattgtttctaaaacaccggcactttcagcagtgttctggtggcctgagatgagagcaccgtgttcagaagtgcctgggagtggcacagtggaa

SEQ ID NO: 565790 - DNA, 120 bp, Artificial Sequence
  ENSG00000170113_47 (sequence is synthesized)
actccgcttgcacggaccatggagtctgctcaggaccatgctgtaggacacacagcctcatgcgctgagaaagcaaaggaagtgctgggtgtaaagtttgcatgattccatgaagcttta

SEQ ID NO: 565791 - DNA, 120 bp, Artificial Sequence
  ENSG00000170113_48 (sequence is synthesized)
gttttcctttttttgttttaaaagaaagggttttatatgttctattgtaaaatatggaaattaaacagggacttcagaaagccgcacagaaagatcaccttccgatggtgtgatgtgctc

SEQ ID NO: 565792 - DNA, 120 bp, Artificial Sequence
  ENSG00000170113_49 (sequence is synthesized)
ctgacattcggccgaggtctgtattctgaaaaagatttaatggcctgtgaaacacgtggattctgttgcactggatttgtaataaatgacgctgaacttcctgcttccaagcagctcaac

SEQ ID NO: 565793 - DNA, 120 bp, Artificial Sequence
  ENSG00000170113_50 (sequence is synthesized)
cctgatgctgaactgacaccaggcgaatgtcagggctcccaaaccactagtgccaaagggtcatgttgaaaagttcagaatatttatttgtcagaatataataattgccccccaccttag

SEQ ID NO: 565794 - DNA, 120 bp, Artificial Sequence
  ENSG00000170113_51 (sequence is synthesized)
tatttttgcactttacagaaatttagatactgtttttcagtggcttgagcgttttgccttttcaaaggataactattattttcttgaaaatggaatataatcatgagaggaagaagatgt

SEQ ID NO: 565795 - DNA, 120 bp, Artificial Sequence
  ENSG00000170113_52 (sequence is synthesized)
aaaaaatgtcaaatgttgattggttgtgtaaaagttttgtcatagacatgtattggggagcttccaattagcatacatagacacatgtgtcagtggccaagacctgcttatattttgctt

SEQ ID NO: 565796 - DNA, 120 bp, Artificial Sequence
  ENSG00000170113_53 (sequence is synthesized)
tatagatgtagtcatagcatgttgttattgcctcatgtaaataaaaaggctattaagttttccagtaatatttattaatctgtatgtgttttaaaataaaataacttatttctagctgaa

SEQ ID NO: 565797 - DNA, 120 bp, Artificial Sequence
  ENSG00000170113_54 (sequence is synthesized)
gcaaagtgccaggaatgatgcaggcagcctgccagatccttggaatcttctggaatgagagaggttgagctgcagcccaaaggcctgtgaaagtgccaggttgaagggtgacggggtgcc

SEQ ID NO: 565798 - DNA, 120 bp, Artificial Sequence
  ENSG00000170113_55 (sequence is synthesized)
cagattcccaccttcaaatttcctggcagcatcctggctgtcatggagcgctgtctccagttcagttttctgacacataaggattcgtatggtatgatcctgggcctttgggagacaaga

SEQ ID NO: 565799 - DNA, 120 bp, Artificial Sequence
  ENSG00000170113_56 (sequence is synthesized)
aaagcaagtgctgaaagagaagcaaagaaaccttctccagaggacaggagggaacttcacaccctccactcacctctagctgcctccttagggcttgctgatgttggtggcttgccttct

SEQ ID NO: 565800 - DNA, 82 bp, Artificial Sequence
  ENSG00000170113_57 (sequence is synthesized)
tgcctccttagggcttgctgatgttggtggcttgccttcttttcctatagaaaagaagaggaagacagagctcttactagac

SEQ ID NO: 565801 - DNA, 120 bp, Artificial Sequence
  ENSG00000170113_58 (sequence is synthesized)
gggaccctgtggggatggggtggaagctgggaggtgagccttcctccccaggctgggagtaggcgagacgagactggggcctctacatctgagtgccccccaaacccagcggtcatgtcg

SEQ ID NO: 565802 - DNA, 120 bp, Artificial Sequence
  ENSG00000170113_59 (sequence is synthesized)
tcatgtcgtgagcaaagaaagaaaccatgttacctctttcagctgagctccgttctgttgtttctgtggggagagtcaaaggaaggtgactgagggtggcccctcgactctattgcccag

SEQ ID NO: 565803 - DNA, 120 bp, Artificial Sequence
  ENSG00000170113_60 (sequence is synthesized)
gccaggaagcggtacgcaggggtcaggaatggattttaagggcaaagttctcagacccaatgggaacacaaactggtcaacttgccttaacgcccaaagaaaaaggatttgggtctttgt

SEQ ID NO: 565804 - DNA, 120 bp, Artificial Sequence
  ENSG00000170113_61 (sequence is synthesized)
tggtttttgcccacagccacagaactgaaagtctgaaactagattctctggaaaagacagtaacataaaccttccgacataagagtgtgagaaaagcccacccttctgccagcttgtgat

SEQ ID NO: 565805 - DNA, 120 bp, Artificial Sequence
  ENSG00000170113_62 (sequence is synthesized)
ggagaaagatgtgttcattcaacaagcattgagcaagcacataggggccggggacagttcttcacagctgggatataggacggaaaaggcagacaggagcccttggccccaaggtttcca

SEQ ID NO: 565806 - DNA, 120 bp, Artificial Sequence
  ENSG00000170113_63 (sequence is synthesized)
ttctagtgaatctttaaatctcagactctcagagcaaacagaaccctctgatactctaactctacctcctcaggaaacggaagcccaaagaggaggggagcttacagcaggccctggact

SEQ ID NO: 565807 - DNA, 79 bp, Artificial Sequence
  ENSG00000170113_64 (sequence is synthesized)
tgtagtttattaaaacgaggaaactagactatgggatcacaagcccagagccccatgtagctgactctagcgccaaggg

SEQ ID NO: 565808 - DNA, 120 bp, Artificial Sequence
  ENSG00000170113_65 (sequence is synthesized)
caagcccagagccccatgtagctgactctagcgccaagggcggaagagaaacgcccagcgccagggctctccttcgatctctgcagcggcgcgccgggcttcgcgctccggtacttccta

SEQ ID NO: 565809 - DNA, 120 bp, Artificial Sequence
  ENSG00000170113_66 (sequence is synthesized)
tgtgtggcgaagtctggtcttttcctttcttagaatccatcactggtctgggcagggctggagtggctgggctagggtggctctgttctttggaagagggtgtcgcgtggcctctcccca

SEQ ID NO: 565810 - DNA, 120 bp, Artificial Sequence
  ENSG00000170113_67 (sequence is synthesized)
ggccctaagcgtgcctttcagttcggatgtccctgcctccccagggcactctccctgctccccttcctcccaggatgagagtgcagaaggacaagttaggagctggtggaggcccctgct

SEQ ID NO: 565811 - DNA, 120 bp, Artificial Sequence
  ENSG00000170122_0 (sequence is synthesized)
cattcatcccgggcttccagctcagcccgccggggccaggtgatccggccgccacatcccctgcgactgaagcacctgctccgccatgaacttgccaagagctgagcgccttcgctccac

SEQ ID NO: 565812 - DNA, 120 bp, Artificial Sequence
  ENSG00000170122_1 (sequence is synthesized)
accgcagcgcagcctccgggactccgatggggaagacggtaaaatcgatgtcctgggagaggaggaagatgaagacgaggaggaggcggcgagccagcagttcctagagcagtcgctcca

SEQ ID NO: 565813 - DNA, 120 bp, Artificial Sequence
  ENSG00000170122_2 (sequence is synthesized)
gccggggctgcaggtggcccggtggggcggggttgcgcttccccgagagcacatcgagggcggcggcggcccgagcgacccctcagagtttggcaccgagttcagggcaccgccaaggtc

SEQ ID NO: 565814 - DNA, 120 bp, Artificial Sequence
  ENSG00000170122_3 (sequence is synthesized)
tgcggcggcctctgaagatgcccggcagccggcaaagcccccctcctcgtacatcgcgctcatcaccatggccatcctgcaaagcccgcacaagcgcctcacgctcagcggcatctgcgc

SEQ ID NO: 565815 - DNA, 120 bp, Artificial Sequence
  ENSG00000170122_4 (sequence is synthesized)
cttcattagtgaccgcttcccctactaccgccgcaagttccccgcctggcagaacagcatccgccacaacctctcgctgaacgactgcttcgtcaagatcccccgcgagccgggccgccc

SEQ ID NO: 565816 - DNA, 120 bp, Artificial Sequence
  ENSG00000170122_5 (sequence is synthesized)
aggcaagggcaactactggagcctggaccccgcctcccaggacatgttcgacaatggcagctttctccggcgtaggaagcgtttccagcgccaccaaccgaccccgggagcccacctgcc

SEQ ID NO: 565817 - DNA, 120 bp, Artificial Sequence
  ENSG00000170122_6 (sequence is synthesized)
ccaccccttccctctacctgctgcacacgccgccctgcacaacccccgcccaggccctctgcttggggcccctgccccgccgcagccagtcccgggggcctaccccaacaccggccccgg

SEQ ID NO: 565818 - DNA, 120 bp, Artificial Sequence
  ENSG00000170122_7 (sequence is synthesized)
gagacgcccttacgctctgctgcacccgcatcctcctcgctacctactgctctcggcccccgcctatgccggggcaccgaagaaagcagaaggcgcggacctggcgaccccggcaccctt

SEQ ID NO: 565819 - DNA, 120 bp, Artificial Sequence
  ENSG00000170122_8 (sequence is synthesized)
gcgtcgccaccgggaggcggatgcatctctttcagcattgagagtatcatgcaaggggtcaggggagcgggtacaggggctgcgcagagtttgtccccgaccgcgtggagctactgcccc

SEQ ID NO: 565820 - DNA, 120 bp, Artificial Sequence
  ENSG00000170122_9 (sequence is synthesized)
ctgctccagcgaccgtcaagcctgtcggacaattttgcagcaacagcagcggcatcaggaggaggactgcgccaacggctgcgctcccaccaagggcgcggtgctgggcgggcacctgtc

SEQ ID NO: 565821 - DNA, 120 bp, Artificial Sequence
  ENSG00000170122_10 (sequence is synthesized)
ggccgcgtcggcgctgctgcggtatcaggcggtggcagagggctctgggctgacatcgctggccgcccctttgggcggagaggggacctcaccagtttttttagtatcgcccacgcccag

SEQ ID NO: 565822 - DNA, 120 bp, Artificial Sequence
  ENSG00000170122_11 (sequence is synthesized)
ttccctggccgagtccgcagggccctcctagagccaggtgggagtggggagcgacccgcagctgctcactccaccttgcgcggcccatactgggcgtgtgcatctgaatcccgctggaga

SEQ ID NO: 565823 - DNA, 120 bp, Artificial Sequence
  ENSG00000170122_12 (sequence is synthesized)
gcaaacacgaacttctgttccctgcaaaatggttagaaagaaacagctggattacgttcctctaaaaaccacctgaacgtaaccttcgcagggcgtcaagtcatcttttcttgccttcgg

SEQ ID NO: 565824 - DNA, 120 bp, Artificial Sequence
  ENSG00000170122_13 (sequence is synthesized)
ttgtggcttctgtggctttcccgatttgcacatgtcctggggtactatgaacgtgagtggggtattttgttctggcattaaaagaaaaacaagcaagcaaacaaaaacacagcctccgat

SEQ ID NO: 565825 - DNA, 120 bp, Artificial Sequence
  ENSG00000170122_14 (sequence is synthesized)
gccaaacatgttcccccttcttcacttccttggaactggaagtattattcctaagtctagtgcaaaatgcttctactctctgtgtcttcctgatagggatgtttaatgtaagtaggatat

SEQ ID NO: 565826 - DNA, 120 bp, Artificial Sequence
  ENSG00000170122_15 (sequence is synthesized)
taatttcagaacattgatttcttatctgtgtgtctgacgtgccatctttaatgttaaaattaaggtgttaaaattaagcctagttatatagacgaaataaaatgctaagtcactacacta

SEQ ID NO: 565827 - DNA, 120 bp, Artificial Sequence
  ENSG00000170128_0 (sequence is synthesized)
agagctgctgccgcctgcgcccagggctgcactccgcgcaggcctcatagccaggccatggcccccacagagccctggagccccagcccggggtcagcgccctgggactactcggggttg

SEQ ID NO: 565828 - DNA, 120 bp, Artificial Sequence
  ENSG00000170128_1 (sequence is synthesized)
gacggcctggaggagctggagctgtgtccggccggggacctgccctacggctacgtctacatccccgcgctctacctggcggccttcgccgtgggcctgctgggcaacgcctttgtggtg

SEQ ID NO: 565829 - DNA, 120 bp, Artificial Sequence
  ENSG00000170128_2 (sequence is synthesized)
ttgtggtgtggctgctggccgggcggcggggcccgcggcggctggtggataccttcgtgctgcacctggcggcagctgacctgggcttcgtgctcacgctgccgctgtgggccgcggcgg

SEQ ID NO: 565830 - DNA, 120 bp, Artificial Sequence
  ENSG00000170128_3 (sequence is synthesized)
ggcggccgctggccgttcggcgatggcctctgcaagctcagcagcttcgcgctggcgggcacgcgctgcgcgggcgcgctgctgctggcgggcatgagcgtggaccgctacctggccgtg

SEQ ID NO: 565831 - DNA, 120 bp, Artificial Sequence
  ENSG00000170128_4 (sequence is synthesized)
agcccctgcctgggggccaggacagccagtgcggcgaggagccctcccacgccttccagggcctcagcttgctgctgctgctgctgaccttcgtgctgcccctggtcgtcaccctcttct

SEQ ID NO: 565832 - DNA, 120 bp, Artificial Sequence
  ENSG00000170128_5 (sequence is synthesized)
gctactgccgcatctcgcgccgcctgcgacggccgccgcacgtgggtcgggcccggaggaactcgctgcgcatcatcttcgccatcgagagcacgtttgtgggctcctggctgcccttca

SEQ ID NO: 565833 - DNA, 120 bp, Artificial Sequence
  ENSG00000170128_6 (sequence is synthesized)
gcgccctgcgggccgtcttccacctggcgcgtctgggggcgctgccgctgccgtgccccctgctgctggcgctgcgctggggcctcaccattgccacctgcctggccttcgtcaacagct

SEQ ID NO: 565834 - DNA, 120 bp, Artificial Sequence
  ENSG00000170128_7 (sequence is synthesized)
gcgccaacccgctcatctacctcctgctggaccgctcattccgagcccgggcgctggacggggcctgcgggcgcaccggccgcctggcgcgaaggatcagctcagcctcctcgctctcca

SEQ ID NO: 565835 - DNA, 120 bp, Artificial Sequence
  ENSG00000170128_8 (sequence is synthesized)
gggacgacagttccgtgttccgttgccgggcccaggccgcgaacactgcctcggcctcctggtagctgccccgggccgctggaggtgggcggcagcggagcatcgagaggaggccagagg

SEQ ID NO: 565836 - DNA, 120 bp, Artificial Sequence
  ENSG00000170142_0 (sequence is synthesized)
attgcctgtttaatagttgctgttgctgcacttccgcttctctcccagcgagagagagacacgagtggccaggcccagccgcagccgcagcagcagccgccgcggcggcacggaggagcc

SEQ ID NO: 565837 - DNA, 120 bp, Artificial Sequence
  ENSG00000170142_1 (sequence is synthesized)
agacacaaagagaggggctgtttgcggggtggggtggggggttcgctatgtcggatgacgattcgagggccagcaccagctcctcctcatcttcgtcttccaaccagcaaaccgagaaag

SEQ ID NO: 565838 - DNA, 120 bp, Artificial Sequence
  ENSG00000170142_2 (sequence is synthesized)
aaacaaacacccccaagaagaaggagagtaaagtcagcatgagcaaaaactccaaactcctctccaccagcgccaagagaattcagaaggagctggcggacatcactttagaccctccac

SEQ ID NO: 565839 - DNA, 120 bp, Artificial Sequence
  ENSG00000170142_3 (sequence is synthesized)
ctaattgcagtgctggtcccaaaggcgataacatctatgaatggagatcaaccattctagggcctccaggatccgtgtatgagggtggtgtattctttctcgatatcacttttacaccag

SEQ ID NO: 565840 - DNA, 120 bp, Artificial Sequence
  ENSG00000170142_4 (sequence is synthesized)
aatatcccttcaagcctccaaaggttacatttcggacaagaatctatcattgtaatattaacagtcaaggtgttatttgcttggacatattgaaagataattggagtccagcactaacca

SEQ ID NO: 565841 - DNA, 120 bp, Artificial Sequence
  ENSG00000170142_5 (sequence is synthesized)
tttctaaagtcctcctttctatctgctcacttcttacagactgtaatcctgccgaccccttggtgggaagtattgccactcagtatatgaccaacagagcagaacatgacagaatggcca

SEQ ID NO: 565842 - DNA, 120 bp, Artificial Sequence
  ENSG00000170142_6 (sequence is synthesized)
gacagtggaccaagagatacgctacataaattggggtttcacaattcttacattatttgtctgtcacagaagagagctgcttatgattttgaaggggtcagggagggtgggagttggtaa

SEQ ID NO: 565843 - DNA, 120 bp, Artificial Sequence
  ENSG00000170142_7 (sequence is synthesized)
ttttaaaattgtcattagttctgcaatattagctgaaatgtagtacagaaaagaatgtacatttagacatttgggttcagttgcttgtagtctgtaaatttaaaacagcttaatttggta

SEQ ID NO: 565844 - DNA, 120 bp, Artificial Sequence
  ENSG00000170142_8 (sequence is synthesized)
caggttacacatatggccatttatgtaaagtccctctaagactacatactttttgtttaaaacaaaattggaatttgttttcccttcttggaagggaacattgatatttaacagagtttt

SEQ ID NO: 565845 - DNA, 120 bp, Artificial Sequence
  ENSG00000170142_9 (sequence is synthesized)
tagagattgtcatctcatatatataaaatggacacgtggctataaaacaccatataagagatgagtagtgcgttttattttatatgccaatctactttgtttaaaaaaggtctgaatcag

SEQ ID NO: 565846 - DNA, 120 bp, Artificial Sequence
  ENSG00000170142_10 (sequence is synthesized)
gacttgtgaaaacctgtagtgaaataccttaagctgttaactaactgtaaggcgtggaataggagttgctcagtggattggttctatgttgtggactacttaagtctgcatttgttactg

SEQ ID NO: 565847 - DNA, 120 bp, Artificial Sequence
  ENSG00000170142_11 (sequence is synthesized)
tgctaataaacaatattaaaaaccacctaataaacactgctgtgttcatttacttttcttttgccttttggttgccattcgcagattcttctgaaatcgataggtatctgcttctaaaac

SEQ ID NO: 565848 - DNA, 120 bp, Artificial Sequence
  ENSG00000170142_12 (sequence is synthesized)
aagctaaaaataatgcatatttagtaggtattagttagttacctatattaggatctgtactttacacagctgtagatgaggtatcctagaaaaggttaaataatctaccccatttaggct

SEQ ID NO: 565849 - DNA, 120 bp, Artificial Sequence
  ENSG00000170142_13 (sequence is synthesized)
tcaaagacgaaccctactgcatctttttaaaagcattttctgacttgcagatgctgtagtagcaagtacatgagaaatgggttccgtcatggataaattggtaccctgccttagggggca

SEQ ID NO: 565850 - DNA, 120 bp, Artificial Sequence
  ENSG00000170142_14 (sequence is synthesized)
gcggtggcagcccaccgctggggagcgacctgcggtctgggcctcccgggcaccccgccacggctggcaggtcactcgggcccgaggggcctcgtggggagcggccatgttggcttcgtc

SEQ ID NO: 565851 - DNA, 120 bp, Artificial Sequence
  ENSG00000170142_15 (sequence is synthesized)
gcctcgtggggagcggccatgttggcttcgtcactgaggactccgggcgggtcgggtgttgagcgaggcctcggaccttcggcctgtcgggggcgccctgccgggaattcagaaggagct

SEQ ID NO: 565852 - DNA, 120 bp, Artificial Sequence
  ENSG00000170142_16 (sequence is synthesized)
agtctatccccagtgtgagctagagagcggaccatgaaggaagtgggcagaccccgggaagttagaggacgcccggggaaaagcagaattcagaaggagctggcggacatcactttagac

SEQ ID NO: 565853 - DNA, 120 bp, Artificial Sequence
  ENSG00000170142_17 (sequence is synthesized)
ctcaggaggcctgactgaccctcactgattagccctgtgcggttttcctggaacctgacatctactctgcccacttgggacgggcccttccttaatactgcgccccacctcaatcctcta

SEQ ID NO: 565854 - DNA, 120 bp, Artificial Sequence
  ENSG00000170142_18 (sequence is synthesized)
aatacttgtttccaaaagctttcaaaggacaaaactaatttttctgcacaagtttgtgaatacaaaaactaatcggcttttcaaaagaaagttttaatcaagttcagtctactagttgag

SEQ ID NO: 565855 - DNA, 120 bp, Artificial Sequence
  ENSG00000170142_19 (sequence is synthesized)
aatgggcctgcagactttgaaaagcgagtggagggcggtgggcggccgcgtgcgcccctggtcaatgccctcctgacagcacccgagttccttatttacactggctgcatggtttgtgtg

SEQ ID NO: 565856 - DNA, 120 bp, Artificial Sequence
  ENSG00000170142_20 (sequence is synthesized)
gtgttcttaaaaatgaaagaagggccttggaagccctaattattttctctattgctgcttctgtttttaaatcattgctcacatgcagctgttgcggcttgcctctcgcatttcttgctg

SEQ ID NO: 565857 - DNA, 120 bp, Artificial Sequence
  ENSG00000170142_21 (sequence is synthesized)
aagtttgtaagattcctcgttacttttattagtgacccccaaatctgatttcagatttcttgtcctactaatggttaatctgtgaccttccccaaggccatgatcccatttcttaattac

SEQ ID NO: 565858 - DNA, 120 bp, Artificial Sequence
  ENSG00000170142_22 (sequence is synthesized)
taataccagcccagagaactgcatcaaaatgaattctgtgaccattttaccttctcctcacctgttgcatggatgatcttttctaaatagagctttcttcacaaattgcataaggaataa

SEQ ID NO: 565859 - DNA, 120 bp, Artificial Sequence
  ENSG00000170142_23 (sequence is synthesized)
gggaacaaagaagttgcagaggcctcagcttcacagagcattgagcagtgggtgatattgtatcctcaggcaggggttgacctcacatttcagtgcaggtcattctaatgactgctggac

SEQ ID NO: 565860 - DNA, 120 bp, Artificial Sequence
  ENSG00000170144_0 (sequence is synthesized)
cccctgaaagctggcgaggcgcgcgcgctcccgcggcacgccgcgcctccgccctccgcccgccaacccgctggtccagtccctcttcgcgcccgcttggctccgcccccttcccaattc

SEQ ID NO: 565861 - DNA, 120 bp, Artificial Sequence
  ENSG00000170144_1 (sequence is synthesized)
gctcctcccccaacagactggcggcgcgcggaaaacgcgtcacgtgacgactggccccgcctcttcctctcggtcccatattgaactcgagttggaagaggcgagtccggtctcaaaatg

SEQ ID NO: 565862 - DNA, 120 bp, Artificial Sequence
  ENSG00000170144_2 (sequence is synthesized)
gaggtaaaaccgccgcccggtcgcccccagcccgactccggccgtcgccgtcgccgccggggggaggagggccatgatccaaaggaaccagagcagttgagaaaactgtttattggtggt

SEQ ID NO: 565863 - DNA, 120 bp, Artificial Sequence
  ENSG00000170144_3 (sequence is synthesized)
ctgagctttgaaactacagatgatagtttacgagaacattttgagaaatggggcacactcacagattgtgtggtaatgagagacccccaaacaaaacgttccaggggctttggttttgtg

SEQ ID NO: 565864 - DNA, 120 bp, Artificial Sequence
  ENSG00000170144_4 (sequence is synthesized)
acttattcttgtgttgaagaggtggatgcagcaatgtgtgctcgaccacacaaggttgatgggcgtgtagtggaaccaaagagagctgtttctagagaggattctgtaaagcctggtgcc

SEQ ID NO: 565865 - DNA, 120 bp, Artificial Sequence
  ENSG00000170144_5 (sequence is synthesized)
catctaacagtgaagaaaatttttgttggtggtattaaagaagatacagaagaatataatttgagagactactttgaaaagtatggcaagattgaaaccatagaagttatggaagacagg

SEQ ID NO: 565866 - DNA, 120 bp, Artificial Sequence
  ENSG00000170144_6 (sequence is synthesized)
cagagtggaaaaaagagaggatttgcttttgtaacttttgatgatcatgatacagttgataaaattgttgttcagaaataccacactattaatgggcataattgtgaagtgaaaaaggcc

SEQ ID NO: 565867 - DNA, 120 bp, Artificial Sequence
  ENSG00000170144_7 (sequence is synthesized)
ctttctaaacaagagatgcagtctgctggatcacagagaggtcgtggaggtggatctggcaattttatgggtcgcggagggaactttggaggtggtggaggtaattttggccgtggtgga

SEQ ID NO: 565868 - DNA, 120 bp, Artificial Sequence
  ENSG00000170144_8 (sequence is synthesized)
ggtggaggtggtggcagcagaggtagttatggaggaggtgatggtggatataatggatttggaggtgatggtggcaactatggcggtggtcctggttatagtagtagagggggctatggt

SEQ ID NO: 565869 - DNA, 120 bp, Artificial Sequence
  ENSG00000170144_9 (sequence is synthesized)
ggtggtggaccaggatatggaaaccaaggtggtggatatggtggaggtggaggatatgatggttacaatgaaggaggaaattttggcggtggtaactatggtggtggtgggaactataat

SEQ ID NO: 565870 - DNA, 120 bp, Artificial Sequence
  ENSG00000170144_10 (sequence is synthesized)
gattttggaaattatagtggacaacagcaatcaaattatggacccatgaaagggggcagttttggtggaagaagctcgggcagtccctatggtggtggttatggatctggtggtggaagt

SEQ ID NO: 565871 - DNA, 120 bp, Artificial Sequence
  ENSG00000170144_11 (sequence is synthesized)
ggtggatatggtagcagaaggttctaaaaacagcagaaaagggctacagttcttagcaggagagagagcgaggagttgtcaggaaagctgcaggttactttgagacagtcgtcccaaatg

SEQ ID NO: 565872 - DNA, 120 bp, Artificial Sequence
  ENSG00000170144_12 (sequence is synthesized)
cattagaggaactgtaaaaatctgccacagaaggaacgatgatccatagtcagaaaagttactgcagcttaaacaggaaacccttcttgttcaggactgtcatagccacagtttgcaaaa

SEQ ID NO: 565873 - DNA, 120 bp, Artificial Sequence
  ENSG00000170144_13 (sequence is synthesized)
agtgcagctattgattaatgcaatgtagtgtcaattagatgtacattcctgaggtcttttatctgttgtagctttgtctttttctttttcttttcattacatcaggtatattgccctgta

SEQ ID NO: 565874 - DNA, 120 bp, Artificial Sequence
  ENSG00000170144_14 (sequence is synthesized)
aattgtggtagtggtaccaggaataaaaaattaaggaatttttaacttttcaatatttgtgtagttcagtttttctacattttagtacagaaactttaacaaaatgcagtttcgaaggtg

SEQ ID NO: 565875 - DNA, 120 bp, Artificial Sequence
  ENSG00000170144_15 (sequence is synthesized)
tttccttgtgagttaacaagtaaagaagatcattgttaattactattttgtatgaattttgctaaagttaactgtaaagaaacacctgctgacttgcagtttaaggggaatctattctcc

SEQ ID NO: 565876 - DNA, 120 bp, Artificial Sequence
  ENSG00000170144_16 (sequence is synthesized)
ccatttccaaaccatgatatgaatgggcgctgacatgtggagagaatagataatttgtgtgtttgcaatgtgtgttttagataaataggattgggtatttaaattagcatttgtgaattt

SEQ ID NO: 565877 - DNA, 120 bp, Artificial Sequence
  ENSG00000170144_17 (sequence is synthesized)
ttgctgagtcctagctgtgtttagaacatctctattctacatttaccttggtcaaatttgaactgctgccataggttttgggtgtaaagaatgtttactgccctccatttaaattctgaa

SEQ ID NO: 565878 - DNA, 120 bp, Artificial Sequence
  ENSG00000170144_18 (sequence is synthesized)
aagggatggtggatgttttccctctcctacgttagaaaccattcttaaaaacttttgaaaatatagaaccattaagcctgctatatctgagcaaattagtgggtaccttttttttcttat

SEQ ID NO: 565879 - DNA, 120 bp, Artificial Sequence
  ENSG00000170144_19 (sequence is synthesized)
ttaaagcacaagaggcccataaatcttgagttactttaaattcttttttttgatacaagttttcagagcaagagaataaaaatcatgtgttattaaacccctaactggctggcatgcttt

SEQ ID NO: 565880 - DNA, 120 bp, Artificial Sequence
  ENSG00000170144_20 (sequence is synthesized)
cctgtttgtattctatacattttgctggatgaaaccaaggatagttcaggtataattgtccaaaataacctaactgcagcagaaatgtagcacagttgcttagtacaggcttctcacttc

SEQ ID NO: 565881 - DNA, 120 bp, Artificial Sequence
  ENSG00000170144_21 (sequence is synthesized)
ctacagacctgaattcaaatttggatagtctgagttcttaaattcccaaagaacacactgttatttcttgtgtatatttcaacataaatcatgttgttaccaatttgtttggaaggccct

SEQ ID NO: 565882 - DNA, 120 bp, Artificial Sequence
  ENSG00000170144_22 (sequence is synthesized)
ggttgagaagagttttagttaataaggtcatatatacatatattaatataaaccaatgtctactgttttgctccagctagtgcttacagtttcattcgagccctgagtatgtgccctgct

SEQ ID NO: 565883 - DNA, 120 bp, Artificial Sequence
  ENSG00000170144_23 (sequence is synthesized)
gttactctctttggtagttgaacgttgaattcaagtcttttgttttaagaagtactaagcaaacaagcaataaaaaggggaatggggtgtgctagtgtttgaatatgctctcttgttgct

SEQ ID NO: 565884 - DNA, 120 bp, Artificial Sequence
  ENSG00000170144_24 (sequence is synthesized)
catggaaattggtcttcacacatactgcagttttccagaaacattcacaaaccaataaatgtaacagacattccatttgttaatgggcatatatgtgaaaagcagtgtagaaaataggct

SEQ ID NO: 565885 - DNA, 120 bp, Artificial Sequence
  ENSG00000170144_25 (sequence is synthesized)
aatattagaaaatggttaagtcctaaataacttcaagtgtggttatataatggacactgtcaatgttcataacttaaacctgggtacctggtcaaaataatgcttgggaaacattaaaat

SEQ ID NO: 565886 - DNA, 120 bp, Artificial Sequence
  ENSG00000170144_26 (sequence is synthesized)
tgagctaaattgtctcaagttcttttattcatataaataaagtttaaaggaatgggggagattaacatttcctgttttatgtttgtgaaattgtttgacacaaccttgacagtatccttt

SEQ ID NO: 565887 - DNA, 120 bp, Artificial Sequence
  ENSG00000170144_27 (sequence is synthesized)
aatggcatgaggttaattgtactgttaaccaactttctatgttctggaactagtattatagtgaaaacatttacagtaagttgatgtttacaacctataagcaggtgaaatctgtgtatg

SEQ ID NO: 565888 - DNA, 120 bp, Artificial Sequence
  ENSG00000170144_28 (sequence is synthesized)
tgacctgtttataagttgtattagcttagctcttgtgaacagtgtggaaaagtaagccatgaggagagcgatttaaccacctttaaaggacctaagatgtgctttttaagcacagtgtgg

SEQ ID NO: 565889 - DNA, 120 bp, Artificial Sequence
  ENSG00000170144_29 (sequence is synthesized)
atcacagaaactcactaagacaggacttcagcagccttttgtgtttggacaagtcagcataaataaagaatgacaaggcagcagcaagagcttcaactacagagaagtgaaggcataaga

SEQ ID NO: 565890 - DNA, 120 bp, Artificial Sequence
  ENSG00000170144_30 (sequence is synthesized)
tactatgatgatagtgagcaactttccaaaagctagttaaatctgcttattacaactgaaatatcgaagaaagtctagcaggaaggagctcttcgccttttggaacatcaatgagagata

SEQ ID NO: 565891 - DNA, 120 bp, Artificial Sequence
  ENSG00000170144_31 (sequence is synthesized)
gttgccacagtcactaggtctagcatttagacctgcaaggaagggcaataagcattaggtaaggcttgaatttgaattttttcactaattaaagagtaattttttgtaaagcaaggtaag

SEQ ID NO: 565892 - DNA, 120 bp, Artificial Sequence
  ENSG00000170144_32 (sequence is synthesized)
agtaatctttttgatttgcaggttgaatgagaaccctacttgcctaaatgaggaatgtctttcctaccatctaaaatacgaaggtttctggctgggtaaggtttgtagttgacagtaaaa

SEQ ID NO: 565893 - DNA, 120 bp, Artificial Sequence
  ENSG00000170144_33 (sequence is synthesized)
cctgatgacaccatttgtttccctgcaagtctacattacatatttcacaactttgtccctctctagtaggcacattggaaaaattcttcaactgaaaactaccttggtaccatgtcctac

SEQ ID NO: 565894 - DNA, 120 bp, Artificial Sequence
  ENSG00000170144_34 (sequence is synthesized)
acgttttaaaccttagttttaaaaattcccctgcgaaatagccataagtattcatatcaagtcagttgtgactccttgtgtatacaattcattttttgtgtcttcagggtaaactcaatt

SEQ ID NO: 565895 - DNA, 120 bp, Artificial Sequence
  ENSG00000170144_35 (sequence is synthesized)
tttggtaaagtggtttcagcttttgtgaaaaccgttttggtgtgtaagcatgacacacaacagactcagtaagctgcccatcctcatactaggaaaacaccttcaaaggaacattaaaag

SEQ ID NO: 565896 - DNA, 120 bp, Artificial Sequence
  ENSG00000170144_36 (sequence is synthesized)
gcactttgggaggctgaggcagatggatcccaagtccaggaatttgagacgagcctgggcaacatagtgagagcctgtcaacaaaaaatagaaaaattagttgggcttggtgatacacat

SEQ ID NO: 565897 - DNA, 120 bp, Artificial Sequence
  ENSG00000170144_37 (sequence is synthesized)
acaaaaaatagaaaaattagttgggcttggtgatacacatctgtagtcccagctatttgggaggctgccttgatatcaggcagtcgaggctgcagtgagctgactgccccactgtattcc

SEQ ID NO: 565898 - DNA, 120 bp, Artificial Sequence
  ENSG00000170144_38 (sequence is synthesized)
agcctgggtgaccccatctcaaagaagaaaagttaccagatgtcatgggtaaaggttggtcttcaagtggcctcataagttgtcttgcatttaaattcagggaattcattggaccaatag

SEQ ID NO: 565899 - DNA, 120 bp, Artificial Sequence
  ENSG00000170144_39 (sequence is synthesized)
gttacattttcgttccttttttgttttggttcatctgttaagcagtgggggcctaattactgctcctttgtaaaaacacattttcccaaagaacactgaattaccgttcaaactggttgt

SEQ ID NO: 565900 - DNA, 120 bp, Artificial Sequence
  ENSG00000170144_40 (sequence is synthesized)
tgatgggtaataagggctgtttttgctgccccaaaagggcttaacaatttagtcggatagtttacttaaaaaaaaaaatcctttggagacatactgaaaatgcaaactagtttctaaatt

SEQ ID NO: 565901 - DNA, 120 bp, Artificial Sequence
  ENSG00000170144_41 (sequence is synthesized)
atcaattccctacatgaagaagcagtttgccagagtttagtctcagaaaatgactggttggctctatttaaatcagaacccaatttctacgcgtgttgaataaggtaacagcctttgatg

SEQ ID NO: 565902 - DNA, 120 bp, Artificial Sequence
  ENSG00000170144_42 (sequence is synthesized)
aatttccttcacaacatggttttagtgaagcaaacattttttttttaagggcattgttctttctagtttatttctttttatgaaataaaattattttatttaaacagttccattgtcgtt

SEQ ID NO: 565903 - DNA, 120 bp, Artificial Sequence
  ENSG00000170144_43 (sequence is synthesized)
tctgaaaactacagtattctcagaagttgtagcagcagtaaaaaaaaaaaagttgttatataagtgattggggcagatttaactgattttgttaaaccaatttgtaagttactgcttcta

SEQ ID NO: 565904 - DNA, 120 bp, Artificial Sequence
  ENSG00000170144_44 (sequence is synthesized)
atattacacttctaaaaagctgaatttatactcatgtcctaaaggagaatatgtggtaataaagtatatttgttaagtaactaattgaaataggcttggttttaagagttccagtatata

SEQ ID NO: 565905 - DNA, 120 bp, Artificial Sequence
  ENSG00000170144_45 (sequence is synthesized)
ataatcacaaattgaaacctgacagtatcttgggagttccagtaatgtcacaaattagtgaataagcatgccagtgtgcaagggtaatgtaaggattgttagcctatctaaatattcaaa

SEQ ID NO: 565906 - DNA, 120 bp, Artificial Sequence
  ENSG00000170144_46 (sequence is synthesized)
attactttaaaacttaagtatgttttctgatttttaagaattcagaagtgttctgtaatggattcagatgtttcatttgtagtataatgaaatgtttacagaaagataactttttcatta

SEQ ID NO: 565907 - DNA, 120 bp, Artificial Sequence
  ENSG00000170144_47 (sequence is synthesized)
aaatatttttagaaatgtgtgtgttgttttgtcacttcacaatgttcatgtgacttaaacactataggtgaatattttgacttattttaccagtaagtaataaaacaacaggaaacttgg

SEQ ID NO: 565908 - DNA, 120 bp, Artificial Sequence
  ENSG00000170144_48 (sequence is synthesized)
aaacagcagaaaagggtaggtatctttaaatttttattatgatgataaaagaatatgtggaactgttcactgagtgtaataatttttttatcctgtattattcaacaggctacagttctt

SEQ ID NO: 565909 - DNA, 120 bp, Artificial Sequence
  ENSG00000170145_0 (sequence is synthesized)
aaggagcgaaggagcgaaggagcaagcggagcggccgtcgcccaagccaagccgcgctgccaaccctcccgcccgcccgcgctcctgtccgccgtgtctagcagcggggcccagcatggt

SEQ ID NO: 565910 - DNA, 120 bp, Artificial Sequence
  ENSG00000170145_1 (sequence is synthesized)
catggcggatggcccgaggcacttgcagcgcgggccggtccgggtggggttctacgacatcgagggcacgctgggcaagggcaacttcgctgtggtgaagctggggcggcaccggatcac

SEQ ID NO: 565911 - DNA, 120 bp, Artificial Sequence
  ENSG00000170145_2 (sequence is synthesized)
caagacggaggtggcaataaaaataatcgataagtctcagctggatgcagtgaaccttgagaaaatctaccgagaagtacaaataatgaaaatgttagaccaccctcacataatcaaact

SEQ ID NO: 565912 - DNA, 120 bp, Artificial Sequence
  ENSG00000170145_3 (sequence is synthesized)
ttatcaggtaatggagaccaaaagtatgttgtaccttgtgacagaatatgccaaaaatggagaaatttttgactatcttgctaatcatggccggttaaatgagtctgaagccaggcgaaa

SEQ ID NO: 565913 - DNA, 120 bp, Artificial Sequence
  ENSG00000170145_4 (sequence is synthesized)
attctggcaaatcctgtctgctgttgattattgtcatggtcggaagattgtgcaccgtgacctcaaagctgaaaatctcctgctggataacaacatgaatatcaaaatagcagatttcgg

SEQ ID NO: 565914 - DNA, 120 bp, Artificial Sequence
  ENSG00000170145_5 (sequence is synthesized)
ttttggaaatttctttaaaagtggtgaactgctggcaacatggtgtggcagccccccttatgcagccccagaagtctttgaagggcagcagtatgaaggaccacagctggacatctggag

SEQ ID NO: 565915 - DNA, 120 bp, Artificial Sequence
  ENSG00000170145_6 (sequence is synthesized)
tatgggagttgttctttatgtccttgtctgtggagctctgccctttgatggaccgactcttccaattttgaggcagagggttctggaaggaagattccggattccgtatttcatgtcaga

SEQ ID NO: 565916 - DNA, 120 bp, Artificial Sequence
  ENSG00000170145_7 (sequence is synthesized)
agattgcgagcaccttatccgaaggatgttggtcctagacccatccaaacggctaaccatagcccaaatcaaggagcataaatggatgctcatagaagttcctgtccagagacctgttct

SEQ ID NO: 565917 - DNA, 120 bp, Artificial Sequence
  ENSG00000170145_8 (sequence is synthesized)
ctatccacaagagcaagaaaatgagccatccatcggggagtttaatgagcaggttctgcgactgatgcacagccttggaatagatcagcagaaaaccattgagtctttgcagaacaagag

SEQ ID NO: 565918 - DNA, 120 bp, Artificial Sequence
  ENSG00000170145_9 (sequence is synthesized)
ctataaccactttgctgccatttatttcttgttggtggagcgcctgaaatcacatcggagcagtttcccagtggagcagagacttgatggccgccagcgtcggcctagcaccattgctga

SEQ ID NO: 565919 - DNA, 120 bp, Artificial Sequence
  ENSG00000170145_10 (sequence is synthesized)
gcaaacagttgccaaggcacagactgtggggctcccagtgaccatgcattcaccgaacatgaggctgctgcgatctgccctcctcccccaggcatccaacgtggaggccttttcatttcc

SEQ ID NO: 565920 - DNA, 120 bp, Artificial Sequence
  ENSG00000170145_11 (sequence is synthesized)
agcatctggctgtcaggcggaagctgcattcatggaagaagagtgtgtggacactccaaaggtcaatggctgtctgcttgaccctgtgcctcctgtcctggtgcggaagggatgccagtc

SEQ ID NO: 565921 - DNA, 120 bp, Artificial Sequence
  ENSG00000170145_12 (sequence is synthesized)
actgcccagcaacatgatggagacctccattgacgaagggctggagacagaaggagaggccgaggaagaccccgctcatgcctttgaggcatttcagtccacacgcagcgggcagagacg

SEQ ID NO: 565922 - DNA, 120 bp, Artificial Sequence
  ENSG00000170145_13 (sequence is synthesized)
gcacactctgtcagaagtgaccaatcaactggtcgtgatgcctggggcagggaaaattttctccatgaatgacagcccctcccttgacagtgtggactctgagtatgatatggggtctgt

SEQ ID NO: 565923 - DNA, 120 bp, Artificial Sequence
  ENSG00000170145_14 (sequence is synthesized)
tcagagggacctgaactttctggaagacaacccttcccttaaggacatcatgttagccaatcagccttcaccccgcatgacatctcccttcataagcctgagacctaccaacccagccat

SEQ ID NO: 565924 - DNA, 120 bp, Artificial Sequence
  ENSG00000170145_15 (sequence is synthesized)
gcaggctctgagctcccagaaacgagaggtccacaacaggtctccagtgagcttcagagagggccgcagagcatcagatacctccctcacccagggaattgtagcatttagacaacatct

SEQ ID NO: 565925 - DNA, 120 bp, Artificial Sequence
  ENSG00000170145_16 (sequence is synthesized)
tcagaatctggctagaaccaaaggaattctagagttgaacaaagtgcagttgttgtatgaacaaataggaccggaggcagaccctaacctggcgccggcggctcctcagctccaggacct

SEQ ID NO: 565926 - DNA, 120 bp, Artificial Sequence
  ENSG00000170145_17 (sequence is synthesized)
tgctagcagctgccctcaggaagaagtttctcagcagcaggaaagcgtctccactctccctgccagcgtgcatccccagctgtccccacggcagagcctggagacccagtacctgcagca

SEQ ID NO: 565927 - DNA, 120 bp, Artificial Sequence
  ENSG00000170145_18 (sequence is synthesized)
cagactccagaagcccagccttctgtcaaaggcccagaacacctgtcagctttattgcaaagaaccaccgcggagccttgagcagcagctgcaggaacataggctccagcagaagcgact

SEQ ID NO: 565928 - DNA, 120 bp, Artificial Sequence
  ENSG00000170145_19 (sequence is synthesized)
ctttcttcagaagcagtctcaactgcaggcctattttaatcagatgcagatagcagagagctcctacccacagccaagtcagcagctgccccttccccgccaggagactccaccgccttc

SEQ ID NO: 565929 - DNA, 120 bp, Artificial Sequence
  ENSG00000170145_20 (sequence is synthesized)
tcagcaggccccaccgttcagcctgacccagcccctgagccccgtcctggagccttcctccgagcagatgcaatacagccctttcctcagccagtaccaagagatgcagcttcagcccct

SEQ ID NO: 565930 - DNA, 120 bp, Artificial Sequence
  ENSG00000170145_21 (sequence is synthesized)
gccctccacttccggtccccgggctgctcctcctctgcccacgcagctacagcagcagcagccgccaccgccaccaccccctccaccaccacgacagccaggagctgccccagccccctt

SEQ ID NO: 565931 - DNA, 120 bp, Artificial Sequence
  ENSG00000170145_22 (sequence is synthesized)
acagttctcctatcagacttgtgagctgccaagcgctgcttcccctgcgccagactatcccactccctgtcagtatcctgtggatggagcccagcagagcgacctaacggggccagactg

SEQ ID NO: 565932 - DNA, 120 bp, Artificial Sequence
  ENSG00000170145_23 (sequence is synthesized)
tcccagaagcccaggactgcaagaggccccctccagctacgacccactagccctctctgagctacctggactctttgattgtgaaatgctagacgctgtggatccacaacacaacgggta

SEQ ID NO: 565933 - DNA, 120 bp, Artificial Sequence
  ENSG00000170145_24 (sequence is synthesized)
tgtcctggtgaattagtctcagcacaggaattgaggtgggtcaggtgaaggaagagtgtatgttcctatttttattccagccttttaaatttaaagcttattttcttgccctctccctaa

SEQ ID NO: 565934 - DNA, 120 bp, Artificial Sequence
  ENSG00000170145_25 (sequence is synthesized)
cggggagaaatcgagccacccaactggaatcagagggtctggctggggtggatgttgcttcctcctggttctgccccaccacaaagttttctgtggcaagtgctggaacatagttgtagg

SEQ ID NO: 565935 - DNA, 120 bp, Artificial Sequence
  ENSG00000170145_26 (sequence is synthesized)
ctgaggctcctgcccttcggtcgagtggagcaagctctcgagggcagcactgacaaatgtgttcctaagaagacattcagacccaggtgttatgcaggattacatccgtttattatcaag

SEQ ID NO: 565936 - DNA, 120 bp, Artificial Sequence
  ENSG00000170145_27 (sequence is synthesized)
ggcaaccttggtgaaagcagaaagggtgtgtgctattgcatatatatgggggaaaaggcaatatatttttcactgaagctgagcaaccacatattgctacaaggcaaatcaagaagacat

SEQ ID NO: 565937 - DNA, 120 bp, Artificial Sequence
  ENSG00000170145_28 (sequence is synthesized)
caggaaatcagatgcacaggaaataaaggaaagctgtgctttgtcattgaatcctaagttcttagctgctgatgcaagttgtcccccaaggccatcacaaagcagtggggcatgagctgt

SEQ ID NO: 565938 - DNA, 120 bp, Artificial Sequence
  ENSG00000170145_29 (sequence is synthesized)
gtttcaggggccactaaataacagctggtactgaccccagaaaccgccttcatctccattcggaagcaggtgacacaccccttcagaaggtgccctgggttgccgagtgtcagaatatac

SEQ ID NO: 565939 - DNA, 120 bp, Artificial Sequence
  ENSG00000170145_30 (sequence is synthesized)
tcaggactccagaggtgtcacacgtggaactgacaggagacccgccaccgtggaggcagggggcaagaaactcaagaacgcatcaagagcaccagccctgggccagggaagacaggctct

SEQ ID NO: 565940 - DNA, 120 bp, Artificial Sequence
  ENSG00000170145_31 (sequence is synthesized)
tcctgcagtttctcgtggacactgctggcttgcgggcagtcggtctccagggtacctgttgtctcttttccgatgtaataactactttgaccttacactatatgttgctagtagtttatt

SEQ ID NO: 565941 - DNA, 120 bp, Artificial Sequence
  ENSG00000170145_32 (sequence is synthesized)
gagctttgtatatttggacagtttcatatagggcttagagattttaaggacatgataaatgaacttttctgtcccatgtgaagtggtagtgcggtgcctttcccccagatcatgctttaa

SEQ ID NO: 565942 - DNA, 120 bp, Artificial Sequence
  ENSG00000170145_33 (sequence is synthesized)
ttctttcttttctgtagaaaccaacagtttccatttatgtcaatgctaaatccaaagtcacttcagagtttgttttccaccatgtgggaatcagcattcttaatttcgttaaagttttga

SEQ ID NO: 565943 - DNA, 120 bp, Artificial Sequence
  ENSG00000170145_34 (sequence is synthesized)
cttgtaatgaaatgttcaagtattacagcaatattcaaagaaagaaccacagatgtgttaaccatttaagcagatcatctgccaaacattatattactaataaaacttaaccaacactta

SEQ ID NO: 565944 - DNA, 120 bp, Artificial Sequence
  ENSG00000170145_35 (sequence is synthesized)
caattcagtcatcaaagtaagtaaaaattagatgctacagctagctaactgtatccctagaaatgatgaataatttgccatttggacagttaacatccaggtgttacaaagtcagtgtta

SEQ ID NO: 565945 - DNA, 120 bp, Artificial Sequence
  ENSG00000170145_36 (sequence is synthesized)
attctaaagatgatcatttctgccctttagaatggcttgtcccatcagcagatgaatgtgttaagcacaaagcatcttccttaaagcacaaagagagggactaactgatgctgcatctag

SEQ ID NO: 565946 - DNA, 120 bp, Artificial Sequence
  ENSG00000170145_37 (sequence is synthesized)
aaaacacctttaagttgcctttcctctttgtagttagcgttcaggcaggtgacgtgtggaaagtctagggggttccattctggccatgcgagcccagctcctaccaacgtcggtaacttg

SEQ ID NO: 565947 - DNA, 120 bp, Artificial Sequence
  ENSG00000170145_38 (sequence is synthesized)
agcagtccctgttgctggccagagactgcctggtcgccagcgctcaccatgggtgccaggatgcttcgcagaggcactgtgctcacggttggacttggtgtcagtgggaaagggcagtgt

SEQ ID NO: 565948 - DNA, 120 bp, Artificial Sequence
  ENSG00000170145_39 (sequence is synthesized)
ggggactgtcatttttgtgatttaataacacacagtgaaaatccaggaagaatgaattaagcttcttctgggagttgtttattcctgctcgtgcttaagattgatgatttcgtgaaataa

SEQ ID NO: 565949 - DNA, 120 bp, Artificial Sequence
  ENSG00000170145_40 (sequence is synthesized)
atcatttcattaagatctctaatctgttttgagtctttacaaaatagccagttataaaatggggcttgatttgtttagactgaaggaagacgttttcccaaaatatactacagaagtgct

SEQ ID NO: 565950 - DNA, 120 bp, Artificial Sequence
  ENSG00000170145_41 (sequence is synthesized)
acaatatttgcgatattaaaatgcctgcagattgaaaatgggggccactcatttcagaactgcaggaatggtgtagttacagatcgacataaactcctgccccccaacaatgccatgagc

SEQ ID NO: 565951 - DNA, 120 bp, Artificial Sequence
  ENSG00000170145_42 (sequence is synthesized)
tgcttagcccaggagacctgggagctatggcaggacggttaggccagccgatgagggactgcagagaggctactggaaggttaaggacccagagagaaatcgagaggtgccctacagcag

SEQ ID NO: 565952 - DNA, 120 bp, Artificial Sequence
  ENSG00000170145_43 (sequence is synthesized)
ccaggcctatcaggatccgtcacacacggcagcggcgtggacaccggcctgatgcagagcgtgacccctcctgctgggacctgtgttgtaagctcctatttgcttatcttgtttatttca

SEQ ID NO: 565953 - DNA, 120 bp, Artificial Sequence
  ENSG00000170145_44 (sequence is synthesized)
agcagaaatcaataaattccataaccctctgtattgactgcaatgtaagctgctgaggagactggttctgttggtcagtcaggtgtttgctcagccctgtctgatcacctgtgctgctct

SEQ ID NO: 565954 - DNA, 120 bp, Artificial Sequence
  ENSG00000170145_45 (sequence is synthesized)
gtccctaactagtgacccatggaagcttccaagcagttttctcttcatcactactaacaaacaaaacactaagaaggcttagtatcgctctttttctgcggggctactctgaagtactga

SEQ ID NO: 565955 - DNA, 120 bp, Artificial Sequence
  ENSG00000170145_46 (sequence is synthesized)
cttgctttccagtctgattcacgttagcagtgtgtacactactgtatcatcatcagcttcatcaccctgtaaaccaggctcctctgaagagactttggtgagatgaacgtgaggtaaaaa

SEQ ID NO: 565956 - DNA, 120 bp, Artificial Sequence
  ENSG00000170145_47 (sequence is synthesized)
tttcgttcggcaaaaagtgcaatatgtgtggtactttattttttatgttctttttttaaatctggggtattagtctgtgctttgggagaaatgcactagctctgcaattcccagctgggc

SEQ ID NO: 565957 - DNA, 120 bp, Artificial Sequence
  ENSG00000170145_48 (sequence is synthesized)
aagtgtgtctctagtatctccacgcaactgatacactggtccctgtaaggcaaacagcatgttagcccgacaggaagagggggcccactttcacattcccggtgacactgaccgtcccca

SEQ ID NO: 565958 - DNA, 120 bp, Artificial Sequence
  ENSG00000170145_49 (sequence is synthesized)
gctgccccctcgccacctctgcctgcactgccttctgtcaccgtgggaaaaggaggctgatggttctctacaccatccaccttgagaatccctgcgtgggagagcatcagggcccaccag

SEQ ID NO: 565959 - DNA, 120 bp, Artificial Sequence
  ENSG00000170145_50 (sequence is synthesized)
gggagtggggatggggctcaggggctgttcatgcccatctgagcaaaccccttctctcttccatccacttttgcctcctaggaaagaaaaagtcagtggccctttcttcctcagatatca

SEQ ID NO: 565960 - DNA, 120 bp, Artificial Sequence
  ENSG00000170145_51 (sequence is synthesized)
agaactcccaagtgtttaaaccgtatgctggagtcagtggttgggacagacaggagcccaagactgaagccagcccttgcctcttgtgtcccttcccaactctggtgctggagtaatggg

SEQ ID NO: 565961 - DNA, 120 bp, Artificial Sequence
  ENSG00000170145_52 (sequence is synthesized)
gtgctctgcattttgatggggagcaaggggggaccccccctgtaggagtatcggcctctcccctgccccctaccctctctcgtggaccaaagtctccagcagaagagactcatcataaga

SEQ ID NO: 565962 - DNA, 120 bp, Artificial Sequence
  ENSG00000170145_53 (sequence is synthesized)
ctgacgactcccccacctccacccacacaccgagtgtcatcagtcctaaaggcagggaaacgctcacagaattctgcccacgggttagatgtggggagaaggatattctcagctccagag

SEQ ID NO: 565963 - DNA, 120 bp, Artificial Sequence
  ENSG00000170145_54 (sequence is synthesized)
tgattaggtgatcagccagaaactaaggcaaggtgacaagcagcagcctggagtcacagttggtcccaggcgtgtgggcactaagcagcctctggagacatgcgggcagttgaggatgca

SEQ ID NO: 565964 - DNA, 120 bp, Artificial Sequence
  ENSG00000170145_55 (sequence is synthesized)
aggacacagtgagtgagtggcgctcctttttggggtcctccagcctctagtcaagccccaggttcgtaaatatgtttgtattacattttaaaacctgtatcaacagtcacatttaagctc

SEQ ID NO: 565965 - DNA, 120 bp, Artificial Sequence
  ENSG00000170145_56 (sequence is synthesized)
cctattggtttaaagaaaattcatactccaggtaactttttcccattcgacctcctatagagacaatatgcagtgtgtcatttcacagtctcagtccctgtgaacagtggctgacaccgg

SEQ ID NO: 565966 - DNA, 120 bp, Artificial Sequence
  ENSG00000170145_57 (sequence is synthesized)
tgccagggctgacctgctacactcaaactcctaaactgggctgcctctaactgcctcctgggaagccacccgagccactcggtctctttgtgcctaaacatgaaaggtgaaaattggaga

SEQ ID NO: 565967 - DNA, 120 bp, Artificial Sequence
  ENSG00000170145_58 (sequence is synthesized)
tgaaaggtgaaaattggagaacagggaagctcgtaagttggagtcattgtacaggcagggatctttgatcattttgttgcttctggaatttatttaattttttttttttttgagacagag

SEQ ID NO: 565968 - DNA, 86 bp, Artificial Sequence
  ENSG00000170145_59 (sequence is synthesized)
acctggaatttttttatagaacttatcttcagagcaatgtatgaaagacaagagcagtatcagccgggcgcggtggctcacgcctg

SEQ ID NO: 565969 - DNA, 120 bp, Artificial Sequence
  ENSG00000170145_60 (sequence is synthesized)
aaagacaagagcagtatcatctgcctctgtttctaaactggacaaagagattttcttaaagtttctatcatctcccttctgacaggttctacagtgtggtctgaagcacctgtaatgtca

SEQ ID NO: 565970 - DNA, 120 bp, Artificial Sequence
  ENSG00000170145_61 (sequence is synthesized)
gagcccttgtctggcccttggtggcaggtgaacgaaagcagtggagcctctcaccttccagtagcctctcacattcttattttaccatttttgtcctaattaaggtagcctagctgattc

SEQ ID NO: 565971 - DNA, 120 bp, Artificial Sequence
  ENSG00000170145_62 (sequence is synthesized)
tagaagacagccatcctacgtgcacccccaccttgtgtccacatcttctccaggcaggtttcaacctatcagcagactcaggcacacactggggcacagatagagaaccaggcggcagca

SEQ ID NO: 565972 - DNA, 120 bp, Artificial Sequence
  ENSG00000170145_63 (sequence is synthesized)
gtgctcgcagacccacccagggagagctgtgatgggttctgcccagatactctgctcgcccacccacaagggagcaatagcttatatttgtacattagttttaccaagcactttctcttc

SEQ ID NO: 565973 - DNA, 120 bp, Artificial Sequence
  ENSG00000170145_64 (sequence is synthesized)
taaccctcacaacaattctatgaaattagctggggagatactgtccttatttttcacagctgaagaaaccaaagctttgggaagtttgtgacttctctgagatcacagctggtgatagaa

SEQ ID NO: 565974 - DNA, 120 bp, Artificial Sequence
  ENSG00000170145_65 (sequence is synthesized)
ggagctgggacacgcgcttgggttgactggcttctggttttggttctctggcttctagtgctggaagaagccctctctttcccttctctttcctcagtagcatctgactcttttcataag

SEQ ID NO: 565975 - DNA, 120 bp, Artificial Sequence
  ENSG00000170145_66 (sequence is synthesized)
caaacagctgtataaacaaagcccccattttggtcaagcacagggtgaatgtgatattgttcccacaaccttattctccactcaacagccgcctggctttggggaagaggccgccttcag

SEQ ID NO: 565976 - DNA, 120 bp, Artificial Sequence
  ENSG00000170145_67 (sequence is synthesized)
gtgacagtgcagctgtccaggtggccgtgcactgaaccaggctgagggagacaaaaaccccgcagacccgcctgcctttcagcgtccagttaactgcagaagtttaggctcacctcaaag

SEQ ID NO: 565977 - DNA, 120 bp, Artificial Sequence
  ENSG00000170145_68 (sequence is synthesized)
atgtctagtttttccaagttacaatacagcagtttcctacagaacacccccttcctcaattgccaaggggccgcatcgcacggcatcaggccaccactgcaggccagcagattccacccc

SEQ ID NO: 565978 - DNA, 120 bp, Artificial Sequence
  ENSG00000170145_69 (sequence is synthesized)
aggaacggtcatgaactcagcctttgtctcaacgaggggcgtaacatttccttacagtcaagccccatcaactagaagtgcttattacttttaggattaaaaaagtaataacagactttg

SEQ ID NO: 565979 - DNA, 120 bp, Artificial Sequence
  ENSG00000170145_70 (sequence is synthesized)
acttaatactctgtcttttcagaggcaaagtgggtgggtagaggggagctttaaaaatagaagtacaaaacaacatcctggaaacatatgaccccagatggaataatgtcacattcccca

SEQ ID NO: 565980 - DNA, 120 bp, Artificial Sequence
  ENSG00000170145_71 (sequence is synthesized)
gtgcagataatgggctgctgctggctctgtggtgtctgtctgcagaagatttgctcagtcaaggaaattcaagtggtgagacctttccaccatgggtggtaagagaaacctgccttcacc

SEQ ID NO: 565981 - DNA, 120 bp, Artificial Sequence
  ENSG00000170145_72 (sequence is synthesized)
aaaatctctgaaggggaaagaagtggagagaaaggtttgcttcacttcggggactgcagtttgagaaataaaagggatacagagatatctgcactttgtagaaagggcaagattatttgc

SEQ ID NO: 565982 - DNA, 120 bp, Artificial Sequence
  ENSG00000170145_73 (sequence is synthesized)
ttatatctgaagggaggtgggtggttttgctggatgtttggtctgaaagagttacttttgataaagttaatctaactgtagttatattttctgtgtgcttttttttaattactaagaaaa

SEQ ID NO: 565983 - DNA, 120 bp, Artificial Sequence
  ENSG00000170145_74 (sequence is synthesized)
aaattggtgagttcagtagctttggtattatgagtgcaaatcataatagctccaatgtgaaaaaaaaaatcaaaagtataacttgtcacttaatgttagaaaattgcctaaaatgcagtg

SEQ ID NO: 565984 - DNA, 120 bp, Artificial Sequence
  ENSG00000170145_75 (sequence is synthesized)
taataaataatctctgtaccaaatagtaatttaaatggggtaattttctgcaaggaaaatgtactgtttttatgtttccaaccctcttgaattaaaataaaaacaacttcttttctaaga

SEQ ID NO: 565985 - DNA, 120 bp, Artificial Sequence
  ENSG00000170145_76 (sequence is synthesized)
tctacccagtgttttccaggtgaaagtactgcttagaactcagcgtcttatgactggctgttcctgagcagctattcataggagaaaatggattgatttccacgggggaatagttaaggt

SEQ ID NO: 565986 - DNA, 120 bp, Artificial Sequence
  ENSG00000170152_0 (sequence is synthesized)
gtgggggatcaagatgaacacactgcagacgaggacacgagccccacaggagctctttgtcccgccggagaccagcggacccacgtcagagaagatgcttgtatcttttcacggctcttc

SEQ ID NO: 565987 - DNA, 120 bp, Artificial Sequence
  ENSG00000170153_0 (sequence is synthesized)
atacagacacacacacacggaccgcttactccgctctgcctgctcgctcccactgtccccaagcccgccccgcccgcggcaagtgcgtgcccaggcgcagccaccggcgagatcaggagc

SEQ ID NO: 565988 - DNA, 120 bp, Artificial Sequence
  ENSG00000170153_1 (sequence is synthesized)
cgcagcctgagggaaccggcgcagggcagcagcggctgcagctggattcgcgcgccccagcgctcagtggcggcggccgggacaccctgggcagcaccccgcaccgcagcaccccagact

SEQ ID NO: 565989 - DNA, 120 bp, Artificial Sequence
  ENSG00000170153_2 (sequence is synthesized)
cccagactacgagcaatcgtgcccgtccccgccggggctggagggcgcagggccgccaccctgcaagttcgtgggcccccggccacccttatgagagaaggcgaagccgggcgaaggagc

SEQ ID NO: 565990 - DNA, 120 bp, Artificial Sequence
  ENSG00000170153_3 (sequence is synthesized)
aggacgctcggcagcaggactcctccgcaagccccgcgggccctctgttcccgcgccccccgggcgcccaagaagcaaaatgcaaccaccgcgctacagctgagaggggaaggggccagc

SEQ ID NO: 565991 - DNA, 120 bp, Artificial Sequence
  ENSG00000170153_4 (sequence is synthesized)
cagctgagaggggaaggggccagcgccatccgctcgcccggaatccggtccccgcggcggctgcgcgtcccggccgcggcccctccggcccgggagtgagcagcagcaggaggagaggca

SEQ ID NO: 565992 - DNA, 120 bp, Artificial Sequence
  ENSG00000170153_5 (sequence is synthesized)
gggaggagggacgggacggagggagggcgcgggggcggggagggggccccggcggataaagatggcaatgtctctcatccaagcgtgctgcagtctggctctctcaacatggctgctttc

SEQ ID NO: 565993 - DNA, 120 bp, Artificial Sequence
  ENSG00000170153_6 (sequence is synthesized)
cttttgtttcgtgcatctgctctgcctggactttaccgtggccgagaaggaggaatggtacaccgccttcgtgaacatcacctacgccgagcccgcgccggaccccggggccggggcggc

SEQ ID NO: 565994 - DNA, 120 bp, Artificial Sequence
  ENSG00000170153_7 (sequence is synthesized)
gggcggcggcggcgcggagctgcacacggagaagacggagtgcgggcgctacggagagcactcgcccaagcaggacgcccgcggggaggtggtcatggccagctcggcccacgaccgcct

SEQ ID NO: 565995 - DNA, 120 bp, Artificial Sequence
  ENSG00000170153_8 (sequence is synthesized)
ggcctgcgaccccaacaccaagttcgccgccccgacccgcggcaagaactggatagccctcatccccaagggcaactgcacgtacagggataagatccggaacgcgttcctgcagaacgc

SEQ ID NO: 565996 - DNA, 120 bp, Artificial Sequence
  ENSG00000170153_9 (sequence is synthesized)
ctcagccgtggtcatcttcaacgtgggctccaacaccaacgagaccatcaccatgccccacgcgggtgtagaagacatcgtggccataatgattcctgagccaaaagggaaggagatagt

SEQ ID NO: 565997 - DNA, 120 bp, Artificial Sequence
  ENSG00000170153_10 (sequence is synthesized)
aagcctgctggaaagaaacatcaccgtgacaatgtacatcaccatcggaacccggaacttgcagaaatatgtgagccgcacttcggttgtgtttgtctccatctccttcattgtcctgat

SEQ ID NO: 565998 - DNA, 120 bp, Artificial Sequence
  ENSG00000170153_11 (sequence is synthesized)
gatcatttccctcgcatggctcgtcttttattacatccagaggtttcgatatgcaaatgccagggataggaaccagcgccgactgggggatgcagcaaagaaagccatcagcaaactcca

SEQ ID NO: 565999 - DNA, 120 bp, Artificial Sequence
  ENSG00000170153_12 (sequence is synthesized)
gatcaggaccatcaagaagggtgacaaggaaacagagtctgattttgacaactgtgcagtttgtattgaagggtacaagcccaatgacgttgtccggatcctgccctgccggcatctttt

SEQ ID NO: 566000 - DNA, 120 bp, Artificial Sequence
  ENSG00000170153_13 (sequence is synthesized)
ccacaagtcctgtgttgacccctggcttctagaccatcgtacctgtcccatgtgcaagatgaacattcttaaagccctagggatcccgcccaatgccgactgcatggacgacttgcccac

SEQ ID NO: 566001 - DNA, 120 bp, Artificial Sequence
  ENSG00000170153_14 (sequence is synthesized)
tgacttcgagggctctctgggaggtccacccaccaaccagatcacaggtgccagcgacacaacagtgaatgaaagttcagtcactttggaccctgctgtccggactgtgggagccttgca

SEQ ID NO: 566002 - DNA, 120 bp, Artificial Sequence
  ENSG00000170153_15 (sequence is synthesized)
ggtggtccaggatacagaccccatcccccaggagggagacgtcatctttactactaacagtgagcaggagccagctgtaagcagtgattctgacatttccttgatcatggcaatggaggt

SEQ ID NO: 566003 - DNA, 120 bp, Artificial Sequence
  ENSG00000170153_16 (sequence is synthesized)
tggactgtctgatgtagaactttccactgaccaggactgtgaagaagtgaaatcttgaaacgacaaatccagaagcaaagagatagtaggacccaagggaaaggaagggaagagtgctcc

SEQ ID NO: 566004 - DNA, 120 bp, Artificial Sequence
  ENSG00000170153_17 (sequence is synthesized)
aagacttggaccaggcacacacacacctccagatcaccttggcaactccagggcgctccgttcaagaatgctgacgaaaagcaatatccaaagtcttgtcaatcaggatgcagtttctcc

SEQ ID NO: 566005 - DNA, 120 bp, Artificial Sequence
  ENSG00000170153_18 (sequence is synthesized)
atcggtatggcagtctgtggccttggcagctgggaagttgaaagctgatttccactcctatgtccatgtagacatacacttcagaagctcctaaaacagagactgaaaggccacctttag

SEQ ID NO: 566006 - DNA, 120 bp, Artificial Sequence
  ENSG00000170153_19 (sequence is synthesized)
gatttcttagtttcatttcaattctttccatgtctcatcattcttgtttttggcatgttgtttgatttctttggcaatttttttaaagattatttgtagtttactttccatctattcctt

SEQ ID NO: 566007 - DNA, 120 bp, Artificial Sequence
  ENSG00000170153_20 (sequence is synthesized)
tgtttttcctttgatgcactccagcttttgtataggtttctgtttagaagcaccagttcctgctatgatcagtttgtattccatctctgagatatgtggtcttgacctcccagcatgaag

SEQ ID NO: 566008 - DNA, 120 bp, Artificial Sequence
  ENSG00000170153_21 (sequence is synthesized)
tgtgcatggctttgagaagtgcctcagcaccctgaaatggactaaggccagctttcattaagaatctaagttcttctaagtgggcctttaaaaaccccagctgccagagaccccaacact

SEQ ID NO: 566009 - DNA, 120 bp, Artificial Sequence
  ENSG00000170153_22 (sequence is synthesized)
aagccctaaatctgctgaggccactgctggttattttaagccacatcacacttgcttccacttgccgggcttgattaagggcccacgtgacatgagaagggagctctagggaagccgttt

SEQ ID NO: 566010 - DNA, 120 bp, Artificial Sequence
  ENSG00000170153_23 (sequence is synthesized)
cattcttctgggtcttacagtctttggctgaaattctgaactcagaagtcccctccaaggcatccagtctttggtggttgtagggctggttttaaaaccagataccacattttcttccta

SEQ ID NO: 566011 - DNA, 120 bp, Artificial Sequence
  ENSG00000170153_24 (sequence is synthesized)
ttgaaaacaaaatgccagttgcattggtttcccctgggctagaacagtttttttcttacctctgtaagtgggttctgtaaaaaatggaggctttagagaaaagccaatcatttttaagtc

SEQ ID NO: 566012 - DNA, 120 bp, Artificial Sequence
  ENSG00000170153_25 (sequence is synthesized)
caatggcaaacatagtgggggctgcagtagcacctagcttttaccttaatttcgacacacttctgttgaatctcaccagaccatgtgggaggatttaggtgaatccctagcagattgctt

SEQ ID NO: 566013 - DNA, 120 bp, Artificial Sequence
  ENSG00000170153_26 (sequence is synthesized)
cccagggctccctgagtgtgtccagataccaagtgaggaatgaggtgtgatttgctgtatcatttgaaccaaaaagtatgcagcatgagaatttgctagatcgtttatcctgactgaaat

SEQ ID NO: 566014 - DNA, 120 bp, Artificial Sequence
  ENSG00000170153_27 (sequence is synthesized)
agacaaagtaagagggaaaggaaaagaggtatcaagtaaatactgaaacccaatggtgtttttaaactgtttctgtttttattcatcttttgtaactatgacagaaatgtgctatttttt

SEQ ID NO: 566015 - DNA, 120 bp, Artificial Sequence
  ENSG00000170153_28 (sequence is synthesized)
cagtgggcaattttgtaatatattcagactatccagatacagagatgactaaggtcattgatagcgtctctgaacaatcagacggatcaccttatctctacacagctggcaaacaccagg

SEQ ID NO: 566016 - DNA, 120 bp, Artificial Sequence
  ENSG00000170153_29 (sequence is synthesized)
ctgcggcttggattaaccaggaaagaaagcttttctcactgagttgtttttatgtattgatggggacttttccacctcattagactaatactcattcaaaaagagtttggttctgctgta

SEQ ID NO: 566017 - DNA, 120 bp, Artificial Sequence
  ENSG00000170153_30 (sequence is synthesized)
aatccttgccgcctgctgaaacatggtgtgcaggtcaacggagaatactagctgctcctttttcaccacctttaccaatttcctatttgatggtttgtaagtagacagtaaggcaaggca

SEQ ID NO: 566018 - DNA, 120 bp, Artificial Sequence
  ENSG00000170153_31 (sequence is synthesized)
gatgattattaccctcagaaaggttgcatctccctaggagtccaatgcttcctgtaatgaaatccactctctatgtgtgggaaaagaggcagggaggaatgaagagagctctgaatcgag

SEQ ID NO: 566019 - DNA, 120 bp, Artificial Sequence
  ENSG00000170153_32 (sequence is synthesized)
aatcctagatgaaccacacgctttactaagcctcggcttcttcatctataatgtgaagggtttaataacatgagtccccaagctcctctggctgtgggaccacagatgagtctttcagag

SEQ ID NO: 566020 - DNA, 120 bp, Artificial Sequence
  ENSG00000170153_33 (sequence is synthesized)
gcaggatccatttttgcagatagctatgacttgtggcaatcaggcttcgtagcttggggaggtagagttacttgacatgtatcatgtaataacagcctttgagacttggcacaactatgg

SEQ ID NO: 566021 - DNA, 120 bp, Artificial Sequence
  ENSG00000170153_34 (sequence is synthesized)
tgctgagaatgaaaatctaaatgattgaagttttaagtccaagtaggagttggtttgttttgccttgtttaaaaattgctgttagtcacagagtttgcaatctctggataccttcaaatc

SEQ ID NO: 566022 - DNA, 120 bp, Artificial Sequence
  ENSG00000170153_35 (sequence is synthesized)
ctagctctcactgtgggattcttgatctcagaggtgtttatttttcacagtcagcataggcttgcgccactgactcctccttcagtcggctttgcccaaaacaaattttagtattactgg

SEQ ID NO: 566023 - DNA, 120 bp, Artificial Sequence
  ENSG00000170153_36 (sequence is synthesized)
tattaagtttagtccagtggaattagaaggataattcaatagcaacagaaatataaattatattccattcccagagagagaatgcgctttggattgtttagtcctctgattaacgagtat

SEQ ID NO: 566024 - DNA, 120 bp, Artificial Sequence
  ENSG00000170153_37 (sequence is synthesized)
tttctcttcctgccaagaactaggtgaatcaggaattgattgcatatgcaagccctggccacagctgcacttacaggatgcctcatagacgatgaggggtctgaaaggccaacccgaggc

SEQ ID NO: 566025 - DNA, 120 bp, Artificial Sequence
  ENSG00000170153_38 (sequence is synthesized)
tggcagatctgaccccaaggaggtcctgctgcaaaccccctgagcctttgccattcactacttaccaaagtttgtttctggaggattttcctgtagctttgatagtttaaaaaaaaaaaa

SEQ ID NO: 566026 - DNA, 120 bp, Artificial Sequence
  ENSG00000170153_39 (sequence is synthesized)
aaaaagaaaaaaaaaaagcttaaccagaaagtttctctttcagaagaaaggggaacagcccttccttatagccttctttacctcccccaaagaagagactgacctggagacctggtagtc

SEQ ID NO: 566027 - DNA, 120 bp, Artificial Sequence
  ENSG00000170153_40 (sequence is synthesized)
tacagatgagtgtcagagggtgtgtgtaccctctagaagcaaatgcagactgtatgtgtatttgcagatgtgcatttttctatagcaagagtctagactagcactgtccaacagaaacgt

SEQ ID NO: 566028 - DNA, 120 bp, Artificial Sequence
  ENSG00000170153_41 (sequence is synthesized)
aatgcaagtcacagacataattttaaattttctactagccacattttaaagtgtaaaaagaaacaggtaaagataattttaatcatgtactttaacctaatattgtttcaacatgtcact

SEQ ID NO: 566029 - DNA, 120 bp, Artificial Sequence
  ENSG00000170153_42 (sequence is synthesized)
aatgtaaattaatgacatgttttacatgcttttgtgtactaagtcttctaaatccattgtgtcttttacactcacagcacctctcaatttggatagtcacatgtggctagtggctgccaa

SEQ ID NO: 566030 - DNA, 120 bp, Artificial Sequence
  ENSG00000170153_43 (sequence is synthesized)
caagtcgcctaatgagaggcccagaggtccatttattttgtagtgaataaagattcaggcaccctttttaaaatttctgcttgaactttctaaccatatcattgatgtccatgaccattt

SEQ ID NO: 566031 - DNA, 120 bp, Artificial Sequence
  ENSG00000170153_44 (sequence is synthesized)
gttgttactcctctgaccagttgttacttaaaactcacacaaaccatgctgatttggtgctgaaacaaaattatacccctcacttctatggcaaaccctcggactgatatgtggcactta

SEQ ID NO: 566032 - DNA, 120 bp, Artificial Sequence
  ENSG00000170153_45 (sequence is synthesized)
ggagccaaagagaactccagactgaaatcacccaactttacctcaaccccttcttcttgttcatggttggtgaaagtcctttcccagtgtcccccagtcccacagctgtagtgaaaactc

SEQ ID NO: 566033 - DNA, 120 bp, Artificial Sequence
  ENSG00000170153_46 (sequence is synthesized)
acgaacttgggaggaaagaatgagaaatgcaagactttatgtggccttcttgaaaaagaatctttgggggcctgtgatcatccggtctctacttggtgaattatgaccacctccaacagc

SEQ ID NO: 566034 - DNA, 120 bp, Artificial Sequence
  ENSG00000170153_47 (sequence is synthesized)
cagcattttactccaagtcagcatccacctgccaccccaatgctatggggaagaaaaggagcatttgcattcactcaaaataatttagggtcacctttaggaactgctacctcctatgtg

SEQ ID NO: 566035 - DNA, 120 bp, Artificial Sequence
  ENSG00000170153_48 (sequence is synthesized)
gctagtccctttggaagagctgagccctgactatgaatacagcttttgaacattgacttaatctctagggttagatatcccctgcagtgtcaactctggtcatctacacagggagaggta

SEQ ID NO: 566036 - DNA, 120 bp, Artificial Sequence
  ENSG00000170153_49 (sequence is synthesized)
gagtctggagaaggcagaaaattaaaagcggcaaaggtacctacccatttttgacatcacatggtaatgatcagaatcatggaggcaaagctctgtccaaaaatgttcattttgttttgt

SEQ ID NO: 566037 - DNA, 120 bp, Artificial Sequence
  ENSG00000170153_50 (sequence is synthesized)
tttgttttgttttcttgtttttaacatttccttcatcctggtgaaatatcctggaaattcatagatctgggtttggtcatttcaaagctcaccatgcccagtggccatttcagttactgc

SEQ ID NO: 566038 - DNA, 120 bp, Artificial Sequence
  ENSG00000170153_51 (sequence is synthesized)
cctgacatccctgaggctaccatactctcaaaaccaaatcaatgccagtgatctaacataggattctttcttatttatgagttttgtttagatggatatttttgcagagcataaaaaatt

SEQ ID NO: 566039 - DNA, 120 bp, Artificial Sequence
  ENSG00000170153_52 (sequence is synthesized)
aaatgacatttagttatccattgaatgtatcaccctgacttaaaaaaaaatccttaaatcaaaacttttcaaaaaatctgggctatggagtcactccctctgtggagcgagagcccagtc

SEQ ID NO: 566040 - DNA, 120 bp, Artificial Sequence
  ENSG00000170153_53 (sequence is synthesized)
ttttctggtactaaggccacagaggcaatttccagtagcatttttatatcttctctaagtttcttttccttttctgtctgtatctgtttttctctgactgcctatatcttactttgtata

SEQ ID NO: 566041 - DNA, 120 bp, Artificial Sequence
  ENSG00000170153_54 (sequence is synthesized)
cccatacataaattattttcccatcttctctcttcccctttttttctgatttgttttctctcttgcaagaaactctgaaataaccttcagaacacaaaaaactggaggttctatacctac

SEQ ID NO: 566042 - DNA, 120 bp, Artificial Sequence
  ENSG00000170153_55 (sequence is synthesized)
agagtcattatcattattgtgattaccattgttactgttgttggtgtttttcctctttttattgtgtagcaatatccatattcacttctgatgaggcaaacctgtttactataaaccaat

SEQ ID NO: 566043 - DNA, 120 bp, Artificial Sequence
  ENSG00000170153_56 (sequence is synthesized)
gtcctccctaaaggagtcagtttcattttcacttctcacatcaccagttgtatcgcaacccatcttacaaccattgccatgttttcaggcttccttgccataaatgttttctgggcaaat

SEQ ID NO: 566044 - DNA, 120 bp, Artificial Sequence
  ENSG00000170153_57 (sequence is synthesized)
aatggcaaagcaacaattccagaatgctgtctagatctgctttctcccaccctcagcatttgaccctcctcattcgcctgagcccccagggttaggatttcttggaaaaacttgtatact

SEQ ID NO: 566045 - DNA, 120 bp, Artificial Sequence
  ENSG00000170153_58 (sequence is synthesized)
gtacctgatggaatgcccattcttcctaactacttagcacaagtgcttgctcatcgtaagtgatctgagggccactaattcctgaagactgacaaagagacacgaagagactaccctctt

SEQ ID NO: 566046 - DNA, 120 bp, Artificial Sequence
  ENSG00000170153_59 (sequence is synthesized)
aagatggggatgcatggttcttcatgcagtgctcttggccaccgaggtccttcatccatgccattgcatggatgaatacgtttgatgttggcagttaaaatgggatgggagtgtcaccct

SEQ ID NO: 566047 - DNA, 120 bp, Artificial Sequence
  ENSG00000170153_60 (sequence is synthesized)
gcaggaagtaagaaaagaggatggcaggatctctgatcagggagctggtcaaagcagggctggaaagcttctgtgcttaacaaaatgtgcgtgctgtccccaagtaaatgctcatcccta

SEQ ID NO: 566048 - DNA, 120 bp, Artificial Sequence
  ENSG00000170153_61 (sequence is synthesized)
ggtttagagctgacctgggttttggggagtttgtatttttaaggaattaaatactcatgagttaaaatactcatgattgcaaagaaggtctggattgcctgaaaaataaattaattctaa

SEQ ID NO: 566049 - DNA, 120 bp, Artificial Sequence
  ENSG00000170153_62 (sequence is synthesized)
gaagctaatatgagtttctcatcatcccttagctcttccttttccctccttttgtcctcactcaaccccagaccctgtgtaataggaacattaatttttaaagacccacagatcaatagc

SEQ ID NO: 566050 - DNA, 120 bp, Artificial Sequence
  ENSG00000170153_63 (sequence is synthesized)
cacactcttccactctacaccttttattgacaccaagttatcatcccagaactaatgaagcaagtccagatgctagacgtggccccttaatatcgagcaatttgattgcaatcctgcttg

SEQ ID NO: 566051 - DNA, 120 bp, Artificial Sequence
  ENSG00000170153_64 (sequence is synthesized)
ttctacaagaacctgctaaggtcagtcacatctctcttcacctgccttgagtgcttcataatcacgtggctttttcaggaatttcagtgatcaaagatcttctaattctgtgctaccact

SEQ ID NO: 566052 - DNA, 120 bp, Artificial Sequence
  ENSG00000170153_65 (sequence is synthesized)
gacgtttgcacttaatacagagccatttgctctgtggccacctgataaatatttgctgatgataagacaaaaatatacacgtctattaagaggtctgcaatgtctgaacacagtgaggga

SEQ ID NO: 566053 - DNA, 120 bp, Artificial Sequence
  ENSG00000170153_66 (sequence is synthesized)
gaaaaatccttagagaaggtcgcttaatctcaattacccaaagtcattgcttggcagaatatctgtggtctgttatccttagtgaagtgacaggcttggagaagcagggtaatgtgggga

SEQ ID NO: 566054 - DNA, 120 bp, Artificial Sequence
  ENSG00000170153_67 (sequence is synthesized)
ccatgtgtgctatataaaccaaagactgatcaccatccaaatgaacacatgtttcttccattgactagttgaattttctcccaatgttctcataaataaaagcgaaggtgggttgcatgg

SEQ ID NO: 566055 - DNA, 120 bp, Artificial Sequence
  ENSG00000170153_68 (sequence is synthesized)
ttgaatgaaaccattaaaccttatggggttttctgttgcagactgttgattgaccttactaaatcccgaaatctaaaaaatgaattgtggccttagtaccacaccatctttaaagtctag

SEQ ID NO: 566056 - DNA, 120 bp, Artificial Sequence
  ENSG00000170153_69 (sequence is synthesized)
tgtttagtccccttttccttcaaaactttccaacaaatctagcgctttactgaactcagaacattgttctctttgagaatgtgaagattttaaatagccaaagaattttcatgtataaga

SEQ ID NO: 566057 - DNA, 120 bp, Artificial Sequence
  ENSG00000170153_70 (sequence is synthesized)
gctagctaaatatagtatatcctgctctttcgaagaagatacaaaactgttgcctgtactaatgggtatagtagagcagttgaagaactaacacatacatggacttttcggtctgaattt

SEQ ID NO: 566058 - DNA, 120 bp, Artificial Sequence
  ENSG00000170153_71 (sequence is synthesized)
gtgttggcatccatggtacttactgttcagtaggatgttattgcaaggagcagagtgccctctgctggagtaatcgcaattattcttgcagcagattaatttgacttgggtcatgaattc

SEQ ID NO: 566059 - DNA, 120 bp, Artificial Sequence
  ENSG00000170153_72 (sequence is synthesized)
aacaaccagttacttgcctttcatcatacaatttcttcggtagttgagaatttggtctacatttatcaaatgaggaaagagtgtcacaaactctaaaaagctgaaggagaccccacagat

SEQ ID NO: 566060 - DNA, 120 bp, Artificial Sequence
  ENSG00000170153_73 (sequence is synthesized)
cttctcactgtcagcagcccttacttctgcaaaatgttgaaggataatgttgctctgtttgcaaagaagatgcctctggctagaatgtttgtgcagttataagcaagggactgcttgttt

SEQ ID NO: 566061 - DNA, 120 bp, Artificial Sequence
  ENSG00000170153_74 (sequence is synthesized)
ttgtaagttatctcaactttattcttgtgaaattgcaaaggaagatcaataaaaagacttcatatgaatgtaaatggtgtgaaatactgatgtgttttgtacatgtacataatatattta

SEQ ID NO: 566062 - DNA, 120 bp, Artificial Sequence
  ENSG00000170153_75 (sequence is synthesized)
cttcctgctttcacattagtaatctgagatggttctaccattttataattagaaggagatgtaggggtgggagtggggagggactgttatttttatagaggggtgtcccttacatttaga

SEQ ID NO: 566063 - DNA, 120 bp, Artificial Sequence
  ENSG00000170153_76 (sequence is synthesized)
aaatgaaataattttgtatttgtgaaaagttacattccatccattttctggaaaaaaaaatgggtattgttctttaaaatgttcatgagctgggaggatgattattctggtttccagggg

SEQ ID NO: 566064 - DNA, 120 bp, Artificial Sequence
  ENSG00000170153_77 (sequence is synthesized)
aaactctcaagcagtacatatgtgatactcagttttgtagactgcagacaataaccagcaattgccagttgcaaaaatgtgaaaaagaaataacttattttaaccactttgtacagcata

SEQ ID NO: 566065 - DNA, 120 bp, Artificial Sequence
  ENSG00000170153_78 (sequence is synthesized)
ttatttcccactagaaaaaaatctgcaaataatgaatttacaattataaataatcagacatgacatcataaatcaatcttcctccctactagcaagaggaaattccaatggctttttttc

SEQ ID NO: 566066 - DNA, 120 bp, Artificial Sequence
  ENSG00000170153_79 (sequence is synthesized)
catcctaacacaaattacttttattgtaaacaaatgcttgcaacaaaatgcttttgttgtaaaatgattgatgttggggtaaagtctacttagcttccccacaaggtctttctggctagt

SEQ ID NO: 566067 - DNA, 120 bp, Artificial Sequence
  ENSG00000170153_80 (sequence is synthesized)
ctgcaggtagtagatgatggttccatctcggcattgtctatcctctccatattcagactgtgtgactgagcttccttgatttatatagcatctgacccaaaatcacaaaaaagtcactcc

SEQ ID NO: 566068 - DNA, 120 bp, Artificial Sequence
  ENSG00000170153_81 (sequence is synthesized)
tgatgacatttgcatggggagtctttcatttggacttcagttcttaattgccgaaataagtactagtgaattatgtagcgtttttacccaaaactaatcttctgtacaaagttgtgtgca

SEQ ID NO: 566069 - DNA, 120 bp, Artificial Sequence
  ENSG00000170153_82 (sequence is synthesized)
tattgagatgattagttaaggcagtgtagttttttaaattttttctgtataaatttctttccttcttccccacctcaggcacctaccctactcctttcagagcactttatatccctcttg

SEQ ID NO: 566070 - DNA, 120 bp, Artificial Sequence
  ENSG00000170153_83 (sequence is synthesized)
aaatacaaagaaattgaaaaaaaaaaaaaagtaactgtctttaaaggaatttgtcttctattaggagacacagacttttattttgctttattctattctctttgtacttggagagcgtaa

SEQ ID NO: 566071 - DNA, 120 bp, Artificial Sequence
  ENSG00000170153_84 (sequence is synthesized)
tcaacttgtctcataatgggctagtgatgaaacaagggtgatagttggaaacagtcattacaacatggttatttttgttatatagaagactatcatgtaaataagtgcaatcgtgttctt

SEQ ID NO: 566072 - DNA, 120 bp, Artificial Sequence
  ENSG00000170153_85 (sequence is synthesized)
acgtactggctaaaaaaaaaatattgcaactataaggatttttaaatgagggttgtgaattccaggaaatttcactgcaaaatttcttttggttttgttttttaataaaatggaaccaga

SEQ ID NO: 566073 - DNA, 120 bp, Artificial Sequence
  ENSG00000170153_86 (sequence is synthesized)
ggagggagacgtcatctttactactaacagtgagttctgccatacttaaagtgacatagccagaaggactgttgccttgtaggaattggaaaaaaatacctttcctcaaaaagaaaaaaa

SEQ ID NO: 566074 - DNA, 120 bp, Artificial Sequence
  ENSG00000170153_87 (sequence is synthesized)
ttgcatcttcttggcataaaaactgtttcaaaaaatgttccagtttatcatctcccttcactcacactttttctgtggcctcataactgctgacattcttggtgcatctcttcactattg

SEQ ID NO: 566075 - DNA, 120 bp, Artificial Sequence
  ENSG00000170153_88 (sequence is synthesized)
ttttcatttagaatgtctttccaaattatactcttgtgtcacaactttttcaaaatcattttatcgcttgtctctttctgagacccatgaacaaattatgatgaattattaataaatgcc

SEQ ID NO: 566076 - DNA, 120 bp, Artificial Sequence
  ENSG00000170153_89 (sequence is synthesized)
catgtgaagattgtgcttgctttccttccatcccttagccataattgcctgtttcctgagacctcctgtacagcctatggaactgtttaatgtcttctcatgcccagcccctgaagctga

SEQ ID NO: 566077 - DNA, 120 bp, Artificial Sequence
  ENSG00000170160_0 (sequence is synthesized)
cggtcctcctttcgcagattggaaaccgcgggctatcctgctgggaggttgtggccgaggcagtagctcgctactgatggcctcctggggtggagaaaagcggggaggggctgaggggtc

SEQ ID NO: 566078 - DNA, 120 bp, Artificial Sequence
  ENSG00000170160_1 (sequence is synthesized)
tccgaagccggcagtctacgccacgaggaagacccctagcgtcgggagccagggggaccagtggtacttgggctacccgggggaccagtggtcctcgggcttcccctacagctggtggaa

SEQ ID NO: 566079 - DNA, 120 bp, Artificial Sequence
  ENSG00000170160_2 (sequence is synthesized)
aaacagcgtcggcagcgagagcaagcacggtgagggcgccttagaccagccccagcacgacgtccgcctggaagatcttggcgagctccacagagctgcccggtcgggcgacgtccctgg

SEQ ID NO: 566080 - DNA, 120 bp, Artificial Sequence
  ENSG00000170160_3 (sequence is synthesized)
ggtggagcacatcttagctcctggagacactggcgtggacaagagggataggaagaagagcattcagcaactagttcctgaatataaggaaaaacagacacctgaaagtcttcctcaaaa

SEQ ID NO: 566081 - DNA, 120 bp, Artificial Sequence
  ENSG00000170160_4 (sequence is synthesized)
taacaatccagattggcatcctactaatttgacccttagtgatgagacttgtcagagatccaagaatctgaaagttgatgataaatgtccatctgtatcaccatcaatgcctgaaaatca

SEQ ID NO: 566082 - DNA, 120 bp, Artificial Sequence
  ENSG00000170160_5 (sequence is synthesized)
gtcagcaaccaaagaactgggacagatgaacttaacagaacgagaaaagatggacactggagttgtacttctctcagggaatgatactctccatgacctgtgccaatcacagctaccaga

SEQ ID NO: 566083 - DNA, 120 bp, Artificial Sequence
  ENSG00000170160_6 (sequence is synthesized)
aaacaaagagagcaaagaagcagaacaagactcggagctgacatcagaggaagagcaagaaagacttaaaggatgcgaaaataagcagccacagaaaacgtctcaagaaccagaaatggc

SEQ ID NO: 566084 - DNA, 120 bp, Artificial Sequence
  ENSG00000170160_7 (sequence is synthesized)
taaggattgcgatagagaggatatacctatatatccagtacttcctcatgtgcaaaaatctgaggaaatgtggattgaacaaggcaaattagagtggaaaaaccaattaaaactcgtcat

SEQ ID NO: 566085 - DNA, 120 bp, Artificial Sequence
  ENSG00000170160_8 (sequence is synthesized)
aaatgagttaaagcagaggtttggtgaaatttatgaaaaatacaaaattccggcttgtcctgaggaagagccactacttgataactctacaagaggaacagatgtaaaggatattccctt

SEQ ID NO: 566086 - DNA, 120 bp, Artificial Sequence
  ENSG00000170160_9 (sequence is synthesized)
taatttgacaaataacatacctggttgtgaggaagaagatgcatctgaaatatctgtctcagtggtattcgagacatttcctgaacaaaaagaacccagtctcaaaaatatcatccatcc

SEQ ID NO: 566087 - DNA, 120 bp, Artificial Sequence
  ENSG00000170160_10 (sequence is synthesized)
atactatcatccatactctgggtcccaggaacatgtttgccagtcatcttctaagtttcatttacatgaaaataaattagactgcgacaatgataacaaaccaggcattggacatatttt

SEQ ID NO: 566088 - DNA, 120 bp, Artificial Sequence
  ENSG00000170160_11 (sequence is synthesized)
tagtacagataagaactttcataatgatgcaagcactaagaaagcaaggaacccagaagtggttatggttgaaatgaaagaagaccaagagtttgatttgcaaatgacaaaaaatatgaa

SEQ ID NO: 566089 - DNA, 120 bp, Artificial Sequence
  ENSG00000170160_12 (sequence is synthesized)
ccaaaatagtgacagtggcagtacaaacaactataaaagcctgaaacctaaattagaaaatctgagttctttaccaccagattctgacagaacatcagaagtatatctacatgaagaatt

SEQ ID NO: 566090 - DNA, 120 bp, Artificial Sequence
  ENSG00000170160_13 (sequence is synthesized)
acagcaagacatgcaaaagtttaagaatgaggtcaacacattagaagaagagttcctggctttgaagaaagaagatgttcaacttcataaagatgttgaagaagaaatggagaagcacag

SEQ ID NO: 566091 - DNA, 120 bp, Artificial Sequence
  ENSG00000170160_14 (sequence is synthesized)
aagtaatagcacagaattatcaggaaccctaactgatggtactactgttggcaatgatgatgatggactaaatcagcagattcctaggaaggaaaatggagagcatgacaggcctgcaga

SEQ ID NO: 566092 - DNA, 120 bp, Artificial Sequence
  ENSG00000170160_15 (sequence is synthesized)
taaaacatctaatgaaaagaacgaggtcaaaaaccaaatatatcctgaggctgactttgctgactcaatggagccatctgaaatagcctcagaggattgtgaattgtctcactctgttta

SEQ ID NO: 566093 - DNA, 120 bp, Artificial Sequence
  ENSG00000170160_16 (sequence is synthesized)
tgagaattttatgttgctgattgaacaacttagaatggagtataaagattctgctagcctaccaagaatccaagacacattttgtttgtgtgaacacttactgaaacttaagaataatca

SEQ ID NO: 566094 - DNA, 120 bp, Artificial Sequence
  ENSG00000170160_17 (sequence is synthesized)
ctgtgaccaacttacagtaaaacttaaacaaatggaaaatatggtcagtgtactacaaaatgagctatctgaaacaaaaaagacaaaattacagttagaacttcaaaaaattgaatggga

SEQ ID NO: 566095 - DNA, 120 bp, Artificial Sequence
  ENSG00000170160_18 (sequence is synthesized)
gaaagagctgtacgatttgagacttgccttaaaacaagaaaatgaggagaaaagaaatgccgatatgttgtataataaagatagtgaacagttaagaataaaagaagaggagtgtgggaa

SEQ ID NO: 566096 - DNA, 120 bp, Artificial Sequence
  ENSG00000170160_19 (sequence is synthesized)
agtggttgaaacaaagcaacaacttaaatggaatctgagaagacttgttaaggaattgaggacagtaagaaataacttggatctggttgtgcaggagagaaacgatgcccagaagcaact

SEQ ID NO: 566097 - DNA, 120 bp, Artificial Sequence
  ENSG00000170160_20 (sequence is synthesized)
ttctgaagaacaggatgccagaatattacaagatcagattctgacgagtaaacaaaaggaactagaaatggctcgaaagaaaatgaattctgagatttctcataggcatcagaaagaaaa

SEQ ID NO: 566098 - DNA, 120 bp, Artificial Sequence
  ENSG00000170160_21 (sequence is synthesized)
ggatctctttcatgaagattgcatgttgcaggaagaaattgccttgctgagactggaaatagatacaataaaaaatcagaacaagcaaaaggaaaagaaatattttgaggacattgaggc

SEQ ID NO: 566099 - DNA, 120 bp, Artificial Sequence
  ENSG00000170160_22 (sequence is synthesized)
tgtgaaagaaaagaatgataaccttcaaaaaattataaaactaaatgaggaaacattaacagaaacaatactccagtacagtggacagctgaacaatctgacagctgagaacaaaatact

SEQ ID NO: 566100 - DNA, 120 bp, Artificial Sequence
  ENSG00000170160_23 (sequence is synthesized)
caattctgaactggagaatgggaaacagaaccaagaaagactagaaatagaaatggaatcataccgttgtagactagctgctgctgtacgtgactgtgatcaaagtcagacagcaagaga

SEQ ID NO: 566101 - DNA, 120 bp, Artificial Sequence
  ENSG00000170160_24 (sequence is synthesized)
tctggcctacaagctaagaatgagattctttctgaaaaactttctaatgctgaaagtaaaattaacagcctacaaattcagctccataacacaagagatgctcttggaagagagagtttg

SEQ ID NO: 566102 - DNA, 120 bp, Artificial Sequence
  ENSG00000170160_25 (sequence is synthesized)
attttggaacgtgtgcaaagagacctcagccaaacacagtgtcagaagaaagaaactgaacaaatgtaccaaattgaacaaagcaaactgaagaaatacattgccaagcaggaatctgta

SEQ ID NO: 566103 - DNA, 120 bp, Artificial Sequence
  ENSG00000170160_26 (sequence is synthesized)
gaggagagattatctcaactacaaagtgaaaatatgttgcttcgacagcaactggatgatgctcacaagaaagctaacagtcaagaaaagacaagcagtactatccaagaccagtttcat

SEQ ID NO: 566104 - DNA, 120 bp, Artificial Sequence
  ENSG00000170160_27 (sequence is synthesized)
tctgctgccaaaaatcttcaagctgagagtgaaaagcagattctttcactacaagagaagaacaaggagctgatggatgaatataatcatttaaaagaaagaatggatcaatgtgagaaa

SEQ ID NO: 566105 - DNA, 120 bp, Artificial Sequence
  ENSG00000170160_28 (sequence is synthesized)
gagaaagcaggaagaaaaattgaccttacagaagcacaggaaactgtaccttcacgatgtctacatctggatgcagagaatgaagttcttcaacttcaacagacattattctctatgaaa

SEQ ID NO: 566106 - DNA, 120 bp, Artificial Sequence
  ENSG00000170160_29 (sequence is synthesized)
gcaatacaaaagcaatgtgaaacactacagaagaataagaagcagctgaaacaagaagtagtaaacctcaaaagttatatggaaagaaatatgttagaacgtggtaaagctgaatggcat

SEQ ID NO: 566107 - DNA, 120 bp, Artificial Sequence
  ENSG00000170160_30 (sequence is synthesized)
aaactgttgattgaagaaagagcaaggaaggagatagaagaaaaattaaacgaagccattctcaccttgcagaaacaagcagcagtatctcatgaacagttagtacagttaagggaggat

SEQ ID NO: 566108 - DNA, 120 bp, Artificial Sequence
  ENSG00000170160_31 (sequence is synthesized)
aatactacttcaataaaaactcagatggaactcacaatcaaagatctggaatctgaaatctccagaataaaaacttcgcaagccgactttaataaaaccgaattggaaagatataaggaa

SEQ ID NO: 566109 - DNA, 120 bp, Artificial Sequence
  ENSG00000170160_32 (sequence is synthesized)
ctctacctagaagaagtgaaagttagagaatccttgtcaaatgaactcagtagaactaatgagatgatagcagaggtcagtacgcaacttactgtggagaaagagcagaccagatccaga

SEQ ID NO: 566110 - DNA, 120 bp, Artificial Sequence
  ENSG00000170160_33 (sequence is synthesized)
tctctattcactgcttatgctacaaggccagtcctagagtcaccttgcgttggaaatcttaatgatagtgaaggtctcaacagaaaacatattccaagaaaaaagaggtctgctcttaag

SEQ ID NO: 566111 - DNA, 120 bp, Artificial Sequence
  ENSG00000170160_34 (sequence is synthesized)
gacatggagagctacttgttgaagatgcagcagaagttgcaaaatgatctaactgcagaagtagcaggatccagccaaactggactgcacagaattccacagtgctcgtccttctcctcc

SEQ ID NO: 566112 - DNA, 120 bp, Artificial Sequence
  ENSG00000170160_35 (sequence is synthesized)
agctctttgcacttgcttctttgctctatctgccaacctttttttctcatccttcagctgctactaaatatgaacctggatcctatatagcttctcctctaggatttacacacaaggaaa

SEQ ID NO: 566113 - DNA, 120 bp, Artificial Sequence
  ENSG00000170160_36 (sequence is synthesized)
atctgaatcaagatccagttttggaagtaacaaaagaatatgcacagattttaagaagaaaatacatactctgaaagataaggcaattttatttgggctattcacatgatattttgtttc

SEQ ID NO: 566114 - DNA, 120 bp, Artificial Sequence
  ENSG00000170160_37 (sequence is synthesized)
ccattaaatatatgatgtgaacatttttactaaagggaaatattctatattatacatgtctgatgaaaatttatatagtattttaaataatgtttcttggcctcttcagctaacttttaa

SEQ ID NO: 566115 - DNA, 120 bp, Artificial Sequence
  ENSG00000170160_38 (sequence is synthesized)
gtggattttgcaaatgaaaaccagtattactgagttttacatactcgaactgcccaaatgtttgctgtttaaacagccaaataatcaagttgccattagtaatttagtggagccaattga

SEQ ID NO: 566116 - DNA, 120 bp, Artificial Sequence
  ENSG00000170160_39 (sequence is synthesized)
tggcttgtttgtattttataattttatctttatacatagtgatagatttaagtttagatagacatcattttggtatactggtactgtggtcattgtcaatgtttggatgtattacgattg

SEQ ID NO: 566117 - DNA, 120 bp, Artificial Sequence
  ENSG00000170160_40 (sequence is synthesized)
ttatagtgcaatcaaacttagataattttaattttaagcactgatttatttagatctttccttgtggaaaaataaggtttgcctaaggctttttgcttttttatttattgtttcatttct

SEQ ID NO: 566118 - DNA, 120 bp, Artificial Sequence
  ENSG00000170160_41 (sequence is synthesized)
ttattagattaacttttgggaaacagtcttaaaattggagaaaatttccacattttaggaaaaacagctttccccctgtgggccatttgagagtaaattgctgacattatgccatcacat

SEQ ID NO: 566119 - DNA, 120 bp, Artificial Sequence
  ENSG00000170160_42 (sequence is synthesized)
ctggtatgtgggtattcccacaagtcaggacattttatataactacttcataatcggaaagttaacatcaatacacttgatcatttaattctcagtttcttttcaagttttcttaattgt

SEQ ID NO: 566120 - DNA, 120 bp, Artificial Sequence
  ENSG00000170160_43 (sequence is synthesized)
ctataatgttctttgtagcagaaggatcccattcaggtccatgaatttcatttagttgtcatgactctttcagtctggaacagttcctcagtttttctttgacctttatgaccttaaatc

SEQ ID NO: 566121 - DNA, 120 bp, Artificial Sequence
  ENSG00000170160_44 (sequence is synthesized)
ttttgaagagtaaagtccaataatacagaatgtccctccattggatttctctgaactttttttatgataagatttagatgataattttttttttggcaagagtatcacagaagttatccc

SEQ ID NO: 566122 - DNA, 120 bp, Artificial Sequence
  ENSG00000170160_45 (sequence is synthesized)
ttttttggcaagagtatcacagaagttatcccatgatcttctcactgcattctatcaggtgacctgcaattattattattttttattttcatcttttaagttcaggggtacatgtgcagg

SEQ ID NO: 566123 - DNA, 120 bp, Artificial Sequence
  ENSG00000170160_46 (sequence is synthesized)
agatcatcccatcacctaggtattaataatagcccagcatccattagctgttcttcacgatgctctcccttctttcacccgccaccatcccacatgcccctgtgtgtgttgttccccgcc

SEQ ID NO: 566124 - DNA, 120 bp, Artificial Sequence
  ENSG00000170160_47 (sequence is synthesized)
catgcccctgtgtgtgttgttccccgccatgtgtccatgtgttctcattattcagctcccacttgtaagtgagagcatgcagtatttcattttctatttctgcgttggtttgctgaggat

SEQ ID NO: 566125 - DNA, 75 bp, Artificial Sequence
  ENSG00000170160_48 (sequence is synthesized)
cattgatgggcttttaggttgattctgtgtatctttatactagaattagttatattcctttgggtatataccaag

SEQ ID NO: 566126 - DNA, 79 bp, Artificial Sequence
  ENSG00000170160_49 (sequence is synthesized)
cagtgtaaaagcattcctgtttctccataatcttgccagcatcttttcatttttttgaattatagccattctgactgta

SEQ ID NO: 566127 - DNA, 120 bp, Artificial Sequence
  ENSG00000170160_50 (sequence is synthesized)
gtgatgttgaagtttttttgtttgttggctgcatgtatgccttcttttgaaaagtgtctgtttgtgtcctttgaccactttctaatggggttgagtttttttttcttgtaaatttgttta

SEQ ID NO: 566128 - DNA, 80 bp, Artificial Sequence
  ENSG00000170160_51 (sequence is synthesized)
atttttatagttttgggttgtatgggttaaggaaggggtcccgtttcaatttgctgcatatggctagccagttctcccag

SEQ ID NO: 566129 - DNA, 60 bp, Artificial Sequence
  ENSG00000170160_52 (sequence is synthesized)
atcacatggttcttgtaccagcactatgctgttttggttactgtagtcttgtagtatgtt

SEQ ID NO: 566130 - DNA, 120 bp, Artificial Sequence
  ENSG00000170160_53 (sequence is synthesized)
gtcggttcttgtaccagcactatgctgttttggttactgtagtcttgtagtatgtttgaagctgggtagcatgatgcctctagctttgctcttcttgcttaggattgtcttggctatttg

SEQ ID NO: 566131 - DNA, 120 bp, Artificial Sequence
  ENSG00000170160_54 (sequence is synthesized)
catatgaattttaaaatagctttttctaggtctgtaaagaatgtgaatagtagtttaatgggcctagcatttaatttacagattgccttgggcagtgtggtcattttcacgatattgaac

SEQ ID NO: 566132 - DNA, 120 bp, Artificial Sequence
  ENSG00000170160_55 (sequence is synthesized)
gtttgtgtcatctctgatttctttgaataatggtttatagttatccttgaaaaggtccttcacttttcttgttagctgtattcctaggtattatactcttcttgtggcaattgtgaatgg

SEQ ID NO: 566133 - DNA, 120 bp, Artificial Sequence
  ENSG00000170160_56 (sequence is synthesized)
tattatactcttcttgtggcaattgtgaatgggagttaattcatgagttttctctcggcttgcctgttgttggtgtataggaatgctagtgacttttgcacattgattttgtatcctgag

SEQ ID NO: 566134 - DNA, 120 bp, Artificial Sequence
  ENSG00000170160_57 (sequence is synthesized)
actttgttgaagttgcttatcagctaagaagtttttgagctgagatgatggagttttctagatataggatcatatcatctgcaaacaaagatagtttgacttcctgtcttcctatttgaa

SEQ ID NO: 566135 - DNA, 120 bp, Artificial Sequence
  ENSG00000170160_58 (sequence is synthesized)
gcaaacaaagatagtttgacttcctgtcttcctatttgaatagcttttctttctttctcttgcctgattgccttggtgagaatttctaatactgtgttgaataggagtggtgagagaggg

SEQ ID NO: 566136 - DNA, 120 bp, Artificial Sequence
  ENSG00000170160_59 (sequence is synthesized)
tttcaagggaacgcttccaggttttcaggtactcaggcaacaaatagcgttacaatagaatagtacctcacatctcaatgctaatgttgaacgtaaatggcctaaatgctccacttaaaa

SEQ ID NO: 566137 - DNA, 120 bp, Artificial Sequence
  ENSG00000170160_60 (sequence is synthesized)
gtaagaattcaccaaccaagttgctgctgtcttcaggagactcacctaacacatacggactcacataaacttaaggcaaagggttggaaaaagacacttcgtctaaatggacacatcaaa

SEQ ID NO: 566138 - DNA, 120 bp, Artificial Sequence
  ENSG00000170160_61 (sequence is synthesized)
tggaaaaagacacttcgtctaaatggacacatcaaaagcgagcaggagtagctgttcttatatcagacaaaacggactttaagacaacagcagttttaaaaagacaaagagggacattat

SEQ ID NO: 566139 - DNA, 120 bp, Artificial Sequence
  ENSG00000170160_62 (sequence is synthesized)
aatttataaaacaattactactagacataagaaatgaggtagttggcaacacaataatagtgggggatgttaatactccgctggcagcactaggcagatcaccaagacagaaagtcaaca

SEQ ID NO: 566140 - DNA, 120 bp, Artificial Sequence
  ENSG00000170160_63 (sequence is synthesized)
aagaaacaatggacttaaactataccctggaacatatggacttaacagatgcttacagaacattctacccaacaagcatagaatatacattgtatacatcagaacacgggacattctcca

SEQ ID NO: 566141 - DNA, 120 bp, Artificial Sequence
  ENSG00000170160_64 (sequence is synthesized)
gaatatacattgtatacatcagaacacgggacattctccaaaatagaccatatgatagggcacaaaacaagtctcagtaaatttaagaaaatcagaattatatcaagtactctctcagac

SEQ ID NO: 566142 - DNA, 120 bp, Artificial Sequence
  ENSG00000170160_65 (sequence is synthesized)
cacagtggaataaaattggaaattaattccaaaaggaacactcaaaagcatgcaaatacatggtaattaaataacctactcctgaatgattgttgggtcaacaatgatatcaagagggaa

SEQ ID NO: 566143 - DNA, 78 bp, Artificial Sequence
  ENSG00000170160_66 (sequence is synthesized)
agagggaaatttaaaaactctgggatacagcaaaagtggagctaagaagaaaattcatagcattaaatgcctatatca

SEQ ID NO: 566144 - DNA, 120 bp, Artificial Sequence
  ENSG00000170160_67 (sequence is synthesized)
gaaagagcacaaataaacaatctaaggtcacacctcacagaattggagaaactagaacagtccaaatccaaacccagcagaagaaaagaaataacaaaatcagaacaaaactaaatgaaa

SEQ ID NO: 566145 - DNA, 120 bp, Artificial Sequence
  ENSG00000170160_68 (sequence is synthesized)
caacttagaatggagtataaaggcaagaaggtaaatcagtacttgctgtccattgtggccagaagcagattccagcagagcttcagcacctgctgtcgactgattctgctagcctaccaa

SEQ ID NO: 566146 - DNA, 120 bp, Artificial Sequence
  ENSG00000170160_69 (sequence is synthesized)
aaagacaatatatcagaatttttgtaactgctgacttaccttctgcagaataatgggggagaaacctttttggtcttgtggaatatgaaattcttggaaataataaaacaaattattaac

SEQ ID NO: 566147 - DNA, 120 bp, Artificial Sequence
  ENSG00000170160_70 (sequence is synthesized)
caaaagagaaacataaaaaggatggggtaacagttatagacagcttaggctagtcttggattatagtaatctgcagatacatggtgtgtgaatgacatctgaaggtgttatcttacactg

SEQ ID NO: 566148 - DNA, 120 bp, Artificial Sequence
  ENSG00000170160_71 (sequence is synthesized)
taaatcatttttatgactacacatatactatttcatgaagatgaaaatgcatttctagtgaatttctaaacttgtttgtaaacagtaacttcttttaaattagctaactctaaatgatct

SEQ ID NO: 566149 - DNA, 120 bp, Artificial Sequence
  ENSG00000170160_72 (sequence is synthesized)
gttctaattaattttcaacttgcataacgtgaaaaagaagtaattttcaacttgtaactttactgaaaaatttcaaatatgcttttccataatatttaccagggttactagtaacagaaa

SEQ ID NO: 566150 - DNA, 120 bp, Artificial Sequence
  ENSG00000170160_73 (sequence is synthesized)
cttaccagttaatggaatatttctttcctcactacctctcaaatatatatgtcccttggaagagatcgaagtgagaaattaaaaacatgagaactagaaaggaaacaagagcataggagt

SEQ ID NO: 566151 - DNA, 120 bp, Artificial Sequence
  ENSG00000170160_74 (sequence is synthesized)
ttttatgaggataataaacccacatgggaagagccagatcacagaataaacttttttattttttaacaaaacacattttaatgtaatccatgtttaactgcagacttgccttaaaacaag

SEQ ID NO: 566152 - DNA, 120 bp, Artificial Sequence
  ENSG00000170160_75 (sequence is synthesized)
ttgtatgttatttggtaaaatagttacttaattgtcttgtgtatggtaagtaaaagtaataattacctgtgttaataaagagaggagacagaaattttaccgttatttttaagtctctgg

SEQ ID NO: 566153 - DNA, 120 bp, Artificial Sequence
  ENSG00000170160_76 (sequence is synthesized)
agctctcattgataagagattactcctttgttaactttatttaataaatgtaaccaaactgacacattttaaatttttttaaaaactgcatttaagttagattttaaccaaaggtttact

SEQ ID NO: 566154 - DNA, 120 bp, Artificial Sequence
  ENSG00000170160_77 (sequence is synthesized)
ttgatgtgctttgtcttactaattgattttagtttgtctggggttcacttttaatgggtttagtgtgcctggggtcacttttaaagtttttctgcgtcatctcaggttttctacctgtca

SEQ ID NO: 566155 - DNA, 120 bp, Artificial Sequence
  ENSG00000170160_78 (sequence is synthesized)
tcatatgtgaatgattggtgtccaaacactaaccacccatggatgtttattatttaaaaggacccaaggtgaatacttttatatgttatataaacctgcaacacttgattaatctgttct

SEQ ID NO: 566156 - DNA, 120 bp, Artificial Sequence
  ENSG00000170160_79 (sequence is synthesized)
ttaagttaaaagttttgtgattttcttatatgagtacatctgtaattgctattgcacttaatagtgttttaatcccaattttagtaaaatgtgtctattgctatgcaatagcacagtggt

SEQ ID NO: 566157 - DNA, 120 bp, Artificial Sequence
  ENSG00000170160_80 (sequence is synthesized)
tttgaaatagttaaatcaaataaatatttgaatttttaaagtaaagctcacataagttttgtctctctacctggccataactttagtaattgatgactaagatggcaatggtatctagag

SEQ ID NO: 566158 - DNA, 120 bp, Artificial Sequence
  ENSG00000170160_81 (sequence is synthesized)
tccttcaatagcaaatgtgaccaaacagaatcagttctattcttaataccccaaattccatgtaaagctgcacatggacatctcccctggacatgtaacaggaaccttttagttcaaccg

SEQ ID NO: 566159 - DNA, 120 bp, Artificial Sequence
  ENSG00000170160_82 (sequence is synthesized)
tgtggtttcactcagagtaagagtctatttctggggatttcaaaatggatccaaaaatgacgagctgtatcaactatagagttggtaaggaaaaaaaaaacaaaacgtagttcaactatg

SEQ ID NO: 566160 - DNA, 120 bp, Artificial Sequence
  ENSG00000170160_83 (sequence is synthesized)
cttgacccagattaaggtatttgtctaacatttgtccatttttcaactgagggaaaattacaaaaactgggcacagtggcacacacctgtagtcccagctgctcctgaggctgaggcagg

SEQ ID NO: 566161 - DNA, 120 bp, Artificial Sequence
  ENSG00000170160_84 (sequence is synthesized)
aagatcacttgaacccaggagttcaaatctgcagtgcgcaatgattattcctgtgagtagctacggcactgcagcattccaatctgggcaacatagcaagattctgtctcttaaaaaaat

SEQ ID NO: 566162 - DNA, 120 bp, Artificial Sequence
  ENSG00000170160_85 (sequence is synthesized)
tacaaaatccataaaacatttgtttgaacaacaatagataaatagttttctttgtgtatattgttgtttttaaaattttcaatcgatgcacattggcttatagttttgatgtttttatga

SEQ ID NO: 566163 - DNA, 120 bp, Artificial Sequence
  ENSG00000170160_86 (sequence is synthesized)
tctccttagcgcacagaaaagtagcgcaggcccacatggaatgaacctcaaccttgttgtgtttacctggctatttcgtgtcctaacaaatcatagaagagcaaatctaaggtttcttag

SEQ ID NO: 566164 - DNA, 120 bp, Artificial Sequence
  ENSG00000170160_87 (sequence is synthesized)
atagcattgtggccaaatagcttaaaagggaatgcattaaatgattgttttaatacatagattacaagagcccagctagctgatatttttaatcatattgttcgcttaggttttattttt

SEQ ID NO: 566165 - DNA, 120 bp, Artificial Sequence
  ENSG00000170160_88 (sequence is synthesized)
ctgaaaaaaatgagatgatcagcgtccaaatgcctcagtcatgaaattgtaccactgggtactaatgggaaatgaatgttaaatacgtctgtaaatggttaagcaagatgcaaatataat

SEQ ID NO: 566166 - DNA, 120 bp, Artificial Sequence
  ENSG00000170160_89 (sequence is synthesized)
gttctcattagtactatgaacccccaaaatttgagacaagtctcaattaatttagaaagtttattttgccgaggttgaggacacacatccatgacacagcctcaggaagtcctgatgaca

SEQ ID NO: 566167 - DNA, 120 bp, Artificial Sequence
  ENSG00000170160_90 (sequence is synthesized)
cacagcttggttttatacattttagggggagacatgagacatcaatcaatatatttaagaagtacattggttcactctggaaaggcgggacaatttgaagcaaagggaggaagactggta

SEQ ID NO: 566168 - DNA, 120 bp, Artificial Sequence
  ENSG00000170160_91 (sequence is synthesized)
caaagggaggaagactggtagcggggagggggcttccaggtcacagataggtgagagacaaacagttgcactcttttgagtttctgattagcttttccaaaggagacagtcagatctgca

SEQ ID NO: 566169 - DNA, 90 bp, Artificial Sequence
  ENSG00000170160_92 (sequence is synthesized)
ctgagttttccttttagcttagtgattttggaggcccaagatattttcctttcacagtacttaccagaaaaacaaggtaatgtatcattt

SEQ ID NO: 566170 - DNA, 120 bp, Artificial Sequence
  ENSG00000170160_93 (sequence is synthesized)
tcctttcacagtacttaccagaaaaacaaggtaatgtatcattttacaagatagtgctgagagagtataaaaagcagatgtaggccgggcactgtagctcacacctgtaatcccagcact

SEQ ID NO: 566171 - DNA, 120 bp, Artificial Sequence
  ENSG00000170160_94 (sequence is synthesized)
caggacggactagaggcgagcaatcctggtggcaccaggcgttccccgacccgcccgggtcgccagctgcacggaccctgggcagatgcgcgcagcggctgcggcacacggcggggagcg

SEQ ID NO: 566172 - DNA, 120 bp, Artificial Sequence
  ENSG00000170160_95 (sequence is synthesized)
gctgcttggccccatcctaaggcagcagaatgcccagagctggtccctggctccaggcgcaggccgagtaggagctgggcgggcagcggcgtcgggcaggcccttccagccgggctgaca

SEQ ID NO: 566173 - DNA, 120 bp, Artificial Sequence
  ENSG00000170160_96 (sequence is synthesized)
ggccgctctgacccagccatctgactccgcttgcgtcctggcagcgcggaccctagggcaactttgctgcagtggccaagccgggggcggaactgacccgtacccctgaaccgagcaagc

SEQ ID NO: 566174 - DNA, 120 bp, Artificial Sequence
  ENSG00000170160_97 (sequence is synthesized)
cccaggttggcgctggagctgcagcgccacctgcaggccaaggagtctttttctgggaggctggagctgcagcgccacctgcaggccaaggagtctttttctgggaggctggagctgcag

SEQ ID NO: 566175 - DNA, 120 bp, Artificial Sequence
  ENSG00000170160_98 (sequence is synthesized)
cgccacctgcaggccaaggagtctttttctgggaggctggagctgcagatgcagtgaagtcacaggttccgtgatgtcacagcattcagcaactagttcctgaatataaggaaaaacaga

SEQ ID NO: 566176 - DNA, 120 bp, Artificial Sequence
  ENSG00000170160_99 (sequence is synthesized)
cacctgaaagtcttcctcaaaataacaatccagaatacagacatttaaaaatactgctggggccagcacagtggtgcatgcctgtaatctcaccactttgggaggctgagatgggaggat

SEQ ID NO: 566177 - DNA, 120 bp, Artificial Sequence
  ENSG00000170160_100 (sequence is synthesized)
cacttgagcccagaagttcgagaccagcccgggcaacatgacaagacctcatctctactaaattttttaaaaaacaataaaacattagctgggcatggtgccaggtgcctgtacttccag

SEQ ID NO: 566178 - DNA, 120 bp, Artificial Sequence
  ENSG00000170160_101 (sequence is synthesized)
agtcctagagtgcctctgcttggctgcatagagctatagttctgacttaaaaaaactttttctggtaaaatgtgctttgtgtttactcaccttttgcactgaacagaatactttttggca

SEQ ID NO: 566179 - DNA, 120 bp, Artificial Sequence
  ENSG00000170160_102 (sequence is synthesized)
ggatatttgtgttcttcctttaaccaaagcaacatctagataacagagaattaggggaaagcatgattttctttaggaagtaggattatatttagaatatagggactaagtatgtttagg

SEQ ID NO: 566180 - DNA, 120 bp, Artificial Sequence
  ENSG00000170160_103 (sequence is synthesized)
gactaacataggattatatttaggataacttagtagagacctaaagattgctgactcaaacacaatgtggtttctttgctttatttttacagctctgaattcacagctgttagttataac

SEQ ID NO: 566181 - DNA, 74 bp, Artificial Sequence
  ENSG00000170160_104 (sequence is synthesized)
ttatttttacagctctgaattcacagctgttagttataactatatgcactacaatttaaaagacaccttcctga

SEQ ID NO: 566182 - DNA, 120 bp, Artificial Sequence
  ENSG00000170160_105 (sequence is synthesized)
gtctcaaaaaacaaaaacaaaaaaacaccttccaaaagcaaatattaagtgacttcctatcgtttctatgactttatgtattatagaattgactttccaagtcagtaattaatgagactt

SEQ ID NO: 566183 - DNA, 120 bp, Artificial Sequence
  ENSG00000170160_106 (sequence is synthesized)
attgagaatttgctgcatagtatctccttggctgtgtccacatgagctaccaccttgcgttaataaatgtgttcgctagggatgttggttttggcattgacagtgttctatcaccaatgc

SEQ ID NO: 566184 - DNA, 120 bp, Artificial Sequence
  ENSG00000170160_107 (sequence is synthesized)
aaataagaccagggaccactcttgagaacattaatgtccaagcatcttaaagttgtacgtaaggctttcataatgtgacttctgctcagctctccatctttagccctttcccctgtgtgc

SEQ ID NO: 566185 - DNA, 120 bp, Artificial Sequence
  ENSG00000170160_108 (sequence is synthesized)
cctttctctggccttactgaactgctggtcctgtcctgctgacccatccttcgactgcaggcaaacacatacactctttcaggcctctttctgccttttgttgctgcctgtcatgctctc

SEQ ID NO: 566186 - DNA, 120 bp, Artificial Sequence
  ENSG00000170160_109 (sequence is synthesized)
actctttcctgtcccctaccccttctaattaggctagcctcactctttaagcctcagctcgggcaggatctctagaaaagtcatctctgacatgctttcttttcactctttaaatcctag

SEQ ID NO: 566187 - DNA, 120 bp, Artificial Sequence
  ENSG00000170160_110 (sequence is synthesized)
tgcctagcacatagcaagactcaatacataattgctgagtaaaatagataatgactctttgtacaaagatgattttcaagattgttccctacagtcaaggagcaaagggaatagacatgt

SEQ ID NO: 566188 - DNA, 120 bp, Artificial Sequence
  ENSG00000170160_111 (sequence is synthesized)
aaagcaataattgacagttcgggtggtggagatgcagtagaaaaatcagttctagggcagccctaaggaaggagatacctagatacctgtttacctggggaaagatgaggatgagggtca

SEQ ID NO: 566189 - DNA, 120 bp, Artificial Sequence
  ENSG00000170160_112 (sequence is synthesized)
acttcacctagcagtctgttttttattttatgtattttatttatttatttttagcagtctgttttaaaagatgaaaatattaatacgtttgtcagaataatacagggaaccatttcagat

SEQ ID NO: 566190 - DNA, 120 bp, Artificial Sequence
  ENSG00000170160_113 (sequence is synthesized)
gttaggaagtggttgtacaccaataaaggtgtccacagtcattttggaaatcattaataaggtactattatgaagtggagaacagtatgcagcattgcctgataatattactactgcatt

SEQ ID NO: 566191 - DNA, 120 bp, Artificial Sequence
  ENSG00000170160_114 (sequence is synthesized)
ccaaaattttgttttgtttgtgatggctttgttcattgatgttgggtggatgaatctgtgagtgaatcttcaacatgattgtatttctttaacctggtggcatctagtgtctcccagaaa

SEQ ID NO: 566192 - DNA, 120 bp, Artificial Sequence
  ENSG00000170160_115 (sequence is synthesized)
gtggtttgttgaagttttggagaattagaagtatttcttaaagaagtaagtattccactaaagatcaagcttcatttaaactctcaatttatgaaataaaatgaaatgtaatttaaaatc

SEQ ID NO: 566193 - DNA, 120 bp, Artificial Sequence
  ENSG00000170160_116 (sequence is synthesized)
ctgaggcaagagaatcatttgaacctgggaggcgggggttgtggtgagctgtgatcatgccattgcactcgagcctgggcaacaagagtaaaactccatttcaaaaaaaaaaagcaaaaa

SEQ ID NO: 566194 - DNA, 120 bp, Artificial Sequence
  ENSG00000170160_117 (sequence is synthesized)
gagaattccaacaagaatggaccgatctcctaaaacaacaacctacgtcagaggctacctcacgttgtcacattaatttagatgagacacaggattcaaagaagaaattgggtcaaatca

SEQ ID NO: 566195 - DNA, 120 bp, Artificial Sequence
  ENSG00000170160_118 (sequence is synthesized)
gatgaacttaacagaacgagaaaagatggacactggagttgtacttctctcagggaatgatactctccatgacctgtgccaatcacagctaccagaaaacaaagagagcaaagaagaaaa

SEQ ID NO: 566196 - DNA, 120 bp, Artificial Sequence
  ENSG00000170160_119 (sequence is synthesized)
tgagacttgccttaaaacaagaaaataggagaaaagaaatgccgatatgttgtataataaagatagtgaacagttaagaataaaagaagaggagtgtgggaaagtggttgaaacaaagca

SEQ ID NO: 566197 - DNA, 120 bp, Artificial Sequence
  ENSG00000170162_0 (sequence is synthesized)
gcttctgccctggagcgcggtcgggagtaaaatcgcaggagtgggagggtagcgagccagctggattccgagccgcggagcgcgctggctttgctccgcctgatgactccagagcgcggg

SEQ ID NO: 566198 - DNA, 120 bp, Artificial Sequence
  ENSG00000170162_1 (sequence is synthesized)
tccaagcgccgcccatgcagcacccctgagctccggggaaggagagttaatgaaaaaacacttaaccgtctccgctgcggagagtcatgagctgtctggatgttatgtaccaagtctatg

SEQ ID NO: 566199 - DNA, 120 bp, Artificial Sequence
  ENSG00000170162_2 (sequence is synthesized)
gtcctccgcagccctacttcgcagccgcctacaccccctaccaccagaaactagcctattattccaaaatgcaggaagcgcaggagtgcaatgccagccccagcagcagtggcagcggca

SEQ ID NO: 566200 - DNA, 120 bp, Artificial Sequence
  ENSG00000170162_3 (sequence is synthesized)
gctcctcattttccagccaaaccccagccagtataaaagaggaagaaggcagcccagagaaagagcgcccaccagaggcagagtacatcaactcccgctgcgtcctcttcacttatttcc

SEQ ID NO: 566201 - DNA, 120 bp, Artificial Sequence
  ENSG00000170162_4 (sequence is synthesized)
agggggacatcagctccgtggtggatgaacatttcagcagggccctgagccaacccagcagctactctcctagctgtaccagcagcaaagcaccaaggagctctgggccctggcgagact

SEQ ID NO: 566202 - DNA, 120 bp, Artificial Sequence
  ENSG00000170162_5 (sequence is synthesized)
gctccttcccgatgagccagcgcagcttccccgcctccttctggaatagcgcgtaccaggcgccagtgcccccgccgctgggcagccctctggccaccgcgcactcggagctgcccttcg

SEQ ID NO: 566203 - DNA, 120 bp, Artificial Sequence
  ENSG00000170162_6 (sequence is synthesized)
ttcgccgccgccgacccctactcgcccgccgcgctgcatggccacctgcaccagggcgccacggagccctggcaccacgcgcacccgcaccacgcgcacccgcatcacccctacgccctg

SEQ ID NO: 566204 - DNA, 120 bp, Artificial Sequence
  ENSG00000170162_7 (sequence is synthesized)
tcacccctacgccctgggcggcgccctcggcgcccaggccgccccctacccgcgccccgccgccgtgcacgaagtctacgcgccgcacttcgacccgcgctatgggccgctgctgatgcc

SEQ ID NO: 566205 - DNA, 80 bp, Artificial Sequence
  ENSG00000170162_8 (sequence is synthesized)
gtcctccctgcgagctctccggcaaaggcgagccggcgggcgccgcgtgggccgggcccgggggacccttcgcgagcccc

SEQ ID NO: 566206 - DNA, 120 bp, Artificial Sequence
  ENSG00000170162_9 (sequence is synthesized)
ctgagctgatctgctgacccagggtttccccttccccttcccttctgaccagccttggaggctcagcatctgtgcctctcactccgtggatgaggacatgggggaaggcagagacttcag

SEQ ID NO: 566207 - DNA, 120 bp, Artificial Sequence
  ENSG00000170162_10 (sequence is synthesized)
acttctcagtgtgttgggaaaaccaaaaaccacaactacagaaattcatctaaaaataagtcctgctgctgaaagagcaaatccaaagactgagttatgtttaatgacttttggccgaat

SEQ ID NO: 566208 - DNA, 120 bp, Artificial Sequence
  ENSG00000170162_11 (sequence is synthesized)
cactggaaatatctgtggtgagattgctgagtcaggtgatgtgatatcataagctttcttggaacgggggaaagaaaatgaaactttttggtgtgaatattttttatgctgatgtgaatt

SEQ ID NO: 566209 - DNA, 120 bp, Artificial Sequence
  ENSG00000170162_12 (sequence is synthesized)
attttgttaggtagtgtgattatagcactactactgtcagattttaaattgtatgtgtacttgcatctaagactgtggtagagaagtaaagagaagtcaattccttcttcctcacctctc

SEQ ID NO: 566210 - DNA, 120 bp, Artificial Sequence
  ENSG00000170162_13 (sequence is synthesized)
agcctccagatcccttcctgcccatcccttccctacaatgcccactccagacgcaaagatacacttttttcctttggactgtgaacatggaagcctcagcctgaatgtgagtggcaagtg

SEQ ID NO: 566211 - DNA, 120 bp, Artificial Sequence
  ENSG00000170162_14 (sequence is synthesized)
gcttatctggagccacctgcccaagtcttactaaaatgcagctgttgttagacaactgttgaaaactccagaaatacatcacccaaggtggcagttctcagtatttggcagaacaattgc

SEQ ID NO: 566212 - DNA, 120 bp, Artificial Sequence
  ENSG00000170162_15 (sequence is synthesized)
aattgcactgggtatattatatatatatatgtatgcatatatatcatattttttacaaggaacattttatgatgaaagaagaaacccttctctgccttctctcccacgaattctgtccct

SEQ ID NO: 566213 - DNA, 120 bp, Artificial Sequence
  ENSG00000170162_16 (sequence is synthesized)
gtatcctctggatgtaaaaagcaaggagagaccccaactgtctccatggagaagaactaggaatcaccacaaggggaagaaatgtacatgaagtctccattacctcgaatttttttctca

SEQ ID NO: 566214 - DNA, 120 bp, Artificial Sequence
  ENSG00000170162_17 (sequence is synthesized)
gtctcactggttgtgatttggtcactttagtgttgggacaggggaaagggtctgtgcgtgggcaaagctgaaggtgatgaggaagaagagacgaacattaaagatgtctatttactatga

SEQ ID NO: 566215 - DNA, 120 bp, Artificial Sequence
  ENSG00000170166_0 (sequence is synthesized)
agttgacagcaagtaggagggccctatggaaggagaaaaaaagacaacacgagaaaaattagtattttctaccttctgaaattaatggtcatgagttcgtatatggtgaactccaagtat

SEQ ID NO: 566216 - DNA, 120 bp, Artificial Sequence
  ENSG00000170166_1 (sequence is synthesized)
gtggaccccaagttccctccgtgcgaggagtatttgcagggcggctacctaggcgagcagggcgccgactactacggcggcggcgcgcagggcgcagacttccagcccccggggctctac

SEQ ID NO: 566217 - DNA, 120 bp, Artificial Sequence
  ENSG00000170166_2 (sequence is synthesized)
ccacggcccgacttcggtgagcagcctttcggaggcagcggccccgggcctggctcggcgctgcctgcgcggggtcacggacaagagccaggcggccccggcggtcactacgccgctcca

SEQ ID NO: 566218 - DNA, 120 bp, Artificial Sequence
  ENSG00000170166_3 (sequence is synthesized)
ggagagccttgcccagctcccccggcgcctccgccggcgcccctgcctggcgcccgggcctacagtcagtccgaccccaagcagccgccctccgggacggcactcaagcagccggccgtg

SEQ ID NO: 566219 - DNA, 120 bp, Artificial Sequence
  ENSG00000170166_4 (sequence is synthesized)
tggggaacccaagcggtcccgaacggcctacacccggcagcaagtcctagaactggaaaaagaatttcattttaacaggtatctgacaaggcgccgtcggattgaaatcgctcacaccct

SEQ ID NO: 566220 - DNA, 120 bp, Artificial Sequence
  ENSG00000170166_5 (sequence is synthesized)
gtgtctgtcggagcgccagatcaagatctggttccagaaccggaggatgaagtggaaaaaagatcataagctgcccaacactaaaggcaggtcatcgtcctcatcttcctcctcatcttg

SEQ ID NO: 566221 - DNA, 120 bp, Artificial Sequence
  ENSG00000170166_6 (sequence is synthesized)
ctcctcctcagtcgcccccagccagcatttacagccgatggccaaagaccaccacacggacctgacgaccttatagaagtggggaccctgggcccatctctccctgcgcaccaggctgag

SEQ ID NO: 566222 - DNA, 120 bp, Artificial Sequence
  ENSG00000170166_7 (sequence is synthesized)
ccgaagctgcgggggcaggccgggcctgctgtcacctcgctgggctctaaggtactgtggggtggacctgggacaagcaggccgccctcggactaggttagcatcctgcccgagggcagc

SEQ ID NO: 566223 - DNA, 120 bp, Artificial Sequence
  ENSG00000170166_8 (sequence is synthesized)
cccctccctagagcgggatggggatgggagggggggcgggattctctctctaagtatattatatggcaggagctactgagaacataaaatcttggcgagtcattaaacttatgaaaatca

SEQ ID NO: 566224 - DNA, 120 bp, Artificial Sequence
  ENSG00000170175_0 (sequence is synthesized)
gtcacttcccctgtgctggcggtcccagcggctctctgagcgaagtcactgagcgagccgccaggctatgaccccaggggctctgctgatgctgctgggggcgctgggggcgccgctcgc

SEQ ID NO: 566225 - DNA, 120 bp, Artificial Sequence
  ENSG00000170175_1 (sequence is synthesized)
cccaggcgtccgcggctcggaggcggagggtcgactccgggagaaacttttctctggctatgatagctccgtgcggccagcgcgggaggtgggagaccgtgtcagggtcagcgttggtct

SEQ ID NO: 566226 - DNA, 120 bp, Artificial Sequence
  ENSG00000170175_2 (sequence is synthesized)
catcctggcgcaactcatcagcctgaacgagaaggatgaagagatgagcacaaaggtgtacttagacctggagtggactgactacaggctgagctgggaccctgcggagcacgacggcat

SEQ ID NO: 566227 - DNA, 120 bp, Artificial Sequence
  ENSG00000170175_3 (sequence is synthesized)
cgattcgctccgcatcacggcggaatccgtgtggctccctgacgtggtgctactgaacaacaatgatgggaattttgacgtggctctggacattagcgtcgtggtgtcctccgacggctc

SEQ ID NO: 566228 - DNA, 120 bp, Artificial Sequence
  ENSG00000170175_4 (sequence is synthesized)
cgtgcgttggcaacccccgggcatctatcgcagcagctgcagcatccaggtcacctacttccccttcgactggcagaattgcactatggtgttcagctcctacagctacgacagctcgga

SEQ ID NO: 566229 - DNA, 120 bp, Artificial Sequence
  ENSG00000170175_5 (sequence is synthesized)
ggtcagcctgcagacaggcctgggtcctgacgggcaagggcatcaggaaatccacattcatgaagggactttcattgagaatggccagtgggagattatccacaagccctctcggctaat

SEQ ID NO: 566230 - DNA, 120 bp, Artificial Sequence
  ENSG00000170175_6 (sequence is synthesized)
ccagcctccaggcgatcctaggggagggagggaaggacagcgccaggaagtcatcttctacctcatcatccgccgcaagcctctcttctacctggtcaacgtcattgccccatgcatcct

SEQ ID NO: 566231 - DNA, 120 bp, Artificial Sequence
  ENSG00000170175_7 (sequence is synthesized)
catcactcttctggccatcttcgtcttctacctgccaccagatgcaggagagaagatggggctctcaatctttgccctgctgacccttactgtgttcctgctgctgctggctgacaaagt

SEQ ID NO: 566232 - DNA, 120 bp, Artificial Sequence
  ENSG00000170175_8 (sequence is synthesized)
acctgagacctcactatcagtacccattattatcaagtacctcatgtttaccatggtcctcgtcaccttctcagtcatccttagtgtcgtggttctcaacctgcaccaccgctcacccca

SEQ ID NO: 566233 - DNA, 120 bp, Artificial Sequence
  ENSG00000170175_9 (sequence is synthesized)
cacccaccaaatgcccctttgggtccgtcagatcttcattcacaaacttccgctgtacctgcgtctaaaaaggcccaaacccgagagagacctgatgccggagccccctcactgttcttc

SEQ ID NO: 566234 - DNA, 120 bp, Artificial Sequence
  ENSG00000170175_10 (sequence is synthesized)
atccggaagccgccaagtgattttctcttccccaaacccaataggttccagcctgaactgtctgcccctgatctgcggcgatttatcgatggtccaaaccgggctgtggccctgcttccg

SEQ ID NO: 566235 - DNA, 120 bp, Artificial Sequence
  ENSG00000170175_11 (sequence is synthesized)
gagctacgggaggtcgtctcctctatcagctacatcgctcgacagctgcaggaacaggaggaccacgatgcgctgaaggaggactggcagtttgtggccatggtagtggaccgcctcttc

SEQ ID NO: 566236 - DNA, 120 bp, Artificial Sequence
  ENSG00000170175_12 (sequence is synthesized)
ctgtggactttcatcatcttcaccagcgttgggaccctagtcatcttcctggacgccacgtaccacttgccccctccagacccctttccttgaagactggagggttgagacccaggcccc

SEQ ID NO: 566237 - DNA, 120 bp, Artificial Sequence
  ENSG00000170175_13 (sequence is synthesized)
ctgccagttgaagtgagagtttggtgatactgtcaagccctatccttctctgcctcttaactccttcacgaggaatctgggcctcttatttcgtttctggggactgcattggactgaggg

SEQ ID NO: 566238 - DNA, 120 bp, Artificial Sequence
  ENSG00000170175_14 (sequence is synthesized)
ctgggtaggcaggtgtcttggacccacctgaaatgcagtatcatctgatttactctttgggatcttgaagaagctcttttgggtatcaacacctaggtcgccagtgaaatagaacacaga

SEQ ID NO: 566239 - DNA, 80 bp, Artificial Sequence
  ENSG00000170175_15 (sequence is synthesized)
gggtatcaacacctaggtcgccagtgaaatagaacacagaacaggaactagattataagccttatgaggtcaagaaatgt

SEQ ID NO: 566240 - DNA, 120 bp, Artificial Sequence
  ENSG00000170175_16 (sequence is synthesized)
gcccagtgccacgcacaggtgctgacctatagtaagtgcttaacatttgttgaataggggaaagaaatttccggaagtaaatacagcaattaataatgtttataagctgggcatggtcgc

SEQ ID NO: 566241 - DNA, 120 bp, Artificial Sequence
  ENSG00000170175_17 (sequence is synthesized)
attaataatgtttataagctgggcatggtcgctcaggccagtaatcccagtgacttaggaggctgaggtgggaggattacttgaaacccacagtttgagaccagcctgggcaacatagtg

SEQ ID NO: 566242 - DNA, 120 bp, Artificial Sequence
  ENSG00000170175_18 (sequence is synthesized)
taaagtagtgcttattgtttgcatgttgggtcttgtggtcgttttctttttacctttctgtaatttattatgttttgtaatgtgtactatctctgggattaaaaaaagttatttctacaa

SEQ ID NO: 566243 - DNA, 120 bp, Artificial Sequence
  ENSG00000170175_19 (sequence is synthesized)
aagattggatcgaaatcagaccaatggacaagctctggccgtgggtggtggacgggcctggagtagaactggaacgagaaggatgaagagatgagcacaaaggtgtacttagacctggta

SEQ ID NO: 566244 - DNA, 120 bp, Artificial Sequence
  ENSG00000170175_20 (sequence is synthesized)
tggagaccccacggggtgggaaagggcttccctctgccttgacaatttccttgaatatccagcccagtaagaatattttttacatcatgactttagataacacgtttataactgaagcaa

SEQ ID NO: 566245 - DNA, 120 bp, Artificial Sequence
  ENSG00000170175_21 (sequence is synthesized)
ttagataacacgtttataactgaagcaaaagctcgaagaaacaacacttaactttactacaggagttacaccccatgcatttttaattccaattttgtgtgtgtgtgtgtgtgtgtgtct

SEQ ID NO: 566246 - DNA, 120 bp, Artificial Sequence
  ENSG00000170175_22 (sequence is synthesized)
gtgtgtgtgtgtgtgtgatgcggtctcactatgttgcacaggctgttcttgaatgcgggggctcgagccatccaccagcctcggggggaacctccacaagtgctgagattacagccgtga

SEQ ID NO: 566247 - DNA, 120 bp, Artificial Sequence
  ENSG00000170175_23 (sequence is synthesized)
gccactgcacctggcccattctaatttttgaaacactggtttggggccgctaatttcattccccatccactaaaggattgcgaactgcagtttgaaaaccgttttagaggctagctactg

SEQ ID NO: 566248 - DNA, 120 bp, Artificial Sequence
  ENSG00000170175_24 (sequence is synthesized)
cagcctcctcatttttacagagtaaaatattgaaacccggtgcgggggagggaaattagctgatgtggatcccagcgagtgaaggcggagccagagccagaaccacggccccttgaccca

SEQ ID NO: 566249 - DNA, 120 bp, Artificial Sequence
  ENSG00000170175_25 (sequence is synthesized)
cagtttatgcctgtcctgctccccttccttgcactcccttcctgggcttcctttggaaatcccaagtccctcccggcctccaacccggggcagcccctcagcctctgcttcactaggagt

SEQ ID NO: 566250 - DNA, 120 bp, Artificial Sequence
  ENSG00000170175_26 (sequence is synthesized)
ctggttttccattgagtgttctgtacactttctttgacttctagtcttactcagtgaccgccctccccatccctcccccattaatggcttcccttcataaccctccaattcctccatgat

SEQ ID NO: 566251 - DNA, 120 bp, Artificial Sequence
  ENSG00000170175_27 (sequence is synthesized)
ttcccttctctgtgccctccccaaagacctcccaaactccaccagcgctgactggttctctggcagctctagtgactctctcctccatccaggtcacctacttccccttcgactggcaga

SEQ ID NO: 566252 - DNA, 120 bp, Artificial Sequence
  ENSG00000170175_28 (sequence is synthesized)
ccaataggtaggactacgcccgttacccacataagagggagagggagaactacagttcccagaagagtgtgcggaagaagcggcccatgctctcggaagacgctgtggttgagcatcatg

SEQ ID NO: 566253 - DNA, 120 bp, Artificial Sequence
  ENSG00000170175_29 (sequence is synthesized)
ggagttgtagtactcctgctgctcactttgaggggaggtgggaactaaaacagaggcggtggaagaagttgcacaaggctagagagatcactgctggagggaaaagcatgatgggctctc

SEQ ID NO: 566254 - DNA, 120 bp, Artificial Sequence
  ENSG00000170175_30 (sequence is synthesized)
tagacctggctgttcttgaatgcgggggctcgagccatccaccagcctcggggggaacctccacaagtgctgagattacagccgagtggactgactacaggctgagctgggaccctgcgg

SEQ ID NO: 566255 - DNA, 120 bp, Artificial Sequence
  ENSG00000170175_31 (sequence is synthesized)
actttgaggggaggtgggaactaaaacagaggcggtggaagaagttgcacaaggctagagagatcactgctggagggaaaagcatgatgggctctcgggttttgagaactggcaagttgt

SEQ ID NO: 566256 - DNA, 120 bp, Artificial Sequence
  ENSG00000170175_32 (sequence is synthesized)
tggaggcagctggagcggggcctgggtcgccggcactggctgtctttgcgtttgggcgtggccagtcactcctcttccaggttccagcctgaactgtctgcccctgatctgcggcgattt

SEQ ID NO: 566257 - DNA, 120 bp, Artificial Sequence
  ENSG00000170175_33 (sequence is synthesized)
ctttggtgaagattggatcgaaatcagaccaatggacaagctctggccgtgggtggtggacgggcctggagtagaactgggtagggtgaaggacggacctgtgatcggaccttaaagtgg

SEQ ID NO: 566258 - DNA, 120 bp, Artificial Sequence
  ENSG00000170175_34 (sequence is synthesized)
ggctggggacgaggcaggggctgggggacggacctcgacgtagggccacatgagtcctgagtgcccagggtggggcggagcttggtgctcaggggtcaataaatggcagcgggtggaggt

SEQ ID NO: 566259 - DNA, 120 bp, Artificial Sequence
  ENSG00000170175_35 (sequence is synthesized)
cctgggacgagaccaggctgagatggaccagcctttggtgaagattggatcgaaatcagaccaatggacaagctctggccgtgggtggtggacgggcctggagtagaactggaacgagaa

SEQ ID NO: 566260 - DNA, 120 bp, Artificial Sequence
  ENSG00000170178_0 (sequence is synthesized)
tctgagcctgtcctcttattcccggttgtaactaaatactgttgcgagcgcagccgaagccctttgttggagatgtgtgagcgcagtctctacagagcgggctatgtgggctcgcttctg

SEQ ID NO: 566261 - DNA, 120 bp, Artificial Sequence
  ENSG00000170178_1 (sequence is synthesized)
aatctgcagtcgccagactctttctacttctccaacctgaggccgaatggcggccagttggccgcgcttccccctatctcctacccgcgcggcgcgctgccctgggccgccacgcccgcc

SEQ ID NO: 566262 - DNA, 120 bp, Artificial Sequence
  ENSG00000170178_2 (sequence is synthesized)
tcctgcgcccccgcgcagcctgcgggcgccactgccttcggcggcttctcgcagccctacctggctggctccgggcctctcggcctgcagcccccaacagccaaagacggacccgaagag

SEQ ID NO: 566263 - DNA, 120 bp, Artificial Sequence
  ENSG00000170178_3 (sequence is synthesized)
caggctaagttctatgcgcccgaagcggccgctgggccagaggagcgcggtcgtacccggccgtccttcgcccccgagtctagcctggctcctgcagtggctgctctcaaagcggccaag

SEQ ID NO: 566264 - DNA, 120 bp, Artificial Sequence
  ENSG00000170178_4 (sequence is synthesized)
tatgactacgctggtgtgggtcgtgccacgccgggctccacgaccctgctccagggggctccctgcgcccctggcttcaaggacgacaccaagggcccgctcaacttgaacatgacagtg

SEQ ID NO: 566265 - DNA, 120 bp, Artificial Sequence
  ENSG00000170178_5 (sequence is synthesized)
agttggagaacgaattcctcgtcaacgaattcatcaacaggcagaaacgcaaggaattgtccaataggctgaacctcagcgaccagcaagtcaaaatctggttccagaacaggcgtatga

SEQ ID NO: 566266 - DNA, 120 bp, Artificial Sequence
  ENSG00000170178_6 (sequence is synthesized)
agaagaagcgcgtggtgcttcgggagcaggcgctggcgctctactagccgcgcgcgtggccagggccgggttggatctgcccttttggacagaggccttgtttggggagggggatctggg

SEQ ID NO: 566267 - DNA, 120 bp, Artificial Sequence
  ENSG00000170178_7 (sequence is synthesized)
gctaaggctaaggcttttccttcggttccttctctgctggccccagaagccaccaagagatttacagaccaggccagttgggcctccttgctttcctcagtccctgagaagcccgtgaga

SEQ ID NO: 566268 - DNA, 120 bp, Artificial Sequence
  ENSG00000170178_8 (sequence is synthesized)
aacgtgcggaagtaccagtgcaactctggctggccttaaggcttccacgttgggggactgaggccaactctccttgctcctggctggggcatttgcacccaccgctcattcttgctcccc

SEQ ID NO: 566269 - DNA, 120 bp, Artificial Sequence
  ENSG00000170178_9 (sequence is synthesized)
ggtacctggatttttctgtttccacccaattcgttctccctttccccctctctccagccccttcagcgtatagcagtcgcctagttagggctcagagtggaaggcctcctgagggaatgg

SEQ ID NO: 566270 - DNA, 120 bp, Artificial Sequence
  ENSG00000170180_0 (sequence is synthesized)
gcaggaaggtgggcctggaagataacagctagcaggctaaggtcagacactgacacttgcagttgtctttggtagtttttttgcactaacttcaggaaccagctcatgatctcaggatgt

SEQ ID NO: 566271 - DNA, 120 bp, Artificial Sequence
  ENSG00000170180_1 (sequence is synthesized)
atggaaaaataatctttgtattactattgtcagaaattgtgagcatatcagcattaagtaccactgaggtggcaatgcacacttcaacttcttcttcagtcacaaagagttacatctcat

SEQ ID NO: 566272 - DNA, 120 bp, Artificial Sequence
  ENSG00000170180_2 (sequence is synthesized)
cacagacaaatgatacgcacaaacgggacacatatgcagccactcctagagctcatgaagtttcagaaatttctgttagaactgtttaccctccagaagaggaaaccggagaaagggtac

SEQ ID NO: 566273 - DNA, 120 bp, Artificial Sequence
  ENSG00000170180_3 (sequence is synthesized)
aacttgcccatcatttctctgaaccagagataacactcattatttttggggtgatggctggtgttattggaacgatcctcttaatttcttacggtattcgccgactgataaagaaaagcc

SEQ ID NO: 566274 - DNA, 120 bp, Artificial Sequence
  ENSG00000170180_4 (sequence is synthesized)
catctgatgtaaaacctctcccctcacctgacacagacgtgcctttaagttctgttgaaatagaaaatccagagacaagtgatcaatgagaatctgttcaccaaaccaaatgtggaaaga

SEQ ID NO: 566275 - DNA, 120 bp, Artificial Sequence
  ENSG00000170180_5 (sequence is synthesized)
acacaaagaagacataagacttcagtcaagtgaaaaattaacatgtggactggacactccaataaattatatacctgcctaagttgtacaatttcagaatgcaattttcattataatgag

SEQ ID NO: 566276 - DNA, 120 bp, Artificial Sequence
  ENSG00000170180_6 (sequence is synthesized)
ttccagtgactcaatgatggggaaaaaaatctctgctcattaatatttcaagataaagaacaaatgtttccttgaatgcttgcttttgtgtgttagcataatttttagaattgtttgaga

SEQ ID NO: 566277 - DNA, 120 bp, Artificial Sequence
  ENSG00000170180_7 (sequence is synthesized)
attctgatccaaaactttagttgaattcatctacgtttgtttaatattaacttaacctattctattgtattataatgatgattctgtcaaatgaaaggcttgaaatacctagatgaagtt

SEQ ID NO: 566278 - DNA, 120 bp, Artificial Sequence
  ENSG00000170180_8 (sequence is synthesized)
tagattttcttcctattgtaaacttttgagtctggtttcattgttttaaataaattaaggggacactaaagtcctatcattcatttccttcattgctgaacaggcaagatataatattac

SEQ ID NO: 566279 - DNA, 120 bp, Artificial Sequence
  ENSG00000170180_9 (sequence is synthesized)
ttccttcattgctgaacaggcaagatataatattacatgaatgattactatattttgttcacactaataaagcttatgctcagaaatgccatacacacacacacacacacacacaaacac

SEQ ID NO: 566280 - DNA, 120 bp, Artificial Sequence
  ENSG00000170180_10 (sequence is synthesized)
ggttttcccattaatatgaaatattacatatatataagtgccatatttaaaataatttgtctaacagtagaactgtgtcggagcactcactgaagcttgcattccactgaaagagttatt

SEQ ID NO: 566281 - DNA, 120 bp, Artificial Sequence
  ENSG00000170180_11 (sequence is synthesized)
gagaaggaaaagaacttacgacctttctttataacagaaactcaactctaaattcaacaagatgtgcaaaccggacatgcaggtgaatattttaataggttactataaggttctcaatta

SEQ ID NO: 566282 - DNA, 120 bp, Artificial Sequence
  ENSG00000170180_12 (sequence is synthesized)
aattctttaatctgtccagtcccagtttctcttattaataaaactttggaaattgctttaaaccatttaaaggaaatttctagatatagaaactaaggactgtgactatacagctgtcac

SEQ ID NO: 566283 - DNA, 120 bp, Artificial Sequence
  ENSG00000170180_13 (sequence is synthesized)
tcatttgtagtaaaacttaaaaagcaaaaacaaaaaacaaaaaagaccttcctgtgatactttatttccgaactaataaaaatctatatgactttttattattgtgtgataaccaagtaa

SEQ ID NO: 566284 - DNA, 120 bp, Artificial Sequence
  ENSG00000170180_14 (sequence is synthesized)
atgttttctattttgcatattttcaggcatggtaacagaaatttaccttttaataaattaaaaaatctaaattttaacctacttgtatgttcggagagtgtttttgtactatattgacta

SEQ ID NO: 566285 - DNA, 120 bp, Artificial Sequence
  ENSG00000170180_15 (sequence is synthesized)
cttaaaatagagaatgagactaagaagggaacatttctgttgatacatgttttttaaaagtaattttaagagcattattaggttaattaatccaattaatgacccaaatgccaaggtaat

SEQ ID NO: 566286 - DNA, 120 bp, Artificial Sequence
  ENSG00000170180_16 (sequence is synthesized)
tttaaatttacatttttaataaaagcaacatgttgaaacaagagagggtgagattaacctttttgctaaagtaatttacaagtcaaagacaggaagagatcagagtgaatgtgccttctt

SEQ ID NO: 566287 - DNA, 120 bp, Artificial Sequence
  ENSG00000170180_17 (sequence is synthesized)
aaccagagctacagaatttagtgaataattaaagtacaaactgctttgacctccttgaacttttccaagcaatttctctgtacttctatatatgaatgtcttagccaattttctgctact

SEQ ID NO: 566288 - DNA, 120 bp, Artificial Sequence
  ENSG00000170180_18 (sequence is synthesized)
ataacagaatacgacagactgggtaatttaaaaagaaaagaaatttattttcttcctagttctggaggctgggaaggcgaagggcatggcactgacatctgccttgtaactgatgagaac

SEQ ID NO: 566289 - DNA, 120 bp, Artificial Sequence
  ENSG00000170180_19 (sequence is synthesized)
cttcttactgcatgataacaaagcagcaaggcaagcaaaagcgtaagatgaagagagaggaaatgaagccaaacacatcctttcatcagaagcccattccctctataaggcgttattaca

SEQ ID NO: 566290 - DNA, 120 bp, Artificial Sequence
  ENSG00000170180_20 (sequence is synthesized)
tttatgagaatggagtcctcatgacctaatcgtgaccttaaaggcccctcccaacactgttacaatggcaattaaatttcaacaaaggttccagaggtgacattcgaatcagcaatgaaa

SEQ ID NO: 566291 - DNA, 120 bp, Artificial Sequence
  ENSG00000170180_21 (sequence is synthesized)
ttttcatagttaaatttggtattcgtgggggaagaaatgaccatttcccttgtatttttataattaaatcagcaaaatattgtaataaagaaatctttcctgtgaagataccatgacccc

SEQ ID NO: 566292 - DNA, 120 bp, Artificial Sequence
  ENSG00000170180_22 (sequence is synthesized)
tttttgcactaacttcaggaaccagctcatgatctcaggatgtatggaaaaataatctttgtattactattgtcagggttcatccagtgattcatttgcaagcaggcatggggtaaggtc

SEQ ID NO: 566293 - DNA, 120 bp, Artificial Sequence
  ENSG00000170180_23 (sequence is synthesized)
ttcagagtatgtttctcagaggcccatgcagctaagaaaatgtgcagtgttggcacaaggtctgtctattcctgggtagccagatgctggacacatctttcataacaccacaagaaattg

SEQ ID NO: 566294 - DNA, 120 bp, Artificial Sequence
  ENSG00000170180_24 (sequence is synthesized)
ttcaggaaccagctcatgatctcaggatgtatggaaaaataatctttgtattactattgtcagcactattctcatgctgagaagattcaaaataatgggaaattgaagtcctaggaacaa

SEQ ID NO: 566295 - DNA, 120 bp, Artificial Sequence
  ENSG00000170180_25 (sequence is synthesized)
tttttgcactaacttcaggaaccagctcatgatctcaggatgtatggaaaaataatctttgtattactattgtcaggtaagatgataaacatgaatgccgaaagctgcttaagaaaaggg

SEQ ID NO: 566296 - DNA, 120 bp, Artificial Sequence
  ENSG00000170180_26 (sequence is synthesized)
tagcagggagttattttctgagtagatgacatttatgctaaatgtggaacaaggagacggagccaaccctgaaaattctgggaaaagaggacagaaggcagagggaagagcaagagcaaa

SEQ ID NO: 566297 - DNA, 120 bp, Artificial Sequence
  ENSG00000170180_27 (sequence is synthesized)
acttgcagttgtctttggtagtttttttgcactaacttcaggaaccagctcatgatctcaggatgtatggaaaaataatctttgtattactattgtcagatggagtctcgttctgtcgcc

SEQ ID NO: 566298 - DNA, 120 bp, Artificial Sequence
  ENSG00000170180_28 (sequence is synthesized)
tatctcttttgactcaatctaaaagtttctgtcttttaatacaaaaccacaatccatatgcattcattaattcacaactgacatttagtatcttatttctgttatcctatttcatatttt

SEQ ID NO: 566299 - DNA, 120 bp, Artificial Sequence
  ENSG00000170180_29 (sequence is synthesized)
atgattccttgtttctgctcttttgatatataaattatgttttatttgcccttatcctttcatgtgtttctaaagtatatagcctacgtgtaattgtcccattagctaactttatgtttt

SEQ ID NO: 566300 - DNA, 120 bp, Artificial Sequence
  ENSG00000170180_30 (sequence is synthesized)
tttgcactaacttcaggaaccagctcatgatctcaggatgtatggaaaaataatctttgtattactattgtcaggagacggagccaaccctgaaaattctgggaaaagaggacagaaggc

SEQ ID NO: 566301 - DNA, 120 bp, Artificial Sequence
  ENSG00000170180_31 (sequence is synthesized)
caaaatctctgcaaaggggatttcaaccaaaagaaaaaaaattttagaaaaaaatatttttaagctgaagcattttactttttactgtcttaagactagaaaattgtgttattaatattt

SEQ ID NO: 566302 - DNA, 120 bp, Artificial Sequence
  ENSG00000170180_32 (sequence is synthesized)
ctcaagctttcgtgacagaaaacccatctcttttactccaaagcccatatagcacccacaactattaactgtgaccaagaaagagaaggcaagccccaattaacctttgtacgtaaagcc

SEQ ID NO: 566303 - DNA, 120 bp, Artificial Sequence
  ENSG00000170180_33 (sequence is synthesized)
taaagaatgaaaaaatatacctgaatcctcaatcatcaaacagcatagtatatactaagtaatttgtaataattaaactctagaaaattgtgtggcttcggtagtaagagagcttcatga

SEQ ID NO: 566304 - DNA, 120 bp, Artificial Sequence
  ENSG00000170180_34 (sequence is synthesized)
cattccattttaaactatccattgcttgtttcaaatgcctaagaaaatgtgtctatcttagaagagcatatgttgttaactttattcacacaaaattgtaaaggcaaagaaaatattctc

SEQ ID NO: 566305 - DNA, 120 bp, Artificial Sequence
  ENSG00000170185_0 (sequence is synthesized)
acttcaaaatccgggtcaaagggtgtcgcttcggtctcttctccccggctgatcccagcactctccgtgacagcgcctcctgactcagcccaggaccggcttcttctcacgacctgctgg

SEQ ID NO: 566306 - DNA, 120 bp, Artificial Sequence
  ENSG00000170185_1 (sequence is synthesized)
agactggacgcccacacctgacccggaactcggaggcgtgcttcctccacccgccggctagcagccccgggccctgagctcccgccgacgccgctggggggcccgacaggcccctcggcg

SEQ ID NO: 566307 - DNA, 120 bp, Artificial Sequence
  ENSG00000170185_2 (sequence is synthesized)
ctgatgctgagtgggatcgagggcccggggcggcggcggagtacgggcctctggcgccttaggccagccgcaggtgtcggttcttaggctctccaggctcgctagctcccgccccggctt

SEQ ID NO: 566308 - DNA, 120 bp, Artificial Sequence
  ENSG00000170185_3 (sequence is synthesized)
ggatgggtctccctgcgccataaatgtggctgctgaggcggcggtggccgtggcccgtcgcgctgctgctgcggcgctccaagttcatctccgccccggggctctcctgccccacctcgg

SEQ ID NO: 566309 - DNA, 120 bp, Artificial Sequence
  ENSG00000170185_4 (sequence is synthesized)
ggctgccgccacccgctccttatcccctggccctggccttgcagcgtggcgacaatggacaagatcctggagggccttgtgagttcctcgcatcccctgcccctcaagcgggtgattgtg

SEQ ID NO: 566310 - DNA, 120 bp, Artificial Sequence
  ENSG00000170185_5 (sequence is synthesized)
cggaaggtggtggaatcggcggagcactggctagacgaggcgcagtgcgaggccatgtttgacctgacgacccggctcatcctggagggccaggaccctttccagcggcaggtggggcac

SEQ ID NO: 566311 - DNA, 120 bp, Artificial Sequence
  ENSG00000170185_6 (sequence is synthesized)
caggtgctggaggcctacgcacgataccaccggccagagttcgagtccttcttcaacaagaccttcgtgttgggcctccttcatcagggctaccactctctggacaggaaggatgtagcc

SEQ ID NO: 566312 - DNA, 120 bp, Artificial Sequence
  ENSG00000170185_7 (sequence is synthesized)
atcctggactacattcacaacggcctgaagctgattatgagctgtccgtcggtgctggatctctttagcctcctgcaggtagaggtgttacggatggtgtgtgagaggccggagccgcag

SEQ ID NO: 566313 - DNA, 120 bp, Artificial Sequence
  ENSG00000170185_8 (sequence is synthesized)
ctctgtgcccgactgagcgaccttctgaccgactttgtgcaatgcatccccaaggggaaattgtccatcacgttctgtcaacagctggttcgaacgataggccatttccagtgcgtgtcc

SEQ ID NO: 566314 - DNA, 120 bp, Artificial Sequence
  ENSG00000170185_9 (sequence is synthesized)
acccaggaaagagagctgcgggaatatgtctcccaggtgacaaaagtgagtaacttgctgcagaacatctggaaggccgagcctgccacactactgccttccctgcaagaagtttttgca

SEQ ID NO: 566315 - DNA, 120 bp, Artificial Sequence
  ENSG00000170185_10 (sequence is synthesized)
agcatctcttccacagatgcatcatttgaaccttctgtagcattggcaagccttgtgcagcatattcctcttcagatgattacagttctcatcaggagccttactacggatccaaatgta

SEQ ID NO: 566316 - DNA, 120 bp, Artificial Sequence
  ENSG00000170185_11 (sequence is synthesized)
aaagatgcaagtatgacccaagccctttgcagaatgattgactggctatcctggccattggctcagcatgtggatacatgggtaattgcactcctgaaaggactggcagctgtccagaag

SEQ ID NO: 566317 - DNA, 120 bp, Artificial Sequence
  ENSG00000170185_12 (sequence is synthesized)
tttactattttgatagatgttactttgctgaaaatagaactggtttttaatcgactttggtttcctcttgtgagacctggtgctcttgcagttctttctcacatgctgcttagctttcag

SEQ ID NO: 566318 - DNA, 120 bp, Artificial Sequence
  ENSG00000170185_13 (sequence is synthesized)
cattctccagaggcgttccatttgattgttcctcatgtggttaatttggttcattctttcaaaaatgatggtctgccttcaagtacagccttcttagtacaattaacagaattgatacac

SEQ ID NO: 566319 - DNA, 120 bp, Artificial Sequence
  ENSG00000170185_14 (sequence is synthesized)
tgtatgatgtatcattattctggatttccagatctctatgaacctattctggaggcaataaaggattttcctaagcccagtgaagagaagattaagttaattctcaatcaaagtgcctgg

SEQ ID NO: 566320 - DNA, 120 bp, Artificial Sequence
  ENSG00000170185_15 (sequence is synthesized)
acttctcaatccaattctttggcgtcttgcttgtctagactttctggaaaatctgaaactgggaaaactggtcttattaacctaggaaatacatgttatatgaacagtgttatacaagcc

SEQ ID NO: 566321 - DNA, 120 bp, Artificial Sequence
  ENSG00000170185_16 (sequence is synthesized)
ttgtttatggccacagatttcaggagacaagtattatctttaaatctaaatgggtgcaattcattaatgaaaaaattacagcatctttttgcctttctggcccatacacagagggaagca

SEQ ID NO: 566322 - DNA, 120 bp, Artificial Sequence
  ENSG00000170185_17 (sequence is synthesized)
tacgcacctcggatattctttgaggcttccagacctccatggtttactcccagatcacagcaagactgttctgaatacctcagatttctccttgacaggctccatgaagaagaaaagatc

SEQ ID NO: 566323 - DNA, 120 bp, Artificial Sequence
  ENSG00000170185_18 (sequence is synthesized)
ttgaaagttcaggcctcacacaagccttctgaaattctggaatgcagtgaaacttctttacaggaagtagctagtaaagcagcagtactaacagagacccctcgtacaagtgacggtgag

SEQ ID NO: 566324 - DNA, 120 bp, Artificial Sequence
  ENSG00000170185_19 (sequence is synthesized)
aagactttaatagaaaaaatgtttggaggaaaactacgaactcacatacgttgtttgaactgcaggagtacctcacaaaaagtggaagcctttacagatctttcgcttgccttttgtcct

SEQ ID NO: 566325 - DNA, 120 bp, Artificial Sequence
  ENSG00000170185_20 (sequence is synthesized)
tcctcttctttggaaaacatgtctgtccaagatccagcatcatcacccagtatacaagatggtggtctaatgcaagcctctgtacccggtccttcagaagaaccagtagtttataatcca

SEQ ID NO: 566326 - DNA, 120 bp, Artificial Sequence
  ENSG00000170185_21 (sequence is synthesized)
acaacagctgccttcatctgtgactcacttgtgaatgaaaaaaccataggcagtcctcctaatgagttttactgttctgaaaacacttctgtccctaacgaatctaacaagattcttgtt

SEQ ID NO: 566327 - DNA, 120 bp, Artificial Sequence
  ENSG00000170185_22 (sequence is synthesized)
aataaagatgtacctcagaaaccaggaggtgaaaccacaccttcagtaactgacttactaaattattttttggctccagagattcttactggtgataaccaatattattgtgaaaactgt

SEQ ID NO: 566328 - DNA, 120 bp, Artificial Sequence
  ENSG00000170185_23 (sequence is synthesized)
gcctctctgcaaaatgctgagaaaactatgcaaatcacggaggaacctgaataccttattcttactctcctgagattttcatatgatcagaagtatcatgtgagaaggaaaattttagac

SEQ ID NO: 566329 - DNA, 120 bp, Artificial Sequence
  ENSG00000170185_24 (sequence is synthesized)
aatgtatcactgccactggttttggagttgccagttaaaagaattacttctttctcttcattgtcagaaagttggtctgtagatgttgacttcactgatcttagtgagaaccttgctaaa

SEQ ID NO: 566330 - DNA, 120 bp, Artificial Sequence
  ENSG00000170185_25 (sequence is synthesized)
aaattaaagccttcagggactgatgaagcttcctgcacaaaattggtgccctatctattaagttccgttgtggttcactctggtatatcctctgaaagtgggcattactattcttatgcc

SEQ ID NO: 566331 - DNA, 120 bp, Artificial Sequence
  ENSG00000170185_26 (sequence is synthesized)
aggaatatcacaagtacagactcttcatatcagatgtaccaccagtctgaggctctggcattagcatcctcccagagtcatttactagggagagatagtcccagtgcagtttttgaacag

SEQ ID NO: 566332 - DNA, 120 bp, Artificial Sequence
  ENSG00000170185_27 (sequence is synthesized)
gatttggaaaataaggaaatgtcaaaagaatggtttttatttaatgacagtagagtgacatttacttcatttcagtcagtccagaaaattacgagcaggtttccaaaggacacagcttat

SEQ ID NO: 566333 - DNA, 120 bp, Artificial Sequence
  ENSG00000170185_28 (sequence is synthesized)
gtgcttttgtataaaaaacagcatagtactaatggtttaagtggtaataacccaaccagtggactctggataaatggagacccacctctacagaaagaacttatggatgctataacaaaa

SEQ ID NO: 566334 - DNA, 120 bp, Artificial Sequence
  ENSG00000170185_29 (sequence is synthesized)
acaataaactatatttacaggaacaagagttgaatgctcgagcccgggccctccaagctgcatctgcttcatgttcatttcggcccaatggatttgatgacaacgacccaccaggaagct

SEQ ID NO: 566335 - DNA, 120 bp, Artificial Sequence
  ENSG00000170185_30 (sequence is synthesized)
gtggaccaactggtggagggggtggaggaggatttaatacagttggcagactcgtattttgatcctgagagagtccaaaatgcactggtcacgaaacgtctaatactatgactgttaaaa

SEQ ID NO: 566336 - DNA, 120 bp, Artificial Sequence
  ENSG00000170185_31 (sequence is synthesized)
tgtcagactataacaaatatctatcttttatttttcattagacccttatacttcaagagaacacactcagtgcttgtttttattttcttgacacatttattaacaaaatgcatcatggaa

SEQ ID NO: 566337 - DNA, 120 bp, Artificial Sequence
  ENSG00000170185_32 (sequence is synthesized)
aaaaaaatctacctcttaaaattccatttgcttttatggttagacatgcttgaccaaaaatgttcagaagaaaatatgtacctggtccctaattaagctgcgttaaatttggtagaagca

SEQ ID NO: 566338 - DNA, 120 bp, Artificial Sequence
  ENSG00000170185_33 (sequence is synthesized)
tttaaatggtctatcttcagttttactgaacaaaaaatgtaatttatttagcattctttataaaagaattgatgctagaggtaaaaaaaaatacttgtttttaaaaaatcctttacgtct

SEQ ID NO: 566339 - DNA, 120 bp, Artificial Sequence
  ENSG00000170185_34 (sequence is synthesized)
tgtgtaattaccccattattaaattcaagtccttgaaaatcaactagagattataaagtctctaaagaaggcaataacaaaatttatcaagatatagtacttttcagtttttgtttagtg

SEQ ID NO: 566340 - DNA, 120 bp, Artificial Sequence
  ENSG00000170185_35 (sequence is synthesized)
tcttcagcatcactgtgtctgtatttcaagtacaaatgtttttaaaaaggattctttatacatatgtgctgaattgattttaagaaagttgcatgatcctgtaggagcaacatttttacc

SEQ ID NO: 566341 - DNA, 120 bp, Artificial Sequence
  ENSG00000170185_36 (sequence is synthesized)
taaaaaatgctaactttatagtatttctaattgttcaaggattttaaaattctatttcagggagtatatcttctgtggttttgaaggaggtgagttctgtatgtgccttgcagtactgta

SEQ ID NO: 566342 - DNA, 120 bp, Artificial Sequence
  ENSG00000170185_37 (sequence is synthesized)
attcaaaaataggaatctttggctgcaaaattttaatgaaatgttaggaagtaattttcgtgctaacattaaaattataactttttgaaaggtaatagattttccagaagtaaaatctga

SEQ ID NO: 566343 - DNA, 120 bp, Artificial Sequence
  ENSG00000170185_38 (sequence is synthesized)
tggttctaaatcaatcaatgtgatagttcatttttaactcttagaagaattcagaggaaattaacccagctaagtaaaaaatctgtcttgattttgttacttattcctcagaatattaaa

SEQ ID NO: 566344 - DNA, 120 bp, Artificial Sequence
  ENSG00000170185_39 (sequence is synthesized)
cattgatcacatatttttagagttttacatttgggttttttgtttgtttgtttcagtcatatgtttggcactgttgtttctattttcgtagttttagataaaatgttaaaatgccaaacc

SEQ ID NO: 566345 - DNA, 120 bp, Artificial Sequence
  ENSG00000170185_40 (sequence is synthesized)
ctaccttcctacactttttcttttgccaggaaactggaaacatgtcagttctcctggttcttgattatacagtactcaagagttatcccagttatcccccttcctaaaggttttaactta

SEQ ID NO: 566346 - DNA, 120 bp, Artificial Sequence
  ENSG00000170185_41 (sequence is synthesized)
tccacagttgtgcattgttctgaagattggtctcatatttattttgaaaacactttaaggaaacaatgttcttcgatgatttggggtttatctttttcccaagcttttatgacagtggtt

SEQ ID NO: 566347 - DNA, 120 bp, Artificial Sequence
  ENSG00000170185_42 (sequence is synthesized)
aaaaaacagaaatcctcatgtttattccattacctcccattcctaacctgtttccaatcaccaggaagattaggaaggcagattagattaaaaactgaaaattctttgcagatttaatga

SEQ ID NO: 566348 - DNA, 120 bp, Artificial Sequence
  ENSG00000170185_43 (sequence is synthesized)
aggttctcctccttataaatgaatgaaccagttatcatgcttttctgtggttttcctatcccaatagtgaatttctgagctatcctgtgtgttcagttatccacttacttgatagcaact

SEQ ID NO: 566349 - DNA, 120 bp, Artificial Sequence
  ENSG00000170185_44 (sequence is synthesized)
tacgaccagattatatcagtcttggcatttattgaaattggtaaagtgatttaatacttgatagattgatattgggctaagatgcttctaggaactttcataaaagcaattatacttgtg

SEQ ID NO: 566350 - DNA, 120 bp, Artificial Sequence
  ENSG00000170185_45 (sequence is synthesized)
cagctttatctatgaatatcaggtctctcaaggattttatgtatcaagataatatgtattgacttttttaaatgataaaatgaattctagttagagtctttccttggtatctgcagtgga

SEQ ID NO: 566351 - DNA, 120 bp, Artificial Sequence
  ENSG00000170185_46 (sequence is synthesized)
ttggttccagaacaccatcccccaatattaaaatccacagatactcaagtcccttatttatataaaatagcacagtatttgcatataacctgtgcacatcctcccatatactttaatctc

SEQ ID NO: 566352 - DNA, 120 bp, Artificial Sequence
  ENSG00000170185_47 (sequence is synthesized)
cagatgattagatatgattgcatagcacttacgttgtgctatgtagttgttatattgttttttcatttgtactattttttatgatatttattggttttttaaattttctatccaaagttg

SEQ ID NO: 566353 - DNA, 120 bp, Artificial Sequence
  ENSG00000170185_48 (sequence is synthesized)
tttgaatctaaggatacagagcctgaggatatggaaagctgactaaatatagtaacactgaagagtattcaaatgataactcataccagtaccaaaaacttgaagacttccttttaacat

SEQ ID NO: 566354 - DNA, 120 bp, Artificial Sequence
  ENSG00000170185_49 (sequence is synthesized)
taaaaatacagtaactttttacgtgatttgttgaattcaacatatttggaaccagaataatcagaaacttcattcaaaacctatgcatctgaacttttttagtaaggtaatactcaggac

SEQ ID NO: 566355 - DNA, 120 bp, Artificial Sequence
  ENSG00000170185_50 (sequence is synthesized)
tgttctgattctaacagatccctgttaattacagatttatttgtcatattaggtcttttctttctcccatattcctaacccgtgtactagctccaactgttgtgaggtttgactctgaag

SEQ ID NO: 566356 - DNA, 120 bp, Artificial Sequence
  ENSG00000170185_51 (sequence is synthesized)
actgagtagagtactattgttgtttttctttccttagtcagagtaatcagtttaaatgaagttgctcattgctgctaagaagcattaggcttcactgctagcaaaaatgaaaaactacaa

SEQ ID NO: 566357 - DNA, 120 bp, Artificial Sequence
  ENSG00000170185_52 (sequence is synthesized)
atctgagtctttctttcaaagatgtttattgacataattaaagtaaaaaattgtttagagatatgcaaagaaggaaatatatatgatgtcacacaagctccagtaagctatccactaagc

SEQ ID NO: 566358 - DNA, 120 bp, Artificial Sequence
  ENSG00000170185_53 (sequence is synthesized)
aggtgcctgtgcaactctgatttatggcattaacatatcaaattgaaggaaggattctagctcattttccattcaagcatcttcccactgcctctcttccagctaaataatcagagaagc

SEQ ID NO: 566359 - DNA, 120 bp, Artificial Sequence
  ENSG00000170185_54 (sequence is synthesized)
agggcagtatatccctggagatccctgacttttatctccataccttaaattgttggtagatcctttggatgtagagataaaaattcattatgatgctagaggcattggggggtccatgcg

SEQ ID NO: 566360 - DNA, 120 bp, Artificial Sequence
  ENSG00000170185_55 (sequence is synthesized)
aaaggttcaaacagcctattacattaatgcacatgtggaaagaacaaaaattttcaagctaagtcttaagttcaaatctataatttttttctcttcagttctgttctttgtatgataatc

SEQ ID NO: 566361 - DNA, 120 bp, Artificial Sequence
  ENSG00000170185_56 (sequence is synthesized)
cttaaaaaagtagttgtcttcttttcacatacacctctttaaagctatcatcttataataagtggaattggatgcttattgtgtgcccagcacagtttaggaaaaaaataattggcactg

SEQ ID NO: 566362 - DNA, 120 bp, Artificial Sequence
  ENSG00000170185_57 (sequence is synthesized)
tttgtccagttactggagatcttcattttgatgctttgtactttgttccaggtctttaattctcagtccatcttttcctatgattgtgtacttcacatgatacattccatataaagagct

SEQ ID NO: 566363 - DNA, 120 bp, Artificial Sequence
  ENSG00000170185_58 (sequence is synthesized)
tgtgtacttcacatgatacattccatataaagagctcttttaaaatgactatttcaaaaatactgtacatttatatatagtattttttctcataaaaatgtgatagtttatatatccttt

SEQ ID NO: 566364 - DNA, 78 bp, Artificial Sequence
  ENSG00000170185_59 (sequence is synthesized)
atgaacctattctggaggcaataaacggctcactgcagcctctacatcttgagctcaagtgaccctcctgcctcagcc

SEQ ID NO: 566365 - DNA, 120 bp, Artificial Sequence
  ENSG00000170185_60 (sequence is synthesized)
tattaaacaattgacacagttaaatgagtaccctcattttgaaatctaacatgagtttttattaaattctgaaatataggtctggatttacatgaagtattctcaacctgtataactaaa

SEQ ID NO: 566366 - DNA, 120 bp, Artificial Sequence
  ENSG00000170185_61 (sequence is synthesized)
ttgcctttctaatattgtgacaatttaaatgaaaagtggcaattagatgtaatgcagaagactttatttgttccttacaaaagatggctcattctgaaatcatgccatacaaaatacaga

SEQ ID NO: 566367 - DNA, 120 bp, Artificial Sequence
  ENSG00000170185_62 (sequence is synthesized)
aagtttacaaaagtggacatatcctccctcttcctctcagcctcacccaccagaggaaataactgctaaatgtggtatttatgccctcaagacttttgtgtaaatgttttaagggctgtt

SEQ ID NO: 566368 - DNA, 120 bp, Artificial Sequence
  ENSG00000170185_63 (sequence is synthesized)
tattgatatttaggtggataagattaaaaaacactaaaatgtagactatgtaaagaaaggatattcatattctttgaggatgtggttagtaaaaccaaggagataatagaacaattgtaa

SEQ ID NO: 566369 - DNA, 120 bp, Artificial Sequence
  ENSG00000170185_64 (sequence is synthesized)
atcgaagccaaggaatggttttatatgagataaatttattcataaatatacttttttcaaggagttagtgattttattacttaaataaaggctaataaaaagttaaaattcttgctgaaa

SEQ ID NO: 566370 - DNA, 120 bp, Artificial Sequence
  ENSG00000170190_0 (sequence is synthesized)
agtcccgcggtcctcgtcgcgaccggcccgggccgcaggacgccgcgctcgggggagctgagccacctctccgccaggcccgtgcgagcggtacaaagaaaagagcacttccctgctggg

SEQ ID NO: 566371 - DNA, 120 bp, Artificial Sequence
  ENSG00000170190_1 (sequence is synthesized)
gcagaggccaagccagagccctggccccatcacctctctgccctgcttgagtctggaatggacctccctgcctggaagctgcattgcccttggtcctgggcctgcctgccccctggggaa

SEQ ID NO: 566372 - DNA, 120 bp, Artificial Sequence
  ENSG00000170190_2 (sequence is synthesized)
cacaggcagcagccacattggcagtgaggccgtggcagcgtcggcagcagaggatgccccaggccctggagcgtgcagatggcagctgggcctgggtggtgctgctggccaccatggtga

SEQ ID NO: 566373 - DNA, 120 bp, Artificial Sequence
  ENSG00000170190_3 (sequence is synthesized)
cccagggcctcaccctgggcttccccacgtgtatcggcatcttcttcactgaattgcaatgggagttccaggccagcaacagcgagacctcttggttcccctccatcctcacggctgtgc

SEQ ID NO: 566374 - DNA, 120 bp, Artificial Sequence
  ENSG00000170190_4 (sequence is synthesized)
tccacatggcagggcccctgtgcagcatcctggtgggacgcttcggctgccgagtgaccgtgatgctggggggcgtgctggccagcctgggcatggtggccagctccttctctcacaacc

SEQ ID NO: 566375 - DNA, 120 bp, Artificial Sequence
  ENSG00000170190_5 (sequence is synthesized)
tcagccagctctacttcacagcaggattcatcacaggcctgggcatgtgcttcagcttccagtcaagcatcacggtgctgggcttctactttgtccgccggcgggtgctggccaacgcgc

SEQ ID NO: 566376 - DNA, 120 bp, Artificial Sequence
  ENSG00000170190_6 (sequence is synthesized)
tggcctcgatgggcgtctccctgggcatcaccctctggccgctgctctcccgctaccttctggagaacctgggctggaggggtaccttccttgtcttcggcgggatctttctccactgct

SEQ ID NO: 566377 - DNA, 120 bp, Artificial Sequence
  ENSG00000170190_7 (sequence is synthesized)
gcatctgcggggccatcataaggcctgtggccaccagtgtggcccctgagaccaaagaatgtcccccgccacctcccgagacacctgcacttggctgcctggctgcatgcggccggacca

SEQ ID NO: 566378 - DNA, 120 bp, Artificial Sequence
  ENSG00000170190_8 (sequence is synthesized)
gacatcctgcggcacaacacaggctactgcgtgtacatactgggtgtgatgtggtccgtcctgggcttcccactgccacaagtcttcctggtgccatatgccatgtggcacagcgtggac

SEQ ID NO: 566379 - DNA, 120 bp, Artificial Sequence
  ENSG00000170190_9 (sequence is synthesized)
gagcagcaggcagccctcctcatctccatcatcggcttcagcaacatcttcctgaggcccctagccgggctgatggcaggacggccggcctttgctagccaccgcaagtacctgttcagc

SEQ ID NO: 566380 - DNA, 120 bp, Artificial Sequence
  ENSG00000170190_10 (sequence is synthesized)
ctggcactcctgctcaatgggctcactaacctggtgtgtgcggcatcaggtgacttctgggtgctcgtgggctactgcctggcgtacagcgtgtccatgagtggcatcggcgccctcatc

SEQ ID NO: 566381 - DNA, 120 bp, Artificial Sequence
  ENSG00000170190_11 (sequence is synthesized)
ttccaggttctcatggacatcgtccccatggatcagttccccagagccctgggactcttcactgtcctggacggccttgctttcctcatctccccaccactggccgggttgctcctggac

SEQ ID NO: 566382 - DNA, 120 bp, Artificial Sequence
  ENSG00000170190_12 (sequence is synthesized)
gccaccaacaactttagctatgttttctacatgtccagcttcttcctcatctcagctgccctcttcatgggtggcagcttctacgccctgcagaagaaggagcaaggcaagcaggctgtc

SEQ ID NO: 566383 - DNA, 120 bp, Artificial Sequence
  ENSG00000170190_13 (sequence is synthesized)
gcggcggatgccctggagcgggatcttttcttggaagccaaagacggtcctgggaagcaacggtcccctgagatcatgtgccagtcttcccgccagccacgtccagctggcgtcaataag

SEQ ID NO: 566384 - DNA, 120 bp, Artificial Sequence
  ENSG00000170190_14 (sequence is synthesized)
catctttggggatgtcctgcctcctccaggaccagccatgagtggctcttatggccaaaggcggtactgcaggccaagcaaacggctctgggctggaatagccctacctgagtgccctgt

SEQ ID NO: 566385 - DNA, 120 bp, Artificial Sequence
  ENSG00000170190_15 (sequence is synthesized)
ttgactccgccactatctgccatgtgagttgggcaaattgttgaccacctctgagccttgaaaaagtaggaggttactttgttagagcaaaataataaaatttaattttaaaaaagaaaa

SEQ ID NO: 566386 - DNA, 120 bp, Artificial Sequence
  ENSG00000170190_16 (sequence is synthesized)
gtctaaacttctccctgcccacacatccagcttcatggcactgtgctacaaagctggtctcattgggcctaggggtctttgagagctgagcttggcagcccctggggcccaacctcaccc

SEQ ID NO: 566387 - DNA, 120 bp, Artificial Sequence
  ENSG00000170190_17 (sequence is synthesized)
ctagtcccagcaagtgagagcgaagcatcttgccctgtctacctccttgcccaaagcacacaccaggcagtgaccatgactcatggttcccagtacaaagaaaagagcacttccctgctg

SEQ ID NO: 566388 - DNA, 120 bp, Artificial Sequence
  ENSG00000170190_18 (sequence is synthesized)
agaagctagaaagagggcatccgggttgtgcaaatttcagacacacggatatcccgtggcgcctgcgtccggagcccggccctgctgctggactgtccccggccacgcccgccgcccctc

SEQ ID NO: 566389 - DNA, 120 bp, Artificial Sequence
  ENSG00000170190_19 (sequence is synthesized)
agagacaattgtaccccattgcctggtgccacctgccctgccccgtcctgtccctcctatccctcctgtccctcctgtccttcctgccacctcctgccaggctggctctgggaagtgggt

SEQ ID NO: 566390 - DNA, 120 bp, Artificial Sequence
  ENSG00000170190_20 (sequence is synthesized)
ctgagatcatgtatgtaaccagcgtctaagacccagggttcatctgtgtgaccagtgtctgagtcctgggatcactgagtgaacactgtctcagcccagcccaggagggggacctctagc

SEQ ID NO: 566391 - DNA, 120 bp, Artificial Sequence
  ENSG00000170190_21 (sequence is synthesized)
tccttcaccaggggcttgggtgaagagtagcccaggaagcccgggctgtccaggctctgcaagctgggactctgccaggagctgggactttggaggctggcctctgaagatgccctgaga

SEQ ID NO: 566392 - DNA, 120 bp, Artificial Sequence
  ENSG00000170190_22 (sequence is synthesized)
gcggtcctcgtcgcgaccggcccgggccgcaggacgccgcgctcgggggagctgagccacctctccgccaggcccgtgcgagcggcacacaccaggcagtgaccatgactcatggttccc

SEQ ID NO: 566393 - DNA, 74 bp, Artificial Sequence
  ENSG00000170190_23 (sequence is synthesized)
agggctgaattttgaaagaccagttgactggagaaaccgctcgatgggaggggaggctggagagccgactgggc

SEQ ID NO: 566394 - DNA, 120 bp, Artificial Sequence
  ENSG00000170191_0 (sequence is synthesized)
gcagtccgccttgcgcatgcgcaggcggcggtggcaaggctacggttcgcgccagcggccggcgctatggggctgagccgcgtgcgggcggttttctttgacttggacaacactctcatc

SEQ ID NO: 566395 - DNA, 120 bp, Artificial Sequence
  ENSG00000170191_1 (sequence is synthesized)
gacacggccggggcgagcaggagaggcatgttggaggtgataaaactcttacaatcaaaataccattataaagaagaggctgaaatcatctgtgataaagttcaagttaaactcagcaag

SEQ ID NO: 566396 - DNA, 120 bp, Artificial Sequence
  ENSG00000170191_2 (sequence is synthesized)
gaatgttttcatccttacaatacatgcattactgatttaaggacttcacattgggaagaagcaatccaggaaacaaaaggtggtgcagccaatagaaaattggctgaagaatgttatttc

SEQ ID NO: 566397 - DNA, 120 bp, Artificial Sequence
  ENSG00000170191_3 (sequence is synthesized)
ctttggaaatctacacgtttacagcatatgacactagcagaagacgtcaaagccatgcttactgaacttcgaaaggaggtccgcctacttctattaacgaatggggacagacagacccag

SEQ ID NO: 566398 - DNA, 120 bp, Artificial Sequence
  ENSG00000170191_4 (sequence is synthesized)
agggagaagattgaggcttgtgcctgtcagtcctattttgacgctgttgttgtaggtggagagcagagagaggagaaaccagcaccgtccatattttattactgctgcaatcttctcgga

SEQ ID NO: 566399 - DNA, 120 bp, Artificial Sequence
  ENSG00000170191_5 (sequence is synthesized)
gtacaacctggggactgtgtgatggtcggtgacacattagaaaccgacatccaaggaggcctcaatgcaggattgaaagcaacagtctggatcaataaaaatggaatagtgccactgaag

SEQ ID NO: 566400 - DNA, 120 bp, Artificial Sequence
  ENSG00000170191_6 (sequence is synthesized)
tcctccccagttccgcattacatggtttcttctgtgctagagttacctgctctcttacaaagtatagactgcaaagtcagtatgtccacttaaagcacataaaagggcatgattatgaat

SEQ ID NO: 566401 - DNA, 120 bp, Artificial Sequence
  ENSG00000170191_7 (sequence is synthesized)
gttagaatcaatttgctgagtatgaaataagaaaagttagggcactccacttatgataatccagctctaagaataattttacttatgatttaatggccaatattttgaaggtcttcccaa

SEQ ID NO: 566402 - DNA, 120 bp, Artificial Sequence
  ENSG00000170191_8 (sequence is synthesized)
ccctattgcttctaagttgtaacaaccaaccattgagtggtacttatatctgaaaattcagattgcatgaattcaggtcagtagtatagcccagaaaatttaaggaaatatattatttgt

SEQ ID NO: 566403 - DNA, 120 bp, Artificial Sequence
  ENSG00000170191_9 (sequence is synthesized)
tagtctgtatctggagctttttaaaattatgttattaatcttttagtatcttggctgcataatgccaagcaggattgctttacacatggatgcacaaatgtaaggtttatcttctggctt

SEQ ID NO: 566404 - DNA, 120 bp, Artificial Sequence
  ENSG00000170191_10 (sequence is synthesized)
aaaaatagatatttttaaaaaatagattttctaaaacacagatttatgaaagcaagtgaatctggttaatatgaaataagtactaagtcacatgcaaatcaaggtattatatagtgaaat

SEQ ID NO: 566405 - DNA, 120 bp, Artificial Sequence
  ENSG00000170191_11 (sequence is synthesized)
tattttgcatattttgaaaacataaaccatagtttttgcctactttggatgtatactttcttttatgaacctgatttttctgtatgacatttttttttttttcagagggcagggagcaat

SEQ ID NO: 566406 - DNA, 120 bp, Artificial Sequence
  ENSG00000170191_12 (sequence is synthesized)
ttttctatggcatgtgacagattcctccagttagaaaaagctgttaaaatcaacacatggtgctcctttaccgtgacattttctcacctgtgcacagtgagccggtagcttccttttagt

SEQ ID NO: 566407 - DNA, 120 bp, Artificial Sequence
  ENSG00000170191_13 (sequence is synthesized)
cttcacctctcaaggaaatgtttttactgtcttttcccagacacacagtggggttgagggagctaggctgttttgctagagataattgcaaggcacgtggcactaaaagtcatttttctt

SEQ ID NO: 566408 - DNA, 120 bp, Artificial Sequence
  ENSG00000170191_14 (sequence is synthesized)
ctgtggatccataagaggaacatttcctcagtgtagcctaacaatgcagcccccaatctgttcctttttttttttgaaatgggatctctgtcgcccaggttggagtgccatggcaccatc

SEQ ID NO: 566409 - DNA, 65 bp, Artificial Sequence
  ENSG00000170191_15 (sequence is synthesized)
ccacctcagcctcccaagggtgtgtgtgactacaagtacacactaccacgcccagctaatgtgta

SEQ ID NO: 566410 - DNA, 120 bp, Artificial Sequence
  ENSG00000170191_16 (sequence is synthesized)
attataggcatgagccactgtgcctggccccctcatctgatagaaaattagattttgctatgagccatttcctgagggccaatttaatactcgtgtgactcttcttagagttaccatctg

SEQ ID NO: 566411 - DNA, 120 bp, Artificial Sequence
  ENSG00000170191_17 (sequence is synthesized)
ccttaaatttcctctgtttttcacattcttggaaatatatcattgttttgcaaatttctatatctaattcagggtttaccaggagcttaataattaatggctacatagcaaggcatcgtc

SEQ ID NO: 566412 - DNA, 120 bp, Artificial Sequence
  ENSG00000170191_18 (sequence is synthesized)
ttggaaccggagaattttctctagactattaggctagacagtctcatgattatactaaccaaacctggagtaaagtggttgaaaaaaaagaaagtataaaggggcttattaaagtggtta

SEQ ID NO: 566413 - DNA, 120 bp, Artificial Sequence
  ENSG00000170191_19 (sequence is synthesized)
ataaatatgatttaggttggtttttgatatgtttttcttccaactgttatataagaaactactaatgtaaaatagtaggctatatgttgggatgtgtatagctatgtcttcaagactaat

SEQ ID NO: 566414 - DNA, 120 bp, Artificial Sequence
  ENSG00000170191_20 (sequence is synthesized)
actcagagaatcaaattgtagattgtacctatctgtgagcctatttctttagccagttttctgtctactgccaagaaacagaattctctgcctcatgcaaatgccctttcgtgtttactt

SEQ ID NO: 566415 - DNA, 120 bp, Artificial Sequence
  ENSG00000170191_21 (sequence is synthesized)
ttcgctctagatttttaaaaatgtgattgtgcccttgactgtaccaaagtgctgttgctataacagtgaacatttgtgaacagaggatgtttgtagtttcaaatgcagtacccatatgac

SEQ ID NO: 566416 - DNA, 120 bp, Artificial Sequence
  ENSG00000170191_22 (sequence is synthesized)
cttgatcatattttagctatttaaaaattaagttggaggattttggcagaagtagtcacatgcatgattgctctgatagattggttggcgtgtgctgcagggggcttgtccttttaactc

SEQ ID NO: 566417 - DNA, 120 bp, Artificial Sequence
  ENSG00000170191_23 (sequence is synthesized)
tcccacaggatggatgtaggcagtgtcacattcattatgctgagagtgaaggttcatcactcctgtatcatggtagcaaatctcaacaggatagcttctaggatgttaagtgagcagttc

SEQ ID NO: 566418 - DNA, 120 bp, Artificial Sequence
  ENSG00000170191_24 (sequence is synthesized)
tccagcagaaatgatgtagaaggaaaaaattgaataattaaatttccttgtcttcacagtttgtattctacagagtacagtaatgtattacattccatttgcacccttccttagggaaga

SEQ ID NO: 566419 - DNA, 120 bp, Artificial Sequence
  ENSG00000170191_25 (sequence is synthesized)
actttgtggttatctaccttctgagtggaatgttacagaaaatattttaaaatattggaataaacctatgattttattaatattttttgttttagaataatattccttaaaattatgggt

SEQ ID NO: 566420 - DNA, 120 bp, Artificial Sequence
  ENSG00000170191_26 (sequence is synthesized)
gatgttttgtcatctttattttttttcaaagtttccctgtagtggccttctcacacaaagccagaggccctccctaacactgcttacagaggtgggcctagaacagacatgaatggacac

SEQ ID NO: 566421 - DNA, 120 bp, Artificial Sequence
  ENSG00000170191_27 (sequence is synthesized)
tgcacctggaataccagcacctggtggggaggtttggttccatgtgcacctccacatacaaggcacgaacatctcagatctgggagtgcccaggacccagtggatgctcagtattgtagg

SEQ ID NO: 566422 - DNA, 120 bp, Artificial Sequence
  ENSG00000170191_28 (sequence is synthesized)
aaagcaggtctttaccaaagttcttggtttattgctttcaaacttctttgcaaccttcagtaagaaacattttctatcataacctctttaacacatttatagtgttagataacactgtaa

SEQ ID NO: 566423 - DNA, 80 bp, Artificial Sequence
  ENSG00000170191_29 (sequence is synthesized)
tatgtgtatgggatccagttttatatgtttaattttcataaaacattcttgttacgtgtgatgatatttttcattccatt

SEQ ID NO: 566424 - DNA, 120 bp, Artificial Sequence
  ENSG00000170191_30 (sequence is synthesized)
ttgttacgtgtgatgatatttttcattccattcttttttgaattagggaatatattcattgttgaacaagtactacttgtagtacacaagtcaaaaaaataaaagggtgaatggtgaaaa

SEQ ID NO: 566425 - DNA, 120 bp, Artificial Sequence
  ENSG00000170209_0 (sequence is synthesized)
attcccctctcccggacccgaggagcaggaagcggcggctccttcggccacccaggcagcagccacagcggggagtgcgcggcgcggggacaggaagagaggggcaatggctgccgaccc

SEQ ID NO: 566426 - DNA, 120 bp, Artificial Sequence
  ENSG00000170209_1 (sequence is synthesized)
caccgagctgcggctgggcagcctccccgtcttcacccgcgacgacttcgagggcgactggcgcctagtggccagcggcggcttcagccaggtgttccaggcgcggcacaggcgctggcg

SEQ ID NO: 566427 - DNA, 120 bp, Artificial Sequence
  ENSG00000170209_2 (sequence is synthesized)
gacggagtacgccatcaagtgcgccccctgccttccacccgacgccgccagctctgatgtgaattacctcattgaagaagctgccaaaatgaagaagatcaagtttcagcacatcgtgtc

SEQ ID NO: 566428 - DNA, 120 bp, Artificial Sequence
  ENSG00000170209_3 (sequence is synthesized)
tatctacggggtgtgcaagcagcccctgggtattgtgatggagtttatggccaacggctccctggagaaggtgctgtccacccacagcctctgctggaagctcaggttccgcatcatcca

SEQ ID NO: 566429 - DNA, 120 bp, Artificial Sequence
  ENSG00000170209_4 (sequence is synthesized)
tgagaccagcttggccatgaacttcctgcacagcattaagccgcctctgctccacctggacctcaagccgggcaacatactcctggacagcaacatgcatgtcaaaatttcagacttcgg

SEQ ID NO: 566430 - DNA, 120 bp, Artificial Sequence
  ENSG00000170209_5 (sequence is synthesized)
cctgtccaagtggatggaacagtccacccggatgcagtacatcgagaggtcggctctgcggggcatgctcagctacatcccccctgagatgttcctggagagtaacaaggccccaggacc

SEQ ID NO: 566431 - DNA, 120 bp, Artificial Sequence
  ENSG00000170209_6 (sequence is synthesized)
taaatatgatgtgtacagctttgcaattgtcatctgggagctactcactcagaagaaaccatactcagggttcaacatgatgatgattattatccgagtggcggcaggcatgcggccctc

SEQ ID NO: 566432 - DNA, 120 bp, Artificial Sequence
  ENSG00000170209_7 (sequence is synthesized)
cctacagcctgtctctgaccaatggccaagcgaggcccagcagatggtggacctgatgaaacgctgctgggaccaggaccccaagaagaggccatgctttctagacattaccatcgagac

SEQ ID NO: 566433 - DNA, 120 bp, Artificial Sequence
  ENSG00000170209_8 (sequence is synthesized)
agacatactgctgtcactgctgcagagtcgtgtggcagtcccagagagcaaggccctggccaggaaggtgtcctgcaagctgtcgctgcgccagcccggggaggttaatgaggacatcag

SEQ ID NO: 566434 - DNA, 120 bp, Artificial Sequence
  ENSG00000170209_9 (sequence is synthesized)
ccaggaactgatggacagtgactcaggaaactacctgaagcgggcccttcagctctccgaccgtaagaatttggtcccgagagatgaggaactgtgtatctatgagaacaaggtcacccc

SEQ ID NO: 566435 - DNA, 120 bp, Artificial Sequence
  ENSG00000170209_10 (sequence is synthesized)
gcaggtgaggttgctgctggcccacgaggtagacgtggactgccagacggcctctggatacacgcccctcctgatcgccgcccaggaccagcaacccgacctctgtgccctgcttttggc

SEQ ID NO: 566436 - DNA, 120 bp, Artificial Sequence
  ENSG00000170209_11 (sequence is synthesized)
acatggtgctgatgccaaccgagtggatgaggatggctgggccccactgcactttgcagcccagaatggggatgacggcactgcgcgcctgctcctggaccacggggcctgtgtggatgc

SEQ ID NO: 566437 - DNA, 120 bp, Artificial Sequence
  ENSG00000170209_12 (sequence is synthesized)
ccaggaacgtgaagggtggacccctcttcacctggctgcacagaataactttgagaatgtggcacggcttctggtctcccgtcaggctgaccccaacctgcatgaggctgagggcaagac

SEQ ID NO: 566438 - DNA, 120 bp, Artificial Sequence
  ENSG00000170209_13 (sequence is synthesized)
ccccctccatgtggccgcctactttggccatgttagcctggtcaagctgctgaccagccagggggctgagttggatgctcagcagagaaacctgagaacaccactgcacctggcagtaga

SEQ ID NO: 566439 - DNA, 120 bp, Artificial Sequence
  ENSG00000170209_14 (sequence is synthesized)
gcggggcaaagtgagggccatccaacacctgctgaagagtggagcggtccctgatgcccttgaccagagcggctacggcccactgcacactgcagctgccaggggcaaatacctgatctg

SEQ ID NO: 566440 - DNA, 120 bp, Artificial Sequence
  ENSG00000170209_15 (sequence is synthesized)
caagatgctgctcaggtacggagccagccttgagctgcccacccaccagggctggacacccctgcatctagcagcctacaagggccacctggagatcatccatctgctggcagagagcca

SEQ ID NO: 566441 - DNA, 120 bp, Artificial Sequence
  ENSG00000170209_16 (sequence is synthesized)
cgcaaacatgggtgctcttggagctgtgaactggactcccctgcacctagctgcacgccacggggaggaggcggtggtgtcagcactgctgcagtgtggggctgaccccaatgctgcaga

SEQ ID NO: 566442 - DNA, 120 bp, Artificial Sequence
  ENSG00000170209_17 (sequence is synthesized)
gcagtcaggctggacacccctccacctggcggtccagaggagcaccttcctgagtgtcatcaacctcctagaacatcacgcaaatgtccacgcccgcaacaaggtgggctggacacccgc

SEQ ID NO: 566443 - DNA, 120 bp, Artificial Sequence
  ENSG00000170209_18 (sequence is synthesized)
ccacctggccgccctcaagggcaacacagccatcctcaaagtgctggtcgaggcaggcgcccagctggacgtccaggatggagtgagctgcacacccctgcaactggccctccgcagccg

SEQ ID NO: 566444 - DNA, 120 bp, Artificial Sequence
  ENSG00000170209_19 (sequence is synthesized)
aaagcagggcatcatgtccttcctagagggcaaggagccgtcagtggccactctgggtggttctaagccaggagccgagatggaaatttagacaacttggccagccgtggtggctcacgt

SEQ ID NO: 566445 - DNA, 120 bp, Artificial Sequence
  ENSG00000170214_0 (sequence is synthesized)
agtcagcccagaagcggctcattgaaagcagaccctcttcggcgctcgctgggcggaggacgcgccgcggtccgcagacccgagcgagctgggcaccgccgggcgcccccggccctgccg

SEQ ID NO: 566446 - DNA, 120 bp, Artificial Sequence
  ENSG00000170214_1 (sequence is synthesized)
ccccctcctccccgccgctcccccgcgagcccggccaggcgcgcctgacgtggaccattaaacttggagctgccgcctcgtcccctctcctcctcctcctccctctgacaggcgagcgag

SEQ ID NO: 566447 - DNA, 120 bp, Artificial Sequence
  ENSG00000170214_2 (sequence is synthesized)
cgactcggtgcaggcaggagacgtgctgccgggctgggctgcccgggggagatgactcctcgccaggagggcgcctctgggaagaagaccacgggggaagcaaagtttcagggcagctga

SEQ ID NO: 566448 - DNA, 120 bp, Artificial Sequence
  ENSG00000170214_3 (sequence is synthesized)
ggagccttcgccgcagcccttccgagcccaatcatccccctggctatggagggcggactctaagatgaatcccgacctggacaccggccacaacacatcagcacctgcccactggggaga

SEQ ID NO: 566449 - DNA, 120 bp, Artificial Sequence
  ENSG00000170214_4 (sequence is synthesized)
gttgaaaaatgccaacttcactggccccaaccagacctcgagcaactccacactgccccagctggacatcaccagggccatctctgtgggcctggtgctgggcgccttcatcctctttgc

SEQ ID NO: 566450 - DNA, 120 bp, Artificial Sequence
  ENSG00000170214_5 (sequence is synthesized)
catcgtgggcaacatcctagtcatcttgtctgtggcctgcaaccggcacctgcggacgcccaccaactacttcattgtcaacctggccatggccgacctgctgttgagcttcaccgtcct

SEQ ID NO: 566451 - DNA, 120 bp, Artificial Sequence
  ENSG00000170214_6 (sequence is synthesized)
gcccttctcagcggccctagaggtgctcggctactgggtgctggggcggatcttctgtgacatctgggcagccgtggatgtcctgtgctgcacagcgtccattctgagcctgtgcgccat

SEQ ID NO: 566452 - DNA, 120 bp, Artificial Sequence
  ENSG00000170214_7 (sequence is synthesized)
ctccatcgatcgctacatcggggtgcgctactctctgcagtatcccacgctggtcacccggaggaaggccatcttggcgctgctcagtgtctgggtcttgtccaccgtcatctccatcgg

SEQ ID NO: 566453 - DNA, 120 bp, Artificial Sequence
  ENSG00000170214_8 (sequence is synthesized)
gcctctccttgggtggaaggagccggcacccaacgatgacaaggagtgcggggtcaccgaagaacccttctatgccctcttctcctctctgggctccttctacatccctctggcggtcat

SEQ ID NO: 566454 - DNA, 120 bp, Artificial Sequence
  ENSG00000170214_9 (sequence is synthesized)
tctagtcatgtactgccgtgtctatatagtggccaagagaaccaccaagaacctagaggcaggagtcatgaaggagatgtccaactccaaggagctgaccctgaggatccattccaagaa

SEQ ID NO: 566455 - DNA, 120 bp, Artificial Sequence
  ENSG00000170214_10 (sequence is synthesized)
cgttgggcattgtggtcggtatgttcatcttgtgctggctacccttcttcatcgctctaccgcttggctccttgttctccaccctgaagccccccgacgccgtgttcaaggtggtgttct

SEQ ID NO: 566456 - DNA, 120 bp, Artificial Sequence
  ENSG00000170214_11 (sequence is synthesized)
ggctgggctacttcaacagctgcctcaaccccatcatctacccatgctccagcaaggagttcaagcgcgctttcgtgcgcatcctcgggtgccagtgccgcggccgcggccgccgccgac

SEQ ID NO: 566457 - DNA, 120 bp, Artificial Sequence
  ENSG00000170214_12 (sequence is synthesized)
gccgccgccgccgtcgcctgggcggctgcgcctacacctaccggccgtggacgcgcggcggctcgctggagcgctcgcagtcgcgcaaggactcgctggacgacagcggcagctgcctga

SEQ ID NO: 566458 - DNA, 120 bp, Artificial Sequence
  ENSG00000170214_13 (sequence is synthesized)
cgacagcggcagctgcctgagcggcagccagcggaccctgccctcggcctcgccgagcccgggctacctgggccgcggcgcgccaccgccagtcgagctgtgcgccttccccgagtggaa

SEQ ID NO: 566459 - DNA, 120 bp, Artificial Sequence
  ENSG00000170214_14 (sequence is synthesized)
gcctgcccgcgcctgagccccccggccgccgcggccgccacgactcgggcccgctcttcaccttcaagctcctgaccgagcccgagagccccgggaccgacggcggcgccagcaacggag

SEQ ID NO: 566460 - DNA, 120 bp, Artificial Sequence
  ENSG00000170214_15 (sequence is synthesized)
gctgcgaggccgcggccgacgtggccaacgggcagccgggcttcaaaagcaacatgcccctggcgcccgggcagttttagggcccccgtgcgcagctttctttccctggggaggaaaaca

SEQ ID NO: 566461 - DNA, 120 bp, Artificial Sequence
  ENSG00000170214_16 (sequence is synthesized)
cggggcggaggggggaggggagcgtccacgccgggtagacgcgcgccccaaggggaaccggggggagggccggggagaggggcagctgcttttctggcaggggcatgggtgccaggtacc

SEQ ID NO: 566462 - DNA, 120 bp, Artificial Sequence
  ENSG00000170214_17 (sequence is synthesized)
gggcatgggtgccaggtaccacgcggaaagccgggccgagcatgctgagagcctgggggacccgacgccgccgggatttacctctctctctccctctgtgtatatataaacgagtccctc

SEQ ID NO: 566463 - DNA, 120 bp, Artificial Sequence
  ENSG00000170214_18 (sequence is synthesized)
tctacttgtatttaaccgtgggtgcacgtgagtgtgactgtgcggtgtgcgtgtgttccgcttgtgtgtgtgcgtggggccgccctgtgagggcgcggcgactgtgcgcccaggaggcaa

SEQ ID NO: 566464 - DNA, 120 bp, Artificial Sequence
  ENSG00000170214_19 (sequence is synthesized)
ccgggggcgttgtgtgtgtcgtgacttcgtacctctcaagcccctccttgtacttcactgaaggatggcactttggtggggttggaaacaaagtcgacattaaaggtcatttctcctgtt

SEQ ID NO: 566465 - DNA, 120 bp, Artificial Sequence
  ENSG00000170214_20 (sequence is synthesized)
ctggacattcctggacattgctgggagccagacactgagttgatcatagtgtgctgtcaacagtgaaagaaaatctgagggatcctcacagaaacggggcgcactttggaatgaaggagc

SEQ ID NO: 566466 - DNA, 120 bp, Artificial Sequence
  ENSG00000170214_21 (sequence is synthesized)
gatcatagtgtgctgtcaacagtgaaagaaaatctgagggatcctcacagaaacggggcgcactttggaatgaaggagcacttttggagaaaagcatgcagcccagagaagtcaagactt

SEQ ID NO: 566467 - DNA, 120 bp, Artificial Sequence
  ENSG00000170214_22 (sequence is synthesized)
gcccaaggttgcacagctagctactaataaaatctggactagaattccaggcttagagatcagcacacttgcctaaaaagagctattggaaacatttttttttgcaaacatacacttcaa

SEQ ID NO: 566468 - DNA, 120 bp, Artificial Sequence
  ENSG00000170214_23 (sequence is synthesized)
agtatggggtgctgtatttggcaccttagagcttgggaggacagagtgtgggggttgataacagagaagacgtcatggaagaactaatgcctgaacaaatttttgaatagtgcatacgag

SEQ ID NO: 566469 - DNA, 120 bp, Artificial Sequence
  ENSG00000170214_24 (sequence is synthesized)
ttccccagatgaaaaggggaagtaatggagcctatttggaataggctccttcaaacatgaaacctatttggaattgacaactatgttataaatgtaaagtattttattcttaccaaatta

SEQ ID NO: 566470 - DNA, 120 bp, Artificial Sequence
  ENSG00000170222_0 (sequence is synthesized)
gtccgtcccgctcgttggtggcgctgttacatagcccgtagtcagaggcctttcagcccaggggccggcgcacgaaacctgtttggaggttatggatgataaacccaatcctgaagccct

SEQ ID NO: 566471 - DNA, 120 bp, Artificial Sequence
  ENSG00000170222_1 (sequence is synthesized)
aagtgacagttcagagcgtcttttctcctttggcgtcatcgcagatgttcaatttgcagacttagaagatggctttaatttccaaggaaccaggcggcgatactacagacatagtcttct

SEQ ID NO: 566472 - DNA, 120 bp, Artificial Sequence
  ENSG00000170222_2 (sequence is synthesized)
tcacttacagggtgccattgaagactggaataatgaaagcagcatgccctgttgtgtccttcagcttggagatatcatcgatggatataatgcacagtataatgcatccaaaaagtccct

SEQ ID NO: 566473 - DNA, 120 bp, Artificial Sequence
  ENSG00000170222_3 (sequence is synthesized)
agaacttgttatggacatgttcaagaggcttaaagttccagttcatcatacatggggaaaccatgaattctataacttcagtagagagtatttaacacactctaaacttaacactaagtt

SEQ ID NO: 566474 - DNA, 120 bp, Artificial Sequence
  ENSG00000170222_4 (sequence is synthesized)
tctagaagatcagattgtacatcatcctgagaccatgccttcagaagattattatgcttatcattttgtaccattccctaaattccggttcattttacttgatgcatatgacttgagtgt

SEQ ID NO: 566475 - DNA, 120 bp, Artificial Sequence
  ENSG00000170222_5 (sequence is synthesized)
cttgggcgtggatcagtcttctccaaaatacgagcagtgtatgaagatattgagggagcacaatccaaatacggaactgaatagtcctcaaggactttctgagccccagtttgtccagtt

SEQ ID NO: 566476 - DNA, 120 bp, Artificial Sequence
  ENSG00000170222_6 (sequence is synthesized)
cttcccatttacccggacgcctctgacaatgtgtgcctggcctggaactacagagatgccctggcagtcatttggtctcatgagtgtgtggtgtgtttctttgctggtcacacccatgat

SEQ ID NO: 566477 - DNA, 120 bp, Artificial Sequence
  ENSG00000170222_7 (sequence is synthesized)
ggtggctactctgaggatccttttggtgtataccacgtcaacctagaaggagttattgaaacagctccagacagccaagcctttggcacagttcatgtctatcctgacaaaatgatgttg

SEQ ID NO: 566478 - DNA, 120 bp, Artificial Sequence
  ENSG00000170222_8 (sequence is synthesized)
aaagggagaggcagagttccagatagaattatgaattacaagaaagaaagagccttccattgttagtctaatttattttaacttgatagaaaatgagctttgtgtttgtccctcctaaac

SEQ ID NO: 566479 - DNA, 120 bp, Artificial Sequence
  ENSG00000170222_9 (sequence is synthesized)
aaaaaaataaaaatcctctgtctcattgtttagtattcagcttgcataacaaaatgtatttatagtttcagtgtgtgatggttgataaaatactcagaaatgttattttggatcatgtat

SEQ ID NO: 566480 - DNA, 120 bp, Artificial Sequence
  ENSG00000170222_10 (sequence is synthesized)
ccattgtaagttagaaacaaaccagggaggaaactgaggcaggggtgtatagtcctcataaggggcatatagtcctcatgagggatcttatttggccctacctgattttttttaactttt

SEQ ID NO: 566481 - DNA, 120 bp, Artificial Sequence
  ENSG00000170222_11 (sequence is synthesized)
tacaaggagattgtattcacatgtgttaactatgtaacttcaagttcagcatataagctcaggtaagctttttctattcaccctgctgtgtaaatgagctttggacaatttctgctcaga

SEQ ID NO: 566482 - DNA, 120 bp, Artificial Sequence
  ENSG00000170222_12 (sequence is synthesized)
taaattcttcagctaccttttattcagcaggaagatggacaattaaggtaaaagtatattgtcacttgttcagggtcaggatttctcacaagccttctcacatggattggttacagttga

SEQ ID NO: 566483 - DNA, 120 bp, Artificial Sequence
  ENSG00000170222_13 (sequence is synthesized)
ttcaagattgatttaacagatattttaaatgcctattttaggccaggcactttttctaggggtagatattccgagctgtaaacaatactaacaatattacttttttgatggatggaatgg

SEQ ID NO: 566484 - DNA, 120 bp, Artificial Sequence
  ENSG00000170222_14 (sequence is synthesized)
agggaacaaacacagtacgtgggcaagacagatgataaatgaaacagaaacaagattatttccacggtcgtaagtgctgccaaggaaatagagtatgatgttatagagtgttacggaaaa

SEQ ID NO: 566485 - DNA, 120 bp, Artificial Sequence
  ENSG00000170231_0 (sequence is synthesized)
gaagaagtggggtgacttaggggctgagcctcagcaactgggagagtttataagctgggatagcagacccctcagcaccacccattctcctcatccctctgctctctggcctccagcctc

SEQ ID NO: 566486 - DNA, 120 bp, Artificial Sequence
  ENSG00000170231_1 (sequence is synthesized)
ccagcagcatggctttcaccggcaagttcgagatggagagtgagaagaattatgatgagttcatgaagctccttgggatctccagcgatgtaatcgaaaaggcccgcaacttcaagatcg

SEQ ID NO: 566487 - DNA, 120 bp, Artificial Sequence
  ENSG00000170231_2 (sequence is synthesized)
gaaagcaacatacagacaatggggggcaagacgttcaaggccactgtgcagatggagggcgggaagctggtggtgaatttccccaactatcaccagacctcagagatcgtgggtgacaag

SEQ ID NO: 566488 - DNA, 120 bp, Artificial Sequence
  ENSG00000170231_3 (sequence is synthesized)
ctggtggaggtctccaccatcggaggcgtgacctatgagcgcgtgagcaagagactggcctaagcagccaggcccggcccagggagctacaaacccaccaataaaactgatataaggaca

SEQ ID NO: 566489 - DNA, 120 bp, Artificial Sequence
  ENSG00000170231_4 (sequence is synthesized)
ctgactcaggttctgagagctgtgttgtctgcgtgcacatgggtgagccggaaaggagacctgcagagaatgaaacagacacataaaggaaagaggacattctcacaagatgggtaggcc

SEQ ID NO: 566490 - DNA, 120 bp, Artificial Sequence
  ENSG00000170231_5 (sequence is synthesized)
ggagtgatcacggaggagatagagtccctgcatgtgaagtggtactgagagacacagcaggaaatggaagtcaagattctgaacccctaaccccttccagctctgaagcttgaacaaaat

SEQ ID NO: 566491 - DNA, 120 bp, Artificial Sequence
  ENSG00000170231_6 (sequence is synthesized)
gcgacaacaaaacagattactttgaagggactagaaggaggacacagggtcctggaggaaggcagctggcaagttacagagcagaaagactttgcacctctggctccagggagctcacag

SEQ ID NO: 566492 - DNA, 120 bp, Artificial Sequence
  ENSG00000170231_7 (sequence is synthesized)
gcaggggctggtccagcccagaggcgatgaagacagtgacgatgatgatggtggtggagatgcaggcgctgactcaggttctgagagctgtgttgtctgcgtgcacatgggtgagccgga

SEQ ID NO: 566493 - DNA, 120 bp, Artificial Sequence
  ENSG00000170231_8 (sequence is synthesized)
tttcccaaaccacagggttaaaagcagctcttatatggctactctgcttgtccccgggtccagggatctccagcgatgtaatcgaaaaggcccgcaacttcaagatcgtcacggaggtgc

SEQ ID NO: 566494 - DNA, 120 bp, Artificial Sequence
  ENSG00000170234_0 (sequence is synthesized)
aagcagcgctgtcgccgccgccgctgcagccggagttggaggagggagaagctaggaagaaaatggcggccgtggctgcagaggcggcagcgactgcagcgtcccccggggaggggggcg

SEQ ID NO: 566495 - DNA, 120 bp, Artificial Sequence
  ENSG00000170234_1 (sequence is synthesized)
ccggcgaggccgagccggagatggagcccatccccggcagtgaggccggcactgaccccctcccggtcacggccactgaagcgtctgtgccggatggcgagactgacgggcagcaatccg

SEQ ID NO: 566496 - DNA, 120 bp, Artificial Sequence
  ENSG00000170234_2 (sequence is synthesized)
ctcctcaggccgacgagccgccgctcccgccgccaccgccgccgccgggggagctcgcccgcagcccagaggcggtggggccggagctggaggctgaggagaaactgtccgttcgggtgg

SEQ ID NO: 566497 - DNA, 120 bp, Artificial Sequence
  ENSG00000170234_3 (sequence is synthesized)
cggagtcggcggcagccgcgcctcagggagggccggaacttccaccttctcctgcatcgccgccggagcagcccccggctcccgaggagcgcgaggagccgccgctgcctcagcccgtag

SEQ ID NO: 566498 - DNA, 120 bp, Artificial Sequence
  ENSG00000170234_4 (sequence is synthesized)
ccccggcgctcgtgccgccggcgggcggggactccacggtgtcgcaactgatcccgggctcggaggtgcgggtcacgctggaccacatcattgaggacgcgcttgtcgtgtcgttccgct

SEQ ID NO: 566499 - DNA, 120 bp, Artificial Sequence
  ENSG00000170234_5 (sequence is synthesized)
tcggggagaagctcttctccggggtcctcatggatctgtccaaaaggtttgggccccatggtatccctgtgacagtatttcccaaaagggaatataaggataaaccagaagccatgccgc

SEQ ID NO: 566500 - DNA, 120 bp, Artificial Sequence
  ENSG00000170234_6 (sequence is synthesized)
tccaaagtaatacattccaagaagggacagaagtcaagtgtgaagcaaatggtgctgttcccgatgacccttctcctgtcccgcatcccgagctgagcttggctgaaagcctgtggactt

SEQ ID NO: 566501 - DNA, 120 bp, Artificial Sequence
  ENSG00000170234_7 (sequence is synthesized)
ccaaaccaccacctctcttccatgaaggagcaccttatcctccccctttgtttatcagggacacatataaccaatcaatacctcagccacctcctcggaaaattaagcgacccaaacgaa

SEQ ID NO: 566502 - DNA, 120 bp, Artificial Sequence
  ENSG00000170234_8 (sequence is synthesized)
aaatgtacagggaagaacccacttcaataatgaatgctattaaactacgacccaggcaagttctgtgtgataaatgtaaaaacagtgttgttgctgaaaaaaaggaaattagaaaaggta

SEQ ID NO: 566503 - DNA, 120 bp, Artificial Sequence
  ENSG00000170234_9 (sequence is synthesized)
gtagtgcaactgactcttctaaatatgaagataaaaaacggagaaatgaaagtgtaactactgtgaacaaaaaactgaaaactgaccataaagtggatgggaaaaaccaaaatgaaagcc

SEQ ID NO: 566504 - DNA, 120 bp, Artificial Sequence
  ENSG00000170234_10 (sequence is synthesized)
agaaaagaaatgctgtggttaaggtttcaaatattgctcacagcagaggcagagtagtaaaagtttctgctcaggcaaatacatcaaaagctcagttaagtactaaaaaagttctccaga

SEQ ID NO: 566505 - DNA, 120 bp, Artificial Sequence
  ENSG00000170234_11 (sequence is synthesized)
gtaagaacatggatcatgcgaaagctcgggaagtgttaaaaattgccaaagaaaaggcacaaaagaagcaaaatgaaacctctacttccaaaaatgcacattcaaaagtccatttcacac

SEQ ID NO: 566506 - DNA, 120 bp, Artificial Sequence
  ENSG00000170234_12 (sequence is synthesized)
gtcgatatcagaatcctagctcaggttcccttccaccccgggttcgtttaaaaccacagaggtacaggaatgaagaaaatgactcttctctgaagacaggacttgagaaaatgcggagtg

SEQ ID NO: 566507 - DNA, 120 bp, Artificial Sequence
  ENSG00000170234_13 (sequence is synthesized)
gcaagatggcacccaagccccagtctcgctgcacctctacccgctcagcaggtgaggccccttcagaaaatcagagtccctcaaaaggccctgaagaggccagcagtgaggttcaggaca

SEQ ID NO: 566508 - DNA, 120 bp, Artificial Sequence
  ENSG00000170234_14 (sequence is synthesized)
tgtgcctggtgatcaggatgaaccacagacattgggcaaaaagggcagcaaaaacaatatctctgtttatatgaccctaaatcaaaagaaatctgactcttccagtgcttcagtgtgtag

SEQ ID NO: 566509 - DNA, 120 bp, Artificial Sequence
  ENSG00000170234_15 (sequence is synthesized)
cattgatagcacagatgatttgaaatcttccaactctgagtgtagttcttctgaaagctttgattttcctccaggcagtatgcatgcaccttccacctcctccacttcctcctcttcaaa

SEQ ID NO: 566510 - DNA, 120 bp, Artificial Sequence
  ENSG00000170234_16 (sequence is synthesized)
ggaagagaaaaagctcagtaattccttgaaaatgaaagtcttttccaaaaacgtctctaaatgcgtcacaccagatggcaggaccatatgtgtaggggacattgtttgggccaagatata

SEQ ID NO: 566511 - DNA, 120 bp, Artificial Sequence
  ENSG00000170234_17 (sequence is synthesized)
tggcttcccttggtggccagcccgtattcttactataactgtgagccggaaagataacggccttttagtccgacaggaggcccgtatttcatggtttgggtctccaacaacatctttcct

SEQ ID NO: 566512 - DNA, 120 bp, Artificial Sequence
  ENSG00000170234_18 (sequence is synthesized)
tgctctttcacaactctccccctttttagaaaacttccagtcacgctttaataagaagagaaagggcctgtatcgcaaggctatcacagaggcagctaaggctgccaagcagctgacccc

SEQ ID NO: 566513 - DNA, 120 bp, Artificial Sequence
  ENSG00000170234_19 (sequence is synthesized)
cgaagtgcgggctttgttgacacagtttgaaacgtgaacatgggcagtaaggtaggcaagaccattggaagtcaccacagattttctagtctagttaggaataatttctacaaaatagcg

SEQ ID NO: 566514 - DNA, 120 bp, Artificial Sequence
  ENSG00000170234_20 (sequence is synthesized)
tggccagattggagagagaagttgcactcagttggctggctttttaatacttaccttatagccatttttagactgagagcttaaactgaacatataatcaaattttgtgttaaggaagtg

SEQ ID NO: 566515 - DNA, 120 bp, Artificial Sequence
  ENSG00000170234_21 (sequence is synthesized)
agattttagcagtatttttcagttttgaagttcgaaaccatcccaaggcataggagccatagcctcaactgaaattgaatttttgtagggactgttaattgccatttgtacctaatactg

SEQ ID NO: 566516 - DNA, 120 bp, Artificial Sequence
  ENSG00000170234_22 (sequence is synthesized)
tatacatatatatacgtgtgtgtgtgtgtatatatatatatccgtgtatgtatatatacacacatatatatgtatatatacacatatatatatatgaaatacagcctgtcactgtgtgac

SEQ ID NO: 566517 - DNA, 120 bp, Artificial Sequence
  ENSG00000170234_23 (sequence is synthesized)
tgacacagattgcatatttgggattgcaataagggcttggtgagctgggggaatagtggatatttaatgactacttgttttttaaataatgaacacttagcctttctatgcgcataatgg

SEQ ID NO: 566518 - DNA, 120 bp, Artificial Sequence
  ENSG00000170234_24 (sequence is synthesized)
tgtaaaagttagatggttaggtgtttgacaaacagatggttgcaattcagttacagactggggaaatagcccagtgtttgggattaaaactgtcaagactggataggtgttagtcatcac

SEQ ID NO: 566519 - DNA, 120 bp, Artificial Sequence
  ENSG00000170234_25 (sequence is synthesized)
tgtctttcgtccagtggggatttaataaatactttcaagcttctggtttgggagtttagataggtttgattttggatttgtaaatagtgattgctaaatttggtcagatttctcctgact

SEQ ID NO: 566520 - DNA, 120 bp, Artificial Sequence
  ENSG00000170234_26 (sequence is synthesized)
ggctgttcctaaattcttaggatatgtcccagtaaaattatactttgtgaattaattgtcatatgtgtaattgttgcattttggatgtacctaatttgataattaaaacaaaataatttc

SEQ ID NO: 566521 - DNA, 120 bp, Artificial Sequence
  ENSG00000170234_27 (sequence is synthesized)
acctaatttgataattaaaacaaaataatttccgtttaaggtatctgtttgcaggtcagaaaatgagaaaatgtaattgtgtaatgctctgaaatgtaaaaaaaaaaaaaaaaaccaaaa

SEQ ID NO: 566522 - DNA, 120 bp, Artificial Sequence
  ENSG00000170234_28 (sequence is synthesized)
gcagcacaaagacattagcaggctgctggtttcatggacctgtaccacaatgacacagagaacaccagagcatcaggactgaatgaaattggagtttttaaagctgcactaagaagtaaa

SEQ ID NO: 566523 - DNA, 120 bp, Artificial Sequence
  ENSG00000170234_29 (sequence is synthesized)
tgttaaggcagtggttaaaaacaacagtctataaaggggcacttgcaaattgtgctgtcttaaaccgaagaaaaggtattagggaatattttataaaaaataaacttgcaataaattatg

SEQ ID NO: 566524 - DNA, 120 bp, Artificial Sequence
  ENSG00000170234_30 (sequence is synthesized)
gctgcacctctacccgctcagcaggtctcaacaaatggcagctattacatcagacagtgacgagtcctgctgctcccttacagtgtctgacagaccactgtggattcagactgggagcat

SEQ ID NO: 566525 - DNA, 120 bp, Artificial Sequence
  ENSG00000170234_31 (sequence is synthesized)
gagaaaaatgatgtgaattacacacgtaagaactcacttgaattttatatatgaagaaacactgacagtaacttctttggaatgtgaagttcttatcagtacagtttggacaggcctaaa

SEQ ID NO: 566526 - DNA, 120 bp, Artificial Sequence
  ENSG00000170234_32 (sequence is synthesized)
aggcatgggatgatgcagaaatgctgaattatttttcatacttaaactttgtgctttctccaaggtttaggttaatcagttcagatatgagcaaaggtatttctaaaatggctcttctat

SEQ ID NO: 566527 - DNA, 120 bp, Artificial Sequence
  ENSG00000170234_33 (sequence is synthesized)
gaaaagcaatagtcacatatgccaaggccaatgtttccttcaaggtgccagtagaaacaacagaaaataacatcctgctgaaaggatggcaaagtgccccgccccaccccacaaacacaa

SEQ ID NO: 566528 - DNA, 120 bp, Artificial Sequence
  ENSG00000170234_34 (sequence is synthesized)
tttggatcttttccttctttaataaagcagggctgtattatcttgaatatatgtttgcttgttagaacatattaagatatatttatttgccactagtatttaacattttgtgcacatttt

SEQ ID NO: 566529 - DNA, 120 bp, Artificial Sequence
  ENSG00000170234_35 (sequence is synthesized)
cataattacattcttacctttcaaattttgactcaaagtggataggctagtgttgatattggagtgcaaatgtatatactccaagagctagttcttaattctgctgagttggaaagcctt

SEQ ID NO: 566530 - DNA, 120 bp, Artificial Sequence
  ENSG00000170234_36 (sequence is synthesized)
ttattattgtctgtatccttactggttttatctagttcaaaaaaggtgacaacgtctaaattttgatgtggacctctctccatagagagccgctcctaagtgcaagaaattccaacaggt

SEQ ID NO: 566531 - DNA, 120 bp, Artificial Sequence
  ENSG00000170234_37 (sequence is synthesized)
gtcagtaggacttggccctgggggacaacaagtggcaggaacaggatcctttaaaacagtgtcaaacttctcatgcatggagcatgaattcttactaatagagactgtagtttttttctt

SEQ ID NO: 566532 - DNA, 120 bp, Artificial Sequence
  ENSG00000170234_38 (sequence is synthesized)
gtctttggtaaatatataaaagaccttaatttttcttttttaatgaatggagaaaacatgagaaaaccagatggacctgttagtactacatttttaaggcattttatatttgatggtgcc

SEQ ID NO: 566533 - DNA, 120 bp, Artificial Sequence
  ENSG00000170234_39 (sequence is synthesized)
gtacttttaataataataaaactgaagttttttagtggcaatactgatttattttttaaaccagaaagataatccatattgattacttactacaaaaaagggaaaatatgccaaaaaata

SEQ ID NO: 566534 - DNA, 120 bp, Artificial Sequence
  ENSG00000170234_40 (sequence is synthesized)
aaaaaccttaaaattcatatgaagcaacgtaacagataactgagcacttggctcaagtggtcagacttttcataatgttactgtgtaagtttggaattacctaataaccccaggctcagg

SEQ ID NO: 566535 - DNA, 120 bp, Artificial Sequence
  ENSG00000170234_41 (sequence is synthesized)
attaacagaaggttctgggtgagttttaaaacatttaatatacctatgatttgttttacaacttgaagaaaaggcaggcagtcttgtgtctaatgagcttaatgcaaattctaattatac

SEQ ID NO: 566536 - DNA, 120 bp, Artificial Sequence
  ENSG00000170234_42 (sequence is synthesized)
tgcaaataatttaaagttttgattgcattctacaattgtctgtttggaaaattacatattatgaagtcattatatattttatcaaatcagaaaaagtcagctcaggaactgtagcagcag

SEQ ID NO: 566537 - DNA, 120 bp, Artificial Sequence
  ENSG00000170234_43 (sequence is synthesized)
ggagttctaaagatgacatgaactatactataggggtgccctactctatatggcctagggctttggtttgggtcagtcttgttctttcagatacataacaccagcagtactttcgggctc

SEQ ID NO: 566538 - DNA, 120 bp, Artificial Sequence
  ENSG00000170234_44 (sequence is synthesized)
acttcaagaaccagataactctcccaaaccatgatacatgaagtgtataatcaagatttttaattaagctttagaattctttatttgtgtagagtgatggaaatgaccaagaagtaataa

SEQ ID NO: 566539 - DNA, 120 bp, Artificial Sequence
  ENSG00000170234_45 (sequence is synthesized)
tataaagcaaaagaattgggagagatcaggttttaagtatataaatattttttttttctcatggcatattctcaaaggtgttttgttacaaaccagattttcattttttaaaaaatgaga

SEQ ID NO: 566540 - DNA, 120 bp, Artificial Sequence
  ENSG00000170234_46 (sequence is synthesized)
cttggtggtatttaaaacctacacctaccatgttgctatttcactttcattgctttagttgcttaatatttaagctttgcttcatgctaccttttgtctgtatttcaatcttcataagcc

SEQ ID NO: 566541 - DNA, 120 bp, Artificial Sequence
  ENSG00000170234_47 (sequence is synthesized)
tattttgttttgtagacttgaatgataaaaattgtttctcatcttaagtatgctcagagttttaaatgttaaagaatgttgtgtaacctttatccaataaagtctttgattttttaaaaa

SEQ ID NO: 566542 - DNA, 120 bp, Artificial Sequence
  ENSG00000170234_48 (sequence is synthesized)
catccattcaactctcatttacagatgtggaaccaaagaccaaacaattatctgtgagaggccagagatggaaccttgctatgttgctcaggctggtctggatctctggcctcaagcaat

SEQ ID NO: 566543 - DNA, 120 bp, Artificial Sequence
  ENSG00000170234_49 (sequence is synthesized)
actcctgcgttggcctcccaaagtactgtgattacagactatgaagggctgctgaaataaaagtttgggcacggtggctcacgcctgtaatccaaagccaaggtctacttccagtggagg

SEQ ID NO: 566544 - DNA, 120 bp, Artificial Sequence
  ENSG00000170234_50 (sequence is synthesized)
caggctccttcccacttcttagcagcttttctcactctgaggcctcccatcttagagtaaagcccaggggacagagtggctgcactctaaaatccatcagcacattcatgcagaggccac

SEQ ID NO: 566545 - DNA, 120 bp, Artificial Sequence
  ENSG00000170234_51 (sequence is synthesized)
ccttcccacctgctgcttccagccaatgcctgagcatgggagggactcgtctgaggggcagcactggctccccaatggctttgctgaaactttctcagcaccacactccagtggaaaact

SEQ ID NO: 566546 - DNA, 120 bp, Artificial Sequence
  ENSG00000170234_52 (sequence is synthesized)
tccccgctcccccggcctttcctcctccacaggggtctgccaactctgccaacagcctccagctcccagccccattttcccttgcaggtgtttcccccagtaaatctcttgtacttttaa

SEQ ID NO: 566547 - DNA, 120 bp, Artificial Sequence
  ENSG00000170234_53 (sequence is synthesized)
tccggggtcctcatggatctgtccaaaagagaccatgaaacgtatggtgcaatagccctacttttggtgggaaaaatatacagccattctggtgaagcagtttgggccccatggtatccc

SEQ ID NO: 566548 - DNA, 120 bp, Artificial Sequence
  ENSG00000170236_0 (sequence is synthesized)
agttcgcagctactggaagagagaggagcatatcaattgtttaaaacaaaaagccagcgttaacaggctcagagaaatgaagttgaaaggaatagatgtagctcctgaatagaagcaaaa

SEQ ID NO: 566549 - DNA, 120 bp, Artificial Sequence
  ENSG00000170236_1 (sequence is synthesized)
gtccaacgtggttccattaaaatgacttctcagccgtctctccctgcagatgacttcgatatctaccacgtccttgcagagtgcacagattactatgatacccttccagttaaggaggct

SEQ ID NO: 566550 - DNA, 120 bp, Artificial Sequence
  ENSG00000170236_2 (sequence is synthesized)
gatgggaaccagccccattttcagggtgtcactggcttgtggaacttgggcaacacatgctgcgtgaatgccatctcacagtgtctctgcagcatcttgccgctggtggaatactttctc

SEQ ID NO: 566551 - DNA, 120 bp, Artificial Sequence
  ENSG00000170236_3 (sequence is synthesized)
accgggaagtatatcaccgctctgcaaaacgattgcagtgaagttgccactgcttttgcctatctgatgacagacatgtggctgggagactcagactgtgtctcaccagaaatattctgg

SEQ ID NO: 566552 - DNA, 120 bp, Artificial Sequence
  ENSG00000170236_4 (sequence is synthesized)
tcagctcttggcaacctctacccagcatttacgaaaaagatgcaacaagatgctcaggaattcttgatttgtgtcctaaatgaacttcatgaagctctaaaaaagtaccactactcccgg

SEQ ID NO: 566553 - DNA, 120 bp, Artificial Sequence
  ENSG00000170236_5 (sequence is synthesized)
tgctgcaggaagtggattaccactgagacatccatcatcacccagctgtttgaagagcagctcaattatagcatcgtatgtttaaagtgtgagaaatgcacctacaagaacgaagtcttc

SEQ ID NO: 566554 - DNA, 120 bp, Artificial Sequence
  ENSG00000170236_6 (sequence is synthesized)
actgtcttctcactccccattccatccaaatatgaatgctcccttcgggactgtctccaatgtttttttcaacaagacgcactgacctggaacaacgaaattcactgctccttttgtgaa

SEQ ID NO: 566555 - DNA, 120 bp, Artificial Sequence
  ENSG00000170236_7 (sequence is synthesized)
accaagcaagaaactgctgtgagggccagtatttccaaagcaccaaaaataattattttccacctaaaaaggtttgacattcagggtacaacaaaaaggaagctgagaacggatattcat

SEQ ID NO: 566556 - DNA, 120 bp, Artificial Sequence
  ENSG00000170236_8 (sequence is synthesized)
tacccactcactaacttggacctcactccttatatttgctcaattttccggaaatatcctaaatacaacctctgtgcagtggtgaaccattttggtgatttggatggtggccactacact

SEQ ID NO: 566557 - DNA, 120 bp, Artificial Sequence
  ENSG00000170236_9 (sequence is synthesized)
gctttctgcaagaattcagtcacccaggcctgatatagctttgataacacacgagtcagtgagattccagatacttctgttcaaaatgctatggatctcctgttctatagctgccagccc

SEQ ID NO: 566558 - DNA, 120 bp, Artificial Sequence
  ENSG00000170236_10 (sequence is synthesized)
ttttccataccaatacaaaagcgttaagagccaggaaaatggtgtttcctgaacactgcaaaacaagcagtcagcatctggtggtagagttttgcttggtcattaaactcttagaactta

SEQ ID NO: 566559 - DNA, 120 bp, Artificial Sequence
  ENSG00000170236_11 (sequence is synthesized)
aagcaatatagcagtcaggctatatgcatgatttaacaacaaaattatcacttccttttaatttagaataagggacaatttaaaaagcatctcttggccctatcatttctgttccagtag

SEQ ID NO: 566560 - DNA, 120 bp, Artificial Sequence
  ENSG00000170236_12 (sequence is synthesized)
ctaaaaagaagcatgaggagatttgtctctaatatttaccgtgcgagtgtggttgggctcctggaaggaaaattcacaaagtgtggtccccctgtgactggattctttggagtttttaac

SEQ ID NO: 566561 - DNA, 88 bp, Artificial Sequence
  ENSG00000170236_13 (sequence is synthesized)
ccttatatttgctcaattttccggaaatatcctaaatacaacctctgtgcagtggtgtttcgctcttccctcatcctcccaaagtgct

SEQ ID NO: 566562 - DNA, 120 bp, Artificial Sequence
  ENSG00000170242_0 (sequence is synthesized)
gaaggcggctgtggtagcggcggcggcggcggcggagccctgggtcggtgtctgcgcgctggtgtctgaggcccaggctgaggcctccgctattgctggagcgcaggcggcggagaggat

SEQ ID NO: 566563 - DNA, 120 bp, Artificial Sequence
  ENSG00000170242_1 (sequence is synthesized)
gactgccgctgccattctctcttgagctagcgagccgccgccaccctccaccctcccccggcagggcggagaggagcggccggagtcagcgatggtgcccggcgaggagaaccaactggt

SEQ ID NO: 566564 - DNA, 120 bp, Artificial Sequence
  ENSG00000170242_2 (sequence is synthesized)
cccgaaagagatagaaaatgctgctgaagaacctagagtcttatgtattatacaagatactactaattcaaagacagtgaatgaacggatcactttaaatttaccagcatctactccagt

SEQ ID NO: 566565 - DNA, 120 bp, Artificial Sequence
  ENSG00000170242_3 (sequence is synthesized)
cagaaagctctttgaagatgtggccaacaaagtaggctacataaatggaacctttgacttggtgtggggaaatggaatcaatactgctgatatggcaccactggatcataccagtgacaa

SEQ ID NO: 566566 - DNA, 120 bp, Artificial Sequence
  ENSG00000170242_4 (sequence is synthesized)
gtcacttctcgacgctaattttgagccaggaaagaagaactttctgcatttgacagataaagatggtgaacaacctcaaatactgctggaggattccagtgctggggaagacagtgttca

SEQ ID NO: 566567 - DNA, 120 bp, Artificial Sequence
  ENSG00000170242_5 (sequence is synthesized)
tgacaggtttataggtccgcttccaagagaaggttctgggggttctaccagtgattatgtcagccaaagctactcctactcatctattttgaataaatcagaaactggatatgtgggact

SEQ ID NO: 566568 - DNA, 120 bp, Artificial Sequence
  ENSG00000170242_6 (sequence is synthesized)
agtaaaccaagcaatgacttgctatttgaatagccttttgcaaacactttttatgactcctgaatttaggaatgcattatataagtgggaatttgaagaatctgaagaagatccagtgac

SEQ ID NO: 566569 - DNA, 120 bp, Artificial Sequence
  ENSG00000170242_7 (sequence is synthesized)
aagtattccataccaacttcaaaggctttttgttttgttacaaaccagcaaaaagagagcaattgaaaccacagatgttacaaggagctttggatgggatagtagtgaggcttggcagca

SEQ ID NO: 566570 - DNA, 120 bp, Artificial Sequence
  ENSG00000170242_8 (sequence is synthesized)
gcatgatgtacaagaactatgcagagtcatgtttgatgctttggaacagaaatggaagcaaacagaacaggctgatcttataaatgagctatatcaaggcaagctgaaggactacgtgag

SEQ ID NO: 566571 - DNA, 120 bp, Artificial Sequence
  ENSG00000170242_9 (sequence is synthesized)
atgtctggaatgtggttatgagggctggcgaatcgacacatatcttgatattccattggtcatccgaccttatgggtccagccaagcatttgctagtgtggaagaagcattgcatgcatt

SEQ ID NO: 566572 - DNA, 120 bp, Artificial Sequence
  ENSG00000170242_10 (sequence is synthesized)
tattcagccagagattctggatggcccaaatcagtatttttgtgaacgttgtaagaagaagtgtgatgcacggaagggccttcggtttttgcattttccttatctgctgaccttacagct

SEQ ID NO: 566573 - DNA, 120 bp, Artificial Sequence
  ENSG00000170242_11 (sequence is synthesized)
gaaaagattcgattttgattatacaaccatgcataggattaaactgaatgatcgaatgacatttcccgaggaactagatatgagtacttttattgatgttgaagatgagaaatctcctca

SEQ ID NO: 566574 - DNA, 120 bp, Artificial Sequence
  ENSG00000170242_12 (sequence is synthesized)
gactgaaagttgcactgacagtggagcagaaaatgaaggtagttgtcacagtgatcagatgagcaacgatttctccaatgatgatggtgttgatgaaggaatctgtcttgaaaccaatag

SEQ ID NO: 566575 - DNA, 120 bp, Artificial Sequence
  ENSG00000170242_13 (sequence is synthesized)
tggaactgaaaagatctcaaaatctggacttgaaaagaattccttgatctatgaacttttctctgttatggttcattctgggagcgctgctggtggtcattattatgcatgtataaagtc

SEQ ID NO: 566576 - DNA, 120 bp, Artificial Sequence
  ENSG00000170242_14 (sequence is synthesized)
attcagtgatgagcagtggtacagcttcaatgatcaacatgtcagcaggataacacaagaggacattaagaaaacacatggtggatcttcaggaagcagaggatattattctagtgcttt

SEQ ID NO: 566577 - DNA, 120 bp, Artificial Sequence
  ENSG00000170242_15 (sequence is synthesized)
cgcaagttccacaaatgcatatatgctgatctatagactgaaggatccagccagaaatgcaaaatttctagaagtggatgaatacccagaacatattaaaaacttggtgcagaaagagag

SEQ ID NO: 566578 - DNA, 120 bp, Artificial Sequence
  ENSG00000170242_16 (sequence is synthesized)
agagttggaagaacaagaaaagagacaacgagaaattgagcgcaatacatgcaagataaaattattctgtttgcatcctacaaaacaagtaatgatggaaaataaattggaggttcataa

SEQ ID NO: 566579 - DNA, 120 bp, Artificial Sequence
  ENSG00000170242_17 (sequence is synthesized)
ggataagacattaaaggaagcagtagaaatggcttataagatgatggatttagaagaggtaatacccctggattgctgtcgccttgttaaatatgatgagtttcatgattatctagaacg

SEQ ID NO: 566580 - DNA, 120 bp, Artificial Sequence
  ENSG00000170242_18 (sequence is synthesized)
gtcatatgaaggagaagaagatacaccaatggggcttctactaggtggcgtcaagtcaacatatatgtttgatctgctgttggagacgagaaagcctgatcaggttttccaatcttataa

SEQ ID NO: 566581 - DNA, 120 bp, Artificial Sequence
  ENSG00000170242_19 (sequence is synthesized)
acctggagaagtgatggtgaaagttcatgttgttgatctaaaggcagaatctgtagctgctcctataactgttcgtgcttacttaaatcagacagttacagaattcaaacaactgatttc

SEQ ID NO: 566582 - DNA, 120 bp, Artificial Sequence
  ENSG00000170242_20 (sequence is synthesized)
aaaggccatccatttacctgctgaaacaatgagaatagtgctggaacgctgctacaatgatttgcgtcttctcagtgtctccagtaaaaccctgaaagctgaaggattttttagaagtaa

SEQ ID NO: 566583 - DNA, 120 bp, Artificial Sequence
  ENSG00000170242_21 (sequence is synthesized)
caaggtgtttgttgaaagctccgagactttggattaccagatggcctttgcagactctcatttatggaaactcctggatcggcatgcaaatacaatcagattatttgttttgctacctga

SEQ ID NO: 566584 - DNA, 120 bp, Artificial Sequence
  ENSG00000170242_22 (sequence is synthesized)
acaatccccagtatcttattccaaaaggacagcataccagaaagctggaggcgattctggtaatgtggatgatgactgtgaaagagtcaaaggacctgtaggaagcctaaagtctgtgga

SEQ ID NO: 566585 - DNA, 120 bp, Artificial Sequence
  ENSG00000170242_23 (sequence is synthesized)
agctattctagaagaaagcactgaaaaactcaaaagcttgtcactgcagcaacagcaggatggagataatggggacagcagcaaaagtactgagacaagtgactttgaaaacatcgaatc

SEQ ID NO: 566586 - DNA, 120 bp, Artificial Sequence
  ENSG00000170242_24 (sequence is synthesized)
acctctcaatgagagggactcttcagcatcagtggataatagagaacttgaacagcatattcagacttctgatccagaaaattttcagtctgaagaacgatcagactcagatgtgaataa

SEQ ID NO: 566587 - DNA, 120 bp, Artificial Sequence
  ENSG00000170242_25 (sequence is synthesized)
tgacaggagtacaagttcagtggacagtgatattcttagctccagtcatagcagtgatactttgtgcaatgcagacaatgctcagatccctttggctaatggacttgactctcacagtat

SEQ ID NO: 566588 - DNA, 120 bp, Artificial Sequence
  ENSG00000170242_26 (sequence is synthesized)
cacaagtagtagaagaacgaaagcaaatgaagggaaaaaagaaacatgggatacagcagaagaagactctggaactgatagtgaatatgatgagagtggcaagagtaggggagaaatgca

SEQ ID NO: 566589 - DNA, 120 bp, Artificial Sequence
  ENSG00000170242_27 (sequence is synthesized)
gtacatgtatttcaaagctgaaccttatgctgcagatgaaggttctggggaaggacataaatggttgatggtgcatgttgataaaagaattactctggcagctttcaaacaacatttaga

SEQ ID NO: 566590 - DNA, 120 bp, Artificial Sequence
  ENSG00000170242_28 (sequence is synthesized)
gccctttgttggagttttgtcctctcacttcaaggtctttcgagtgtatgccagcaatcaagagtttgagagcgtccggctgaatgagacactttcatcattttctgatgacaataagat

SEQ ID NO: 566591 - DNA, 120 bp, Artificial Sequence
  ENSG00000170242_29 (sequence is synthesized)
tacaattagactggggagagcacttaaaaaaggagaatacagagttaaagtataccagcttttggtcaatgaacaagagccatgcaagtttctgctagatgctgtgtttgctaaaggaat

SEQ ID NO: 566592 - DNA, 120 bp, Artificial Sequence
  ENSG00000170242_30 (sequence is synthesized)
gactgtacggcaatcaaaagaggaattaattcctcagctcagggagcaatgtggtttagagctcagtattgacaggtttcgtctaaggaaaaaaacatggaagaatcctggcactgtctt

SEQ ID NO: 566593 - DNA, 120 bp, Artificial Sequence
  ENSG00000170242_31 (sequence is synthesized)
tttggattatcatatttatgaagaagatattaatatttccagcaactgggaggttttccttgaagttcttgatggggtagagaagatgaagtccatgtcacagcttgcagttttgtcaag

SEQ ID NO: 566594 - DNA, 120 bp, Artificial Sequence
  ENSG00000170242_32 (sequence is synthesized)
acggtggaagccttcagagatgaagttggatcccttccaggaggttgtattggaaagcagtagtgtggacgaattgcgagagaagcttagtgaaatcagtgggattcctttggatgatat

SEQ ID NO: 566595 - DNA, 120 bp, Artificial Sequence
  ENSG00000170242_33 (sequence is synthesized)
tgaatttgctaagggtagaggaacatttccctgtgatatttctgtccttgatattcatcaggatttagactggaatcctaaagtttctaccctgaatgtctggcctctttatatctgtga

SEQ ID NO: 566596 - DNA, 120 bp, Artificial Sequence
  ENSG00000170242_34 (sequence is synthesized)
tgatggtgcggtcatattttatagggataaaacagaagaattaatggaattgacagatgagcaaagaaatgaactgatgaaaaaagaaagcagtcgactccagaagactggacatcgtgt

SEQ ID NO: 566597 - DNA, 120 bp, Artificial Sequence
  ENSG00000170242_35 (sequence is synthesized)
aacatactcacctcgtaaagagaaagcactaaaaatatatctggatggagcaccaaataaagatctgactcaagactgactctgatagtgtagcattttccctgggggagttttggtttt

SEQ ID NO: 566598 - DNA, 120 bp, Artificial Sequence
  ENSG00000170242_36 (sequence is synthesized)
aattagatggttcactaccactgggtagtgccattttggccggacatggttggggtaacccagtgacaccagcactgattggactgccctacaccaatcagaagctcagtgcccaatggg

SEQ ID NO: 566599 - DNA, 120 bp, Artificial Sequence
  ENSG00000170242_37 (sequence is synthesized)
atcagaagctcagtgcccaatgggccactgttttgactcggaatcatgttgtgcactatagtcaaatgtactgtaaagtgaaaagggatgtgcaaaaaaataaaaaaaaacaacaaaaaa

SEQ ID NO: 566600 - DNA, 120 bp, Artificial Sequence
  ENSG00000170242_38 (sequence is synthesized)
gacaggggaatgagtaaacttcttttattgcggacaaatgtgcacatagccgctagtaaaactagcctcaaacaggatgctcatagcttaataataaaagctgtgcaaaggccatgaatg

SEQ ID NO: 566601 - DNA, 120 bp, Artificial Sequence
  ENSG00000170242_39 (sequence is synthesized)
aatgaattttctgtttatttcactgatgcacacattacctcattgacaattcagaagtaaatccaacgtgtgttgactcttggaaagcagcaaaaacaggagctgaagaaaagaaattct

SEQ ID NO: 566602 - DNA, 120 bp, Artificial Sequence
  ENSG00000170242_40 (sequence is synthesized)
tggaaccagccgtaacccagtaaggaattgtgaagttgtgtttttattttgtttcattttttgcagagtattaagaacattattctggaacatcagaacgtttcccttagaccgatccca

SEQ ID NO: 566603 - DNA, 120 bp, Artificial Sequence
  ENSG00000170242_41 (sequence is synthesized)
taattataactgattgtacttaagttatggatgtagagaatatgtttcattcatttattcagcatgtaaataaaattgatcctgttgagttatcataattgcagttcaactatctgccat

SEQ ID NO: 566604 - DNA, 120 bp, Artificial Sequence
  ENSG00000170242_42 (sequence is synthesized)
gattattcttttcacgtatcattcattctgtacatttgtgtacattgagaagtatagcaatctatgtaaatgtaatcctcagtgaggttcctcagtgctaggtcccataggattgtcgtt

SEQ ID NO: 566605 - DNA, 120 bp, Artificial Sequence
  ENSG00000170242_43 (sequence is synthesized)
gcccttgttaatgaggtttctctgttcagcggcttcaatttttttctctttgtacatctagttttgaagatttacttcaagtttgaatcttctagaatgcttgtaagtccagttttaatt

SEQ ID NO: 566606 - DNA, 120 bp, Artificial Sequence
  ENSG00000170242_44 (sequence is synthesized)
tttagagtcaatttgtagttacatgtagtttaacttttgggaaacgtcttaacattgttctgaataaacttgctaatgaggtcaggtcatggtacagactgatgcagtcaacatgatttc

SEQ ID NO: 566607 - DNA, 120 bp, Artificial Sequence
  ENSG00000170242_45 (sequence is synthesized)
attgcagagtttattagtatcagcaagtttttgctttgctaaataaaagtactcaatgaacacaattctacataaattttgacataccatctaatttataaaaatcaataaaaaaggttt

SEQ ID NO: 566608 - DNA, 120 bp, Artificial Sequence
  ENSG00000170242_46 (sequence is synthesized)
tggtaaaactttttcatgccagatgctgtttacaacaatgaacatgccaataaaacatttgttcattctgttgtgttattttagtcattaaacttctgtggatgaagaatctgggttaag

SEQ ID NO: 566609 - DNA, 120 bp, Artificial Sequence
  ENSG00000170242_47 (sequence is synthesized)
aatagatttgtcatctttaaatatgacattttgtaatgtgtattggatatctcatttctatgataaaggtatatttacagtaaagttctcataagagaaatgaaaagctgtgttaatatc

SEQ ID NO: 566610 - DNA, 120 bp, Artificial Sequence
  ENSG00000170242_48 (sequence is synthesized)
taactttggggaaccctgtcagtatttcagatccgatttttaccctttttttcttataagaaagataaaattagaaaatactgttagcaaatgtggctctgccatttgaatataatcacc

SEQ ID NO: 566611 - DNA, 120 bp, Artificial Sequence
  ENSG00000170242_49 (sequence is synthesized)
gagaattccatgtcttaaaagtctcctggaatccacaatgaaaaaaaaaatcttttctaaggtatttttctggctaatttttatttgaagaaagctatagcatttagcgaaatttgactg

SEQ ID NO: 566612 - DNA, 120 bp, Artificial Sequence
  ENSG00000170242_50 (sequence is synthesized)
aagtaatgttctgagtttgcattagtgggattggtgatgttctcagaagaaaattggaaacacttgtgatgaattgtctttcagatcacttagattttctgatgtaagaggacagctgtt

SEQ ID NO: 566613 - DNA, 120 bp, Artificial Sequence
  ENSG00000170242_51 (sequence is synthesized)
tggttctgatacaggcctgcttacttgggatgtagggttagtaaatggggtttctgctttaaaggactgacttgctatcacacaaaagaggcagacttgtaaacacaatgggctttggag

SEQ ID NO: 566614 - DNA, 120 bp, Artificial Sequence
  ENSG00000170242_52 (sequence is synthesized)
tttggtctgattgggtttggtttagtattcctatgagcgtaaatggtaaaattcttctgatacccactctttagactgtgccttctgctctgttctttgttttatgtttaactgctgttt

SEQ ID NO: 566615 - DNA, 120 bp, Artificial Sequence
  ENSG00000170242_53 (sequence is synthesized)
ctaattgcaggtgtattacagatacaaataagagtaaagaaaatatatttcattatagaaaagaaaaaattaaaagcttcttgcttttcagtgcctgatagagtgaaaacacaaagttgc

SEQ ID NO: 566616 - DNA, 120 bp, Artificial Sequence
  ENSG00000170242_54 (sequence is synthesized)
actttaataatttcaataaaagctaatctgtgtcagcctccctctgcttcagagagtcaggtgagcatccataacctaacaggcagagccctagcgatgtggatcaagtttcctgagccc

SEQ ID NO: 566617 - DNA, 120 bp, Artificial Sequence
  ENSG00000170242_55 (sequence is synthesized)
gggggcggtggagcctcatgatctcttatcttttgaggctgaggcaggtcacatgcaacaaattgtgaccctgctccccacaagtcatgcaaaggttttgaagagcttttaccgtggggc

SEQ ID NO: 566618 - DNA, 120 bp, Artificial Sequence
  ENSG00000170242_56 (sequence is synthesized)
agatgaacttgtgtcaaccatgcacaccctgtgagaaccaagtacctgtgtttctaaggcgggcactcaaggtgaggggtgcattctggccaaagaaacaaaagctgtggtttcaggacc

SEQ ID NO: 566619 - DNA, 120 bp, Artificial Sequence
  ENSG00000170242_57 (sequence is synthesized)
atgccgtgtgtagctgatctgtacgggacgtgtatgtaaggaagagcaatcatgatagataagaacagtgtgtgaagcagccttcacactagagtgtttggtcatctcttataatgtaag

SEQ ID NO: 566620 - DNA, 120 bp, Artificial Sequence
  ENSG00000170242_58 (sequence is synthesized)
ggaaggtactttaaaattctgggaagatgcgatgaactcatgtcccagtcagaaaataatccaatgaaataagcattggttgccaggccacagttaggaattgtattgtgatacatctag

SEQ ID NO: 566621 - DNA, 120 bp, Artificial Sequence
  ENSG00000170242_59 (sequence is synthesized)
aggccaagagagcaggagagagctaccaacttacactgtggtttaagctaaatgaccgcacagcatcatagcattgcagtgttgttactaaatctggaagtgacctgtgaatgtatggaa

SEQ ID NO: 566622 - DNA, 120 bp, Artificial Sequence
  ENSG00000170242_60 (sequence is synthesized)
tacaataaagtcttttattctggttcatttgctagtacttcctttttgattggatactgtagttcttcctctggattttattttgttcagcgtcaaggccctaattttgcaaatgtagtc

SEQ ID NO: 566623 - DNA, 120 bp, Artificial Sequence
  ENSG00000170242_61 (sequence is synthesized)
taaaccacattacgtggactagaggatactctgaattagcaagttttttgtttgctgaataaaactattccatcttaacaattctgtgtaatttttgaaaaacatcaacattttggtcac

SEQ ID NO: 566624 - DNA, 120 bp, Artificial Sequence
  ENSG00000170242_62 (sequence is synthesized)
tagtagtcaaaatcttataaggccatatgtcctgaaaggcaaaactctgtgtatgtgcgatttaccagggagatagtaggacagtttttatgagggtttcaaaggagttcatggcccaaa

SEQ ID NO: 566625 - DNA, 120 bp, Artificial Sequence
  ENSG00000170242_63 (sequence is synthesized)
tgaagcttgtggccacctaggtttagtgtacatgaaattggaagatgcttcttgattgtagttcccatggggaagagggaggctgtgatcatttggttagatacagcattaattgtcaca

SEQ ID NO: 566626 - DNA, 120 bp, Artificial Sequence
  ENSG00000170242_64 (sequence is synthesized)
acttgactttcagaaacaagaatactgcacaaactcaagcatgcattggagcatgtgttactatttagaaaagagtgcagccatcagtaggtcaagctaggagggcaaaagagagttgag

SEQ ID NO: 566627 - DNA, 120 bp, Artificial Sequence
  ENSG00000170242_65 (sequence is synthesized)
aggaatgctctgccccttccccatcacagcactgcccctttccacctcctcaccagctcacctgtacaagagaattgatctcaactgagtgtcagctcaccaggtcagaaattgttattg

SEQ ID NO: 566628 - DNA, 120 bp, Artificial Sequence
  ENSG00000170242_66 (sequence is synthesized)
gaccctaaaaccttgcctcacaggtgggcaccaagctccccttccctctgctttccatgtttcccacctgccctctccccacctgttttcagcctcttttataatgcttaagtaacctgc

SEQ ID NO: 566629 - DNA, 120 bp, Artificial Sequence
  ENSG00000170242_67 (sequence is synthesized)
ttgaagagtataatttatggagataaaaatactcaatgcttacatttttttcataactgtgccaattgttttgtcaaatgcagttacccactgggcagtgggcttatcaagtgctcagtg

SEQ ID NO: 566630 - DNA, 120 bp, Artificial Sequence
  ENSG00000170242_68 (sequence is synthesized)
caatcctgtgacttttaagtcattttgcattattaagacaatcttatcttaaagttcagtggtttcattcaaagctcccctgaacctccatagtgcctccaagatgtgctgtccctgcca

SEQ ID NO: 566631 - DNA, 120 bp, Artificial Sequence
  ENSG00000170242_69 (sequence is synthesized)
actcctgcaccagcttgactggtggtggaagaggccaggaagagcggggggaagacatgtgctaaccacttcttagcaatgaggctggtaaggttactgtccccttgtgcctggtcacta

SEQ ID NO: 566632 - DNA, 120 bp, Artificial Sequence
  ENSG00000170242_70 (sequence is synthesized)
gtaacttttttgtagacatgaaggtagatgccctgcaggtcctatcagcaaaggacccaactcctaacagcattggtgctccctcatgaaatttgacagtgtcttgccagcctcctgctg

SEQ ID NO: 566633 - DNA, 120 bp, Artificial Sequence
  ENSG00000170242_71 (sequence is synthesized)
gcagacacttctctgcagtgaataccactatcccatgctgcactagtccctaccaagtcttcaaccctcaatttgatcttccatgagtgtctcaaaaagttcccctcagaagtttcagcc

SEQ ID NO: 566634 - DNA, 120 bp, Artificial Sequence
  ENSG00000170242_72 (sequence is synthesized)
aagggaataaaatctaacctctcctccctcaacggagtgtcagggaggggaagaatctgttttccaaacaccacaatctcccaaaaggggatttcaccctcccttggtcatctttataca

SEQ ID NO: 566635 - DNA, 120 bp, Artificial Sequence
  ENSG00000170242_73 (sequence is synthesized)
gggcaattgtgctgctgctgctgaggtggccactttcagcaagccctgtgtgcaggggcctagctgcatttagaaaccaagcatagctatcaaaaagtaatctccaaatagttgaattgc

SEQ ID NO: 566636 - DNA, 120 bp, Artificial Sequence
  ENSG00000170242_74 (sequence is synthesized)
atttcttgagtatctggagaggatgtgcagaccacaggaatacctaatgccttttttctcttcctgtctttgtccctcacactacagcaggcccctcccttccctcttcaacctcatcct

SEQ ID NO: 566637 - DNA, 120 bp, Artificial Sequence
  ENSG00000170242_75 (sequence is synthesized)
ccctccccacaggcccagagaaccagttgggctttgttctcctgcaggctatggttcatcatgcaaatagctcctgtgtcagaaatgctttttggcttcaaataacagaaaagctaacac

SEQ ID NO: 566638 - DNA, 120 bp, Artificial Sequence
  ENSG00000170242_76 (sequence is synthesized)
cagctttatcaataataatatcggtggtttacttaaggtgtccagagatggtggagaacaggattggtttcctcctcaatgtcaaggactcaaagactctttctgtggtagggccacatc

SEQ ID NO: 566639 - DNA, 120 bp, Artificial Sequence
  ENSG00000170242_77 (sequence is synthesized)
ctaaaccctgtatcctgtgattatttacctgacagggcaaaagagattttgcagatgcaattaaggttaaggaccttgacgtgggaagattgtgattatttacctgacagggcaaaagag

SEQ ID NO: 566640 - DNA, 120 bp, Artificial Sequence
  ENSG00000170242_78 (sequence is synthesized)
attttgcagatgcaattaaggttaaggaccttgacgtgggaagattattctggattatctaggtgggcgcaatttgatcacatgggtccccagaagtggagaacctttcccacctgtaga

SEQ ID NO: 566641 - DNA, 120 bp, Artificial Sequence
  ENSG00000170242_79 (sequence is synthesized)
aagccagagagctggcacctgagaaggacagaactgtcattgcaggatttgaagatgaaggggcccatgagccaaggaatgccagtgacctatagaggctaaaaaacagcaaggaaatgg

SEQ ID NO: 566642 - DNA, 120 bp, Artificial Sequence
  ENSG00000170242_80 (sequence is synthesized)
actctccccagagcctccagaggaatgcagccctgttgatcacatgatcaccagatggctgccccagagccaaatgtcgcttcctgagcaccatactcaaaggcaggggaagtggatgga

SEQ ID NO: 566643 - DNA, 120 bp, Artificial Sequence
  ENSG00000170242_81 (sequence is synthesized)
gggcaggagctccattcttgtttgccactctccttttgtcaattgggaaaaaattccagaaactctgggagccctccccttacatttcctgggtcatggggccagccctagctgctggag

SEQ ID NO: 566644 - DNA, 120 bp, Artificial Sequence
  ENSG00000170242_82 (sequence is synthesized)
ggactgagaacagctgttgagcagtttacctgacggcatctgccatggcttggcaggaactctggctttgggagagagcagcagcaaggtattcaagcaccacctccacccagcccctcc

SEQ ID NO: 566645 - DNA, 120 bp, Artificial Sequence
  ENSG00000170242_83 (sequence is synthesized)
tttacagttactgaaaacatagaatatattttattcatagtcattttatttctctgaagcaaaggtcagcaaattttttctgggccttgcagtttagcaggccatactgcctctgttgca

SEQ ID NO: 566646 - DNA, 120 bp, Artificial Sequence
  ENSG00000170242_84 (sequence is synthesized)
gttactcacttctgctattatagcacaaggagccatagacaataataagccaatgagatggctatgtctcaacattttatttacaaaagcaggcagcagtgaacttggccctcaggccac

SEQ ID NO: 566647 - DNA, 120 bp, Artificial Sequence
  ENSG00000170242_85 (sequence is synthesized)
tgtttgtcatccctgtgctctaaagtgttgctacaaatgctgaaatgagacaaaattttcctgcttttaaaaggaaaagaaatttttttgtgcgtgtgcttgctttctggaaacaatcat

SEQ ID NO: 566648 - DNA, 120 bp, Artificial Sequence
  ENSG00000170242_86 (sequence is synthesized)
acagtgctacaggtgaatagcagttgcaagtcattttagtatgtaacaagcatttatatagtgtctactgtgtgctttaggtgcttgcaaatattaactcatttaatcatcagttaacta

SEQ ID NO: 566649 - DNA, 120 bp, Artificial Sequence
  ENSG00000170242_87 (sequence is synthesized)
ctacttagaaagccccatatttataatttttgtgcactgtcacctactacttgaggatgcagtttcccaaaggaaataagatgtgttttgtaatttgtgtaataaattaatattttttca

SEQ ID NO: 566650 - DNA, 120 bp, Artificial Sequence
  ENSG00000170242_88 (sequence is synthesized)
agaggggaaaagaacgtcaggagagtgaacgggagcaaataaaacgctgtccattctgactggaagggccagagccgtgtctaagggcgggggccgggaggtggcccgcggtggtgtctc

SEQ ID NO: 566651 - DNA, 120 bp, Artificial Sequence
  ENSG00000170242_89 (sequence is synthesized)
taccaggacgaggcctggggtatctgaagaggggatgacgtccaggcgctttgctaaagggaagccagaagggtatgagttgctagggtcagagatggggctttcggctcgagtctttcc

SEQ ID NO: 566652 - DNA, 120 bp, Artificial Sequence
  ENSG00000170242_90 (sequence is synthesized)
ctgcagggcagagagtccgaagagcccgagaaggcagggaggacagtgggcctggtccttccccggccggcagagggagtcccgagatggaacgtccagctctcctctaacgaaaagcgt

SEQ ID NO: 566653 - DNA, 120 bp, Artificial Sequence
  ENSG00000170242_91 (sequence is synthesized)
ttgcatggctgtctcgccaattctgtacctcccggggctgaggaagagccgaggtgactagaagctagcgacaagtgccggccacctccgacgccaggcgccgggcttggagcccgacgg

SEQ ID NO: 566654 - DNA, 120 bp, Artificial Sequence
  ENSG00000170242_92 (sequence is synthesized)
aaactttagaaaatttgatattcaatgcccaggaaaatgttttatttctacatgctcttccctctctccatttccaatgcaaacaacaattcccttgccatacccccttaaaaagtcctt

SEQ ID NO: 566655 - DNA, 120 bp, Artificial Sequence
  ENSG00000170242_93 (sequence is synthesized)
aatcaactgggaaagtcagagaaagaaaaagcgctcttaaaattttttctgttactttgaagtaactccaaagcaaggagttactagaaattccaatgcataatctcagaaagagggaaa

SEQ ID NO: 566656 - DNA, 120 bp, Artificial Sequence
  ENSG00000170242_94 (sequence is synthesized)
agatctgagagtttgggcatttggcataagcagtaacaacaaaaacattccagcatagtatgagacttaaaataaaagaacctttataaaaccttagactgaggccagccaaataattag

SEQ ID NO: 566657 - DNA, 120 bp, Artificial Sequence
  ENSG00000170242_95 (sequence is synthesized)
ctaatattttcttagccacgtttgttctttagtttcttttttactattatggcttattttgtattgaagacatggtactgataatttatcagagactcaagaacaatgactatttgtgtc

SEQ ID NO: 566658 - DNA, 120 bp, Artificial Sequence
  ENSG00000170242_96 (sequence is synthesized)
ctaagccaggtggcttaaagaatagaagtgtattgtctcacaatctgagatcaggctgtcaacagggttggttccttctgagtgctgtgggggagaatctgttccatactctctcctagc

SEQ ID NO: 566659 - DNA, 120 bp, Artificial Sequence
  ENSG00000170242_97 (sequence is synthesized)
ttctgtggtttttggccatcattggcaaccttggcttgtagatacatcaccccagtctctgccttcatcttcatgtggtgttctttctgtgggcttgtctgtctgtattgttttcccctt

SEQ ID NO: 566660 - DNA, 120 bp, Artificial Sequence
  ENSG00000170242_98 (sequence is synthesized)
tttcataaaccactagtcctattgtattagggcccaccctgaagaccttattttactttgagtatcactggaaagaccctatttccaaataaggtcacattctgaggtactagggattag

SEQ ID NO: 566661 - DNA, 120 bp, Artificial Sequence
  ENSG00000170242_99 (sequence is synthesized)
gatttcaaaatgtctttttgtggggggcacaattcaacccatagcagtgaccttgaggaggtccaagtagcagacatacttgtcacacctcccagttttcgttatcaacattggcacatt

SEQ ID NO: 566662 - DNA, 120 bp, Artificial Sequence
  ENSG00000170242_100 (sequence is synthesized)
taaagtattggtgtttggagggaggcttataggaggaaagttggcttttagaagatcacatcaaggtaaacaactagttctatattctttttttgctgttgcttaggaaaattttaattt

SEQ ID NO: 566663 - DNA, 120 bp, Artificial Sequence
  ENSG00000170242_101 (sequence is synthesized)
tccttttcttctgtagaaagtaaaatatgaattctggatattttgttacaagattatcctagtttttagagagctcaataatactaacacctcatgtatttcaggctgcttcaggtctaa

SEQ ID NO: 566664 - DNA, 120 bp, Artificial Sequence
  ENSG00000170242_102 (sequence is synthesized)
ttcaaccataaatttaaatggttgaaattctgattaattgacaagttaagttgggaggtaaggaacaactaggataccatctactatggtgtgtaggcaagtgctccagattgtgatttc

SEQ ID NO: 566665 - DNA, 120 bp, Artificial Sequence
  ENSG00000170242_103 (sequence is synthesized)
tttgagtatctggggtcgtagggaataatcactgtgcctgggtaagtcaggaagagatcataaatgacaaagaagtcacccttgtaaggattgagtatgtattagcagagatggattcat

SEQ ID NO: 566666 - DNA, 120 bp, Artificial Sequence
  ENSG00000170242_104 (sequence is synthesized)
ctgaaaatggtactagatggtgggtgcctgcatcagtattatttcagtatattttcacatcaagatagttgagtaagaaatgtcatgtgattaaatccaagaggtatttattgacctgta

SEQ ID NO: 566667 - DNA, 120 bp, Artificial Sequence
  ENSG00000170242_105 (sequence is synthesized)
atttgccagacactgctaatcccttgtgctacaaaaatgagtaagaaccacttattggtgcacacagtctgtggaagaaacagaactgcaaacctgtcattctaaaataataggtactaa

SEQ ID NO: 566668 - DNA, 120 bp, Artificial Sequence
  ENSG00000170242_106 (sequence is synthesized)
gggactgaatcagtagaagttcttcttgtgtacaccagagaaaagtgacaattgagttgatgcttgaaaagtgacaattgagttgatgcttgaaaagtgacataatggaaaagtgacaat

SEQ ID NO: 566669 - DNA, 120 bp, Artificial Sequence
  ENSG00000170242_107 (sequence is synthesized)
tttgaagaatcactaaattggggagtaaatggaaagagaaggattaataatagctttagtgaaaaaagaggataaagtgaagttgatttgtttatgattttagatagggataggagccaa

SEQ ID NO: 566670 - DNA, 120 bp, Artificial Sequence
  ENSG00000170242_108 (sequence is synthesized)
agaaacaaagattggaaatccagagaagagagtaattggtaatgcagtgttcaacaggagtcaggagggagtggaattaggagtactggtttgaagaagagaggaattatcttctgagac

SEQ ID NO: 566671 - DNA, 120 bp, Artificial Sequence
  ENSG00000170242_109 (sequence is synthesized)
tggagagaagagagtaaatatttcattctcaaaaactccttgggataattgggttttttcttgtgcccactttttaagagtaacacttgaagtaaatctttttgtttagtaaggcactaa

SEQ ID NO: 566672 - DNA, 120 bp, Artificial Sequence
  ENSG00000170242_110 (sequence is synthesized)
ctctcacttcaaggtctttcgagtgtatgccagcaatcaagagtttgagagcgtccggctgaatgagacactttcatcattttctgatgacaataaggttgattaaaataatcttcgagt

SEQ ID NO: 566673 - DNA, 120 bp, Artificial Sequence
  ENSG00000170242_111 (sequence is synthesized)
atttccagcaactgggaggttttccttgaagttcttgatggctgcttcaggtctaattcaaccataaatttaaatggttgaaattctgattaattgacaagttaagttgggaggggtaga

SEQ ID NO: 566674 - DNA, 120 bp, Artificial Sequence
  ENSG00000170248_0 (sequence is synthesized)
agtcagtccgccagtccgccagcccagtacctctctctcctcggccctcgtaagctgtccgcggtctgtttggcccgaacggcggcggaggcgctgatcatggcgacattcatctcggtg

SEQ ID NO: 566675 - DNA, 120 bp, Artificial Sequence
  ENSG00000170248_1 (sequence is synthesized)
cagctgaaaaagacctcagaggtggacctggccaagccgctggtgaagttcatccagcagacttacccaagcggcggggaagagcaggcccagtactgccgcgcggcggaggagctcagc

SEQ ID NO: 566676 - DNA, 120 bp, Artificial Sequence
  ENSG00000170248_2 (sequence is synthesized)
aagctgcgccgcgccgcagtcggtcgtccgctggacaagcacgagggcgcgctcgagacgctcctgagatattatgatcagatttgttctattgaacccaaattcccattttctgaaaat

SEQ ID NO: 566677 - DNA, 120 bp, Artificial Sequence
  ENSG00000170248_3 (sequence is synthesized)
cagatctgcttgacatttacctggaaggatgctttcgataaaggttcactttttggaggctctgtaaaactggctcttgcaagcttaggatatgaaaagagctgtgtgttgttcaattgt

SEQ ID NO: 566678 - DNA, 120 bp, Artificial Sequence
  ENSG00000170248_4 (sequence is synthesized)
gcagccttagctagccaaattgcagcagaacagaacctggataatgatgaaggattgaaaatcgctgctaaacattaccagtttgctagtggtgcctttttacatattaaagagacggtt

SEQ ID NO: 566679 - DNA, 120 bp, Artificial Sequence
  ENSG00000170248_5 (sequence is synthesized)
ttatctgccttaagtcgagagccgaccgtggacatatctccagatactgttgggaccctcagtcttattatgctggcacaggctcaagaagtattttttttaaaagccacaagagataaa

SEQ ID NO: 566680 - DNA, 120 bp, Artificial Sequence
  ENSG00000170248_6 (sequence is synthesized)
atgaaagatgccatcatagctaaattggctaatcaggctgcagattattttggtgatgctttcaaacagtgtcaatacaaagatactctccccaaggaggtgttccctgtcttggctgca

SEQ ID NO: 566681 - DNA, 120 bp, Artificial Sequence
  ENSG00000170248_7 (sequence is synthesized)
aagcactgtatcatgcaggccaatgctgagtaccatcagtctatcctggcaaaacagcagaagaaatttggagaagaaattgcaaggttacagcatgcagcagaactgattaaaacagtg

SEQ ID NO: 566682 - DNA, 120 bp, Artificial Sequence
  ENSG00000170248_8 (sequence is synthesized)
gcatctcgctatgatgaatatgttaatgtgaaggatttttctgacaaaatcaatcgtgcccttgctgcagcaaagaaggataatgacttcatttatcatgatcgagttccagaccttaaa

SEQ ID NO: 566683 - DNA, 120 bp, Artificial Sequence
  ENSG00000170248_9 (sequence is synthesized)
gatctagatcctattggcaaagccacacttgtgaaatctaccccggtcaatgtacccatcagtcagaaatttactgatctgtttgagaagatggttcccgtgtcagtacagcagtctttg

SEQ ID NO: 566684 - DNA, 120 bp, Artificial Sequence
  ENSG00000170248_10 (sequence is synthesized)
gctgcctataatcagaggaaagccgatttggttaacagatcaattgctcagatgagagaagccaccactttggcaaatggggtgctagcttcccttaatcttccagcagcaattgaagat

SEQ ID NO: 566685 - DNA, 120 bp, Artificial Sequence
  ENSG00000170248_11 (sequence is synthesized)
gtgtctggagacactgtacctcagtctatattgactaaatccagatctgtgattgaacagggaggcatccagactgttgatcagttgattaaagaactgcctgaattactgcaacgaaat

SEQ ID NO: 566686 - DNA, 120 bp, Artificial Sequence
  ENSG00000170248_12 (sequence is synthesized)
agagaaatcctagatgagtcattaaggttgttggatgaagaagaagcaaccgataatgatttaagagcaaaatttaaggaacgttggcaaaggacaccatccaatgaactgtataagcct

SEQ ID NO: 566687 - DNA, 120 bp, Artificial Sequence
  ENSG00000170248_13 (sequence is synthesized)
ttaagagcagagggaaccaacttcagaacagttttagataaagctgtgcaggcagatggacaagtgaaagaatgttaccagtctcatcgtgacaccatcgtgcttttgtgtaagccagag

SEQ ID NO: 566688 - DNA, 120 bp, Artificial Sequence
  ENSG00000170248_14 (sequence is synthesized)
cctgagctgaatgctgccatcccttctgctaatccagcaaagaccatgcagggcagtgaggttgtaaatgtcttaaaatccttattgtcaaatcttgatgaagtaaagaaggaaagagag

SEQ ID NO: 566689 - DNA, 120 bp, Artificial Sequence
  ENSG00000170248_15 (sequence is synthesized)
ggtctggagaatgacttgaaatctgtgaattttgacatgacaagcaagtttttgacagccctggctcaagatggtgtgataaatgaagaagctctttctgttactgaactagatcgagtc

SEQ ID NO: 566690 - DNA, 120 bp, Artificial Sequence
  ENSG00000170248_16 (sequence is synthesized)
tatggaggtcttacaactaaagtccaagaatctctaaagaaacaggagggacttcttaaaaatattcaggtctcacatcaggaattttcaaaaatgaaacaatctaataatgaagctaac

SEQ ID NO: 566691 - DNA, 120 bp, Artificial Sequence
  ENSG00000170248_17 (sequence is synthesized)
ttaagagaagaagttttgaagaatttagctactgcatatgacaactttgttgaacttgtagctaatttgaaggaaggcacaaagttttacaatgagttgactgaaatcctggtcaggttc

SEQ ID NO: 566692 - DNA, 120 bp, Artificial Sequence
  ENSG00000170248_18 (sequence is synthesized)
cagaacaaatgcagtgatatagtttttgcacggaagacagaaagagatgaactcttaaaggacttgcaacaaagcattgccagagaacctagtgctccttcaattcctacacctgcgtat

SEQ ID NO: 566693 - DNA, 120 bp, Artificial Sequence
  ENSG00000170248_19 (sequence is synthesized)
cagtcctcaccagcaggaggacatgcaccaactcctccaactccagcgccaagaaccatgccgcctactaagccccagcccccagccaggcctccaccacctgtgcttccagcaaatcga

SEQ ID NO: 566694 - DNA, 120 bp, Artificial Sequence
  ENSG00000170248_20 (sequence is synthesized)
gctccttctgctactgctccatctccagtgggggctgggactgctgcgccagctccatcacaaacgcctggctcagctcctcctccacaggcgcagggaccaccctatcccacctatcca

SEQ ID NO: 566695 - DNA, 120 bp, Artificial Sequence
  ENSG00000170248_21 (sequence is synthesized)
ggatatcctgggtattgccaaatgcccatgcccatgggctataatccttatgcgtatggccagtataatatgccatatccaccagtgtatcaccagagtcctggacaggctccatacccg

SEQ ID NO: 566696 - DNA, 120 bp, Artificial Sequence
  ENSG00000170248_22 (sequence is synthesized)
ggaccccagcagccttcataccccttccctcagcccccacagcagtcttactatccacagcagtaatatgtctgctcagcagctcagctgattcagatcagagggaaagaaataccaacc

SEQ ID NO: 566697 - DNA, 120 bp, Artificial Sequence
  ENSG00000170248_23 (sequence is synthesized)
ctgcaataagtgtactaaactctacgctctggttaatgtaatgtactctcctggactgaatgcagtgtataatttctgtctacagctagaagctgtgccccagttccacatttgattaca

SEQ ID NO: 566698 - DNA, 120 bp, Artificial Sequence
  ENSG00000170248_24 (sequence is synthesized)
tgagatttgctgctgttgcagtataaacactaggtataataggatttgaaattgcattacagttcataaaaattgaaaatgagaaattaaacctgcaagtgaaacatttgaaacgattat

SEQ ID NO: 566699 - DNA, 120 bp, Artificial Sequence
  ENSG00000170248_25 (sequence is synthesized)
actttctacataagacatggttgggacatcagatacttacaaagatggtttaagtatggatactagagaaaattaagttttctttctctttggtttattgatttggtttaatttccatta

SEQ ID NO: 566700 - DNA, 120 bp, Artificial Sequence
  ENSG00000170248_26 (sequence is synthesized)
tgctattttgcataatcaaggcactgtaaatcttataattttaaaataaattacttaagaacagttgtcattgttatgttttgttattgattctcattactgtctaattttttttctggt

SEQ ID NO: 566701 - DNA, 120 bp, Artificial Sequence
  ENSG00000170248_27 (sequence is synthesized)
attagtctcattttgtatgtatataagttaaacagatactgtttttaagtgcatgaatagtacaagttattatcaaggatgttttacagggaaatcaaaagaatattatcatactttatc

SEQ ID NO: 566702 - DNA, 120 bp, Artificial Sequence
  ENSG00000170248_28 (sequence is synthesized)
tttcgtatgctgattagtaaacgatttttgacatttattttagaaagtcctataatgtggaagaaacaaacagttgctaccaaagattcttcaaataaacatacaaataaatgtgtatat

SEQ ID NO: 566703 - DNA, 120 bp, Artificial Sequence
  ENSG00000170248_29 (sequence is synthesized)
ttaatgttttattgttagcttctccagaaaattgatgcaaattctggtaataattcttgcattttttccccataacctggttaaaataaatacgccattggcaatacttcataatgtaat

SEQ ID NO: 566704 - DNA, 120 bp, Artificial Sequence
  ENSG00000170248_30 (sequence is synthesized)
ggaattgtttggggaacacttactgtaccctctcatcctttttccaccttactgtgttaacttagtgacatttaatgcccaatatgtatgaatagatctaagccatttaattttttttcc

SEQ ID NO: 566705 - DNA, 120 bp, Artificial Sequence
  ENSG00000170248_31 (sequence is synthesized)
ttaaagattggagtattttataattcaaggagcatacaaaacaatggttgggaacatatgccaattatggaataggctatgtatttaatattaatctctgccattaggatatctactcac

SEQ ID NO: 566706 - DNA, 120 bp, Artificial Sequence
  ENSG00000170248_32 (sequence is synthesized)
tgtataaacctcagtaaaaatagtgaagacatgcatcatggaatgagaaaatgagaaaggaatgagttgtctaacatcacagtgggatctgttttttgtgaggttcatttctgaacacat

SEQ ID NO: 566707 - DNA, 120 bp, Artificial Sequence
  ENSG00000170248_33 (sequence is synthesized)
taggcatatgagcagatttccagtgaatctatttatgtttattttctgagtttcaacgctgaccttttcttgcattattgtttcattttaatgatagtgttacttgtcccactgttgttt

SEQ ID NO: 566708 - DNA, 120 bp, Artificial Sequence
  ENSG00000170248_34 (sequence is synthesized)
tcattgagtttggatttatattttaaatgttcgaatgaaagtatgattgtaaaagggagtgaattggtttaaaaatatatgtatattttaaactttgttgtgtgtaggaaacatgaaggc

SEQ ID NO: 566709 - DNA, 120 bp, Artificial Sequence
  ENSG00000170248_35 (sequence is synthesized)
atgttaattcaatataaatgacctttgatttcatggaatattaaagttggtttaaagtccaatagttaaaccttagcaaaaatagctttttacttcatcagttgctaagatttaatactt

SEQ ID NO: 566710 - DNA, 120 bp, Artificial Sequence
  ENSG00000170248_36 (sequence is synthesized)
tggattcatcaaagtgtgacatgggcttgtttgacttctgtaagtggcatttaagttccacattcttattacttgaggtactttatactaacataagacagtgagagttagaggtattac

SEQ ID NO: 566711 - DNA, 120 bp, Artificial Sequence
  ENSG00000170248_37 (sequence is synthesized)
aagttgctagtttataatgtcttactaatgcagaaacaaggaaaaaagcaaaattggcctgaatattctcttggggaaagagggcaccaaagaaaagggtaagtgcatctgagggccaaa

SEQ ID NO: 566712 - DNA, 120 bp, Artificial Sequence
  ENSG00000170248_38 (sequence is synthesized)
agagatgtataagccttttagcccattccccatgctgggcctgctcacagagccacaggaagatcattcagaaactaggaaaggaggcccccacagctgatcctgccacagcacacctga

SEQ ID NO: 566713 - DNA, 120 bp, Artificial Sequence
  ENSG00000170248_39 (sequence is synthesized)
ctcactcggctctgttagtgtaaccttttaaatgtagcaacacaaaccctttccctcttgtcagttcactcatcctttggtttctttttaatcacctgtgtctgggcacagacaatcaca

SEQ ID NO: 566714 - DNA, 120 bp, Artificial Sequence
  ENSG00000170248_40 (sequence is synthesized)
ataaatgcagccctttattactgttaaggatcatactgttggtttggagttggaagggtactactctgtgattcaggtgtgttgtacccatatttataattaggctttattatcttccta

SEQ ID NO: 566715 - DNA, 120 bp, Artificial Sequence
  ENSG00000170248_41 (sequence is synthesized)
aatcaaggaaaggaaatcatccccagaccatttatgctgagctttggaatactattttaaactggattgtacttaaataatgaagctctgcatagaggaactagtcagaagtggggaaaa

SEQ ID NO: 566716 - DNA, 120 bp, Artificial Sequence
  ENSG00000170248_42 (sequence is synthesized)
cactgtctaatttttatcagtctggtataaagtattgatctaagagaactctccctgtgccccttggtctttattctcaattaagaaaaacagtcacatgtcacgacaaaccaatcaatc

SEQ ID NO: 566717 - DNA, 120 bp, Artificial Sequence
  ENSG00000170248_43 (sequence is synthesized)
tttatgagatattcctgtatccataccccagcttgtttgcaatttataaacctccccttcaaaactaaggagttgcagaaaaaaatggatttcacagagccttgtgtccctaaagttctg

SEQ ID NO: 566718 - DNA, 120 bp, Artificial Sequence
  ENSG00000170248_44 (sequence is synthesized)
tcccagtcagcagtctttatagtccaaacagattataaaaaatgttttccatttgaactttacagtttgcaaaagtgcttttatacattttctaatttcagaaacaggataatttgttaa

SEQ ID NO: 566719 - DNA, 120 bp, Artificial Sequence
  ENSG00000170248_45 (sequence is synthesized)
gtgggtttcagtttgctaatagggattttttgtgttttgttttttaattttcagcatctcttgaagaatcttgctacagccaaatggcatctcactttttaaagacgtttgcaattatta

SEQ ID NO: 566720 - DNA, 120 bp, Artificial Sequence
  ENSG00000170248_46 (sequence is synthesized)
gttgattcacagtacagaacaaggtataaaggaaaaaaccctgctaggtagtgttataattgctagattaaaaatagactagaacaggttcattttaagatttacttggaagagcaaaga

SEQ ID NO: 566721 - DNA, 120 bp, Artificial Sequence
  ENSG00000170248_47 (sequence is synthesized)
aggaaaaattatatttttaaagaaagagaatattcaggctttatttctggtatgaagtttatattttttaaaaaaatcctatattatcacaccagagattttagattcttttctggttag

SEQ ID NO: 566722 - DNA, 120 bp, Artificial Sequence
  ENSG00000170248_48 (sequence is synthesized)
aaacattgctggtagttggattatatttttattgtattcatttatcttagggggaacattgtaaagaaacaaaaaggtccagatgaatgtatgctagaaataaaagttgaaagattctta

SEQ ID NO: 566723 - DNA, 120 bp, Artificial Sequence
  ENSG00000170248_49 (sequence is synthesized)
cccagagtgctaggattacaggcgtgatctgctgtgcctggccctttcagatattatgatcagatttgttctattgaacccaaattcccattttctgaaaatcagatctgcttgacattt

SEQ ID NO: 566724 - DNA, 120 bp, Artificial Sequence
  ENSG00000170248_50 (sequence is synthesized)
ttattttgttccgttgaagtcattgtgtgtttataaagatgaataagatagtgtttatgattaccaaggcagaatgaccatttgaaatatcccagtgccagtattttactttttttagat

SEQ ID NO: 566725 - DNA, 120 bp, Artificial Sequence
  ENSG00000170248_51 (sequence is synthesized)
ttcaatttaaaaggagaaggaaaggaagttgggtggttataggagataatattttgagcttttgtcctttttttcatggtggatttttcttcaaagaagacttaatatttaatgagattc

SEQ ID NO: 566726 - DNA, 120 bp, Artificial Sequence
  ENSG00000170248_52 (sequence is synthesized)
gtttggaatccattttctatgtttcatgtatgaagaaaagaaaagctgatattttatgtgtgttaatttttttctatcatgttaatttttaacactctgtctttgataagggacttgcaa

SEQ ID NO: 566727 - DNA, 120 bp, Artificial Sequence
  ENSG00000170248_53 (sequence is synthesized)
agctctgtgctttgtgttcctctgtgaatgtccattctacttctctttctaataatgcatgcttttctttttgtaaacaaaatgttgacttcatggatcaattaaagagaattgtaaaaa

SEQ ID NO: 566728 - DNA, 120 bp, Artificial Sequence
  ENSG00000170248_54 (sequence is synthesized)
cctaaattggcttcagttaacagttaaaaaaaaccccttcaattggaagaaaaaaaatttaattcatagatttcaatccacacaaaatcatgtcgtcttctctgtttacacctaatgact

SEQ ID NO: 566729 - DNA, 120 bp, Artificial Sequence
  ENSG00000170248_55 (sequence is synthesized)
aaccttaatctctaaaccattaatggggtgattctaatttctgtcttcttttcctttttcttcctgcatcccatgttgtctgtggtggtttgtgtggttggactctcccctggtcagtat

SEQ ID NO: 566730 - DNA, 120 bp, Artificial Sequence
  ENSG00000170248_56 (sequence is synthesized)
aagagacttgggatctcctctcatgtttttttcatctgaaagacctcatgttcagctgcacagtgttccgttacatcctgttgggccattagttcagtcctgtcatggagagaagaaagt

SEQ ID NO: 566731 - DNA, 120 bp, Artificial Sequence
  ENSG00000170248_57 (sequence is synthesized)
cacctacaaagacttggaagctacctctgcagcattcctggtattccttgaaaatctcctgtttcagaaccaagttgctccagccttaccttgagaactggcatgagtgtagtttgaaat

SEQ ID NO: 566732 - DNA, 120 bp, Artificial Sequence
  ENSG00000170248_58 (sequence is synthesized)
tactaataaagctcataaggtattttcatattctagttataaaactgaaaagtctgcaagtagtgatccaggaaggtaggaaattattccctgggagacaggaaagcacacaaggaggtg

SEQ ID NO: 566733 - DNA, 120 bp, Artificial Sequence
  ENSG00000170248_59 (sequence is synthesized)
gggcgcggggctgggagtgggtaggttgtctgccagccgtcgctcgccgctcctcttcccgtctccccccttccttcaatcctgtaacctgggcggagccgccccgtcccggcctgacca

SEQ ID NO: 566734 - DNA, 120 bp, Artificial Sequence
  ENSG00000170248_60 (sequence is synthesized)
ggcgcgtaggtgtggtctgcattctttgctggtgagcaggacccgccctgcaggcccgctgtgactgcccgcttgtcctgcctgcacgtctgctctagcccttggtcggcgagggctccg

SEQ ID NO: 566735 - DNA, 120 bp, Artificial Sequence
  ENSG00000170248_61 (sequence is synthesized)
tggatcagatacctgggagcagcagtctgccctgtactgatctcttttgccacatttacttagaactagtcttcacttttttgggtctctaactgaagcttcccctttcgccccattttt

SEQ ID NO: 566736 - DNA, 120 bp, Artificial Sequence
  ENSG00000170248_62 (sequence is synthesized)
cactggaccaaatgtctgatcagctcatcacattgtccacatgaaatggaccgtcttcctcagttcaaaataatcaaatgatagatggagaattctgaaagttaggagctacaactattt

SEQ ID NO: 566737 - DNA, 120 bp, Artificial Sequence
  ENSG00000170248_63 (sequence is synthesized)
ttgatataaatacagtaggtaaaatgtaaaaccctctgaagagagggtgaaaatactgcaaagccttccaaatagagaggatagtaaaatgccattttaatttggtttaaaatgctttgt

SEQ ID NO: 566738 - DNA, 120 bp, Artificial Sequence
  ENSG00000170248_64 (sequence is synthesized)
ttaaataggtaagctgagaaaaccctccagagagcctttagaaattcttttaagggtttctgaagtatgcttgcatttctgtagtgaatttgaaaacctaatccttccacttaaataggt

SEQ ID NO: 566739 - DNA, 120 bp, Artificial Sequence
  ENSG00000170248_65 (sequence is synthesized)
ttaatgttattaaacaattgacttttctctaggaattaggaaggttttcatgatcatgaatcttttaacttgttacattttttatgataatgttctgtaaaaatgcttttattattttta

SEQ ID NO: 566740 - DNA, 120 bp, Artificial Sequence
  ENSG00000170248_66 (sequence is synthesized)
ttctttaggagtcttagatcatatttaatattaagttgttgggcctagtaaattgtataaatgtatctcatgcagatctcagttcttcggctctaactatcattgacaaattagctttag

SEQ ID NO: 566741 - DNA, 120 bp, Artificial Sequence
  ENSG00000170248_67 (sequence is synthesized)
atgcagtgatatagtttttgcacggaagacagaaagagatgaactcttaaagtaagtctgttttgtgtaccaaattgtacttaaagaattttcttttaaaaaatcatgtagagacttttg

SEQ ID NO: 566742 - DNA, 120 bp, Artificial Sequence
  ENSG00000170248_68 (sequence is synthesized)
tttgtgtataagaagcaagttgaaacttataaagaaatttgaagttttaatagagttatctgaagtatatagtagaaatagtttttttttttttttaatttaagatgcatgaacaattct

SEQ ID NO: 566743 - DNA, 120 bp, Artificial Sequence
  ENSG00000170248_69 (sequence is synthesized)
tttatgtttaggggatgcctttgtctttaccttttactaaacttgtttttccaagctagaactctttctggaaaatgttgaccatctgttttcaatacttttatcaaatcaaggcattgt

SEQ ID NO: 566744 - DNA, 120 bp, Artificial Sequence
  ENSG00000170248_70 (sequence is synthesized)
gcaaatggtcattaaggttgttggatgaagaagaagcaaccgataatgatttaagagcaaaatttaaggaacgttggcaaaggacaccatccaatgaactgtataagcctttaagagcag

SEQ ID NO: 566745 - DNA, 120 bp, Artificial Sequence
  ENSG00000170255_0 (sequence is synthesized)
aggtcaggcttcagagtcagcaagaactggatttcaaactggatttgaggacccccaccttttgataggtgacttattctctgtgagtctctgatctgccctctttaaatgaggaagtaa

SEQ ID NO: 566746 - DNA, 120 bp, Artificial Sequence
  ENSG00000170255_1 (sequence is synthesized)
atcccacatggcagggtggtggggagaatcagagatcatacagctggtgatcacaactggtttctgtttccagggtcaccagactagggtttctgagcatggatccaaccatctcaacct

SEQ ID NO: 566747 - DNA, 120 bp, Artificial Sequence
  ENSG00000170255_2 (sequence is synthesized)
tggacacagaactgacaccaatcaacggaactgaggagactctttgctacaagcagaccttgagcctcacggtgctgacgtgcatcgtttcccttgtcgggctgacaggaaacgcagttg

SEQ ID NO: 566748 - DNA, 120 bp, Artificial Sequence
  ENSG00000170255_3 (sequence is synthesized)
tgctctggctcctgggctgccgcatgcgcaggaacgccttctccatctacatcctcaacttggccgcagcagacttcctcttcctcagcggccgccttatatattccctgttaagcttca

SEQ ID NO: 566749 - DNA, 120 bp, Artificial Sequence
  ENSG00000170255_4 (sequence is synthesized)
ctgtggcccatctggtaccgctgccaccgccccacacacctgtcagcggtggtgtgtgtcctgctctgggccctgtccctgctgcggagcatcctggagtggatgttatgtggcttcctg

SEQ ID NO: 566750 - DNA, 120 bp, Artificial Sequence
  ENSG00000170255_5 (sequence is synthesized)
ttcagtggtgctgattctgcttggtgtcaaacatcagatttcatcacagtcgcgtggctgatttttttatgtgtggttctctgtgggtccagcctggtcctgctgatcaggattctctgt

SEQ ID NO: 566751 - DNA, 120 bp, Artificial Sequence
  ENSG00000170255_6 (sequence is synthesized)
ggatcccggaagataccgctgaccaggctgtacgtgaccatcctgctcacagtactggtcttcctcctctgtggcctgccctttggcattcagtttttcctatttttatggatccacgtg

SEQ ID NO: 566752 - DNA, 120 bp, Artificial Sequence
  ENSG00000170255_7 (sequence is synthesized)
gacagggaagtcttattttgtcatgttcatctagtttctattttcctgtccgctcttaacagcagtgccaaccccatcatttacttcttcgtgggctcctttaggcagcgtcaaaatagg

SEQ ID NO: 566753 - DNA, 120 bp, Artificial Sequence
  ENSG00000170255_8 (sequence is synthesized)
cagaacctgaagctggttctccagagggctctgcaggacgcgtctgaggtggatgaaggtggagggcagcttcctgaggaaatcctggagctgtcgggaagcagattggagcagtgagga

SEQ ID NO: 566754 - DNA, 120 bp, Artificial Sequence
  ENSG00000170255_9 (sequence is synthesized)
aatacctctggccactgatttgtccatagtcctcatacaggaaataacaagtctgtccagcatcttcataagcctggattgctcaccagctttgactccagctcctgtatgcatctcctg

SEQ ID NO: 566755 - DNA, 120 bp, Artificial Sequence
  ENSG00000170255_10 (sequence is synthesized)
aattaagcaacacagaagggttctctgaagtcactgaatcccagaaaggccctccacctttagcacaagggacgtcttcaccactggacaaaggagaaaaagataaggggtcaccagact

SEQ ID NO: 566756 - DNA, 120 bp, Artificial Sequence
  ENSG00000170260_0 (sequence is synthesized)
agaatgcacctggcatcaacacggcggcggcggcggcggcttccaacaggctctggggcgccgagcggacaggaacgcagcacgggggctccgaggcggggtctgggtgttgaggggcga

SEQ ID NO: 566757 - DNA, 120 bp, Artificial Sequence
  ENSG00000170260_1 (sequence is synthesized)
ctggagccatggcggagtcggcgcctgctcggcacaggagaaaacgacgctccacacctttaacttcttccacacttccttcacaagcaacagagaaaagctcctattttcagaccaccg

SEQ ID NO: 566758 - DNA, 120 bp, Artificial Sequence
  ENSG00000170260_2 (sequence is synthesized)
agatttcactctggacggtggtggccgctattcaggctgtggagaagaagatggagtcccaggctgcccggctacagagcctggaggggcgcacggggacagccgagaagaagctggctg

SEQ ID NO: 566759 - DNA, 120 bp, Artificial Sequence
  ENSG00000170260_3 (sequence is synthesized)
actgcgagaagatggccgtggagttcgggaaccagctggagggcaagtgggccgtgctggggaccctgctgcaggagtatgggctactgcagaggcggctggagaacgtggagaacctgc

SEQ ID NO: 566760 - DNA, 120 bp, Artificial Sequence
  ENSG00000170260_4 (sequence is synthesized)
tgcgcaacaggaacttctggatcctgcggctgcccccgggcagcaagggggaggcccccaaggtgtccaggtcactggagaatgatggcgtctgtttcaccgagcaggaatgggagaatc

SEQ ID NO: 566761 - DNA, 120 bp, Artificial Sequence
  ENSG00000170260_5 (sequence is synthesized)
tggaggattggcagaaggagctctacagaaacgtgatggagagtaactatgagacactggtctctctgaaggtccttggccagacagagggagaagcggagttgggtacagagatgctgg

SEQ ID NO: 566762 - DNA, 120 bp, Artificial Sequence
  ENSG00000170260_6 (sequence is synthesized)
gtgacttggaagaggaaggtcctggtggtgcccacccagcaggtggggtcatgatcaaacaggagctacagtatacacaggaaggccctgcggatcttcctggagagttctcatgcattg

SEQ ID NO: 566763 - DNA, 120 bp, Artificial Sequence
  ENSG00000170260_7 (sequence is synthesized)
ctgaagagcaggctttcctgagcccagagcagaccgaactctggggtggtcagggcagttctgtcctcttggaaacaggtcctggggactctactctagaggagcctgttggtagtagag

SEQ ID NO: 566764 - DNA, 120 bp, Artificial Sequence
  ENSG00000170260_8 (sequence is synthesized)
ttcctagcagcagcagaactgtgggctgcccgaagcagaaatctcataggcaggtacagctggaccaggaatgtgggcagggcctgaagctgaaaaaggacacttcccgcccctacgaat

SEQ ID NO: 566765 - DNA, 120 bp, Artificial Sequence
  ENSG00000170260_9 (sequence is synthesized)
gttctgagtgtgagatcaccttccgctataagcagcagctggccacacatctgcgcagccactctgggtgggggtcttgtacacctgaggagccagaggagagccttaggcccaggccac

SEQ ID NO: 566766 - DNA, 120 bp, Artificial Sequence
  ENSG00000170260_10 (sequence is synthesized)
ggctgaaaccacagaccaaaaaggccaagctgcatcagtgtgatgtgtgcctgaggagcttcagctgcaaggtgagcctggtgacccatcagcgttgccacctgcaggaggggcccagtg

SEQ ID NO: 566767 - DNA, 120 bp, Artificial Sequence
  ENSG00000170260_11 (sequence is synthesized)
ctgcctggccacatcccttggaggaaaagccggagttccctcatctgtggttactgtggcaagagcttcagtcacccatctgacttggtgcggcaccagcgcatccacacgggtgagcgg

SEQ ID NO: 566768 - DNA, 120 bp, Artificial Sequence
  ENSG00000170260_12 (sequence is synthesized)
ccctacagctgcactgagtgtgagaagagctttgtccagaagcagcacctcctgcagcaccagaagatccaccagcgggagcggggtgggctggccctggagcccggaaggcccaatggc

SEQ ID NO: 566769 - DNA, 120 bp, Artificial Sequence
  ENSG00000170260_13 (sequence is synthesized)
ctgctttaagggtgcagcccctcgcccgtctgggggatggaggggggtggcattggttcccccgaagagacactgcagtcagggactgagttcttcctgagggcagttgtttgtgattgc

SEQ ID NO: 566770 - DNA, 120 bp, Artificial Sequence
  ENSG00000170260_14 (sequence is synthesized)
cttcccttgtcccagtaccaagccaagcccaaaggctgtcctgaaaaccctgtggaagaagagtccaggccaggtcttcatcctgctgccaagtttgctgtttcttggcaccttcaggtc

SEQ ID NO: 566771 - DNA, 120 bp, Artificial Sequence
  ENSG00000170260_15 (sequence is synthesized)
tctggttttctcattcatgccaatgcttgtgggctggggttggcgttctgaccccacagggactggtggctggttccagggctcgtcccggcatttcatgtcttcccacggggttgagtc

SEQ ID NO: 566772 - DNA, 120 bp, Artificial Sequence
  ENSG00000170260_16 (sequence is synthesized)
gggccataggggtgagcagctgcctggaagagttctgggaagtataaccctccattttttcttgttttataatctctttgtttaataataagtagaagaaataatttaaatgaactgctt

SEQ ID NO: 566773 - DNA, 120 bp, Artificial Sequence
  ENSG00000170260_17 (sequence is synthesized)
agccctgctctgaagaaccttttttggaattagattttagttgattttttaaagaatacagcccaacacttgttttttacattttaagagttgtagaagttgttcctaacttggggactg

SEQ ID NO: 566774 - DNA, 120 bp, Artificial Sequence
  ENSG00000170260_18 (sequence is synthesized)
gacctaccctctaggagggagttgttaatggggctcttttagcccactgatgcttacttaggccggagagcaggggacacggtgctaggttccctcgtgcagtgcctggtgctctcaaat

SEQ ID NO: 566775 - DNA, 120 bp, Artificial Sequence
  ENSG00000170260_19 (sequence is synthesized)
tgtctcaaaaggaccaagaggaaaagagtcggaggggtagaccctgcagccctgttgagaagaaagattccagtgaagttgctgatggtatggctgtggtctgggacttgcggtgtctcg

SEQ ID NO: 566776 - DNA, 120 bp, Artificial Sequence
  ENSG00000170260_20 (sequence is synthesized)
gcatacccctctcctcttcccacctcctcctggctatgttctgcagcctcccagagtagaaaactactttgttacttaaggttgttcaccttgtaccagtggttatttgagtttgttcct

SEQ ID NO: 566777 - DNA, 120 bp, Artificial Sequence
  ENSG00000170260_21 (sequence is synthesized)
attacaccaatccttacttgaggtggttcggattacagtttccaaatgcattctgggattgcctattccagagagggtacagaaaaagcacacagatggcttgtctcaggagtgttgaat

SEQ ID NO: 566778 - DNA, 120 bp, Artificial Sequence
  ENSG00000170260_22 (sequence is synthesized)
gtgtgccccgctgctgtctggggggatgggagtgggctctggggtcatatgtgaacatccccttggatgatttgcggttgcttagaataaaacttgctactagcaaaagaaaaaaaaaaa

SEQ ID NO: 566779 - DNA, 120 bp, Artificial Sequence
  ENSG00000170260_23 (sequence is synthesized)
gcggagtcggcgcctgctcgggtaaagaggcaccggcgcgctggctcgagggcgcgttggggatggcggagtcccctgccgggggcggggcttcgcggtttggacgccgccggggtcttg

SEQ ID NO: 566780 - DNA, 120 bp, Artificial Sequence
  ENSG00000170260_24 (sequence is synthesized)
ccctcctcttcgcgaccccagtgctctgcccttttttccctccgcttccttctgcagcggggtcggagcctcggcgccgtgcgcccttgcccagaaacttctctgacgcttgctttagca

SEQ ID NO: 566781 - DNA, 120 bp, Artificial Sequence
  ENSG00000170260_25 (sequence is synthesized)
ctgtttcaccgagcaggaatgggagaatctggaggattggcagaaggagctctacagaaacgtgatggagagtaactatgagacactggtctctctgaagtcttgctctattgcccaggc

SEQ ID NO: 566782 - DNA, 72 bp, Artificial Sequence
  ENSG00000170260_26 (sequence is synthesized)
aattacagaggtccttggccagacagagggagaagcggagttgggtacagagatgctgggtgacttggaaga

SEQ ID NO: 566783 - DNA, 120 bp, Artificial Sequence
  ENSG00000170262_0 (sequence is synthesized)
gacccacagacacacttggacgattcctgcagaaatcagtgaggcagtctcctcccaggggcttggcgcctggctcgaggcgaggctgccggcccggacgctgactgcccagtgccacag

SEQ ID NO: 566784 - DNA, 120 bp, Artificial Sequence
  ENSG00000170262_1 (sequence is synthesized)
acatggccaacgggaccaacgcctctgccccatactacagctatgaatactacctggactatctggacctcattcccgtggacgagaagaagctgaaagcccacaaacattccatcgtga

SEQ ID NO: 566785 - DNA, 120 bp, Artificial Sequence
  ENSG00000170262_2 (sequence is synthesized)
tcgcattctgggtgagcctggctgccttcgtggtgctgctcttcctcatcttgctctacatgtcctggtccgcctccccgcagatgaggaacagccccaagcaccaccaaacatgcccct

SEQ ID NO: 566786 - DNA, 120 bp, Artificial Sequence
  ENSG00000170262_3 (sequence is synthesized)
gagccagggagcagaactggccctgaccagccgctacgacaggagagctcctccaccttgcccctcgggggtttccagacccaccccactctcctctgggaactgaccctcaatgggggt

SEQ ID NO: 566787 - DNA, 120 bp, Artificial Sequence
  ENSG00000170262_4 (sequence is synthesized)
cccctcgtcaggagcaagcccagcgagcctccccctggagacaggacctctcaattgcagagctgatgtcagtaaatcgtggccatagctgagtgaactggtgaaatcaagccaacctgg

SEQ ID NO: 566788 - DNA, 120 bp, Artificial Sequence
  ENSG00000170262_5 (sequence is synthesized)
acacatacgttcctcgttcttcttagaggccatttgcatgtagcagaaagggcacctaggtcaagtgcaactagagcaggagcatcctatgcctttgacaaagattgcagtggcccctcg

SEQ ID NO: 566789 - DNA, 120 bp, Artificial Sequence
  ENSG00000170262_6 (sequence is synthesized)
agtgcagaggtcatcccaggtgttgctgagtttattgagcacacctagcctgcttgcttactgcttatatttgctcagggaagagtaggaaaataaaatatatgcaaatcaagaggaaaa

SEQ ID NO: 566790 - DNA, 120 bp, Artificial Sequence
  ENSG00000170262_7 (sequence is synthesized)
ggataatggggaggctatgcaggtgtgtgggctggagggactttgcagatgtgattaaggattgtgagatggaaaaattatccttgattacctgcacggacccagtataatcacaactgt

SEQ ID NO: 566791 - DNA, 120 bp, Artificial Sequence
  ENSG00000170262_8 (sequence is synthesized)
gatgagctttaacacagatgaatctcttctgcattcagaagtgctgcctcaaactcgagctatttcctgtgatgagctccaagcccctagagaggaaggggcggcctgacgaggcactgg

SEQ ID NO: 566792 - DNA, 120 bp, Artificial Sequence
  ENSG00000170262_9 (sequence is synthesized)
atgggcctcatggcctagaagtccccacattccttgcaactctgatgctgggcacctacaggcccgagtttatcatttactgggcagttcaataaagtcctctcaacttttcttgtcaaa

SEQ ID NO: 566793 - DNA, 120 bp, Artificial Sequence
  ENSG00000170264_0 (sequence is synthesized)
atagcaaccggctccctagctaggcgcccccgggttgccaggggccgcaccagctttcccgtcccgggccagcgcaggcgctcaggcctcggaggcggggcgatggccacctcccaccga

SEQ ID NO: 566794 - DNA, 120 bp, Artificial Sequence
  ENSG00000170264_1 (sequence is synthesized)
gtggcgaagctggtggcctccagtctccagaccccggtaaatcccatcactggagcgcgggtcgcccagtacgaacgcgaagaccccttaaaggccctggcggcagcggaggcgatcttg

SEQ ID NO: 566795 - DNA, 120 bp, Artificial Sequence
  ENSG00000170264_2 (sequence is synthesized)
gaggacgaagaggaggagaaagtggctcagcccgctggggcatcggctgatttgaacaccagcttttctggggtggatgaacatgcaccgataagctatgaggactttgtgaactttcct

SEQ ID NO: 566796 - DNA, 120 bp, Artificial Sequence
  ENSG00000170264_3 (sequence is synthesized)
gatattcaccactctaatgaggagtatttcaagaaagtagaagagttgaaggctgcccacatagaaactatggcaaaattagagaaaatgtaccaggataaattacatttaaaggaagtt

SEQ ID NO: 566797 - DNA, 120 bp, Artificial Sequence
  ENSG00000170264_4 (sequence is synthesized)
cagccagtggtcatcagagaagactctcttagtgactcttccagatctgtatcagaaaagaactcctatcaccctgtctcattaatgacatcattttcagagcctgatttaggccagtct

SEQ ID NO: 566798 - DNA, 120 bp, Artificial Sequence
  ENSG00000170264_5 (sequence is synthesized)
tcctccttgtatgtgtcctcctctgaagaggagttacccaacctagaaaaagagtatcctaggaaaaacagaatgatgacctatgctaaggagctcatcaacaatatgtggacagacttt

SEQ ID NO: 566799 - DNA, 120 bp, Artificial Sequence
  ENSG00000170264_6 (sequence is synthesized)
tgtgttgaggattatattcgctgtaaagatactggcttccatgcagctgaaaaaagaaggaagaaacgaaaagaatgggtgcccacaattacagtaccggagccttttcaaatgatgata

SEQ ID NO: 566800 - DNA, 120 bp, Artificial Sequence
  ENSG00000170264_7 (sequence is synthesized)
agagaacagaagaaaaaagaagagtccatgaaatctaaatcagatatcgaaatggtacataaagcgctcaaaaaacaagaagaggatccagagtataagaagaaattccgagccaatcca

SEQ ID NO: 566801 - DNA, 120 bp, Artificial Sequence
  ENSG00000170264_8 (sequence is synthesized)
gttcctgcatctgtctttctccccctttaccatgatttagtcaagcaaaaagaagaacggagaaggtctctgaaggagaaaagcaaagaagctcttttggcctcacaaaagccatttaaa

SEQ ID NO: 566802 - DNA, 120 bp, Artificial Sequence
  ENSG00000170264_9 (sequence is synthesized)
tttatagcaagggaggaacagaagcgagcagcccgggaaaagcagctgagagactttcttaagtataaaaagaaaacaaatcgatttaaagccagacccattcctcgatctacttatggt

SEQ ID NO: 566803 - DNA, 120 bp, Artificial Sequence
  ENSG00000170264_10 (sequence is synthesized)
tcaactaccaatgacaagttaaaagaagaagagctctatcgaaaccttaggacacagctgagagcccaggagcatttacagaactcatctcctctgccttgtaggtcagcttgtggatgc

SEQ ID NO: 566804 - DNA, 120 bp, Artificial Sequence
  ENSG00000170264_11 (sequence is synthesized)
aggaaccccaggtgtcctgaacaggctgtaaagttgaagtgtaaacacaaggttaggtgcccaactcctgattttgaggaccttcctgagagataccagaaacacctctcagaacacaag

SEQ ID NO: 566805 - DNA, 120 bp, Artificial Sequence
  ENSG00000170264_12 (sequence is synthesized)
tctccaaaactcttaacagtgtgtaaaccatttgatcttcatgcatctccacatgcatctattaaaagagaaaaaattttggcagacatcgaagcagatgaagaaaatttaaaagaaaca

SEQ ID NO: 566806 - DNA, 120 bp, Artificial Sequence
  ENSG00000170264_13 (sequence is synthesized)
cgttggccttatttgtctccaaggcgtaagtcaccagtaagatgtgcaggtgtaaaccctgtgccttgtaactgcaaccctcccgtgcccacggtatcttccagaggacgagaacaagcc

SEQ ID NO: 566807 - DNA, 120 bp, Artificial Sequence
  ENSG00000170264_14 (sequence is synthesized)
gtaagaaagagcgaaaaggaaaggatgagagaataccaacgagaactagaagaaagagaagaaaaattaaaaaagaggccactgctatttgaaagagttgctcagaaaaatgcaagaatg

SEQ ID NO: 566808 - DNA, 120 bp, Artificial Sequence
  ENSG00000170264_15 (sequence is synthesized)
gtacttgagtacttcaacaatcaagagacgaaaagtgtcactgaagacaaagaaagctttaatgaagaagaaaaaatagaagaaagagagaatggggaagaaaattattttattgatacc

SEQ ID NO: 566809 - DNA, 120 bp, Artificial Sequence
  ENSG00000170264_16 (sequence is synthesized)
aacagccaggattcttacaaggaaaaagatgaagccaatgaggaaagtgaagaagagaaatctgttgaagaatcacactgaatcatcaaggtctcctctctatgcccttgctgttgtttg

SEQ ID NO: 566810 - DNA, 120 bp, Artificial Sequence
  ENSG00000170264_17 (sequence is synthesized)
cagcgtcagggtgtcagcagccgcatttgtgtttagaacatctgtggggacgcttctgatatgtgcagggctgttgatcaaagtcatctgtagcctgaaaagcctgaatccagctgattg

SEQ ID NO: 566811 - DNA, 120 bp, Artificial Sequence
  ENSG00000170264_18 (sequence is synthesized)
gtcatttgatcagttagagtaaggctttgcctattcagttttaaaaatcattgtgtattatctgtttgcaactatgattttgtatttttaaaaagtgagaaccacagctgtcacaaactg

SEQ ID NO: 566812 - DNA, 120 bp, Artificial Sequence
  ENSG00000170264_19 (sequence is synthesized)
attagttataaaaatatacattatttcattaattttactggaaaaaatggcttagtattgaaaggagagagaagtattggtctttggtggtttactttttaaaaattttggaaagtgtga

SEQ ID NO: 566813 - DNA, 120 bp, Artificial Sequence
  ENSG00000170264_20 (sequence is synthesized)
atcaataactatttttaattatactatttgcccattctttttctctgcagtgcatttcacagaataaatcctctaacttgttttgctgctctgagccatttttaaaagtatagaaaaaac

SEQ ID NO: 566814 - DNA, 120 bp, Artificial Sequence
  ENSG00000170264_21 (sequence is synthesized)
agactccgtctccaaaaaaaaaaaaaaagtatagaaaaaaatggatacttgcaaatttacatttatttttgcactgagagtttactgttaaattgtctacaccatcatccctttttcttt

SEQ ID NO: 566815 - DNA, 120 bp, Artificial Sequence
  ENSG00000170264_22 (sequence is synthesized)
ttgtctacaccatcatccctttttctttttatccttagttctagtccaaattatttttgatttgtaaattattaggaaagtttttatactagtttttttaaccctatgtattattacaga

SEQ ID NO: 566816 - DNA, 120 bp, Artificial Sequence
  ENSG00000170264_23 (sequence is synthesized)
tggaagtaattatggcatgtgtgagttataatctaaattaggggcaagtatccctttttttatatgatgaaattgtgcataataacttggctagggcaagtctccaaagtaattcagatt

SEQ ID NO: 566817 - DNA, 120 bp, Artificial Sequence
  ENSG00000170264_24 (sequence is synthesized)
taactcttcactgctagacccagttgtgttcaactttttacatattattgccaacacactttatctctctgtgtacagtgttaatctgattttataaatctatatttttttctttaagca

SEQ ID NO: 566818 - DNA, 120 bp, Artificial Sequence
  ENSG00000170264_25 (sequence is synthesized)
aatttttgttttaaaatttgaagccaatcataaagataatatagcataagacattttcttttctaaaaacaatcagcatcattttaaaaggatgaactaatacaggtgtatgtaatagca

SEQ ID NO: 566819 - DNA, 120 bp, Artificial Sequence
  ENSG00000170264_26 (sequence is synthesized)
gtgtttccaaactggcaatttatgctttaaatttaaaaataaggtcatttttctccatcaggggcaaatgtttacttgtaattttcttcctacagttcgtgttaaattactttttactat

SEQ ID NO: 566820 - DNA, 120 bp, Artificial Sequence
  ENSG00000170264_27 (sequence is synthesized)
tattatattgtaaactccttgggatttggcaccatttaaaaattcatctttgtattcccttaatatttggaacagtattgtacatatggtaggtacttaataaaggtttgaatgagtgtg

SEQ ID NO: 566821 - DNA, 120 bp, Artificial Sequence
  ENSG00000170264_28 (sequence is synthesized)
attttcttggttttatacacttataaatgagacaagaggactttcattcatcttttcagggcagtttgaagtcccttaaaatatttatgccttgaggatttcagaaattaaagtgtccag

SEQ ID NO: 566822 - DNA, 120 bp, Artificial Sequence
  ENSG00000170264_29 (sequence is synthesized)
actattcctagagcataatatgtgtgatctcagaacctaggattttattctgcattccatgagaattaaccggtatagaagaggaatcgaggtaaactgtgaactgtgcttataatttct

SEQ ID NO: 566823 - DNA, 120 bp, Artificial Sequence
  ENSG00000170264_30 (sequence is synthesized)
aggcatgaaccactgtgcctggccaattctgttgatttttcgagtgaaaactgcatactggattcagacactgctactaaaacgaactgctgctgcccagatgaataaccgttgctagac

SEQ ID NO: 566824 - DNA, 120 bp, Artificial Sequence
  ENSG00000170264_31 (sequence is synthesized)
aacgaactgctgctgcccagatgaataaccgttgctagactgacacaagccgacaggaagcagtcagagggctaacagaaaggagctgatttgaacaccagcttttctggggtggatgaa

SEQ ID NO: 566825 - DNA, 82 bp, Artificial Sequence
  ENSG00000170264_32 (sequence is synthesized)
atataactgttgagatacattattgttgtttgtgttggcttcatcatatcagccaatgagtaattttgcttaaatccgagca

SEQ ID NO: 566826 - DNA, 120 bp, Artificial Sequence
  ENSG00000170264_33 (sequence is synthesized)
agttttggtccaacctgtgcaacgtagcaagacctcatctcaaaaaaataatctgaacattgaatctttttgatgaagcacataagtttgataaataacatgccaatccagtagttcgta

SEQ ID NO: 566827 - DNA, 120 bp, Artificial Sequence
  ENSG00000170264_34 (sequence is synthesized)
aaataattttgcaagctgttttctaatggctggtcttttttcagtacaaacttggttagatattaagatgaggcttcatgatatcacttggaggtctttgaagaattaaaaaaatgaaac

SEQ ID NO: 566828 - DNA, 120 bp, Artificial Sequence
  ENSG00000170264_35 (sequence is synthesized)
aagaattgcagaaactcctgacaacccgggctaaggcttatgactcacatcaaagtttagctcaaatatctaaatccagagtaaaatgtctcaggccaggcgcaatggctcatgcctgta

SEQ ID NO: 566829 - DNA, 120 bp, Artificial Sequence
  ENSG00000170265_0 (sequence is synthesized)
cttcttctccctggccgacccgagcggggaacagcactcccaggatgcagtttgtgtcaacacggccgcagcctcagcagctgggcatccagggcctggggctggacagcgggagctgga

SEQ ID NO: 566830 - DNA, 120 bp, Artificial Sequence
  ENSG00000170265_1 (sequence is synthesized)
gctgggcccaggctctgcccccggaggaggtctgccaccaggagccggcgctgcgcggggaaatggccgagggaatgccgcccatgcaggctcaagaatgggacatggacgcccggcggc

SEQ ID NO: 566831 - DNA, 120 bp, Artificial Sequence
  ENSG00000170265_2 (sequence is synthesized)
caatgccttttcagttcccaccctttccagatagggcacctgtcttccccgaccgcatgatgcgagagccccagttgcccacagcagagatctcactctggactgtggtggctgccattc

SEQ ID NO: 566832 - DNA, 120 bp, Artificial Sequence
  ENSG00000170265_3 (sequence is synthesized)
aggctgtggagaggaaggtggatgcccaggccagccagctgctgaacctggaggggcgcacggggacagccgagaagaagctggccgactgtgaaaagacggccgtggaatttgggaacc

SEQ ID NO: 566833 - DNA, 120 bp, Artificial Sequence
  ENSG00000170265_4 (sequence is synthesized)
acatggagagcaagtgggccgtgctggggaccctgctgcaggagtacgggctgctgcagaggcggctggagaacttggagaacttgctgcgcaacaggaacttctgggtcctgcggctgc

SEQ ID NO: 566834 - DNA, 120 bp, Artificial Sequence
  ENSG00000170265_5 (sequence is synthesized)
ccccgggcagcaagggggaggcccccaaggttccagtgacttttgtcgacattgctgtgtacttctccgaagacgagtggaagaacttggacgaatggcagaaggagctttataacaacc

SEQ ID NO: 566835 - DNA, 120 bp, Artificial Sequence
  ENSG00000170265_6 (sequence is synthesized)
ttgttaaggagaactacaaaaccctcatgtccctggacgcggagggctcagtccccaagccagatgctccagtccaggctgagcccagggaagaaccttgtgtgtgggagcagcgccacc

SEQ ID NO: 566836 - DNA, 120 bp, Artificial Sequence
  ENSG00000170265_7 (sequence is synthesized)
ccgaagagagagaaatcccaatggatcccgaagcaggagcagagcccctggtgcctgcgcaggatgcgtcctcccaggtgaagcgtgaggacaccctgtgtgtccggggtcagcggggcc

SEQ ID NO: 566837 - DNA, 120 bp, Artificial Sequence
  ENSG00000170265_8 (sequence is synthesized)
tggaggaaagagccatccctacggaatccattaccgactccccaatttctgcccaggacctcttgtcccggattaaacaggaggagcatcagtgcgtgtgggatcagcaggatttggcag

SEQ ID NO: 566838 - DNA, 120 bp, Artificial Sequence
  ENSG00000170265_9 (sequence is synthesized)
acagagatattcccacggatcccaattcagagtctctcatctcagcacatgacattttgtcatggatcaagcaggaggagcagccatacccatggggaccacgcgactcaatggacggag

SEQ ID NO: 566839 - DNA, 120 bp, Artificial Sequence
  ENSG00000170265_10 (sequence is synthesized)
agcttggattagactctggccctagtgacagcctgctgatggtgaagaacccacccccggccccgccacagccccagccccagccccagccaccgcagccgcagctgcagtcgcagcccc

SEQ ID NO: 566840 - DNA, 120 bp, Artificial Sequence
  ENSG00000170265_11 (sequence is synthesized)
agtcgcagccccagccccagagcctgccccccatcgcggtggccgagaacccgggcggccccccgagccgagggctgctggacgacggtttccaggtgctgcccggggagcgtggctccg

SEQ ID NO: 566841 - DNA, 80 bp, Artificial Sequence
  ENSG00000170265_12 (sequence is synthesized)
cggaggcggggacgggggcaggcggcggctgtggcagctgctgccctggcgggctgcggcggagcctcctcctgcacggc

SEQ ID NO: 566842 - DNA, 120 bp, Artificial Sequence
  ENSG00000170265_13 (sequence is synthesized)
ggagcctcctcctgcacggcgcccgcagcaagccctactcgtgccccgagtgcggcaagagcttcggcgtgcgcaagagcctcatcatccaccaccgcagccacaccaaggagcggccct

SEQ ID NO: 566843 - DNA, 120 bp, Artificial Sequence
  ENSG00000170265_14 (sequence is synthesized)
acgagtgcgctgagtgcgagaagagcttcaactgccactcgggcctcatccgccaccagatgacgcaccgcggcgagcggccctacaagtgctcggagtgcgagaagacctacagccgta

SEQ ID NO: 566844 - DNA, 120 bp, Artificial Sequence
  ENSG00000170265_15 (sequence is synthesized)
aatgtgcactgtgcggcaagagcttcatccgcaagcagaacctgctcaagcaccagcgcatccacacgggcgagcgcccctacacgtgcggcgagtgcggcaagagcttccgctacaagg

SEQ ID NO: 566845 - DNA, 120 bp, Artificial Sequence
  ENSG00000170265_16 (sequence is synthesized)
ctacaaggagtcgctcaaggaccacctgcgcgtgcacagcggcggcccgggccccggcgccccacggcagctcccgccgcctcctgagcgagactagggctgggctgggggagggcaggg

SEQ ID NO: 566846 - DNA, 120 bp, Artificial Sequence
  ENSG00000170265_17 (sequence is synthesized)
agtggatcgggggcggcctgagcaccaaccaccttgccgggtgtcctcagccaccgtctggaaatcggcaacaggcattgcactccggttgggggtcccccagggtggggcagggatccc

SEQ ID NO: 566847 - DNA, 120 bp, Artificial Sequence
  ENSG00000170265_18 (sequence is synthesized)
ccagatctgtctggtctgaatggacgcccagctcatctagggtggacccagctgctggggaagagccagggggaccgcgaggagccgagcgtcctcgggcaccgccctcacacctcctcg

SEQ ID NO: 566848 - DNA, 120 bp, Artificial Sequence
  ENSG00000170265_19 (sequence is synthesized)
agtgccctgggaccactgggccacagatggtcatcaggggaagccaccagggagtcccgaagcccttctgagatcaggaaatcaggtcccaaggttaggagacgccctgaaaaaaagcga

SEQ ID NO: 566849 - DNA, 120 bp, Artificial Sequence
  ENSG00000170265_20 (sequence is synthesized)
aggccgagggatgtgctaagggtaacaccttcatgatgacaacactgcctcgcgtttcaatagcgctttatacttttttaagtgttttctatccgttatccatttcacccttggcctatc

SEQ ID NO: 566850 - DNA, 120 bp, Artificial Sequence
  ENSG00000170265_21 (sequence is synthesized)
cctctcagataggtggggtaggattttcctggtgaccgagtaaagtgagaggcaggtgagacggttcacccaatcacacgggaaggggcgcgcgctgcccaaccgcgctctccgcctacc

SEQ ID NO: 566851 - DNA, 120 bp, Artificial Sequence
  ENSG00000170265_22 (sequence is synthesized)
tccgctgctcgggaagctgctggcctggccctcctggtctctcttcctttcctggtctctcttcctttccttgctctcacccacggataaaaccagaagcgacaggaggccagctcctgg

SEQ ID NO: 566852 - DNA, 120 bp, Artificial Sequence
  ENSG00000170265_23 (sequence is synthesized)
ggttcctgggagccgggaacagattggctacggaacgccccaggttgtacattcagagggctctttctccatgggagctcctggtgccgcctcggccccagcctgtccccagcccctcaa

SEQ ID NO: 566853 - DNA, 120 bp, Artificial Sequence
  ENSG00000170265_24 (sequence is synthesized)
tctggtgcagcagcatcttgtcactgcacaacagtggcctggtcccccacaggcagttagggccccaggtcagacctcaccatgatgatttgttccagttctcccagggcagaggggcga

SEQ ID NO: 566854 - DNA, 120 bp, Artificial Sequence
  ENSG00000170265_25 (sequence is synthesized)
gggagaggcttttgctgtgagagtagccgtcacgtgtctcttcccagcagcgccgggcaagtgggtgctagagtctgagcctcaggctctcctgccctgggcctcccaattggtgctatc

SEQ ID NO: 566855 - DNA, 120 bp, Artificial Sequence
  ENSG00000170265_26 (sequence is synthesized)
tgttactgcccgtgctcacggacatggatacagaccctgctgtgctccacaccctgcaggcgcctcgggaagcgcccaaaggattccccttcacgttggtgcacctgctccatagctccg

SEQ ID NO: 566856 - DNA, 120 bp, Artificial Sequence
  ENSG00000170265_27 (sequence is synthesized)
ggcgctgcgtcccgaggggccacagtctccatttcagcgtcttgcatggcctggcaccgggtggggtggtatgccccaggacccttgtttgtgtcaaaaatgactttccctgcccttgcc

SEQ ID NO: 566857 - DNA, 120 bp, Artificial Sequence
  ENSG00000170265_28 (sequence is synthesized)
gtgggtccggcgttcctcccagccgggatcacagtgggcagccggcacccggcaccactttggcgagcgtcctgcttccgccctcgccctcatctacgctgctccgctttcctcagaccc

SEQ ID NO: 566858 - DNA, 120 bp, Artificial Sequence
  ENSG00000170265_29 (sequence is synthesized)
ctttttgccgtgcaaagggaattcttgacattaaataaaaggtatccagattgcagactgcatgttcacagagctgggggttctccagcttgcctacagtaaagcctcaatgaactggaa

SEQ ID NO: 566859 - DNA, 120 bp, Artificial Sequence
  ENSG00000170266_0 (sequence is synthesized)
agtcaagtgacgcgaagcggccggcctgggcgccgactgcagagccgggaggctggtggtcatgccggggttcctggttcgcatcctccctctgttgctggttctgctgcttctgggccc

SEQ ID NO: 566860 - DNA, 120 bp, Artificial Sequence
  ENSG00000170266_1 (sequence is synthesized)
tacgcgcggcttgcgcaatgccacccagaggatgtttgaaattgactatagccgggactccttcctcaaggatggccagccatttcgctacatctcaggaagcattcactactcccgtgt

SEQ ID NO: 566861 - DNA, 120 bp, Artificial Sequence
  ENSG00000170266_2 (sequence is synthesized)
gccccgcttctactggaaggaccggctgctgaagatgaagatggctgggctgaacgccatccagacgtatgtgccctggaactttcatgagccctggccaggacagtaccagttttctga

SEQ ID NO: 566862 - DNA, 120 bp, Artificial Sequence
  ENSG00000170266_3 (sequence is synthesized)
ggaccatgatgtggaatattttcttcggctggctcatgagctgggactgctggttatcctgaggcccgggccctacatctgtgcagagtgggaaatgggaggattacctgcttggctgct

SEQ ID NO: 566863 - DNA, 120 bp, Artificial Sequence
  ENSG00000170266_4 (sequence is synthesized)
agagaaagagtctattcttctccgctcctccgacccagattacctggcagctgtggacaagtggttgggagtccttctgcccaagatgaagcctctcctctatcagaatggagggccagt

SEQ ID NO: 566864 - DNA, 120 bp, Artificial Sequence
  ENSG00000170266_5 (sequence is synthesized)
tataacagtgcaggttgaaaatgaatatggcagctactttgcctgtgattttgactacctgcgcttcctgcagaagcgctttcgccaccatctgggggatgatgtggttctgtttaccac

SEQ ID NO: 566865 - DNA, 120 bp, Artificial Sequence
  ENSG00000170266_6 (sequence is synthesized)
tgatggagcacataaaacattcctgaaatgtggggccctgcagggcctctacaccacggtggactttggaacaggcagcaacatcacagatgctttcctaagccagaggaagtgtgagcc

SEQ ID NO: 566866 - DNA, 120 bp, Artificial Sequence
  ENSG00000170266_7 (sequence is synthesized)
caaaggacccttgatcaattctgaattctatactggctggctagatcactggggccaacctcactccacaatcaagaccgaagcagtggcttcctccctctatgatatacttgcccgtgg

SEQ ID NO: 566867 - DNA, 120 bp, Artificial Sequence
  ENSG00000170266_8 (sequence is synthesized)
ggcgagtgtgaacttgtacatgtttataggtgggaccaattttgcctattggaatggggccaactcaccctatgcagcacagcccaccagctacgactatgatgccccactgagtgaggc

SEQ ID NO: 566868 - DNA, 120 bp, Artificial Sequence
  ENSG00000170266_9 (sequence is synthesized)
tggggacctcactgagaagtattttgctctgcgaaacatcatccagaagtttgaaaaagtaccagaaggtcctatccctccatctacaccaaagtttgcatatggaaaggtcactttgga

SEQ ID NO: 566869 - DNA, 120 bp, Artificial Sequence
  ENSG00000170266_10 (sequence is synthesized)
gttaaagacagtgggagcagctctggacattctgtgtccctctgggcccatcaaaagcctttatcccttgacatttatccaggtgaaacagcattatgggtttgtgctgtaccggacaac

SEQ ID NO: 566870 - DNA, 120 bp, Artificial Sequence
  ENSG00000170266_11 (sequence is synthesized)
acttcctcaagattgcagcaacccagcacctctctcttcacccctcaatggagtccacgatcgagcatatgttgctgtggatgggatcccccagggagtccttgagcgaaacaatgtgat

SEQ ID NO: 566871 - DNA, 120 bp, Artificial Sequence
  ENSG00000170266_12 (sequence is synthesized)
cactctgaacataacagggaaagctggagccactctggaccttctggtagagaacatgggacgtgtgaactatggtgcatatatcaacgattttaagggtttggtttctaacctgactct

SEQ ID NO: 566872 - DNA, 120 bp, Artificial Sequence
  ENSG00000170266_13 (sequence is synthesized)
cagttccaatatcctcacggactggacgatctttccactggacactgaggatgcagtgtgcagccacctggggggctggggacaccgtgacagtggccaccatgatgaagcctgggccca

SEQ ID NO: 566873 - DNA, 120 bp, Artificial Sequence
  ENSG00000170266_14 (sequence is synthesized)
caactcatccaactacacgctcccggccttttatatggggaacttctccattcccagtgggatcccagacttgccccaggacacctttatccagtttcctggatggaccaagggccaggt

SEQ ID NO: 566874 - DNA, 120 bp, Artificial Sequence
  ENSG00000170266_15 (sequence is synthesized)
ctggattaatggctttaaccttggccgctattggccagcccggggccctcagttgaccttgtttgtgccccagcacatcctgatgacctcggccccaaacaccatcaccgtgctggaact

SEQ ID NO: 566875 - DNA, 120 bp, Artificial Sequence
  ENSG00000170266_16 (sequence is synthesized)
ggagtgggcaccctgcagcagtgatgatccagaactatgtgctgtgacgttcgtggacaggccagttattggctcatctgtgacctacgatcatccctccaaacctgttgaaaaaagact

SEQ ID NO: 566876 - DNA, 120 bp, Artificial Sequence
  ENSG00000170266_17 (sequence is synthesized)
catgcccccacccccgcaaaaaaacaaagattcatggctggaccatgtatgatgatgaaagcctgtgtctttgagggattctaccctgaacatacctcacagatcctccctgtcatgcca

SEQ ID NO: 566877 - DNA, 120 bp, Artificial Sequence
  ENSG00000170266_18 (sequence is synthesized)
catttcactgattggaatgtggaaatggaaaaggaatttaggatgtgcattttcacctgaggtttccctgcatccctgcagtgccaaagccccaccttcagggaccacctggaatgtgtg

SEQ ID NO: 566878 - DNA, 120 bp, Artificial Sequence
  ENSG00000170266_19 (sequence is synthesized)
aggggctgacagcacagtaacgtgcatacatatctgcagggctggaatggaagctttaaaggtggtagtgatttttattttggaagaatcatgttacctttttgttaaataaaatttgta

SEQ ID NO: 566879 - DNA, 120 bp, Artificial Sequence
  ENSG00000170266_20 (sequence is synthesized)
ctcaaatgatgatgtcactgtttttaatgtgcaggtattgaattatatggtctgacttaaatcataactagacttgagtgggctgaataaaccacttcactaacttgaagttcaaaagga

SEQ ID NO: 566880 - DNA, 120 bp, Artificial Sequence
  ENSG00000170266_21 (sequence is synthesized)
gggcgggccgggcggggcgcgcgtccttccaggcagctcggtcgcttgtgcgttccgctccggccgccctttgcgcttggatccacttccccatctgtaacgaggtgttgagacgagaat

SEQ ID NO: 566881 - DNA, 120 bp, Artificial Sequence
  ENSG00000170266_22 (sequence is synthesized)
gaagagtcgcccagtattgtgtgagaggtagagtcacagattggagaagctttggagagagacagaacaaaacttgagtgttgactccagtactcagtgggcaagtttgaaaaagtacca

SEQ ID NO: 566882 - DNA, 120 bp, Artificial Sequence
  ENSG00000170266_23 (sequence is synthesized)
gagtctttgaccttgctttcaaataataaattttatgaatatgtttctgaaggtttaccaactttttttcttttctctctttttctactctggtttatagtttgaaaaagtaccagaagg

SEQ ID NO: 566883 - DNA, 120 bp, Artificial Sequence
  ENSG00000170266_24 (sequence is synthesized)
cccattctgaattcaggggccaaaatggtaagcaaatgcatcagatcccaggtaaatgaaccatgaatttccaggctctctttagcttgaagtgctgcgtggtgggctgatcatgcctat

SEQ ID NO: 566884 - DNA, 120 bp, Artificial Sequence
  ENSG00000170266_25 (sequence is synthesized)
attttttgccccacttcttctcactcatacaggaggtagcccaacctgcttcaacataattctgtacaagttataaattgagttcactgaccaatctaattaatctttattactaggcat

SEQ ID NO: 566885 - DNA, 120 bp, Artificial Sequence
  ENSG00000170266_26 (sequence is synthesized)
caatatgttggctgtgatggacctgcccgcatgctacatgacatcattgaacttgtgcagcaatttgggagaccatatatttcccaaggcatcatcacaggtccagatgaacacacgacc

SEQ ID NO: 566886 - DNA, 120 bp, Artificial Sequence
  ENSG00000170266_27 (sequence is synthesized)
atcccaggagcagctggcaatggtgctggtgggcaggctgatggagggggcccaggccacatctcaaacccagtcactgtgcttccagcttctgctctccttccactggccatccttgaa

SEQ ID NO: 566887 - DNA, 120 bp, Artificial Sequence
  ENSG00000170266_28 (sequence is synthesized)
gaggttgtcacagccacctgatggaaacttcttgatgtaattgggtttctgcctgaacagctggtctatgaggcttccagtttgaaaaagtaccagaaggtcctatccctccatctacac

SEQ ID NO: 566888 - DNA, 120 bp, Artificial Sequence
  ENSG00000170266_29 (sequence is synthesized)
ctatgatgccccactgagtgaggctggggacctcactgagaagtattttgctctgcgaaacatcatccagaaggccagattatctttccaaaagttcaggtgagaggtagggtgatggga

SEQ ID NO: 566889 - DNA, 120 bp, Artificial Sequence
  ENSG00000170266_30 (sequence is synthesized)
cttgagactatagcccctattaaggcagcatggatatatgggagcccctatccttgagacacagctaatgtacttcaatatcaaaagaggtaaagctaagctctggtttctttatttaat

SEQ ID NO: 566890 - DNA, 120 bp, Artificial Sequence
  ENSG00000170266_31 (sequence is synthesized)
ctgggcgccgactgcagagccgggaggctggtggtcatgccggggttcctggttcgcatcctccctctgttgctggttctgctgcttctgggccctacgcgcggcttgcgcgttgaaaat

SEQ ID NO: 566891 - DNA, 120 bp, Artificial Sequence
  ENSG00000170266_32 (sequence is synthesized)
tgtagaaattaatcaagtggtagtgaggaccttgataattggagtggattctgggattcccaaagatgtgacttcctggccttaagttggagctatatacaattccatgaatgaaacagc

SEQ ID NO: 566892 - DNA, 120 bp, Artificial Sequence
  ENSG00000170266_33 (sequence is synthesized)
agatgtgacttcctggccttaagttggagctatatacaattccatgaatgaaacagcactgtttatacctcctggtctctgcaccctctgcctttattcacctggaaatgaagacacacc

SEQ ID NO: 566893 - DNA, 120 bp, Artificial Sequence
  ENSG00000170266_34 (sequence is synthesized)
cgcggcttgcgcgcagcaacatcacagatgctttcctaagccagaggaagtgtgagcccaaaggacccttgaccaaggcttggcagggcaatgcccaagaaaaacatgaagtgtttgagg

SEQ ID NO: 566894 - DNA, 120 bp, Artificial Sequence
  ENSG00000170266_35 (sequence is synthesized)
gcttgtgcgttccgctccggccgccctttgcgcttggatccacttccccatctgtaacgaggtgttgagacgagtctcgattccttccttgggcttttcatctgccacggcaagcgccta

SEQ ID NO: 566895 - DNA, 120 bp, Artificial Sequence
  ENSG00000170270_0 (sequence is synthesized)
gtcgtgttctggaagcttagcggtcaccatggagctgctgggagagtacgtcgggcaggaagggaagccgcagaagctgcgggtgtcctgtgaggcgccgggtgacggcgaccctttcca

SEQ ID NO: 566896 - DNA, 120 bp, Artificial Sequence
  ENSG00000170270_1 (sequence is synthesized)
gggcctgttgtctggcgtggcccagatgaaggacatggtaacggaattattcgaccctctggtacagggggaagtgcagcaccgggtggcggcggctccagacgaggacttggacggtga

SEQ ID NO: 566897 - DNA, 120 bp, Artificial Sequence
  ENSG00000170270_2 (sequence is synthesized)
tgatgaagatgatgcagaagatgaaaataacattgataacagaactaacttcgatggaccatctgcaaaacggccaaaaacaccgtcttaacaatagccttcatgacatttaaaagatgg

SEQ ID NO: 566898 - DNA, 120 bp, Artificial Sequence
  ENSG00000170270_3 (sequence is synthesized)
ctgttgtatccttattgtcacactaggacatttaaggaagacttatgctctaatttggaaaaagcatttgtgttgttctcctgggacaattttgtcaaagagaaaactggtttttctgtt

SEQ ID NO: 566899 - DNA, 120 bp, Artificial Sequence
  ENSG00000170270_4 (sequence is synthesized)
agaaataaatttcagaccctggaaggaaaatagaacacttcataatgtataaaatcctctaagttggcaactgaatttttatcattgttttctatttttaaaataatcattgatttgtgt

SEQ ID NO: 566900 - DNA, 120 bp, Artificial Sequence
  ENSG00000170270_5 (sequence is synthesized)
gatgtctacatcttttaacttctggttctgttataaagagtacatgtcacggttcataggcagtaacatttcagagaactgacatgaacaagtagtgaaaattgggcattaaatataaaa

SEQ ID NO: 566901 - DNA, 120 bp, Artificial Sequence
  ENSG00000170270_6 (sequence is synthesized)
ataacagttcttcataaacagaaggaaaataaggaaatagaaataccgacgagaaaggagagtccttgaaagagacccaaggaaaccctgaattcatacccacgtcaaatatgcacatat

SEQ ID NO: 566902 - DNA, 120 bp, Artificial Sequence
  ENSG00000170270_7 (sequence is synthesized)
cctgagatgatgccactttgatgaatgtgcattagtctgatttatcatgtaccttaagagagccagatggggtatgtttttgtgctgtgatatggtatttatacaggtacaaatataagg

SEQ ID NO: 566903 - DNA, 120 bp, Artificial Sequence
  ENSG00000170270_8 (sequence is synthesized)
ccttaagtaaacaatctgcattgattacaatttggatatttcctctcctcctgtagccatactttgattttgctttaaaaagattattgaatccttttaaaaatatatattcctaaaata

SEQ ID NO: 566904 - DNA, 120 bp, Artificial Sequence
  ENSG00000170271_0 (sequence is synthesized)
aaggttagcctgcagcagagccgcagcagcaacagccaccaaagcgggggctgaaagggaagagaacttagatttgacctgtgcaaggacctcagcagcttggacacagcccactgcaga

SEQ ID NO: 566905 - DNA, 120 bp, Artificial Sequence
  ENSG00000170271_1 (sequence is synthesized)
gatgaaaggagaagctggacatatgctacacaatgaaaagtcaaagcaggagggacacatctggggctctatgaggaggacagctttcatcctgggctctggacttctctcatttgtggc

SEQ ID NO: 566906 - DNA, 120 bp, Artificial Sequence
  ENSG00000170271_2 (sequence is synthesized)
cttctggaactcagtgacatggcatcttcagagattttggggtgcttctggctacttttggcaagcccagtgggagaggctgctgactacatttgaagggaaggagtggatcctcttctt

SEQ ID NO: 566907 - DNA, 120 bp, Artificial Sequence
  ENSG00000170271_3 (sequence is synthesized)
tataggtgccatccaagtgccttgtctcttcttctggagcttcaatgggcttctattggtggttgacacaacaggaaaacctaacttcatctctcgctaccgaattcaggtcggcaagaa

SEQ ID NO: 566908 - DNA, 120 bp, Artificial Sequence
  ENSG00000170271_4 (sequence is synthesized)
tgaacctgtggatcctgtgaaactgcgccagtctatccgcacagttcttttcaaccagtgcatgatatctttccccatggtggtcttcctctatcccttcctcaaatggtggagagaccc

SEQ ID NO: 566909 - DNA, 120 bp, Artificial Sequence
  ENSG00000170271_5 (sequence is synthesized)
ctgccgccgtgagctacccaccttccactggttcctcctggagctggccatcttcacgctgatcgaggaagtcttgttctactattcacaccggctccttcaccacccaacattctacaa

SEQ ID NO: 566910 - DNA, 120 bp, Artificial Sequence
  ENSG00000170271_6 (sequence is synthesized)
gaaaatccacaagaaacaccatgagtggacagctcccattggcgtgatctctctctatgcccaccctatagagcatgcagtctccaacatgctaccggtgatagtgggcccattagtaat

SEQ ID NO: 566911 - DNA, 120 bp, Artificial Sequence
  ENSG00000170271_7 (sequence is synthesized)
gggctcccacttgtcctccatcaccatgtggttttccttggccctcatcatcaccaccatctcccactgtggctaccaccttcccttcctgccttcgcctgaattccacgactaccacca

SEQ ID NO: 566912 - DNA, 120 bp, Artificial Sequence
  ENSG00000170271_8 (sequence is synthesized)
tctcaagttcaaccagtgctatggggtgctgggtgtgctggaccacctccatgggactgacaccatgttcaagcagaccaaggcctacgagagacatgtcctcctgctgggcttcacccc

SEQ ID NO: 566913 - DNA, 120 bp, Artificial Sequence
  ENSG00000170271_9 (sequence is synthesized)
gctctctgagagcatcccagactccccaaagaggatggagtgagagacagcctaagtgtcatcctggctgtccctcagccatgggatgcagacacggcttcctgattgcacctaacaatt

SEQ ID NO: 566914 - DNA, 120 bp, Artificial Sequence
  ENSG00000170271_10 (sequence is synthesized)
tgcctccttcggccacacgccctaatgatggcaccaccagggtagagggaaggtcggcttcccggaaaagcagggccaaggatgaggctttcttcaaactactgcccttgatgtccctca

SEQ ID NO: 566915 - DNA, 120 bp, Artificial Sequence
  ENSG00000170271_11 (sequence is synthesized)
atgggatcaggagttagcttaagaaaaaggaaaacacagctccccagactggaggctggtcagagggaggagacccctggtcctctgctgtggaaggagaggggttcagccccagataac

SEQ ID NO: 566916 - DNA, 120 bp, Artificial Sequence
  ENSG00000170271_12 (sequence is synthesized)
gctccagcgagagctccttctgggaccagagggtgggacggccaggtatcactttgccccttcctgccccaaaaggctttcacatacccgactcaggccagagccaagacaccctggcaa

SEQ ID NO: 566917 - DNA, 120 bp, Artificial Sequence
  ENSG00000170271_13 (sequence is synthesized)
atcattataggtctcaattcatgacataccagatgccagtcgccacttcacccaacacacacacaaacatacacacaccaaacactctgagtgagtggtaaaggccccgttttaactctg

SEQ ID NO: 566918 - DNA, 120 bp, Artificial Sequence
  ENSG00000170271_14 (sequence is synthesized)
gcccaccgcaaacaaaaggtttccctctgtgggggagaaaaagaaatccaggagctcctccctggattaaaaccaacgaggtgcagaccaaactttaacacctttagccttatgtggaaa

SEQ ID NO: 566919 - DNA, 120 bp, Artificial Sequence
  ENSG00000170271_15 (sequence is synthesized)
ccaaaaaccaactgctgggaaactgtgaaaagcccttttacccacaaggggaggggtcaaagttgctgccctttggggacacccgagacccctaattagcctatctgaatgaggaccaaa

SEQ ID NO: 566920 - DNA, 120 bp, Artificial Sequence
  ENSG00000170271_16 (sequence is synthesized)
ggttagagccctctttctccccgaagaaagagcccggaaaaacatggcagagcaaagagcaaaatcctttctcccccgaatgctttaccagtttctcagcaacatttattcaagatgatt

SEQ ID NO: 566921 - DNA, 120 bp, Artificial Sequence
  ENSG00000170271_17 (sequence is synthesized)
tttaccaggaaccttatcaaaggcaaaaccacagctgcttgggttgaagtccccatcctggcctcctctcagccgccagacatggccaggaaccctgtggttcccaagaacaatttaaag

SEQ ID NO: 566922 - DNA, 120 bp, Artificial Sequence
  ENSG00000170271_18 (sequence is synthesized)
atcactctttgatttgaaagaccaccattatcattttactaaattcttatatatacttgtgccttttccaactttcagttctcttaagaaaaacatccactgtagctttataaaatacct

SEQ ID NO: 566923 - DNA, 120 bp, Artificial Sequence
  ENSG00000170271_19 (sequence is synthesized)
tagtatcagctaggtccaagtctccaggcaggactatcaaaatggactccttcttcctatcagctctagaaccccagaggacttgcccagtaggccagctgagcacttaccaggcagcat

SEQ ID NO: 566924 - DNA, 120 bp, Artificial Sequence
  ENSG00000170271_20 (sequence is synthesized)
ctccctggccttccacagtctcgcctgtctgtctctggccttggtggacctggctccctccctaggaggcttttgccctcagcttgaatacagttcctggtgcatcaaagctgtaagttc

SEQ ID NO: 566925 - DNA, 120 bp, Artificial Sequence
  ENSG00000170271_21 (sequence is synthesized)
tcagctgctggcctgcactcatcacctcttcctacaaataaacatttggaaaaaagtccatcttcaatatgcttaaagagaagggtaggagataaggagaaagaacagatacggtttttt

SEQ ID NO: 566926 - DNA, 120 bp, Artificial Sequence
  ENSG00000170271_22 (sequence is synthesized)
tcccctttaaggcctttagattttgaggtactgtaaggggcctagaaggacaaaaggctttcattccctcttccttttggcaggcaggttatcagtccttggcagaagggcccagcccta

SEQ ID NO: 566927 - DNA, 120 bp, Artificial Sequence
  ENSG00000170271_23 (sequence is synthesized)
tccttttctgtatcaaacaaaatccttgaggttggtatacaagttaaggctgaaaaaaggccttaaattcccagtaaagaatgtgaaagcaagcatgtaaaataaactggtcttcatgaa

SEQ ID NO: 566928 - DNA, 120 bp, Artificial Sequence
  ENSG00000170271_24 (sequence is synthesized)
gctagaactactctttgagttctggatgaaaggagaagctggacatatgctacacaatgaaaagtcaaagcaggagggacacatctggggctctatgaggaggacagctttcatcctggg

SEQ ID NO: 566929 - DNA, 120 bp, Artificial Sequence
  ENSG00000170271_25 (sequence is synthesized)
gaacctgtaagtgttgttgcaacttctggtcaaagcacagaaagcaagagccaaagccacactctcagaattctcaccactggcccaggagagacctggccagtgtgagccaagttatta

SEQ ID NO: 566930 - DNA, 120 bp, Artificial Sequence
  ENSG00000170271_26 (sequence is synthesized)
gcaacaaggctcccccagtttagaaggttaaagagaggaaataatttgcccacaacctcagagtcactcagctagtggccagtcaagaccagtgttctggtctcttgattcctggcccag

SEQ ID NO: 566931 - DNA, 120 bp, Artificial Sequence
  ENSG00000170271_27 (sequence is synthesized)
gctctggacctgcctgtggtgccccatggcactgtggtcagcctggcactgagaaggcaggcaactccactttacccataggaatggagacagcaatgggtggatgctagaatatgggta

SEQ ID NO: 566932 - DNA, 120 bp, Artificial Sequence
  ENSG00000170271_28 (sequence is synthesized)
acagctgttgttatgagagagggagacagctgcgaaaacaatggataactccactgtaatagacggatagtatggattctgaatgtgtgggcggtggctgtcttttaaacaagttctcct

SEQ ID NO: 566933 - DNA, 120 bp, Artificial Sequence
  ENSG00000170271_29 (sequence is synthesized)
ttatcatcatccttccacttcaaatcacactcagtcctcctccttctgacacgccattcttcttctgtttttgtttggcccgcttaccgggaccgacagggcccgcgaagcgctggctgg

SEQ ID NO: 566934 - DNA, 120 bp, Artificial Sequence
  ENSG00000170271_30 (sequence is synthesized)
atttgccaagaggactggtgatgaaatcctatggctgatagaggctcgcctgtcctctgactgacagaattgcctgctagtttctctggagtcaggctaattcccttccctcccccaact

SEQ ID NO: 566935 - DNA, 120 bp, Artificial Sequence
  ENSG00000170271_31 (sequence is synthesized)
tgagctctaattttcataaacacacccatgtacagcctgagagctcctgataaggaagaggctcccacagaagctggaaaaggccagctggaaaacgcagatgtgccttcctggttggtt

SEQ ID NO: 566936 - DNA, 120 bp, Artificial Sequence
  ENSG00000170271_32 (sequence is synthesized)
taggcaacaaccatcaccctccctccttaagcttctgatagcaggcactggtatctcagtttacatgtgagtgctagttggggaagaggtctgatggctgggaaaataaccacactggga

SEQ ID NO: 566937 - DNA, 120 bp, Artificial Sequence
  ENSG00000170271_33 (sequence is synthesized)
tgaccttactcttttccttctgaaattgggtcctcctccaactgggggttttaaacctttatttggactctgggccctttgaataagctctggacattctctttagaaaagtacatatat

SEQ ID NO: 566938 - DNA, 120 bp, Artificial Sequence
  ENSG00000170271_34 (sequence is synthesized)
gcataaaactcctgcaggcaatcacaaggaagtcatgtatctctgaaagccccagactttttcaagtgtagtctacaaacctcctataccagaatcacctgagatgcttgtttaaaatat

SEQ ID NO: 566939 - DNA, 120 bp, Artificial Sequence
  ENSG00000170271_35 (sequence is synthesized)
aggctcttgaattccactccaaatatgctgaactaaggtatctgggggagcagggcctggaaacctgcattttagttaagtgttccaggggattctgatgctggtgatctcatacctgaa

SEQ ID NO: 566940 - DNA, 120 bp, Artificial Sequence
  ENSG00000170271_36 (sequence is synthesized)
gaagcctagttctgctagagattctcagactgtgggcatcaatcacacagcaagcttttcaaaggaggactccagatacggcaaattgcaggtttggagtggcccccgggagatgcattg

SEQ ID NO: 566941 - DNA, 120 bp, Artificial Sequence
  ENSG00000170271_37 (sequence is synthesized)
gtagcaactccccagcttattctgatgcagatggtcaggatggtggtgacaggtgtggggtaggagggctgagaaatgtgtgaggctggcacaaatgaaatgggatctgcacggaagcct

SEQ ID NO: 566942 - DNA, 120 bp, Artificial Sequence
  ENSG00000170271_38 (sequence is synthesized)
aaggacctctcagtgatttccagtggtctctccttgaccctcagaatggctagtcgtcttgtccagctgggagcctgggctaatcttgctggaaggcagagaggggttattaaaagtcag

SEQ ID NO: 566943 - DNA, 120 bp, Artificial Sequence
  ENSG00000170271_39 (sequence is synthesized)
ttcctttgcttctccttccttggcaattcataaagggttcagtgggcgcagactcccaaatgtcaacctgaattcatttctattttagagggtattatatatcttaacatactttcatat

SEQ ID NO: 566944 - DNA, 120 bp, Artificial Sequence
  ENSG00000170271_40 (sequence is synthesized)
gtatttatatgaaaaccaccaaccaccttgaaggttgtccctattttatggctaagaaaatggagacactccttaaatggcctgtccaagttcctacccaagactacaggtaaccccttg

SEQ ID NO: 566945 - DNA, 120 bp, Artificial Sequence
  ENSG00000170271_41 (sequence is synthesized)
tttcaacacccagtacactgagtgctacatagtgggtactcaataaatatcagttaaataaataaatgaatagatagatgtgataccccgcctcttggtcaaggtttccagaaggtgtaa

SEQ ID NO: 566946 - DNA, 120 bp, Artificial Sequence
  ENSG00000170271_42 (sequence is synthesized)
tggcctcacctaacatgtcctctcacaacaggctggcgagacctggcctcgcaatgggatggaagtaaacaaagagtgaattctgaaatcagttaatgcatgcagtgcctggaaaggctg

SEQ ID NO: 566947 - DNA, 120 bp, Artificial Sequence
  ENSG00000170271_43 (sequence is synthesized)
gaggaagaggcaggcctcaagctggggaccattctgaacctgtcgcgctttggggcagaaatccctccagctcacagagggaacttggagaaatcccttctaaccaaacaagttcatcag

SEQ ID NO: 566948 - DNA, 120 bp, Artificial Sequence
  ENSG00000170271_44 (sequence is synthesized)
gatccaggaagtaatctatggtcacaggactgttgcctggagccccagtgctctgacaaagggaagggtcaaagggttgctgattctgggggaaatattggctgcagtattgaggccaaa

SEQ ID NO: 566949 - DNA, 120 bp, Artificial Sequence
  ENSG00000170271_45 (sequence is synthesized)
tggactttggacacttgggaccagctctgtacagtggaccctggtggaaatgcttgggcaggcccccatcttcacagcatcactgtgaaaaccagcaagttggtcaagaagctggataag

SEQ ID NO: 566950 - DNA, 120 bp, Artificial Sequence
  ENSG00000170271_46 (sequence is synthesized)
cagttccttggcttacctgcttctttgctctgggcctactgcagggaggctggaccacttgaggaggcagatgatcttgatctctgcatccaatcatgaacaaggttctctgatgaagag

SEQ ID NO: 566951 - DNA, 120 bp, Artificial Sequence
  ENSG00000170271_47 (sequence is synthesized)
gggctaaatggctgaaatggggtatcactcagaaagtcacagccttctccaagcaccatggaggctacccaagttacctgtaaatacatggggcctggccagagaaatggggagggcagt

SEQ ID NO: 566952 - DNA, 120 bp, Artificial Sequence
  ENSG00000170271_48 (sequence is synthesized)
ggtgataatgtgcagaaccaggaagaaggcaggttccgacacagactgaaggctgctgaagtttccaaggacaggggtattactcacctgcctagcagccagggccttattctgcaacgt

SEQ ID NO: 566953 - DNA, 120 bp, Artificial Sequence
  ENSG00000170271_49 (sequence is synthesized)
ttccaggcccagagctgggtggcagtcaggagctactggctgtcccccgacatctctcccagaatccaaccagagtgagggcctcctgtaagcaggtcacggtggagcctacttctcaca

SEQ ID NO: 566954 - DNA, 120 bp, Artificial Sequence
  ENSG00000170275_0 (sequence is synthesized)
aagcactgggcccgccgcgtcgcaccgtcctctttcctttccttctccctccccttttcccttccttcgtcccttccttccttcctttcgccgggcgcgatggagccggggcgccggggg

SEQ ID NO: 566955 - DNA, 120 bp, Artificial Sequence
  ENSG00000170275_1 (sequence is synthesized)
gccgcggcgctgctagcgctgctgtgcgtggcctgcgcgctgcgcgccgggcgcgcccaatacgaacgctacagcttccgcagcttcccacgggacgagctgatgccgctcgagtcggcc

SEQ ID NO: 566956 - DNA, 120 bp, Artificial Sequence
  ENSG00000170275_2 (sequence is synthesized)
taccggcacgcgctggacaagtacagcggcgagcactgggccgagagcgtgggctacctggagatcagcctgcggctgcaccgcttgctgcgcgacagcgaggccttctgccaccgcaac

SEQ ID NO: 566957 - DNA, 120 bp, Artificial Sequence
  ENSG00000170275_3 (sequence is synthesized)
caactgcagcgccgcgccgcagcccgagcccgccgccggcctcgccagctatcccgagctgcgcctcttcgggggcctgctgcgccgcgcgcactgcctcaagcgctgcaagcagggcct

SEQ ID NO: 566958 - DNA, 120 bp, Artificial Sequence
  ENSG00000170275_4 (sequence is synthesized)
gccttccgccagtcccagcccagccgcgaggtgctggcggacttccagcgccgcgagccctacaagttcctgcagttcgcttacttcaaggcaaataatctccccaaagccatcgccgct

SEQ ID NO: 566959 - DNA, 120 bp, Artificial Sequence
  ENSG00000170275_5 (sequence is synthesized)
gctcacacctttctactgaagcatcctgatgacgaaatgatgaagaggaacatggcatattataagagcctgcctggtgccgaggactacattaaagacctggaaaccaagtcatatgaa

SEQ ID NO: 566960 - DNA, 120 bp, Artificial Sequence
  ENSG00000170275_6 (sequence is synthesized)
agcctgttcatccgagcagtgcgggcatacaacggtgagaactggagaacatccatcacagacatggagctggcccttcccgacttcttcaaagccttttacgagtgtctcgcagcctgc

SEQ ID NO: 566961 - DNA, 120 bp, Artificial Sequence
  ENSG00000170275_7 (sequence is synthesized)
gagggttccagggagatcaaggacttcaaggatttctacctttccatagcagatcattatgtagaagttctggaatgcaaaatacagtgtgaagagaacctcaccccagttataggaggc

SEQ ID NO: 566962 - DNA, 120 bp, Artificial Sequence
  ENSG00000170275_8 (sequence is synthesized)
tatccggttgagaaatttgtggctaccatgtatcattacttgcagtttgcctattataagttgaacgacctgaagaatgcagccccctgtgcagtcagctatctgctctttgatcagaat

SEQ ID NO: 566963 - DNA, 120 bp, Artificial Sequence
  ENSG00000170275_9 (sequence is synthesized)
gacaaggtcatgcagcagaacctggtgtattaccagtaccacagggacacttggggcctctcggatgagcacttccagcccagacctgaagcagttcagttctttaatgtgaccacactc

SEQ ID NO: 566964 - DNA, 120 bp, Artificial Sequence
  ENSG00000170275_10 (sequence is synthesized)
cagaaggagctgtatgactttgctaaggaaaatataatggatgatgatgagggagaagttgtggaatatgtggatgacctcttggaactggaggagaccagctagcccacagcaaccaaa

SEQ ID NO: 566965 - DNA, 120 bp, Artificial Sequence
  ENSG00000170275_11 (sequence is synthesized)
gagacttcctcttggcgttcaggaaacacagattctttgtccttttcccaacagcccaggctgttgatacctcagagccttctctttactctccaaagtgaaagggaagcccccgtctct

SEQ ID NO: 566966 - DNA, 120 bp, Artificial Sequence
  ENSG00000170275_12 (sequence is synthesized)
gcccccgtctctctaactgcatgtcatcaggggtgagcctgcctttcctatcttcacacctgccacctcatgttcacacctatctttctcaccttttttttgagatggagtctcgctctc

SEQ ID NO: 566967 - DNA, 120 bp, Artificial Sequence
  ENSG00000170275_13 (sequence is synthesized)
atgcccggcctctttctcacctttacacctgtcttcttatcctcacatctgttttcacaccttcatccctgtcttcctcatgttcacacttgtcttccccatgttcatagctgcctttct

SEQ ID NO: 566968 - DNA, 120 bp, Artificial Sequence
  ENSG00000170275_14 (sequence is synthesized)
taccattttggtttgaagggcagtcttctctggcttgtttttttgtttttcccagaaaatcagtattattttttaaataagaaaaacattcctagaagatgataattgtgaaaacctcct

SEQ ID NO: 566969 - DNA, 120 bp, Artificial Sequence
  ENSG00000170275_15 (sequence is synthesized)
ttggcttatttgcttttccagattttagtctcctttctccccatccgggaaagatggtggaagacataggctaaatttctccagcctcacaatggtcttcacttggtctgacttgtacca

SEQ ID NO: 566970 - DNA, 120 bp, Artificial Sequence
  ENSG00000170275_16 (sequence is synthesized)
attctagcacccactgaaaaacaagttgagtagagagtgtagagtgcagaaatgtggcttttgccccactttgcatctccaaaattacaacggttggccgatcccatttgaggacaatgc

SEQ ID NO: 566971 - DNA, 120 bp, Artificial Sequence
  ENSG00000170275_17 (sequence is synthesized)
ttagttataagtctccgagttggaaaaggaagaaagccagagctgtctagtttcattcattctttcagtaaatatttattgagtacctactgtgtgctaggcattgacctgggaactaga

SEQ ID NO: 566972 - DNA, 120 bp, Artificial Sequence
  ENSG00000170275_18 (sequence is synthesized)
gatacttcacagaataacagggaaagttccctgtgctcatggagcttacattctacagggagaaagagatagccaatacataggaataaatatatacaaggtatcatgtagtgataattg

SEQ ID NO: 566973 - DNA, 120 bp, Artificial Sequence
  ENSG00000170275_19 (sequence is synthesized)
ctgtggagaaaaataaagcaggggagggagtaagaaatcctggagatgaggctgcagttttaaatggggcctcactgggaatgtgacgttgagcagagacgttagggaagtggatcctgg

SEQ ID NO: 566974 - DNA, 120 bp, Artificial Sequence
  ENSG00000170275_20 (sequence is synthesized)
acaaggcattccaggcagaggaacaggatgtgcactgccccaaagtgagaacttgctctacgtggtcaggaaagagcagggagaccaagcagagtcgtgggcaggggtagaatggaagga

SEQ ID NO: 566975 - DNA, 120 bp, Artificial Sequence
  ENSG00000170275_21 (sequence is synthesized)
gaggcggctggggaggacaggtggtggagggccttggcttctgctaagtgagatgggaaccactggagggtttgaacagaggagtgccttgattgatttatattttgcaagggtcattct

SEQ ID NO: 566976 - DNA, 120 bp, Artificial Sequence
  ENSG00000170275_22 (sequence is synthesized)
agctgccatattgtgaaaaactttagtggacaagggcagaaggaagagggaagacctgttaggaagctactgcaaggttccaggcttgggcctgggccacagcaacagcagtggtcaaat

SEQ ID NO: 566977 - DNA, 120 bp, Artificial Sequence
  ENSG00000170275_23 (sequence is synthesized)
atctagatttattttgaaaagagccaataggatttgctgagagtttgaatgtggagtgtaagagaaggaagagttaatgatgacattaaggtttttggcctgaatagcaggaaagatgga

SEQ ID NO: 566978 - DNA, 120 bp, Artificial Sequence
  ENSG00000170275_24 (sequence is synthesized)
gttaccagttactgaaatagggaaggatgggctgggtaagtatggaatttggtgcaaagcaggctgtctgtggttggaatgggaggttctggctgcaaatcaaagtggagagttctctca

SEQ ID NO: 566979 - DNA, 120 bp, Artificial Sequence
  ENSG00000170275_25 (sequence is synthesized)
gatctgaatgcacttggtttattgttgggggtgctctcagaaggaacctgtgaaagcctttatcagtcatttattggctgtgagaagttctctgggagtgtgggtacatttgaaggcaag

SEQ ID NO: 566980 - DNA, 120 bp, Artificial Sequence
  ENSG00000170275_26 (sequence is synthesized)
tgacttcagttgagggcaagtctctggaaaagaggctgtaggcatctggcagctaccatgcatggtagtgtgttgggggtgggggtcctgggcactggctgtgtgaagggatctggcagg

SEQ ID NO: 566981 - DNA, 120 bp, Artificial Sequence
  ENSG00000170275_27 (sequence is synthesized)
gcaccacagcgccccctactgaaccatcagcatgtcagtggcatttaaagccatgcagctggaggggccactgagattgtctctgagtattactgagaagcaacagaaaagagccatgga

SEQ ID NO: 566982 - DNA, 120 bp, Artificial Sequence
  ENSG00000170275_28 (sequence is synthesized)
tggagcccttgggctctctgggaaatgggaaatcagccaaaggactgagaaggagttaccttaaggtcagagaaaaccaagagagtgtggtgttctggaagctgagctttctttattcaa

SEQ ID NO: 566983 - DNA, 120 bp, Artificial Sequence
  ENSG00000170275_29 (sequence is synthesized)
cctcattcccttctccaaataagccacttgtgtagttgggcccctccagggttgaaggcaagaggagaaaggcacagcgtttgggaaacaagacttttcctgcaatagcctgggaaggaa

SEQ ID NO: 566984 - DNA, 120 bp, Artificial Sequence
  ENSG00000170275_30 (sequence is synthesized)
taaaaggatagagtgtttgggtttttgtgtaatggtggttaattggggtggaacactcacacgttgtgctttttctgggcttcccttatcccccagaacactctaccaacctcggggaac

SEQ ID NO: 566985 - DNA, 120 bp, Artificial Sequence
  ENSG00000170275_31 (sequence is synthesized)
tcgggcacatccttctgtttctccttcagctctatcctgctttcctcatcccttctgacaccacgtcctcactcacctgcacaagaatccctgcatcaggttctcctttgagggtaccca

SEQ ID NO: 566986 - DNA, 120 bp, Artificial Sequence
  ENSG00000170275_32 (sequence is synthesized)
cccaggacagtcccctaccacttctgtcttgggctgaagttgcccacgtccacaaaatctgtactcccagcgggggtgtttggcccgaggagtcagtgttattactggtggatgcaccgt

SEQ ID NO: 566987 - DNA, 120 bp, Artificial Sequence
  ENSG00000170275_33 (sequence is synthesized)
gtccacagcagcccccaatcccagcgatgcgtcagatcttacgtggcttcctgctgggggagatggccttcacccacgggatgccgggttctcctttctttcctcaccccaacctttact

SEQ ID NO: 566988 - DNA, 120 bp, Artificial Sequence
  ENSG00000170275_34 (sequence is synthesized)
ccaccagagaaacttccttttgaactcagtggggaagagggtgatgagacaggactagaaagtagtgggggacccagcgagtggacgccctgctccgggattcctgagtctgtaaatagt

SEQ ID NO: 566989 - DNA, 120 bp, Artificial Sequence
  ENSG00000170275_35 (sequence is synthesized)
gtgcccagcagctgtgaactccccttatagcctcaggctgcagtgtccttcccagctgtgtgagaaaatgaaagccgacgtccacagggacccaggcagggttgggtgttgtgactcact

SEQ ID NO: 566990 - DNA, 120 bp, Artificial Sequence
  ENSG00000170275_36 (sequence is synthesized)
ccacctctgtgccctgcagaggtactgttgggtccttgtcttgtgagcctggggtgagctctctgtacatgttgttgttccacgtatgggttgacttggcatgctggggggtcctcgttc

SEQ ID NO: 566991 - DNA, 120 bp, Artificial Sequence
  ENSG00000170275_37 (sequence is synthesized)
actctctgaagttggcctcctttcactggggattgaaaagcacctccacccctaccctagtgatgtcccctgaggacccgggtgatagtacagtcaatattgtcagtactttgctttgat

SEQ ID NO: 566992 - DNA, 120 bp, Artificial Sequence
  ENSG00000170275_38 (sequence is synthesized)
tgaaggctgtagagctgagttaccaaaatttctatttcaaaggaaaccaaaccttaaaaaaaaaaaacaaaaactgggctgggtcttccaaacctaccatgaaaccctggtgtgcaggct

SEQ ID NO: 566993 - DNA, 120 bp, Artificial Sequence
  ENSG00000170275_39 (sequence is synthesized)
gcactcaatgacctcaacccaacacctccctgagtgtgcttcttggaagagcctagaagattcctggatggagaccccattggttcagcctcaagtctggcccgtcttcgaaaaaacaaa

SEQ ID NO: 566994 - DNA, 120 bp, Artificial Sequence
  ENSG00000170275_40 (sequence is synthesized)
cacatttgtaagctttgtgggagcttccaggcctgctctaagatgccttgcttgtcctttgacccatcagcatggagctcagtggttgctgtttggttctgcaggctggtggggaggccg

SEQ ID NO: 566995 - DNA, 120 bp, Artificial Sequence
  ENSG00000170275_41 (sequence is synthesized)
cccatcgtggtggggcatctgtccagccccattgccactcagggcatccaaacaggaggcacccgctgggaagggtctaaagatactccttgtggccactgctactgttcacacttgact

SEQ ID NO: 566996 - DNA, 120 bp, Artificial Sequence
  ENSG00000170275_42 (sequence is synthesized)
tgtggagaagcgaagggctgaggggaggtttgtgtacacccatgtatttaaaagtgactgactgactgaaatgagcacataccgacatatgcaacatactaataccttcctgattttcga

SEQ ID NO: 566997 - DNA, 120 bp, Artificial Sequence
  ENSG00000170275_43 (sequence is synthesized)
gactttctaattactacaactaacctgttgtgctcacctctggaattcagaaagagagccactgcgagcactgaccacaagggctgccttaggaaggaaatgtgtgctttcaggagttct

SEQ ID NO: 566998 - DNA, 120 bp, Artificial Sequence
  ENSG00000170275_44 (sequence is synthesized)
tattaggggaattttaagagcacaaaaattttattgaacccaccttagtgacaaacagaaaatgatttgttagattgtcagttggaaggggtttattatgactgctggtgaaataaacag

SEQ ID NO: 566999 - DNA, 120 bp, Artificial Sequence
  ENSG00000170275_45 (sequence is synthesized)
tgaccagtttctgccaacatttatggaaataacgtttctaggttttaaatgtgagccgtaaactgaagctacttcagttaaaaaaaaaaaaatcaatacttaaactgtagggaaaaggtg

SEQ ID NO: 567000 - DNA, 120 bp, Artificial Sequence
  ENSG00000170275_46 (sequence is synthesized)
gattggtgccagagaaaacattatttaatagtgtcagaacatggaactgcaacacagtttgtagcaaggcactgagaaaaacccacaactaatccttcatcgcagctgtctgaactcttg

SEQ ID NO: 567001 - DNA, 120 bp, Artificial Sequence
  ENSG00000170275_47 (sequence is synthesized)
atcatctgccatcccccaaacagtgacttctttttttctggtgactccaggcctgaatgacctagtgtggagagtttaaactatgtacaagggaggaaagaaaaaaaggaaaggaacctt

SEQ ID NO: 567002 - DNA, 120 bp, Artificial Sequence
  ENSG00000170275_48 (sequence is synthesized)
aagtaagcctcagccaaaggttttatgcattggacttcctgtgcctgcccccaggggcaagactgatccccatgcctgtgcccatgacatctccctgaaagaggacaccatgacagcccg

SEQ ID NO: 567003 - DNA, 120 bp, Artificial Sequence
  ENSG00000170275_49 (sequence is synthesized)
gctttgccttgactgacccactgctaccccagaaataagaatcaagagcagctattgttatccttagagtgttttccgtctagggccggctcgtgaacagccacatatccttgcacctga

SEQ ID NO: 567004 - DNA, 120 bp, Artificial Sequence
  ENSG00000170275_50 (sequence is synthesized)
cactgtccccacacaaatagctggctttcgttgcttgttgaatgaatgagtgagttggctctatatccccttggagctggccggtaagatattagtgcctcattttacaagaagagaata

SEQ ID NO: 567005 - DNA, 120 bp, Artificial Sequence
  ENSG00000170275_51 (sequence is synthesized)
ggaaggaattaagcaatttggccaacagatacaagatagattccagagttttatctcccactttagggtggcagccagtaggccaaactccaaagaccgttgctgatgtctttttctgcc

SEQ ID NO: 567006 - DNA, 120 bp, Artificial Sequence
  ENSG00000170275_52 (sequence is synthesized)
tcccctctttgggttagtgtggtatgtacaagctcactcttgttgaaaattagaaaatagttgaaaacaaaaggtttttgtttttctttttaaatcacattaaatgttttacattgctta

SEQ ID NO: 567007 - DNA, 120 bp, Artificial Sequence
  ENSG00000170276_0 (sequence is synthesized)
ctcctatcgagccctggctctccgggcagctggaggggtcgcgctgcgcctgttggggctgcacctcggaccagggcttctgctgcatctgcagccatgtcgggccgctcagtgccacat

SEQ ID NO: 567008 - DNA, 120 bp, Artificial Sequence
  ENSG00000170276_1 (sequence is synthesized)
gcccacccggccaccgccgagtacgaatttgccaacccgagccgcctgggtgagcagcgcttcggagaaggcctcctgccagaagagatcctgacccccacactctaccatggctactat

SEQ ID NO: 567009 - DNA, 120 bp, Artificial Sequence
  ENSG00000170276_2 (sequence is synthesized)
gtccggcctcgggccgccccagctggggagggcagcagggcaggggcctccgagcttaggctcagtgagggcaagttccaggcatttctggatgtgagccactttaccccagacgaggtg

SEQ ID NO: 567010 - DNA, 120 bp, Artificial Sequence
  ENSG00000170276_3 (sequence is synthesized)
gtgaggactgtggataacctgctggaggtgtctgcccggcacccccagcgcctggaccgccacggcttcgtgtcccgagagttctgccgcacctatgtcctgcctgctgatgtcgacccc

SEQ ID NO: 567011 - DNA, 120 bp, Artificial Sequence
  ENSG00000170276_4 (sequence is synthesized)
tggcgagtccgagctgctctctcccatgatggcatcttaaacctggaagcacctcggggtggccgacatttggacacagaggtcaatgaggtctacatctccctgctccctgcgcctcct

SEQ ID NO: 567012 - DNA, 120 bp, Artificial Sequence
  ENSG00000170276_5 (sequence is synthesized)
gatccagaggaagaggaggaggcagccatagttgagccctgattgccacagacccagcacccagcaaatccctctctacctcccaaggtgatatgggcagctgcccaccactccagaggt

SEQ ID NO: 567013 - DNA, 120 bp, Artificial Sequence
  ENSG00000170276_6 (sequence is synthesized)
agcagcatccttgggggaagggaaaggtgcatggtccacaatgtatggtttggtcccatgggacatgtcatagccttggtttagttttgggtggagctgaataaacccaaatctcagggc

SEQ ID NO: 567014 - DNA, 120 bp, Artificial Sequence
  ENSG00000170279_0 (sequence is synthesized)
acttatggtgatgccaatccagtggtcaggagcgaggcgcccagcctgtgtctgaatcctcctactgaccctggggatccgtgcgacttgatcttagatattggtggtgaagcgccgctc

SEQ ID NO: 567015 - DNA, 120 bp, Artificial Sequence
  ENSG00000170279_1 (sequence is synthesized)
tccttgacagcatccaggaaaggtaattacctttgccaaaatgcaagtggaagttcaaagcctcagccttgaagagtgtccctggagacttccaggcccccaatgtgaatgtgaagccct

SEQ ID NO: 567016 - DNA, 120 bp, Artificial Sequence
  ENSG00000170279_2 (sequence is synthesized)
cctgcccagtggggcaaggcgccggattgaccttcgcctgagtgggagggcagtcgctgtttgggtccacgttaggggcggtccaggtcaatttaacttgtcatatgccacgggaagaca

SEQ ID NO: 567017 - DNA, 120 bp, Artificial Sequence
  ENSG00000170279_3 (sequence is synthesized)
taagaagccaaacccacaccaaaacatgaaccgggggatggaatttattgctcctgtatcagctcccaccaaatctggtgccccgtggcattttctttctcaaggtcccacggatgccca

SEQ ID NO: 567018 - DNA, 120 bp, Artificial Sequence
  ENSG00000170279_4 (sequence is synthesized)
agttacctagatctgctaactctctcttacaagcctgggaggacagtgacaagttcatacctaaacgtacgtgggcatgaagtaagaaagctccagaattctgttgaggccacaaggatt

SEQ ID NO: 567019 - DNA, 120 bp, Artificial Sequence
  ENSG00000170279_5 (sequence is synthesized)
tccagaactgacagcagttaagaattttgcagaatctaagagtcacatctctaaatttgtgtagattgtgaaatctcttcttgcaagaaaaaagagaaatagctgaagttctggaaataa

SEQ ID NO: 567020 - DNA, 120 bp, Artificial Sequence
  ENSG00000170279_6 (sequence is synthesized)
cagttgatgaaaacttggtaatctgaagtctgaactttgaacaccagcagacaggctgagaattctctttgatcatgagcccaagttccacgtgtacctgcaggaatctgtgtggcattt

SEQ ID NO: 567021 - DNA, 120 bp, Artificial Sequence
  ENSG00000170279_7 (sequence is synthesized)
gtgcactggtgtggggcccaggagaggaccacggagtgacaagccaccaggttctaaagggagacgaagatccccagaggacctggatagagatgtttccctgaccattgtctgctgtgt

SEQ ID NO: 567022 - DNA, 120 bp, Artificial Sequence
  ENSG00000170279_8 (sequence is synthesized)
gctcccgatgatgagactctagagtttacaactgaaacacactgtcatttatgatattatttgtaatatctggtatgtctaagtaaaacatgcattcagtaaaactcgcgatgaaactta

SEQ ID NO: 567023 - DNA, 120 bp, Artificial Sequence
  ENSG00000170289_0 (sequence is synthesized)
aaggcacagtcataaatacagagggttttcagaaccacctcagagaagatgtttaaatcgctgacaaaagtcaacaaggtgaagcctataggagagaacaatgagaatgaacaaagttct

SEQ ID NO: 567024 - DNA, 120 bp, Artificial Sequence
  ENSG00000170289_1 (sequence is synthesized)
cgtcggaatgaagaaggctctcacccaagtaatcagtctcagcaaaccacagcacaggaagaaaacaaaggtgaagagaaatctctcaaaaccaagtcaactccagtcacgtctgaagag

SEQ ID NO: 567025 - DNA, 120 bp, Artificial Sequence
  ENSG00000170289_2 (sequence is synthesized)
ccacacaccaacatacaagacaaactctccaagaaaaattcctctggagatctgaccacaaaccctgaccctcaaaatgcagcagaaccaactggaacagtgccagagcagaaggaaatg

SEQ ID NO: 567026 - DNA, 120 bp, Artificial Sequence
  ENSG00000170289_3 (sequence is synthesized)
gaccccgggaaagaaggtccaaacagcccacaaaacaaaccgcctgcagctcctgttataaatgagtatgccgatgcccagctacacaacctggtgaaaagaatgcgtcaaagaacagcc

SEQ ID NO: 567027 - DNA, 120 bp, Artificial Sequence
  ENSG00000170289_4 (sequence is synthesized)
ctctacaagaaaaagttggtagagggagatctctcctcacccgaagccagcccacaaactgcaaagcccacggctgtaccaccagtaaaagaaagcgatgataagccaacagaacattac

SEQ ID NO: 567028 - DNA, 120 bp, Artificial Sequence
  ENSG00000170289_5 (sequence is synthesized)
tacaggctgttgtggttcaaagtcaaaaagatgcctttaacagagtacttaaagcgaattaaacttccaaacagcatagattcatacacagatcgactctatctcctgtggctcttgctt

SEQ ID NO: 567029 - DNA, 120 bp, Artificial Sequence
  ENSG00000170289_6 (sequence is synthesized)
gtcactcttgcctataactggaactgctgttttataccactgcgcctcgtcttcccatatcaaaccgcagacaacatacactactggcttattgcggacatcatatgtgatatcatctac

SEQ ID NO: 567030 - DNA, 120 bp, Artificial Sequence
  ENSG00000170289_7 (sequence is synthesized)
ctttatgatatgctatttatccagcccagactccagtttgtaagaggaggagacataatagtggattcaaatgagctaaggaaacactacaggacttctacaaaatttcagttggatgtc

SEQ ID NO: 567031 - DNA, 120 bp, Artificial Sequence
  ENSG00000170289_8 (sequence is synthesized)
gcatcaataataccatttgatatttgctacctcttctttgggtttaatccaatgtttagagcaaataggatgttaaagtacacttcattttttgaatttaatcatcacctagagtctata

SEQ ID NO: 567032 - DNA, 120 bp, Artificial Sequence
  ENSG00000170289_9 (sequence is synthesized)
atggacaaagcatatatctacagagttattcgaacaactggatacttgctgtttattctgcacattaatgcctgtgtttattactgggcttcaaactatgaaggaattggcactactaga

SEQ ID NO: 567033 - DNA, 120 bp, Artificial Sequence
  ENSG00000170289_10 (sequence is synthesized)
tgggtgtatgatggggaaggaaacgagtatctgagatgttattattgggcagttcgaactttaattaccattggtggccttccagaaccacaaactttatttgaaattgtttttcaactc

SEQ ID NO: 567034 - DNA, 120 bp, Artificial Sequence
  ENSG00000170289_11 (sequence is synthesized)
ttgaattttttttctggagtttttgtgttctccagtttaattggtcagatgagagatgtgattggagcagctacagccaatcagaactacttccgcgcctgcatggatgacaccattgcc

SEQ ID NO: 567035 - DNA, 120 bp, Artificial Sequence
  ENSG00000170289_12 (sequence is synthesized)
tacatgaacaattactccattcctaaacttgtgcaaaagcgagttcggacttggtatgaatatacatgggactctcaaagaatgctagatgagtctgatttgcttaagaccctaccaact

SEQ ID NO: 567036 - DNA, 120 bp, Artificial Sequence
  ENSG00000170289_13 (sequence is synthesized)
acggtccagttagccctcgccattgatgtgaacttcagcatcatcagcaaagtcgacttgttcaagggttgtgatacacagatgatttatgacatgttgctaagattgaaatccgttctc

SEQ ID NO: 567037 - DNA, 120 bp, Artificial Sequence
  ENSG00000170289_14 (sequence is synthesized)
tatttgcctggtgactttgtctgcaaaaagggagaaattggcaaggaaatgtatatcatcaagcatggagaagtccaagttcttggaggccctgatggtactaaagttctggttactctg

SEQ ID NO: 567038 - DNA, 120 bp, Artificial Sequence
  ENSG00000170289_15 (sequence is synthesized)
aaagctgggtcggtgtttggagaaatcagccttctagcagcaggaggaggaaaccgtcgaactgccaatgtggtggcccacgggtttgccaatcttttaactctagacaaaaagaccctc

SEQ ID NO: 567039 - DNA, 120 bp, Artificial Sequence
  ENSG00000170289_16 (sequence is synthesized)
caagaaattctagtgcattatccagattctgaaaggatcctcatgaagaaagccagagtgcttttaaagcagaaggctaagaccgcagaagcaacccctccaagaaaagatcttgccctc

SEQ ID NO: 567040 - DNA, 120 bp, Artificial Sequence
  ENSG00000170289_17 (sequence is synthesized)
ctcttcccaccgaaagaagagacacccaaactgtttaaaactctcctaggaggcacaggaaaagcaagtcttgcaagactactcaaattgaagcgagagcaagcagctcagaagaaagaa

SEQ ID NO: 567041 - DNA, 120 bp, Artificial Sequence
  ENSG00000170289_18 (sequence is synthesized)
aaagaaaatgaagataaacaaaaagaaaatgaagataaacaaaaagaaaatgaagataaaggaaaagaaaatgaagataaagataaaggaagagagccagaagagaagccactggacaga

SEQ ID NO: 567042 - DNA, 120 bp, Artificial Sequence
  ENSG00000170289_19 (sequence is synthesized)
cctgaatgtacagcaagtcctattgcagtggaggaagaaccccactcagttagaaggacagttttacccagagggacttctcgtcaatcactcattatcagcatggctccttctgctgag

SEQ ID NO: 567043 - DNA, 120 bp, Artificial Sequence
  ENSG00000170289_20 (sequence is synthesized)
ggcggagaagaggttcttactattgaagtcaaagaaaaggctaagcaataaatgtttgattatctttagatgtgatatagctagttcccaaagtgattgtacctaggattgtaacttaaa

SEQ ID NO: 567044 - DNA, 120 bp, Artificial Sequence
  ENSG00000170289_21 (sequence is synthesized)
ttaacgaggggaaacgacatgctgggacccttgagaaacgaaaggcaaatccctagcttagtttctaggacttatctgagagtgtgatttcatgcagtggtaataagaagattattaaaa

SEQ ID NO: 567045 - DNA, 120 bp, Artificial Sequence
  ENSG00000170289_22 (sequence is synthesized)
gccatccctattctccgttttcattaactttatgcaattgctatatcttctaattgtatgtagtaagtttccttttcctttggttctttcctgatgatgtctcttccttccagttttatt

SEQ ID NO: 567046 - DNA, 120 bp, Artificial Sequence
  ENSG00000170289_23 (sequence is synthesized)
agcttgctcttggctgtgatgtgattcactaaccttttctcttaatttttattgtgtttaatttcttctttggcactctaaagcctggctaattgttctaggtttatgaatttcacctct

SEQ ID NO: 567047 - DNA, 120 bp, Artificial Sequence
  ENSG00000170289_24 (sequence is synthesized)
tacatgtaaagggtataagattttaatgtaataggtcaaaaatcagattattttcattcaaatgaggatgatgagtcactgtaatatcaaaaaatccccagcagctgggactgaagggaa

SEQ ID NO: 567048 - DNA, 120 bp, Artificial Sequence
  ENSG00000170289_25 (sequence is synthesized)
gcagagatcatgaagctttctgaatgagaagtctgatttttggaacagtcccctgaagaccaatgttggtcggcagaattagcaaactggcaaaatcacattgcaggaacatattggaaa

SEQ ID NO: 567049 - DNA, 120 bp, Artificial Sequence
  ENSG00000170289_26 (sequence is synthesized)
aattgtaccctttactaaagaaataaacttcaatattttctcttctaaccaacttaaaagacaccaatctacctaactcatctggctcaagggacttggactggaggatacaggctaaag

SEQ ID NO: 567050 - DNA, 120 bp, Artificial Sequence
  ENSG00000170289_27 (sequence is synthesized)
tgacacttatcagaatcttcctcaagcacttgctggaaaagatatcagattggaacttcttgtttaaaattaagctttagtaaaacaaagtgatgaggttaggaaggcagactctacaca

SEQ ID NO: 567051 - DNA, 120 bp, Artificial Sequence
  ENSG00000170289_28 (sequence is synthesized)
tgtcagattgacatatccccacaatttccggaacctacatgtatagctgtttacaaaatctccaagttaattaagggcactttaggaagttgtcctcatgaattagctagcattagcata

SEQ ID NO: 567052 - DNA, 120 bp, Artificial Sequence
  ENSG00000170289_29 (sequence is synthesized)
attaccgacgttgcatgctgtgaggaggctacaaaggccaggctggtgtcggaagtaataatacatatagaattccattctaataaatgccattagtgtataacatcaagttctgtgtaa

SEQ ID NO: 567053 - DNA, 120 bp, Artificial Sequence
  ENSG00000170289_30 (sequence is synthesized)
tgaggctatttccaagtctccaaagatggtcactgtaacagcactttgctgagagggttttaacaaatcatattagccaaaaagcctacaacatagatgcatttagcaaaccatgtacaa

SEQ ID NO: 567054 - DNA, 120 bp, Artificial Sequence
  ENSG00000170289_31 (sequence is synthesized)
atcaatcactataataaactgcatcatttgatagagtcaccgtttttgcatgtagtgttagagtatcacaaaatataacaagttttactaaaggatggttggttttttcaggatttaagg

SEQ ID NO: 567055 - DNA, 120 bp, Artificial Sequence
  ENSG00000170289_32 (sequence is synthesized)
gaatatggacaaattgttaaatagtatttatttgataaatgggagtttgtatgcagaaagagtgaattgcgtataaaaagggtgatttaaaaacccagaaacaaaaggtagaatagggct

SEQ ID NO: 567056 - DNA, 120 bp, Artificial Sequence
  ENSG00000170289_33 (sequence is synthesized)
gaagcatctgataataggaaaagaaaaggacaaaagtcctcaacttgtgagcaatatgctttccctttacaccctgtaatttattcaaatgatattaaaatacaagaccattgcaattta

SEQ ID NO: 567057 - DNA, 120 bp, Artificial Sequence
  ENSG00000170289_34 (sequence is synthesized)
tgcttttcgcctggcagttattttcccccccaagctatcctgtttcagataatatcaatttatttccaatccatcagactaaaatctaagaaaattcaagaactcttttattgttgattt

SEQ ID NO: 567058 - DNA, 120 bp, Artificial Sequence
  ENSG00000170289_35 (sequence is synthesized)
ggtgccaccaaattctttttctttttaaatctttctaattatcctttctttttcaatcccattgctaacacccagaacatattttctgttcaatgcaaataaacattcactttttaccta

SEQ ID NO: 567059 - DNA, 120 bp, Artificial Sequence
  ENSG00000170289_36 (sequence is synthesized)
cctcttcttgctcctcctcagcctactcaacatgaggacaactggatgcagacctttctgatgatccacttccacttaggcaatagtaaatatatggtctcttctttatgattttaataa

SEQ ID NO: 567060 - DNA, 120 bp, Artificial Sequence
  ENSG00000170289_37 (sequence is synthesized)
cattttctcttctctggcttgctttattgtaagaatgcagtatgtaacatgtataacatgaaatatgtacccatccatatgaacaagtaaggcttctggccaacagtaggctattagtag

SEQ ID NO: 567061 - DNA, 120 bp, Artificial Sequence
  ENSG00000170289_38 (sequence is synthesized)
ttaagtttgggaggagtcaaaagtcatatgcaattttcagctacacaggaggtctagtgcccctaacctctacatcatttatgggccaactgtaatttgcaataaattttgactgctaga

SEQ ID NO: 567062 - DNA, 120 bp, Artificial Sequence
  ENSG00000170289_39 (sequence is synthesized)
cagcacatcccagataaggctgttccttcagcctgagtcccaatataagaaacatggagagaactccagcctagctgcatgtaaaatgagcaagaaataaactgttgtcattaaagccac

SEQ ID NO: 567063 - DNA, 120 bp, Artificial Sequence
  ENSG00000170290_0 (sequence is synthesized)
agacagcctgggaggggagaaggagttggagctcaagttggagacagcgaggagaaacctgccatagccagggtgtgtctttgatcctcttcaggaggtgaggagaagccagaggtcctt

SEQ ID NO: 567064 - DNA, 120 bp, Artificial Sequence
  ENSG00000170290_1 (sequence is synthesized)
ggtgtgccctcagaaatctgcctgcagttctcaccaagccgctgtgaaaatggggataaacacccgggagctgtttctcaacttcactattgtcttgattacggttattcttatgtggct

SEQ ID NO: 567065 - DNA, 120 bp, Artificial Sequence
  ENSG00000170290_2 (sequence is synthesized)
ccttgtgaggtcctatcagtactgagaggccatgccatggtcctgggattgactgagatgctccggagctgcctgctctatgccctgagaccccactgctgtcattgtcacaggatgcca

SEQ ID NO: 567066 - DNA, 120 bp, Artificial Sequence
  ENSG00000170290_3 (sequence is synthesized)
ctccatccgagggcacctgtgacctgcactcacaatatctgctatgctgtagtgctaggattgattatgtgttctccaaagatgctgctcccaagggctgccaagtgtttgccagggaac

SEQ ID NO: 567067 - DNA, 120 bp, Artificial Sequence
  ENSG00000170290_4 (sequence is synthesized)
ggtagatttattccccaactcttaactgaaaatgtgttagacaagccacaaagttaaaattaaactggattcatgatgatgtaggattgttacaagcccctgatctgtctcaccacacat

SEQ ID NO: 567068 - DNA, 120 bp, Artificial Sequence
  ENSG00000170290_5 (sequence is synthesized)
cccttcaacccacacggtctgcaaccaaactctaattcaacctgccagaaggaatgttagaggaagtctttgtcagcccttatagctatcatgtgaataaagttaagtcaacttcaaaaa

SEQ ID NO: 567069 - DNA, 120 bp, Artificial Sequence
  ENSG00000170290_6 (sequence is synthesized)
attttcttgctcttgagctctggcacttctctgctgctgtctgctgctgaggcctgcagagattaatataaacggcagcctcgaaccttcggagggtgttcctttgagatgtttcatcag

SEQ ID NO: 567070 - DNA, 120 bp, Artificial Sequence
  ENSG00000170291_0 (sequence is synthesized)
actaagttcctcctgcgcggtctatggcggactatgttaggtcttaatggtgggaggacgcccgagtgctcggcccgtttcaccccgaggaggaaggacactgggtcatgacgccatcag

SEQ ID NO: 567071 - DNA, 120 bp, Artificial Sequence
  ENSG00000170291_1 (sequence is synthesized)
agggcgccagagcagggaccggacgcgagttggagatgttggactcgctgttggccttgggcggcctggtgctgcttcgggattccgtggagtgggaggggcgcagtctcttgaaggcgc

SEQ ID NO: 567072 - DNA, 120 bp, Artificial Sequence
  ENSG00000170291_2 (sequence is synthesized)
ttgtcaagaaatctgcactgtgtggggagcaagtgcatatcctgggctgtgaagtgagcgaggaagagtttcgtgaaggttttgactctgatatcaacaatcggctggtttaccatgact

SEQ ID NO: 567073 - DNA, 120 bp, Artificial Sequence
  ENSG00000170291_3 (sequence is synthesized)
tcttcagagaccctctcaactggtcaaaaactgaggaggcctttcctggggggccgctgggagccttgagagccatgtgcaagaggacagatcctgttcctgtcaccattgctctcgatt

SEQ ID NO: 567074 - DNA, 120 bp, Artificial Sequence
  ENSG00000170291_4 (sequence is synthesized)
cactcagctggctgctacttcgccttccctgcaccacactctgccaggtcctgcatgctgtgagccatcaggactcttgtcctggtgacagctcctcagtggggaaagtgagtgtgctgg

SEQ ID NO: 567075 - DNA, 120 bp, Artificial Sequence
  ENSG00000170291_5 (sequence is synthesized)
cacatcctgtgtcggaggccccgacagcgcccaactgaccagactcagtggttctccatccttccggacttcagcctggatctccaagaggggccctctgtagagtcccagccctactcc

SEQ ID NO: 567076 - DNA, 120 bp, Artificial Sequence
  ENSG00000170291_6 (sequence is synthesized)
gatcctcatatacccccggtggatcccacaactcatttgacctttaaccttcacctgtccaagaaagagagagaagccagagatagcctgatcctgcccttccagttcagttctgaaaaa

SEQ ID NO: 567077 - DNA, 120 bp, Artificial Sequence
  ENSG00000170291_7 (sequence is synthesized)
cagcaggctctcctgcggcctaggccagggcaggctaccagccacatcttctatgagccagatgcttatgatgacctggaccaagaagacccagatgacgacctggatatttgactggcc

SEQ ID NO: 567078 - DNA, 120 bp, Artificial Sequence
  ENSG00000170291_8 (sequence is synthesized)
agatttgattagattgtaattggagggggcgcgggaagactttgggcccagaaccatctttctattgtttgtgttagccttaccctgtccctgccccaccttggttccccttgtctatgg

SEQ ID NO: 567079 - DNA, 120 bp, Artificial Sequence
  ENSG00000170291_9 (sequence is synthesized)
agccccgccttgtgagccaggaagcagcgtctcatcaggacagaaggtaggatgaagacatggggtaatgtgagagagtagaacacccccgtacctaataaaaatctttatttttttatt

SEQ ID NO: 567080 - DNA, 120 bp, Artificial Sequence
  ENSG00000170291_10 (sequence is synthesized)
ggccctcgcggggggcttgtgggtcctcctccccctcccactgacaactgccccaactgctcttcccgccccggtcacagtgaaaatgtagacggggtcgttgtccactatgttaggtct

SEQ ID NO: 567081 - DNA, 120 bp, Artificial Sequence
  ENSG00000170291_11 (sequence is synthesized)
aactgctcttcccgccccggtcacagtgaaaatgtagacggggtcgttgtccgtacgactgtgcgccagggctcggggaggggcgccctccgcgtgagcgcccccctgggaatattgaac

SEQ ID NO: 567082 - DNA, 120 bp, Artificial Sequence
  ENSG00000170291_12 (sequence is synthesized)
tgccaaggccagaacaaggaaatgtagtttagtatctggtcacgggagagaaaataaaagctgcagaggttgggggtggggtcagggattctagggatggggcagagtggcagcatcctt

SEQ ID NO: 567083 - DNA, 120 bp, Artificial Sequence
  ENSG00000170291_13 (sequence is synthesized)
atctgggccatggagaggttggggcaacaggttattgattaacctgactttatagggactgaagtccacctccagagacaagtccaagttcttgatccacccattccccctataatggca

SEQ ID NO: 567084 - DNA, 120 bp, Artificial Sequence
  ENSG00000170291_14 (sequence is synthesized)
gaggacctttatgtctcttttctctcccttatacccttgggtcacagctccagttgtccccagagcaccctgggcctgggctgagccagaccagacccttgggaggtggccctatcccta

SEQ ID NO: 567085 - DNA, 120 bp, Artificial Sequence
  ENSG00000170291_15 (sequence is synthesized)
ggcagtggtgctaggaggacagaaggctatatgggcgtggcagaggctggttaacaagggcttagtacacgcttgctgttctgtgcccagtatgtgggcggatgacgcaagactacaaga

SEQ ID NO: 567086 - DNA, 120 bp, Artificial Sequence
  ENSG00000170291_16 (sequence is synthesized)
tccttgccctcaagctgctaggaacttacggttttattaggagagcagtacaagggtatctatcccagtaccaaatggtgcttcagctctaacatggaggtcagagaaagggacttggac

SEQ ID NO: 567087 - DNA, 120 bp, Artificial Sequence
  ENSG00000170291_17 (sequence is synthesized)
caataaaatgacatggaggcctaacaggttgcctgaatgagagtcacagtcacctggaagaaagtatccagacccaacctgttagctaccctcaccagcaccaaatcttcccttctcaga

SEQ ID NO: 567088 - DNA, 120 bp, Artificial Sequence
  ENSG00000170291_18 (sequence is synthesized)
tcaggactcttgtcctggtgagacccctccttcattgtttcccctcatacatctccctctgccaaggagtgtgccccttttcctttctaccctagaataaacatctgggttctccagtca

SEQ ID NO: 567089 - DNA, 120 bp, Artificial Sequence
  ENSG00000170291_19 (sequence is synthesized)
gcggggggtgcggttcgggcctggctgaggggacggaagtgggcaggaagggccaggggtcacaggctaggtgtggaaatcgcgacgggttcgcgaaggcggtaatcccagcgctctcat

SEQ ID NO: 567090 - DNA, 120 bp, Artificial Sequence
  ENSG00000170291_20 (sequence is synthesized)
cagagaggggcacggagcgggcggctcagaaagccacccctggcgagggtaaagcccagcggaacggggagctgggggacaggcgtgggcagcccgcgggggcccacatgggctgggagt

SEQ ID NO: 567091 - DNA, 120 bp, Artificial Sequence
  ENSG00000170291_21 (sequence is synthesized)
tcgcggggggcttgtgggtcctcctccccctcccactgacaactgccccaactgctcttcccgccccggtcacagtgaaaatgtagacggggtcgttgtccgtacgactactatgttagg

SEQ ID NO: 567092 - DNA, 120 bp, Artificial Sequence
  ENSG00000170293_0 (sequence is synthesized)
gcctccaccgccttccccggctgcccggcagcctcccctcgctcgctctcctcttcctctagggccccagcgcagctcgggagcccgcgcaccgaggcgctaggggcaccgcgcactaga

SEQ ID NO: 567093 - DNA, 80 bp, Artificial Sequence
  ENSG00000170293_1 (sequence is synthesized)
taggggcaccgcgcactagagggacacccgccgcgcctggacagcccccggcgggcgcccccctcgcacctcctgccccg

SEQ ID NO: 567094 - DNA, 120 bp, Artificial Sequence
  ENSG00000170293_2 (sequence is synthesized)
ccccagacccgccggggtccctggggacgcgccagcccggcagtggctcgacgatggaggagccgcagcgcgcccgctcgcacacagtcaccaccaccgccagctccttcgcagagaact

SEQ ID NO: 567095 - DNA, 120 bp, Artificial Sequence
  ENSG00000170293_3 (sequence is synthesized)
tctccaccagcagcagcagcttcgcctacgaccgggagttcctccgcaccctgcccggcttcctcatcgtggccgagatcgttctggggctgctggtatggacgcttattgctggaactg

SEQ ID NO: 567096 - DNA, 120 bp, Artificial Sequence
  ENSG00000170293_4 (sequence is synthesized)
acaatgacctacaccaggattccccaggtgccctggacaacagtgggcctgtgctttaacggcagtgccttcgtcttgtacctctctgccgctgttgtagatgcatcttccgtctcccct

SEQ ID NO: 567097 - DNA, 120 bp, Artificial Sequence
  ENSG00000170293_5 (sequence is synthesized)
gagagggacagtcacaacttcaacagctgggcggcctcatcgttctttgccttcctggtcaccatctgctacgctggaaatacatatttcagttttatagcatggagatccaggaccata

SEQ ID NO: 567098 - DNA, 120 bp, Artificial Sequence
  ENSG00000170293_6 (sequence is synthesized)
cagtgatttaccattttgataattaaaaggaaaaaaaaaggaagactctcactgtaaaaacagctgtaggtataatgtatattcccagagaattgtatttaactaattaatgttttttat

SEQ ID NO: 567099 - DNA, 120 bp, Artificial Sequence
  ENSG00000170293_7 (sequence is synthesized)
attcttaaatttgctcacaaattgtggtttgttacaattaaactggatacttatttgcaaagtgttgtagcttataatgaactcttaagtatcttattaatgtattaatgtcttcataga

SEQ ID NO: 567100 - DNA, 120 bp, Artificial Sequence
  ENSG00000170293_8 (sequence is synthesized)
tcatattttcttagacaatgtttaaatagataaattgctaatattgagaatgtgtcaagtttgtaaacctaacttttaagatgccagattcttttttgattaaatgttgcaaaatcccaa

SEQ ID NO: 567101 - DNA, 120 bp, Artificial Sequence
  ENSG00000170296_0 (sequence is synthesized)
gcaaattcgtggatcgctccgctgaatccgcccgcgcgtcgccgccgtcgtcgccgccccccgtcccggcccccctgggttccctcagcccagccctgtccagcccggttcccgggagga

SEQ ID NO: 567102 - DNA, 120 bp, Artificial Sequence
  ENSG00000170296_1 (sequence is synthesized)
tgaagttcgtgtacaaagaagagcatccgttcgagaagcgccgctctgagggcgagaagatccgaaagaaatacccggaccgggtgccggtgatagtagaaaaggctcccaaagctcgga

SEQ ID NO: 567103 - DNA, 120 bp, Artificial Sequence
  ENSG00000170296_2 (sequence is synthesized)
taggagacctggacaaaaagaaatacctggtgccttctgatctcacagttggtcagttctacttcttgatccggaagcgaattcatctccgagctgaggatgccttgtttttctttgtca

SEQ ID NO: 567104 - DNA, 120 bp, Artificial Sequence
  ENSG00000170296_3 (sequence is synthesized)
acaatgtcattccacccaccagtgccacaatgggtcagctgtaccaggaacaccatgaagaagacttctttctctacattgcctacagtgacgaaagtgtctacggtctgtgaagctgct

SEQ ID NO: 567105 - DNA, 120 bp, Artificial Sequence
  ENSG00000170296_4 (sequence is synthesized)
gcccctgagctggaggggggtctcattctacaaagagagaggtggcccccctttcttgacctcctcctccttcaagctcaaacaccacctcccttattcaggaccggcacttcttaatgt

SEQ ID NO: 567106 - DNA, 120 bp, Artificial Sequence
  ENSG00000170296_5 (sequence is synthesized)
ttgattgtcagtctgtgtcacatccagtgattgttttggtttctgttccctttctgactgcccaaggggctcagaaccccagcaatcccttcctttcactaccttcttttttgggggtag

SEQ ID NO: 567107 - DNA, 120 bp, Artificial Sequence
  ENSG00000170296_6 (sequence is synthesized)
ttggaagggactgaaattgtggggggaaggtaggaggcacatcaataaagaggaaaccaccaagctgaactgaattttgccttgtgttgctcccctcgtcccgctgattttaagtctttc

SEQ ID NO: 567108 - DNA, 120 bp, Artificial Sequence
  ENSG00000170296_7 (sequence is synthesized)
caaggtgtcagtgggtttcagtggtggggaaagaagagtactgggtacaagctggagggatagaagtatattttggtttattctgttcatgttgggcttttccctgtctgcaaaaagagg

SEQ ID NO: 567109 - DNA, 120 bp, Artificial Sequence
  ENSG00000170296_8 (sequence is synthesized)
gtgcttttgttgtgatggaatggaatactgaggattatttcttgaaactttagttttataacacgcatgtgaaactaaatgttaaaaatgctcatgtaaaaaaaaatttttttttactgt

SEQ ID NO: 567110 - DNA, 120 bp, Artificial Sequence
  ENSG00000170296_9 (sequence is synthesized)
gggttcctgtggagaaagttccgaagtacctgctttaggtgaacatccacatttgctagaacattctaactaagatattttcatgtgtgcaagctagtaaaacggctgttctcagttgca

SEQ ID NO: 567111 - DNA, 120 bp, Artificial Sequence
  ENSG00000170296_10 (sequence is synthesized)
gaccgggtgccggtgaggacagtagccagggccgagggcgcgggacgcttacgctgacgccacagcctggccttggatcgggacaggcagcgcagggatcaggctgctggctgtggtggg

SEQ ID NO: 567112 - DNA, 120 bp, Artificial Sequence
  ENSG00000170296_11 (sequence is synthesized)
gttggcagcgagcctgaaactgctgtccttgggacccaggatgaaaggagtggggtagtggtggatgtggggttgagagggatgtggacaggagagagaaaccttagcatttgaggcctt

SEQ ID NO: 567113 - DNA, 120 bp, Artificial Sequence
  ENSG00000170296_12 (sequence is synthesized)
agagagtttgacagcctgagcttcaaatggtcatccccccagctagctaaggttgcgagattgaatcactagtcgacccaaacaagtcacctccgtctgattaagatagttgtttatggt

SEQ ID NO: 567114 - DNA, 120 bp, Artificial Sequence
  ENSG00000170296_13 (sequence is synthesized)
agatttaggtgctaggaatattgtttcttgagttcttgacaggtgcagcttcggggctgcattccttctgtctcctaattttcatctctttatcaggtgatagtagaaaaggctcccaaa

SEQ ID NO: 567115 - DNA, 120 bp, Artificial Sequence
  ENSG00000170296_14 (sequence is synthesized)
agccctgtccagcccggttcccgggaggatgaagttcgtgtacaaagaagagcatccgttcgagaagcgccgctctgagggcgagaagatccgaaagaaatacccggaccgggtgccgtt

SEQ ID NO: 567116 - DNA, 120 bp, Artificial Sequence
  ENSG00000170298_0 (sequence is synthesized)
cattccttctgcaaaggactgcctggcaggtgtgaaaggcagcggtggccacagaggcggtggagatggccttcagcggttcccaggctccctatctgagcccagccgtccccttttctg

SEQ ID NO: 567117 - DNA, 120 bp, Artificial Sequence
  ENSG00000170298_1 (sequence is synthesized)
ggactatccaagggggtctccaggacggatttcagatcactgtcaatggggccgttctcagctccagtggaaccaggtttgctgtggactttcagacgggcttcagtggaaacgacattg

SEQ ID NO: 567118 - DNA, 120 bp, Artificial Sequence
  ENSG00000170298_2 (sequence is synthesized)
ccttccacttcaaccctcggtttgaagacggagggtatgtggtgtgcaacacgaggcagaaaggaagatgggggcccgaggagaggaagatgcacatgcccttccagaaggggatgccct

SEQ ID NO: 567119 - DNA, 120 bp, Artificial Sequence
  ENSG00000170298_3 (sequence is synthesized)
ttgacctctgcttcctggtgcagagctcagatttcaaggtgatggtgaacgggagcctcttcgtgcagtacttccaccgcgtgcccttccaccgtgtggacaccatctccgtcaatggct

SEQ ID NO: 567120 - DNA, 120 bp, Artificial Sequence
  ENSG00000170298_4 (sequence is synthesized)
ctgtgcagctgtcctacatcagcttccagaatccccgcacagtccccgttcagcctgccttctccacggtgccgttctcccagcctgtctgtttcccacccaggcccagggggcgcagac

SEQ ID NO: 567121 - DNA, 120 bp, Artificial Sequence
  ENSG00000170298_5 (sequence is synthesized)
ccagacagtcatccacacggtgcagagcgcctctggacagatgttctctactcccgccatcccacctatgatgtacccccaccctgcctatccgatgcctttcatcaccaccattccggg

SEQ ID NO: 567122 - DNA, 120 bp, Artificial Sequence
  ENSG00000170298_6 (sequence is synthesized)
agggctgtacccatccaagtccatcatcctgtcaggcactgtcctgcccagtgctcagaggttccacatcaacctgtgctctgggagccacatcgccttccacatgaacccccgttttga

SEQ ID NO: 567123 - DNA, 120 bp, Artificial Sequence
  ENSG00000170298_7 (sequence is synthesized)
tgagaatgctgtggtccgtaacacccagatcaacaactcttgggggtctgaggagcgaagtctgccccgaaaaatgcccttcgtccgaggccagagcttctcggtgtggatcttgtgtga

SEQ ID NO: 567124 - DNA, 120 bp, Artificial Sequence
  ENSG00000170298_8 (sequence is synthesized)
agctcactgcctcaaggtggccgtggatggtcagcacgtgtttgaatactaccatcgcctgaggaacctgcccaccatcaacaaactggaagtgggtggcgacatccagctgacccacgt

SEQ ID NO: 567125 - DNA, 120 bp, Artificial Sequence
  ENSG00000170298_9 (sequence is synthesized)
gcagacataggcggctccctggccctggggccgggggctggggtgtggggcagtcggggtcctctcatcatccccacttcccaggcccagcctttccaaccgtgcctgggatctgggctt

SEQ ID NO: 567126 - DNA, 120 bp, Artificial Sequence
  ENSG00000170298_10 (sequence is synthesized)
gcgccagctgctggaatcctacaatcccagaaggcgggcacagccagggagaggggaggagcgggcagtgaagatgaagccccatgctcagtcccctcccatcccccacgcagctccacc

SEQ ID NO: 567127 - DNA, 120 bp, Artificial Sequence
  ENSG00000170298_11 (sequence is synthesized)
ccagtctcaagccaccagctgtctgctcctggtgggagatggcctcctcagcccctcctctctgacctttaacctcactctcaccttgcaccctgcaccaacccttcacccctcctggaa

SEQ ID NO: 567128 - DNA, 120 bp, Artificial Sequence
  ENSG00000170298_12 (sequence is synthesized)
agcaggtctgatggcttcccactggcctccaccaactgaccagagtgttctcttcaggggactggctcctttcccagtgtccttaaaataaagaaatgaaaatgcttgttggcacattca

SEQ ID NO: 567129 - DNA, 120 bp, Artificial Sequence
  ENSG00000170298_13 (sequence is synthesized)
aagtcattccttctgcaaaggactgcctggcaggtgtgaaaggcagcggtggccacagaggcggtggagatggccttcagcggttcccaggctccctatctgagcccagtttgctgtgga

SEQ ID NO: 567130 - DNA, 120 bp, Artificial Sequence
  ENSG00000170298_14 (sequence is synthesized)
gtggggagggcagaggccaggcccttgaccatctacccggcctggcgaggttggtgggtgaatgtggttggctggccgtgatggaacaacctgagttgccactccatgggcagccacgga

SEQ ID NO: 567131 - DNA, 120 bp, Artificial Sequence
  ENSG00000170298_15 (sequence is synthesized)
agaccatgccccacgttcacttctctcacctgcaaagggaggctaggctgagagacgtttccccgagaggaaagatgggccagagccaccagcgtccccatctgtcttctccagggttct

SEQ ID NO: 567132 - DNA, 120 bp, Artificial Sequence
  ENSG00000170298_16 (sequence is synthesized)
ctgccgtgtggcaccctctggtgggagctggggtggtctttactcaggagagcctgggtgagacctggtttctttcttccagacccagacagtcatccacacggtgcagagcgcctctgg

SEQ ID NO: 567133 - DNA, 120 bp, Artificial Sequence
  ENSG00000170298_17 (sequence is synthesized)
accttaaaactgtcgtgtcaacgtgagcacattgcatggccctcccttttcaccccacgagtctttctttctgtgtttggccaaatttcctttcatgacactaatctaagcccattaatt

SEQ ID NO: 567134 - DNA, 120 bp, Artificial Sequence
  ENSG00000170298_18 (sequence is synthesized)
tgaggagcaccggaaagttttcctttggcttttatggaaccaagtaaagatatcgtgggcttcttctcagctgacagcctaaattcatgggaaatggtacaatcttccccttccatgtgg

SEQ ID NO: 567135 - DNA, 120 bp, Artificial Sequence
  ENSG00000170298_19 (sequence is synthesized)
ctgccactggctgacctgtccccgtccttctgacagccgatgcctttcatcaccaccattccgggagggctgtacccatccaagtccatcatcctgtcaggcactgtcctgcccagtgct

SEQ ID NO: 567136 - DNA, 120 bp, Artificial Sequence
  ENSG00000170298_20 (sequence is synthesized)
cagaggctggcgatgatggggaggaaatggggctcagaactcagtggacaaaggtccaggtaggctgcccaccgcaggttccacatcaacctgtgctctgggagccacatcgccttccac

SEQ ID NO: 567137 - DNA, 120 bp, Artificial Sequence
  ENSG00000170298_21 (sequence is synthesized)
gagaggaagatgcacatgcccttccagaaggggatgccctttgacctctgcttcctggtgcagagctcagatttcaaggaacatggatggagctggaagccgttgcaggagcagaaaacc

SEQ ID NO: 567138 - DNA, 120 bp, Artificial Sequence
  ENSG00000170298_22 (sequence is synthesized)
gctgaacgatgagaacacatggacacaagtggggaaacaacacacactggggcctggtcggggacggagagcatcaggaagattagctaatggatgctgggcttgataccaaggtgatgg

SEQ ID NO: 567139 - DNA, 120 bp, Artificial Sequence
  ENSG00000170298_23 (sequence is synthesized)
gataccaaggtgatggtgaacgggagcctcttcgtgcagtacttccaccgcgtgcccttccaccgtgtggacaccatctccgtcaatggctctgtgcagctgtcctacatcagcttccag

SEQ ID NO: 567140 - DNA, 120 bp, Artificial Sequence
  ENSG00000170310_0 (sequence is synthesized)
ggagtctgcaggatggcaccggacccctggttctccacatacgattctacttgtcaaattgcccaagaaattgctgagaaaattcaacaacgaaatcaatatgaaagaaaaggtgaaaag

SEQ ID NO: 567141 - DNA, 120 bp, Artificial Sequence
  ENSG00000170310_1 (sequence is synthesized)
gcaccaaagcttaccgtgacaatcagagctttgttgcagaacctgaaggaaaagatcgcccttttgaaggacttattgctaagagctgtgtcaacacatcagataacacagcttgaaggg

SEQ ID NO: 567142 - DNA, 120 bp, Artificial Sequence
  ENSG00000170310_2 (sequence is synthesized)
gaccgaagacagaacctcttggatgatcttgtaactcgagagagactacttctggcatcctttaagaatgagggtgccgaaccagatctaatcaggtccagcctgatgagtgaagaggct

SEQ ID NO: 567143 - DNA, 120 bp, Artificial Sequence
  ENSG00000170310_3 (sequence is synthesized)
aggccttgatgccctttcctctatcataagtcgccaaaaacaaatggggcaggaaattgggaatgaattggatgaacaaaatgagataattgacgaccttgccaacctagtggagaacac

SEQ ID NO: 567144 - DNA, 120 bp, Artificial Sequence
  ENSG00000170310_4 (sequence is synthesized)
agatgaaaaacttcgcaatgaaaccaggcgggtaaacatggtggacagaaagtcagcctcttgtgggatgatcatggtgattttactgctgcttgtggctatcgtggttgttgcagtctg

SEQ ID NO: 567145 - DNA, 120 bp, Artificial Sequence
  ENSG00000170310_5 (sequence is synthesized)
gccgaccaactgatggcagtaaagagaccaccagcagtgacacctgccaatgacagatgcaagcccaacacccttttggtacgcaaaacctgctctcaataaattcccccaaagctctga

SEQ ID NO: 567146 - DNA, 120 bp, Artificial Sequence
  ENSG00000170310_6 (sequence is synthesized)
agaaacccagcctgccgagttcgagttcattagcattcttggaaatgaaggggctccggtcgcgcacgggacgaactgcggggagtgagccgcgcgggccgccgtagtcagctgctaaga

SEQ ID NO: 567147 - DNA, 120 bp, Artificial Sequence
  ENSG00000170310_7 (sequence is synthesized)
agaaagtcagcctcttgtggtaagagatagctacgttatggctctgtttctgtcatagcttgtggatttactctgctctgagtttcctgtttgtctaattactgtggggatttggttgct

SEQ ID NO: 567148 - DNA, 120 bp, Artificial Sequence
  ENSG00000170310_8 (sequence is synthesized)
cttctgatacaggcagttccatttgatgaagcactgaaattgctaaacaatggttaaatctggtcaaaatgaaatggagttcaaagggcatatcattcattgtttttttgttgttgtttt

SEQ ID NO: 567149 - DNA, 120 bp, Artificial Sequence
  ENSG00000170310_9 (sequence is synthesized)
gttttaaaggggatctcacttgcttttgtgccgtcttaaaataaccacaagcttaattgagttcaaatcctatgtttagtgatggtatctttgtcaagtcaccttacctcttgatacctt

SEQ ID NO: 567150 - DNA, 120 bp, Artificial Sequence
  ENSG00000170310_10 (sequence is synthesized)
gtatgtaaaatggggattcatatgccaagataagaatcgcttggagggcttgcttaaaatactgatcctgaggccctcccctggggattctgattgagtagatctagggtggagttcaag

SEQ ID NO: 567151 - DNA, 120 bp, Artificial Sequence
  ENSG00000170310_11 (sequence is synthesized)
aatgttcattatttaacaagtgtaccaagcagttctgctgcaggtgcttgttctgcagaaattctgatgcagacttttgtgaggtttaaattgtgtattgccggtgcacagtgccttgcc

SEQ ID NO: 567152 - DNA, 120 bp, Artificial Sequence
  ENSG00000170310_12 (sequence is synthesized)
tccaggctcacccccatcttagttaaacctgcagaggggatgttaattagcaaagactggcgctcagggagttgggggagctcttagccctctcccttccaagaaagatgaccttttgga

SEQ ID NO: 567153 - DNA, 120 bp, Artificial Sequence
  ENSG00000170310_13 (sequence is synthesized)
aattgggctccagttgctctcgttcgaggcactcggagtgcttcccacgtatctcatttatcctcatgacaccccagagagggatgatcatggtgattttactgctgcttgtggctatcg

SEQ ID NO: 567154 - DNA, 120 bp, Artificial Sequence
  ENSG00000170310_14 (sequence is synthesized)
ttaagaaaggaaggaatctgggccacccagattttcccacagcttgaggaagacctggtttccaaaatattgcctgtaatcttgatttctattttaagtgtctgttacatgttttacagt

SEQ ID NO: 567155 - DNA, 120 bp, Artificial Sequence
  ENSG00000170310_15 (sequence is synthesized)
gaatatgctggcaaagcaagacctaccgagggaattaacttatttgggtataacctgtacagttcaggaagctaatgttttccgtcagtgcggtatttacggagccccacactgctctct

SEQ ID NO: 567156 - DNA, 120 bp, Artificial Sequence
  ENSG00000170310_16 (sequence is synthesized)
gtctagaccgccttgaccatggctagctactgctccaacaggaaaacttccatgatcatcctaagctgtgattccgcttctgggagtttccagagtttttaatgatccatttattttcgg

SEQ ID NO: 567157 - DNA, 120 bp, Artificial Sequence
  ENSG00000170310_17 (sequence is synthesized)
agtgggcaataccagtagaaaccatacatctctcctctcaccacctgccccgtgtttatgtagatttgagatgtgccttatttttcctccagaggcacagacactgcctctagtatggga

SEQ ID NO: 567158 - DNA, 120 bp, Artificial Sequence
  ENSG00000170310_18 (sequence is synthesized)
ccggtctgcttaagtattttctatatgatagaaagtaaaaatgctctgagagaagcaaaacataaggggctattgggagttcaccgtgaacccttcaaagcctccaacgctgctgaatga

SEQ ID NO: 567159 - DNA, 120 bp, Artificial Sequence
  ENSG00000170310_19 (sequence is synthesized)
caactagaagcttattaaatgttttgagagaattctggcaagctcagatgtcaggttctccacatacgattctacttgtcaaattgcccaagaaattgctgagaaaattcaacaacgaaa

SEQ ID NO: 567160 - DNA, 120 bp, Artificial Sequence
  ENSG00000170310_20 (sequence is synthesized)
tgcatatgaaattccagatagtactaaagatacttagtaccatcttcttagagttggcttcacatgaaacttatccttttgttggcatttcacaggaggcagcacctttacttattttaa

SEQ ID NO: 567161 - DNA, 120 bp, Artificial Sequence
  ENSG00000170310_21 (sequence is synthesized)
agagaataaagaaaatctctttacagaggggtttgatgtcaaaaagtactttggtgtcttgggagaaggcctttggaaataagttttaaaaatctataaataaattttctcatcccaggc

SEQ ID NO: 567162 - DNA, 120 bp, Artificial Sequence
  ENSG00000170310_22 (sequence is synthesized)
aggaagaactttctaatgattgaaattcatcatggaatcactgcaatggccgcaaacagaggcgtctaagagactgggaaagtggccggcctgagataattgacgaccttgccaacctag

SEQ ID NO: 567163 - DNA, 120 bp, Artificial Sequence
  ENSG00000170310_23 (sequence is synthesized)
accagatctaatcaggaccagaagtctaggatggttcagaataaggttctagaagaattctgtttaaaaataatgtaagtactgtcaaggagaaatgactcctgtggagtgatttggaga

SEQ ID NO: 567164 - DNA, 120 bp, Artificial Sequence
  ENSG00000170312_0 (sequence is synthesized)
gcacttggcttcaaagctggctcttggaaattgagcggagagcgacgcggttgttgtagctgccgctgcggccgccgcggaataataagccgggatctaccatacccattgactaactat

SEQ ID NO: 567165 - DNA, 120 bp, Artificial Sequence
  ENSG00000170312_1 (sequence is synthesized)
ggaagattataccaaaatagagaaaattggagaaggtacctatggagttgtgtataagggtagacacaaaactacaggtcaagtggtagccatgaaaaaaatcagactagaaagtgaaga

SEQ ID NO: 567166 - DNA, 120 bp, Artificial Sequence
  ENSG00000170312_2 (sequence is synthesized)
ggaaggggttcctagtactgcaattcgggaaatttctctattaaaggaacttcgtcatccaaatatagtcagtcttcaggatgtgcttatgcaggattccaggttatatctcatctttga

SEQ ID NO: 567167 - DNA, 120 bp, Artificial Sequence
  ENSG00000170312_3 (sequence is synthesized)
gtttctttccatggatctgaagaaatacttggattctatccctcctggtcagtacatggattcttcacttgttaagagttatttataccaaatcctacaggggattgtgttttgtcactc

SEQ ID NO: 567168 - DNA, 120 bp, Artificial Sequence
  ENSG00000170312_4 (sequence is synthesized)
tagaagagttcttcacagagacttaaaacctcaaaatctcttgattgatgacaaaggaacaattaaactggctgattttggccttgccagagcttttggaatacctatcagagtatatac

SEQ ID NO: 567169 - DNA, 120 bp, Artificial Sequence
  ENSG00000170312_5 (sequence is synthesized)
acatgaggtagtaacactctggtacagatctccagaagtattgctggggtcagctcgttactcaactccagttgacatttggagtataggcaccatatttgctgaactagcaactaagaa

SEQ ID NO: 567170 - DNA, 120 bp, Artificial Sequence
  ENSG00000170312_6 (sequence is synthesized)
accacttttccatggggattcagaaattgatcaactcttcaggattttcagagctttgggcactcccaataatgaagtgtggccagaagtggaatctttacaggactataagaatacatt

SEQ ID NO: 567171 - DNA, 120 bp, Artificial Sequence
  ENSG00000170312_7 (sequence is synthesized)
atccagccaaacgaatttctggcaaaatggcactgaatcatccatattttaatgatttggacaatcagattaagaagatgtagctttctgacaaaaagtttccatatgttatatcaacag

SEQ ID NO: 567172 - DNA, 120 bp, Artificial Sequence
  ENSG00000170312_8 (sequence is synthesized)
atagttgtgtttttattgttaactcttgtctatttttgtcttatatatatttctttgttatcaaacttcagctgtacttcgtcttctaatttcaaaaatataacttaaaaatgtaaatat

SEQ ID NO: 567173 - DNA, 120 bp, Artificial Sequence
  ENSG00000170312_9 (sequence is synthesized)
tctatatgaatttaaatataattctgtaaatgtgtgtaggtctcactgtaacaactatttgttactataataaaactataatattgatgtcaggaatcaggaaaaaatttgagttggctt

SEQ ID NO: 567174 - DNA, 120 bp, Artificial Sequence
  ENSG00000170312_10 (sequence is synthesized)
aaatcatctcagtccttatggcagttttattttcctgtagttggaactactaaaatttaggaaaatgctaagttcaagtttcgtaatgctttgaagtatttttatgctctgaatgtttaa

SEQ ID NO: 567175 - DNA, 120 bp, Artificial Sequence
  ENSG00000170312_11 (sequence is synthesized)
atgttctcatcagtttcttgccatgttgttaactatacaacctggctaaagatgaatatttttctactggtattttaatttttgacctaaatgtttaagcattcggaatgagaaaactat

SEQ ID NO: 567176 - DNA, 120 bp, Artificial Sequence
  ENSG00000170312_12 (sequence is synthesized)
acagatttgagaaatgatgctaaatttataggagttttcagtaacttaaaaagctaacatgagagcatgccaaaatttgctaagtcttacaaagatcaagggctgtccgcaacagggaag

SEQ ID NO: 567177 - DNA, 120 bp, Artificial Sequence
  ENSG00000170312_13 (sequence is synthesized)
aacagttttgaaaatttatgaactatcttatttttaggtaggttttgaaagctttttgtctaagtgaattcttatgccttggtcagagtaataactgaaggagttgcttatcttggcttt

SEQ ID NO: 567178 - DNA, 120 bp, Artificial Sequence
  ENSG00000170312_14 (sequence is synthesized)
cgagtctgagtttaaaactacacattttgacatagtgtttattagcagccatctaaaaaggctctaatgtatatttaactaaaattactagctttgggaattaaactgtttaacaaataa

SEQ ID NO: 567179 - DNA, 120 bp, Artificial Sequence
  ENSG00000170312_15 (sequence is synthesized)
gctggctcttggaaattgagcggagagcgacgcggttgttgtagctgccgctgcggccgccgcggaataataagccgggtacagtggctggggtcagggtcgtgtctaggggacggccga

SEQ ID NO: 567180 - DNA, 120 bp, Artificial Sequence
  ENSG00000170312_16 (sequence is synthesized)
acccgggaaggcctgcccagcgtagctgggctctgattggctgctttgaaagtctacgggctacccgattggtgaatccggggccctttagcgcggatctaccatacccattgactaact

SEQ ID NO: 567181 - DNA, 120 bp, Artificial Sequence
  ENSG00000170312_17 (sequence is synthesized)
tataaagggactatatatagaagtccctgcattttgtgggaatatgcttggaaaaagtgttagaataagaaaaagtatttcatttttctccctcatggttagtttatacaggttagagat

SEQ ID NO: 567182 - DNA, 120 bp, Artificial Sequence
  ENSG00000170312_18 (sequence is synthesized)
acccatgttattaccagatagtgtttctagtaagtaaaaattagtgcctgagataacatagaactggtaggtattgttggaagctagggtagtctggtctttctttggctgtcagataca

SEQ ID NO: 567183 - DNA, 120 bp, Artificial Sequence
  ENSG00000170312_19 (sequence is synthesized)
tgtaaaacaaagtaatgaaagcctagggcagagtggtggttgtaggtgttttattccagttttgaacatgttttggtcaatttattgtagacatttattatatttcaggtaaattataaa

SEQ ID NO: 567184 - DNA, 120 bp, Artificial Sequence
  ENSG00000170312_20 (sequence is synthesized)
attcttgcaccagttctaccaaaccactctgcagaggtagcgctgttagttttatttgtaatcttacacttgtatgtatgttcactttgtatgtatataaagatttttttttttacacaa

SEQ ID NO: 567185 - DNA, 120 bp, Artificial Sequence
  ENSG00000170312_21 (sequence is synthesized)
ggtggacttatttgcatatgtatatatacatattttcccttttttgtgtaaaacattatcaagacgtagatctacctatgtctatttacatttttgatataattaaaccacttccatatt

SEQ ID NO: 567186 - DNA, 120 bp, Artificial Sequence
  ENSG00000170312_22 (sequence is synthesized)
gatgaacatttaaattattttccaacttggttattgttgctcttattaacagtactgcactgaatgtccttatagatatttatcttcgtatgcaactttataggataaatttttagaatg

SEQ ID NO: 567187 - DNA, 120 bp, Artificial Sequence
  ENSG00000170312_23 (sequence is synthesized)
ggaatgatggattgaagatgtttatttacattttgatagatattgccggttgccccctaaaaaacttgtagcaatttactcttaaatactcatggtgtgtaatacttattgttttagtac

SEQ ID NO: 567188 - DNA, 120 bp, Artificial Sequence
  ENSG00000170312_24 (sequence is synthesized)
atcattgccaaaacttggttttatcaatctgttaactatgtgaaaaaggcatattaagattgttttaattttatatttcatgacaatttaacacttcatatttagctattataaaccgcc

SEQ ID NO: 567189 - DNA, 120 bp, Artificial Sequence
  ENSG00000170312_25 (sequence is synthesized)
tatattttcgttaggatacgttctttaacaatcttgcatgacttttggactttctgcttttatgtcttgcttaagtcttcctcactcaaagatcgaatgtattagaataatacatgtcag

SEQ ID NO: 567190 - DNA, 120 bp, Artificial Sequence
  ENSG00000170312_26 (sequence is synthesized)
tatttttctggtagttttagtaagtcctgtcttccacacatactttttttgtcttaaattctgtattaagatttattttgacttaaaaactgggatacagattctgctttatctttttcc

SEQ ID NO: 567191 - DNA, 120 bp, Artificial Sequence
  ENSG00000170312_27 (sequence is synthesized)
tgaatatgtaaaaatgaaagatagaaaaggccaactgtattgaagatacaaaatagagttggtagcggtatatagaagaaaaatcaagaggcttctgtgtagaaaaccaatttgtaattt

SEQ ID NO: 567192 - DNA, 120 bp, Artificial Sequence
  ENSG00000170312_28 (sequence is synthesized)
aaggatcggggaccaaaaatgtttaaagactaaatgtgttcacattactatagatatgtctataaggtgaagattcttttcttaggtatacaaatgtgatgttgtatataaatgggcttc

SEQ ID NO: 567193 - DNA, 120 bp, Artificial Sequence
  ENSG00000170312_29 (sequence is synthesized)
aatagagaaaattggagaagagaaactcataaaagctatagaagaggccttcttcctagaacagtgcactctaatcacttttgaagttaaaccaatgccatggaaagcaagctattcaac

SEQ ID NO: 567194 - DNA, 120 bp, Artificial Sequence
  ENSG00000170315_0 (sequence is synthesized)
atttaggggcggttggctttgttgggtgagcttgtttgtgtccctgtgggtggacgtggttggtgattggcaggatcctggtatccgctaacaggtcaaaatgcagatcttcgtgaaaac

SEQ ID NO: 567195 - DNA, 120 bp, Artificial Sequence
  ENSG00000170315_1 (sequence is synthesized)
ccttaccggcaagaccatcacccttgaggtggagcccagtgacaccatcgaaaatgtgaaggccaagatccaggataaggaaggcattccccccgaccagcagaggctcatctttgcagg

SEQ ID NO: 567196 - DNA, 120 bp, Artificial Sequence
  ENSG00000170315_2 (sequence is synthesized)
caagcagctggaagatggccgtactctttctgactacaacatccagaaggagtcgaccctgcacctggtcctgcgtctgagaggtggtatgcagatcttcgtgaagaccctgaccggcaa

SEQ ID NO: 567197 - DNA, 120 bp, Artificial Sequence
  ENSG00000170315_3 (sequence is synthesized)
gctcatctttgcaggcaagcagctggaagatggccgcactctttctgactacaacatccagaaggagtcgaccctgcacctggtcctgcgtctgagaggtggtatgcagatcttcgtgaa

SEQ ID NO: 567198 - DNA, 120 bp, Artificial Sequence
  ENSG00000170315_4 (sequence is synthesized)
gaccctgaccggcaagaccatcactctggaggtggagcccagtgacaccatcgaaaatgtgaaggccaagatccaagataaagaaggcatcccccccgaccagcagaggctcatctttgc

SEQ ID NO: 567199 - DNA, 120 bp, Artificial Sequence
  ENSG00000170315_5 (sequence is synthesized)
aggcaagcagctggaagatggccgcactctttctgactacaacatccagaaagagtcgaccctgcacctggtcctgcgcctgaggggtggctgttaattcttcagtcatggcattcgcag

SEQ ID NO: 567200 - DNA, 120 bp, Artificial Sequence
  ENSG00000170315_6 (sequence is synthesized)
tgcccagtgatggcattactctgcactatagccatttgccccaacttaagtttagaaattacaagtttcagtaatagctgaacctgttcaaaatgttaataaaggtttcgttgcatggta

SEQ ID NO: 567201 - DNA, 120 bp, Artificial Sequence
  ENSG00000170315_7 (sequence is synthesized)
gggccttgttgacctgaggggggcgagggcggttggcgcgcgcgcgcgttgacggaaactaacggacgcctaaccgatcggcgattctgtcgagtttacttcgcggggaaggcggaaaag

SEQ ID NO: 567202 - DNA, 120 bp, Artificial Sequence
  ENSG00000170315_8 (sequence is synthesized)
agtttgtgtggtttctggaagcctttactttggaatcccagtgtgagaaaggtgccccttcttgtgtttcaatgggatttttatttcgcgagtcttgtgggtttggttttgttttcagtt

SEQ ID NO: 567203 - DNA, 120 bp, Artificial Sequence
  ENSG00000170315_9 (sequence is synthesized)
tgcctaacaccgtgcttaggtttgaggcagattggagttcggtcgggggagtttgaatatccggaacagttagtggggaaagctgtggacgcttggtcaaaatgcagatcttcgtgaaaa

SEQ ID NO: 567204 - DNA, 120 bp, Artificial Sequence
  ENSG00000170315_10 (sequence is synthesized)
agtttccagagctttcgaggaaggtttcttcaactcaaattcatccgcctgataattttcttatattttcctaaagaaggaagagaagcgcatagaggagaagggaaataattttttagg

SEQ ID NO: 567205 - DNA, 120 bp, Artificial Sequence
  ENSG00000170315_11 (sequence is synthesized)
atgaggaatttggggctcagttgaaaagcctaaactgcctctcgggaggttgggcgcggcgaactactttcagcggcgcacggagacggcgtctacgtgaggggtcaaaatgcagatctt

SEQ ID NO: 567206 - DNA, 120 bp, Artificial Sequence
  ENSG00000170315_12 (sequence is synthesized)
gctatgaggaatttggggctcagttgaaaagcctaaactgcctctcgggaggttgggcgcggcgaactactttcagcggcgcacggagacggcgtctacgtcaaaatgcagatcttcgtg

SEQ ID NO: 567207 - DNA, 120 bp, Artificial Sequence
  ENSG00000170322_0 (sequence is synthesized)
caggattccagaattggaaataacgggagggaggacctggtccagcttcccttcctcaaataaggaaattgacacctggcgtgagtacctgtggagaagaaacaatggattccttagacc

SEQ ID NO: 567208 - DNA, 120 bp, Artificial Sequence
  ENSG00000170322_1 (sequence is synthesized)
atatgctgacagatcctctggaacttggtccgtgtggagatggccatggcacgcgcatcatggaggattgcctcctgggaggcaccagagttagtctgcccgaggaccttctggaggatc

SEQ ID NO: 567209 - DNA, 120 bp, Artificial Sequence
  ENSG00000170322_2 (sequence is synthesized)
ctgagatcttctttgatgttgtcagcctctcaacatggcaggaagtgttaagtgattctcaacgtgaacacctccagcagtttctgccccagtttcctgaagacagtgctgagcagcaga

SEQ ID NO: 567210 - DNA, 120 bp, Artificial Sequence
  ENSG00000170322_3 (sequence is synthesized)
atgaactcatcttagccttgttcagtggggagaacttccgctttggaaaccctctgcacattgcccagaagcttttccgagacggacactttaaccccgaggtggtcaagtaccggcagt

SEQ ID NO: 567211 - DNA, 120 bp, Artificial Sequence
  ENSG00000170322_4 (sequence is synthesized)
tatgcttcaagtcacagtacaagcgctacctcaactcccagcagcagtatttccatcggctgctgaagcaaattcttgcttcccggagtgatctgctggagatggcccggcggagtggcc

SEQ ID NO: 567212 - DNA, 120 bp, Artificial Sequence
  ENSG00000170322_5 (sequence is synthesized)
ccgcccttcccttccggcagaaacgcccttcaccatcccgcacacctgaggagcgggagtggcggacccagcagcgctacttgaaggtcttaagggaagtgaaagaggagtgtggtgaca

SEQ ID NO: 567213 - DNA, 120 bp, Artificial Sequence
  ENSG00000170322_6 (sequence is synthesized)
cagccctgtcatctgatgaagaggatctcagctcatggcttccgagctctccagcacgttctcctagtcctgcggtgcccctgcgggtggtgcccacactttcaaccacggatatgaaaa

SEQ ID NO: 567214 - DNA, 120 bp, Artificial Sequence
  ENSG00000170322_7 (sequence is synthesized)
ctgcagataaagtagaactgggggacagtgacctgaagataatgttaaagaagcaccacgagaagcggaaacatcagccagatcacccggaccttttgacaggggacctgactctcaatg

SEQ ID NO: 567215 - DNA, 120 bp, Artificial Sequence
  ENSG00000170322_8 (sequence is synthesized)
acatcatgactcgagtaaatgctggcaggaagggctctctggcagccttatatgacttggctgtccttaaaaaaaaggttaaggaaaaagaggaaaagaagaagaagaaaataaaaacga

SEQ ID NO: 567216 - DNA, 120 bp, Artificial Sequence
  ENSG00000170322_9 (sequence is synthesized)
tcaaatcagaggcagaggacctggccgagccgctaagcagtactgaaggggtcgcacctctctcacaggccccctctccgctggcaattcctgctatcaaggaagagccccttgaagacc

SEQ ID NO: 567217 - DNA, 120 bp, Artificial Sequence
  ENSG00000170322_10 (sequence is synthesized)
tcaagccttgccttggaatcaatgaaatatcttccagcttcttctctcttctattagagatcttgctgctggagagtcaggctagccttcctatgctagaggagcgagttttggattggc

SEQ ID NO: 567218 - DNA, 120 bp, Artificial Sequence
  ENSG00000170322_11 (sequence is synthesized)
agtcatcgccagccagctccctcaacagctggttctctgcggcccccaactgggctgagttggtactaccagccctgcagtatcttgctggagaaagtcgagctgttccttccagtttct

SEQ ID NO: 567219 - DNA, 120 bp, Artificial Sequence
  ENSG00000170322_12 (sequence is synthesized)
ctccatttgttgaattcaaagagaaaacccagcagtggaagttgcttggccaatcccaagataatgaaaaggaattagctgccctcttccagctatggctagagaccaaagatcaggcct

SEQ ID NO: 567220 - DNA, 120 bp, Artificial Sequence
  ENSG00000170322_13 (sequence is synthesized)
tctgtaagcaagaaaatgaagacagctcagatgccacaacacctgtccctcgggtaagaactgactatgtggtgcgtcccagcacgggggaggagaaacgggtttttcaggagcaggagc

SEQ ID NO: 567221 - DNA, 120 bp, Artificial Sequence
  ENSG00000170322_14 (sequence is synthesized)
gttacaggtatagccaaccccataaggcgttcacctttcgcatgcacggctttgagtctgtggtggggccagtgaagggcgtgtttgacaaggagacctcgctcaacaaggctcgggagc

SEQ ID NO: 567222 - DNA, 120 bp, Artificial Sequence
  ENSG00000170322_15 (sequence is synthesized)
actccctgctgcgctccgaccggcctgcctacgtcaccattctgtctcttgttcgggacgctgcggctcgactgcctaatggagaaggcacacgggcagagatctgtgaactgcttaagg

SEQ ID NO: 567223 - DNA, 120 bp, Artificial Sequence
  ENSG00000170322_16 (sequence is synthesized)
actcccagtttcttgcaccagatgtcaccagcactcaggtaaatacagtagtgagtggtgcactggatcggctacattacgaaaaagatccctgtgtgaaatacgacattggacgaaagc

SEQ ID NO: 567224 - DNA, 120 bp, Artificial Sequence
  ENSG00000170322_17 (sequence is synthesized)
tgtggatctacctgcatcgtgaccggagtgaagaagagtttgagcggattcaccaagcacaagcagctgcagctaaagccagaaaagctcttcagcaaaaacccaagcccccatccaagg

SEQ ID NO: 567225 - DNA, 120 bp, Artificial Sequence
  ENSG00000170322_18 (sequence is synthesized)
tgaagtccagtagcaaggagagctccataaaggtccttagcagtggcccttctgagcagagccagatgagcctcagtgactccagtatgccacccaccccagtcacacctgtaaccccca

SEQ ID NO: 567226 - DNA, 120 bp, Artificial Sequence
  ENSG00000170322_19 (sequence is synthesized)
ccacaccagcattgcccgccattcccatctcccctccacctgtatcggcagtgaacaaaagcggcccttccacagtctcagaaccagctaagtctagctcgggtgttcttctggtgtctt

SEQ ID NO: 567227 - DNA, 120 bp, Artificial Sequence
  ENSG00000170322_20 (sequence is synthesized)
caccaacaatgccacatctgggaacaatgctttccccagcttccagccagactgcacccagttctcaggctgccgcccgggtcgtgagccactctggctctgctggactgtctcaggtgc

SEQ ID NO: 567228 - DNA, 120 bp, Artificial Sequence
  ENSG00000170322_21 (sequence is synthesized)
gcacagacattgccacagatgccagcaggaccgcagatccgggttccagccactgccacacagaccaaagtagtgccccagacagtaatggccactgtgcccgtcaaagcgcagactacg

SEQ ID NO: 567229 - DNA, 120 bp, Artificial Sequence
  ENSG00000170322_22 (sequence is synthesized)
gcagccactgtgcagcggcctggacccgggcagacagggctcacggtgacaagtctccctgccacagccagccctgtgagtaagccagccacgagttctcctgggacctctgctcccagt

SEQ ID NO: 567230 - DNA, 120 bp, Artificial Sequence
  ENSG00000170322_23 (sequence is synthesized)
gcctccacggctgccgtcattcaaaatgtcacaggacagaacatcatcaagcaggtggcaatcactgggcagcttggtgtgaagccccaaacaggcaacagcattccactcacagccact

SEQ ID NO: 567231 - DNA, 120 bp, Artificial Sequence
  ENSG00000170322_24 (sequence is synthesized)
aacttccgcatccagggtaaggatgtattgcgtctgccgccctcttccatcaccacagatgccaagggccagacggttctgcgaatcactccggacatgatggccacattggccaagtcc

SEQ ID NO: 567232 - DNA, 120 bp, Artificial Sequence
  ENSG00000170322_25 (sequence is synthesized)
caggttaccacagtcaaattgacccaggacctcttcgggacaggaggcaacactacaggcaaaggcatctctgccaccttacacgtcacttccaatccagtacatgcagctgatagccct

SEQ ID NO: 567233 - DNA, 120 bp, Artificial Sequence
  ENSG00000170322_26 (sequence is synthesized)
gccaaggccagttcagccagtgccccttcatccactccaacaggtaccactgtggtcaaagtgactcctgacctcaagccaacagaagcctcaagttcggcttttcgcttgatgccagct

SEQ ID NO: 567234 - DNA, 120 bp, Artificial Sequence
  ENSG00000170322_27 (sequence is synthesized)
cttggcgtgagtgtggctgaccagaagggaaaaagcacagtggcctcttcagaagcaaaaccagctgccacgatccgcatcgtgcagggactgggagtgatgcctcccaaagcaggccag

SEQ ID NO: 567235 - DNA, 120 bp, Artificial Sequence
  ENSG00000170322_28 (sequence is synthesized)
accatcaccgttgcaacccacgccaagcaaggggcctcggtggccagtgggtctggaactgtccatacttcagcggtgtccttacccagtatgaatgctgctgtgtccaagactgtagct

SEQ ID NO: 567236 - DNA, 120 bp, Artificial Sequence
  ENSG00000170322_29 (sequence is synthesized)
gtggcttctggggctgcaagcacccccatcagcatcagcacaggagcccccaccgtgcggcaggtccctgtcagcaccacggttgtgtccacgtcccaggctgggaagttgcctacacgg

SEQ ID NO: 567237 - DNA, 120 bp, Artificial Sequence
  ENSG00000170322_30 (sequence is synthesized)
atcacagttcccctctctgtgatcagccagccaatgaagggcaagagcgtggtcacagcccccatcatcaaaggcaaccttggagccaacctcagtgggttgggccgcaacatcatcctc

SEQ ID NO: 567238 - DNA, 120 bp, Artificial Sequence
  ENSG00000170322_31 (sequence is synthesized)
acaactatgccagcaggcactaagctcattgctggcaataagcctgttagtttcctcactgctcagcagttgcagcagcttcagcagcaaggtcaggccacacaggtgcgcatccagact

SEQ ID NO: 567239 - DNA, 120 bp, Artificial Sequence
  ENSG00000170322_32 (sequence is synthesized)
gtccctgcatcccatctccaacagggaacagcttctggctcctccaaagcagtctccactgttgttgtgactacagctccgtctcctaaacaggcacctgagcaacaatgattatgagag

SEQ ID NO: 567240 - DNA, 120 bp, Artificial Sequence
  ENSG00000170322_33 (sequence is synthesized)
aggatggcttccgtgaaagaccatgcctggtctgtcctggctgagaagggaccagggaggttgcatcattgttttaagcttgcctgttcaaggcagccaggcgaggggtgatggcaacgg

SEQ ID NO: 567241 - DNA, 120 bp, Artificial Sequence
  ENSG00000170322_34 (sequence is synthesized)
tggcctggattcgtggcctggattctgctgccacgtgccatagtggagcaccctgagaaaggttcactccagggttccaaggtctgctctctaccaatctaggagaatattctgttgaaa

SEQ ID NO: 567242 - DNA, 120 bp, Artificial Sequence
  ENSG00000170322_35 (sequence is synthesized)
ttgcaggaattaccagttacgtccaacaagccagagttctgagagtaagacccccagggaaggcttaccagttgcagagtgcacacagcgaataggctggttctccatgaggattgtatt

SEQ ID NO: 567243 - DNA, 120 bp, Artificial Sequence
  ENSG00000170322_36 (sequence is synthesized)
ttttggcttctggtcttctccatgactagtggtctggataggagttttgtgtccagaaaattttatgtaatttatttttttaaagaacctgttgtacatctttctcaaatacaaacttgg

SEQ ID NO: 567244 - DNA, 120 bp, Artificial Sequence
  ENSG00000170322_37 (sequence is synthesized)
gctttagctgccccctccactaaaccgatgacttacttttttgactagaatgagaaaatggcaagaatcttagtaaggtggtagccagcttggtaactgcatagtaatcgagaggctgta

SEQ ID NO: 567245 - DNA, 120 bp, Artificial Sequence
  ENSG00000170322_38 (sequence is synthesized)
agatgggaattcatcgtaggcagcgaggtagagtgggtcccctgaaatgggattcgcttggcactgcctcttaaagataggggtgttgggatcttgattgtggccgccccccccagcttt

SEQ ID NO: 567246 - DNA, 120 bp, Artificial Sequence
  ENSG00000170322_39 (sequence is synthesized)
acctgcccactttgtccttcttggcaagcctgttcacatggacgtccagagccagtggacagagaggaggggacggacagcagaggtgctgcttttgcagcagaaactttgttgcagttc

SEQ ID NO: 567247 - DNA, 120 bp, Artificial Sequence
  ENSG00000170322_40 (sequence is synthesized)
ttttgcagcagaaactttgttgcagttcagagtataccttctgctctgctccagagcaagagttgcaaaccaggcccttggggctggccatttgtttttgtaaataaagttttattggaa

SEQ ID NO: 567248 - DNA, 120 bp, Artificial Sequence
  ENSG00000170322_41 (sequence is synthesized)
tatctgtggctgctttcagattcgaaggcagaattgagtagttgacatagagactggatggccctgaagcctaaagtatttcctatatggccttttaagtaaaagcgttttttgtttgtt

SEQ ID NO: 567249 - DNA, 120 bp, Artificial Sequence
  ENSG00000170322_42 (sequence is synthesized)
caggattccagaattggaaataacgggagggaggacctggtccagcttcccttcctcaaataaggaaattgacacctggcgtgagaaggggttttgccatgttcgctaggctggtctcaa

SEQ ID NO: 567250 - DNA, 120 bp, Artificial Sequence
  ENSG00000170322_43 (sequence is synthesized)
gctgtttagctgtaattagggtgcaaggataaggtgtaagaactggctggaggttgaatgttttcctggaggagtgttagcatcaactagatccctggaatttctgcctttctgtctcaa

SEQ ID NO: 567251 - DNA, 120 bp, Artificial Sequence
  ENSG00000170322_44 (sequence is synthesized)
ctggagctggaggttcttggccagactgcatgcccatgggaagaagatttgtcatcttcgactctcagcttatagatacttaggtgtgagttcccaccaaaggcaaaggcagtgcagctt

SEQ ID NO: 567252 - DNA, 120 bp, Artificial Sequence
  ENSG00000170322_45 (sequence is synthesized)
tgatagatgctgaagagatttcttctgtttcattccgtttaattcagcattcagtagtcgagtttctggatttagaatagactgttcatgagtttatttagtgaaattcccatggccaca

SEQ ID NO: 567253 - DNA, 120 bp, Artificial Sequence
  ENSG00000170322_46 (sequence is synthesized)
attttagtatgctttttagcccactttgtaggaataggagctggaaaggatggatttagtaaatgttggtagagtgattgagtttaagctccctgtggtcctgttagcattgtgcagtcc

SEQ ID NO: 567254 - DNA, 120 bp, Artificial Sequence
  ENSG00000170322_47 (sequence is synthesized)
tgtgctatcaacttgacccctaatcccagccatcagtctgaaaatgttgtggtatgtagttttctgaaggtgatcagcagtgttctgttattacacgaaggagaaaagtagcattaattt

SEQ ID NO: 567255 - DNA, 120 bp, Artificial Sequence
  ENSG00000170322_48 (sequence is synthesized)
tcccaaagtactgagattgtagtctcattttactcatctgtaaaatgaaggcatatgaaatttatgaatttaggagttactgtaggagcattctgagaaaagagctcttccagagtacct

SEQ ID NO: 567256 - DNA, 120 bp, Artificial Sequence
  ENSG00000170322_49 (sequence is synthesized)
gtgcgcgcacccagactccttgcgggagcgagtgcgtctgggagcccgcggccggagaagggctgcgggttagggggccggcgcccgcggttcagagtacctgtggagaagaaacaatgg

SEQ ID NO: 567257 - DNA, 120 bp, Artificial Sequence
  ENSG00000170322_50 (sequence is synthesized)
ctaaaaaacaaaaatgtattgacttatatagaaaatacataatatgaattcagcttgtaaccagcatcagcttgtaaccagcatctacataaaaaaataaaacatttccagcatactaga

SEQ ID NO: 567258 - DNA, 120 bp, Artificial Sequence
  ENSG00000170323_0 (sequence is synthesized)
acagcaccctcctgaaaactgcagcttccttctcaccttgaagaataatcctagaaaactcacaaaatgtgtgatgcttttgtaggtacctggaaacttgtctccagtgaaaactttgat

SEQ ID NO: 567259 - DNA, 120 bp, Artificial Sequence
  ENSG00000170323_1 (sequence is synthesized)
gattatatgaaagaagtaggagtgggctttgccaccaggaaagtggctggcatggccaaacctaacatgatcatcagtgtgaatggggatgtgatcaccattaaatctgaaagtaccttt

SEQ ID NO: 567260 - DNA, 120 bp, Artificial Sequence
  ENSG00000170323_2 (sequence is synthesized)
aaaaatactgagatttccttcatactgggccaggaatttgacgaagtcactgcagatgacaggaaagtcaagagcaccataaccttagatgggggtgtcctggtacatgtgcagaaatgg

SEQ ID NO: 567261 - DNA, 120 bp, Artificial Sequence
  ENSG00000170323_3 (sequence is synthesized)
cgtcacttccacgagagtttatgagagagcataagccaagggacgttgacctggactgaagttcgcattgaactctacaacattctgtgggatatattgttcaaaaagatattgttgttt

SEQ ID NO: 567262 - DNA, 120 bp, Artificial Sequence
  ENSG00000170323_4 (sequence is synthesized)
tccatgatttagcaagcaactaattttctcccaagctgattttattcaatatggttacgttggttaaataaactttttttagatttagaaggtgatgtaatgatgtattcattgtgctta

SEQ ID NO: 567263 - DNA, 120 bp, Artificial Sequence
  ENSG00000170323_5 (sequence is synthesized)
tgatgtattcttagtcataactgagtgaaggaaatgggaaatttgcattatttctttgttctgatatgaataataacatatttcataataattcaaggtaaaaagggatatctatggatt

SEQ ID NO: 567264 - DNA, 120 bp, Artificial Sequence
  ENSG00000170323_6 (sequence is synthesized)
tccctaggtaggagataacaagtatgtaccattactgaatattaaatccttctttaccatagctacagttaagtaggtgtatctcagaaacctaaggtagttttaaatgtagtgaaattg

SEQ ID NO: 567265 - DNA, 120 bp, Artificial Sequence
  ENSG00000170323_7 (sequence is synthesized)
ctccctaaatgctggaattacagttgtgagccaccacacctggcctgtctccaaattaacaaaaaaattattaacataatttatttgagtcatacaatacatagagtatttcaagtgaat

SEQ ID NO: 567266 - DNA, 120 bp, Artificial Sequence
  ENSG00000170323_8 (sequence is synthesized)
taaaatactataacaatgtaagagaatgtttataaaaatggaagaaagaaatagaaaaaccacccatactactaccatcgcaatgtaaatttctttttcatattccttcacagtaatttt

SEQ ID NO: 567267 - DNA, 120 bp, Artificial Sequence
  ENSG00000170323_9 (sequence is synthesized)
tccaattatgtaatttgtataacactctggacataacgtatccataagtggttatgttgttgtttttgagactcattttttttcttgttgcaatatattcttgtcatttagaattactaa

SEQ ID NO: 567268 - DNA, 120 bp, Artificial Sequence
  ENSG00000170323_10 (sequence is synthesized)
aatttttttctgcctccctctgcacattgtcattacattttcttatgcctacagagcaccataaccttagatgggggtgtcctggtacatgtgcagaaatgggatggaaaatcaaccacc

SEQ ID NO: 567269 - DNA, 120 bp, Artificial Sequence
  ENSG00000170324_0 (sequence is synthesized)
agtaaacaaagacagcggcaacagtgctggtggcagggagctccgcggacagacttgcaagagacccctgctccttgttggaaagttgtcccatgatgaaggcctagacctggtcacgga

SEQ ID NO: 567270 - DNA, 120 bp, Artificial Sequence
  ENSG00000170324_1 (sequence is synthesized)
gacttttggatgcagcctttaacgaaggacgcaggcatgagcctgtcctctgtgacgctggccagcgccctacaggtcaggggtgaagctctgtctgaggaggaaatctggtccctcctg

SEQ ID NO: 567271 - DNA, 120 bp, Artificial Sequence
  ENSG00000170324_2 (sequence is synthesized)
ttcctggccgctgagcagctcctggaagacctccgcaacgattcctcggactatgtggtttgcccctggtcagccctgctttctgcagctggaagcctttctttccaaggccgtgtttct

SEQ ID NO: 567272 - DNA, 120 bp, Artificial Sequence
  ENSG00000170324_3 (sequence is synthesized)
catatagaggctgctcctttcaaggcccctgaactgctacagggacagagtgaggatgagcagcctgatgcatctcagatgcatgtctattctttaggaatgaccctctactggtcagca

SEQ ID NO: 567273 - DNA, 120 bp, Artificial Sequence
  ENSG00000170324_4 (sequence is synthesized)
gggtttcatgttccgccacatcagcccctgcagctctgcgagcccctgcactccatcctgctgaccatgtgtgaagaccagcctcacaggcggtgcacgttgcagtcggttctggaagct

SEQ ID NO: 567274 - DNA, 120 bp, Artificial Sequence
  ENSG00000170324_5 (sequence is synthesized)
tgtcgggttcatgagaaagaagtgtctgtctacccagcccctgctggtctccacatcagaaggctggttggcttggttctgggtaccatttctgaggtggagaaaagagttgtggaggaa

SEQ ID NO: 567275 - DNA, 120 bp, Artificial Sequence
  ENSG00000170324_6 (sequence is synthesized)
agctcctctgtgcagcagaacagaagctacctgctcaggaagaggctgcgtgggacaagcagcgagagcccagcggcacaggccccggagtgtctgcatccttgcagagtttcagaaaga

SEQ ID NO: 567276 - DNA, 120 bp, Artificial Sequence
  ENSG00000170324_7 (sequence is synthesized)
agcacggagacccagagctcaccagagccccattggagcaccttgacacacagtcactgcagcctccttgttaaccgcgctcttccaggagcagatccccaggaccagcaggcgggccgg

SEQ ID NO: 567277 - DNA, 120 bp, Artificial Sequence
  ENSG00000170324_8 (sequence is synthesized)
aggctcagctctggatctgtgcactcggcagcagacagctcatggccaacaactccttctcagaggggttttctgcaaagaaggagcaagttttccaggccagagttcatcctgttggct

SEQ ID NO: 567278 - DNA, 120 bp, Artificial Sequence
  ENSG00000170324_9 (sequence is synthesized)
ggagaggccccgatgacactacatctgccgggatcggttgtgaccaaaaaagggaaatcctatttggctctcagggacctctgtgtggtcctgctgaacgggcagcacctggaggtaaaa

SEQ ID NO: 567279 - DNA, 120 bp, Artificial Sequence
  ENSG00000170324_10 (sequence is synthesized)
tgtgatgttgaatcaacagtgggagctgtcttcaatgccgtgacatcctttgccaacctcgaggaactcacctactttggcttggcgtatatgaaaagcaaagagttctttttcctggac

SEQ ID NO: 567280 - DNA, 120 bp, Artificial Sequence
  ENSG00000170324_11 (sequence is synthesized)
agtgaaaccagattgtgcaaaatagctcctgaaggctggagagagcagcctcagaagacctccatgaataccttcacactcttcctgaggataaagttctttgtcagccactatgggctg

SEQ ID NO: 567281 - DNA, 120 bp, Artificial Sequence
  ENSG00000170324_12 (sequence is synthesized)
ctccagcacagcctgacaaggcaccagttttacctgcagcttcggaaagatatcctggaggagaggctgtactgcaatgaagagatactgctgcagctgggggtccttgccttgcaggct

SEQ ID NO: 567282 - DNA, 120 bp, Artificial Sequence
  ENSG00000170324_13 (sequence is synthesized)
gagtttggcaattaccctaaggagcaggtggagagtaagccatactttcacgttgaagattacatcccagcgagtctgatcgagaggatgaccgctctacgggtccaggttgaagtctca

SEQ ID NO: 567283 - DNA, 120 bp, Artificial Sequence
  ENSG00000170324_14 (sequence is synthesized)
gagatgcaccggctcagctctgcactgtggggagaggatgctgagctgaagttcttgagggtcactcagcagctcccagaatacggtgtgctggttcaccaagtattctcagagaagagg

SEQ ID NO: 567284 - DNA, 120 bp, Artificial Sequence
  ENSG00000170324_15 (sequence is synthesized)
aggccagaagaggagatggccctggggatctgtgccaagggtgtcatagtctatgaagtgaaaaacaacagcagaattgcaatgttacggtttcagtggagagaaaccgggaagatttct

SEQ ID NO: 567285 - DNA, 120 bp, Artificial Sequence
  ENSG00000170324_16 (sequence is synthesized)
acttatcaaaaaaagttcaccatcacaagcagtgtcactgggaagaagcacacatttgtcacagattcagccaagaccagtaaatacttactggacctctgctcagcccagcatgggttt

SEQ ID NO: 567286 - DNA, 120 bp, Artificial Sequence
  ENSG00000170324_17 (sequence is synthesized)
aatgcacagatgggctctgggcagccttcccatgttttatttgaccatgataagtttgtgcaaatggccaatttgagtcctgcacaccaggcccggtctaagcctctcatttggattcag

SEQ ID NO: 567287 - DNA, 120 bp, Artificial Sequence
  ENSG00000170324_18 (sequence is synthesized)
agattgtcatgctcagaaaacgagttgtttgtatccaggcttcagggtgctgcaggaggcctgctgagtacatcaatggataacttcaacgtggacggcagcaaggaggctggagcagaa

SEQ ID NO: 567288 - DNA, 120 bp, Artificial Sequence
  ENSG00000170324_19 (sequence is synthesized)
ggcatcgggcgcagcccctgcactggccgggagcagctgaagagtgcctgtgtgatccagaagccaatgacctgggactctctctctggaccacctgttcagagcatgcatgcaggctca

SEQ ID NO: 567289 - DNA, 120 bp, Artificial Sequence
  ENSG00000170324_20 (sequence is synthesized)
gctttatagctgaaccgggccgagaaattgtacgtgtgacactgaaacgtgacccacatcgtggttttgggtttgtcattaatgagggagagtattcaggccaagctgaccctggcattt

SEQ ID NO: 567290 - DNA, 120 bp, Artificial Sequence
  ENSG00000170324_21 (sequence is synthesized)
ttatatcttctattatacctggaggaccagcagaaaaagcaaaaacgatcaaaccaggagggcagatactagccctgaatcacatcagtctggagggcttcacattcaacatggctgtta

SEQ ID NO: 567291 - DNA, 120 bp, Artificial Sequence
  ENSG00000170324_22 (sequence is synthesized)
ggatgatccagaattcccctgacaacatagaattaattatttctcagtcaaaaggtgttggtggaaataacccagatgaagaaaagaatagcacagccaattctggggtctcctctacag

SEQ ID NO: 567292 - DNA, 120 bp, Artificial Sequence
  ENSG00000170324_23 (sequence is synthesized)
acatcctgagcttcgggtaccagggaagtttgttgtcacacacacaagaccaggacagaaatactgaagaactagacatggctggggtgcagagcttagtgcccaggctgagacatcagc

SEQ ID NO: 567293 - DNA, 120 bp, Artificial Sequence
  ENSG00000170324_24 (sequence is synthesized)
tttcctttctgccgttaaagggtgctggttcttcttgtcctccatcacctccagaaatcagtgctggtgaaatctactttgtggaactggttaaagaagatgggacacttggattcagtg

SEQ ID NO: 567294 - DNA, 120 bp, Artificial Sequence
  ENSG00000170324_25 (sequence is synthesized)
taactggtggcattaacaccagtgtgccatatggtggtatctatgtgaaatccattgttcctggaggaccagctgccaaggaagggcagatcctacagggtgaccgactcctgcaggtgg

SEQ ID NO: 567295 - DNA, 120 bp, Artificial Sequence
  ENSG00000170324_26 (sequence is synthesized)
atggagtgattctgtgcggcctcacccacaagcaggctgtgcagtgcctgacgggtcctgggcaggttgcaagactggtcttagagagaagagtccccaggagtacacagcagtgtcctt

SEQ ID NO: 567296 - DNA, 120 bp, Artificial Sequence
  ENSG00000170324_27 (sequence is synthesized)
ctgctaatgacagcatgggagatgaacgcacggctgtttccttggtaacagccttgcctggcaggccttcgagctgtgtctcagtgacagatggtcctaagtttgaagtcaaactaaaaa

SEQ ID NO: 567297 - DNA, 120 bp, Artificial Sequence
  ENSG00000170324_28 (sequence is synthesized)
agaatgccaatggtttgggattcagtttcgtgcagatggagaaagagagctgcagccatctcaaaagtgatcttgtgaggattaagaggctctttccggggcagccagctgaggagaatg

SEQ ID NO: 567298 - DNA, 120 bp, Artificial Sequence
  ENSG00000170324_29 (sequence is synthesized)
gggccattgcagctggtgacattatcctggccgtgaatggaaggtccacggaaggcctcatcttccaggaggtgctgcatttactgagaggggccccacaggaagtcacgctcctccttt

SEQ ID NO: 567299 - DNA, 120 bp, Artificial Sequence
  ENSG00000170324_30 (sequence is synthesized)
gccgaccccctccaggtgcgctgcctgagctggagcaggaatggcagacacctgaactctcagctgacaaagaattcaccagggcaacatgtactgactcatgtaccagccccatcctgg

SEQ ID NO: 567300 - DNA, 120 bp, Artificial Sequence
  ENSG00000170324_31 (sequence is synthesized)
atcaagaggacagctggagggacagtgcctccccagatgcaggggaaggcctgggtctcaggccagagtcttcccaaaaggccatcagagaggcacaatggggccaaaacagagagagac

SEQ ID NO: 567301 - DNA, 120 bp, Artificial Sequence
  ENSG00000170324_32 (sequence is synthesized)
cttgggccagttccttgacacattctcctgagtcccaccctcatttatgcaaacttcaccaagaaagggatgaatcaacattggcgacctctttggaaaaggatgtgaggcaaaactgct

SEQ ID NO: 567302 - DNA, 120 bp, Artificial Sequence
  ENSG00000170324_33 (sequence is synthesized)
attcagtttgtgatatcatgagacttggaagatattccttctcatctcctctaaccagactttcgacagatattttctgagcaccttctctgcatgtctgcagtgctgtgtaaaatgccc

SEQ ID NO: 567303 - DNA, 120 bp, Artificial Sequence
  ENSG00000170324_34 (sequence is synthesized)
tacctttgcatggactattctttctaatcaagaggcgtgtgtggcgaacttggggcagcccctggaagtcttgttctttgaccattacgtctgcggctgcatcaccagataatgagcttc

SEQ ID NO: 567304 - DNA, 120 bp, Artificial Sequence
  ENSG00000170324_35 (sequence is synthesized)
accactcgtctgcctcctgtgtccttccgcggggagtaaatgtcacttcagcttgccgcatctctaaataggcaaattttcagtgctcagaaaaggacctgatctttgcacaaagtgctt

SEQ ID NO: 567305 - DNA, 120 bp, Artificial Sequence
  ENSG00000170324_36 (sequence is synthesized)
tgatggttgcctgcttgagtcactcccaatcccttcctgaagccctttctttataattcttctgttgaaatagccatcatattcacagtactaatcacagcatctcacatttactaaaaa

SEQ ID NO: 567306 - DNA, 120 bp, Artificial Sequence
  ENSG00000170324_37 (sequence is synthesized)
cttaccccataccaggaacccagagttgggggggctgtgtcagaattatgtaatttacgtgtcccaataatcctagacgcttcttgaccatctagttttgtcaaatgagaaaactgaggt

SEQ ID NO: 567307 - DNA, 120 bp, Artificial Sequence
  ENSG00000170324_38 (sequence is synthesized)
tccaaagaagtcaataaacttgtccaaagtctgaccgactctgcttgccatgtgacgagtctgtcttagaactgggtcattgccctgcttgcaatgctgtgccctctggcaagccccccc

SEQ ID NO: 567308 - DNA, 120 bp, Artificial Sequence
  ENSG00000170324_39 (sequence is synthesized)
atccccccggtctcctgagctcggtaaggtgctccagctgcttctatcatagcacttcctacatggactgtaacatttctttactgctccaacttctcattaaattgggggctcctcaaa

SEQ ID NO: 567309 - DNA, 120 bp, Artificial Sequence
  ENSG00000170324_40 (sequence is synthesized)
gatgaagagtatcttaccatcaactctacatgccaaggccagctaccctgtgaagaatgtttggaggcagattctgggaccattcccttgccacagttctgctcttggggcactgtccca

SEQ ID NO: 567310 - DNA, 120 bp, Artificial Sequence
  ENSG00000170324_41 (sequence is synthesized)
gagtctttgcctccagaagagtccccagagagtgggagtgaatgggaagacctggaggagcctgtggccctggaatacggtgccctcaggtctctctcttttgggggtctgaatgtctag

SEQ ID NO: 567311 - DNA, 120 bp, Artificial Sequence
  ENSG00000170324_42 (sequence is synthesized)
cattccacccagatggcaacctctgacagtgtgcttagtttgcacaaatgtaaggggtaaataaaaaagccagtgggggcctgcactgggggatgagttcagagacaaacagaggtactg

SEQ ID NO: 567312 - DNA, 120 bp, Artificial Sequence
  ENSG00000170324_43 (sequence is synthesized)
gggaacctcaggatgagcagggcatgcactaggggactccaaactcatgaggaggcagtgtgggcagagttggctgatgtgtcctgactctgaggtcaagctggactgcagagagagaga

SEQ ID NO: 567313 - DNA, 120 bp, Artificial Sequence
  ENSG00000170324_44 (sequence is synthesized)
atgagacttggaagagatactgtaaatccaacctgccaaaactaaatgcagttgtcaggagcagagacctggggctcccagctgtgtcatcagggctaatggagacctcaatatggggcc

SEQ ID NO: 567314 - DNA, 120 bp, Artificial Sequence
  ENSG00000170324_45 (sequence is synthesized)
tgatgttggagaactggagacatgaagggacacaaaccccaaactttgttgtgagtttaaccgtaagtaaataggacaattataataccttcatatttcaagcctgaaatgcccaatctg

SEQ ID NO: 567315 - DNA, 120 bp, Artificial Sequence
  ENSG00000170324_46 (sequence is synthesized)
cttctatgaatttcctcctgaaaggcagagatgaatttggtggcccaagtctttaaaggacagctgtccagaaaagttgggcacagtgtcttttctcagtaaacattctgtagcaagcag

SEQ ID NO: 567316 - DNA, 120 bp, Artificial Sequence
  ENSG00000170324_47 (sequence is synthesized)
aatgaaaaatgcacatatcctttggcccatcaaagcacacaagacgtgccaggcacaagccttcaggcccacagccatatccacctacgctggtcactacctatatagagatagtggtgc

SEQ ID NO: 567317 - DNA, 120 bp, Artificial Sequence
  ENSG00000170324_48 (sequence is synthesized)
atcccacgtgagcagttgctgagcacccgccttgtaccagtgcttgggctggggacatgcccagatctctcacatagttgctattgttaagcttatgaacacctaatcttattgctcagt

SEQ ID NO: 567318 - DNA, 120 bp, Artificial Sequence
  ENSG00000170324_49 (sequence is synthesized)
ctgaggtcagtagagaaccgtgcttttcaagcagtagctgctggtcatgtgtggctattaaaatttgaattagttatattatcattaactaaaataaaataaaaaattaaattaatcagt

SEQ ID NO: 567319 - DNA, 120 bp, Artificial Sequence
  ENSG00000170324_50 (sequence is synthesized)
cagcatagaatcagtgtggagcctcttgctcagacatcccagggccaggcctccatcaggactgacactttccatttggtttctgagctctgcctggtagacccttgtgaaaggagatta

SEQ ID NO: 567320 - DNA, 120 bp, Artificial Sequence
  ENSG00000170324_51 (sequence is synthesized)
cccatataactgtgtttacccaaggggttggggaatggcacacacaaagctggtgaaaatccagaggtcagaggttggaaggtgctgcttttattactgagtattgaaagtgatccatta

SEQ ID NO: 567321 - DNA, 66 bp, Artificial Sequence
  ENSG00000170324_52 (sequence is synthesized)
ggtgctgcttttattactgagtattgaaagtgatccattacaggctgggctcggtggctcatgatt

SEQ ID NO: 567322 - DNA, 120 bp, Artificial Sequence
  ENSG00000170324_53 (sequence is synthesized)
gaagagtcttggtgtcctgtcatagggcccatcttgttggactgctgtggctgagtatagaccagcatcaggaaagtctcactgttaatgcaaggagccaccagaagctgacctggtcac

SEQ ID NO: 567323 - DNA, 120 bp, Artificial Sequence
  ENSG00000170324_54 (sequence is synthesized)
caggcagggtcagaacatattgatgaggacacagaaaaaataaacacagagaacagccgtcttccgaggcagagactgagggtttctgcatggaggtcctttggatagaagagccctcag

SEQ ID NO: 567324 - DNA, 120 bp, Artificial Sequence
  ENSG00000170324_55 (sequence is synthesized)
gtgaccttggtccaaagagtgtacccaccagctctgccactgggaaagaaacctgtaggctcctgcaaaggtgacctgggatgaagggcctggcccagttgttaagagctcacttcaaga

SEQ ID NO: 567325 - DNA, 120 bp, Artificial Sequence
  ENSG00000170324_56 (sequence is synthesized)
ggaggaagggaggttaaattctgggcaggtctgtaaccacccaacattctgttaaagtacttacagtgtatatttaaaaatgctgaatgttccaaaaactttcacataaacacagtttca

SEQ ID NO: 567326 - DNA, 120 bp, Artificial Sequence
  ENSG00000170324_57 (sequence is synthesized)
cagagtgggtttcaagagttttattcccaggatttcttgtcaacaacttactagctcatggacaagggcaagtccacttctctgagccccaatttctacattggtaaaatggggttaatg

SEQ ID NO: 567327 - DNA, 120 bp, Artificial Sequence
  ENSG00000170324_58 (sequence is synthesized)
tggcttaattgatcaggttattatcaatattcaaaaagaagtgttgaaaagctgtggttaagtggtctggcacattgttaccattggcagtatgtagcaagacacctcaaaatgacccaa

SEQ ID NO: 567328 - DNA, 120 bp, Artificial Sequence
  ENSG00000170324_59 (sequence is synthesized)
cacgtcctcaactaggaatttattctaaggcacaagtaaagataaatttagctgcagcaatgctgattgttgtattgctgacgttagtgataaattgaaaacaagctaaatagtgagtgg

SEQ ID NO: 567329 - DNA, 120 bp, Artificial Sequence
  ENSG00000170324_60 (sequence is synthesized)
ccacttcatattcttctcacccagcacactccttgaaaaatagttattgtttgataaacaatttgattgatgaatgaaggaaaaactaaaaagagggattttctttaagctaaggaaaat

SEQ ID NO: 567330 - DNA, 120 bp, Artificial Sequence
  ENSG00000170324_61 (sequence is synthesized)
atcaggccatagtcagacagcatctgccatgcacccgtggatgcctgctacagggtgtggaaccaagggaccgagcattttcttgcagttgtgcgtcagtggagggttgtggatgatcag

SEQ ID NO: 567331 - DNA, 120 bp, Artificial Sequence
  ENSG00000170324_62 (sequence is synthesized)
gtgtgcccaggaagaggaagtagtgtaacgatacaccatggtccttgccataacggctgcagccgtctgctgtatcactcttaattgagagtttggtattaaactcatagcaggaccaga

SEQ ID NO: 567332 - DNA, 120 bp, Artificial Sequence
  ENSG00000170324_63 (sequence is synthesized)
gagaagaagggagtgagactgctcagagaggcaggattcctgctgactccagggggacacctggcacctcagcttcctttcccacttctccaggctgcatggaggggtgccgggcagggg

SEQ ID NO: 567333 - DNA, 120 bp, Artificial Sequence
  ENSG00000170325_0 (sequence is synthesized)
actctgcggcgggaagaaccacctggaggtggcggggggggttgatttctatcacccctagggagagaggatcggggacccgctgatcttccagctcccctcacccaacgtcgtgcatgc

SEQ ID NO: 567334 - DNA, 120 bp, Artificial Sequence
  ENSG00000170325_1 (sequence is synthesized)
tgcagacagacctttccgtccttcatgaacacacgtgtggtagacagatgactgtcctgtaccctgtgctgctctaggtgtgccagacgtggagctgtccagttgggagaagatggattc

SEQ ID NO: 567335 - DNA, 120 bp, Artificial Sequence
  ENSG00000170325_2 (sequence is synthesized)
caaagatgaaagctcgcatgtgtggccgacatctgcagagcatgaacagaatgccgcacaggtgcactttgttccggacacaggaacagtggctcagattgtctataccgatgaccaggt

SEQ ID NO: 567336 - DNA, 120 bp, Artificial Sequence
  ENSG00000170325_3 (sequence is synthesized)
tcgccccccacagcaggtggtgtacacggcagatggtgcctcctacacatcagtggatggtccagagcacacgctggtgtacatccacccggtggaagctgcacagactctgtttacaga

SEQ ID NO: 567337 - DNA, 120 bp, Artificial Sequence
  ENSG00000170325_4 (sequence is synthesized)
ccccggccaggtagcttatgtccaacaggatgctacagctcagcaggcctcattgccagttcataaccaggtgctgccttccatcgagagtgtagatgggtccgaccctttggcaactct

SEQ ID NO: 567338 - DNA, 120 bp, Artificial Sequence
  ENSG00000170325_5 (sequence is synthesized)
gcagacccctctaggcagactggaggccaaagaggaagaggatgaggatgaggacgaggacactgaggaagatgaggaagaagacggtgaggacacggatctggatgactgggagccaga

SEQ ID NO: 567339 - DNA, 120 bp, Artificial Sequence
  ENSG00000170325_6 (sequence is synthesized)
cccgccccggcccttcgacccacacgacttgtggtgtgaggagtgcaataacgcgcatgcttcagtgtgtccgaagcacggccccttgcacccgatccccaaccggccggtgctcacccg

SEQ ID NO: 567340 - DNA, 120 bp, Artificial Sequence
  ENSG00000170325_7 (sequence is synthesized)
ggccagggcgagcctccccctggtgctctacatagacaggtttctgggcggggtgttctccaagcggcgcatccccaagcgcacccagtttggccccgtggaggggcctctcgtcagggg

SEQ ID NO: 567341 - DNA, 120 bp, Artificial Sequence
  ENSG00000170325_8 (sequence is synthesized)
ctcggagctgaaagactgttacattcacctcaaggtttctcttgataaaggggacaggaaagaaagggatttacatgaagacctatggtttgagttgtctgatgagacgctttgtaactg

SEQ ID NO: 567342 - DNA, 120 bp, Artificial Sequence
  ENSG00000170325_9 (sequence is synthesized)
gatgatgtttgtacggccagcccagaatcacctggagcagaacctggtggcttaccagtatggccaccatgtgtattatacaaccataaaaaatgtggagcccaagcaggaactgaaggt

SEQ ID NO: 567343 - DNA, 120 bp, Artificial Sequence
  ENSG00000170325_10 (sequence is synthesized)
gtggtatgccgcatcctatgctgagttcgtgaaccagaaaattcatgacatttctgaggaagaaaggaaagttcttcgagagcaagagaagaattggccctgctatgaatgtaaccgccg

SEQ ID NO: 567344 - DNA, 120 bp, Artificial Sequence
  ENSG00000170325_11 (sequence is synthesized)
atttataagctcggagcagttgcaacagcatctcaattctcatgatgagaaactagatgtgtttagcagaacaagaggcagaggaaggggacgaggcaagaggcgattcggtccaggtcg

SEQ ID NO: 567345 - DNA, 120 bp, Artificial Sequence
  ENSG00000170325_12 (sequence is synthesized)
acggccggggcgtcctccaaaatttatccgcctggaaatcaccagcgaaaatggggaaaagagtgacgatgggacacaggacttgctacattttcccacaaaggagcaatttgatgaggc

SEQ ID NO: 567346 - DNA, 120 bp, Artificial Sequence
  ENSG00000170325_13 (sequence is synthesized)
tgaaccagccactctgaatgggctggatcaaccagaacagaccactatcccaatccctcagctgccacaggaaacccagtcttccctggaacatgaaccagaaactcacaccctgcacct

SEQ ID NO: 567347 - DNA, 120 bp, Artificial Sequence
  ENSG00000170325_14 (sequence is synthesized)
gcagccgcagcatgaagagagcgtggtgcccacccagagcacgctgacagccgacgacatgcgcagagccaagcgcatccgaaatgcagctcttcagcatctgtttattcggaagtcctt

SEQ ID NO: 567348 - DNA, 120 bp, Artificial Sequence
  ENSG00000170325_15 (sequence is synthesized)
ccggccttttaaatgcttgcagtgtgggaaggccttccgggaaaaggacaaactggaccagcacttacgcttccatgggcgggaggggaactgcccactgacctgtgatctctgtaacaa

SEQ ID NO: 567349 - DNA, 120 bp, Artificial Sequence
  ENSG00000170325_16 (sequence is synthesized)
gggcttcatcagcagcacatccttggagagccacatgaagctccactcagaccagaagacttactcttgcattttttgcccagaatcctttgaccgccttgatttgttgaaagatcatgt

SEQ ID NO: 567350 - DNA, 120 bp, Artificial Sequence
  ENSG00000170325_17 (sequence is synthesized)
ggccattcatatcaatgatggctacttcacctgcccaacttgtaagaaacggttcccagattttatccaggtgaaaaaacacgtgcgcagcttccactcagaaaagatctaccagtgcac

SEQ ID NO: 567351 - DNA, 120 bp, Artificial Sequence
  ENSG00000170325_18 (sequence is synthesized)
agagtgtgacaaggccttctgtcgccccgataaactgcgactccacatgctccggcattcggaccgcaaagacttcctgtgttccacctgtgggaagcaatttaagcgaaaagacaaact

SEQ ID NO: 567352 - DNA, 120 bp, Artificial Sequence
  ENSG00000170325_19 (sequence is synthesized)
acgggaacacatgcagaggatgcataatcctgagagggaggccaagaaagccgaccgcatcagccgctccaagacgttcaagccccgcatcacgtccacagactacgacagcttcacgtt

SEQ ID NO: 567353 - DNA, 120 bp, Artificial Sequence
  ENSG00000170325_20 (sequence is synthesized)
caagtgccgcctgtgcatgatgggcttccggcggcgcggcatgctggtaaatcacttatcgaagagacacccagacatgaagatagaagaggtgccagagttaactctacccatcataaa

SEQ ID NO: 567354 - DNA, 120 bp, Artificial Sequence
  ENSG00000170325_21 (sequence is synthesized)
acccaatcgtgattacttttgtcagtattgcgataaggtttataaaagtgccagcaagcgcaaagcccacattctgaagaaccacccaggagcagagctcccaccgagcattcggaagct

SEQ ID NO: 567355 - DNA, 120 bp, Artificial Sequence
  ENSG00000170325_22 (sequence is synthesized)
ccgacccgctggtcctggagagccagaccccatgctgagcacacacacccagctgacgggcaccatcgccacccctcccgtctgctgtccccactgctccaagcagtacagcagcaagac

SEQ ID NO: 567356 - DNA, 120 bp, Artificial Sequence
  ENSG00000170325_23 (sequence is synthesized)
caagatggtccagcacattcgaaagaagcatccagagttcgcccagctctccaacaccatacacacaccactgacgacagctgtgatcagtgccaccccagcggttttgactacagacag

SEQ ID NO: 567357 - DNA, 120 bp, Artificial Sequence
  ENSG00000170325_24 (sequence is synthesized)
cgccactggagagactgtggtgacgacggacctgctcacccaagcaatgacagaactgtcccagaccttaacgacagactaccgaacgccacaaggggattaccagagaattcagtacat

SEQ ID NO: 567358 - DNA, 120 bp, Artificial Sequence
  ENSG00000170325_25 (sequence is synthesized)
ccctgtgtcgcagtcggcgtctggcctccagcagcctcagcacatacagctgcaagtggttcaagtggcctcggccacttcccctcaccagtcacagcagtccactgtggatgttggcca

SEQ ID NO: 567359 - DNA, 120 bp, Artificial Sequence
  ENSG00000170325_26 (sequence is synthesized)
gagcctaccgcctcggccccgtcctccgcccaggtatctgggcagccgttgagtccctcagcccagcaggctcagcaggggctcagcccctcccacatccagggcagttcttccacacag

SEQ ID NO: 567360 - DNA, 120 bp, Artificial Sequence
  ENSG00000170325_27 (sequence is synthesized)
gggcaggctctgcagcagcagcagcagcagcagcagaattcctctgtgcagcacacgtacctgcccagtgcttggaattccttccgtggctattcatctgagattcaaatgatgacgctt

SEQ ID NO: 567361 - DNA, 120 bp, Artificial Sequence
  ENSG00000170325_28 (sequence is synthesized)
cctccgggtcagtttgtgattacagacagtggtgtggcaactccagttactactggccaggtgaaggcggttacttcgggtcattatgtgttatcagaaagtcaatcagaattggaagaa

SEQ ID NO: 567362 - DNA, 120 bp, Artificial Sequence
  ENSG00000170325_29 (sequence is synthesized)
aagcaaacttctgccctctctggtggagtccaggtcgagccacctgcacacagtgactccctggacccccagaccaacagccaacagcagaccacacagtacatcatcaccaccaccacc

SEQ ID NO: 567363 - DNA, 120 bp, Artificial Sequence
  ENSG00000170325_30 (sequence is synthesized)
aacgggaacggaagcagcgaagtgcatatcaccaaaccatgacttccaccctggagcttgaatccagcacccacctcatgtctgttctcataagtctgaaagctctgacacgtagagctc

SEQ ID NO: 567364 - DNA, 120 bp, Artificial Sequence
  ENSG00000170325_31 (sequence is synthesized)
ttttgtaagatttattattcactcaagagttcggaaaccacagttttgtctctcatccatacactggggtttattttgccaaggtcatctttatcaaattgactcttcaaaccctcggtt

SEQ ID NO: 567365 - DNA, 120 bp, Artificial Sequence
  ENSG00000170325_32 (sequence is synthesized)
tttgccacagaacagagatctttcaggggaaagtagatttcgaggtggagagaatttgccttgctcttgagctggtcttttaacatactgacgagccttacttttcctttgtggaaatat

SEQ ID NO: 567366 - DNA, 120 bp, Artificial Sequence
  ENSG00000170325_33 (sequence is synthesized)
taagtggcatattgtgttcataccaaaggtggagacaggatgtgccaagttcatggttactggacttcttattccaagccatggcaccaaaggagaaggggcattttgtgggtgtgcatt

SEQ ID NO: 567367 - DNA, 120 bp, Artificial Sequence
  ENSG00000170325_34 (sequence is synthesized)
aggtctgaactgctttatcttgttttagttttcagtaatttaacaaagggagcctgctgaataacaaaattaaaatgatgaaacaaaagtttgacagtgatattctgaagcaaaaactgt

SEQ ID NO: 567368 - DNA, 120 bp, Artificial Sequence
  ENSG00000170325_35 (sequence is synthesized)
catctaaatttttcttgctgattttttttaacttccctattttagaaaactattgttgggctgttggtagtgctttccacagatgctggtcctcagtggattaggtcagaagctcatgtt

SEQ ID NO: 567369 - DNA, 120 bp, Artificial Sequence
  ENSG00000170325_36 (sequence is synthesized)
ctgatagttcttcattatttcacaaaggtggacaacctgaaagagaaaaggctgcttgatgtcagcagaatctaaacccctacattaaagctttgcctcccattctgtggttgtggtggt

SEQ ID NO: 567370 - DNA, 120 bp, Artificial Sequence
  ENSG00000170325_37 (sequence is synthesized)
ggtaagaaggagatattggtaccaagaaaaatttccaaaactattgagagagagagagagaaagtattgaaattttgttctgccttgcaggatccatttatcattcattggtaaaggata

SEQ ID NO: 567371 - DNA, 120 bp, Artificial Sequence
  ENSG00000170325_38 (sequence is synthesized)
tattccttgttcttaccaagtgtacatttaactcttgctgacatgttcagtgtattttattacttttaatgctgtcttaaaatgaacattctttaaagttggacaggaaggtggcatttc

SEQ ID NO: 567372 - DNA, 120 bp, Artificial Sequence
  ENSG00000170325_39 (sequence is synthesized)
ttatttattaacatttttaactttaaacatattgtgactcatctagaccttttaataagacggtcaacttcacacttagggaaaaaattaaaatgtgatggccacttctaataattcagg

SEQ ID NO: 567373 - DNA, 120 bp, Artificial Sequence
  ENSG00000170325_40 (sequence is synthesized)
tagttataagggatctggaagaaatccagtctttatgaatatactattagttgggcattaaaaaatcagtatatattttaactttttgtgacatgctaacacattttcagaataattatt

SEQ ID NO: 567374 - DNA, 120 bp, Artificial Sequence
  ENSG00000170325_41 (sequence is synthesized)
gcatagtagaatttattactccagaacagaaagaccttacttcatttcaaatgaagttaattaatttacatttctgggtaaaaactggttctataaattaagtagagtagcttctttatg

SEQ ID NO: 567375 - DNA, 120 bp, Artificial Sequence
  ENSG00000170325_42 (sequence is synthesized)
ataaagacaattttctgaaaagtgaacaattctgttaaaagaactttattgatgtgtagatttcgcactttatttctgagactgcgttcatgtagttgttccccaatgtttgagtactaa

SEQ ID NO: 567376 - DNA, 120 bp, Artificial Sequence
  ENSG00000170325_43 (sequence is synthesized)
gagaacttgagaaaattacttcataaacatatggaaactgaaaatggactctctttgtgacaaagatattcaacagaaaatattgaccctgcattgcaaaacacaggttcgggttcccta

SEQ ID NO: 567377 - DNA, 120 bp, Artificial Sequence
  ENSG00000170325_44 (sequence is synthesized)
agtcccacagtgtaatgattacaaatatcctagtgtccggtctagaaagactttctaggagaagactagtggaattttctaaaggttcagttttagcttttataacttaaatttggccct

SEQ ID NO: 567378 - DNA, 120 bp, Artificial Sequence
  ENSG00000170325_45 (sequence is synthesized)
gttacgttctttttaatttgaaccataaggtatctcccctcccttcaggaataacttattggaaaactgaaaagaatcactgaatggaatgttcattttatggcagttgttttaagtttt

SEQ ID NO: 567379 - DNA, 120 bp, Artificial Sequence
  ENSG00000170325_46 (sequence is synthesized)
atgttcattttatggcagttgttttaagttttaaaatacacagaggaaaatattgtggaaggacctctttgttgctttcccttctaagttgtcttcttcttcttcttcttcttcttcttc

SEQ ID NO: 567380 - DNA, 120 bp, Artificial Sequence
  ENSG00000170325_47 (sequence is synthesized)
ctaatttgtatattatcagccagagatgcggatggcagtcgagccaaatcgcatggctttcagatcaggtattctgcacattcattccaaggtcatagatttttaaaaggacctggattt

SEQ ID NO: 567381 - DNA, 120 bp, Artificial Sequence
  ENSG00000170325_48 (sequence is synthesized)
gaagagatggcaaatgatgagccatcagaaaacttaatttggaaaacatgtatgtagccagtgtggatattgtggcctctctcaagacacattgacactgtagacttcattcagtccagt

SEQ ID NO: 567382 - DNA, 120 bp, Artificial Sequence
  ENSG00000170325_49 (sequence is synthesized)
gtgagtattttggagtaggttggatgtagattttgtttttatcattgatttgtaccgacagaaatagacatttcatcatgtaaaattcctgttattctggaaaaacctattgttttgatc

SEQ ID NO: 567383 - DNA, 120 bp, Artificial Sequence
  ENSG00000170325_50 (sequence is synthesized)
ttcttgttttctgacttggaagtatcctttcaaaaaaactcttaagatatctaggtctaaaaagcacttcatgagatgctaaagctgacccactggttgaaaatgttgaccctatcctgt

SEQ ID NO: 567384 - DNA, 120 bp, Artificial Sequence
  ENSG00000170325_51 (sequence is synthesized)
tatttaaatgtgaacatttattgtacattcagtgagttatagtgttaatagtcttgtgctatgcagcaggtgtaaaaattaataaatatattttttaataaacatgtttgtatgtgtgaa

SEQ ID NO: 567385 - DNA, 120 bp, Artificial Sequence
  ENSG00000170325_52 (sequence is synthesized)
caaaaatgaagccagctcttcctcacagccggtagatggaagtcatttttccagggcctggaaggagttggtaggaagactagatttcagccagcccttgcgccctgtttgtgccagcag

SEQ ID NO: 567386 - DNA, 120 bp, Artificial Sequence
  ENSG00000170340_0 (sequence is synthesized)
agcctggagtgaggcgcagcggcagcggcagcagcggcaacaagtgccggaggctagcagagccaagccggagcagtccctgccgccgacaccgccgggccgcccgtccggggcgccgcg

SEQ ID NO: 567387 - DNA, 120 bp, Artificial Sequence
  ENSG00000170340_1 (sequence is synthesized)
catggagcgtgagctgcggcggtcgccgggctgagccgcgcggagcggccgggacgtggatgtggccgcgatctcccgcccttgcccccgccccgccgagctggagctgctcccggacaa

SEQ ID NO: 567388 - DNA, 120 bp, Artificial Sequence
  ENSG00000170340_2 (sequence is synthesized)
gatatgagaaatgagtgttggacgtcgaagaataaagttgttgggtatcctgatgatggcaaatgtcttcatttattttattatggaagtctccaaaagcagtagccaagaaaaaaatgg

SEQ ID NO: 567389 - DNA, 120 bp, Artificial Sequence
  ENSG00000170340_3 (sequence is synthesized)
aaaaggggaagtaataatacccaaagagaagttctggaagatatctacccctcccgaggcatactggaaccgagagcaagagaagctgaaccggcagtacaaccccatcctgagcatgct

SEQ ID NO: 567390 - DNA, 120 bp, Artificial Sequence
  ENSG00000170340_4 (sequence is synthesized)
gaccaaccagacgggggaggcgggcaggctctccaatataagccatctgaactactgcgaacctgacctgagggtcacgtcggtggttacgggttttaacaacttgccggacagatttaa

SEQ ID NO: 567391 - DNA, 120 bp, Artificial Sequence
  ENSG00000170340_5 (sequence is synthesized)
agactttctgctgtatttgagatgccgcaattattcactgcttatagatcagccggataagtgtgcaaagaaacctttcttgttgctggcgattaagtccctcactccacattttgccag

SEQ ID NO: 567392 - DNA, 120 bp, Artificial Sequence
  ENSG00000170340_6 (sequence is synthesized)
aaggcaagcaatccgggaatcctggggccaagaaagcaacgcagggaaccaaacggtggtgcgagtcttcctgctgggccagacacccccagaggacaaccaccccgacctttcagatat

SEQ ID NO: 567393 - DNA, 120 bp, Artificial Sequence
  ENSG00000170340_7 (sequence is synthesized)
gctgaaatttgagagtgagaagcaccaagacattcttatgtggaactacagagacactttcttcaacttgtctctgaaggaagtgctgtttctcaggtgggtaagtacttcctgcccaga

SEQ ID NO: 567394 - DNA, 120 bp, Artificial Sequence
  ENSG00000170340_8 (sequence is synthesized)
cactgagtttgttttcaagggcgatgacgatgtttttgtgaacacccatcacatcctgaattacttgaatagtttatccaagaccaaagccaaagatctcttcataggtgatgtgatcca

SEQ ID NO: 567395 - DNA, 120 bp, Artificial Sequence
  ENSG00000170340_9 (sequence is synthesized)
caatgctggacctcatcgggataagaagctgaagtactacatcccagaagttgtttactctggcctctacccaccctatgcagggggaggggggttcctctactccggccacctggccct

SEQ ID NO: 567396 - DNA, 120 bp, Artificial Sequence
  ENSG00000170340_10 (sequence is synthesized)
gaggctgtaccatatcactgaccaggtccatctctaccccattgatgacgtttatactggaatgtgccttcagaaactcggcctcgttccagagaaacacaaaggcttcaggacatttga

SEQ ID NO: 567397 - DNA, 120 bp, Artificial Sequence
  ENSG00000170340_11 (sequence is synthesized)
atcgaggagaaaaacaaaaataacatctgctcctatgtagatctgatgttagtacatagtagaaaacctcaagagatgattgatatttggtctcagttgcagagtgctcatttaaaatgc

SEQ ID NO: 567398 - DNA, 120 bp, Artificial Sequence
  ENSG00000170340_12 (sequence is synthesized)
taaaatagatacaaactcaattttgcatagaaaggtgtattttgaatagttcccatgttgtgttctcacattagagtaatttctatattaaaccatgaaaattgcctttatgagtgatac

SEQ ID NO: 567399 - DNA, 120 bp, Artificial Sequence
  ENSG00000170340_13 (sequence is synthesized)
ccatttgagggcctctaaacccttcaatttggtactcacgtgaagagggaaagcggaagatggtaatttttttttatggatgatatggcaggatgattggttctgatcttaccggctagt

SEQ ID NO: 567400 - DNA, 120 bp, Artificial Sequence
  ENSG00000170340_14 (sequence is synthesized)
ggtcatttttaaaaaacttgtaccctcttatctgaaatcctgtttctggaatttggccattttaagtgattttgtttgccctcttctataatattcctacttcccataataatgactgat

SEQ ID NO: 567401 - DNA, 120 bp, Artificial Sequence
  ENSG00000170340_15 (sequence is synthesized)
ttatttgtaattcaggtatttataaacctattggctacaaagactttgttaaacattatccagtggttttcgtgaaatggaattatgtttatttttatgggatttgggtaaattttaaat

SEQ ID NO: 567402 - DNA, 120 bp, Artificial Sequence
  ENSG00000170340_16 (sequence is synthesized)
tgtctagaaaactgaaatttcagttgtcagttgtggaattcagtttttcaattgtggaaatttcctgccaccccaacagtatttttgtgtgttaattaattttgcaaaatgagaatcatg

SEQ ID NO: 567403 - DNA, 120 bp, Artificial Sequence
  ENSG00000170340_17 (sequence is synthesized)
gtgtgacactcatctaatttatcttgttgtgatgttatggtcataataaggagaaagagggtttaatttttcttgtatttggtttcctggtggtatcatagtgtaattttagtatttgaa

SEQ ID NO: 567404 - DNA, 120 bp, Artificial Sequence
  ENSG00000170340_18 (sequence is synthesized)
aatcagtgtgattccttaatggccaactgaagattgaattgccgctaacaaccatatcgtgttagtgaattttcaatatggaccaggaaggcatatgtattttgaacttgagtgaaaagg

SEQ ID NO: 567405 - DNA, 120 bp, Artificial Sequence
  ENSG00000170340_19 (sequence is synthesized)
ttgaagttacagacttttgcatagatggtttgtcaatttaaaattccagaatttattattgccatattttcacatgctgcttatacaagattattattgagtagtaactgcttccctgtc

SEQ ID NO: 567406 - DNA, 120 bp, Artificial Sequence
  ENSG00000170340_20 (sequence is synthesized)
tatgtagaagtgcctgtgtttttatttattgttcagatcaaagaccaaaacattttcttaaatatattttatgtaatattttatttgtatacagtgttgttgatgaaatatttaactaga

SEQ ID NO: 567407 - DNA, 120 bp, Artificial Sequence
  ENSG00000170340_21 (sequence is synthesized)
gcatgatattttaaatgttaaggtgtaacatatgttaaataaaactgttatttttgaattttaaaatttgttttttgggggtatgaactactagagtttaaaattctgccaaactattac

SEQ ID NO: 567408 - DNA, 120 bp, Artificial Sequence
  ENSG00000170340_22 (sequence is synthesized)
ttatatgtactattgtgtaacatactttcttgaaatatttttgtttatagaattgaaggttcttatcagatgggatactggggactataaacaatggaaataaagccactgtatttttaa

SEQ ID NO: 567409 - DNA, 120 bp, Artificial Sequence
  ENSG00000170345_0 (sequence is synthesized)
aaccgcatctgcagcgagcatctgagaagccaagactgagccggcggccgcggcgcagcgaacgagcagtgaccgtgctcctacccagctctgctccacagcgcccacctgtctccgccc

SEQ ID NO: 567410 - DNA, 120 bp, Artificial Sequence
  ENSG00000170345_1 (sequence is synthesized)
ctcggcccctcgcccggctttgcctaaccgccacgatgatgttctcgggcttcaacgcagactacgaggcgtcatcctcccgctgcagcagcgcgtccccggccggggatagcctctctt

SEQ ID NO: 567411 - DNA, 120 bp, Artificial Sequence
  ENSG00000170345_2 (sequence is synthesized)
actaccactcacccgcagactccttctccagcatgggctcgcctgtcaacgcgcaggacttctgcacggacctggccgtctccagtgccaacttcattcccacggtcactgccatctcga

SEQ ID NO: 567412 - DNA, 120 bp, Artificial Sequence
  ENSG00000170345_3 (sequence is synthesized)
ccagtccggacctgcagtggctggtgcagcccgccctcgtctcctccgtggccccatcgcagaccagagcccctcaccctttcggagtccccgccccctccgctggggcttactccaggg

SEQ ID NO: 567413 - DNA, 120 bp, Artificial Sequence
  ENSG00000170345_4 (sequence is synthesized)
ctggcgttgtgaagaccatgacaggaggccgagcgcagagcattggcaggaggggcaaggtggaacagttatctccagaagaagaagagaaaaggagaatccgaagggaaaggaataaga

SEQ ID NO: 567414 - DNA, 120 bp, Artificial Sequence
  ENSG00000170345_5 (sequence is synthesized)
tggctgcagccaaatgccgcaaccggaggagggagctgactgatacactccaagcggagacagaccaactagaagatgagaagtctgctttgcagaccgagattgccaacctgctgaagg

SEQ ID NO: 567415 - DNA, 120 bp, Artificial Sequence
  ENSG00000170345_6 (sequence is synthesized)
agaaggaaaaactagagttcatcctggcagctcaccgacctgcctgcaagatccctgatgacctgggcttcccagaagagatgtctgtggcttcccttgatctgactgggggcctgccag

SEQ ID NO: 567416 - DNA, 120 bp, Artificial Sequence
  ENSG00000170345_7 (sequence is synthesized)
aggttgccaccccggagtctgaggaggccttcaccctgcctctcctcaatgaccctgagcccaagccctcagtggaacctgtcaagagcatcagcagcatggagctgaagaccgagccct

SEQ ID NO: 567417 - DNA, 120 bp, Artificial Sequence
  ENSG00000170345_8 (sequence is synthesized)
agacatggacctatctgggtccttctatgcagcagactgggagcctctgcacagtggctccctggggatggggcccatggccacagagctggagcccctgtgcactccggtggtcacctg

SEQ ID NO: 567418 - DNA, 120 bp, Artificial Sequence
  ENSG00000170345_9 (sequence is synthesized)
tactcccagctgcactgcttacacgtcttccttcgtcttcacctaccccgaggctgactccttccccagctgtgcagctgcccaccgcaagggcagcagcagcaatgagccttcctctga

SEQ ID NO: 567419 - DNA, 120 bp, Artificial Sequence
  ENSG00000170345_10 (sequence is synthesized)
ctcgctcagctcacccacgctgctggccctgtgagggggcagggaaggggaggcagccggcacccacaagtgccactgcccgagctggtgcattacagagaggagaaacacatcttccct

SEQ ID NO: 567420 - DNA, 120 bp, Artificial Sequence
  ENSG00000170345_11 (sequence is synthesized)
agagggttcctgtagacctagggaggaccttatctgtgcgtgaaacacaccaggctgtgggcctcaaggacttgaaagcatccatgtgtggactcaagtccttacctcttccggagatgt

SEQ ID NO: 567421 - DNA, 120 bp, Artificial Sequence
  ENSG00000170345_12 (sequence is synthesized)
agcaaaacgcatggagtgtgtattgttcccagtgacacttcagagagctggtagttagtagcatgttgagccaggcctgggtctgtgtctcttttctctttctccttagtcttctcatag

SEQ ID NO: 567422 - DNA, 120 bp, Artificial Sequence
  ENSG00000170345_13 (sequence is synthesized)
cattaactaatctattgggttcattattggaattaacctggtgctggatattttcaaattgtatctagtgcagctgattttaacaataactactgtgttcctggcaatagtgtgttctga

SEQ ID NO: 567423 - DNA, 120 bp, Artificial Sequence
  ENSG00000170345_14 (sequence is synthesized)
ttagaaatgaccaatattatactaagaaaagatacgactttattttctggtagatagaaataaatagctatatccatgtactgtagtttttcttcaacatcaatgttcattgtaatgtta

SEQ ID NO: 567424 - DNA, 120 bp, Artificial Sequence
  ENSG00000170345_15 (sequence is synthesized)
ctgatcatgcattgttgaggtggtctgaatgttctgacattaacagttttccatgaaaacgttttattgtgtttttaatttatttattaagatggattctcagatatttatatttttatt

SEQ ID NO: 567425 - DNA, 120 bp, Artificial Sequence
  ENSG00000170345_16 (sequence is synthesized)
ttatttttttctaccttgaggtcttttgacatgtggaaagtgaatttgaatgaaaaatttaagcattgtttgcttattgttccaagacattgtcaataaaagcatttaagttgaatgcga

SEQ ID NO: 567426 - DNA, 120 bp, Artificial Sequence
  ENSG00000170345_17 (sequence is synthesized)
gcaggagcccagtacagaggatgaagccactgatggggctggctgcacatccgtaactgggagccctggctccaagcccattccatcccaactcagactctgagtctcaccctaagaagt

SEQ ID NO: 567427 - DNA, 120 bp, Artificial Sequence
  ENSG00000170345_18 (sequence is synthesized)
actctcatagtttcttccctaagtttcttaccgcatgctttcagactgggctcttctttgttctcttgctgaggatcttattttaaatgcaagtcacacctagtctgcaactgcaggtca

SEQ ID NO: 567428 - DNA, 120 bp, Artificial Sequence
  ENSG00000170345_19 (sequence is synthesized)
gaaatggtttcacagtggggtgccaggaagcagggaagctgcaggagccagttctactggggtgggtgaatggaggtgatggcagacacttttactgaatgtcggtctttttttgtgatt

SEQ ID NO: 567429 - DNA, 120 bp, Artificial Sequence
  ENSG00000170345_20 (sequence is synthesized)
cgcacgcttgccatagtaagaattggttcccccttcgggaggcaggttcgttctgagcaacctctggtctgcactccaggacggatctctgacattagctggagcagacgtgtcccaagc

SEQ ID NO: 567430 - DNA, 120 bp, Artificial Sequence
  ENSG00000170345_21 (sequence is synthesized)
acaaactcgctaactagagcctggcttctccggggaggtggcagaaagcggcaatcccccctcccccggcagcctggagcacggaggagggatgagggaggagggtgcagcgggcgggtg

SEQ ID NO: 567431 - DNA, 120 bp, Artificial Sequence
  ENSG00000170345_22 (sequence is synthesized)
aggtactctgtgggttgctcctttttaaaacttaaggggaaagttggagattgagcataagggcccttgagtaagactgtgtcttatgctttcctttatccctctgtatacaggagacag

SEQ ID NO: 567432 - DNA, 120 bp, Artificial Sequence
  ENSG00000170345_23 (sequence is synthesized)
cggcaggatggaagagacaggcactgcgctgcggaatgcctgggaggaaaagggggagacctttcatccaggatgagggacatttaagatgaaatgtccgtggcaggatcgtttctcttc

SEQ ID NO: 567433 - DNA, 120 bp, Artificial Sequence
  ENSG00000170345_24 (sequence is synthesized)
actgctgcatgcggcactgggaactcgccccacctgtgtccggaacctgctcgctcacgtcggctttccccttctgttttgttctaggacttctgcacggacctggccgtctccagtgcc

SEQ ID NO: 567434 - DNA, 120 bp, Artificial Sequence
  ENSG00000170345_25 (sequence is synthesized)
caggaggggcaaggtggaacagaagaagaagagaaaaggagaatccgaagggaaaggaataagatggctgcagccaaatgccgcaaccggaggagggagctgactgatacactccaagcg

SEQ ID NO: 567435 - DNA, 120 bp, Artificial Sequence
  ENSG00000170348_0 (sequence is synthesized)
gaggccttcggtggtgaacgagtctccagcaccatgtctggtttgtctggcccaccagcccggcgcggcccttttccgttagcgttgctgcttttgttcctgctcggccccagattggtc

SEQ ID NO: 567436 - DNA, 120 bp, Artificial Sequence
  ENSG00000170348_1 (sequence is synthesized)
cttgccatctccttccatctgcccattaactctcgcaagtgcctccgtgaggagattcacaaggacctgctagtgactggcgcgtacgagatctccgaccagtctgggggcgctggcggc

SEQ ID NO: 567437 - DNA, 120 bp, Artificial Sequence
  ENSG00000170348_2 (sequence is synthesized)
ctgcgcagccacctcaagatcacagattctgctggccatattctctactccaaagaggatgcaaccaaggggaaatttgcctttaccactgaagattatgacatgtttgaagtgtgtttt

SEQ ID NO: 567438 - DNA, 120 bp, Artificial Sequence
  ENSG00000170348_3 (sequence is synthesized)
gagagcaagggaacagggcggatacctgaccaactcgtgatcctagacatgaagcatggagtggaggcgaaaaattacgaagagattgcaaaagttgagaagctcaaaccattagaggta

SEQ ID NO: 567439 - DNA, 120 bp, Artificial Sequence
  ENSG00000170348_4 (sequence is synthesized)
gagctgcgacgcctagaagacctttcagaatctattgttaatgattttgcctacatgaagaagagagaagaggagatgcgtgataccaacgagtcaacaaacactcgggtcctatacttc

SEQ ID NO: 567440 - DNA, 120 bp, Artificial Sequence
  ENSG00000170348_5 (sequence is synthesized)
agcatcttttcaatgttctgtctcattggactagctacctggcaggtcttctacctgcgacgcttcttcaaggccaagaaattgattgagtaatgaatgaggcatattctcctcccacct

SEQ ID NO: 567441 - DNA, 120 bp, Artificial Sequence
  ENSG00000170348_6 (sequence is synthesized)
tgtacctcagccagcagaacatcgctgggacgtgcctggcctaaggcatcctaccaacagcaccatcaaggcacgttggagctttcttgccagaactgatctcttttggtgtgggaggac

SEQ ID NO: 567442 - DNA, 120 bp, Artificial Sequence
  ENSG00000170348_7 (sequence is synthesized)
atggggtaccacctacacccaacaagtcaatgagggacttctttttaatttggtaggattttgactggttttgcaacaataggtctattattagagtcacctatgacaaaaaataggggt

SEQ ID NO: 567443 - DNA, 120 bp, Artificial Sequence
  ENSG00000170348_8 (sequence is synthesized)
tacctagataatgccaaagtcagcatttgtcctgggttcccttgtgtgatctgtttggactatgttttcttttcttctcccacttgctcagcagcttgggcttccattctagttctttta

SEQ ID NO: 567444 - DNA, 120 bp, Artificial Sequence
  ENSG00000170348_9 (sequence is synthesized)
ccaagatttttgtgtgaccatgttgacttcatttggattgccctctttcaatttccttgtgaaaacacccttaactttctctttacccttagctgaaatgtttacatagcttctggtgat

SEQ ID NO: 567445 - DNA, 120 bp, Artificial Sequence
  ENSG00000170348_10 (sequence is synthesized)
atcttttcatgattttatatctcttaaaatggtgatggatgtgacacctcataaaagtgagctttgaactgtagataactcttaaagaaaatgtcattttagacaattaaaatatttgtg

SEQ ID NO: 567446 - DNA, 120 bp, Artificial Sequence
  ENSG00000170348_11 (sequence is synthesized)
ctcaactgcttgaacttttttcgtgtatgtgtatttaattctatgcaatattatcacatgtgtagattcatgtgaccaccatcacaagagacagaacagttctgtcacatggatcccttg

SEQ ID NO: 567447 - DNA, 120 bp, Artificial Sequence
  ENSG00000170348_12 (sequence is synthesized)
cactgcccttttacagccgcagccacatccctttcttataccctcaccccaacctgtggctaccactgttctgtcctccatctctgtaattttgtcatttcaagaatgttgtatgaatgg

SEQ ID NO: 567448 - DNA, 120 bp, Artificial Sequence
  ENSG00000170348_13 (sequence is synthesized)
aatcatacagaatgtaatcttacgaggctgatcttttttcattcagcataattcccttgaaatccatccaagttgttgcatgtatgaatagtttcttcctttttttcttttaaaaatgtt

SEQ ID NO: 567449 - DNA, 120 bp, Artificial Sequence
  ENSG00000170348_14 (sequence is synthesized)
ttatatatttagggggtataagtacagatttcttacatgcatatattgcatcgtggtgaagtgggggcagttccttttgattgctgagtagtattccatggtatggatgtaccacagttt

SEQ ID NO: 567450 - DNA, 120 bp, Artificial Sequence
  ENSG00000170348_15 (sequence is synthesized)
gcttaaccattcacccactaaaggacataagagttgttttcagttttttgccctaataaagctgctgtgaacattcatgtacaggtttttatgtgaacatacattttcattttctgggat

SEQ ID NO: 567451 - DNA, 120 bp, Artificial Sequence
  ENSG00000170348_16 (sequence is synthesized)
aaatgctcaaaagggcaactgttgggttgtatggtaaacacatatatttttgtaagaaactaccctactctttttccagagtggctctactttttacatacagccactcatacaattcag

SEQ ID NO: 567452 - DNA, 120 bp, Artificial Sequence
  ENSG00000170348_17 (sequence is synthesized)
cacatcctcaccagcatttggtattactactattttttatcttaaccattcacatagatgtgtgtaatgataccacatgtggttttaatttgcatttccaatggctaatgatgttgagta

SEQ ID NO: 567453 - DNA, 120 bp, Artificial Sequence
  ENSG00000170348_18 (sequence is synthesized)
tctttttgtgtgctaatttgccatctatgtatcctcttcggtgaaatgtcttcatgtcttttgtctattttctatttaggtcatttgttctttttactattgagttttgagaggtttttt

SEQ ID NO: 567454 - DNA, 120 bp, Artificial Sequence
  ENSG00000170348_19 (sequence is synthesized)
atatatcctagataaaattcctctgttagatatgtggttgcttgaatttttaacataacttctaccaaggaaaaataagtaaaatttccaacccttgcatggccagtcacttacttaatt

SEQ ID NO: 567455 - DNA, 120 bp, Artificial Sequence
  ENSG00000170348_20 (sequence is synthesized)
cctgtccttcagtgttccatctagagaattaagagatatgatgtataaaatagacatcgagggccattaagagagtaaatacttaaaaatacatgttatgaaagcaaagccaataatcac

SEQ ID NO: 567456 - DNA, 120 bp, Artificial Sequence
  ENSG00000170348_21 (sequence is synthesized)
tgtaggagtatgagttgcctaagggccaaaactaatgtaaataagagaaagtgtggatataaatgaccattgtttataaacagttatgaaaaatgctgtgacttgaaatctttcccacat

SEQ ID NO: 567457 - DNA, 120 bp, Artificial Sequence
  ENSG00000170348_22 (sequence is synthesized)
ctcccaagaaagtaggtaggagtttatcctttccgtaatctctttttaaccctgctgactattacagggcttgtttaatcacagtggcaagaattacatgtatcttacagtaaagaaaca

SEQ ID NO: 567458 - DNA, 120 bp, Artificial Sequence
  ENSG00000170348_23 (sequence is synthesized)
gaatactggaatcgttagagaaccctgatgtgttgacctggataaagtacaaaggtggaagagggaatgagttatgctgttaaaatctcaggctattctgttaatgttcctgctactatg

SEQ ID NO: 567459 - DNA, 120 bp, Artificial Sequence
  ENSG00000170348_24 (sequence is synthesized)
aacccaaactttttttttcccccttttgactccttgtgtcttcctctcctgtggcataaaagtagttctgtcgttaacttgtacaacattgccatctgctgttgagaattggtaggtact

SEQ ID NO: 567460 - DNA, 120 bp, Artificial Sequence
  ENSG00000170348_25 (sequence is synthesized)
gcttctgagaacctggctgcagatccttagcataggcagcaaatgttgagaaagtctatctgtagtattacatatactaagttacagaggatgcatccaagtagagaaaataatatgtgg

SEQ ID NO: 567461 - DNA, 120 bp, Artificial Sequence
  ENSG00000170348_26 (sequence is synthesized)
ggatgcatccaagtagagaaaataatatgtgggttaagatacatccttaaacttttttttttttggggggggggggacggagtcttgctgcaacgcccaggctggagtgcaatggcacta

SEQ ID NO: 567462 - DNA, 82 bp, Artificial Sequence
  ENSG00000170348_27 (sequence is synthesized)
cagcctccatctttaaacttttaaatgtgaaatttctatcatgtaccgttagcctaacaagattttctttcctatttctgac

SEQ ID NO: 567463 - DNA, 120 bp, Artificial Sequence
  ENSG00000170348_28 (sequence is synthesized)
gtaccgttagcctaacaagattttctttcctatttctgactggtgcctttcccctttttaggagcaacgaaagctactctcttagttatgttcttgtgatgtgacaaaatgtcaagaaga

SEQ ID NO: 567464 - DNA, 120 bp, Artificial Sequence
  ENSG00000170348_29 (sequence is synthesized)
taggagaagagaatattttatttcgttgatgcttttgttcccaagtgtgaccctaaacttaagctttgtaggagttgacattctttcatgtcccttccctttactcatgccgaaactatc

SEQ ID NO: 567465 - DNA, 120 bp, Artificial Sequence
  ENSG00000170348_30 (sequence is synthesized)
aactgggacattttgtgcttttggtttaaaagttaattgatattatactttggttttatctaaaaagtaaatgtatttgcctttgacaaaagactgacacaagagcaaataagctttaaa

SEQ ID NO: 567466 - DNA, 120 bp, Artificial Sequence
  ENSG00000170348_31 (sequence is synthesized)
atcgggtgttatgtgctttcctccatttttgagcatattatccaaaatggtctgtataatataaatgagaatgatgcagtttaagtaagccttgttataccattgtcatggacccctgtc

SEQ ID NO: 567467 - DNA, 120 bp, Artificial Sequence
  ENSG00000170348_32 (sequence is synthesized)
ataaagccatttcttggtttgtttgggaaagaggcatatgggatttatacagattcacttgtaaatgttggattggggatttttgtgtaaattttctcaaataaaggctagcagaaacca

SEQ ID NO: 567468 - DNA, 120 bp, Artificial Sequence
  ENSG00000170348_33 (sequence is synthesized)
attacgaagaggtatgtcctgctctaacagccagaggaggcagcagtgtgctatgctgtgaggtttctgtgacctcggcaggccaacaggctgtgctttgcccaaagggctgtggtttct

SEQ ID NO: 567469 - DNA, 120 bp, Artificial Sequence
  ENSG00000170348_34 (sequence is synthesized)
gtcgggccggcggaggcctgggagttgttctggcctcccgggagcgcaaaggacgtgcggtggagcccgccccctcaccccgctggttgcctgtcgcggggcggggcgggtcaccaacgc

SEQ ID NO: 567470 - DNA, 120 bp, Artificial Sequence
  ENSG00000170348_35 (sequence is synthesized)
ctgggaaccccaagaagggctgcgaggctttggcggatgtggtgacacctgagctggggcggttgtcaacgtcctataccagttttggtctcagatacattgaaccgtaatttggttctc

SEQ ID NO: 567471 - DNA, 120 bp, Artificial Sequence
  ENSG00000170348_36 (sequence is synthesized)
caaataaatgttggggtgttgaatatttatacggattggcatcataagataccgcgatacctgcaggaaagtaaaggagacagagctaaccgtgattaataaaatgttatttattgagca

SEQ ID NO: 567472 - DNA, 120 bp, Artificial Sequence
  ENSG00000170364_0 (sequence is synthesized)
acaagtcccagcatccaccgcgcggcccaggactgtcagggtagtgggcgttgcgtgaggcgggtaaatgttcgcggaagcggcaaagacgacacggccttgtgggatggcggagtttaa

SEQ ID NO: 567473 - DNA, 120 bp, Artificial Sequence
  ENSG00000170364_1 (sequence is synthesized)
ggagaagcctgaggccccgactgagcagctggatgtcgcgtgcggccaggaaaacttgccggtgggcgcgtggcccccgggggccgcgccggcgcccttccagtacactcctgatcatgt

SEQ ID NO: 567474 - DNA, 120 bp, Artificial Sequence
  ENSG00000170364_2 (sequence is synthesized)
agttggacctggagcagacattgatcccactcaaataacctttcccggatgcatttgtgtcaaaactccctgcctccctggcacttgctcctgtctccgccatggagagaactatgatga

SEQ ID NO: 567475 - DNA, 120 bp, Artificial Sequence
  ENSG00000170364_3 (sequence is synthesized)
taactcatgccttagagatataggatctggaggaaagtatgcagagcctgtttttgaatgcaatgtcctgtgccgatgcagtgaccactgcagaaacagagtggtccagaaaggtctaca

SEQ ID NO: 567476 - DNA, 120 bp, Artificial Sequence
  ENSG00000170364_4 (sequence is synthesized)
gttccacttccaagtgttcaagacgcataaaaaaggctggggacttcgtaccttggaatttataccgaaaggaaggtttgtctgtgaatatgctggtgaggttttaggattctctgaagt

SEQ ID NO: 567477 - DNA, 120 bp, Artificial Sequence
  ENSG00000170364_5 (sequence is synthesized)
tcagagaagaattcacttacaaacaaaatccgactccaattacattatagccatcagggaacatgtttataatgggcaggtaatggaaacatttgttgaccctacttatataggaaatat

SEQ ID NO: 567478 - DNA, 120 bp, Artificial Sequence
  ENSG00000170364_6 (sequence is synthesized)
tggaagattccttaatcattcttgtgagccaaaccttttgatgattcctgtccgaattgactcaatggtacctaagttggcactttttgcagccaaagatattgtgccagaagaagaact

SEQ ID NO: 567479 - DNA, 120 bp, Artificial Sequence
  ENSG00000170364_7 (sequence is synthesized)
ctcttatgattattcaggaagatatcttaatctaacagtcagtgaagacaaagaaaggctagatcatgggaaactaaggaaaccttgttactgtggtgccaaatcatgtactgctttcct

SEQ ID NO: 567480 - DNA, 120 bp, Artificial Sequence
  ENSG00000170364_8 (sequence is synthesized)
gccttttgacagttctctgtactgccccgtagaaaagtcgaacatcagttgtggaaatgagaaggaacccagcatgtgtggctcagccccttctgtgttcccctcctgcaagcgattgac

SEQ ID NO: 567481 - DNA, 120 bp, Artificial Sequence
  ENSG00000170364_9 (sequence is synthesized)
ccttgagactatgaaaatgatgttagacaaaaagcaaattcgagcaattttcttattcgagttcaaaatgggtcgtaaagcagcagaaacaactcgcaacatcaacaatgcatttggccc

SEQ ID NO: 567482 - DNA, 120 bp, Artificial Sequence
  ENSG00000170364_10 (sequence is synthesized)
aggagatgagagccttgaagatgaggagcgtagtggccggccatcagaagttgacaacgaccagttgagagcaatcatcgaagctgatccccttacaactacacgagaagttgctgaaga

SEQ ID NO: 567483 - DNA, 84 bp, Artificial Sequence
  ENSG00000170364_11 (sequence is synthesized)
aatcatcgaagctgatccccttacaactacacgagaagttgctgaagaactcaatgtcaaccattctacggtcgttcgacattt

SEQ ID NO: 567484 - DNA, 120 bp, Artificial Sequence
  ENSG00000170364_12 (sequence is synthesized)
tttgaagtgtcatcttctcttattctacgcaaccacaacgaaccatttctcgatcggattgtgacgtgtgatgaaaagtggattttatatgacaaccggcgacgatcagctcagtggttg

SEQ ID NO: 567485 - DNA, 88 bp, Artificial Sequence
  ENSG00000170364_13 (sequence is synthesized)
cggcgacgatcagctcagtggttggatcatcttgcacccaaaaaaggtcatggtcactatttggtggtctgctgctggtctgatccac

SEQ ID NO: 567486 - DNA, 120 bp, Artificial Sequence
  ENSG00000170364_14 (sequence is synthesized)
accattacatctgagaagtatgctcaggaaatcgatgagatgaaccaaaaactgcaacgcctgcagctggcattggtcaacagaaagggcccaattcttctccacgacaatgcccgaccg

SEQ ID NO: 567487 - DNA, 120 bp, Artificial Sequence
  ENSG00000170364_15 (sequence is synthesized)
catgttgcacaacccacacttcaaaagttgaatgaattgggctatgaagttttgcctcatccaccgtattcacctgacctcttgccaaccaactaccacgtctttaagcatctcaacaac

SEQ ID NO: 567488 - DNA, 83 bp, Artificial Sequence
  ENSG00000170364_16 (sequence is synthesized)
tcgaatcccaaagcacggatttttacgctacaggaataaaccaacttatttctcgttggcaaaaatgtgttgattgtaatggt

SEQ ID NO: 567489 - DNA, 78 bp, Artificial Sequence
  ENSG00000170364_17 (sequence is synthesized)
aaaaatgccgcagttagttttgcaccaacccaatatcttcatagattgaaatataaattaaaattgcatttgaagtag

SEQ ID NO: 567490 - DNA, 120 bp, Artificial Sequence
  ENSG00000170364_18 (sequence is synthesized)
tcatagattgaaatataaattaaaattgcatttgaagtagattccacggactttattaagaatgtagaaatgtggcctggcatggtggcttacaactgtaatcccagcactttgggaggc

SEQ ID NO: 567491 - DNA, 84 bp, Artificial Sequence
  ENSG00000170364_19 (sequence is synthesized)
ccaggcgggcagatcacttgagtccaattactctaataaaataattttttaaaaaaagattaaaacatgtaccttgaaaagcat

SEQ ID NO: 567492 - DNA, 120 bp, Artificial Sequence
  ENSG00000170364_20 (sequence is synthesized)
tggaagacagtggttggctagctttacctctgcctagttacataagtttaactcaggaatgtggcagagactgcaagttgtccatcagtatcctttcccctttctgtaatagaattctcc

SEQ ID NO: 567493 - DNA, 120 bp, Artificial Sequence
  ENSG00000170364_21 (sequence is synthesized)
atttaacaaaagtacatgactacccagaatactcactttcctagttagatttgtcttagtgactgttctagttaataggatataagcaaaaatgacaagtccttaaatggagatatcctg

SEQ ID NO: 567494 - DNA, 120 bp, Artificial Sequence
  ENSG00000170364_22 (sequence is synthesized)
cccttcacctcctctttcttcctgctggctggaatgtatacatgatgactggaactggagcagtcatcctagaccccaggatgaccctgggaaaggaagccattgcatagaaaaatcaac

SEQ ID NO: 567495 - DNA, 120 bp, Artificial Sequence
  ENSG00000170364_23 (sequence is synthesized)
aaggttaaaaggagtctaggtgtctggtactgtagaacatcctgtcagtcgtgatctgacacctttgtactttcaggtgagaaatagtctctcccttgcttaagtcactgttattgtaag

SEQ ID NO: 567496 - DNA, 120 bp, Artificial Sequence
  ENSG00000170364_24 (sequence is synthesized)
ttttctagcactaacatcgaacctaataatgatccaagaaacccttgtggctgcatacctaaaccctgcttgccaaccaattttaacagtaataaagctgactttttgatttctgtctga

SEQ ID NO: 567497 - DNA, 120 bp, Artificial Sequence
  ENSG00000170364_25 (sequence is synthesized)
gtcttctcttacagcgcacccgttggtgcgcgggaataggtgtgcatgccccggcctgggcctttttctgttgacccacggcatcaccttagcaagggtgttgtccttttcagtccattc

SEQ ID NO: 567498 - DNA, 120 bp, Artificial Sequence
  ENSG00000170364_26 (sequence is synthesized)
cctgaagcgcagaaccggaggccttgtgagaacctggctttttgtccagtcctgtcctcagaactcaaggaggcatcacggggggagtcatttacctccctggtctcaggtgtctctcac

SEQ ID NO: 567499 - DNA, 120 bp, Artificial Sequence
  ENSG00000170364_27 (sequence is synthesized)
gtcagccttagctgtggtctccctcacgctgtgggctcttgggcgagtgtaaattagctgtggctcagccttagagtcttccagcgtacagtggaacagtacctctcttccggagtgctt

SEQ ID NO: 567500 - DNA, 120 bp, Artificial Sequence
  ENSG00000170365_0 (sequence is synthesized)
agatcaatccaggctccaggagaaagcaggcgggcgggcggagaaaggagaggccgagcggctcaacccgggccgaggctcggggagcggagagtggcgcagcgcccggccgtccggacc

SEQ ID NO: 567501 - DNA, 120 bp, Artificial Sequence
  ENSG00000170365_1 (sequence is synthesized)
cgggccgcgagaccccgctcgcccggccactcgtgctcccacacggacgggcgcgccgccaacccggtgctgactgggttacttttttaaacactaggaatggtaatttctactcttctg

SEQ ID NO: 567502 - DNA, 120 bp, Artificial Sequence
  ENSG00000170365_2 (sequence is synthesized)
gacttcaaactaagaagttaaagagacttctctgtaaataaacaaatctcttctgctgtccttttgcatttggagacagctttatttcaccatatccaaggagtataactagtgctgtca

SEQ ID NO: 567503 - DNA, 120 bp, Artificial Sequence
  ENSG00000170365_3 (sequence is synthesized)
ttatgaatgtgacaagtttattttcctttacaagtccagctgtgaagagacttcttgggtggaaacagggcgatgaagaagaaaaatgggcagagaaagctgttgatgctttggtgaaaa

SEQ ID NO: 567504 - DNA, 120 bp, Artificial Sequence
  ENSG00000170365_4 (sequence is synthesized)
aactgaagaaaaagaaaggtgccatggaggaactggaaaaggccttgagctgcccagggcaaccgagtaactgtgtcaccattccccgctctctggatggcaggctgcaagtctcccacc

SEQ ID NO: 567505 - DNA, 120 bp, Artificial Sequence
  ENSG00000170365_5 (sequence is synthesized)
ggaagggactgcctcatgtcatttactgccgtgtgtggcgctggcccgatcttcagagccaccatgaactaaaaccactggaatgctgtgagtttccttttggttccaagcagaaggagg

SEQ ID NO: 567506 - DNA, 120 bp, Artificial Sequence
  ENSG00000170365_6 (sequence is synthesized)
tctgcatcaatccctaccactataagagagtagaaagccctgtacttcctcctgtgctggttccaagacacagcgaatataatcctcagcacagcctcttagctcagttccgtaacttag

SEQ ID NO: 567507 - DNA, 120 bp, Artificial Sequence
  ENSG00000170365_7 (sequence is synthesized)
gacaaaatgagcctcacatgccactcaacgccacttttccagattctttccagcaacccaacagccacccgtttcctcactctcccaatagcagttacccaaactctcctgggagcagca

SEQ ID NO: 567508 - DNA, 120 bp, Artificial Sequence
  ENSG00000170365_8 (sequence is synthesized)
gcagcacctaccctcactctcccaccagctcagacccaggaagccctttccagatgccagctgatacgcccccacctgcttacctgcctcctgaagaccccatgacccaggatggctctc

SEQ ID NO: 567509 - DNA, 120 bp, Artificial Sequence
  ENSG00000170365_9 (sequence is synthesized)
agccgatggacacaaacatgatggcgcctcccctgccctcagaaatcaacagaggagatgttcaggcggttgcttatgaggaaccaaaacactggtgctctattgtctactatgagctca

SEQ ID NO: 567510 - DNA, 120 bp, Artificial Sequence
  ENSG00000170365_10 (sequence is synthesized)
acaatcgtgtgggtgaagcgttccatgcctcctccacaagtgtgttggtggatggtttcactgatccttccaacaataagaaccgtttctgccttgggctgctctccaatgttaaccgga

SEQ ID NO: 567511 - DNA, 120 bp, Artificial Sequence
  ENSG00000170365_11 (sequence is synthesized)
attccactattgaaaacaccaggcggcatattggaaaaggagttcatctttattatgttggaggggaggtgtatgccgaatgccttagtgacagtagcatctttgtgcaaagtcggaact

SEQ ID NO: 567512 - DNA, 120 bp, Artificial Sequence
  ENSG00000170365_12 (sequence is synthesized)
aactaccatcatggatttcatcctactactgtttgcaagatccctagtgggtgtagtctgaaaatttttaacaaccaagaatttgctcagttattggcacagtctgtgaaccatggattt

SEQ ID NO: 567513 - DNA, 120 bp, Artificial Sequence
  ENSG00000170365_13 (sequence is synthesized)
gagacagtctatgagcttacaaaaatgtgtactatacgtatgagctttgtgaagggctggggagcagaataccaccgccaggatgttactagcaccccctgctggattgagatacatctg

SEQ ID NO: 567514 - DNA, 120 bp, Artificial Sequence
  ENSG00000170365_14 (sequence is synthesized)
cacggccccctccagtggctggataaagttcttactcaaatgggttcacctcataatcctatttcatctgtatcttaaatggccccaggcatctgcctctggaaaactattgagccttgc

SEQ ID NO: 567515 - DNA, 120 bp, Artificial Sequence
  ENSG00000170365_15 (sequence is synthesized)
atgtacttgaaggatggatgagtcagacacgattgagaactgacaaaggagccttgataatacttgacctctgtgaccaactgttggattcagaaatttaaacaaaaaaaaaaaaaaaca

SEQ ID NO: 567516 - DNA, 120 bp, Artificial Sequence
  ENSG00000170365_16 (sequence is synthesized)
cacacaccttggtaacatactgttgatatcaagaacctgtttagtttacattgtaacattctattgtaaaatcaactaaaattcagacttttagcaggactttgtgtacagttaaaggag

SEQ ID NO: 567517 - DNA, 120 bp, Artificial Sequence
  ENSG00000170365_17 (sequence is synthesized)
agatggccaagccagggacaaattgtctattagaaaacggtcctaagagattctttggtgtttggcactttaaggtcatcgttgggcagaagtttagcattaatagttgttctgaaacgt

SEQ ID NO: 567518 - DNA, 120 bp, Artificial Sequence
  ENSG00000170365_18 (sequence is synthesized)
gttttatcaggtttagagcccatgttgagtcttcttttcatgggttttcataatattttaaaactatttgtttagcgatggttttgttcgtttaagtaaaggttaatcttgatgatatac

SEQ ID NO: 567519 - DNA, 120 bp, Artificial Sequence
  ENSG00000170365_19 (sequence is synthesized)
ataataatctttctaaaattgtatgctgaccatacttgctgtcagaataatgctaggcatatgctttttgctaaatatgtatgtacagagtatttggaagttaagaattgattagactag

SEQ ID NO: 567520 - DNA, 120 bp, Artificial Sequence
  ENSG00000170365_20 (sequence is synthesized)
tgaatttaggagtatttgaggtgggtggggggaagagggaaatgacaactgcaaatgtagactatactgtaaaaattcagtttgttgctttaaagaaacaaactgatacctgaattttgc

SEQ ID NO: 567521 - DNA, 120 bp, Artificial Sequence
  ENSG00000170365_21 (sequence is synthesized)
tgtgtttccattttttagagatttttatcatttttttctctctcggcattcttttttctcatactcttcaaaaagcagttctgcagctggttaattcatgtaactgtgagagcaaatgaa

SEQ ID NO: 567522 - DNA, 120 bp, Artificial Sequence
  ENSG00000170365_22 (sequence is synthesized)
taattcctgctattctgaaattgcctacatgtttcaataccagttatatggagtgcttgaatttaataagcagtttttacggagtttacagtacagaaataggctttaattttcaagtga

SEQ ID NO: 567523 - DNA, 120 bp, Artificial Sequence
  ENSG00000170365_23 (sequence is synthesized)
attttttgccaaacttagtaactctgttaaatatttggaggatttaaagaacatcccagtttgaattcatttcaaactttttaaatttttttgtactatgtttggttttattttccttct

SEQ ID NO: 567524 - DNA, 120 bp, Artificial Sequence
  ENSG00000170365_24 (sequence is synthesized)
gttaatcttttgtattcacttatgctctcgtacattgagtacttttattccaaaactagtgggttttctctactggaaattttcaataaacctgtcattattgcttactttgattaaaaa

SEQ ID NO: 567525 - DNA, 120 bp, Artificial Sequence
  ENSG00000170365_25 (sequence is synthesized)
atgtgtattcgtgagttcgcggttgaacaactgttcctttactctgctccctgtctttgttagtgtttctcggggttgtttctgtaggaaggtgggggtggtgggcgtgagagacagatg

SEQ ID NO: 567526 - DNA, 120 bp, Artificial Sequence
  ENSG00000170365_26 (sequence is synthesized)
tgggcttgtttttctagttgctgaaactgtatgaaggctttaaagggagaacgttttcttgatgtgctttaggaggggaggaggaacaaatgcctgccagatctcacagctacagtagct

SEQ ID NO: 567527 - DNA, 120 bp, Artificial Sequence
  ENSG00000170365_27 (sequence is synthesized)
gagcttttgtttattttgaagagcatgcaatttttaaatacacggtgcaagataaccagtaaaggcgcgttccttctgaaaattgaggccggtctcagaaccatctcctgagaaagcatc

SEQ ID NO: 567528 - DNA, 120 bp, Artificial Sequence
  ENSG00000170365_28 (sequence is synthesized)
aatgagggaggctaggaaggtgtgggggtggggggcatatggaaaatcactctgtcttatactcagttttgctgtgaacctaaaactgctttaaacatcgatttaaaaactggtgatgaa

SEQ ID NO: 567529 - DNA, 120 bp, Artificial Sequence
  ENSG00000170365_29 (sequence is synthesized)
agcaaaactcagtctcaaaaaaaaaaaagaaaaaaaaaattggtgataaactcaaaggacctttcttggatgtgcagtgtcataaattggaatgtacaccactttaatcattatgatttt

SEQ ID NO: 567530 - DNA, 120 bp, Artificial Sequence
  ENSG00000170365_30 (sequence is synthesized)
tgtacaccactttaatcattatgattttttaaatcttttttattgcctctgtattttatggttcctgattatctcttgaacatcttatcaaacataattctgagtcaatgaacactctgg

SEQ ID NO: 567531 - DNA, 120 bp, Artificial Sequence
  ENSG00000170365_31 (sequence is synthesized)
ttgggggaaataacccctatctcacacatctgtggaatttatatttggggaccaggataccaggagagaataggcacagtaccacactattaggagcatgtggacccagtaactattatt

SEQ ID NO: 567532 - DNA, 120 bp, Artificial Sequence
  ENSG00000170365_32 (sequence is synthesized)
actaaacccaaaatgtctgatttcaggaaacagatctttaaattgctttaagatttttttcatttaaatagctttaatttttttttcctttatagtttatagtcagttaatattttcacg

SEQ ID NO: 567533 - DNA, 120 bp, Artificial Sequence
  ENSG00000170365_33 (sequence is synthesized)
aggaaggaatgttggccattttttttcttccccccgctttttttttaacttgtttttaacctttggtgattttcctagagcaggggtgaacaaactacagcccacaggccaattcagcct

SEQ ID NO: 567534 - DNA, 120 bp, Artificial Sequence
  ENSG00000170365_34 (sequence is synthesized)
gctatctgtttttgtaaataaagcattattggaccacagctgtattcattcattacatattgtctatgactgcttctgtgttacaagggcagaattggatagttgtgataaagattatac

SEQ ID NO: 567535 - DNA, 120 bp, Artificial Sequence
  ENSG00000170365_35 (sequence is synthesized)
agcccataaaatcttgctggcctttcacagaaaaaattcatcaacctctgacctagatgaatagtattttgaagtatcctgatagctgataaaagccttctgctaataatgttgcagtct

SEQ ID NO: 567536 - DNA, 120 bp, Artificial Sequence
  ENSG00000170365_36 (sequence is synthesized)
gctttaagatttggcacttgtaaatcactaaagttttgctctttgaattatagcaaattgatgtggtagagttgcttagcaagcagggaagatagtgtatgtttttagctaactacttac

SEQ ID NO: 567537 - DNA, 120 bp, Artificial Sequence
  ENSG00000170365_37 (sequence is synthesized)
aagcagggaagatagtgtatgtttttagctaactacttacatatgtaaagcgactaacttatgtgtgggttttttcatgagtattttccttgttttttttttgtgtgtgtgtgtgtgtgt

SEQ ID NO: 567538 - DNA, 120 bp, Artificial Sequence
  ENSG00000170365_38 (sequence is synthesized)
aaagtgcattttagtatttgtggaatttgatgttaagaacacagaggtgcttctcccttagcagttgtagtctgggcttctgatgtggactttctttcttttcctccttttattattgta

SEQ ID NO: 567539 - DNA, 120 bp, Artificial Sequence
  ENSG00000170365_39 (sequence is synthesized)
atggtttgtattcctggaatctctaaaggagtggtacaagaggttttactacagaaggaattcatctttaaaaccttttagttgcaaatgtttagaaccatgttctgtttggagatttgt

SEQ ID NO: 567540 - DNA, 120 bp, Artificial Sequence
  ENSG00000170365_40 (sequence is synthesized)
tagtcttaagagatttgacttaacaagctgcatcctgtcagtaaagttgggtaatttccattgttggcccattctgggaatggagagacaaaacacacctgctctgcatgacttaaagca

SEQ ID NO: 567541 - DNA, 120 bp, Artificial Sequence
  ENSG00000170365_41 (sequence is synthesized)
aatataaggaagttagcatgaaatctggatgagaaagatatgattcattctgtaagaatggccagctggcaagatttcttcctgagtttgagaactggagcaacactgtagctgtgatag

SEQ ID NO: 567542 - DNA, 120 bp, Artificial Sequence
  ENSG00000170365_42 (sequence is synthesized)
ttattggcaacttaatatgaggtaaagtaacttcttatcaataattagaaactgattttcatggctttgaataagcataggcatacttagtctttgccaaaagtaattcatttttatgcc

SEQ ID NO: 567543 - DNA, 120 bp, Artificial Sequence
  ENSG00000170365_43 (sequence is synthesized)
agtacctttggcatattttcagtcttctattgttctcttcccacttattttttcacttgtcacttgtgtttctttagatggtgagccaaagtctgtggtaggggtgatttccatttctgc

SEQ ID NO: 567544 - DNA, 120 bp, Artificial Sequence
  ENSG00000170365_44 (sequence is synthesized)
atattacagagcaattagcatattgttaatattcagcaaaagtttttgctgtgcttccttagctggtgttttggttatctgatagtaattggagaaaattgttctccaattttctccaat

SEQ ID NO: 567545 - DNA, 120 bp, Artificial Sequence
  ENSG00000170365_45 (sequence is synthesized)
taggagaataaggagagtgtcatattaagaagtacctgctttaaacatcatagaaaaactgtatacattataatagcaattgcttttccagtgtcttcattccatgatcctgagccaatt

SEQ ID NO: 567546 - DNA, 120 bp, Artificial Sequence
  ENSG00000170365_46 (sequence is synthesized)
caacaacacggtttcagtttttgagagcctgaggcactaaccttggttgatataacattttctttcctctagatgttcaggcggttgcttatgaggaaccaaaacactggtgctctattg

SEQ ID NO: 567547 - DNA, 120 bp, Artificial Sequence
  ENSG00000170365_47 (sequence is synthesized)
attatttggagcaacaaggttacctactcgaatcactggatcctgagttgacacaaaacgcatctgttgactcagggtttgtataaccacgtgcagtatttactaggctatccaattctg

SEQ ID NO: 567548 - DNA, 120 bp, Artificial Sequence
  ENSG00000170365_48 (sequence is synthesized)
cgacccctgcgggagctggaggacgaccgctggcgctgctctccaaggcgcctggtggagcgggtctcgcgggcgggggaccccggcgccccgggcccctccacatcccgcacgggtttt

SEQ ID NO: 567549 - DNA, 120 bp, Artificial Sequence
  ENSG00000170365_49 (sequence is synthesized)
ccctccacatcccgcacgggttttcttctcggccccagcaagcctctttggggtcgaggtcaaggaaagttcgcaccgagatcccctctaatttattcaaaggtgctgactgggttactt

SEQ ID NO: 567550 - DNA, 120 bp, Artificial Sequence
  ENSG00000170365_50 (sequence is synthesized)
attctgtaagaatggccagctggcaagatttcttcctgagtttgagaactggagcaacactgtagctgtgatagttattggcaacttaatatgagatgttcaggcggttgcttatgagga

SEQ ID NO: 567551 - DNA, 120 bp, Artificial Sequence
  ENSG00000170365_51 (sequence is synthesized)
caccttgtgccctaagctgctgggatcggctcgggccactgcgaccctgaattggaataattgggtgctgactgggttacttttttaaacactaggaatggtaatttctactcttctgga

SEQ ID NO: 567552 - DNA, 120 bp, Artificial Sequence
  ENSG00000170365_52 (sequence is synthesized)
gagtcgattgcctcactgcatgtgtattcgtgagttcgcggttgaacaactgttcctttactctgctccctgtctttgatcttggccccctcaagtcctgagtgccttggttcctctttg

SEQ ID NO: 567553 - DNA, 120 bp, Artificial Sequence
  ENSG00000170365_53 (sequence is synthesized)
tatacttcagatatgggtggtacatgggttttgtttatagtggaaaggctgagatggccagggataccagtgtgtgtgaaagagggaaaaggcttacagaactatgaatttctgtagaaa

SEQ ID NO: 567554 - DNA, 120 bp, Artificial Sequence
  ENSG00000170365_54 (sequence is synthesized)
aatttaagataaatgcagagatattcaatctgaattgtataagtagcttttcatttggtagaggagaaacagatgctttagggatgctgataaggacctttgcagctctgatatgtgtac

SEQ ID NO: 567555 - DNA, 120 bp, Artificial Sequence
  ENSG00000170365_55 (sequence is synthesized)
caattctgggtacgtacaacttctggggcctgcaaattattggagagtgagtgaggggcaacgaaagatagacataaaagggcgcgtctcgaaaggtgctgactgggttacttttttaaa

SEQ ID NO: 567556 - DNA, 120 bp, Artificial Sequence
  ENSG00000170365_56 (sequence is synthesized)
cattgccctcagtcctcaacaggatttctctagcactgaagcctgaccataatactcaattgcaggtctgctccacataaaactatgtaactagagtacttcctcctgtgctggttccaa

SEQ ID NO: 567557 - DNA, 120 bp, Artificial Sequence
  ENSG00000170367_0 (sequence is synthesized)
gcttcctgcctcagccttctgctgctttgctctctgggagatccagctccttgctctgtgtcccagtagaacatgatgtggcccatgcacaccccactgctgctgctgactgccttgatg

SEQ ID NO: 567558 - DNA, 120 bp, Artificial Sequence
  ENSG00000170367_1 (sequence is synthesized)
gtggccgtggccgggagtgcctcggcccaatctaggaccttggcaggtggcatccatgccacagacctcaatgacaagagtgtgcagtgtgccctggactttgccatcagcgagtacaac

SEQ ID NO: 567559 - DNA, 120 bp, Artificial Sequence
  ENSG00000170367_2 (sequence is synthesized)
aaggtcattaataaggatgagtactacagccgccctctgcaggtgatggctgcctaccagcagatcgtgggtggggtgaactactacttcaatgtgaagttcggtcgaaccacatgcacc

SEQ ID NO: 567560 - DNA, 120 bp, Artificial Sequence
  ENSG00000170367_3 (sequence is synthesized)
tgaccagccaaaactgaaagaggaagagttctgctctttccagatcaatgaagttccctgggaggataaaatttccattctgaactacaagtgccggaaagtctaggggtctgtgcaagg

SEQ ID NO: 567561 - DNA, 120 bp, Artificial Sequence
  ENSG00000170367_4 (sequence is synthesized)
cctgtcacactgaccacctcctactcccaccccctgtagtgctcccacccctggactggtggcccccaccctgggggaggtctcctcatgcgcctgcaccaggagacagacacagaaggt

SEQ ID NO: 567562 - DNA, 120 bp, Artificial Sequence
  ENSG00000170367_5 (sequence is synthesized)
ggcaggaggcctttgttgctcagcaggaggctctgcccttgctccttccttcttgcttctcatagccccagtgtgcagtgcacactctcccacctcctgcaattaaacagtagcattgcc

SEQ ID NO: 567563 - DNA, 120 bp, Artificial Sequence
  ENSG00000170369_0 (sequence is synthesized)
gatccccgcctcaggctctcaacctcctctcctgcagctccagctctgtgctctgcctccgaggagaccatggcctggcccctgtgcaccctgctgctcctgctggccacccaggctgtg

SEQ ID NO: 567564 - DNA, 120 bp, Artificial Sequence
  ENSG00000170369_1 (sequence is synthesized)
gccctggcctggagcccccaggaggaggacaggataatcgagggtggcatctatgatgcagacctcaatgatgagcgggtacagcgtgcccttcactttgtcatcagcgagtataacaag

SEQ ID NO: 567565 - DNA, 120 bp, Artificial Sequence
  ENSG00000170369_2 (sequence is synthesized)
gccactgaagatgagtactacagacgcctgctgcgggtgctacgagccagggagcagatcgtgggcggggtgaattacttcttcgacatagaggtgggccgaaccatatgtaccaagtcc

SEQ ID NO: 567566 - DNA, 120 bp, Artificial Sequence
  ENSG00000170369_3 (sequence is synthesized)
ccatgaacagccagaactgcagaagaaacagttgtgctctttccagatctacgaagttccctgggaggacagaatgtccctggtgaattccaggtgtcaagaagcctagggatctgtgcc

SEQ ID NO: 567567 - DNA, 120 bp, Artificial Sequence
  ENSG00000170369_4 (sequence is synthesized)
agggagtcacactgaccacctcctactcccaccccttgtagtgctcccacccctggactggtggcccccaccctgtgggaggtctccccatgcacctgcagcaggagaagacagagaagg

SEQ ID NO: 567568 - DNA, 120 bp, Artificial Sequence
  ENSG00000170369_5 (sequence is synthesized)
ctgcaggaggcctttgttgctcagcaggggactctgccctccctccttccttttgcttctcatagccctggtacatggtacacacacccccacctcctgcaattaaacagtagcatcacc

SEQ ID NO: 567569 - DNA, 120 bp, Artificial Sequence
  ENSG00000170370_0 (sequence is synthesized)
gcacaacttgtgaagaagcgaacacttccatggattgtccttggacttagggcgccctgcccgccttttgcagaggagaaaaaacttttttttttttttgcctcccccgagaactttccc

SEQ ID NO: 567570 - DNA, 84 bp, Artificial Sequence
  ENSG00000170370_1 (sequence is synthesized)
aaaacttttttttttttttgcctcccccgagaactttccccccttctcctccctgcctctaactccgatccccccacgccatct

SEQ ID NO: 567571 - DNA, 120 bp, Artificial Sequence
  ENSG00000170370_2 (sequence is synthesized)
caaattcttctggaaggattttcccccctctcttcaggttgggcgcgtttggtgcaagattctcgggatcctcggctttgcctctccctctccctcccccctcctttcctttttcctttc

SEQ ID NO: 567572 - DNA, 120 bp, Artificial Sequence
  ENSG00000170370_3 (sequence is synthesized)
ctttcctttctttcttcctttccttccccccacccccacccccaccccaaacaaacgagtccccaattctcgtccgtcctcgccgcgggcagcgggcggcggaggcagcgtgcggcggtc

SEQ ID NO: 567573 - DNA, 120 bp, Artificial Sequence
  ENSG00000170370_4 (sequence is synthesized)
gccaggagctgggagcccagggcgcccgctcctcggcgcagcatgttccagccggcgcccaagcgctgcttcaccatcgagtcgctggtggccaaggacagtcccctgcccgcctcgcgc

SEQ ID NO: 567574 - DNA, 120 bp, Artificial Sequence
  ENSG00000170370_5 (sequence is synthesized)
tccgaggaccccatccgtcccgcggcactcagctacgctaactccagccccataaatccgttcctcaacggcttccactcggccgccgccgccgccgccggtaggggcgtctactccaac

SEQ ID NO: 567575 - DNA, 120 bp, Artificial Sequence
  ENSG00000170370_6 (sequence is synthesized)
ccggacttggtgttcgccgaggcggtctcgcacccgcccaaccccgccgtgccagtgcacccggtgccgccgccgcacgccctggccgcccaccccctaccctcctcgcactcgccacac

SEQ ID NO: 567576 - DNA, 120 bp, Artificial Sequence
  ENSG00000170370_7 (sequence is synthesized)
cccctattcgcctcgcagcagcgggatccgtccaccttctacccctggctcatccaccgctaccgatatctgggtcatcgcttccaagggaacgacactagccccgagagtttccttttg

SEQ ID NO: 567577 - DNA, 120 bp, Artificial Sequence
  ENSG00000170370_8 (sequence is synthesized)
cacaacgcgctggcccgaaagcccaagcggatccgaaccgccttctccccgtcccagcttctaaggctggaacacgcctttgagaagaatcactacgtggtgggcgccgaaaggaagcag

SEQ ID NO: 567578 - DNA, 120 bp, Artificial Sequence
  ENSG00000170370_9 (sequence is synthesized)
ctggcacacagcctcagcctcacggaaactcaggtaaaagtatggtttcagaaccgaagaacaaagttcaaaaggcagaagctggaggaagaaggctcagattcgcaacaaaagaaaaaa

SEQ ID NO: 567579 - DNA, 120 bp, Artificial Sequence
  ENSG00000170370_10 (sequence is synthesized)
gattaaaaacataaacctaaccccacagaaacggacaacatggagcaaaagagacagggagaggtggagaaggaaaaaaccctacaaaacaaaaacaaaccgcatacacgttcaccgaga

SEQ ID NO: 567580 - DNA, 120 bp, Artificial Sequence
  ENSG00000170370_11 (sequence is synthesized)
aagggagagggaatcggagggagcagcggaatgcggcgaagactctggacagcgagggcacagggtcccaaaccgaggccgcgccaagatggcagaggatggaggctccttcatcaacaa

SEQ ID NO: 567581 - DNA, 120 bp, Artificial Sequence
  ENSG00000170370_12 (sequence is synthesized)
ggaggctccttcatcaacaagcgaccctcgtctaaagaggcagctgagtgagagacacagagagaaggagaaagagggagggagagagagaaagagagagaaagagagagagagagagag

SEQ ID NO: 567582 - DNA, 120 bp, Artificial Sequence
  ENSG00000170370_13 (sequence is synthesized)
actctgacaaggggagctgtcaatcaaacaccaaaccggggagacaagatgattggcaggtattccgtttatcacagtccacttaaaaaatgatgatgatgataaaaaccacgacccaac

SEQ ID NO: 567583 - DNA, 120 bp, Artificial Sequence
  ENSG00000170370_14 (sequence is synthesized)
caggcacaggacttttttgttttttgcacttcgctgtgtttcccccccatctttaaaaataattagtaataaaaaacaaaaattccatatctagccccatcccacacctgtttcaaatcc

SEQ ID NO: 567584 - DNA, 120 bp, Artificial Sequence
  ENSG00000170370_15 (sequence is synthesized)
ttgaaatgcatgtagcagttgttgggcgaatggtgtttaaagaccgaaaatgaattgtaattttcttttccttttaaagacaggttctgtgtgctttttattttgattttttttcccaag

SEQ ID NO: 567585 - DNA, 120 bp, Artificial Sequence
  ENSG00000170370_16 (sequence is synthesized)
aaatgtgcagtctgtaaacactttttgataccttctgatgtcaaagtgattgtgcaagctaaatgaagtaggctcagcgatagtggtcctcttacagagaaacggggagcaggacgacgg

SEQ ID NO: 567586 - DNA, 120 bp, Artificial Sequence
  ENSG00000170370_17 (sequence is synthesized)
gggggctgggggtggcgggggagggtgcccacaaaaagaatcaggacttgtactgggaaaaaaacccctaaattaattatatttcttggacattccctttcctaacatcctgaggcttaa

SEQ ID NO: 567587 - DNA, 120 bp, Artificial Sequence
  ENSG00000170370_18 (sequence is synthesized)
aaccctgatgcaaacttctcctttcagtggttggagaaattggccgagttcaaccattcactgcaatgcctattccaaactttaaatctatctattgcaaaacctgaaggactgtagtta

SEQ ID NO: 567588 - DNA, 120 bp, Artificial Sequence
  ENSG00000170370_19 (sequence is synthesized)
gcggggatgatgttaagtgtggccaagcgcacggcggcaagttttcaagcactgagtttctattccaagatcatagacttactaaagagagtgacaaatgcttccttaatgtcttctata

SEQ ID NO: 567589 - DNA, 120 bp, Artificial Sequence
  ENSG00000170370_20 (sequence is synthesized)
ccagaatgtaaatatttttgtgttttgtgttaatttgttagaattctaacacactatatacttccaagaagtatgtcaatgtcaatattttgtcaataaagatttatcaatatgccctca

SEQ ID NO: 567590 - DNA, 120 bp, Artificial Sequence
  ENSG00000170370_21 (sequence is synthesized)
ttcgctatcagtcatgcttatggtcccctcaccagacccggagccgctgggatcttcctgcgttacagactgtcctggcggtgtctgcaagtcggtaaccccccgggtttcgatcccttc

SEQ ID NO: 567591 - DNA, 120 bp, Artificial Sequence
  ENSG00000170370_22 (sequence is synthesized)
gctcgcgtttctcttctagttctcgggagccgggagccccggagcccagttcgcgagaggcagcagcggctgtagccaagcacacccgccggccagatttctgtcccgatcgggcttcaa

SEQ ID NO: 567592 - DNA, 120 bp, Artificial Sequence
  ENSG00000170370_23 (sequence is synthesized)
cgactcgccccgcctctatacttttccggaggggcaataaaacaaataatttaaaaataaatctccatgaaaactctggagagcagcccgccgcctttccaccgtgggtcaaagttcccc

SEQ ID NO: 567593 - DNA, 120 bp, Artificial Sequence
  ENSG00000170370_24 (sequence is synthesized)
cgggcgccgcaggagcgagtgagctgggagcgaggggcgaaggcgcggagaagcccggccgcccggtgggcggcagaaggctcagccgaggcggcggcgccgactccgttccactctcgg

SEQ ID NO: 567594 - DNA, 120 bp, Artificial Sequence
  ENSG00000170370_25 (sequence is synthesized)
cccggatccaggcctccgggttcccaggcgctcacctccctctgacgcactttaaagagtctccccccttccacctcagggcgagtaatagcgaccaatcatcaagccatttaccaggct

SEQ ID NO: 567595 - DNA, 120 bp, Artificial Sequence
  ENSG00000170373_0 (sequence is synthesized)
gggctccctgcctcgggctctcaccctcctctcctgcagctccagctttgtgctctgcctctgaggagaccatggcccagtatctgagtaccctgctgctcctgctggccaccctagctg

SEQ ID NO: 567596 - DNA, 120 bp, Artificial Sequence
  ENSG00000170373_1 (sequence is synthesized)
tggccctggcctggagccccaaggaggaggataggataatcccgggtggcatctataacgcagacctcaatgatgagtgggtacagcgtgcccttcacttcgccatcagcgagtataaca

SEQ ID NO: 567597 - DNA, 120 bp, Artificial Sequence
  ENSG00000170373_2 (sequence is synthesized)
aggccaccaaagatgactactacagacgtccgctgcgggtactaagagccaggcaacagaccgttgggggggtgaattacttcttcgacgtagaggtgggccgcaccatatgtaccaagt

SEQ ID NO: 567598 - DNA, 120 bp, Artificial Sequence
  ENSG00000170373_3 (sequence is synthesized)
agaactgcagaagaaacagttgtgctctttcgagatctacgaagttccctgggagaacagaaggtccctggtgaaatccaggtgtcaagaatcctagggatctgtgccaggccattcgca

SEQ ID NO: 567599 - DNA, 120 bp, Artificial Sequence
  ENSG00000170373_4 (sequence is synthesized)
ccagccaccacccactcccaccccctgtagtgctcccacccctggactggtggcccccaccctgcgggaggcctccccatgtgcctgcgccaagagacagacagagaaggctgcaggagt

SEQ ID NO: 567600 - DNA, 120 bp, Artificial Sequence
  ENSG00000170373_5 (sequence is synthesized)
cctttgttgctcagcagggcgctctgccctccctccttccttcttgcttctaatagccctggtacatggtacacacccccccacctcctgcaattaaacagtagcatcgcctccctctga

SEQ ID NO: 567601 - DNA, 120 bp, Artificial Sequence
  ENSG00000170373_6 (sequence is synthesized)
caggaagtcacatagctttcacagtcaaaggaccagtgtcacctctgtggagacctgggtgactcaagcttgggagcactggggaagagaggcatggctcggggaggctgcactccagct

SEQ ID NO: 567602 - DNA, 120 bp, Artificial Sequence
  ENSG00000170374_0 (sequence is synthesized)
attctcccattctccctccctctcccttttctctctctaccccccccaccccccggctcagctctctccatctgcctggctccttgggacccgttccccagcctcaggatggcgtcctcc

SEQ ID NO: 567603 - DNA, 120 bp, Artificial Sequence
  ENSG00000170374_1 (sequence is synthesized)
ctgcttgaggaggaagttcactatggctccagtcccctggccatgctgacggcagcgtgcagcaaatttggtggctctagccctctgcgggactcaacaactctgggcaaagcaggcaca

SEQ ID NO: 567604 - DNA, 120 bp, Artificial Sequence
  ENSG00000170374_2 (sequence is synthesized)
aagaagccgtactctgtgggcagtgacctttcagcctccaaaaccatgggggatgcttatccagccccctttacaagcactaatgggctcctttcacctgcaggcagtcctccagcaccc

SEQ ID NO: 567605 - DNA, 120 bp, Artificial Sequence
  ENSG00000170374_3 (sequence is synthesized)
acctcaggctatgctaatgattaccctcccttttcccactcattccctgggcccacaggcacccaggaccctgggctactagtgcccaaggggcacagctcttctgactgtctgcccagt

SEQ ID NO: 567606 - DNA, 120 bp, Artificial Sequence
  ENSG00000170374_4 (sequence is synthesized)
gtctacacctctctggacatgacacacccctatggctcctggtacaaggcaggcatccatgcaggcatttcaccaggcccaggcaacactcctactccatggtgggatatgcaccctgga

SEQ ID NO: 567607 - DNA, 120 bp, Artificial Sequence
  ENSG00000170374_5 (sequence is synthesized)
ggcaactggctaggtggtgggcagggccagggtgatgggctgcaagggacactgcccacaggtccagctcagcctccactgaacccccagctgcccacctacccatctgactttgctccc

SEQ ID NO: 567608 - DNA, 120 bp, Artificial Sequence
  ENSG00000170374_6 (sequence is synthesized)
cttaatccagccccctacccagctccccacctcttgcaaccagggccccagcatgtcttgccccaagatgtctataaacccaaggcagtgggaaatagtgggcagctagaagggagtggt

SEQ ID NO: 567609 - DNA, 120 bp, Artificial Sequence
  ENSG00000170374_7 (sequence is synthesized)
ggagccaaacccccacggggtgcaagcactgggggtagtggtggatatgggggcagtggggcagggcgctcctcctgcgactgccctaattgccaggagctagagcggctgggagcagca

SEQ ID NO: 567610 - DNA, 120 bp, Artificial Sequence
  ENSG00000170374_8 (sequence is synthesized)
gcggctgggctgcggaagaagcccatccacagctgccacatccctggctgcggcaaggtgtatggcaaggcttcgcacctgaaggcccacttgcgctggcacacaggcgagaggcccttc

SEQ ID NO: 567611 - DNA, 120 bp, Artificial Sequence
  ENSG00000170374_9 (sequence is synthesized)
gtctgcaactggctcttctgcggcaagaggttcactcgttcggatgagctggagcgtcatgtgcgcactcacacccgggagaagaagttcacctgcctgctctgctccaagcgctttacc

SEQ ID NO: 567612 - DNA, 120 bp, Artificial Sequence
  ENSG00000170374_10 (sequence is synthesized)
cgaagcgaccacctgagcaaacaccagcgcacccatggagaaccaggcccgggtccccctcccagtggccccaaggagctgggggagggccgcagcacgggggaagaggaggccagtcag

SEQ ID NO: 567613 - DNA, 120 bp, Artificial Sequence
  ENSG00000170374_11 (sequence is synthesized)
acgccccgaccttctgcctcgccagcaaccccagagaaagcccctggaggcagccctgagcagagcaacttgctggagatctgagccgggtggaaggtctcccaccccagggctgccctg

SEQ ID NO: 567614 - DNA, 120 bp, Artificial Sequence
  ENSG00000170374_12 (sequence is synthesized)
ctcctggccattctgggcttgggtatctccttgcatgcctcctcagctcaccttctctcttcaccatgagactggctttccacaaactctcatctcaggccctccccttgtgcctgatac

SEQ ID NO: 567615 - DNA, 120 bp, Artificial Sequence
  ENSG00000170374_13 (sequence is synthesized)
ctgcactccggcttcctagactctggccctgccacaccaacacactttctatttgggctcccaacactatttctccatctcactccttgacatgtacccctttctgcttctcaagcttat

SEQ ID NO: 567616 - DNA, 120 bp, Artificial Sequence
  ENSG00000170374_14 (sequence is synthesized)
ttcctgctgtccctcagcctccaggcttcagtcttcccaacttcttacaccattgctttccattctccagaactcttttttcctttttacaaacacaatgataatgataatttattgccc

SEQ ID NO: 567617 - DNA, 120 bp, Artificial Sequence
  ENSG00000170374_15 (sequence is synthesized)
cctggtggcctcttcatcaggggtattggggttagtgacctggccagagggtgccaagaggggggcagaccagtggggatctgatcccaaagatggggtgaccccagggtcagggaggct

SEQ ID NO: 567618 - DNA, 120 bp, Artificial Sequence
  ENSG00000170374_16 (sequence is synthesized)
gcccccaggcctgtatatttaacccctatgtaccaggagtaatgaatagtaataattctatttatgtaagttatgatgacgggtcaggtagagtgagctggggagggaagtggatccatt

SEQ ID NO: 567619 - DNA, 120 bp, Artificial Sequence
  ENSG00000170374_17 (sequence is synthesized)
tctgctaaggaaattctagtcaaatgcatctctgtatagacaaaatgttagtggagaagatcttgttaatagaatgtctatcatcagaatctcagttgatagggtttctcttgtaatgaa

SEQ ID NO: 567620 - DNA, 120 bp, Artificial Sequence
  ENSG00000170374_18 (sequence is synthesized)
gtctctacaaattgggttagctacatctctgctaaacagttgatggggtatctcttgattagggggatccctaatatccccagccccagccagaagctgtgaaacctcaagtcctatgga

SEQ ID NO: 567621 - DNA, 120 bp, Artificial Sequence
  ENSG00000170374_19 (sequence is synthesized)
ggggagaaggactggaatgtaccccatctcccttgactgcagagcaggttcctccactgccccaccccttagacaccatgaccccatcaggttaatcccctgttgccatggttatggaga

SEQ ID NO: 567622 - DNA, 120 bp, Artificial Sequence
  ENSG00000170374_20 (sequence is synthesized)
gcttgcagctgccatcttagatgtgctctttggggaagcccatctaacaggaggacattggtttgggggtgcacctcctgaagaatgggtggggaaggctttctctaggatcagattcaa

SEQ ID NO: 567623 - DNA, 120 bp, Artificial Sequence
  ENSG00000170374_21 (sequence is synthesized)
ataagtatgtattgagtgcctactctgtgcaaggcactatgctagatctggtgcctagaagccctgagaaagaacttaaagagctaggaggacagaggcccccaagctgatctggtggtg

SEQ ID NO: 567624 - DNA, 120 bp, Artificial Sequence
  ENSG00000170374_22 (sequence is synthesized)
catccacgcacccccaccctgggactttggatgctcccatctccacctccagtgacttttaaagccgcttcgtgcctttcctgtaacgttggatcctccttttctgtcccctgctgtctc

SEQ ID NO: 567625 - DNA, 120 bp, Artificial Sequence
  ENSG00000170374_23 (sequence is synthesized)
aaggccccaagttaaagggttaaagccgctggagcttggggagagaacattgtggaatggaagggatcatgccctttgtggagtcttttttttttaatttaataaataaaagttggattt

SEQ ID NO: 567626 - DNA, 120 bp, Artificial Sequence
  ENSG00000170374_24 (sequence is synthesized)
agtagcagaagcagcagccgccgagcagcagcaaggactctggagtcagagtaggactgtaggaccggagcctgagtggaacaggagtggagctggcctgggagagagcggatccctccc

SEQ ID NO: 567627 - DNA, 120 bp, Artificial Sequence
  ENSG00000170374_25 (sequence is synthesized)
agcaccctcaggccacccgttgcctgcactctccctgccagacctccagagaggagagactcgggacagccagccccaggttcccccagctctctccatctgcctggctccttgggaccc

SEQ ID NO: 567628 - DNA, 120 bp, Artificial Sequence
  ENSG00000170374_26 (sequence is synthesized)
tgcattggggagcggaggataagagaatgggggagctctgagatccctactcctctctgtgtggggtgatggggaagagaaagggcatgagagactggcaggctgggggccaacgggatg

SEQ ID NO: 567629 - DNA, 120 bp, Artificial Sequence
  ENSG00000170379_0 (sequence is synthesized)
agtaattgagtgagagagttctggtgtgtagacaacggtggctttggaagcaagccagcctgggtttagtaaaaattaaagaaataggaaagaaatacaaaagttttcttttaagaaatg

SEQ ID NO: 567630 - DNA, 120 bp, Artificial Sequence
  ENSG00000170379_1 (sequence is synthesized)
cctttttatgaaaatatttcaaaaggaattcaagtttattttgaaaaaatgcacaccaatacagaaatatagagaggaaaatggcaactcatcctcctcaccacaccaccagctccagtc

SEQ ID NO: 567631 - DNA, 120 bp, Artificial Sequence
  ENSG00000170379_2 (sequence is synthesized)
tcatgcctctggaccaaggtatggggaggatgtcaggcaggaccagcagcagctcctggaggggatctcagagctggacatcaggacagggggagtcccctcacagctgcttgtacatgg

SEQ ID NO: 567632 - DNA, 120 bp, Artificial Sequence
  ENSG00000170379_3 (sequence is synthesized)
agccctggccttccctctggggctggatgcctcactcaactgcttcctggcggctgctcactatggccggggccgggtggtcctggctgcccacgagtgcctgctctgtgctcccaagat

SEQ ID NO: 567633 - DNA, 120 bp, Artificial Sequence
  ENSG00000170379_4 (sequence is synthesized)
ggggcccttcttgctcaatgcggtgcgctggctggccagaggccagacaggcaaagttggggtgaacacaaatctaaaagatctgtgtcctctcctatcggagcatggcctgcaatgcag

SEQ ID NO: 567634 - DNA, 120 bp, Artificial Sequence
  ENSG00000170379_5 (sequence is synthesized)
cctggagccccatctgaacagcgacttgtgtgtctactgctgcaaggcgtacagtgacaaggaggctaagcagctgcaggagtttgtggctgagggtggggggctgctgattgggggcca

SEQ ID NO: 567635 - DNA, 120 bp, Artificial Sequence
  ENSG00000170379_6 (sequence is synthesized)
ggcctggtggtgggcctcccagaaccctggccactgccccttggctggcttccctggtaacatcatcctcaactgctttggcctcagcatcctgcctcagactctcaaagcaggctgctt

SEQ ID NO: 567636 - DNA, 120 bp, Artificial Sequence
  ENSG00000170379_7 (sequence is synthesized)
ccccgttcccacccctgagatgagaagctaccacttccgcaaggcgctctctcaattccaggctatactgaaccacgagaatgggaacttggaaaagagctgtctggcaaagttgagagt

SEQ ID NO: 567637 - DNA, 120 bp, Artificial Sequence
  ENSG00000170379_8 (sequence is synthesized)
tgatggtgcagccttcctacagattcctgcggagggggtccctgcttacatatccctgcacaggctcctgaggaagatgctacgagggtctggcctcccagctgtgagccgggaaaatcc

SEQ ID NO: 567638 - DNA, 120 bp, Artificial Sequence
  ENSG00000170379_9 (sequence is synthesized)
agttgccagtgactcctatgaggctgcggtgctctccctggccactgggctggctcactctggaactgactgctcccagctggcccaggggcttggcacctggacctgctcctccagttt

SEQ ID NO: 567639 - DNA, 120 bp, Artificial Sequence
  ENSG00000170379_10 (sequence is synthesized)
gtacccctcaaaacaccccatcaccgtggagatcaatggaatcaacccagagtctcactctgtcatccaggttggaatgcagtggcgcgatctcagctcatgcaacctccacctcctggg

SEQ ID NO: 567640 - DNA, 120 bp, Artificial Sequence
  ENSG00000170379_11 (sequence is synthesized)
tcctggaaggacaaaatgcagaagtctcactgtctgaagctgctgcctctgctggcctgagggtacagataggctgccacaccgatgaccttaccaaggccaggaagctatctcgagccc

SEQ ID NO: 567641 - DNA, 120 bp, Artificial Sequence
  ENSG00000170379_12 (sequence is synthesized)
ccgtggtgactcaccaatgctggatggacaggactgagcggtcagtctcctgcctctggggcggcctcctctacgtcatcgtgcccaagggcagccaactaggccctgtgcctgtcacta

SEQ ID NO: 567642 - DNA, 120 bp, Artificial Sequence
  ENSG00000170379_13 (sequence is synthesized)
tcaggggagctgtgcctgccccatactacaagctgggtaagacatcgctggaggagtggaagaggcagatgcaggagaacctggctccctggggagagctggccacggacaacatcatcc

SEQ ID NO: 567643 - DNA, 120 bp, Artificial Sequence
  ENSG00000170379_14 (sequence is synthesized)
tgacagtgccaaccacaaaccttcaggccctgaaggaccccgagcctgtgctccgcctctgggatgagatgatgcaggctgtggccaggctggcggctgagcccttccctttccgccgtc

SEQ ID NO: 567644 - DNA, 120 bp, Artificial Sequence
  ENSG00000170379_15 (sequence is synthesized)
ctgagaggattgtggctgatgtgcagatctcagctggctggatgcattcaggataccccatcatgtgccacctggagtctgtgaaggagatcatcaatgagatggacatgaggagcaggg

SEQ ID NO: 567645 - DNA, 120 bp, Artificial Sequence
  ENSG00000170379_16 (sequence is synthesized)
gtgtgtggggccccatccatgagctgggccacaaccaacagcggcatggatgggagttccccccacacactactgaggccacctgtaacctttggtcagtctacgtgcatgaaacagtcc

SEQ ID NO: 567646 - DNA, 120 bp, Artificial Sequence
  ENSG00000170379_17 (sequence is synthesized)
tggggatccccagggctcaggcccacgaggctctgagccctccagagcgagagaggagaatcaaggcccacctgggaaagggagcccccctgtgtgactggaatgtatggacagccctgg

SEQ ID NO: 567647 - DNA, 120 bp, Artificial Sequence
  ENSG00000170379_18 (sequence is synthesized)
aaacatatctacagctccaagaggccttcgggtgggagccattcacccagctctttgctgagtaccagaccctctctcacctccccaaagacaacactggcaggatgaatctatgggtga

SEQ ID NO: 567648 - DNA, 120 bp, Artificial Sequence
  ENSG00000170379_19 (sequence is synthesized)
agaagttctctgaaaaagtgaagaagaatctggttcccttctttgaggcctggggctggcctatccagaaggaggtggctgacagcctggcctccctaccagagtggcaggaaaacccca

SEQ ID NO: 567649 - DNA, 120 bp, Artificial Sequence
  ENSG00000170379_20 (sequence is synthesized)
tgcaagtgtacctccgtgccaggaagtaaaggatgccccacaaggcgggagagaaaaggcagggtcacgccatcaactccaccatggggctttggccgtgtgctcagtatctggagcctg

SEQ ID NO: 567650 - DNA, 120 bp, Artificial Sequence
  ENSG00000170379_21 (sequence is synthesized)
aatcccgcttccaagcctgaccactagatggtggccacggtcataagaaaaaatggaacccctttctgtaaaaggtgccttgtgcttctttttattgtttttctgcctacgctattgctt

SEQ ID NO: 567651 - DNA, 120 bp, Artificial Sequence
  ENSG00000170379_22 (sequence is synthesized)
tccccaagagactcacttcacctcttagtcttccagagaggatctttcatcctgccatcctgaggcttctatttttgaccaatagctctaaagaccacgggttcccataacaacctgata

SEQ ID NO: 567652 - DNA, 120 bp, Artificial Sequence
  ENSG00000170379_23 (sequence is synthesized)
cagctgatagaaccatggcgaccattgctgctgctgcgtttgaggccctcatggatggagtgacatgctgggatgtccccagaggccccatccccagtgaactccttcttattggagaag

SEQ ID NO: 567653 - DNA, 120 bp, Artificial Sequence
  ENSG00000170379_24 (sequence is synthesized)
ccgccttccccgtgatggtgaatgacaagggccaggtgctcattgctgcctcctcctacggccgaggccgcctcgtggttgtgtcccatgagggctacctgtcgcatactggcttggctc

SEQ ID NO: 567654 - DNA, 120 bp, Artificial Sequence
  ENSG00000170379_25 (sequence is synthesized)
catttctcctcaatgcagtgagctggctctgtccctgtcctggggctcccgtgggagtgcatccatccctggcacctctagtaaacatcctacaggatgctgggcttgaggcacaggtca

SEQ ID NO: 567655 - DNA, 120 bp, Artificial Sequence
  ENSG00000170379_26 (sequence is synthesized)
agccagaaccaggagagcccctaggggtttactgtatcaatgcctacaatgacaccttgactgcaacgctgatccagtttgtgaaacatggagggggcttgttaatcgggggccaggcct

SEQ ID NO: 567656 - DNA, 120 bp, Artificial Sequence
  ENSG00000170379_27 (sequence is synthesized)
ggtactgggccagccagcacggccctgacaaggtgctctccaggttccctgggaacaaggtgacaagtgtagctggagtgtacttcactgacacctatggggacagagaccggttcaagg

SEQ ID NO: 567657 - DNA, 120 bp, Artificial Sequence
  ENSG00000170379_28 (sequence is synthesized)
tccctgccatccctgaataaggcttctaatttattatgctttaacaagttttcaaatagcaagcgagacacgctggaatagtggagagagccccaaaccagctttggttctatggaaaat

SEQ ID NO: 567658 - DNA, 120 bp, Artificial Sequence
  ENSG00000170379_29 (sequence is synthesized)
cactccacctctctgtgtttctgtcttcacatccatgacatgaggatacaaatcttttcctcacaaagctgttgtttgatttctcctggtcccatagtggactgttaacggtgtccagtc

SEQ ID NO: 567659 - DNA, 120 bp, Artificial Sequence
  ENSG00000170379_30 (sequence is synthesized)
tagcgtgcacatcctgggtgctgaatctcacttcagtgttgacccccttggggttagcattcagtccttgtatatttagagaatgtcaatgttttcccagacatggtatcaataatggta

SEQ ID NO: 567660 - DNA, 120 bp, Artificial Sequence
  ENSG00000170379_31 (sequence is synthesized)
gttgtcagcagtatcttagccctttctacattttttctcccacttctggaaggattcttgggtataacctaacccaaagaaaagtggcatgtgctgaaactgagtgtcacagagctgtga

SEQ ID NO: 567661 - DNA, 120 bp, Artificial Sequence
  ENSG00000170379_32 (sequence is synthesized)
ggttgggtctttgggattagcttcattttccagggtttgccctttgcccttcaaccaaaggacaaagtcatgttaacagctgctactaagtctatatgcccattcgttcataccacaaaa

SEQ ID NO: 567662 - DNA, 120 bp, Artificial Sequence
  ENSG00000170379_33 (sequence is synthesized)
caggcatctgactcctctggtcaccatggaatcaaggcactgtcaagtggtggggggtccacaggcacagtgggcttcactctggaacaggattactgggtgcagcggatgtaatcctca

SEQ ID NO: 567663 - DNA, 120 bp, Artificial Sequence
  ENSG00000170379_34 (sequence is synthesized)
cttaatcaacccacaccccagcatcccctgagctttctcttaatctcattctagcccatcttgactcttcggttagagggagttctcattggagatttgtctctgggattaatgagtgta

SEQ ID NO: 567664 - DNA, 120 bp, Artificial Sequence
  ENSG00000170379_35 (sequence is synthesized)
tgcctagctactttctccagtttacttttagaccatattgttgtttgttttgaatatcattccttaggctatgttgagagtagagtggcttcccattaggagaactaatttagggcatgt

SEQ ID NO: 567665 - DNA, 120 bp, Artificial Sequence
  ENSG00000170379_36 (sequence is synthesized)
cttttgctgaatcccgtcagcatatttaacaaattcccaattctagataatttccttttatttctctagtaccctttgccaggggctctacacatcaaaggtgttcatgaagtatttgtc

SEQ ID NO: 567666 - DNA, 120 bp, Artificial Sequence
  ENSG00000170379_37 (sequence is synthesized)
aaaggaaagaacagtaatgacacctaacacataatgagtgattagtatgttccaggcattgcgtgagctatttactgtgagtgatttaatgttatcttcccagcagacctctgaggtagg

SEQ ID NO: 567667 - DNA, 120 bp, Artificial Sequence
  ENSG00000170379_38 (sequence is synthesized)
tactagtatgatccccatttcgtacatgaggaaactgacactaagggacataaaataagttttttgaagtcacaaagtgaataaaaggaagaaccagggtttaattgaagcccatagcaa

SEQ ID NO: 567668 - DNA, 120 bp, Artificial Sequence
  ENSG00000170379_39 (sequence is synthesized)
tgaaaacattgtggaacttattcttcatgaatggtttacaatttaaacaaaatgtcacctagaaaatagatgaaaatatgttcaaccaggtctggatttttccaatgtttactactgaat

SEQ ID NO: 567669 - DNA, 120 bp, Artificial Sequence
  ENSG00000170379_40 (sequence is synthesized)
tttcattcaataacaagtttaacttccaaaaaggtgttggtatctgattttctgcctgcctcagaatgtgatttgtctgcctttgggtcatccagccttgggtagagaaggaatttgaac

SEQ ID NO: 567670 - DNA, 83 bp, Artificial Sequence
  ENSG00000170379_41 (sequence is synthesized)
ctttgggtcatccagccttgggtagagaaggaatttgaactcaggaaattcaactccagaactgatgttcttttttttttttc

SEQ ID NO: 567671 - DNA, 90 bp, Artificial Sequence
  ENSG00000170379_42 (sequence is synthesized)
ttgcccccaacctcccgacaggccccagtgtgatgtttccctccctgtgtccatttgttctcatttttcatctcccacttatgagtgaga

SEQ ID NO: 567672 - DNA, 85 bp, Artificial Sequence
  ENSG00000170379_43 (sequence is synthesized)
cctcccgacaggccccagtgtgatgtttccctccctgtgtccatttgttctcatttttcatctcccacttatgagtgagaacatg

SEQ ID NO: 567673 - DNA, 120 bp, Artificial Sequence
  ENSG00000170379_44 (sequence is synthesized)
ggggatgaccagacccctcagtcatgtagcgacctggatcccagtagccctccacctccttcgccactccaccagcctggacctccacctcccctggaaatgagagggactgggccgcag

SEQ ID NO: 567674 - DNA, 120 bp, Artificial Sequence
  ENSG00000170379_45 (sequence is synthesized)
ggtggtgcttcttgggttatacccctctaaggcagagagaatggcacctgtctcactcaccttctgattttgcaatgtaagaggaaatgaaaaatattatgaaaaaaatagaaatatagc

SEQ ID NO: 567675 - DNA, 120 bp, Artificial Sequence
  ENSG00000170379_46 (sequence is synthesized)
atattattcaagggcagaaactctgttagacattcctgcagctgaatcacagctcttgccctcattggttttgttcttggtctcctaataagtgttccataaatggtcattgctttgttt

SEQ ID NO: 567676 - DNA, 120 bp, Artificial Sequence
  ENSG00000170381_0 (sequence is synthesized)
aaccctgcctgaactttcctgtaaacagccactgacagactgcatccctgctgggtggatcctgcgactcctagagggaatggcacttcttgtttttaattagcaaggtgaaaggtgaat

SEQ ID NO: 567677 - DNA, 120 bp, Artificial Sequence
  ENSG00000170381_1 (sequence is synthesized)
taaaactagcagtttggcaagtcagtgcaagaggctgacttctgagaggcttccaggagcccgaagagaggacctccacgggagaagggagtgcgtgtgctcggttttgtttttttctct

SEQ ID NO: 567678 - DNA, 120 bp, Artificial Sequence
  ENSG00000170381_2 (sequence is synthesized)
cttttttttttttttttctgaatgaacagctttgcccaagtgactgaaaaatacagcttcttcctgaatctaccggcgtagttgctgaagagcgctctagacaggacatggctctgaaga

SEQ ID NO: 567679 - DNA, 120 bp, Artificial Sequence
  ENSG00000170381_3 (sequence is synthesized)
ctcactctttggaatgtcctcttgctcccggcttataaacaactgtcccgaggaaagaaaggttttacatagccaaatacagcctgacaaatggcacttcggaactgtgctttctgatga

SEQ ID NO: 567680 - DNA, 120 bp, Artificial Sequence
  ENSG00000170381_4 (sequence is synthesized)
caacgcgttcgatttctgacaaagcctctcgcacgctgcccctggagggaagtcctaagtaaaactcagaccctccttaaagtgaggagcgagggcttggacggtgaacacggcagcatg

SEQ ID NO: 567681 - DNA, 120 bp, Artificial Sequence
  ENSG00000170381_5 (sequence is synthesized)
gcatccgcggggcacattatcaccttgctcctgtggggttacttactggagctttggacaggaggtcatacagctgatactacccacccccggttacgcctgtcacataaagagctcttg

SEQ ID NO: 567682 - DNA, 120 bp, Artificial Sequence
  ENSG00000170381_6 (sequence is synthesized)
aatctgaacagaacatcaatatttcatagcccttttggatttcttgatctccatacaatgctgctggatgaatatcaagagaggctcttcgtgggaggcagggaccttgtatattccctc

SEQ ID NO: 567683 - DNA, 120 bp, Artificial Sequence
  ENSG00000170381_7 (sequence is synthesized)
agcttggagagaatcagtgacggctataaagagatacactggccgagtacagctctaaaaatggaagaatgcataatgaagggaaaagatgcgggtgaatgtgcaaattatgttcgggtt

SEQ ID NO: 567684 - DNA, 120 bp, Artificial Sequence
  ENSG00000170381_8 (sequence is synthesized)
ttgcatcactataacaggacacaccttctgacctgtggtactggagcttttgatccagtttgtgccttcatcagagttggatatcatttggaggatcctctgtttcacctggaatcaccc

SEQ ID NO: 567685 - DNA, 120 bp, Artificial Sequence
  ENSG00000170381_9 (sequence is synthesized)
agatctgagagaggaaggggcagatgtccttttgaccccagctcctccttcatctccactttaattggtagtgaattgtttgctggactctacagtgactactggagcagagacgctgcg

SEQ ID NO: 567686 - DNA, 120 bp, Artificial Sequence
  ENSG00000170381_10 (sequence is synthesized)
atcttccgcagcatggggcgactggcccatatccgcactgagcatgacgatgagcgtctgttgaaagaaccaaaatttgtaggttcatacatgattcctgacaatgaagacagagatgac

SEQ ID NO: 567687 - DNA, 120 bp, Artificial Sequence
  ENSG00000170381_11 (sequence is synthesized)
aacaaagtatatttcttttttactgagaaggcactggaggcagaaaacaatgctcacgcaatttacaccagggtcgggcgactctgtgtgaatgatgtaggagggcagagaatactggtg

SEQ ID NO: 567688 - DNA, 120 bp, Artificial Sequence
  ENSG00000170381_12 (sequence is synthesized)
aataagtggagcactttcctaaaagcgagactcgtttgctcagtaccaggaatgaatggaattgacacatattttgatgaattagaggacgtttttttgctacctaccagagatcataag

SEQ ID NO: 567689 - DNA, 120 bp, Artificial Sequence
  ENSG00000170381_13 (sequence is synthesized)
aatccagtgatatttggactctttaacactaccagtaatatttttcgagggcatgctatatgtgtctatcacatgtctagcattcgggcagccttcaacggaccatatgcacataaggaa

SEQ ID NO: 567690 - DNA, 120 bp, Artificial Sequence
  ENSG00000170381_14 (sequence is synthesized)
ggacctgaataccactggtcagtctatgaaggaaaagtcccttatccaaggcctggttcttgtgccagcaaagtaaatggagggagatacggaaccaccaaggactatcctgatgatgcc

SEQ ID NO: 567691 - DNA, 120 bp, Artificial Sequence
  ENSG00000170381_15 (sequence is synthesized)
atccgatttgcaagaagtcatccactaatgtaccaggccataaaacctgcccataaaaaaccaatattggtaaaaacagatggaaaatataacctgaaacaaatagcagtagatcgagtg

SEQ ID NO: 567692 - DNA, 120 bp, Artificial Sequence
  ENSG00000170381_16 (sequence is synthesized)
gaagctgaggatggccaatatgacgtcttgtttattgggacagataatggaattgtgctgaaagtaatcacaatttacaaccaagaaatggaatcaatggaagaagtaattctagaagaa

SEQ ID NO: 567693 - DNA, 120 bp, Artificial Sequence
  ENSG00000170381_17 (sequence is synthesized)
cttcagatattcaaggatccagttcctattatttctatggagatttcttcaaagcggcaacagctgtatattggatctgcttctgctgtggctcaagtcagattccatcactgtgacatg

SEQ ID NO: 567694 - DNA, 120 bp, Artificial Sequence
  ENSG00000170381_18 (sequence is synthesized)
tatggaagtgcttgtgctgactgctgcctggctcgagacccttactgtgcctgggatggcatatcctgctcccggtattacccaacaggcacacatgcaaaaaggcgtttccggagacaa

SEQ ID NO: 567695 - DNA, 120 bp, Artificial Sequence
  ENSG00000170381_19 (sequence is synthesized)
gatgttcgacatggaaatgcagctcagcagtgctttggacaacagtttgttggggatgctttggataagactgaagaacatctggcttatggcatagagaacaacagtactttgctggaa

SEQ ID NO: 567696 - DNA, 120 bp, Artificial Sequence
  ENSG00000170381_20 (sequence is synthesized)
tgtaccccacgatctttacaagcgaaagttatctggtttgtacagaaaggacgtgagacaagaaaagaggaggtgaagacagatgacagagtggttaagatggaccttggtttactcttc

SEQ ID NO: 567697 - DNA, 120 bp, Artificial Sequence
  ENSG00000170381_21 (sequence is synthesized)
ctaaggttacacaaatcagatgctgggacctatttttgccagacagtagagcatagctttgtccatacggtccgtaaaatcaccttggaggtagtggaagaggagaaagtcgaggatatg

SEQ ID NO: 567698 - DNA, 120 bp, Artificial Sequence
  ENSG00000170381_22 (sequence is synthesized)
tttaacaaggacgatgaggaggacaggcatcacaggatgccttgtcctgctcagagtagcatctcgcagggagcaaaaccatggtacaaggaattcttgcagctgatcggttatagcaac

SEQ ID NO: 567699 - DNA, 120 bp, Artificial Sequence
  ENSG00000170381_23 (sequence is synthesized)
ttccagagagtggaagaatactgcgagaaagtatggtgcacagatagaaagaggaaaaagcttaaaatgtcaccctccaagtggaagtatgccaaccctcaggaaaagaagctccgttcc

SEQ ID NO: 567700 - DNA, 120 bp, Artificial Sequence
  ENSG00000170381_24 (sequence is synthesized)
aaacctgagcattaccgcctgcccaggcacacgctggactcctgatggggtgagactatctactgtcttttgaagaatttatatttggaaagtaaaaaagtaaaaaaataaatcatccaa

SEQ ID NO: 567701 - DNA, 120 bp, Artificial Sequence
  ENSG00000170381_25 (sequence is synthesized)
cttctttgcattacttaaaagagatttctgtaatacaggaatgactatgaaggtgttataataaattattctacatactcatttgactggataaactttacataaaattaactaattttt

SEQ ID NO: 567702 - DNA, 120 bp, Artificial Sequence
  ENSG00000170381_26 (sequence is synthesized)
taaataaatgcattgcttaatggtttctcattatgtttatcaaaaaacaactgtagctgttattttcagtacttggctgcttttctgtgaaaattattattttacttttggaagacaaga

SEQ ID NO: 567703 - DNA, 120 bp, Artificial Sequence
  ENSG00000170381_27 (sequence is synthesized)
ttattagaatattgaagaaaaattggagacttataatcatggtaaatataaaactaaatatgttttaatatttctgaatttttcttttccatcacaatgtaagatatgcagaatacaaga

SEQ ID NO: 567704 - DNA, 120 bp, Artificial Sequence
  ENSG00000170381_28 (sequence is synthesized)
tactttggcattctcatgtgaactttctgtactctttaaggattattttattagtgttgtttaagccatgagtgttaagtagcaggtgtgttgtgagtgctgtaacccatgaaaggaaaa

SEQ ID NO: 567705 - DNA, 120 bp, Artificial Sequence
  ENSG00000170381_29 (sequence is synthesized)
atgtcattctgaggcttgtgcccttcgtaaaatattcattaaagtacattcacactatttttgctttataacacagtctttaattttcactcactgtggaaataaaaactaaggtaactt

SEQ ID NO: 567706 - DNA, 120 bp, Artificial Sequence
  ENSG00000170381_30 (sequence is synthesized)
aagatttttgcttccctcttgtggtaaaaaaaattatattctcacacatttcttttttctctacagacggatatctgtttaggaaagatttgaaagcagattatcagtaggtacatggat

SEQ ID NO: 567707 - DNA, 120 bp, Artificial Sequence
  ENSG00000170381_31 (sequence is synthesized)
acatcaagttcatttgcagaaacaaataactgaaataaaaaacatgttaatccttgtatcatactttaatatgaaagtattgtttatagataatttatctcacaagtcaaaaatgaagat

SEQ ID NO: 567708 - DNA, 120 bp, Artificial Sequence
  ENSG00000170381_32 (sequence is synthesized)
tttgcagcactgaaaatctattaaagctccaaattttaagtttctaaataatcttcgctgaaatctaaaatatactataacaaccgtgttttatttgtgaaaaaaatattaaagtgattt

SEQ ID NO: 567709 - DNA, 120 bp, Artificial Sequence
  ENSG00000170381_33 (sequence is synthesized)
gctctcaaatatcaaattttcttctctcttttatattaagagacagaaaattgtttcatgagttcacttaactactgagatattcagagcatttttacctctctcttaaatgttataaaa

SEQ ID NO: 567710 - DNA, 120 bp, Artificial Sequence
  ENSG00000170381_34 (sequence is synthesized)
tttaagaatgtttatttatcaaagtctttccttcttctattaaatatttagcaattacctttctaaaatatgaaattttgtaagatgttttcacctaaataaaaattgaaagcaagtgga

SEQ ID NO: 567711 - DNA, 120 bp, Artificial Sequence
  ENSG00000170381_35 (sequence is synthesized)
aaagcaagtggattacacaggagaaccattatgaacatttatttagatattaatcttaaacagtgtttatttcagttttcaaagttagcttataggttatacatttaagttaaagtgctc

SEQ ID NO: 567712 - DNA, 120 bp, Artificial Sequence
  ENSG00000170381_36 (sequence is synthesized)
ataatcacttgcaatttcattgtaaaatgaacaaatacataaatattttaagaaaaatttaagtttattcagataagtcaccatgcttcaaaagatctaagaaatgcaaatatactgaaa

SEQ ID NO: 567713 - DNA, 120 bp, Artificial Sequence
  ENSG00000170381_37 (sequence is synthesized)
attgacatcctctgaaaattccacttgctatttacccaagaatccactggaggtcattactgccattaaataataactgaaaagactatgtagtgaaatgtatttttaaaaactatattc

SEQ ID NO: 567714 - DNA, 120 bp, Artificial Sequence
  ENSG00000170381_38 (sequence is synthesized)
agtaaaagcctgctcaatttggagaaatagaaccacaaacacagatcacaggggccttacaaagtttatgtctgaacaaataagtcaattaagtacactttattgaaaattgccttccat

SEQ ID NO: 567715 - DNA, 120 bp, Artificial Sequence
  ENSG00000170381_39 (sequence is synthesized)
taacacacaagaaagaaagcaggattttctcctgtatctgaattttaaaattaaaaaggcagataagacataaatagttatcattttaattgcaataacacagacaagtagttaatgatg

SEQ ID NO: 567716 - DNA, 120 bp, Artificial Sequence
  ENSG00000170381_40 (sequence is synthesized)
ataacaatggtgtaacttgtaaactaaatatttggtaactgaagcaataggcagaggaaaatagcttttctatgacacaagtcataagaagtccatatactgaagagcgtttgattaaaa

SEQ ID NO: 567717 - DNA, 120 bp, Artificial Sequence
  ENSG00000170381_41 (sequence is synthesized)
taaagtgactattaaccagaaaagaaacattttacataaaatgctaaaatttattataggaaaataaatcaaacccaaagaaagtttattcaatgctaatttgaaagaaaattgataaga

SEQ ID NO: 567718 - DNA, 120 bp, Artificial Sequence
  ENSG00000170381_42 (sequence is synthesized)
aaactttgagggcccaagtccacaatttggtgagaccactaaattttacatataattatacacacacatatgtacatatatatgtatataatcttgcttcccgcctgtttatggcagtac

SEQ ID NO: 567719 - DNA, 120 bp, Artificial Sequence
  ENSG00000170381_43 (sequence is synthesized)
tgaagagaaatgggaaagaagagggagggagagagaaagacgaagggagagagaaagcagtttccaaggatatgtttcatgtcccaccattttctcagtttctccctctctctcccaaca

SEQ ID NO: 567720 - DNA, 120 bp, Artificial Sequence
  ENSG00000170381_44 (sequence is synthesized)
cacacacacacacacccctcacatactataaaataaatcttcactgccctatcaaaatacaaataaatcaatctatgctgttctgtccttcttgagaatctaaaacataccacaaaaata

SEQ ID NO: 567721 - DNA, 120 bp, Artificial Sequence
  ENSG00000170381_45 (sequence is synthesized)
catccccagtcttttgttctgtctgaggttagaattaattcaaattcagaatctgttgtgagaaatgcccaggctttaaaaattaaaaatggatggatcttctctgaactcagggagggc

SEQ ID NO: 567722 - DNA, 120 bp, Artificial Sequence
  ENSG00000170381_46 (sequence is synthesized)
acatacttagatacctacaagacttggaggaattaagagttcacccttcatctcaccaaattttccccatttttctctttcttgtagaaggagagaaaccatgctctctagcaacattga

SEQ ID NO: 567723 - DNA, 120 bp, Artificial Sequence
  ENSG00000170381_47 (sequence is synthesized)
gcaaaaatcataaccactcatctaatttctaagaggcacctccatcgagggccggtctcctgcttctttagacctcttctatctttgttacaggagaggacctgtggatagacttagttt

SEQ ID NO: 567724 - DNA, 120 bp, Artificial Sequence
  ENSG00000170381_48 (sequence is synthesized)
tgacataaaacaatgcccattcacctcctccttcagcacaacgtcacccattgggcaagagatccagatttgttaacaaaaaagattttacttcgtgattccacgtctataattctatat

SEQ ID NO: 567725 - DNA, 120 bp, Artificial Sequence
  ENSG00000170381_49 (sequence is synthesized)
tgctaattttttcttttgtgtgaattactgaatatttcagagcaaagctatcaacttggagaaacagggattaaaaataaggataaacactaataagagctctagaaaaaagggaacaga

SEQ ID NO: 567726 - DNA, 120 bp, Artificial Sequence
  ENSG00000170381_50 (sequence is synthesized)
aagtctgcctgtttagtaagtggcaattccatacatattttagagttttttctatctaaaattagttaaatacttagaatgtttgtaatgagtgttcgatatttgctataggttttaggg

SEQ ID NO: 567727 - DNA, 120 bp, Artificial Sequence
  ENSG00000170381_51 (sequence is synthesized)
ttttgtaaatcttcatagtaattataaacatttgtaaaatttgtaaaatactataagtcattttgagtgttggtgttaagcatgaaacaaacagcagctgttgtccttaaaaatgaattg

SEQ ID NO: 567728 - DNA, 120 bp, Artificial Sequence
  ENSG00000170381_52 (sequence is synthesized)
gcctaataaacatattaagaaaagtacttagtattgtatagatatttggattccaagagaaaatgcaacatttataataagaagtccatactctttttcttacagcagagcgtcacactg

SEQ ID NO: 567729 - DNA, 120 bp, Artificial Sequence
  ENSG00000170381_53 (sequence is synthesized)
agttccattttaaaaaaggactcatttttcaggccaacaactgttgcatttgaatcagatataaataatagattttccacaaacactcagctgattgtagcagtgttatttaagctggta

SEQ ID NO: 567730 - DNA, 120 bp, Artificial Sequence
  ENSG00000170381_54 (sequence is synthesized)
tgtttattttttttttcttggaaggatagctttatattttggctttcattataaattgtgttctgcttgtgtttaaatggcttacttataagctagagcactatatgggagtgttcttct

SEQ ID NO: 567731 - DNA, 120 bp, Artificial Sequence
  ENSG00000170381_55 (sequence is synthesized)
ctgtatggtatccttttatttgcttggctgggttcataacagtgtgtgccatattctttcttttcactgattctaagccatgagacttattagcatctggtggcaagctgcagggaccat

SEQ ID NO: 567732 - DNA, 120 bp, Artificial Sequence
  ENSG00000170381_56 (sequence is synthesized)
taacagtgtgtctctttgactacaacgtggatctgccactacgcgctatgtaccattatgtacaatctctatttggctcaacttcgatgaaaaagaaataaatatttgctaaactctcaa

SEQ ID NO: 567733 - DNA, 120 bp, Artificial Sequence
  ENSG00000170381_57 (sequence is synthesized)
tgtttgctccttcttattcaaattattattggatttacctggaagtttttaatatcttttggatatgtctgtatggatataccccattgctatacatgtttgtgctctaaaaatgaatta

SEQ ID NO: 567734 - DNA, 120 bp, Artificial Sequence
  ENSG00000170381_58 (sequence is synthesized)
gtatgttctcattttacactatcttctgaattctttactcattataggataattcagaagaataaagaaataggtctttgccctttaaaaacttatatgtttgaagagatgaaacttgtg

SEQ ID NO: 567735 - DNA, 120 bp, Artificial Sequence
  ENSG00000170381_59 (sequence is synthesized)
tggaaaaataatttgaaaagaaatataaataacagcttttgtgctacaaatgtaaatggtattgtgttacaaaaagaagcaaaatacctttaggggctataaaggaagtatttataaagg

SEQ ID NO: 567736 - DNA, 120 bp, Artificial Sequence
  ENSG00000170381_60 (sequence is synthesized)
aagggaaagtttagttaagcctggaaggaaatgaaaaaacaaatggattggtagacagtagaaaggagtttatttaagggaaaaagagtatgttcagagtaagagctgtgagtggaaagc

SEQ ID NO: 567737 - DNA, 120 bp, Artificial Sequence
  ENSG00000170381_61 (sequence is synthesized)
agggtggcgatacacgggaatggcagcataaagaattatgaaaaggaggggttgattctggtaatgtacaggttgcccccaccacctgcccttaaaagtgaaacatcttcctgggctgct

SEQ ID NO: 567738 - DNA, 120 bp, Artificial Sequence
  ENSG00000170381_62 (sequence is synthesized)
agcacgatttatattaatatgttcattaaatattcacaagaataaaacaacacatacattccttacgcttgtagcttttattaaaatattgaaccaaaattaaagataaattataaacaa

SEQ ID NO: 567739 - DNA, 120 bp, Artificial Sequence
  ENSG00000170381_63 (sequence is synthesized)
atggaggaggaaactgcaggctcaagtaaaaagagctcttgaatctgaacagaacatcaatatttcatagcccttttggatttcttgatctccatacaatgctgctggatgaatatcaag

SEQ ID NO: 567740 - DNA, 120 bp, Artificial Sequence
  ENSG00000170382_0 (sequence is synthesized)
gaacaggcacagggcctgcagctgcagcattcagtgcatcccagaccctccagaggcccagggcagggtcagatcagacagacctggcagcacagatgtgaagtgtaaacggcacacagc

SEQ ID NO: 567741 - DNA, 120 bp, Artificial Sequence
  ENSG00000170382_1 (sequence is synthesized)
cccctggacttgggttgattcttgtatcttgctgctcaccagctatgtgacttgagccaagttctttaacctcttcaggacctcagtctcttaatctgcaaactggaggtattagtgctt

SEQ ID NO: 567742 - DNA, 120 bp, Artificial Sequence
  ENSG00000170382_2 (sequence is synthesized)
atctcatgtacctgttatgagagtcatatgaaaaaagacattcagagtcttcaaagagtcctgagcaatggtaggtgctcagtaagtgtttgtgcatttccttgacacttgtagctaaaa

SEQ ID NO: 567743 - DNA, 120 bp, Artificial Sequence
  ENSG00000170382_3 (sequence is synthesized)
acttacctggaatcagacttccactcaggagtcagaccaggctcaagaaggcaacacagtctggcccctttttgtttccatctttggttctaggccaaggctggacttgcctcatggccc

SEQ ID NO: 567744 - DNA, 120 bp, Artificial Sequence
  ENSG00000170382_4 (sequence is synthesized)
tggcatctgagagagaaactggataggttcctcatgctcaggatggaggaaacagcagtggcttgcattgttgattgcaggggtgatgtctaatctcctgaagaaaggaactctggagtc

SEQ ID NO: 567745 - DNA, 120 bp, Artificial Sequence
  ENSG00000170382_5 (sequence is synthesized)
acagagattgattcatacaatcaacacacactgggcacccatcccgtactacaggcacaagaggcaagacaggtctctagttagagacgttttcccacggtgtggtcagaactgtgacag

SEQ ID NO: 567746 - DNA, 120 bp, Artificial Sequence
  ENSG00000170382_6 (sequence is synthesized)
taggaagcatgagtactgcaagagcataaagccagccccttagtcagccaggtggggaggttttggagaagacttctgcaggtggtgactgaacttaaagttgagcgttgaagaacaagt

SEQ ID NO: 567747 - DNA, 120 bp, Artificial Sequence
  ENSG00000170382_7 (sequence is synthesized)
aggagttgtctggaagacaatgaggaggagacatcagaaggggtggcatgtcacggtaacctcaacccaaaaggtttgtgtgcagcgggtaagtggggtggtgacaagagaagccaggtg

SEQ ID NO: 567748 - DNA, 120 bp, Artificial Sequence
  ENSG00000170382_8 (sequence is synthesized)
aaggggccgggccaggtcacagaaggtcttacctgcacagctgaggagctcagacccaggcttcttaactccactgcctcctcctgggcaacactgccaggctgttgggaaaggagaaac

SEQ ID NO: 567749 - DNA, 120 bp, Artificial Sequence
  ENSG00000170382_9 (sequence is synthesized)
actcctgcctccagggtggggaagttggcaaacaccaaagcaatatccccacccagaagatcctgggcagcagaacaccccagcctgcctggatgtgtcaggtctgctgcctttcacctc

SEQ ID NO: 567750 - DNA, 120 bp, Artificial Sequence
  ENSG00000170382_10 (sequence is synthesized)
tagggtcctggggagcccatcccagattttagaagctgtacttatttccaccaaccctcacccacctcccacctacactgccagaggaacttctggaaacttatcattttatcttccatt

SEQ ID NO: 567751 - DNA, 120 bp, Artificial Sequence
  ENSG00000170382_11 (sequence is synthesized)
tacccagtgagccaaggaggctgggaggaaagaggtaagaaaggttagagaacctacctcacatctctctgggctcagaaggactctgaagataacaataatttcagcccatccactctc

SEQ ID NO: 567752 - DNA, 120 bp, Artificial Sequence
  ENSG00000170382_12 (sequence is synthesized)
cttccctcccaaacacacatgtgcatgtacacacacacatacacacacatacaccttcctctccttcactgaagactcacagtcactcactctgtgagcaggtcatagaaaaggacacta

SEQ ID NO: 567753 - DNA, 120 bp, Artificial Sequence
  ENSG00000170382_13 (sequence is synthesized)
agcaggtcatagaaaaggacactaaagccttaaggacaggcctggccattacctctgcagctcctttggcttgttgagtcaaaaaacatgggaggggccaggcacggtgactcacacctg

SEQ ID NO: 567754 - DNA, 72 bp, Artificial Sequence
  ENSG00000170382_14 (sequence is synthesized)
ggaggcggaggatgcagtcagctgagtcaaacaaacacgggaggaggggtagatactgcttctctgcaacct

SEQ ID NO: 567755 - DNA, 120 bp, Artificial Sequence
  ENSG00000170382_15 (sequence is synthesized)
aaacacgggaggaggggtagatactgcttctctgcaacctccttaactctgcatcctcttcttccagggctgcccctgatggggcctggcaatgactgagcaggcccagccccagaggac

SEQ ID NO: 567756 - DNA, 120 bp, Artificial Sequence
  ENSG00000170382_16 (sequence is synthesized)
aaggaagagaaggcatattgaggagggcaagaagtgacgcccggtgtagaatgactgccctgggagggtggttccttgggccctggcagggttgctgacccttaccctgcaaaacacaaa

SEQ ID NO: 567757 - DNA, 120 bp, Artificial Sequence
  ENSG00000170382_17 (sequence is synthesized)
gagcaggactccagactcttcttgtgaatggtcccctgccctgcagctccaccatgaggcttctcgtggccccactcttgctagcttgggtggctggtgccactgccgctgtgcccgtgg

SEQ ID NO: 567758 - DNA, 120 bp, Artificial Sequence
  ENSG00000170382_18 (sequence is synthesized)
taccctggcatgttccctgcccccctcagtgtgcctgccagatccggccctggtatacgccccgctcgtcctaccgcgaggctaccactgtggactgcaatgacctattcctgacggcag

SEQ ID NO: 567759 - DNA, 120 bp, Artificial Sequence
  ENSG00000170382_19 (sequence is synthesized)
cagaacagcttttcggatgcccgagactgtgatttccatgccctgccccagctgctgagcctgcacctagaggagaaccagctgacccggctggaggaccacagctttgcagggctggcc

SEQ ID NO: 567760 - DNA, 120 bp, Artificial Sequence
  ENSG00000170382_20 (sequence is synthesized)
agcctacaggaactctatctcaaccacaaccagctctaccgcatcgcccccagggccttttctggcctcagcaacttgctgcggctgcacctcaactccaacctcctgagggccattgac

SEQ ID NO: 567761 - DNA, 120 bp, Artificial Sequence
  ENSG00000170382_21 (sequence is synthesized)
agccgctggtttgaaatgctgcccaacttggagatactcatgattggcggcaacaaggtagatgccatcctggacatgaacttccggcccctggccaacctgcgtagcctggtgctagca

SEQ ID NO: 567762 - DNA, 120 bp, Artificial Sequence
  ENSG00000170382_22 (sequence is synthesized)
ggcatgaacctgcgggagatctccgactatgccctggaggggctgcaaagcctggagagcctctccttctatgacaaccagctggcccgggtgcccaggcgggcactggaacaggtgccc

SEQ ID NO: 567763 - DNA, 120 bp, Artificial Sequence
  ENSG00000170382_23 (sequence is synthesized)
gggctcaagttcctagacctcaacaagaacccgctccagcgggtagggccgggggactttgccaacatgctgcaccttaaggagctgggactgaacaacatggaggagctggtctccatc

SEQ ID NO: 567764 - DNA, 120 bp, Artificial Sequence
  ENSG00000170382_24 (sequence is synthesized)
gacaagtttgccctggtgaacctccccgagctgaccaagctggacatcaccaataacccacggctgtccttcatccacccccgcgccttccaccacctgccccagatggagaccctcatg

SEQ ID NO: 567765 - DNA, 120 bp, Artificial Sequence
  ENSG00000170382_25 (sequence is synthesized)
ctcaacaacaacgctctcagtgccttgcaccagcagacggtggagtccctgcccaacctgcaggaggtaggtctccacggcaaccccatccgctgtgactgtgtcatccgctgggccaat

SEQ ID NO: 567766 - DNA, 120 bp, Artificial Sequence
  ENSG00000170382_26 (sequence is synthesized)
gccacgggcacccgtgtccgcttcatcgagccgcaatccaccctgtgtgcggagcctccggacctccagcgcctcccggtccgtgaggtgcccttccgggagatgacggaccactgtttg

SEQ ID NO: 567767 - DNA, 120 bp, Artificial Sequence
  ENSG00000170382_27 (sequence is synthesized)
cccctcatctccccacgaagcttccccccaagcctccaggtagccagtggagagagcatggtgctgcattgccgggcactggccgaacccgaacccgagatctactgggtcactccagct

SEQ ID NO: 567768 - DNA, 120 bp, Artificial Sequence
  ENSG00000170382_28 (sequence is synthesized)
gggcttcgactgacacctgcccatgcaggcaggaggtaccgggtgtaccccgaggggaccctggagctgcggagggtgacagcagaagaggcagggctatacacctgtgtggcccagaac

SEQ ID NO: 567769 - DNA, 120 bp, Artificial Sequence
  ENSG00000170382_29 (sequence is synthesized)
ctggtgggggctgacactaagacggttagtgtggttgtgggccgtgctctcctccagccaggcagggacgaaggacaggggctggagctccgggtgcaggagacccacccctatcacatc

SEQ ID NO: 567770 - DNA, 120 bp, Artificial Sequence
  ENSG00000170382_30 (sequence is synthesized)
ctgctatcttgggtcaccccacccaacacagtgtccaccaacctcacctggtccagtgcctcctccctccggggccagggggccacagctctggcccgcctgcctcggggaacccacagc

SEQ ID NO: 567771 - DNA, 120 bp, Artificial Sequence
  ENSG00000170382_31 (sequence is synthesized)
tacaacattacccgcctccttcaggccacggagtactgggcctgcctgcaagtggcctttgctgatgcccacacccagttggcttgtgtatgggccaggaccaaagaggccacttcttgc

SEQ ID NO: 567772 - DNA, 120 bp, Artificial Sequence
  ENSG00000170382_32 (sequence is synthesized)
cacagagccttaggggaccgtcctgggctcattgccatcctggctctcgctgtccttctcctggcagctgggctagcggcccaccttggcacaggccaacccaggaagggtgtgggtggg

SEQ ID NO: 567773 - DNA, 120 bp, Artificial Sequence
  ENSG00000170382_33 (sequence is synthesized)
aggcggcctctccctccagcctgggctttctggggctggagtgccccttctgtccgggttgtgtctgctcccctcgtcctgccctggaatccagggaggaagctgcccagatcctcagaa

SEQ ID NO: 567774 - DNA, 120 bp, Artificial Sequence
  ENSG00000170382_34 (sequence is synthesized)
ggggagacactgttgccaccattgtctcaaaattcttgaagctcagcctgttctcagcagtagagaaatcactaggactactttttaccaaaagagaagcagtctgggccagatgccctg

SEQ ID NO: 567775 - DNA, 120 bp, Artificial Sequence
  ENSG00000170382_35 (sequence is synthesized)
ccaggaaagggacatggacccacgtgcttgaggcctggcagctgggccaagacagatggggctttgtggccctgggggtgcttctgcagcctcgaaaaagttgcccttacctcctagggt

SEQ ID NO: 567776 - DNA, 120 bp, Artificial Sequence
  ENSG00000170382_36 (sequence is synthesized)
cacctctgctgccattctgaggaacatctccaaggaacaggagggactttggctagagcctcctgcctccccatcttctctctgcccagaggctcctgggcctggcttggctgtccccta

SEQ ID NO: 567777 - DNA, 120 bp, Artificial Sequence
  ENSG00000170382_37 (sequence is synthesized)
cctgtgtccccgggctgcaccccttcctcttctctttctctgtacagtctcagttgcttgctcttgtgcctcctgggcaagggctgaaggaggccactccatctcacctcggggggctgc

SEQ ID NO: 567778 - DNA, 120 bp, Artificial Sequence
  ENSG00000170382_38 (sequence is synthesized)
cctcaatgtgggagtgaccccagccagatctgaaggacatttgggagagggatgcccaggaacgcctcatctcagcagcctgggctcggcattccgaagctgactttctataggcaattt

SEQ ID NO: 567779 - DNA, 120 bp, Artificial Sequence
  ENSG00000170382_39 (sequence is synthesized)
tgtacctttgtggagaaatgtgtcacctcccccaacccgattcactcttttctcctgttttgtaaaaaataaaaataaataataacaataatacgggggaaaggaacgaaaggaaaataa

SEQ ID NO: 567780 - DNA, 120 bp, Artificial Sequence
  ENSG00000170382_40 (sequence is synthesized)
cagcagacggcagacggtgcccggcgcccacgggaagctgaagatacagcggtaaacaaacctccatgtctcaagctgaccacacttgtatctggacttgccagctgattagctctgttc

SEQ ID NO: 567781 - DNA, 120 bp, Artificial Sequence
  ENSG00000170382_41 (sequence is synthesized)
aggttgggagagcggcggagaagcgagtgaggagggcgagcgcgaagccgggaagaggggcgcgcgtggagggggtgccgggcgccgcgagggcctgctccgggcacctgcgaacgcgcg

SEQ ID NO: 567782 - DNA, 120 bp, Artificial Sequence
  ENSG00000170382_42 (sequence is synthesized)
gcgctctcaaggagcgcctggctctcgcccgccagcctccggccgcgacgcgcccagggcgcggagagggggtggggacggattgggattctgccatcgccctcaccggctgggccctgg

SEQ ID NO: 567783 - DNA, 120 bp, Artificial Sequence
  ENSG00000170382_43 (sequence is synthesized)
ttctgccatcgccctcaccggctgggccctggagccgctcccaggataactccacgttggggagggcgcccgccgagcctccccggcctgtgcagacggcgcgcgcggcgggagggcgcg

SEQ ID NO: 567784 - DNA, 120 bp, Artificial Sequence
  ENSG00000170382_44 (sequence is synthesized)
gcggccgcgcgggcagcagacggcagacggtgcccggcgcccacgggttctggaggctgggaagtccaagacaaggtgccagcatctggtgaaggctgctgtctgctttcaagatggtgc

SEQ ID NO: 567785 - DNA, 120 bp, Artificial Sequence
  ENSG00000170385_0 (sequence is synthesized)
gaagaaggcgcccgagaccgggccgagtgcagctgccgtggccgccgcctctctagctcctcagccatccgctcctcagtccagccgccgcagaggagaccagcaagcagagccctcaga

SEQ ID NO: 567786 - DNA, 120 bp, Artificial Sequence
  ENSG00000170385_1 (sequence is synthesized)
tgctcggagctttctcggcgcgaagctgcccgtcgccctctcctgccgccctcgcccgccgccctcctgctcctgctccggctgcggctcttggtaccccggctccgggagcccagctcc

SEQ ID NO: 567787 - DNA, 120 bp, Artificial Sequence
  ENSG00000170385_2 (sequence is synthesized)
tcttggtaccccggctccgggagcccagctccccgccaccgccgccgcctgggtgtgggggctgctgaggctgagccgggcctcggcgccggctctgaggacggacgcctgaggagctgc

SEQ ID NO: 567788 - DNA, 120 bp, Artificial Sequence
  ENSG00000170385_3 (sequence is synthesized)
gagaacgcccacaggcgcggggctcggcggcttgacccgggcttgtccccgtgcggccgcgggggcccctcagcggtttcccgaacggcccgactcgggcgctcctccgtgtcgcggtcg

SEQ ID NO: 567789 - DNA, 120 bp, Artificial Sequence
  ENSG00000170385_4 (sequence is synthesized)
cgccaacgccgccgctgcaccagtctccgggccgggctcggcgggccccgcagccgcagccatggggtgttggggtcggaaccggggccggctgctgtgcatgctggcgctgaccttcat

SEQ ID NO: 567790 - DNA, 120 bp, Artificial Sequence
  ENSG00000170385_5 (sequence is synthesized)
accttcatgttcatggtgctggaggtggtggtgagccgggtgacctcgtcgctggcgatgctctccgactccttccacatgctgtcggacgtgctggcgctggtggtggcgctggtggcc

SEQ ID NO: 567791 - DNA, 120 bp, Artificial Sequence
  ENSG00000170385_6 (sequence is synthesized)
gagcgcttcgcccggcggacccacgccacccagaagaacacgttcggctggatccgagccgaggtaatgggggctctggtgaacgccatcttcctgactggcctctgtttcgccatcctg

SEQ ID NO: 567792 - DNA, 120 bp, Artificial Sequence
  ENSG00000170385_7 (sequence is synthesized)
ctggaggccatcgagcgcttcatcgagccgcacgagatgcagcagccgctggtggtccttggggtcggcgtggccgggctgctggtcaacgtgctggggctctgcctcttccaccatcac

SEQ ID NO: 567793 - DNA, 120 bp, Artificial Sequence
  ENSG00000170385_8 (sequence is synthesized)
agcggcttcagccaggactccggccacggccactcgcacgggggtcacggccacggccacggcctccccaaggggcctcgcgttaagagcacccgccccgggagcagcgacatcaacgtg

SEQ ID NO: 567794 - DNA, 120 bp, Artificial Sequence
  ENSG00000170385_9 (sequence is synthesized)
gccccgggcgagcagggtcccgaccaggaggagaccaacaccctggtggccaataccagcaactccaacgggctgaaattggaccccgcagacccagaaaaccccagaagtggtgataca

SEQ ID NO: 567795 - DNA, 120 bp, Artificial Sequence
  ENSG00000170385_10 (sequence is synthesized)
gtggaagtacaagtgaatggaaatcttgtcagagaacctgaccatatggaactggaagaagatagggctggacaacttaacatgcgtggagtttttctgcatgtccttggagatgccttg

SEQ ID NO: 567796 - DNA, 120 bp, Artificial Sequence
  ENSG00000170385_11 (sequence is synthesized)
ggttcagtgattgtagtagtaaatgccttagtcttttacttttcttggaaaggttgttctgaaggggatttttgtgtgaatccatgtttccctgacccctgcaaagcatttgtagaaata

SEQ ID NO: 567797 - DNA, 120 bp, Artificial Sequence
  ENSG00000170385_12 (sequence is synthesized)
attaatagtactcatgcatcagtttatgaggctggtccttgctgggtgctatatttagatccaactctttgtgttgtaatggtttgtatacttctttacacaacctatccattacttaag

SEQ ID NO: 567798 - DNA, 120 bp, Artificial Sequence
  ENSG00000170385_13 (sequence is synthesized)
gaatctgctcttattcttctacaaactgttcctaaacaaattgatatcagaaatttgataaaagaacttcgaaatgttgaaggagttgaggaagttcatgaattacatgtttggcaactt

SEQ ID NO: 567799 - DNA, 120 bp, Artificial Sequence
  ENSG00000170385_14 (sequence is synthesized)
gctggaagcagaatcattgccactgctcacataaaatgtgaagatccaacatcatacatggaggtggctaaaaccattaaagacgtttttcataatcacggaattcacgctactaccatt

SEQ ID NO: 567800 - DNA, 120 bp, Artificial Sequence
  ENSG00000170385_15 (sequence is synthesized)
cagcctgaatttgctagtgtaggctctaaatcaagtgtagttccgtgtgaacttgcctgcagaacccagtgtgctttgaagcaatgttgtgggacactaccacaagccccttctggaaag

SEQ ID NO: 567801 - DNA, 120 bp, Artificial Sequence
  ENSG00000170385_16 (sequence is synthesized)
gatgcagaaaagaccccagcagttagcatttcttgtttagaacttagtaacaatctagagaagaagcccaggaggactaaagctgaaaacatccctgctgttgtgatagagattaaaaac

SEQ ID NO: 567802 - DNA, 120 bp, Artificial Sequence
  ENSG00000170385_17 (sequence is synthesized)
atgccaaacaaacaacctgaatcatctttgtgagtcttgaaaaagatgtgatatttgacttttgctttaaactgcaagaggaaaaagactccactgaaattctaagtttgccaagtagtg

SEQ ID NO: 567803 - DNA, 120 bp, Artificial Sequence
  ENSG00000170385_18 (sequence is synthesized)
taattgaagtccttgtctggtcacacagtttaattctatttttgtaagaacataatgggactgcataacagagttctatattacaattttgtgattattagtacagagtacagctatgct

SEQ ID NO: 567804 - DNA, 120 bp, Artificial Sequence
  ENSG00000170385_19 (sequence is synthesized)
gtgactgttttggaaagccagttttaacactatgttacatttttgtttaaagtaagttaaaccttatataacataatgacatttgatttctggatttttcccatgataaaaattaggggg

SEQ ID NO: 567805 - DNA, 120 bp, Artificial Sequence
  ENSG00000170385_20 (sequence is synthesized)
ataaataaaattgttactggaatttctctgcttttcttttcccccagtgttatactttattagaattataattgatagaactttaaaatcatcaacagtttgtttcctttgacattttag

SEQ ID NO: 567806 - DNA, 120 bp, Artificial Sequence
  ENSG00000170385_21 (sequence is synthesized)
gtgatattgccctttgagatcattacatagcataatggcagcatattttaagagtgactcatggctattagtaggaaataagatcagttactatcctgtattctgtattgctggctatta

SEQ ID NO: 567807 - DNA, 120 bp, Artificial Sequence
  ENSG00000170385_22 (sequence is synthesized)
aacagtaagataattaacaaattgaactacagtttacacacaatggggcaaatggggtagtaagagcaaggaagaaagtttaccaaactaaatatttaggttattgtatgataatattga

SEQ ID NO: 567808 - DNA, 120 bp, Artificial Sequence
  ENSG00000170385_23 (sequence is synthesized)
gactacatttctaaattattttgagaatttcaactttttattctaccaaagttaatctgaaacttggacatgttcaccagcattactttctttgaaagattggtataaaaacattgagct

SEQ ID NO: 567809 - DNA, 120 bp, Artificial Sequence
  ENSG00000170385_24 (sequence is synthesized)
caaaatatataagtatttttaaggatgttgacacctaataattacatgctaaacgcaaacgattaatgtaatcttttaaaccgggcgtttgaaaaaaaattttcaaggtcatttcatgat

SEQ ID NO: 567810 - DNA, 120 bp, Artificial Sequence
  ENSG00000170385_25 (sequence is synthesized)
aaccaatcatgaatggatttaaatggagctttttgagcacaaccagcaatgtttgtgctttctaagagtcactgacttgagaggaaagaaaaccagaaggttaatgcagtttggatatta

SEQ ID NO: 567811 - DNA, 120 bp, Artificial Sequence
  ENSG00000170385_26 (sequence is synthesized)
aattcttagcaaaattaataattaaagcaaaattaattaagattttgtaagtcatcctgtcttcacatactcagatcttccaatagtggcttattttgcaagatgccacaatatctacac

SEQ ID NO: 567812 - DNA, 120 bp, Artificial Sequence
  ENSG00000170385_27 (sequence is synthesized)
agaaaattgtggctatttcattattgctatagatttcaaatccaacacaaatatttaagggtgtttaagttatatttttcttgatagagggtatgctttgtgacaaaattagatttttgt

SEQ ID NO: 567813 - DNA, 120 bp, Artificial Sequence
  ENSG00000170385_28 (sequence is synthesized)
ccttgaaaggattaatattagcatcagttatgtatagctctatttttctagaaacaaggtattctgactacttttatagctgactacttttgggatggctacgttttgggatttaaaata

SEQ ID NO: 567814 - DNA, 120 bp, Artificial Sequence
  ENSG00000170385_29 (sequence is synthesized)
gttcattgtttaatgggttgtaagaggaaaaagtgttaggatttgacagttactttttaaagggatgatcttttgtggtgtgtgtttttcctagtataagcctattgctggcgatgggcc

SEQ ID NO: 567815 - DNA, 120 bp, Artificial Sequence
  ENSG00000170385_30 (sequence is synthesized)
tatttaagaacagctgattttttccagtgaaaatatggtaattttaggaacacagtttgtaagttcacatttactataatgggccaaaaccataacctgccagtttgcaatacatcttga

SEQ ID NO: 567816 - DNA, 120 bp, Artificial Sequence
  ENSG00000170385_31 (sequence is synthesized)
tcttttaatattcttatctgatattgtgtaattcaattcctaaactgatagttaccttgaattttgcgaaaaggtttgggtggttttttttaaacatgaaattgagggatctcatctggg

SEQ ID NO: 567817 - DNA, 120 bp, Artificial Sequence
  ENSG00000170385_32 (sequence is synthesized)
cgaacaagaagagaaagctgtgaattgtactgtatcatgtacattcctgatttaatactttacagaacattttattcagatatcaatttgttacataaacatttcagcaatgatacaaag

SEQ ID NO: 567818 - DNA, 120 bp, Artificial Sequence
  ENSG00000170385_33 (sequence is synthesized)
ataactgataaaatatattacattcaatgaggttttctttacaaatgctctacttgaggtctgtgtcttaaagatggcatgacacctaagtacaagacatcaactgaatgaggattttaa

SEQ ID NO: 567819 - DNA, 120 bp, Artificial Sequence
  ENSG00000170385_34 (sequence is synthesized)
aaaatggtatataagcataggacaagggctatgtttgtttgtttttcaaaagtgctttgaagataacagcctttaggtttgagttatttcacttttcataatttttaagtagcttatata

SEQ ID NO: 567820 - DNA, 120 bp, Artificial Sequence
  ENSG00000170385_35 (sequence is synthesized)
taatggtggtaccataggattttcttttttcaaatgactgtcggcagaaacagtgggcactgactcaccttttgagttttagcagagaattatttatttctttacaatgcactttctaac

SEQ ID NO: 567821 - DNA, 120 bp, Artificial Sequence
  ENSG00000170385_36 (sequence is synthesized)
ccattgtagctatattagcattatcttttaaaaaagacatgcttttgtatttaaatattgtaggatttaagtgtctttctcaaaatagcttattcctttctgaaagaaaatgagggaaat

SEQ ID NO: 567822 - DNA, 120 bp, Artificial Sequence
  ENSG00000170385_37 (sequence is synthesized)
actctgaattattaggagacttaaacccaatatttaaatatgctattttataacactgcatcagttttaggagttgcatctctcctgctggctcttttatatttgagcaagatcagtgta

SEQ ID NO: 567823 - DNA, 120 bp, Artificial Sequence
  ENSG00000170385_38 (sequence is synthesized)
gaatatgtgtttagaaacttgtctgttgtctcagtttagtgaaaaggaggtgctgcatgtgcctgaattaaaaccaagaaatttttccaagccaaatgcagccttagtgatgagagattt

SEQ ID NO: 567824 - DNA, 120 bp, Artificial Sequence
  ENSG00000170385_39 (sequence is synthesized)
aattctccattgtcaccttttagcttttatgattgcttagttttttctgaaggatgtctgcattgtaaaactatggactaaaacctaaaaaacagaatcctcaaaaactttgctgtatgt

SEQ ID NO: 567825 - DNA, 120 bp, Artificial Sequence
  ENSG00000170385_40 (sequence is synthesized)
gttttaacattttagagaacagtatgttgaataactaaggtatgtaacttgaataggaaaaatgtccatcaaatgcaccttggaaaatcacagtaggtagaaggctgtgttaaccgtttg

SEQ ID NO: 567826 - DNA, 120 bp, Artificial Sequence
  ENSG00000170385_41 (sequence is synthesized)
tgtcttattaacatccttaagttaattttgaatttttgacagttttgagggaaaagacctatggaacctaatgtgaagtatttcgtatgttaactggtgttgagttgaagatttttactg

SEQ ID NO: 567827 - DNA, 120 bp, Artificial Sequence
  ENSG00000170385_42 (sequence is synthesized)
tgtataagcagatatcatttgaatgataaaaatgtcattaacctgctgtcttaagatgttcacacaaatatggagagtaattctacaatataaaaatatttattttaatactgagtttca

SEQ ID NO: 567828 - DNA, 120 bp, Artificial Sequence
  ENSG00000170385_43 (sequence is synthesized)
gttaagtcataaacagtgttaaaactcttgggaaggtgtaggggttttttgtttgtcatttttaaaattgaaactgtgtcatacagtgtttcacgtctctgaaattgggattataatagc

SEQ ID NO: 567829 - DNA, 120 bp, Artificial Sequence
  ENSG00000170385_44 (sequence is synthesized)
actattttgatgtagctctaccgatactatgtggtaatgctattttgttttactaacaagctctggaatatttagcagtcattttcactggcacaagagccttttgtatgttattcaatt

SEQ ID NO: 567830 - DNA, 120 bp, Artificial Sequence
  ENSG00000170385_45 (sequence is synthesized)
taaacttttaaaccaaaaattttatggtccagtgtctttggcaaaaagatgctggagggaatgtaacatacaattaatatgtggttatatatatatataaaaagacacaaattgccatgt

SEQ ID NO: 567831 - DNA, 120 bp, Artificial Sequence
  ENSG00000170385_46 (sequence is synthesized)
tatggttctgccttgaaacagcacaatgaagtgtatcagtatattctgtgattatgaaacttatatgttgtgttgttttgtgtcttctgttgcctgtcctttgggccagatgtgggccag

SEQ ID NO: 567832 - DNA, 120 bp, Artificial Sequence
  ENSG00000170385_47 (sequence is synthesized)
ttaaatgcagttatcatctcattaaatacagatgcagataaaatatctttagtgctgcaacattttacctaactttttgtatgttttcatgactgtgtgttattttccaaagctgttcct

SEQ ID NO: 567833 - DNA, 120 bp, Artificial Sequence
  ENSG00000170385_48 (sequence is synthesized)
acctcaccatgaggctttatggattgttatgtattataaatgttctatatgagacagactactgtgtttcttctcatttattaaaagttaagtagaaaaataaactaattttaatatcta

SEQ ID NO: 567834 - DNA, 80 bp, Artificial Sequence
  ENSG00000170390_0 (sequence is synthesized)
tgcaccccgggcctgggcccgcgcgactcccccgggggcctctcccacgctccgcgccccgccccacccttccttccttc

SEQ ID NO: 567835 - DNA, 120 bp, Artificial Sequence
  ENSG00000170390_1 (sequence is synthesized)
ggcctctcccacgctccgcgccccgccccacccttccttccttcctcccctcggcgctcccgggagcgctcggcagacgcccgagctttgtgggcgcccgcgggcccagcgcgagcctcg

SEQ ID NO: 567836 - DNA, 120 bp, Artificial Sequence
  ENSG00000170390_2 (sequence is synthesized)
aactttgcctctcccggtcggctcccgagcgggacttgtgaggcgtggccgggtggaggaggcgcttgcgggggcgtggggctccccggcaggcgggaggcacggagcaagtcgcactgg

SEQ ID NO: 567837 - DNA, 120 bp, Artificial Sequence
  ENSG00000170390_3 (sequence is synthesized)
acaatgacctgggcagctcggcgctgcggacacttttagctgagggcgcgggcgggtcggctcctccgcggctcctcggccccacctgcgcggagagggcgggatgccagagccaggtgt

SEQ ID NO: 567838 - DNA, 120 bp, Artificial Sequence
  ENSG00000170390_4 (sequence is synthesized)
cccggcgcgttaagggccctcgcagtcagacgtccctgcaccggcgctcgcacccttagtcggcccggaacgtctttttgcggacgccctcggagcagccgcgatggccagcaccaggag

SEQ ID NO: 567839 - DNA, 120 bp, Artificial Sequence
  ENSG00000170390_5 (sequence is synthesized)
tatcgagctggagcactttgaggaacgggacaaaaggccgcggccggggtcgcggagaggggcccccagctcctccgggggcagcagcagctcgggccccaaggggaacgggctcatccc

SEQ ID NO: 567840 - DNA, 120 bp, Artificial Sequence
  ENSG00000170390_6 (sequence is synthesized)
cagtccggcgcacagtgcccactgcagcttctaccgcacgcggaccctgcaggccctcagctcggagaagaaggccaagaaggcgcgcttctaccggaacggggaccgctacttcaaggg

SEQ ID NO: 567841 - DNA, 120 bp, Artificial Sequence
  ENSG00000170390_7 (sequence is synthesized)
cctggtgtttgccatctccagcgaccgcttccggtccttcgatgcgctcctcatagagctcacccgctccctgtcggacaacgtgaacctgccccagggtgtccgcactatctacaccat

SEQ ID NO: 567842 - DNA, 120 bp, Artificial Sequence
  ENSG00000170390_8 (sequence is synthesized)
cgacggcagccggaaggtcaccagcctggacgagctgctggaaggtgagagttacgtgtgtgcatccaatgaaccatttcgtaaagtcgattacaccaaaaatattaatccaaactggtc

SEQ ID NO: 567843 - DNA, 120 bp, Artificial Sequence
  ENSG00000170390_9 (sequence is synthesized)
tgtgaacatcaagggtgggacatcccgagcgctggctgctgcctcctctgtgaaaagtgaagtaaaagaaagtaaagatttcatcaaacccaagttagtgactgtgattcgaagtggagt

SEQ ID NO: 567844 - DNA, 120 bp, Artificial Sequence
  ENSG00000170390_10 (sequence is synthesized)
gaagcctagaaaagccgtgcggatccttctgaataaaaagactgctcattcctttgaacaagtcttaacagatatcaccgaagccattaaactagactcaggagtcgtcaagaggctctg

SEQ ID NO: 567845 - DNA, 120 bp, Artificial Sequence
  ENSG00000170390_11 (sequence is synthesized)
caccctggatggaaagcaggttacttgtctgcaagacttttttggtgatgacgatgtttttattgcatgtggaccagaaaaatttcgttatgcccaagatgactttgtcctggatcatag

SEQ ID NO: 567846 - DNA, 120 bp, Artificial Sequence
  ENSG00000170390_12 (sequence is synthesized)
tgaatgtcgtgtcctgaagtcatcttattctcgatcctcagctgttaagtattctggatccaaaagccctgggccctctcgacgcagcaaatcaccagcttcagttaatggaactcccag

SEQ ID NO: 567847 - DNA, 120 bp, Artificial Sequence
  ENSG00000170390_13 (sequence is synthesized)
cagccaactttctactcctaaatctacgaaatcctccagttcctctccaactagtccaggaagtttcagaggattaaagcagatttctgctcatggcagatcttcttccaatgtaaacgg

SEQ ID NO: 567848 - DNA, 120 bp, Artificial Sequence
  ENSG00000170390_14 (sequence is synthesized)
tggacctgagcttgaccgttgcataagtcctgaaggtgtgaatggaaacagatgctctgaatcatcaactcttcttgagaaatacaaaattggaaaggtcattggtgatggcaattttgc

SEQ ID NO: 567849 - DNA, 120 bp, Artificial Sequence
  ENSG00000170390_15 (sequence is synthesized)
agtagtcaaagagtgtatagacaggtccactggaaaggagtttgccctaaagattatagacaaagccaaatgttgtggaaaggaacacctgattgagaatgaagtgtcaatactgcgccg

SEQ ID NO: 567850 - DNA, 120 bp, Artificial Sequence
  ENSG00000170390_16 (sequence is synthesized)
accaagtacactgagagagatggcagtgccatggtgtacaacttagccaatgccctcaggtatctccatggcctcagcatcgtgcacagagacatcaaaccagagaatctcttggtgtgt

SEQ ID NO: 567851 - DNA, 120 bp, Artificial Sequence
  ENSG00000170390_17 (sequence is synthesized)
gaatatcctgatggaaccaagtctttgaaactgggagactttgggcttgcgactgtggtagaaggccctttatacacagtctgtggcacacccacttatgtggctccagaaatcattgct

SEQ ID NO: 567852 - DNA, 120 bp, Artificial Sequence
  ENSG00000170390_18 (sequence is synthesized)
gaaactggctatggcctgaaggtggacatttgggcagctggtgtgatcacatacatacttctctgtggattcccaccattccgaagtgagaacaatctccaggaagatctcttcgaccag

SEQ ID NO: 567853 - DNA, 120 bp, Artificial Sequence
  ENSG00000170390_19 (sequence is synthesized)
atcttggctgggaagctggagtttccggccccctactgggataacatcacggactctgccaaggaattaatcagtcaaatgcttcaggtaaatgttgaagctcggtgtaccgcgggacaa

SEQ ID NO: 567854 - DNA, 120 bp, Artificial Sequence
  ENSG00000170390_20 (sequence is synthesized)
atcctgagtcacccctgggtgtcagatgatgcctcccaggagaataacatgcaagctgaggtgacaggtaaactaaaacagcactttaataatgcgctccccaaacagaacagcactacc

SEQ ID NO: 567855 - DNA, 120 bp, Artificial Sequence
  ENSG00000170390_21 (sequence is synthesized)
accggggtctccgtcatcatgaacacggctctagataaggaggggcagattttctgcagcaagcactgtcaagacagcggcaggcctgggatggagcccatctctccagttcctccctca

SEQ ID NO: 567856 - DNA, 120 bp, Artificial Sequence
  ENSG00000170390_22 (sequence is synthesized)
gtggaggagatccctgtgcctggggaagcagtcccggcccccacccctccggaatctcccaccccccaccctcctcccgctgccccgggtggtgagcgggcaggaacctggcgccgccac

SEQ ID NO: 567857 - DNA, 120 bp, Artificial Sequence
  ENSG00000170390_23 (sequence is synthesized)
cgagactgagcctcctgcagacgggcgaagccgcctgctgcagcccaggaagccagccctctgctcggcctcgccggcctccctgctgcaggcctccctctcttcaccgcctgcgcctga

SEQ ID NO: 567858 - DNA, 120 bp, Artificial Sequence
  ENSG00000170390_24 (sequence is synthesized)
gttcgcgggtcctccgcaggccgcctgggaaccggagcctggcgtgccggagcctggcctggtgctctgggctctgccttctggttcctggaggcatcaaaggctgcatccgttctgcca

SEQ ID NO: 567859 - DNA, 120 bp, Artificial Sequence
  ENSG00000170390_25 (sequence is synthesized)
acagctgttcggagagactcgttccagatcatcccgtcattttcagtttgttggacattttacagcttcaccaggagaatgtgcaactttattccagcattcgatgcatttttatagaaa

SEQ ID NO: 567860 - DNA, 120 bp, Artificial Sequence
  ENSG00000170390_26 (sequence is synthesized)
cactttggaaacactttggatgaaccaaggccttttccttatttaagtagactcagaacactccctttcttttcttttctctctctctctctcttttttttttacgaaagacttagaatt

SEQ ID NO: 567861 - DNA, 120 bp, Artificial Sequence
  ENSG00000170390_27 (sequence is synthesized)
gcatttgtccttttgtgggtgtcctgtgagaggtgatatgggggctaagaggactggctttctaatagaagaagtgagcgcctgagaggacaatttggtcattggacacggattgcaggc

SEQ ID NO: 567862 - DNA, 120 bp, Artificial Sequence
  ENSG00000170390_28 (sequence is synthesized)
tttgagaagcgctcagaggcccagggcggcgggctcagccattcggcttggggcaccaggctccccagagacaatgctcagtattcattcatacacagacgatggaagaagccacttctt

SEQ ID NO: 567863 - DNA, 120 bp, Artificial Sequence
  ENSG00000170390_29 (sequence is synthesized)
ccctgggcggtgtgggtttcccccagctcttcccacacgtgtgttaggaaatgcccgtgaacttgccctctgggctttttaatgagaggcttggcgcatgcggcacccagcggctgcttc

SEQ ID NO: 567864 - DNA, 120 bp, Artificial Sequence
  ENSG00000170390_30 (sequence is synthesized)
cctgcaagccagcgacttgccgagcagaatgagctctgctcctgagccccggtagctgcttcctcatctgcatttcatctggagcagggcaggtaaccacaggaggaggcatgcccgagg

SEQ ID NO: 567865 - DNA, 120 bp, Artificial Sequence
  ENSG00000170390_31 (sequence is synthesized)
cagccaggactgggcgggaaggtgctccctggatatactctgtgaaccttctggaaggctgctggcagtttttcctttttgtccaccaccctgctctttttaataattgtacataatccg

SEQ ID NO: 567866 - DNA, 120 bp, Artificial Sequence
  ENSG00000170390_32 (sequence is synthesized)
tgtatttgttttacctgctcatcttctaaactggcgagccctatagttcgttctcattgttagattttgccttttacaagtgtccccaacctgcaataaacttttccctcttgaaaaaaa

SEQ ID NO: 567867 - DNA, 120 bp, Artificial Sequence
  ENSG00000170390_33 (sequence is synthesized)
cgaagtgagaacaatctccaggaagatctcttcgaccagatcttggctgggaagctggagtttccggccccctactgggataacatcacggactctgccaaggatgatgcctcccaggag

SEQ ID NO: 567868 - DNA, 120 bp, Artificial Sequence
  ENSG00000170390_34 (sequence is synthesized)
agtctttctcctgtggctggaggggaatgaaatgggtatttccatgggtcggagaattgggactcacgacagactaaggcagaacacgtgagaaatgcaagtgagggctgtccttcaccc

SEQ ID NO: 567869 - DNA, 80 bp, Artificial Sequence
  ENSG00000170396_0 (sequence is synthesized)
aactccgagtgcaggcgccgagcgcgggggatgctgccgccgccgccgcttctgctgccgcgcgggcggctcccgcagcc

SEQ ID NO: 567870 - DNA, 120 bp, Artificial Sequence
  ENSG00000170396_1 (sequence is synthesized)
ggttccgtttcgccggcccggccccctcctaggctggaatcctcccgcggggctcgtcgtcccgacgcgaatctgaggagaaacaggagcgagagactgaggggagagcgcggcgagcat

SEQ ID NO: 567871 - DNA, 120 bp, Artificial Sequence
  ENSG00000170396_2 (sequence is synthesized)
gcggaggcgggggagcctcggcgctcaccacagaggggtgcagtgagccagtctccagaggacgtgccgggggtggctgcgtgccctcgtggcgggttcccagcccaccgtcgccggccc

SEQ ID NO: 567872 - DNA, 120 bp, Artificial Sequence
  ENSG00000170396_3 (sequence is synthesized)
cggcgcgctgcggctgtgggcgcggggtgcgtggaagcggcggctgcggcggaggaggcggcggctgccccatggagtgttactacattgtcatcagctccacgcatctcagcaacggac

SEQ ID NO: 567873 - DNA, 120 bp, Artificial Sequence
  ENSG00000170396_4 (sequence is synthesized)
actttcgcaacatcaagggagttttccggggccctctcagcaagaacgggaacaaaactctggactatgctgagaaggaaaataccatagcaaaagctctggaagatctgaaggcaaatt

SEQ ID NO: 567874 - DNA, 120 bp, Artificial Sequence
  ENSG00000170396_5 (sequence is synthesized)
tttactgtgaactctgtgacaagcagtactataagcaccaggagtttgacaatcacattaattcatatgaccatgctcacaagcagaggctcaaggaactgaaacaaagggaatttgctc

SEQ ID NO: 567875 - DNA, 120 bp, Artificial Sequence
  ENSG00000170396_6 (sequence is synthesized)
gaaatgtagcatctaaatccaggaaagatgaaagaaaacaggaaaaggcactccaacgcctgcacaagctggctgagctaagaaaggaaactgtatgtgctcctggaagtggccccatgt

SEQ ID NO: 567876 - DNA, 120 bp, Artificial Sequence
  ENSG00000170396_7 (sequence is synthesized)
tcaaatcaacaactgttactgtgagagaaaactgtaatgaaatttcccaacgagttgttgtggattcagttaataaccagcaagatttcaaatatactttgattcatagtgaagagaata

SEQ ID NO: 567877 - DNA, 120 bp, Artificial Sequence
  ENSG00000170396_8 (sequence is synthesized)
ctaaagatgctaccactgttgctgaagatccagaaagtgcaaataattatacagcaaaaaataaccaagttggggatcaagcccaggggattcacagacacaaaatcggcttttcttttg

SEQ ID NO: 567878 - DNA, 120 bp, Artificial Sequence
  ENSG00000170396_9 (sequence is synthesized)
catttccaaagaaagcgtccgtgaagctagagtcctcagctgcagccttctctgaatacagtgatgatgcctcagtgggaaaaggatttagcagaaaaagtagatttgtccccagtgctt

SEQ ID NO: 567879 - DNA, 120 bp, Artificial Sequence
  ENSG00000170396_10 (sequence is synthesized)
gtcatcttcaacaatcttcaccaacagatgtgcttttgagttctgaggagaaaactaactcttttcatccaccagaggcaatgtgcagagacaaagaaactgttcaaactcaagagataa

SEQ ID NO: 567880 - DNA, 120 bp, Artificial Sequence
  ENSG00000170396_11 (sequence is synthesized)
aagaagtctctagtgaaaaagatgcattattattaccttcattttgcaagtttcaacttcagttatcttctgatgcagataattgtcaaaattcagtcccattagcagatcaaataccac

SEQ ID NO: 567881 - DNA, 120 bp, Artificial Sequence
  ENSG00000170396_12 (sequence is synthesized)
tagagagtgttgttattaatgaagacatacctgttagtggtaacagttttgagttgttaggaaataaatccacagttcttgacatgtctaatgattgcatatctgtgcaagctaccacag

SEQ ID NO: 567882 - DNA, 120 bp, Artificial Sequence
  ENSG00000170396_13 (sequence is synthesized)
aggaaaatgttaagcataacgaggcatccacaactgaggttgaaaataaaaatggtcccgagacattggccccttcaaatactgaagaggttaacataactatacataagaaaacaaatt

SEQ ID NO: 567883 - DNA, 120 bp, Artificial Sequence
  ENSG00000170396_14 (sequence is synthesized)
tctgcaaaagacaatgtgagccatttgtacctgtccttaacaaacacagatctacagttcttcagtggccatcagaaatgctggtttatacaactacgaaaccatcaatttcctatagct

SEQ ID NO: 567884 - DNA, 120 bp, Artificial Sequence
  ENSG00000170396_15 (sequence is synthesized)
gtaatcctctatgttttgacttcaagtctactaaagtaaataataatctagataaaaataagccagacttaaaagatctttgttctcagcagaagcaggaagacatttgcatgggaccac

SEQ ID NO: 567885 - DNA, 120 bp, Artificial Sequence
  ENSG00000170396_16 (sequence is synthesized)
tttcagattacaaggatgtatctacagaaggactcactgattatgaaattggaagtagcaaaaataaatgcagccaagtcactcctcttttggctgatgatattctctccagtagttgtg

SEQ ID NO: 567886 - DNA, 120 bp, Artificial Sequence
  ENSG00000170396_17 (sequence is synthesized)
attctggaaaaaatgagaacacaggtcagaggtataaaaacatttcctgtaagatcagagaaacagaaaagtataattttactaaaagtcaaataaaacaggacactctagatgaaaaat

SEQ ID NO: 567887 - DNA, 120 bp, Artificial Sequence
  ENSG00000170396_18 (sequence is synthesized)
atcatatggagaaaaccaaagaatcagaaactcgctgcaaaatggaagcagagaatagttacactgaaaatgctgggaaatatctattggaaccaatttcagaaaagcagtatttagctg

SEQ ID NO: 567888 - DNA, 120 bp, Artificial Sequence
  ENSG00000170396_19 (sequence is synthesized)
cagagcaattattagactcacatcagttacttgataaaaggcccaaatcagaatccatatccttaagtgacaatgaagaaatgtgtaaaacatggaatactgaatacaacacttatgata

SEQ ID NO: 567889 - DNA, 120 bp, Artificial Sequence
  ENSG00000170396_20 (sequence is synthesized)
ctatcagttctaaaaaccactgtaaaaagaacacaatacttttaaatggacaatcaaatgcaacaatgatacattctgggaaacataatttaacatattctagaacttactgttgttgga

SEQ ID NO: 567890 - DNA, 120 bp, Artificial Sequence
  ENSG00000170396_21 (sequence is synthesized)
aaaccaaaatgtcaagctgtagtcaggatcacagaagcttagttcttcaaaatgatatgaaacacatgagtcagaatcaggctgttaaaagaggttacaattctgtcatgaatgaatcag

SEQ ID NO: 567891 - DNA, 120 bp, Artificial Sequence
  ENSG00000170396_22 (sequence is synthesized)
aaagattctatcgaaaacgtagacaacattcacattcttattcttcagatgaaagtttaaatcgacagaatcatttaccagaagaatttttgaggccaccaagtacttcagttgctccct

SEQ ID NO: 567892 - DNA, 120 bp, Artificial Sequence
  ENSG00000170396_23 (sequence is synthesized)
gcaagcctaaaaagaaacggaggcgaaaaagaggcagattccaccccggatttgaaactttagaactcaaagaaaatacagattatcccgtgaaagacaattcttccttaaatcctctgg

SEQ ID NO: 567893 - DNA, 120 bp, Artificial Sequence
  ENSG00000170396_24 (sequence is synthesized)
ataggttaataagtgaagacaaaaaagagaaaatgaaaccacaagaagttgcaaaaatcgaaaggaactcagaacaaacaaaccaattaagaaacaaactgtctttccaccctaacaatc

SEQ ID NO: 567894 - DNA, 120 bp, Artificial Sequence
  ENSG00000170396_25 (sequence is synthesized)
tccttccttctgaaaccaatggtgaaactgagcatttagaaatggagaccacttctggtgaattgtcagatgtttccaatgatcccaccacatctgtctgtgtagctagtgccccaacaa

SEQ ID NO: 567895 - DNA, 120 bp, Artificial Sequence
  ENSG00000170396_26 (sequence is synthesized)
aagaagcaattgacaataccctgcttgaacacaaagaaagaagtgagaatataaatcttaatgaaaagcaaattccttttcaggtgcctaatattgaaaggaactttagacagtcacagc

SEQ ID NO: 567896 - DNA, 120 bp, Artificial Sequence
  ENSG00000170396_27 (sequence is synthesized)
ctaaatcctatctttgccattatgaactggctgaggcccttccacaaggaaagatgaatgagacaccaactgagtggctgcgttataattcaggaatccttaacacacaaccaccattac

SEQ ID NO: 567897 - DNA, 120 bp, Artificial Sequence
  ENSG00000170396_28 (sequence is synthesized)
cattcaaagaagcacatgtcagtggtcatacttttgtaacagctgagcaaatcctggctccattagctttaccagagcaagcattattgatcccactagaaaaccatgacaaattcaaaa

SEQ ID NO: 567898 - DNA, 120 bp, Artificial Sequence
  ENSG00000170396_29 (sequence is synthesized)
atgtaccatgtgaggtctaccagcacattctgcagccaaacatgctggccaacaaggttaaatttacctttcctccagctgccctcccaccccctagcacacctctgcagcctttgcctt

SEQ ID NO: 567899 - DNA, 120 bp, Artificial Sequence
  ENSG00000170396_30 (sequence is synthesized)
tgcagcagtccttatgttctacctctgtaaccactatccatcacactgttttgcagcagcacgctgcagctgctgcagctgcagctgcagccgcagctgcaggaacctttaaagtgcttc

SEQ ID NO: 567900 - DNA, 120 bp, Artificial Sequence
  ENSG00000170396_31 (sequence is synthesized)
agccacaccaacagtttctttcccaaatcccagctctcaccagaacctcattacctcagctctcagtaggaccagtaggaccgaggctttgtcctgggaaccagccaacttttgttgctc

SEQ ID NO: 567901 - DNA, 120 bp, Artificial Sequence
  ENSG00000170396_32 (sequence is synthesized)
ctcctcagatgccaatcattccagcttccgttcttcatcctagccatctggctttcccatctttaccccatgcactctttccttcactgctttccccacaccctactgtcatccctttgc

SEQ ID NO: 567902 - DNA, 120 bp, Artificial Sequence
  ENSG00000170396_33 (sequence is synthesized)
aacctctcttctagtcatcaccataatgggaaaaaaatactcttgtgaaaactattgctatatgcgttaagtgttcatctatgtgggtacatggctatttaactggtggaaataaactgg

SEQ ID NO: 567903 - DNA, 120 bp, Artificial Sequence
  ENSG00000170396_34 (sequence is synthesized)
ccgatacatggcgtcattggtttgaaatcatttactgtaagtgcaatgatgcaaataaatccctaagtttctgatatataatattattaaagcactgaatagtttgaaaatcaatacaat

SEQ ID NO: 567904 - DNA, 120 bp, Artificial Sequence
  ENSG00000170396_35 (sequence is synthesized)
gctatatattaaaatgatgtcttaagagtatgtataatgtacataaaatatatttatagtactctaatttatgttgtaaagtatgctcccttggtttttcttaatctttgtgtatttgca

SEQ ID NO: 567905 - DNA, 120 bp, Artificial Sequence
  ENSG00000170396_36 (sequence is synthesized)
tgcacctatttaatgtttagacaaagctgatggcactatgttttgtatcatgttccttgaaactgtaaattcagtgaaaaatatctcttgcaataaatttttgttaactatttaagtaaa

SEQ ID NO: 567906 - DNA, 120 bp, Artificial Sequence
  ENSG00000170412_0 (sequence is synthesized)
agaacctggaacggtcacaggaaacccgggcgcggggtagtcgggccgagggggacctttgcccacggtccagagtggtctggactcggcccacgcgtgagaggagcgcttggtgacgat

SEQ ID NO: 567907 - DNA, 120 bp, Artificial Sequence
  ENSG00000170412_1 (sequence is synthesized)
cccacgtacgcttggtgactggtggaggtcccagagaaggaccgtgcgtgcaaaaggcgaacctcggtgtgcggtgtgtccacgtgtgcaagctggggaggggagggggcgcagaaggcg

SEQ ID NO: 567908 - DNA, 120 bp, Artificial Sequence
  ENSG00000170412_2 (sequence is synthesized)
tgacaaagacggactctgtcttgagtgtgcgcctcgctccggcccgctcccagcgaactgtgcctgaagtgtgtctcacgggagggccaggacgaaggtgacaaaggctaggtgtccccc

SEQ ID NO: 567909 - DNA, 120 bp, Artificial Sequence
  ENSG00000170412_3 (sequence is synthesized)
acggagacgcgccaaggtagccccgcgcgtgtccgtaggcgcgctctctggaagacgcggtggggggtgcgcagggctgcaccctcacaccaattgccccggcgaaggccgagcccagaa

SEQ ID NO: 567910 - DNA, 120 bp, Artificial Sequence
  ENSG00000170412_4 (sequence is synthesized)
agtgagtgcgcgtgagtgtgcgcgcgcccgcatgcgggggcgtggcagtcaacagcaacaacccacacgccggcagggccagaaactcccatctccctcaccagccggaaagtacgagtc

SEQ ID NO: 567911 - DNA, 120 bp, Artificial Sequence
  ENSG00000170412_5 (sequence is synthesized)
ggctcagcctggagggacccaaccagagcctggcctgggagccaggatggccatccacaaagccttggtgatgtgcctgggactgcctctcttcctgttcccaggggcctgggcccaggg

SEQ ID NO: 567912 - DNA, 120 bp, Artificial Sequence
  ENSG00000170412_6 (sequence is synthesized)
ccatgtcccacccggctgcagccaaggcctcaaccccctgtactacaacctgtgtgaccgctctggggcgtggggcatcgtcctggaggccgtggctggggcgggcattgtcaccacgtt

SEQ ID NO: 567913 - DNA, 120 bp, Artificial Sequence
  ENSG00000170412_7 (sequence is synthesized)
tgtgctcaccatcatcctggtggccagcctcccctttgtgcaggacaccaagaaacggagcctgctggggacccaggtattcttccttctggggaccctgggcctcttctgcctcgtgtt

SEQ ID NO: 567914 - DNA, 120 bp, Artificial Sequence
  ENSG00000170412_8 (sequence is synthesized)
tgcctgtgtggtgaagcccgacttctccacctgtgcctctcggcgcttcctctttggggttctgttcgccatctgcttctcttgtctggcggctcacgtctttgccctcaacttcctggc

SEQ ID NO: 567915 - DNA, 120 bp, Artificial Sequence
  ENSG00000170412_9 (sequence is synthesized)
atcatcaccctggttcggggcagtggcgagggcggccctcagggcaacagcagcgcaggctgggccgtggcctccccctgtgccatcgccaacatggactttgtcatggcactcatctac

SEQ ID NO: 567916 - DNA, 120 bp, Artificial Sequence
  ENSG00000170412_10 (sequence is synthesized)
gtcatgctgctgctgctgggtgccttcctgggggcctggcccgccctgtgtggccgctacaagcgctggcgtaagcatggggtctttgtgctcctcaccacagccacctccgttgccata

SEQ ID NO: 567917 - DNA, 120 bp, Artificial Sequence
  ENSG00000170412_11 (sequence is synthesized)
tgggtggtgtggatcgtcatgtatacttacggcaacaagcagcacaacagtcccacctgggatgaccccacgctggccatcgccctcgccgccaatgcctgggccttcgtcctcttctac

SEQ ID NO: 567918 - DNA, 120 bp, Artificial Sequence
  ENSG00000170412_12 (sequence is synthesized)
gtcatccccgaggtctcccaggtgaccaagtccagcccagagcaaagctaccagggggacatgtaccccacccggggcgtgggctatgagaccatcctgaaagagcagaagggtcagagc

SEQ ID NO: 567919 - DNA, 120 bp, Artificial Sequence
  ENSG00000170412_13 (sequence is synthesized)
atgttcgtggagaacaaggccttttccatggatgagccggttgcagctaagaggccggtgtcaccatacagcgggtacaatgggcagctgctgaccagtgtgtaccagcccactgagatg

SEQ ID NO: 567920 - DNA, 120 bp, Artificial Sequence
  ENSG00000170412_14 (sequence is synthesized)
gccctgatgcacaaagttccgtccgaaggagcttacgacatcatcctcccacgggccaccgccaacagccaggtgatgggcagtgccaactcgaccctgcgggctgaagacatgtactcg

SEQ ID NO: 567921 - DNA, 120 bp, Artificial Sequence
  ENSG00000170412_15 (sequence is synthesized)
gcccagagccaccaggcggccacaccgccgaaagacggcaagaactctcaggtctttagaaacccctacgtgtgggactgagtcagcggtggcgaggagaggcgggcggatttggggagg

SEQ ID NO: 567922 - DNA, 120 bp, Artificial Sequence
  ENSG00000170412_16 (sequence is synthesized)
gccctgaggacctggccccgggcaagggactctccaggctcctcctccccctggcaggcccagcaacatgtgccccagatctggaagggcctccctctctgccagtgtttgggtgggtgt

SEQ ID NO: 567923 - DNA, 120 bp, Artificial Sequence
  ENSG00000170412_17 (sequence is synthesized)
catgggtgtccccacccactcctcagtgtttgtggagtcgaggagccaaccccagcctcctgccaggatcacctcggcggtcacactccagccaaatagtgttctcggggtggtggctgg

SEQ ID NO: 567924 - DNA, 120 bp, Artificial Sequence
  ENSG00000170412_18 (sequence is synthesized)
gcagcgcctatgtttctctggagattcctgcaacctcaagagacttcccaggcgctcaggcctggatcttgctcctctgtgaggaacaagggtgcctaataaatacatttctgctttatt

SEQ ID NO: 567925 - DNA, 120 bp, Artificial Sequence
  ENSG00000170412_19 (sequence is synthesized)
cggcatcctgatcctcattcctctgtacccaggctggaccgggcccagcacctttcccatccttgtcattggagctgggaggggccggaggccaccaacctgaagcagtggaccgagtgg

SEQ ID NO: 567926 - DNA, 87 bp, Artificial Sequence
  ENSG00000170412_20 (sequence is synthesized)
tgtctctgcagatggggcggggccagagctgggatggagctgactgttagcatccgttcagggcgtcggcaccatgggggcactatc

SEQ ID NO: 567927 - DNA, 120 bp, Artificial Sequence
  ENSG00000170412_21 (sequence is synthesized)
tagcatccgttcagggcgtcggcaccatgggggcactatccagcgcagatctgcaagcccagcattcagcactccctcccccagccccagctgttgccagctgcatggggccagctgtgt

SEQ ID NO: 567928 - DNA, 120 bp, Artificial Sequence
  ENSG00000170412_22 (sequence is synthesized)
tgggtggggactgtgtagggtccagctatgagttggtggagtctgcgtggggactgtgtagggtccagctatgagttggtgaggcttaacaagcagtgcaggtgattccaatgcacactc

SEQ ID NO: 567929 - DNA, 120 bp, Artificial Sequence
  ENSG00000170412_23 (sequence is synthesized)
atctgtggttttggaccacagatgtagatgttccagggaccacatggacaggggccattgcagacaggcctgaggacctcctgggcctgattgacttgaaggctagtttggggtctggga

SEQ ID NO: 567930 - DNA, 120 bp, Artificial Sequence
  ENSG00000170412_24 (sequence is synthesized)
gctacagagatttggtggcagctctttcccatagggctaagacagatggggccaggaatacacctttcctccagcataggagccggaacaggtacctcaggaccctcttcaccccacagc

SEQ ID NO: 567931 - DNA, 120 bp, Artificial Sequence
  ENSG00000170412_25 (sequence is synthesized)
tggtgtctctcacccacatgggagcaagacccagcgccaggcagagaattcaggtttcaagactccaaatcagggctggttgcagtggctcatgcctttaatcccagtgctctgggagac

SEQ ID NO: 567932 - DNA, 120 bp, Artificial Sequence
  ENSG00000170412_26 (sequence is synthesized)
tgacatgggagaactgcttgaggccgagggttcgagagcagccctggcaacgtagtgagaccccccccccccgcccaccatctctacaaaaaaaaaaaaaagactccaaatcagaccggc

SEQ ID NO: 567933 - DNA, 120 bp, Artificial Sequence
  ENSG00000170412_27 (sequence is synthesized)
cagactagatgcctagagagatgtgtgggcacacccagagccatgtcctccgccagggaagccagcaactgtgatgctgggggtatggtagtgacaggcggtcgactcggggtaatattc

SEQ ID NO: 567934 - DNA, 79 bp, Artificial Sequence
  ENSG00000170412_28 (sequence is synthesized)
gggtatggtagtgacaggcggtcgactcggggtaatattcttggaggagccgggcatggtggctcacacctataatccc

SEQ ID NO: 567935 - DNA, 120 bp, Artificial Sequence
  ENSG00000170412_29 (sequence is synthesized)
attcttggaggaagggggcctgggagctatgtcagacaggtagtagcagctctgtgtggctgactctccactggccctagcatttccctaaacaattggaagtaggagggtcttgagaag

SEQ ID NO: 567936 - DNA, 120 bp, Artificial Sequence
  ENSG00000170412_30 (sequence is synthesized)
gggatccccctctgtgaagccccagcaccatccaaggtcagcaggggcctcgttcccatgcccagaggcagggtgagataaggggctcaggtctggctgtcccaggctgctcctggggcc

SEQ ID NO: 567937 - DNA, 120 bp, Artificial Sequence
  ENSG00000170412_31 (sequence is synthesized)
cagccagagggggcagaggagccgaggggggagttgggggggatctggcagtcccagccctgcaggaagtgtttgtgcatccgccccggcggaacctggctcccaatccccgactgtgag

SEQ ID NO: 567938 - DNA, 120 bp, Artificial Sequence
  ENSG00000170412_32 (sequence is synthesized)
agagccaacgtgtcccggagcgcagaggcccagggggtcgcgctaaacactgtacctcggggaacaaaaccgtgaaggctaattaggacaagtcggagcagggaacggggacgccgggag

SEQ ID NO: 567939 - DNA, 120 bp, Artificial Sequence
  ENSG00000170412_33 (sequence is synthesized)
cacagctctctggtgctacccccgtccccagcagcctgtgcctttgtcactggcatacttttccagagctaaattgggcgagcaatccctgcagagtaggattgcagctctgactgtggc

SEQ ID NO: 567940 - DNA, 120 bp, Artificial Sequence
  ENSG00000170412_34 (sequence is synthesized)
ccccgacctctctgtgttgcctgtcgaagtccatgaacagaatgttatttccctccagtggaagggaagcagggagctctgtggacctcacgctgcccttggtctagcttagcggcccca

SEQ ID NO: 567941 - DNA, 120 bp, Artificial Sequence
  ENSG00000170412_35 (sequence is synthesized)
agatcccttagtgaatcaaggcgctgtgttgctttcctatgtgataatttcaaaggagtccccggcagggcctgatacccagaggctgcagtctccagtggacgtgggtgtgtgtatagc

SEQ ID NO: 567942 - DNA, 120 bp, Artificial Sequence
  ENSG00000170412_36 (sequence is synthesized)
ctgagtcctctgggggtctgcgcgtgaggctcagggagggatgggatcctaaaagatgcaggcctgcctgtattcaggagtacccactggccctgcttactcccgcccgggccaagtgga

SEQ ID NO: 567943 - DNA, 120 bp, Artificial Sequence
  ENSG00000170412_37 (sequence is synthesized)
gaagaagttagatgagttcttaggaggagagaggcagcttctttgaggtggtcgagtggcatcacaaacaagcgttgaatggaaaaagactagaagaggcagagcctgtcacaggttcac

SEQ ID NO: 567944 - DNA, 120 bp, Artificial Sequence
  ENSG00000170412_38 (sequence is synthesized)
catcatccagccaacactatgggaaatctcacacccaccactgtcaaaccgaggactttggacttaataactgctcagaattaaacgaccttaccttccatgggtgagggcttactgcca

SEQ ID NO: 567945 - DNA, 120 bp, Artificial Sequence
  ENSG00000170412_39 (sequence is synthesized)
agacgtccgctgtgccgtcctcacagcaaggcctgctccgaggccccggggtgcgtcagcagccctcctcaaacaccctgggagtgcccagcagggcggaacacaccgggaaaccaacac

SEQ ID NO: 567946 - DNA, 120 bp, Artificial Sequence
  ENSG00000170412_40 (sequence is synthesized)
cccaaaggcacaaggaagtatccctggagctaaaaatagttctggaaacttgccagggggccacaggctgggacgtgcgttaaggctccctggccaggctctgggttggtgtagtgggga

SEQ ID NO: 567947 - DNA, 120 bp, Artificial Sequence
  ENSG00000170412_41 (sequence is synthesized)
aggggcgcccaggtcggccctgggaggacatgaacaggcttaggccgagggctctcagatgtatttacctctgtgcctggcagctggcccgtggtgacaggcagagctggaggctggcca

SEQ ID NO: 567948 - DNA, 120 bp, Artificial Sequence
  ENSG00000170412_42 (sequence is synthesized)
tcttggaaggcggccgaaggcccatgtgtcctcttggcctctggccccggagggcggatggggatgtggaagttgctgacagagcattttctgagctgttgggtcaggggctggggtgtc

SEQ ID NO: 567949 - DNA, 120 bp, Artificial Sequence
  ENSG00000170412_43 (sequence is synthesized)
tacagtgcagggaagctcagcagtgttgttcactcccatgcatctgtacaaaggggtgctaggcttgggagggggcccccgtgttcacaacctcacccccaagttggccactcctgggtt

SEQ ID NO: 567950 - DNA, 120 bp, Artificial Sequence
  ENSG00000170412_44 (sequence is synthesized)
agagactatgccagggttggcctgccccctttacctcttccctgcccccagagagccttgcttggtttgtgggaggtggggaagggagctgagagccctgggatcttcaaactgttcctg

SEQ ID NO: 567951 - DNA, 120 bp, Artificial Sequence
  ENSG00000170412_45 (sequence is synthesized)
gacggcaagaactctcaggtaagcgaactgacccagagaggccaggccaacaccaaccaggttttcctaagactctgacgtccagcagcctctctccgtggcccaccctgggctcagtcc

SEQ ID NO: 567952 - DNA, 120 bp, Artificial Sequence
  ENSG00000170412_46 (sequence is synthesized)
ggcccccaggctgcctccaactcccctcttgacacgcccccctccccccaaatcatagtccctgtgtccccaagctgtggttcagattgccttcttcccctctgtgaacaacaggcctca

SEQ ID NO: 567953 - DNA, 120 bp, Artificial Sequence
  ENSG00000170412_47 (sequence is synthesized)
gtgccccgtcttgactctggaccttcctggccctgccatcttggtgtctggcactggcttgtcccaccctctgcctagatggatctcctccatgagtctttggagccaagccagggcaga

SEQ ID NO: 567954 - DNA, 120 bp, Artificial Sequence
  ENSG00000170412_48 (sequence is synthesized)
agttggcccttgcccttctcaccagggcctcctgccaccacctggactgtggaaggccactgagatgggggcagagctcagcccgaggcttgggcacactgcttctctccacggcctgtg

SEQ ID NO: 567955 - DNA, 120 bp, Artificial Sequence
  ENSG00000170412_49 (sequence is synthesized)
ggtcctggatctgagcccttggggtgtttcactcaagagccactgagccgtccccatcttccacaaagcagtttccacaagcaagccagggccagccctgcctgcactctgcccgcagtg

SEQ ID NO: 567956 - DNA, 120 bp, Artificial Sequence
  ENSG00000170412_50 (sequence is synthesized)
cccctcaacgtctgggatgaggatgagcctgctgagatgagggcagctctctccatccagcagtacctcatggagtgctcactaaggagttaggaatggcaggccacgctggcatctggg

SEQ ID NO: 567957 - DNA, 120 bp, Artificial Sequence
  ENSG00000170412_51 (sequence is synthesized)
gttcaaggtggctcctgtggcaggaacaggtgtccatgaccctgattacctggatctcacaggttctgggaatgcaataggggcctgctgtggctattccaacatctctggtcagggcct

SEQ ID NO: 567958 - DNA, 120 bp, Artificial Sequence
  ENSG00000170412_52 (sequence is synthesized)
ggaagtaccttaggacacatggggttggggtcaggactgcattctcagggaccagtggagagccctggaccagatgaactggagtctaggcctctctcgtgactgggacttgtgggacgt

SEQ ID NO: 567959 - DNA, 120 bp, Artificial Sequence
  ENSG00000170412_53 (sequence is synthesized)
gggaggcctgtgagatccaggactaaagattatgctgtttcctaatgggcagatatgtaagtaggtaagtgggatcctcaggtaagcgggatccagaactaaagactgtgctatttcctg

SEQ ID NO: 567960 - DNA, 120 bp, Artificial Sequence
  ENSG00000170412_54 (sequence is synthesized)
agcctggaggtgagtcggggcggggagggccgggcaggctttgttcctgtgtaaacggagcgcacgtacctggagcgcggcgggcgcccgattagcgccctgaatggaggtgatgtaacg

SEQ ID NO: 567961 - DNA, 120 bp, Artificial Sequence
  ENSG00000170412_55 (sequence is synthesized)
gtgatgcaggctccagcccaccctcgccgaaagcaaggagccctgcctggggacaggcccgcgcgagagcgagcaacccagcgcgcctggctcagcctcggtcccagggagaggcaggcc

SEQ ID NO: 567962 - DNA, 120 bp, Artificial Sequence
  ENSG00000170417_0 (sequence is synthesized)
gaatctgccggtggggcgtgagcgagaagccaccaaaacatgagctaggacagccttctcaagaagattctgccaactcaaaaatattattcttttttttttttttttgctgttgtttct

SEQ ID NO: 567963 - DNA, 120 bp, Artificial Sequence
  ENSG00000170417_1 (sequence is synthesized)
gagaaactaggtgtcttaccattttaaaatttcatattttatttaaaaggaaaccagtgaattgaaaatgagactaaatatcgctatcttctttggagctctctttggtgctttgggggt

SEQ ID NO: 567964 - DNA, 120 bp, Artificial Sequence
  ENSG00000170417_2 (sequence is synthesized)
gttactctttttggtggcttttggatcggattattggcttcttgcaactgaagtggggagatgttcaggtgaaaagaatatagagaacgtcacttttcaccatgaagggttcttctggag

SEQ ID NO: 567965 - DNA, 120 bp, Artificial Sequence
  ENSG00000170417_3 (sequence is synthesized)
gtgttggtttaatgggattgtggaagagaatgactccaatatttggaagttctggtacaccaatcagccaccgtccaagaactgcacacatgcttacctgtctccgtaccccttcatgag

SEQ ID NO: 567966 - DNA, 120 bp, Artificial Sequence
  ENSG00000170417_4 (sequence is synthesized)
aggcgagcacaactcgacctcctatgactctgcagttatttaccgtggtttctgggcagtcctgatgctcctgggggtagttgctgtagtcatcgcaagctttttgatcatctgtgcagc

SEQ ID NO: 567967 - DNA, 120 bp, Artificial Sequence
  ENSG00000170417_5 (sequence is synthesized)
ccccttcgccagccattttctctacaaagctgggggaggctcatatattgctgcaggcatcctattttcattggtggtgatgctgtatgtcatctgggtccaggcagtggctgacatgga

SEQ ID NO: 567968 - DNA, 120 bp, Artificial Sequence
  ENSG00000170417_6 (sequence is synthesized)
aagctaccgaaacatgaaaatgaaggactgcctggatttcaccccttctgttctgtatggctggtcatttttcctggccccagctgggatatttttttctttgctagctggattactatt

SEQ ID NO: 567969 - DNA, 120 bp, Artificial Sequence
  ENSG00000170417_7 (sequence is synthesized)
tctggttgttggatggcatattcagatacatcactaaatcaactgttgccacaagtattttcttgagagattttaaaacaaggaatactttttttccattttgtttcattgatcccagca

SEQ ID NO: 567970 - DNA, 120 bp, Artificial Sequence
  ENSG00000170417_8 (sequence is synthesized)
taaagttagtagatataactttttagttgctattcaaattaatcattttactaaaattttcttcagtaagaaggtcctagaatctctccagacaccagcaagcctctatcttgtctaagt

SEQ ID NO: 567971 - DNA, 120 bp, Artificial Sequence
  ENSG00000170417_9 (sequence is synthesized)
gctgtcaaggacctagttctttagggaataggtaaacaggtctccctttcattgaacatgttagagttcatgcaggtcgcaaaggcctgataatagcttaataccatgacatggggaaaa

SEQ ID NO: 567972 - DNA, 120 bp, Artificial Sequence
  ENSG00000170417_10 (sequence is synthesized)
tctcgatagatttggcttaaagtctccttggcattcacttctgctaattaaaaaaaatccttgaagaataattaagaatgggcaaggttgtcagagaatttattttgtttcttgcccaca

SEQ ID NO: 567973 - DNA, 120 bp, Artificial Sequence
  ENSG00000170417_11 (sequence is synthesized)
cagataatatccacatacacattcactggctcttgtgagcaaatgaatttaaaaatagacagcagttgttctaattagtgggagccatgtactcaccagttaaaatgggccacaacaaac

SEQ ID NO: 567974 - DNA, 120 bp, Artificial Sequence
  ENSG00000170417_12 (sequence is synthesized)
aagactgagagcatgtacttatcttgctttttcaccaacagtggtttggttacctagttttattcacttaattgtgcatgcttacataaactttaaactacatttaaaactagcaaatct

SEQ ID NO: 567975 - DNA, 120 bp, Artificial Sequence
  ENSG00000170417_13 (sequence is synthesized)
gcataccaaattatgtataacgtagattgaatttttatgaacttaaagtgagttaattgtataatgtaatattgtttaaaatatgtaaaaaccaagcatttccgcttggtccataattct

SEQ ID NO: 567976 - DNA, 120 bp, Artificial Sequence
  ENSG00000170417_14 (sequence is synthesized)
gtacttccatatgaggattataatagccctgctttattaaagaccataaaatattaactttccccaagatgttatgggttccagttcttctgatcatttgattcctttaattactgtccc

SEQ ID NO: 567977 - DNA, 120 bp, Artificial Sequence
  ENSG00000170417_15 (sequence is synthesized)
tcaatttcttcatctttacaatagatatattaacatttacagatcgactatttcctttaacctcctagaagaaagtttttgtggggaaagatgattctgtattattcagtagcatagaca

SEQ ID NO: 567978 - DNA, 120 bp, Artificial Sequence
  ENSG00000170417_16 (sequence is synthesized)
ttttgcatatcaaagatgttcatttggcactaatgttgattgaaatcaaatccatctgagatgcctagctcgtatttgcattctggaagcctccatcgcaggggagctcggcagggtatg

SEQ ID NO: 567979 - DNA, 120 bp, Artificial Sequence
  ENSG00000170417_17 (sequence is synthesized)
tgagctttgttggaggtgcggtgtttcattctgcagctgttgtgaggacagagaggcatggcccacaggcaaaaaaagtcaccacccagaagatgctctgggatagaggaactgctcctt

SEQ ID NO: 567980 - DNA, 120 bp, Artificial Sequence
  ENSG00000170417_18 (sequence is synthesized)
ttcatcagctcttccaatgccgtgggagaggtgatcccagtcttctctgtacatcttgtgcttttccattaagacttgttccagtgggaaggagctttggaaaaattgcaaaggtctgaa

SEQ ID NO: 567981 - DNA, 88 bp, Artificial Sequence
  ENSG00000170417_19 (sequence is synthesized)
tccagaggcctaactggtttctcaagtcatttcagtgatatcattgaaacgtttttgtggtacttccctttgtctttcactgtttcat

SEQ ID NO: 567982 - DNA, 120 bp, Artificial Sequence
  ENSG00000170417_20 (sequence is synthesized)
acgtttttgtggtacttccctttgtctttcactgtttcatttttatattgcttcatttacttctttgcttttggctttgttattagaaaaaataattatgaggtctgttgtgcatgttga

SEQ ID NO: 567983 - DNA, 120 bp, Artificial Sequence
  ENSG00000170417_21 (sequence is synthesized)
ctgtgatattaagttatggcatgccattaagttttccagacgatgttggatgtatctgattagttcatgtcatctgtaaatacaattcttttttgtagtactttggaatggagccttttt

SEQ ID NO: 567984 - DNA, 120 bp, Artificial Sequence
  ENSG00000170417_22 (sequence is synthesized)
ctggtgtactgtatgccatttaagtttcacatacaagctgctttcggcaaaggcttgaatatttataaatttcagatggttatcctcactttatagtacacttaagtggctaccatatat

SEQ ID NO: 567985 - DNA, 120 bp, Artificial Sequence
  ENSG00000170417_23 (sequence is synthesized)
tttttatatgacaattggctgaatagctgatgtgtatgacacttttacacagatttgcactttggaactattttatagttgtaatgcatcaatcaaatacatttcaagcacatttcttga

SEQ ID NO: 567986 - DNA, 120 bp, Artificial Sequence
  ENSG00000170417_24 (sequence is synthesized)
tcaatttaccagcaaccctctgaaggaatgaaggagagttgtgattgctatgtcaatgagtgaaatatacttaaaaatggcagagttatatagtacattattgtagcaaccttatatctg

SEQ ID NO: 567987 - DNA, 120 bp, Artificial Sequence
  ENSG00000170417_25 (sequence is synthesized)
atttgagatactgtgttgccaaatgtccatgttatgtttatttctctattggttgtatttattaatttttagaagcctttaaactgtgttagaatctttttgaaaaatgttgattttgca

SEQ ID NO: 567988 - DNA, 120 bp, Artificial Sequence
  ENSG00000170417_26 (sequence is synthesized)
tcataaagtttcaatttatcaaggatatcttttcagttacacttttagaaagagtgaataaaaagggcagtgagttatgctcttggacttggtgaaagctatcatctctccatattgtat

SEQ ID NO: 567989 - DNA, 120 bp, Artificial Sequence
  ENSG00000170417_27 (sequence is synthesized)
ttgttcagctggtttaattcactcaggtggatgattgcacatacattggaattggctggagagactacacagagaagtttaatgatcgtgtacaatttgagggttgatggtagggctttc

SEQ ID NO: 567990 - DNA, 120 bp, Artificial Sequence
  ENSG00000170417_28 (sequence is synthesized)
gggttgatggtagggctttctaaaaaaagtaatatcaagtgtgttgttagtattcatttagtcatttttattactaatctataaatatatttattaaatttgaagattaaatggaattat

SEQ ID NO: 567991 - DNA, 120 bp, Artificial Sequence
  ENSG00000170417_29 (sequence is synthesized)
aaaaatgaagatgaaagcaactgactgtgacaatctgctgtgtacacaatctaagtgtatttttctttcttttctcttttcctcctggggtctccagtttaccgtggtttctgggcagtc

SEQ ID NO: 567992 - DNA, 120 bp, Artificial Sequence
  ENSG00000170417_30 (sequence is synthesized)
gagagggggcgggtgctacctggcagctccgcgggtgcgtggccggtgctggctgggagttctggtctcaggcaaggtggggactgggcacatcatcaatacggaatcatggaaaactag

SEQ ID NO: 567993 - DNA, 120 bp, Artificial Sequence
  ENSG00000170417_31 (sequence is synthesized)
cgcagagagagggggcgggtgctacctggcagctccgcgggtgcgtggccggtgctggctgggagttctggtctcaggcaaggtggggactgggcacatcatcaatacgatagagaacgt

SEQ ID NO: 567994 - DNA, 120 bp, Artificial Sequence
  ENSG00000170417_32 (sequence is synthesized)
cgtgttttaaaaagcattcgtgatttcagcgatcctttctgaaatgtgtaaaaataccatcgtctccaatgataaaaacaacaacaacatctgccgatggcaaaatatagtcaactttca

SEQ ID NO: 567995 - DNA, 120 bp, Artificial Sequence
  ENSG00000170417_33 (sequence is synthesized)
gggccaagtttttggaagcagccaatgcgtttgcatgtgtgattttctttttcacatataagtttctgtggatacaaaaatatatgtttgtatgtactgatcaggtgtctgtgtcttaaa

SEQ ID NO: 567996 - DNA, 120 bp, Artificial Sequence
  ENSG00000170417_34 (sequence is synthesized)
tttacatagctatggtttccctgcacctaaatattgaggcttttaaaatttgtagtgtgaaggtataaagcttttaatttgttgttggtggcatttggcatgatatcttgggtggtttta

SEQ ID NO: 567997 - DNA, 120 bp, Artificial Sequence
  ENSG00000170417_35 (sequence is synthesized)
ttacttgtatttttaaagcaaatatacttaaattttcaaagggatcacttcctgtcaatatgtatattgtttccccacttttctcccaagttaataaacaactacaatgataataccata

SEQ ID NO: 567998 - DNA, 120 bp, Artificial Sequence
  ENSG00000170417_36 (sequence is synthesized)
agagagagggggcgggtgctacctggcagctccgcgggtgcgtggccggtgctggctgggagttctggtctcaggcaaggtggggactgggcacatcatcaatacgagaagatctttaac

SEQ ID NO: 567999 - DNA, 120 bp, Artificial Sequence
  ENSG00000170417_37 (sequence is synthesized)
tcctccaaccatgaagaccttcagaagatgaaattcctgcccaggagagtggatgcccacagagacactggttgtttcatattctgcctactaaagacttatctgtattcaaggaatcat

SEQ ID NO: 568000 - DNA, 120 bp, Artificial Sequence
  ENSG00000170417_38 (sequence is synthesized)
tggaccagtcactggacctgcattacagtgggcttatattgacctttacctctacacttgtatataactcgttttcccatttagttgcaagacacttggaagcacagaccaaggcttaca

SEQ ID NO: 568001 - DNA, 120 bp, Artificial Sequence
  ENSG00000170417_39 (sequence is synthesized)
tttgtgttttaatgtttttcttgtaaatgctttatgcctaaatgtttctgtactactcttctttccaaatccttattgtttaaaagtttctctcctactataccatgccttataaatatt

SEQ ID NO: 568002 - DNA, 120 bp, Artificial Sequence
  ENSG00000170417_40 (sequence is synthesized)
gattgaatgaatggatgaaatgcatacctgcttatatttctaattaaaggcaatttgggattatagtatttgtttttccaaaaatgtttccaattacccattcccttgtcagttcccatg

SEQ ID NO: 568003 - DNA, 120 bp, Artificial Sequence
  ENSG00000170417_41 (sequence is synthesized)
gccagccattttctctacaaagctgggggaggctcatatattgctgcagcagagcacgaagataatgacgaactaagagaattctgaatgaaggtctgaaatttcaagttctcagcaacc

SEQ ID NO: 568004 - DNA, 120 bp, Artificial Sequence
  ENSG00000170417_42 (sequence is synthesized)
tttcctgagcccctagaaagttaatcctactttgaagacctctaatttcccagtcctcagccatagctgattggaccaggaataggtgtctgaatgaataaaccactgactctcagaaat

SEQ ID NO: 568005 - DNA, 120 bp, Artificial Sequence
  ENSG00000170417_43 (sequence is synthesized)
ttgaactgaaagagacagagctacttgagctgaagagtcatatggaggctccatggaagtagtggttttcagcaaagcataagataatcaaacatcagatacccttggaggagagaatga

SEQ ID NO: 568006 - DNA, 120 bp, Artificial Sequence
  ENSG00000170417_44 (sequence is synthesized)
caaatggatagatgtacagagtgaaatgaagtcataagaaagagagatgcagagatggcattatgtgaagacattaaccttggttaccaaattaaatatccaggccctggacagccaact

SEQ ID NO: 568007 - DNA, 120 bp, Artificial Sequence
  ENSG00000170417_45 (sequence is synthesized)
ctcaggaaaggtcgggatgagaaggatgccttgtctgttatgctgtattcatgccagagaacaggaactcaagccagccactaaattcaggactgaagcaaaggattaatgcatttttca

SEQ ID NO: 568008 - DNA, 120 bp, Artificial Sequence
  ENSG00000170419_0 (sequence is synthesized)
gcgccgcgagcccggcgaagtcctcagcccgccccgcttgcccactccccacttcccgagccggctccgtgtttagggagggcagtgatcacgcaagccggagcggcgggctgacgttgg

SEQ ID NO: 568009 - DNA, 120 bp, Artificial Sequence
  ENSG00000170419_1 (sequence is synthesized)
acgagctgccaggtagctgaaagcaggcagccaggcagccgagacacttcccagcgattccagcctgggctccgcaggaagcctcgctgaatcccagccagctggttctaaccttccaga

SEQ ID NO: 568010 - DNA, 120 bp, Artificial Sequence
  ENSG00000170419_2 (sequence is synthesized)
atcgcaatcccttctccccacagccagccctcgccaagcaagcagcaggatgtttgcagtgtcgcgcccagggctctgagactgagcctgccatccactcgcacgcctttctttcagggc

SEQ ID NO: 568011 - DNA, 120 bp, Artificial Sequence
  ENSG00000170419_3 (sequence is synthesized)
ttttcggctgttggctacactgatgtgacccccctccctttttggaatgatggggatctttttggtgtatgttggatttgttttcttttccgttttatatgtacaacaagggctttcttc

SEQ ID NO: 568012 - DNA, 120 bp, Artificial Sequence
  ENSG00000170419_4 (sequence is synthesized)
tcaagcaaaatttaccgagtttccgcggaacgtgacggcgaccgaggggcagaatgtggagatgtcctgcgccttccagagcggctccgcctcggtgtatctggagatccaatggtggtt

SEQ ID NO: 568013 - DNA, 120 bp, Artificial Sequence
  ENSG00000170419_5 (sequence is synthesized)
cctgcgggggccggaggacctggatcccggggccgagggggccggcgcgcaggtggagctcttgcccgacagagacccggacagcgacgggaccaagatcagcacagtgaaagtccaagg

SEQ ID NO: 568014 - DNA, 120 bp, Artificial Sequence
  ENSG00000170419_6 (sequence is synthesized)
caatgacatctcccacaagcttcagatttccaaagtgaggaaaaaggatgaaggcttatatgagtgcagggtgactgatgccaactacggggagcttcaggaacacaaggcccaggccta

SEQ ID NO: 568015 - DNA, 120 bp, Artificial Sequence
  ENSG00000170419_7 (sequence is synthesized)
tctgaaagtcaatgccaacagccatgcccgcagaatgcaggccttcgaagcctcgcccatgtggctgcaggatatgaagccccgcaagaacgtctccgcagccatccccagcagcatcca

SEQ ID NO: 568016 - DNA, 120 bp, Artificial Sequence
  ENSG00000170419_8 (sequence is synthesized)
tggctctgccaaccaacgaacgcactccacctccagccctcaagtggtagccaaaatccccaaacaaagtccacaatcaggtgcgaggatagctacaagccatggactttctgtcctgct

SEQ ID NO: 568017 - DNA, 120 bp, Artificial Sequence
  ENSG00000170419_9 (sequence is synthesized)
tcttgtttgtggctttgtgaagggtgctttgctttaatctaaagtgctgacttttttccaatatcactttctcttcttaaagcaaagagcaaatcgcctgtaaaatctacggagcggaca

SEQ ID NO: 568018 - DNA, 120 bp, Artificial Sequence
  ENSG00000170419_10 (sequence is synthesized)
gcaaagttgaccctaaactccaagcaccaccctgcacccactgtactctaattcactacacaaggagcgcctgcttccggaagcataaatgaagaggctatcacatgctttgttgatcat

SEQ ID NO: 568019 - DNA, 120 bp, Artificial Sequence
  ENSG00000170419_11 (sequence is synthesized)
attttctttggcaaaacactgatcttttattttaagagaattaacgtgaagtgatagaacgttttctaatagcaagatctattttttcccttttctttcggcgactaaaatcatctcact

SEQ ID NO: 568020 - DNA, 120 bp, Artificial Sequence
  ENSG00000170419_12 (sequence is synthesized)
ggctacagaacagaagctatcatcagacaaaaccccctttttaggggaagaacaaaactatcaacactgcaagtcaacaaggaggacattactttaaggaataacatgagaaagaaattt

SEQ ID NO: 568021 - DNA, 120 bp, Artificial Sequence
  ENSG00000170419_13 (sequence is synthesized)
ttttattttcccctttttttcttggatttttcttctttttcttgattacagttcttgttcaatggtggcaagtgctggttatggccaatctccgtcaatcctaggaggtttatagaacta

SEQ ID NO: 568022 - DNA, 120 bp, Artificial Sequence
  ENSG00000170419_14 (sequence is synthesized)
cattttgagtgttctatatttcagtgtattttaattcattttgcaattcctgtgtatgcaaacctgataaattctgtaaattgcttatagtatgtgtgctataacttcaaagtagatgta

SEQ ID NO: 568023 - DNA, 120 bp, Artificial Sequence
  ENSG00000170419_15 (sequence is synthesized)
ctgcgaccctcatgcaagctgatttttatcattatatatataaatatatacttaagaatatctgtgtgttgggccaatgaccaactttttttgacgaagcatttgtttttcgttgataat

SEQ ID NO: 568024 - DNA, 120 bp, Artificial Sequence
  ENSG00000170419_16 (sequence is synthesized)
tcatacactgcgtgaattttgtaattcattgtttcacttccacaggtttgacagctgcagatggtctctattgtcctctgcttcattctggaaagtgcatattcaaaattgtatcagtct

SEQ ID NO: 568025 - DNA, 120 bp, Artificial Sequence
  ENSG00000170419_17 (sequence is synthesized)
ctgatcgatgaattaattttgttatgtctgtgctaagttggaatttactatgttcctttatacatggtgtttattgaggtttgagagtctcttgactgtgaagaatgtacactgtctggt

SEQ ID NO: 568026 - DNA, 120 bp, Artificial Sequence
  ENSG00000170419_18 (sequence is synthesized)
tttgacagctatttctgtattattatcattataatcttgtcaaatagaaatgttgcttctagaaaatttgcctaggaggcgaatgtggggaaggtgaagcactcaccataattccctaaa

SEQ ID NO: 568027 - DNA, 120 bp, Artificial Sequence
  ENSG00000170419_19 (sequence is synthesized)
ttcatgttagaacatttcttgctatggttaaaaatgctgcttcctttgacctttatgaatttctgtacctttgtcattctgttacctttgtcattctgttatttgcgctaattatatttt

SEQ ID NO: 568028 - DNA, 120 bp, Artificial Sequence
  ENSG00000170419_20 (sequence is synthesized)
aatgtctcctaattaaaaattaaaatttggttgttggctaaatacaatatgcaaaagatgatggcaggtccccgactaaagaagattaatgtgttcagttttcactggttaagtgaatta

SEQ ID NO: 568029 - DNA, 120 bp, Artificial Sequence
  ENSG00000170419_21 (sequence is synthesized)
taattttaaatattccattcttatttatgtctttatgataattcagactattttattttgaacctgttttctactctggcaaagaaagataggcagaactattagtgttccatatacatt

SEQ ID NO: 568030 - DNA, 120 bp, Artificial Sequence
  ENSG00000170419_22 (sequence is synthesized)
atggaatagataaagcttgagagataaatgacctaagttttccttccagagagactcttccattttctctcattacaaaaccagaagatcagctatgtggggccatcagctcccagccta

SEQ ID NO: 568031 - DNA, 120 bp, Artificial Sequence
  ENSG00000170419_23 (sequence is synthesized)
aggtcctataacccgaagcttgaaggcaatcagtacctctgcttttcaaaggtaaatgcattcattttctttgattcagttataagcaagtatatattttcataatattcttgacattac

SEQ ID NO: 568032 - DNA, 120 bp, Artificial Sequence
  ENSG00000170419_24 (sequence is synthesized)
ctgagaaataatacttcatgctaaatcttttactgccacttttctcattcatttggtttatcatttcagtttaatgagaaaaattaataaaggttttgattgcactattttattaaccta

SEQ ID NO: 568033 - DNA, 120 bp, Artificial Sequence
  ENSG00000170419_25 (sequence is synthesized)
cttccagaagtcaaacatctccacagaccacctctactagtccttcctttcttctctctgtcttcacttttttctactgacccccttcccaccttcccaacgtcacacagaactgtgaag

SEQ ID NO: 568034 - DNA, 120 bp, Artificial Sequence
  ENSG00000170419_26 (sequence is synthesized)
cgcacagcccttccctgtccccgagaaggcggcttgccagcgctgcaggacagccggacagccgggtgccccttgcttgcctcattagatacatacaaatggaagcacatttagagtccc

SEQ ID NO: 568035 - DNA, 120 bp, Artificial Sequence
  ENSG00000170419_27 (sequence is synthesized)
ttaaagctgttctgaatggcattaatgtatgcagtcattcagccaatggaaatgcgtggaagttttaaccttgatgtgggataaaggcttcgtggaatgagcagtaccctgcacaacccc

SEQ ID NO: 568036 - DNA, 120 bp, Artificial Sequence
  ENSG00000170419_28 (sequence is synthesized)
aaacgctccacagaaaggtcagtcgtatagagtagacagatttatgaatggtgatttttaaaatcggagacctagttcagtgcaagtgattatgagaggtgagcaccgagcctgcaccaa

SEQ ID NO: 568037 - DNA, 120 bp, Artificial Sequence
  ENSG00000170419_29 (sequence is synthesized)
ttcactcagagctcaaagcatgtgggtgcaccccgtcagtcccctagtggtgcttcatttccagggcatctgagagctggactctggtttttatcctttctgtatttacacattataaga

SEQ ID NO: 568038 - DNA, 120 bp, Artificial Sequence
  ENSG00000170419_30 (sequence is synthesized)
acaataaatcatgtaatgttggttacattacaaatgcatgttcattttctctacagatttatgtatcgataatgacccaaattaagaggctttcacttaatcaaaatgtaaatgagagag

SEQ ID NO: 568039 - DNA, 120 bp, Artificial Sequence
  ENSG00000170419_31 (sequence is synthesized)
acatgccatatcatgcattttcagcgacccatagctctaagcaggactattctccaagggcttttgattttgaaggagaaacctcagctgcctgtgatgatgataatggaaggatggagg

SEQ ID NO: 568040 - DNA, 120 bp, Artificial Sequence
  ENSG00000170419_32 (sequence is synthesized)
catactgactttatccttctttaggtttttccctaaagaagtattgatgctaccatcagtaatggaaaattacattgctaatatttaaggtctcttcagccattaaattaaaaagtctga

SEQ ID NO: 568041 - DNA, 87 bp, Artificial Sequence
  ENSG00000170419_33 (sequence is synthesized)
atatttaaggtctcttcagccattaaattaaaaagtctgattacttcaccaggatgatttctgagatctcatctcatatcgtcctga

SEQ ID NO: 568042 - DNA, 120 bp, Artificial Sequence
  ENSG00000170419_34 (sequence is synthesized)
tatatatcaaatatatatatacatgtagaaatacatataggtatgtatctttaagtccttgcttgtgaacaatgcttttaaatgtttttaaaatactgtatgccaaaataggttttctct

SEQ ID NO: 568043 - DNA, 120 bp, Artificial Sequence
  ENSG00000170419_35 (sequence is synthesized)
taatgctttacttcctaatggatgtgatttgcagatttgtagggcacttggattagggttctctgagtttgccctgccttataatgtagatgagcaactctcctggcatgccttggtcat

SEQ ID NO: 568044 - DNA, 120 bp, Artificial Sequence
  ENSG00000170419_36 (sequence is synthesized)
tgcaatttatgtcagtctgatgaacagatggcttagcctctctgaagcccaatgtgtgtggatttgtctaatttttttctttataatcttttctgcttaccaaattaaaggacaaactag

SEQ ID NO: 568045 - DNA, 120 bp, Artificial Sequence
  ENSG00000170419_37 (sequence is synthesized)
tatagctggaacatatatgtgtgtatccatacacactaaacacacaggtatatgctaaattgtaatggtaaccaaatgatggttacaactttgtgactattatttgaggaagatttaatg

SEQ ID NO: 568046 - DNA, 120 bp, Artificial Sequence
  ENSG00000170419_38 (sequence is synthesized)
tctttggagtgattttcccctctttcttcacattatcataaaagaagttagacactacaggcaagattacagagtagcctaagcagacaatttacaacctaattagcaagaactccaaat

SEQ ID NO: 568047 - DNA, 120 bp, Artificial Sequence
  ENSG00000170419_39 (sequence is synthesized)
catggaagtgaaattattattatcctacatagactgttccaagttagatgtcatcaatctgttcggcagaataaaatcaaacagattacctattccaagtgaagaattccaagggtagaa

SEQ ID NO: 568048 - DNA, 120 bp, Artificial Sequence
  ENSG00000170419_40 (sequence is synthesized)
tgaaatgctttatctatttctagaatgttttcttagcttttggggtttaataatgcaatctcaaaatatctatttattttattttaatatctcttagcgctgtgattagtgctaaatgat

SEQ ID NO: 568049 - DNA, 120 bp, Artificial Sequence
  ENSG00000170419_41 (sequence is synthesized)
aaactctagatctcttctaacaattatcaaataaaaattactgctctttttgcatcccattgccagccttgctgtcagattcaaaattgctttttctagagttaaaggtagaaggagaga

SEQ ID NO: 568050 - DNA, 120 bp, Artificial Sequence
  ENSG00000170419_42 (sequence is synthesized)
aaaaagtgactcatgaagtctatattcattaaaagtcctgttcactaaacatatctgcttatatcaaagagtaacttgaaatatctgaaaatatttaatttcaatatttccaaccagtga

SEQ ID NO: 568051 - DNA, 120 bp, Artificial Sequence
  ENSG00000170419_43 (sequence is synthesized)
atactggataatatttttatatacttctatcaacattttctaatttcgatttcagaagctggggcagtccagtcactcactttacttatgtgtaagttcctatacttgcacaattattat

SEQ ID NO: 568052 - DNA, 120 bp, Artificial Sequence
  ENSG00000170419_44 (sequence is synthesized)
atatgattcagtatctggggtggatatttatatattatattcactgtaatacccacatcctgatttatgatttttgcctcacgattttcagattatattcaaataaagcttatttcaata

SEQ ID NO: 568053 - DNA, 120 bp, Artificial Sequence
  ENSG00000170421_0 (sequence is synthesized)
gacctaaacctcctgccttccacccacagcatgccctgcctggccccacccaggcctggggtgccttgctcagctccccaatctccaacctcccacaggccattcctgagagctctcctc

SEQ ID NO: 568054 - DNA, 120 bp, Artificial Sequence
  ENSG00000170421_1 (sequence is synthesized)
accaagaagcagcttctccgctccttctaggatctccgcctggttcggcccgcctgcctccactcctgcctctaccatgtccatcagggtgacccagaagtcctacaaggtgtccacctc

SEQ ID NO: 568055 - DNA, 120 bp, Artificial Sequence
  ENSG00000170421_2 (sequence is synthesized)
tggcccccgggccttcagcagccgctcctacacgagtgggcccggttcccgcatcagctcctcgagcttctcccgagtgggcagcagcaactttcgcggtggcctgggcggcggctatgg

SEQ ID NO: 568056 - DNA, 120 bp, Artificial Sequence
  ENSG00000170421_3 (sequence is synthesized)
tggggccagcggcatgggaggcatcaccgcagttacggtcaaccagagcctgctgagcccccttgtcctggaggtggaccccaacatccaggccgtgcgcacccaggagaaggagcagat

SEQ ID NO: 568057 - DNA, 120 bp, Artificial Sequence
  ENSG00000170421_4 (sequence is synthesized)
catggacaacatgttcgagagctacatcaacaaccttaggcggcagctggagactctgggccaggagaagctgaagctggaggcggagcttggcaacatgcaggggctggtggaggactt

SEQ ID NO: 568058 - DNA, 120 bp, Artificial Sequence
  ENSG00000170421_5 (sequence is synthesized)
aacaagtatgaggatgagatcaataagcgtacagagatggagaacgaatttgtcctcatcaagaaggatgtggatgaagcttacatgaacaaggtagagctggagtctcgcctggaaggg

SEQ ID NO: 568059 - DNA, 120 bp, Artificial Sequence
  ENSG00000170421_6 (sequence is synthesized)
tctgtggtgctgtccatggacaacagccgctccctggacatggacagcatcattgctgaggtcaaggcacagtacgaggatattgccaaccgcagccgggctgaggctgagagcatgtac

SEQ ID NO: 568060 - DNA, 120 bp, Artificial Sequence
  ENSG00000170421_7 (sequence is synthesized)
cagatcaagtatgaggagctgcagagcctggctgggaagcacggggatgacctgcggcgcacaaagactgagatctctgagatgaaccggaacatcagccggctccaggctgagattgag

SEQ ID NO: 568061 - DNA, 120 bp, Artificial Sequence
  ENSG00000170421_8 (sequence is synthesized)
ggcctcaaaggccagagggcttccctggaggccgccattgcagatgccgagcagcgtggagagctggccattaaggatgccaacgccaagttgtccgagctggaggccgccctgcagcgg

SEQ ID NO: 568062 - DNA, 120 bp, Artificial Sequence
  ENSG00000170421_9 (sequence is synthesized)
gccaagcaggacatggcgcggcagctgcgtgagtaccaggagctgatgaacgtcaagctggccctggacatcgagatcgccacctacaggaagctgctggagggcgaggagagccggctg

SEQ ID NO: 568063 - DNA, 120 bp, Artificial Sequence
  ENSG00000170421_10 (sequence is synthesized)
gagtctgggatgcagaacatgagtattcatacgaagaccaccagcggctatgcaggtggtctgagctcggcctatgggggcctcacaagccccggcctcagctacagcctgggctccagc

SEQ ID NO: 568064 - DNA, 120 bp, Artificial Sequence
  ENSG00000170421_11 (sequence is synthesized)
tttggctctggcgcgggctccagctccttcagccgcaccagctcctccagggccgtggttgtgaagaagatcgagacacgtgatgggaagctggtgtctgagtcctctgacgtcctgccc

SEQ ID NO: 568065 - DNA, 120 bp, Artificial Sequence
  ENSG00000170421_12 (sequence is synthesized)
aagtgaacagctgcggcagcccctcccagcctacccctcctgcgctgccccagagcctgggaaggaggccgctatgcagggtagcactgggaacaggagacccacctgaggctcagccct

SEQ ID NO: 568066 - DNA, 120 bp, Artificial Sequence
  ENSG00000170421_13 (sequence is synthesized)
agccctcagcccacctggggagtttactacctggggaccccccttgcccatgcctccagctacaaaacaattcaattgctttttttttttggtccaaaataaaacctcagctagctctgc

SEQ ID NO: 568067 - DNA, 120 bp, Artificial Sequence
  ENSG00000170421_14 (sequence is synthesized)
gtaaagctctcaaccctgtccccttccccctctctcctgggaaagagccctcccatgcctagctgctgctcttagggaccctgtggctaggtgcgcggatggaaatccaggatctccgcc

SEQ ID NO: 568068 - DNA, 120 bp, Artificial Sequence
  ENSG00000170421_15 (sequence is synthesized)
atgctgtccacttcctctgtaaagctctcaaccctgtccccttccccctctctcctgggaaagagccctcccatgcctagctgctgctcttagggaccctgtggctaggtgcgcggatgg

SEQ ID NO: 568069 - DNA, 120 bp, Artificial Sequence
  ENSG00000170421_16 (sequence is synthesized)
aaatccaggtatgcccaaccccctcccggtggagtaggggttgggtggttatggaatgacggaaagaggcaaaggagtgtataattggagggtcagacaaggctgggagttgaggtccct

SEQ ID NO: 568070 - DNA, 120 bp, Artificial Sequence
  ENSG00000170421_17 (sequence is synthesized)
ataattggagggtcagacaaggctgggagttgaggtccctcctaccccttacctgagccctcaggtcctcgatgatcttgaagtaatggctccagtctctgacctggggtcccttcttct

SEQ ID NO: 568071 - DNA, 120 bp, Artificial Sequence
  ENSG00000170421_18 (sequence is synthesized)
gtaagaggccaggcggtcgttcaggctttgcatggtctccttctcgttctggatgcctcccattcctgccagacccccggctatcccggtggccaggcccccggaccccatgccgcccct

SEQ ID NO: 568072 - DNA, 120 bp, Artificial Sequence
  ENSG00000170421_19 (sequence is synthesized)
gaagctggtggagcgggacacggagatccgggaaccagagcccccagcgcctgcatagacgctggccgcgctgctgaccggccgggcgccgtagctgggcgcctggacagagcccaggga

SEQ ID NO: 568073 - DNA, 120 bp, Artificial Sequence
  ENSG00000170421_20 (sequence is synthesized)
acaagtgagcaactcccaccctccacccaactgaagtcaccgtgctctcctccaccccttgggaccttgggactaagtccccatggccctctgttgtgggaagtgcagtcctatctaatt

SEQ ID NO: 568074 - DNA, 120 bp, Artificial Sequence
  ENSG00000170421_21 (sequence is synthesized)
agggtgaccacctgatgaggtttgctcggaacagtctgtgtttatgcccaggttcctagcacaattgttgatagtacccaccccctttcaatctcaactgtctggatttgaagaacaaat

SEQ ID NO: 568075 - DNA, 120 bp, Artificial Sequence
  ENSG00000170421_22 (sequence is synthesized)
tatgtgtcaatgttgacatggtaaacctgagacgggagagataggcagcctgtgggcctcacttttgtacttaacattctggcccctctttagtcttgacccttgacctctagcaaactc

SEQ ID NO: 568076 - DNA, 120 bp, Artificial Sequence
  ENSG00000170421_23 (sequence is synthesized)
tagaaagttctgtctgaggtctcatgtcaggccctgctgttaacactctcaaggtgtccaatccgatgtgtattcatggatttggagagagatttcctgcttcccacgggctaagggagg

SEQ ID NO: 568077 - DNA, 120 bp, Artificial Sequence
  ENSG00000170421_24 (sequence is synthesized)
ggtgagggtggagagggcagctggggaaggcagaaggaccagccttctcatatcctgcatctctgtgaactgaattttcctgattttcacaacgcccctgtctcccaaaagaccaagggc

SEQ ID NO: 568078 - DNA, 120 bp, Artificial Sequence
  ENSG00000170421_25 (sequence is synthesized)
aacctcccttttgccttcatcctctaattgtaagtcttttcctcacaggtatgaggatgagatcaataagcgtacagagatggagaacgaatttgtcctcatcaagaaggtgagggagtc

SEQ ID NO: 568079 - DNA, 120 bp, Artificial Sequence
  ENSG00000170421_26 (sequence is synthesized)
atttatgtaaacatttgggtgcacagaaaggtagacaaggatggagtggtaggtgcatttggacagaactcttgacatcggtgttgggacatggttcagaaaacagagcagtagaactgg

SEQ ID NO: 568080 - DNA, 120 bp, Artificial Sequence
  ENSG00000170421_27 (sequence is synthesized)
agatctggctctagaaggctccctagagaaggaggtggaagagggtgtgttgcaggaagcagaggtgaaggtgtgtgggctgagaatgcacatgtgatgggcagaggctgggctggaaga

SEQ ID NO: 568081 - DNA, 120 bp, Artificial Sequence
  ENSG00000170421_28 (sequence is synthesized)
tcaatccacaaagtgggcaactagaaagtcctgtgaccaggccattgggtggaccttgggagccccttggttggggttgggtgtggaaacccagctcaggctcccctctcctcatccccc

SEQ ID NO: 568082 - DNA, 68 bp, Artificial Sequence
  ENSG00000170421_29 (sequence is synthesized)
ccaggctcctcactctgtccaggtggaggaggtgctggcgagtttgaaatttgggagtctttgggcgg

SEQ ID NO: 568083 - DNA, 70 bp, Artificial Sequence
  ENSG00000170421_30 (sequence is synthesized)
gggggtctggtggtgtgcgggtggaatggcctgtgagtccctctagctgtccttaacctgcagcccaaat

SEQ ID NO: 568084 - DNA, 120 bp, Artificial Sequence
  ENSG00000170421_31 (sequence is synthesized)
ctgtgagtccctctagctgtccttaacctgcagcccaaattatccacttgtggaggggatcttgggggcatcctggagccccaggagtcccggggaagaaaggctgggagctggagaaga

SEQ ID NO: 568085 - DNA, 120 bp, Artificial Sequence
  ENSG00000170421_32 (sequence is synthesized)
ggaggagaagcaatgcccagcctcatagctgcttgcttacacactcacaccccagctgcacctggctcccaaacactcctcgcctgcccacgtttcctcacacacactcacacccgaatc

SEQ ID NO: 568086 - DNA, 120 bp, Artificial Sequence
  ENSG00000170421_33 (sequence is synthesized)
atacagaggtgtgctctcaaatgcacacacacatacattcactcagcaaataggtgcagactccccaaaacaaacccagtctctgagccccctccaccaccctcccctctcccgacctca

SEQ ID NO: 568087 - DNA, 120 bp, Artificial Sequence
  ENSG00000170421_34 (sequence is synthesized)
ctcccaagggccttgcctcagtggaacactgtgatttggacagggaatgcatcctgacttctgcacaccggtatatcacctttcctgcatccttaattaaacaaatcctgagcatttaca

SEQ ID NO: 568088 - DNA, 120 bp, Artificial Sequence
  ENSG00000170421_35 (sequence is synthesized)
attcaaccagtatgcattcagcacctactgtgagccaggcccagttctaggagctgggagagaagggcggtgacaaaagagaccaaaaatctctcacagagatgataatgtgtcccacat

SEQ ID NO: 568089 - DNA, 64 bp, Artificial Sequence
  ENSG00000170421_36 (sequence is synthesized)
gggtggatcacttgaggtcaagagttcgatgccactgcactccagcctccagcctgaccaacat

SEQ ID NO: 568090 - DNA, 86 bp, Artificial Sequence
  ENSG00000170421_37 (sequence is synthesized)
gaggttgcagtgagccaagatcgtgccgtcgcgctccagcctgggcaaccagagcgaaactctgaaatgtgtcctacatcgcatgg

SEQ ID NO: 568091 - DNA, 120 bp, Artificial Sequence
  ENSG00000170421_38 (sequence is synthesized)
tcgcatggggcctgagaggacaggcaggcactcctaggaccatcatagcagcgacccagccctggtggccagtgcccctcccctcttttctaggacttttctccaagccagtccttcccc

SEQ ID NO: 568092 - DNA, 120 bp, Artificial Sequence
  ENSG00000170421_39 (sequence is synthesized)
tgtccccccttgtaagggctgtctggattagaagcctggccccaggggactgcatcctccaagatgctctccccagcctctgtgtgagaaggatggaggtagggaggctttcatgctgcc

SEQ ID NO: 568093 - DNA, 120 bp, Artificial Sequence
  ENSG00000170421_40 (sequence is synthesized)
tgccccctgaagctgaatgaccatccctgctgaatgaagtgttggggggaacccttaggtgtttggccttcaagtttgtcagctccagcagctcgtttttctggcagggcctggtatgac

SEQ ID NO: 568094 - DNA, 120 bp, Artificial Sequence
  ENSG00000170421_41 (sequence is synthesized)
acatttggctgtgttctttgctctggagtggacctattgattcttatcgagctaccagctgagggggaaggggaggacaaatagtagggcagacctgggagagaagggaccctggaaaag

SEQ ID NO: 568095 - DNA, 120 bp, Artificial Sequence
  ENSG00000170421_42 (sequence is synthesized)
cctggccagtggacctgccaggtgggaggcagagcacagataaagagcctgagcctggattgttcctgatctgtcacctaatggtggggagagccccacagtgctcaatgggagccagcc

SEQ ID NO: 568096 - DNA, 120 bp, Artificial Sequence
  ENSG00000170421_43 (sequence is synthesized)
agggggcagtcagggtggaagctggccaggggagggtcggggcctgctgaaggctgggaggcaaacgggatgcaaaataacatacaaatgaatgcccactggttttgcatacaaggcttc

SEQ ID NO: 568097 - DNA, 120 bp, Artificial Sequence
  ENSG00000170421_44 (sequence is synthesized)
tgggaggtaagaggttccagtcagaggggtctctcctgctttcacctttatattcccccactggattccagaactgtcaagttgggcagtattttataataaagtatgtggagtcaacaa

SEQ ID NO: 568098 - DNA, 120 bp, Artificial Sequence
  ENSG00000170421_45 (sequence is synthesized)
gtgtggggtgtgtgtgtgtgtgtgtgtgtatgcacgcgtgcattgtgaagagagcttgtctgtgtgtctgtctttttaagtttgtctgtcctccaaggagggggcttctgggtctctctg

SEQ ID NO: 568099 - DNA, 120 bp, Artificial Sequence
  ENSG00000170421_46 (sequence is synthesized)
tttgtctgtcctccaaggagggggcttctgggtctctctgtccttctgggtaggggtcctatgtgcctgtctttctgtgagcctgggtgtctctcctagagaaggatggggaagaaactg

SEQ ID NO: 568100 - DNA, 120 bp, Artificial Sequence
  ENSG00000170421_47 (sequence is synthesized)
tacatctgtcctcccagtaggtggtcacccccttccctgggtcagggctatgtcacctgtccctctcctcaaggggatctggctgtcatctgttggtcctctgagttcagtttcatccag

SEQ ID NO: 568101 - DNA, 120 bp, Artificial Sequence
  ENSG00000170421_48 (sequence is synthesized)
tggggtcctgttgttctgggccaagaagggctaggagttggtcctgacaccccatttgtctgggtacaggctggagtctgggatgcagaacatgagtattcatacgaagaccaccagcgg

SEQ ID NO: 568102 - DNA, 120 bp, Artificial Sequence
  ENSG00000170421_49 (sequence is synthesized)
gctaaccaggtgcctggggtctggagaccttactgcttgaggagtgaattaagagaaaagactgcttgctttcctccagactttgagccctggcctgatgtagacctttttgctctctcc

SEQ ID NO: 568103 - DNA, 120 bp, Artificial Sequence
  ENSG00000170421_50 (sequence is synthesized)
actttcacacagcaggagccaggccgggttttgcagccctgggactccgctgcctgaggggccccgggcccccggcggccccgaggattgggcccttcacgctgactggctcctgggagg

SEQ ID NO: 568104 - DNA, 120 bp, Artificial Sequence
  ENSG00000170421_51 (sequence is synthesized)
gctggagactctgggccaggagaagctgaagctggaggcggagcttggcaacatgcaggggctggtggaggacttcaagaacaagatgtggatgaagcttacatgaacaaggtagagctg

SEQ ID NO: 568105 - DNA, 120 bp, Artificial Sequence
  ENSG00000170423_0 (sequence is synthesized)
agaaactcacacaccttgacaatctgtctgtccgtctgcagctgcgtgactgtctgtctctgccatgtctctctccccatgccgggcccagaggggcttcagcgctcgctcagcctgttc

SEQ ID NO: 568106 - DNA, 120 bp, Artificial Sequence
  ENSG00000170423_1 (sequence is synthesized)
tgctcgctcaaggggccgcagcaggggaggcttcagcagcaggggcggcttcagcagcaggagccttaattcctttggggggtgcctggaaggctctcgtgggagtacctgggggtcagg

SEQ ID NO: 568107 - DNA, 120 bp, Artificial Sequence
  ENSG00000170423_2 (sequence is synthesized)
gggtaggctgggggtgcggtttggggagtggagtggtgggcctgggctctccctgtgccctccggggggcatccaagaagtgaccatcaaccagaatctgctgaccccactgaagattga

SEQ ID NO: 568108 - DNA, 120 bp, Artificial Sequence
  ENSG00000170423_3 (sequence is synthesized)
gatcgatccccagttccaggtggtgcggacgcaggagacccaggagatcagaaccctcaacaaccagtttgcttccttcattgacaaggtgcggttcctggagcagcagaacaaggtcct

SEQ ID NO: 568109 - DNA, 120 bp, Artificial Sequence
  ENSG00000170423_4 (sequence is synthesized)
ggagacgaagtggcatctgctgcagcaacaggggttgagtggcagccagcagggcctggagcctgtctttgaggcctgcctggatcagctcaggaagcagctggagcagctccagggaga

SEQ ID NO: 568110 - DNA, 120 bp, Artificial Sequence
  ENSG00000170423_5 (sequence is synthesized)
acgaggggctctggatgctgagttgaaggcctgccgggaccaggaggaggagtataagtccaagtatgaggaggaggcccacaggcgtgccacacttgagaacgactttgtggtcctcaa

SEQ ID NO: 568111 - DNA, 120 bp, Artificial Sequence
  ENSG00000170423_6 (sequence is synthesized)
gaaggatgtggatggggttttcctgagcaagatggagttggagggcaagctggaggctctgagagagtacctctacttcttgaagcatctgaatgaagaagagctgggccagctccagac

SEQ ID NO: 568112 - DNA, 120 bp, Artificial Sequence
  ENSG00000170423_7 (sequence is synthesized)
ccaggccagcgacacgtctgtggtgctgtccatggacaacaaccgctacctggacttcagcagcatcatcactgaggtccgcgcccggtacgaggagatcgcccggagcagcaaggctga

SEQ ID NO: 568113 - DNA, 120 bp, Artificial Sequence
  ENSG00000170423_8 (sequence is synthesized)
ggctgaggccttgtaccagaccaagtaccaggaacttcaggtgtctgcccagcttcatggggacaggatgcaggaaacgaaagtccagatctctcagctacaccaagagattcagaggct

SEQ ID NO: 568114 - DNA, 120 bp, Artificial Sequence
  ENSG00000170423_9 (sequence is synthesized)
gcagagtcagactgagaacctcaagaagcagaacgccagcctgcaggccgccatcactgatgctgagcagcgtggggagctggccctcaaggacgctcaggccaaggtggacgagctgga

SEQ ID NO: 568115 - DNA, 120 bp, Artificial Sequence
  ENSG00000170423_10 (sequence is synthesized)
ggctgctctgaggatggccaagcagaacctggcccggctgctgtgcgagtaccaggagctgacgagcacgaagctttccctggatgtggagattgccacttaccgcaggctgctggaggg

SEQ ID NO: 568116 - DNA, 120 bp, Artificial Sequence
  ENSG00000170423_11 (sequence is synthesized)
cgaggagtgcaggatgtctggggagtgcaccagccaggtcactatctcctcggtgggaggcagcgctgtcatgtctggaggagttggtggaggcttggggagcacttgtggactcggtag

SEQ ID NO: 568117 - DNA, 120 bp, Artificial Sequence
  ENSG00000170423_12 (sequence is synthesized)
acatcattctgggctctgggaaggaccctgttttggattcctgctctgtgtctggctccagcgctggctccagctgccacaccatcctgaagaagacagttgagtcgagtctgaagacat

SEQ ID NO: 568118 - DNA, 120 bp, Artificial Sequence
  ENSG00000170423_13 (sequence is synthesized)
ccatcacctactgagcgacccagcagccacctccttcctgaacacatttggcccactccccccatcagccggctctgcaaggccaactccgtgtccgctgcccacagcccaagccagccc

SEQ ID NO: 568119 - DNA, 120 bp, Artificial Sequence
  ENSG00000170423_14 (sequence is synthesized)
acagcggatgctgcaaaaatcaataaagtctcccctcctgctgttctgaatgctctaagtgcttgcacacctcacccagcaaaacaaaagctgtgtggctccccagcttcctctcctcgg

SEQ ID NO: 568120 - DNA, 120 bp, Artificial Sequence
  ENSG00000170423_15 (sequence is synthesized)
aaggcaattgtggcatatctgtgtccagacgtgttctattggtatctcactccacatcccagccactctatcaagggatccttcaagctctccagtgtgttccttggggtgccctccatc

SEQ ID NO: 568121 - DNA, 120 bp, Artificial Sequence
  ENSG00000170423_16 (sequence is synthesized)
tcccacaactccactgatgttttagctgtgcttgtagctcacttcctcatcaactgcctgttttaagaggttctagtcctgactggggcagcccccttccttcttgttcctccttcttcc

SEQ ID NO: 568122 - DNA, 120 bp, Artificial Sequence
  ENSG00000170423_17 (sequence is synthesized)
tgactgtgcaccaaaattttctccttttaggaaccttctctaattcccatgtctaaactactgggcccttcctgtccctggcagtctggctgcacctgttgctgtcctgggtgctatgtc

SEQ ID NO: 568123 - DNA, 120 bp, Artificial Sequence
  ENSG00000170423_18 (sequence is synthesized)
tgtctggctctggtaagggactcagcttctctattagcctggcactcctgcatccaggatgaggatgtgctcagcttgtgcctgggggctctgatggagattggggttcaaactctgccc

SEQ ID NO: 568124 - DNA, 120 bp, Artificial Sequence
  ENSG00000170423_19 (sequence is synthesized)
ctacccccttatctgttggctctcatcttatccttgggcaagtgtgaacatgaggctggaaacttctcctccttcctctccttcaggaagctctgcaggaagccaggagtgtgggaatca

SEQ ID NO: 568125 - DNA, 120 bp, Artificial Sequence
  ENSG00000170423_20 (sequence is synthesized)
ggtggggtgccaggaggggctggaaggatcaccttttctacacacccccagcagcctcatgggtgcctgcagttgctctttccccattctcgctttccagacccaggtgggggacctggc

SEQ ID NO: 568126 - DNA, 120 bp, Artificial Sequence
  ENSG00000170423_21 (sequence is synthesized)
tcaaccccaaactccatagtctgggctgcaggaggtcacactacgcctctccttgctttagagggagggcagacctttcctcagattcatgaatcgctccatccaaattatgcaagaagg

SEQ ID NO: 568127 - DNA, 120 bp, Artificial Sequence
  ENSG00000170423_22 (sequence is synthesized)
cttttcagctttgtgtgaaggagaccagagccggtgaggatgtggcttgaatcccagctctgctgtttcctagtggtgtgaccttgatcaagcagcttgacctcttcagttacctcatct

SEQ ID NO: 568128 - DNA, 120 bp, Artificial Sequence
  ENSG00000170423_23 (sequence is synthesized)
gtaaaaagagattaataataatatgtacctcacagggctgtgtggcgacagtgccactaggatcccagaaggaaactaaattcatccaaggtagttcaattaaattgactttttgaaaaa

SEQ ID NO: 568129 - DNA, 120 bp, Artificial Sequence
  ENSG00000170423_24 (sequence is synthesized)
caagaggggaagtctgttagggtggcttagattctgggtcattcagtcacttgacaaccaattactgaaaacttactatgtgaattgctaggtcctggggatacatcaatgaataaccag

SEQ ID NO: 568130 - DNA, 120 bp, Artificial Sequence
  ENSG00000170425_0 (sequence is synthesized)
gggcaatttgttagttatccgccgccaccaagacgcggcacggcgcctggaccggaggggccccgcgcgggcgcgaactttgggctcgggcgagtgggtggtgctccgcccagcccgaga

SEQ ID NO: 568131 - DNA, 80 bp, Artificial Sequence
  ENSG00000170425_1 (sequence is synthesized)
cccgacccgtgggtcccggccaccagcgccccagccccgaggctcagaagcggcaggcggaggcgcggtccgggcgctat

SEQ ID NO: 568132 - DNA, 120 bp, Artificial Sequence
  ENSG00000170425_2 (sequence is synthesized)
ctatggccatgcccggcgggtctcacgcggctgcccctcgcccggcgcgccttcggtagggggcgcccggggcccagctggcccggccatgctgctggagacacaggacgcgctgtacgt

SEQ ID NO: 568133 - DNA, 120 bp, Artificial Sequence
  ENSG00000170425_3 (sequence is synthesized)
acgtggcgctggagctggtcatcgccgcgctttcggtggcgggcaacgtgctggtgtgcgccgcggtgggcacggcgaacactctgcagacgcccaccaactacttcctggtgtccctgg

SEQ ID NO: 568134 - DNA, 120 bp, Artificial Sequence
  ENSG00000170425_4 (sequence is synthesized)
ctgcggccgacgtggccgtggggctcttcgccatcccctttgccatcaccatcagcctgggcttctgcactgacttctacggctgcctcttcctcgcctgcttcgtgctggtgctcacgc

SEQ ID NO: 568135 - DNA, 120 bp, Artificial Sequence
  ENSG00000170425_5 (sequence is synthesized)
agagctccatcttcagccttctggccgtggcagtcgacagatacctggccatctgtgtcccgctcaggtataaaagtttggtcacggggacccgagcaagaggggtcattgctgtcctct

SEQ ID NO: 568136 - DNA, 120 bp, Artificial Sequence
  ENSG00000170425_6 (sequence is synthesized)
gggtccttgcctttggcatcggattgactccattcctggggtggaacagtaaagacagtgccaccaacaactgcacagaaccctgggatggaaccacgaatgaaagctgctgccttgtga

SEQ ID NO: 568137 - DNA, 120 bp, Artificial Sequence
  ENSG00000170425_7 (sequence is synthesized)
tgggtgtgttctgcccccactgcttataatgctggtgatctacattaagatcttcctggtggcctgcaggcagcttcagcgcactgagctgatggaccactcgaggaccaccctccagcg

SEQ ID NO: 568138 - DNA, 120 bp, Artificial Sequence
  ENSG00000170425_8 (sequence is synthesized)
ggagatccatgcagccaagtcactggccatgattgtggggatttttgccctgtgctggttacctgtgcatgctgttaactgtgtcactcttttccagccagctcagggtaaaaataagcc

SEQ ID NO: 568139 - DNA, 120 bp, Artificial Sequence
  ENSG00000170425_9 (sequence is synthesized)
caagtgggcaatgaatatggccattcttctgtcacatgccaattcagttgtcaatcccattgtctatgcttaccggaaccgagacttccgctacacttttcacaaaattatctccaggta

SEQ ID NO: 568140 - DNA, 120 bp, Artificial Sequence
  ENSG00000170425_10 (sequence is synthesized)
tcttctctgccaagcagatgtcaagagtgggaatggtcaggctggggtacagcctgctctcggtgtgggcctatgatctaggctctcgcctcttccaggagaagatacaaatccacaaga

SEQ ID NO: 568141 - DNA, 120 bp, Artificial Sequence
  ENSG00000170425_11 (sequence is synthesized)
aacaaagaggacacggctggttttcattgtgaaagatagctacacctcacaaggaaatggactgcctctcttgagcacttccctggagctaccacgtatctagctaatatgtatgtgtca

SEQ ID NO: 568142 - DNA, 120 bp, Artificial Sequence
  ENSG00000170425_12 (sequence is synthesized)
gtagtaggctccaaggattgacaaatatatttatgatctattcagctgcttttactgtgtggattatgccaacagcttgaatggattctaacagactcttttgtttttaaaagtctgcct

SEQ ID NO: 568143 - DNA, 120 bp, Artificial Sequence
  ENSG00000170425_13 (sequence is synthesized)
tgtttatggtggaaaattactgaaactattttactgtgaaacagtgtgaactattataatgcaaatactttttaacttagaggcaatggaaaaataaaagttgactgtactaaaaatgta

SEQ ID NO: 568144 - DNA, 120 bp, Artificial Sequence
  ENSG00000170425_14 (sequence is synthesized)
tgtataacaaagccaattttaccacagttgatactgttaaaagaaaaacttcggctgaattcaatttaaaagagcttaattgagcaaagaatgattcacaaattgtgcagcctgctgagc

SEQ ID NO: 568145 - DNA, 120 bp, Artificial Sequence
  ENSG00000170425_15 (sequence is synthesized)
caaagcaggctcagagactccagtgcagtcacgtggtggaagataatttatggacagaaaaaagaaagtgatggacagaaaaaggaaaagtgacgtacagaaaatggaagtgaggaacag

SEQ ID NO: 568146 - DNA, 120 bp, Artificial Sequence
  ENSG00000170425_16 (sequence is synthesized)
aaacagctggattggttatagctcagcatttgccctttttgaacagggttcgaacagttggccacatttgattggccaaaagtcgaggattggcatgagtgcaggctatagtctgtttac

SEQ ID NO: 568147 - DNA, 89 bp, Artificial Sequence
  ENSG00000170425_17 (sequence is synthesized)
agtcgaggattggcatgagtgcaggctatagtctgtttacacgtccacttgttgtagtccacgatgtacagagaaacctttaggccaaa

SEQ ID NO: 568148 - DNA, 120 bp, Artificial Sequence
  ENSG00000170425_18 (sequence is synthesized)
gacatatacttcaagtcacagtttgagaacccaccgaggacattgaggacttacagtactcccttaaggcttccccacctcttgtcattggccatcctgtgtcactaaacagaaaggagt

SEQ ID NO: 568149 - DNA, 120 bp, Artificial Sequence
  ENSG00000170425_19 (sequence is synthesized)
tgctaagtcaagaatgaagatcttactgagttttctagagcaaagctgctcatccctgcttgcatgtctttagtattgagggtaaaggccttagtgccctggaaggtgaactttagaggt

SEQ ID NO: 568150 - DNA, 120 bp, Artificial Sequence
  ENSG00000170425_20 (sequence is synthesized)
tgttaaagggtcatggaaaaaagaggaggtggggtcttggattgtggttgcagagcgctataaactgaccgtaacagatggtattcttttaaacaggtataaaagtttggtcacggggac

SEQ ID NO: 568151 - DNA, 120 bp, Artificial Sequence
  ENSG00000170426_0 (sequence is synthesized)
cctagatttgttgcaagctgtgggaggaaggagagttcttcttccaggtggtttcctgcagactgcctgctagggctcagaggaccagcttcttccctgctgtctcctgagcccagtccc

SEQ ID NO: 568152 - DNA, 120 bp, Artificial Sequence
  ENSG00000170426_1 (sequence is synthesized)
tcttggccatcacattccccttgccctatggcggccctcacagacctctcatttatgtatcgctggttcaagaactgcaatctggttggcaacctctcagagaagtacgtcttcatcaca

SEQ ID NO: 568153 - DNA, 120 bp, Artificial Sequence
  ENSG00000170426_2 (sequence is synthesized)
ggctgtgactctggcttcgggaacctgctggccaaacagctggttgatcggggcatgcaggtgctggctgcttgcttcactgaggagggatcccagaaacttcagcgggatacctcctat

SEQ ID NO: 568154 - DNA, 120 bp, Artificial Sequence
  ENSG00000170426_3 (sequence is synthesized)
cggctgcagaccaccctactggatgtcaccaagagcgaaagcatcaaggcggcggcccagtgggtgagggacaaagtgggcgaacaaggcctctgggccctggtgaacaatgctggtgtg

SEQ ID NO: 568155 - DNA, 120 bp, Artificial Sequence
  ENSG00000170426_4 (sequence is synthesized)
ggcctgcccagtggtcccaacgaatggctgaccaaggatgactttgtgaaggtgattaatgtgaacctggtgggactgatcgaagtgacccttcacatgctgcccatggtcaagagagcc

SEQ ID NO: 568156 - DNA, 120 bp, Artificial Sequence
  ENSG00000170426_5 (sequence is synthesized)
cggggcagggttgtcaacatgtccagctctggtggtcgtgtggctgtcattggtggtggctactgcgtctccaagtttggcgttgaggccttctctgacagcataaggcgtgagctctac

SEQ ID NO: 568157 - DNA, 120 bp, Artificial Sequence
  ENSG00000170426_6 (sequence is synthesized)
tactttggggtgaaagtctgcatcattgagccagggaactatcggacagccattctcggcaaggagaacctggagtcacgcatgcgaaagctttgggagaggctgcctcaggagacccgg

SEQ ID NO: 568158 - DNA, 120 bp, Artificial Sequence
  ENSG00000170426_7 (sequence is synthesized)
ttgtttcccggagccctcgcatccgctacaaccctggcctggatgccaaactcctctacatccctctggctaagttgcccacccctgtgacagatttcatcctaagccggtaccttccaa

SEQ ID NO: 568159 - DNA, 120 bp, Artificial Sequence
  ENSG00000170426_8 (sequence is synthesized)
ggccagcggacagtgtctaaactggggaggatcaatgggtcagtggagcctagaagtgggggaggaaggaaggaccgtggggtcacaaaaggtggtatcggttatcctgggggcattggc

SEQ ID NO: 568160 - DNA, 120 bp, Artificial Sequence
  ENSG00000170426_9 (sequence is synthesized)
tgcaaaggaagcttggctcagctgacacccactgctgtcgaatttaccagtaacttctaacagaaggtgaatgcctcttcccaccctctgggaccccacagaaacctgaggtggtctttg

SEQ ID NO: 568161 - DNA, 120 bp, Artificial Sequence
  ENSG00000170426_10 (sequence is synthesized)
caggttcagcgatctgcagcaatagctccaaggacgtctgtcacccaatcaggatacagctttttctggtcctggaaaagtcatggagaagaaaaccagctcctgtggaatcatgagccc

SEQ ID NO: 568162 - DNA, 120 bp, Artificial Sequence
  ENSG00000170426_11 (sequence is synthesized)
ctttcagttatcactgccactgagaaatactgtgggataatcttgcctccaggagaatctaaccaccttcctaatgggtccctcaatatgcataacttcattcacataacccattactga

SEQ ID NO: 568163 - DNA, 120 bp, Artificial Sequence
  ENSG00000170426_12 (sequence is synthesized)
agtatgcggtagggcagatagggagtgcaagattaaatcagacaaaagtttaaaatattttctttctttttagattcttctatctataggttattgggatccacatgaaataacattcat

SEQ ID NO: 568164 - DNA, 120 bp, Artificial Sequence
  ENSG00000170426_13 (sequence is synthesized)
ttatttaatcaccattaatttttcaaatatttattgagtgcctactacctaccgggcactttgtaggtgctgggggaatataaagatgattaaatcatggtcttggttttttattgttta

SEQ ID NO: 568165 - DNA, 120 bp, Artificial Sequence
  ENSG00000170430_0 (sequence is synthesized)
ctcggccccgcccccgcgccccggatatgctgggacagcccgcgcccctagaacgctttgcgtcccgacgcccgcaggtcctcgcggtgcgcaccgtttgcgacttggtacttggaaaaa

SEQ ID NO: 568166 - DNA, 120 bp, Artificial Sequence
  ENSG00000170430_1 (sequence is synthesized)
tggacaaggattgtgaaatgaaacgcaccacactggacagccctttggggaagctggagctgtctggttgtgagcagggtctgcacgaaataaagctcctgggcaaggggacgtctgcag

SEQ ID NO: 568167 - DNA, 120 bp, Artificial Sequence
  ENSG00000170430_2 (sequence is synthesized)
ctgatgccgtggaggtcccagcccccgctgcggttctcggaggtccggagcccctgatgcagtgcacagcctggctgaatgcctatttccaccagcccgaggctatcgaagagttccccg

SEQ ID NO: 568168 - DNA, 120 bp, Artificial Sequence
  ENSG00000170430_3 (sequence is synthesized)
tgccggctcttcaccatcccgttttccagcaagagtcgttcaccagacaggtgttatggaagctgctgaaggttgtgaaattcggagaagtgatttcttaccagcaattagcagccctgg

SEQ ID NO: 568169 - DNA, 120 bp, Artificial Sequence
  ENSG00000170430_4 (sequence is synthesized)
caggcaaccccaaagccgcgcgagcagtgggaggagcaatgagaggcaatcctgtccccatcctcatcccgtgccacagagtggtctgcagcagcggagccgtgggcaactactccggag

SEQ ID NO: 568170 - DNA, 120 bp, Artificial Sequence
  ENSG00000170430_5 (sequence is synthesized)
gggagctcaggtctggcaggggcctggctcaagggagcgggagctacctcgggctccccgcctgctggccgaaactgagtatgtgcagtaggatggatgtttgagcgacacacacgtgta

SEQ ID NO: 568171 - DNA, 120 bp, Artificial Sequence
  ENSG00000170430_6 (sequence is synthesized)
acactgcatcggatgcggggcgtggaggcaccgctgtattaaaggaagtggcagtgtcctgggaacaagcgtgtctgccctttctgtttccatattttacagcaggatgagttcagacgc

SEQ ID NO: 568172 - DNA, 120 bp, Artificial Sequence
  ENSG00000170430_7 (sequence is synthesized)
ccgcggtcctgcacacatttgtttccttctctaacgctgcccttgctctatttttcatgtccattaaaacaggccaagtgagtgtggaaggcctggctcatgttgggccacagcccagga

SEQ ID NO: 568173 - DNA, 120 bp, Artificial Sequence
  ENSG00000170430_8 (sequence is synthesized)
tggggcagtctggcaccctcaggccacagacggctgccatagccgctgtccagggccagctaaggcccatcccaggccgtccacactagaaagctggccctgccccatccccaccatgcc

SEQ ID NO: 568174 - DNA, 120 bp, Artificial Sequence
  ENSG00000170430_9 (sequence is synthesized)
tcccttcctggctgtgtccatggctgtgatggcattctccactcagcagttcctagcatcccacacccaggtctcactgaaagaaaggggaacaggccatggcagtcagtgcttacagag

SEQ ID NO: 568175 - DNA, 120 bp, Artificial Sequence
  ENSG00000170430_10 (sequence is synthesized)
gacagagagctctctggacacgggttcgatggagcttgcacctctctgagagctgaagtcaagtctcaccctctctccatactccctggcctagtgtgctctgggcagcaggtaggaagg

SEQ ID NO: 568176 - DNA, 120 bp, Artificial Sequence
  ENSG00000170430_11 (sequence is synthesized)
gacagggacctctcatctcaagggctgccccaaagggccctcagggaccatgggcctgttaggaccccagcaccccagtgtcgatcctggaagtcaaaggtcacgactgtggggggccag

SEQ ID NO: 568177 - DNA, 120 bp, Artificial Sequence
  ENSG00000170430_12 (sequence is synthesized)
ctcatgtcactgatggcagcaggcagggtttccagcatgggcggtgcgctgctgtctgatacttcattattgtgttgtcatcctagctgtataattaactatatccaaaagccggaaggg

SEQ ID NO: 568178 - DNA, 120 bp, Artificial Sequence
  ENSG00000170430_13 (sequence is synthesized)
aaacctgtagctctgcatatggagaaataaaacagagcatatgatgtatagagaaaatgaactgcacccagctgtgcactagagcgccatgttcttacccagcattccttgccacggtgt

SEQ ID NO: 568179 - DNA, 120 bp, Artificial Sequence
  ENSG00000170430_14 (sequence is synthesized)
gaaccacagcagggaagctcgcatggttctacacgtcaccgaggcctggatgaaaatgtggcctcacgatgtgtatggttgggacccgccttctatttcattttatcttaacaccaacga

SEQ ID NO: 568180 - DNA, 120 bp, Artificial Sequence
  ENSG00000170430_15 (sequence is synthesized)
aagaaaaccgatttcagacgtttttcgctgatttatgatttattatatccctttctggcatcagccaaaatctcggtttttcctatgacatgaagtgatgtgactcttaccccgttgtct

SEQ ID NO: 568181 - DNA, 120 bp, Artificial Sequence
  ENSG00000170430_16 (sequence is synthesized)
taactcttggtatttttgaagcaggataagtcacacagcgggtcacgtagacacgtgctgttttgtgggacaggccctgggcctccttgctcctggcaggcctcaggtgccgcacgccgc

SEQ ID NO: 568182 - DNA, 120 bp, Artificial Sequence
  ENSG00000170430_17 (sequence is synthesized)
gtcaccgtcaggactcgcaggctgtctggtcatttttgacgttgctgaaggtgagtgggaaaagctgggtgcactctgccccaaaggtggtgccctgtgtcccccacagatgatggccct

SEQ ID NO: 568183 - DNA, 120 bp, Artificial Sequence
  ENSG00000170430_18 (sequence is synthesized)
gctttccaacagagggcaccagagccgtgcggtgtgctgtggagaccccagcaccacttcccctgctggaggatggatttgaaggagggtggctgggcggcaccccgatggctccctgtg

SEQ ID NO: 568184 - DNA, 120 bp, Artificial Sequence
  ENSG00000170430_19 (sequence is synthesized)
ctccctgagaccctacaggccgccctctgcagccacacctggaccggcaggcatgcacgctgcaggcaggctgcctccgctgtttgggtcccatgaacgatggaagcctcccagtgagat

SEQ ID NO: 568185 - DNA, 120 bp, Artificial Sequence
  ENSG00000170430_20 (sequence is synthesized)
cttcaggtctctcatcaggcacaggctctgagggagggtcctggggccacatgactgcagccagcgagggccgagcccccagaatccaggtcagctcctggtggcaggggacctgcccgt

SEQ ID NO: 568186 - DNA, 120 bp, Artificial Sequence
  ENSG00000170430_21 (sequence is synthesized)
caaagccgtccaaggtgagccagcaaatccgtgtggcctgggagcacaggtgggcctgctcggaccatgcccttggtgcagtacaaaaccatgttctgcttcctctccgagggtttccgc

SEQ ID NO: 568187 - DNA, 120 bp, Artificial Sequence
  ENSG00000170430_22 (sequence is synthesized)
ggccctgtcagaacaggcttgatagatgcccggaggttccctctgacagccgcagcagcagggctcaaaccggcggggccgtgtaccgctccaaggacaagctctgccgaggccgacatg

SEQ ID NO: 568188 - DNA, 120 bp, Artificial Sequence
  ENSG00000170430_23 (sequence is synthesized)
aaaagccagcacgcgggtcgcctagagccgctctgcctccaagctgcagcgccgttcgtgaaaatacagagggagagggaaggcacaaagaaatacaaaactattttccaaataaaaaga

SEQ ID NO: 568189 - DNA, 120 bp, Artificial Sequence
  ENSG00000170430_24 (sequence is synthesized)
aatgtcgaaacaagaaagctgtgttcttcagccttggccctgggtccccctcaccctgtcgcatttcccagcactgtgatgctttgaaggccgacaccgagacccgccgtgcacgacagc

SEQ ID NO: 568190 - DNA, 120 bp, Artificial Sequence
  ENSG00000170430_25 (sequence is synthesized)
cacctcgcagccactcagaccggcggaccacgctcccctgtttccagagagatgagagagtcagaagtaatacttgtttttgcagaaccacacttgtggcaaaataagttgcctttggcc

SEQ ID NO: 568191 - DNA, 120 bp, Artificial Sequence
  ENSG00000170430_26 (sequence is synthesized)
acgcaggagactgagttttgtgaggggttgtccttctcccagtctctcttcccgctgggaacagaagtgtccagtaaacccacctgcattccacgtgtcctgtggccgcctccagtggtg

SEQ ID NO: 568192 - DNA, 120 bp, Artificial Sequence
  ENSG00000170430_27 (sequence is synthesized)
agtctgtgaggccagagaagagaagctatgaccgtgcaaacatgcatgttatggtgttggctgatgcggaatcaggaagcttggaggagctcttgcatgaggaattgcagaacttagggg

SEQ ID NO: 568193 - DNA, 120 bp, Artificial Sequence
  ENSG00000170430_28 (sequence is synthesized)
catgaatttgcacttccagatgtgaaggttgcaggcaccgggcgttgcagaggaagtgggcaagctcaccttgtagagaacttacttggggtttgtaatttgtatacacttcttacccag

SEQ ID NO: 568194 - DNA, 120 bp, Artificial Sequence
  ENSG00000170430_29 (sequence is synthesized)
cagaaacagcttactgaacacccctcgggtggctggatgatgtgctagcaactgaaaccatctctgcgacttaagcttctctggtgcgtcgcgccccacgtgcttctccagaatcccgtt

SEQ ID NO: 568195 - DNA, 120 bp, Artificial Sequence
  ENSG00000170430_30 (sequence is synthesized)
tggaggggccaagcaagtccaatatagataggtttatactgaagccatcagttttgtttcttacatcgtttgtaaacagcagtattatcctggaacttgtttcctacagaactgtaagat

SEQ ID NO: 568196 - DNA, 120 bp, Artificial Sequence
  ENSG00000170430_31 (sequence is synthesized)
aaggataaaatcccatccacctgaattgctgagaaacgtaagaggtggtgtgacccgctggagccctgtggagtggcggactctggggagtagctggtcagtgagattctcgcagcaatg

SEQ ID NO: 568197 - DNA, 120 bp, Artificial Sequence
  ENSG00000170430_32 (sequence is synthesized)
tgaggcatcctcctcacagaaatgcatttacggatgttgctgtatcccctgacctggcctacaaggacagaacagccctgggggccacgtcccctcccggtctcatctgccgcttgctca

SEQ ID NO: 568198 - DNA, 120 bp, Artificial Sequence
  ENSG00000170430_33 (sequence is synthesized)
ccttggctgtccatgcacccgtagctgtgaccatgggcggtggcgccagctcggacttcaccccgttggagcgggcaggatgtcacactgagctaatgtgagattgttcatgaagctaca

SEQ ID NO: 568199 - DNA, 120 bp, Artificial Sequence
  ENSG00000170430_34 (sequence is synthesized)
gatcttagtgctacttgggcttctcacagcacagaggaggattctgaagtgagagataaattggcttcatgtatgagcaagggggaaagtgttttattttactaggaagattttactgaa

SEQ ID NO: 568200 - DNA, 120 bp, Artificial Sequence
  ENSG00000170430_35 (sequence is synthesized)
agaccaatcccgaaacggcccttgcttcggccacagctgctgggatgtcctcgggcctcccctgtttgtctgcatgtcttcttgttgccatcggggcagtggagtccccggaaacagtcc

SEQ ID NO: 568201 - DNA, 120 bp, Artificial Sequence
  ENSG00000170430_36 (sequence is synthesized)
aaggccctggggtgggggatttaaatttttggcttccctcagacctcagaccgtgtgggtttttttttctttctttctttcctgttcatgggcatttgattaaaagtttgtgtttaaaga

SEQ ID NO: 568202 - DNA, 120 bp, Artificial Sequence
  ENSG00000170430_37 (sequence is synthesized)
aagagcctggtagccgtggtaccaggaacactcactcttcctgcttgctgctttcctcatgctgagctgggctgagatcaagactcctggggcacttgcttcctctaccctttgtctgtg

SEQ ID NO: 568203 - DNA, 120 bp, Artificial Sequence
  ENSG00000170430_38 (sequence is synthesized)
gccaggtgggattcccacacagtcaaaggaagcccgtgtccaacaggggccatttcccttaaatttctctcatcacccccagctctgctgtgcctcaggtgggccgctgccactcttcct

SEQ ID NO: 568204 - DNA, 120 bp, Artificial Sequence
  ENSG00000170430_39 (sequence is synthesized)
catcccgttttccagcaagtcattagctggacatgtgccgctccaaaagagaatgttaaccttcgtctcttttgtcgtcataaatgcacattcatgttttacagagtgcttccctgcagc

SEQ ID NO: 568205 - DNA, 120 bp, Artificial Sequence
  ENSG00000170430_40 (sequence is synthesized)
agataaatattgaaaccattaacaccttttgatgtatggtacagtctgcatcttagacccacacatggctggccggctgtggtccctccgtgccgcacacctggccggggaccctgactc

SEQ ID NO: 568206 - DNA, 120 bp, Artificial Sequence
  ENSG00000170430_41 (sequence is synthesized)
ttctctgaggacagtgagcagcagtaatgcctgtttccttttctggaaaacaggattctttttgaaaatttcatcagaaggtggtgtttatttgtattaaagcaatgcatttaaatatta

SEQ ID NO: 568207 - DNA, 120 bp, Artificial Sequence
  ENSG00000170430_42 (sequence is synthesized)
gaaggtgaaagcttcaccctttgtctcccttgccatcctttggccttgtgtgtttggaagtagccagaggtggtggaacagtggtgggctggtttgggtcttgttggcagtgccaaaggg

SEQ ID NO: 568208 - DNA, 120 bp, Artificial Sequence
  ENSG00000170430_43 (sequence is synthesized)
acaaaggctggatgtgggcacgacctcagcctcgtgatgggcaagacaggtgggggtgactttctgttctgaaaatgacctcctccccttcttcctcccctcaagcttcctacctttcct

SEQ ID NO: 568209 - DNA, 120 bp, Artificial Sequence
  ENSG00000170430_44 (sequence is synthesized)
ggcatgttttccattgatggcagggtaacgcatagccttacccccacaaccgcaaccacgagtccgtctctcaaaacagtgtgctgcgacggctcctgcatttgcagcttccctgtgtgt

SEQ ID NO: 568210 - DNA, 120 bp, Artificial Sequence
  ENSG00000170430_45 (sequence is synthesized)
attgaacatttgggttcttcggcatatgtctctggaaatttagagacagggagatgcaggattaatcttgattaaaaaaaaaagcccagatcagcgttccctgttcctccagagtctgcc

SEQ ID NO: 568211 - DNA, 120 bp, Artificial Sequence
  ENSG00000170430_46 (sequence is synthesized)
aggtgagtttcatactaggactgcttgatgttctggaatcccttaaccaggagtcccagttgccttttgagagccgtggtcagacccttggcgagggtgtggctgaggatggccctgcca

SEQ ID NO: 568212 - DNA, 120 bp, Artificial Sequence
  ENSG00000170430_47 (sequence is synthesized)
gggggaagggcccgaaagccccttttcagcatgactttaagttcttgtcatttctaagagcgtacatgtttctctttttgtgaacagctcccactatatttctctaattgcaaaaacgta

SEQ ID NO: 568213 - DNA, 120 bp, Artificial Sequence
  ENSG00000170430_48 (sequence is synthesized)
agaaatgtaaagcattccttagtgttttgctttgaaatgtaacatttaatttcctccgttcattctattaaaattgtagctcttgttatttctgaccaaagaagaagaagaaaaaaaaaa

SEQ ID NO: 568214 - DNA, 120 bp, Artificial Sequence
  ENSG00000170439_0 (sequence is synthesized)
agctcagagctggtctgccatggacatcctggtcccactcctgcagctgctggtgctgcttcttaccctgcccctgcacctcatggctctgctgggctgctggcagcccctgtgcaaaag

SEQ ID NO: 568215 - DNA, 120 bp, Artificial Sequence
  ENSG00000170439_1 (sequence is synthesized)
ctacttcccctacctgatggccgtgctgactcccaagagcaaccgcaagatggagagcaagaaacgggagctcttcagccagataaaggggcttacaggagcctccgggaaagtggccct

SEQ ID NO: 568216 - DNA, 120 bp, Artificial Sequence
  ENSG00000170439_2 (sequence is synthesized)
actggagctgggctgcggaaccggagccaactttcagttctacccaccgggctgcagggtcacctgcctagacccaaatccccactttgagaagttcctgacaaagagcatggctgagaa

SEQ ID NO: 568217 - DNA, 120 bp, Artificial Sequence
  ENSG00000170439_3 (sequence is synthesized)
caggcacctccaatatgagcggtttgtggtggctcctggagaggacatgagacagctggctgatggctccatggatgtggtggtctgcactctggtgctgtgctctgtgcagagcccaag

SEQ ID NO: 568218 - DNA, 120 bp, Artificial Sequence
  ENSG00000170439_4 (sequence is synthesized)
gaaggtcctgcaggaggtccggagagtactgagaccgggaggtgtgctctttttctgggagcatgtggcagaaccatatggaagctgggccttcatgtggcagcaagttttcgagcccac

SEQ ID NO: 568219 - DNA, 120 bp, Artificial Sequence
  ENSG00000170439_5 (sequence is synthesized)
ctgttgggccccacatcatgggaaaggctgtcaaataatctttcccaagctccaaggcactcatttgctccttccccagcctccaattagaacaagccacccaccagcctatctatcttc

SEQ ID NO: 568220 - DNA, 120 bp, Artificial Sequence
  ENSG00000170439_6 (sequence is synthesized)
cactgagagggacctagcagaatgagagaagacattcatgtaccacctactagtccctctctccccaacctctgccagggcaatctctaacttcaatcccgccttcgacagtgaaaaagc

SEQ ID NO: 568221 - DNA, 120 bp, Artificial Sequence
  ENSG00000170439_7 (sequence is synthesized)
tctacttctacgctgacccagggaggaaacactaggaccctgttgtatcctcaactgcaagtttctggactagtctcccaacgtttgcctcccaatgttgtccctttccttcgttcccat

SEQ ID NO: 568222 - DNA, 120 bp, Artificial Sequence
  ENSG00000170439_8 (sequence is synthesized)
ggtaaagctcctctcgctttcctcctgaggctacacccatgcgtctctaggaactggtcacaaaagtcatggtgcctgcatccctgccaagcccccctgaccctctctccccactaccac

SEQ ID NO: 568223 - DNA, 120 bp, Artificial Sequence
  ENSG00000170439_9 (sequence is synthesized)
cttcttcctgagctgggggcaccagggagaatcagagatgctggggatgccagagcaagactcaaagaggcagaggttttgttctcaaatattttttaataaatagacgaaaccacgaaa

SEQ ID NO: 568224 - DNA, 120 bp, Artificial Sequence
  ENSG00000170442_0 (sequence is synthesized)
tccattcggacgtctccatcctcagaacctcctctcttccccaaaaagcaccatgacttgtggatcttactgtggtggccgcgccttcagctgcatctcggcctgcgggccccggcccgg

SEQ ID NO: 568225 - DNA, 120 bp, Artificial Sequence
  ENSG00000170442_1 (sequence is synthesized)
ccgctgctgcatcaccgccgccccctaccgtggcatctcctgctaccgcggcctcaccgggggcttcggcagccacagcgtgtgcggaggctttcgggccggctcctgcggacgcagctt

SEQ ID NO: 568226 - DNA, 120 bp, Artificial Sequence
  ENSG00000170442_2 (sequence is synthesized)
cggctaccgctccgggggcgtgtgcgggcccagtcccccatgcatcaccaccgtgtcggtcaacgagagcctcctcacgcccctcaacctggagatcgaccccaacgcgcagtgcgtgaa

SEQ ID NO: 568227 - DNA, 120 bp, Artificial Sequence
  ENSG00000170442_3 (sequence is synthesized)
gcaggaggagaaggagcagatcaagtccctcaacagcaggttcgcggccttcatcgacaaggtgcgcttcctggagcagcagaacaaactgctggagacaaagctgcagttctaccagaa

SEQ ID NO: 568228 - DNA, 120 bp, Artificial Sequence
  ENSG00000170442_4 (sequence is synthesized)
ccgcgagtgttgccagagcaacctggagcccctgtttgagggctacatcgagactctgcggcgggaggccgagtgcgtggaggccgacagcgggaggctggcctcagagcttaaccacgt

SEQ ID NO: 568229 - DNA, 120 bp, Artificial Sequence
  ENSG00000170442_5 (sequence is synthesized)
gcaggaggtgctggagggctacaagaagaagtatgaggaggaggtttctctgagagcaacagctgagaacgagtttgtggctctgaagaaggatgtggactgcgcctacctccgcaaatc

SEQ ID NO: 568230 - DNA, 120 bp, Artificial Sequence
  ENSG00000170442_6 (sequence is synthesized)
agacctggaggccaatgtggaggccctgatccaggagatcgacttcctgaggcggctgtatgaggaggagatccgcgttctccagtcccacatctcagacacctccgtggttgtcaagct

SEQ ID NO: 568231 - DNA, 120 bp, Artificial Sequence
  ENSG00000170442_7 (sequence is synthesized)
ggacaacagccgggacctgaacatggactgcatcattgccgagatcaaggcacagtacgatgacattgtcacccgtagccgggctgaggccgagtcctggtaccgcagcaagtgtgagga

SEQ ID NO: 568232 - DNA, 120 bp, Artificial Sequence
  ENSG00000170442_8 (sequence is synthesized)
ggagatcaacgagctgaaccgcatgatccagaggctgacggctgaggtggagaatgccaagtgccagaattccaagctggaggctgcggtggctcagtctgagcagcagggtgaggcggc

SEQ ID NO: 568233 - DNA, 120 bp, Artificial Sequence
  ENSG00000170442_9 (sequence is synthesized)
cctcagcgatgcccgctgcaagttggccgagctggagggtgccctgcagaaggccaagcaggacatggcctgcctgatcagggagtaccaggaggtgatgaactccaagctgggcctgga

SEQ ID NO: 568234 - DNA, 120 bp, Artificial Sequence
  ENSG00000170442_10 (sequence is synthesized)
catcgagatcgccacctacaggcgcctgctggagggcgaggagcagaggctgtgcgagggcgtcggctcggtgaatgtctgcgtcagcagctcccgcggtggcgttgtctgtggcgatct

SEQ ID NO: 568235 - DNA, 120 bp, Artificial Sequence
  ENSG00000170442_11 (sequence is synthesized)
ctgcgcctccactactgcccctgttgtctccaccagagtcagtagcgtccccagcaacagcaacgtggtggtgggcactactaacgcctgcgccccctccgcccgggttggcgtctgcgg

SEQ ID NO: 568236 - DNA, 120 bp, Artificial Sequence
  ENSG00000170442_12 (sequence is synthesized)
cggcagctgtaagaggtgctaggaggctgccgcctccgccagcgcctgtcgccgtcactctccacccagccagtacctcgcgccaccagaacgcgccgcccgcgccggcctcccaatagc

SEQ ID NO: 568237 - DNA, 120 bp, Artificial Sequence
  ENSG00000170442_13 (sequence is synthesized)
cgccgcccgctgcctgcactctaagcgccctccccaccgctccgctccgggagccatccccggtcgcaggagtccggggagggccgggaggcgccatggtctctctctgtagcctttcct

SEQ ID NO: 568238 - DNA, 120 bp, Artificial Sequence
  ENSG00000170442_14 (sequence is synthesized)
ggtagtcaatttgttgtcccgaggattcatctttttcttccgcctgccttctgttttttttgctgtatacattggtcttgcctgagctcttccccaaagcttggaggaacgggggaggcc

SEQ ID NO: 568239 - DNA, 120 bp, Artificial Sequence
  ENSG00000170442_15 (sequence is synthesized)
cgggaatgtccctgtctgcacgacctgggactctgcccatgtgcttttgcctgtggaatggagacgcggaccctggatagtggttctatgactctgcgagggacaggcccacgcgtgtgg

SEQ ID NO: 568240 - DNA, 120 bp, Artificial Sequence
  ENSG00000170442_16 (sequence is synthesized)
ggagaacatctcccttccggggctgccctcaagagcttctgaaaaactaatgactctgctgccttctcctttgtctttgtttcactctgtgtttccaataaactcattgtagcgaatcaa

SEQ ID NO: 568241 - DNA, 120 bp, Artificial Sequence
  ENSG00000170442_17 (sequence is synthesized)
attctggtagctcttgggctgaagctgggctttggtgctcaagagaggcttggaggagaccacagttctttctccatgtgtgaggaattaaaggcaactgtgcagaaacacacgcagagc

SEQ ID NO: 568242 - DNA, 120 bp, Artificial Sequence
  ENSG00000170442_18 (sequence is synthesized)
ctgaagcccagcaaggaggatctgaacaggcttaatcaggccatccagtggctgacggtggaggtgggcagtgctgagagtcagcaccatgacttgtggatcttactgtggtggccgcgc

SEQ ID NO: 568243 - DNA, 120 bp, Artificial Sequence
  ENSG00000170442_19 (sequence is synthesized)
agtttcgggtggcccagccaactttcatgccagccgtcctcagcccttcctggtgctgggtctgccaggctcatggtcagccaggcctggggccctggagaggtcctctgcatcttgaat

SEQ ID NO: 568244 - DNA, 120 bp, Artificial Sequence
  ENSG00000170445_0 (sequence is synthesized)
atccttgctgaggctggggcaaccaccgcaggtcgagacagcaggcggctcaagtggacagccgggatggcagagcgtgcggcgctggaggagctggtgaaacttcagggagagcgcgtg

SEQ ID NO: 568245 - DNA, 120 bp, Artificial Sequence
  ENSG00000170445_1 (sequence is synthesized)
cgaggcctcaagcagcagaaggccagcgccgagctgatcgaggaggaggtggcgaaactcctgaaactgaaggcacagctgggtcctgatgaaagcaaacagaaatttgtgctcaaaacc

SEQ ID NO: 568246 - DNA, 120 bp, Artificial Sequence
  ENSG00000170445_2 (sequence is synthesized)
cccaagggcacaagagactatagtccccggcagatggcagttcgcgagaaggtgtttgacgtaatcatccgttgcttcaagcgccacggtgcagaagtcattgatacacctgtatttgaa

SEQ ID NO: 568247 - DNA, 120 bp, Artificial Sequence
  ENSG00000170445_3 (sequence is synthesized)
ctaaaggaaacactgatgggaaagtatggggaagactccaagcttatctatgacctgaaggaccagggcggggagctcctgtcccttcgctatgacctcactgttccttttgctcggtat

SEQ ID NO: 568248 - DNA, 120 bp, Artificial Sequence
  ENSG00000170445_4 (sequence is synthesized)
ttggcaatgaataaactgaccaacattaaacgctaccacatagcaaaggtatatcggcgggataacccagccatgacccgtggccgataccgggaattctaccagtgtgattttgacatt

SEQ ID NO: 568249 - DNA, 120 bp, Artificial Sequence
  ENSG00000170445_5 (sequence is synthesized)
gctgggaactttgatcccatgatccctgatgcagagtgcctgaagatcatgtgcgagatcctgagttcacttcagataggcgacttcctggtcaaggtaaacgatcgacgcattctagat

SEQ ID NO: 568250 - DNA, 120 bp, Artificial Sequence
  ENSG00000170445_6 (sequence is synthesized)
gggatgtttgctatctgtggtgtttctgacagcaagttccgtaccatctgctcctcagtagacaagctggacaaggtgtcctgggaagaggtgaagaatgagatggtgggagagaagggc

SEQ ID NO: 568251 - DNA, 120 bp, Artificial Sequence
  ENSG00000170445_7 (sequence is synthesized)
cttgcacctgaggtggctgaccgcattggggactatgtccagcaacatggtggggtatccctggtggaacagctgctccaggatcctaaactatcccaaaacaagcaggccttggagggc

SEQ ID NO: 568252 - DNA, 120 bp, Artificial Sequence
  ENSG00000170445_8 (sequence is synthesized)
acctgaccctatttggcattgatgacaaaatctcctttgacctgagccttgctcgagggctggattactacactggggtgatctatgaggcagtgctgctacagaccccagcccaggcag

SEQ ID NO: 568253 - DNA, 120 bp, Artificial Sequence
  ENSG00000170445_9 (sequence is synthesized)
gggaagagcccctgggtgtgggcagtgtggctgctggaggacgctatgatgggctagtgggcatgttcgaccccaaagggcgcaaggtgccatgtgtggggctcagcattggggtggagc

SEQ ID NO: 568254 - DNA, 120 bp, Artificial Sequence
  ENSG00000170445_10 (sequence is synthesized)
ggattttctccatcgtggaacagagactagaggctttggaggagaagatacggaccacggagacacaggtgcttgtggcatctgcacagaagaagctgctagaggaaagactaaagcttg

SEQ ID NO: 568255 - DNA, 120 bp, Artificial Sequence
  ENSG00000170445_11 (sequence is synthesized)
tctcagaactgtgggatgctgggatcaaggctgagctgctgtacaagaagaacccaaagctactgaaccagttacagtactgtgaggaggcaggcatcccactggtggctatcatcggcg

SEQ ID NO: 568256 - DNA, 120 bp, Artificial Sequence
  ENSG00000170445_12 (sequence is synthesized)
agcaggaactcaaggatggggtcatcaagctccgttcagtgacgagcagggaagaggtggatgtccgaagagaagaccttgtggaggaaatcaaaaggagaacaggccagcccctctgca

SEQ ID NO: 568257 - DNA, 120 bp, Artificial Sequence
  ENSG00000170445_13 (sequence is synthesized)
tctgctgaactgaacaaactatcagaggaaaggaagtgggactggcactatttgaggttaagacaaactgcatatgtacttcaattgctttgcacttttccgtttcagcggaagacctga

SEQ ID NO: 568258 - DNA, 120 bp, Artificial Sequence
  ENSG00000170445_14 (sequence is synthesized)
agagtggtcagaacagagcctttgatttttattatggttattttattgattattactggcaaaaacggccaggtacaacacctttttcatacaaggcccaggaggcttagtccagtctgt

SEQ ID NO: 568259 - DNA, 120 bp, Artificial Sequence
  ENSG00000170445_15 (sequence is synthesized)
gctcctgggctacaaggacccagcctgagatggtcccatctgcagggccccgcaccagttggagcagatgcctccccaccaccaattgccaaaggtccaataaaatgcctcaaccacgga

SEQ ID NO: 568260 - DNA, 120 bp, Artificial Sequence
  ENSG00000170445_16 (sequence is synthesized)
tacgtcctatgtacaagtcagtcagttcagtcctcatatctactaaaagctacctttatgcccaaggtgctagatgagaagacagggcccctgccctggtagagctgagttgggcctggt

SEQ ID NO: 568261 - DNA, 71 bp, Artificial Sequence
  ENSG00000170445_17 (sequence is synthesized)
tcctgatgaaagcaaacagaaatttgtgctcaaaacccccaagatggggtttcaccgtgttggctgtaaag

SEQ ID NO: 568262 - DNA, 120 bp, Artificial Sequence
  ENSG00000170445_18 (sequence is synthesized)
gtgagccactgcgcctggcccttctataataattctaagacattatctgcctttttcgttgtgttaacatttgcactgaaggcacaaaagcgctgacagaatctcactctgttgcccagg

SEQ ID NO: 568263 - DNA, 120 bp, Artificial Sequence
  ENSG00000170445_19 (sequence is synthesized)
gctctctcaagccagcagaatctattgagtactcacggtgtcctgagcaaattggatgacccagataatgctcttagggtttctatggtggtttttttgtttgttttttgtttttttgag

SEQ ID NO: 568264 - DNA, 120 bp, Artificial Sequence
  ENSG00000170445_20 (sequence is synthesized)
gcgtgagccaccgcacccagcctcttctatggtgttttcatgcagatttcacaaaatccctgtggtgggggaggagaataaagtctcttcattttacatatgagtaaacttgatacccag

SEQ ID NO: 568265 - DNA, 120 bp, Artificial Sequence
  ENSG00000170445_21 (sequence is synthesized)
taaacttgatacccagcccatgaagagatcatagggataagaaaggcaaagtcaggactagaactcttggtccagtgctctttattttaaaccacagtgataggatcacagcagagaata

SEQ ID NO: 568266 - DNA, 120 bp, Artificial Sequence
  ENSG00000170445_22 (sequence is synthesized)
aggaaattagctttgatacatcaaatcatccagactgatgccagggcttctggatgaatagggaaaatggctaagcactaaagccatataatcaccccatccagtaggaggagttaagaa

SEQ ID NO: 568267 - DNA, 120 bp, Artificial Sequence
  ENSG00000170445_23 (sequence is synthesized)
gatgatgaagtagaaaatgaaggaatagcccagtagatggaaaggaaaccaaaactggtgagaagcccaaagatgccggggtttacctctgggctgatgatcagaaaatgaaagagaaat

SEQ ID NO: 568268 - DNA, 120 bp, Artificial Sequence
  ENSG00000170445_24 (sequence is synthesized)
tctatgcttgagtgcaaccaggccttcctagaggacagagctcccagagtccccccttcagaaaggtgaatccctgaagaccgctggctaaccctctccctgcaggattttgacattgct

SEQ ID NO: 568269 - DNA, 120 bp, Artificial Sequence
  ENSG00000170445_25 (sequence is synthesized)
gggaactttgatcccatgatccctgatgcagagtgcctgaagatcatgtgcgagatcctgagttcacttcagataggcgacttcctggtcaaggtcagagctgacaaggctgggagggca

SEQ ID NO: 568270 - DNA, 120 bp, Artificial Sequence
  ENSG00000170445_26 (sequence is synthesized)
aagttgggcctggcctctcacaagagaagatccttgtgcagagggaccagtagcctaagtgaccatgactattgcaggtcatgtaagaaaagagattcccccctcactatgcattggttc

SEQ ID NO: 568271 - DNA, 120 bp, Artificial Sequence
  ENSG00000170445_27 (sequence is synthesized)
tgagcaggtggtggcacctaagctatctgatctccaagggagcaagtggtgctgctttgggcagggagcatctcacagaaatggagaaaagattattgctctttttcacagatttctacc

SEQ ID NO: 568272 - DNA, 120 bp, Artificial Sequence
  ENSG00000170445_28 (sequence is synthesized)
ccattatatgtaagttttatggatctttaatccataatctttctgcactcaatcctctgctctgggtctctacttccttcagggctgtcacaaacctgggctggtgtatccaagacttag

SEQ ID NO: 568273 - DNA, 120 bp, Artificial Sequence
  ENSG00000170445_29 (sequence is synthesized)
atcttcctcatgatacggaatacttaacattttactgccttgtgccaggcactgtgcttggtgcttttcatgcattatcaaaatataattgttactacagccctgtgagagtagctaatt

SEQ ID NO: 568274 - DNA, 120 bp, Artificial Sequence
  ENSG00000170445_30 (sequence is synthesized)
ttattaattgcattttccagatgagaacactgaagcattatagatcaaataatttgcttaaggccatgaaacttgtaagtggtagggtcagaatttgaatccaggcagtctgactccaaa

SEQ ID NO: 568275 - DNA, 120 bp, Artificial Sequence
  ENSG00000170445_31 (sequence is synthesized)
gtcttgccactaaccacactgcaatactgtctctaaatgggaagcatgtgtctgaggccctgggatccctcagatggctaccgtgactctctagcacctagagtaacaccaaggaagcct

SEQ ID NO: 568276 - DNA, 120 bp, Artificial Sequence
  ENSG00000170445_32 (sequence is synthesized)
cttgtagcctcaagccctcctttgttgctgctggtcttaagtggctggttgcatttcatcttctgggaaatgctctggcaacctccccacagtcctatgccttttctctagggtggaaac

SEQ ID NO: 568277 - DNA, 120 bp, Artificial Sequence
  ENSG00000170445_33 (sequence is synthesized)
cacccatttcccagttgagatcatttttccagtaggcatcttacattctaagaactatgaaaatagttttcctgaaaaagacaagggaagcagcagcagcattctcctttccccacaccc

SEQ ID NO: 568278 - DNA, 120 bp, Artificial Sequence
  ENSG00000170445_34 (sequence is synthesized)
atatacacgcctgtgccctgtaactgaagtgtgagaggcacagtgtcataaatgggtagatagtaagtggggactaaaactgtcaagggtgatctaattggggtgggctcatagtagtac

SEQ ID NO: 568279 - DNA, 85 bp, Artificial Sequence
  ENSG00000170445_35 (sequence is synthesized)
gacagattaaaaaaaaaaatttttttttttttttaaattagctgagtatggtggtgtgtgcctgtagtcaggaggctgaggtggg

SEQ ID NO: 568280 - DNA, 77 bp, Artificial Sequence
  ENSG00000170445_36 (sequence is synthesized)
attaaaaaaaaaaatttttttttttttttaaattagctgagtatggtggtgtgtgcctgtagaagctgcagtgatca

SEQ ID NO: 568281 - DNA, 120 bp, Artificial Sequence
  ENSG00000170445_37 (sequence is synthesized)
ttgaaactctgtacccattaaacaataactccccacttcaccctccctccagcccctggtaactgctatcctactttctactttctgtctctatggatttgactattctaggtactagat

SEQ ID NO: 568282 - DNA, 120 bp, Artificial Sequence
  ENSG00000170445_38 (sequence is synthesized)
aagtgagagactaattgttctttttttttttttttaagttcattgatctagctttcaaattccacattgcaaccaatctttaagaaacaaccacttgttggattctgatgtagtaccaaa

SEQ ID NO: 568283 - DNA, 120 bp, Artificial Sequence
  ENSG00000170445_39 (sequence is synthesized)
gaaaaatatccacagttagctgaaaagtttgttaaaatactcttccttttacaactacatatctgtgtaaggttagattttcgttatatacttcaaccagcacgacatatcacgacagat

SEQ ID NO: 568284 - DNA, 120 bp, Artificial Sequence
  ENSG00000170445_40 (sequence is synthesized)
tgaatgcaaaaatcacatatgagaatcctgctgtcttctattcagtcagacattaaagatttgcaaagatgtaaatcagtgccactcttctcactaaattgttttggaaaacagttacct

SEQ ID NO: 568285 - DNA, 120 bp, Artificial Sequence
  ENSG00000170445_41 (sequence is synthesized)
tagatatattatttgtgttaacatatgttatttgttaaatgaataaatattttaaaatttttgccgttctaattctaatacagtaaatattgataggtataatccactttggggtcttga

SEQ ID NO: 568286 - DNA, 120 bp, Artificial Sequence
  ENSG00000170445_42 (sequence is synthesized)
attgataggtataatccactttggggtcttgaatacatagtaagagtgtaaagaggtcctgaaaccaaagactttggagtagggtataaaagcccagattggaagctctgacctggaagg

SEQ ID NO: 568287 - DNA, 120 bp, Artificial Sequence
  ENSG00000170445_43 (sequence is synthesized)
acaacacagttctagtcctgactgccacgaacatgctgaatggccttaagaaatgacttaacttctcaacatcctgtacttcatctgtaaaatttatctgcctagcctatgtcatagagt

SEQ ID NO: 568288 - DNA, 120 bp, Artificial Sequence
  ENSG00000170445_44 (sequence is synthesized)
tgttaccagaaacaaattagagaacaaacagttgtaactaagatttaaaagaaaagttatattgggagagaaacgttgcttataaaatttggaattcaattagttgagccagtttgagtt

SEQ ID NO: 568289 - DNA, 120 bp, Artificial Sequence
  ENSG00000170445_45 (sequence is synthesized)
ggttatattgcctataatcatgtaggtatttttttgttgttattatttttgtttgtttggttgggtttgtttttgtttttgtttttgttttgacagagtcttgctctgtctcccaggctg

SEQ ID NO: 568290 - DNA, 120 bp, Artificial Sequence
  ENSG00000170445_46 (sequence is synthesized)
gaaaactcgggcgtttgcgcacctcactagtcacgaaggctgaggtgggatcctcccaagttcccttagtagccagcttcggcacttccgggaggagccggaaataatttttgtgctcgg

SEQ ID NO: 568291 - DNA, 120 bp, Artificial Sequence
  ENSG00000170445_47 (sequence is synthesized)
ttggcactcacttggctcaggtttaagaatggtagagtaggtaggatcaaatatgaggcctttggcgattaggggaattatttctctaaaccaggagtggaactttggctaaacagagca

SEQ ID NO: 568292 - DNA, 120 bp, Artificial Sequence
  ENSG00000170445_48 (sequence is synthesized)
tacacatccttagaaatcttctgaatcctgagtgagacctcagcttgatgtcagggcccagttccaactctacagtcatcccctggctccagaatacctctcccctgccctgtccagtga

SEQ ID NO: 568293 - DNA, 120 bp, Artificial Sequence
  ENSG00000170445_49 (sequence is synthesized)
acaaaattcttcttaatggactagcaacacatttcccttgtctccaagctacacagagaatcatctgcttagaaatcccatatgggggcctttttctggtcgcctttttctggtctgtgg

SEQ ID NO: 568294 - DNA, 120 bp, Artificial Sequence
  ENSG00000170445_50 (sequence is synthesized)
tgttgtggacacagaccagtctttgctccaataagaagggggacaagaatggcttggagggagaggccctgtcttttattatcttggttgtggccagcagattccaaaagagagccattc

SEQ ID NO: 568295 - DNA, 120 bp, Artificial Sequence
  ENSG00000170445_51 (sequence is synthesized)
tttggaatggtaattgttctgggtcctctctacattgtattgcgtggcatctgtacttggaatgttttctagattcatgcaaaccatacgtacataaatatgcaaccactctcctattga

SEQ ID NO: 568296 - DNA, 62 bp, Artificial Sequence
  ENSG00000170445_52 (sequence is synthesized)
tcctgatgaaagcaaacagaaatttgtgctcaaaaccccccaatccatctgccttggcctcc

SEQ ID NO: 568297 - DNA, 120 bp, Artificial Sequence
  ENSG00000170448_0 (sequence is synthesized)
ggaacgcgggcgggggcttctgggagttgtagtctgttgggggcgtgcgcagtcgggatggaagcttcctggcgccaggtggccggtggccgaggccgatcccggggacgggccactgcc

SEQ ID NO: 568298 - DNA, 120 bp, Artificial Sequence
  ENSG00000170448_1 (sequence is synthesized)
gccccctcaggaaatggagtccatctccgcggcgccggaggagggcgagagaaggggtcggtgggcgcagttccttctggcaccagtcccggaggagtcgcgaccacggcggctgcaggg

SEQ ID NO: 568299 - DNA, 120 bp, Artificial Sequence
  ENSG00000170448_2 (sequence is synthesized)
agcaggcacagccccgcaggatcccaagccctgcagactaccgcagccagcgagctaatgtctcagaaaaaatttgaagaaatcaagaaagctaaccaagctgcagccagaaaacttgtt

SEQ ID NO: 568300 - DNA, 120 bp, Artificial Sequence
  ENSG00000170448_3 (sequence is synthesized)
gaagaacagtttagctcttcatctgaagaaggagatgaagattttgaaggaaaacagggaaaaatacttgcaaatacgtttataacatacactactcagacagatggagatacacgtgaa

SEQ ID NO: 568301 - DNA, 120 bp, Artificial Sequence
  ENSG00000170448_4 (sequence is synthesized)
ttagagcgaacaaaacaatatgtaaatgaagcttttcaagcaggggctatgacatgcctaatttgtattgcttcggtgaagagaaaccaagcagtttggagctgttcgggatgtttctgt

SEQ ID NO: 568302 - DNA, 120 bp, Artificial Sequence
  ENSG00000170448_5 (sequence is synthesized)
atatttcacatgccctgtatccagaagtgggctaaagacagccagtttcttgtatcttctgtgactgatgatgattttggaaagaaagattgtccctggccttgtccaaaatgtaggttt

SEQ ID NO: 568303 - DNA, 120 bp, Artificial Sequence
  ENSG00000170448_6 (sequence is synthesized)
gaatacaaacgatctgaaacacctagtaggtactattgctattgtggaaaagtagaagatccacctttagatccgtggcttgtgcctcattcatgtggccaagtatgtgagcgtgaattt

SEQ ID NO: 568304 - DNA, 120 bp, Artificial Sequence
  ENSG00000170448_7 (sequence is synthesized)
aaacctccttgtggccataaatgtttactcctctgtcatccaggtccctgccctccttgtccaaagatggtcacaactacttgttactgtaagaaagcaaaacctatccctcgtaggtgc

SEQ ID NO: 568305 - DNA, 120 bp, Artificial Sequence
  ENSG00000170448_8 (sequence is synthesized)
agtgccaaggaatggtcttgtcagctgccatgtggacagaagttgctttgtgggcaacataagtgtgaaaatccttgtcatgcaggaagctgtcagccttgtccaagagttagtagacaa

SEQ ID NO: 568306 - DNA, 120 bp, Artificial Sequence
  ENSG00000170448_9 (sequence is synthesized)
aagtgtgtctgtggcaaaaaagtagctgaaagaagttgtgcaagtccactatggcactgtgatcaagtatgtggaaaaacactgccatgtggtaatcacacatgtgagcaagtttgccat

SEQ ID NO: 568307 - DNA, 120 bp, Artificial Sequence
  ENSG00000170448_10 (sequence is synthesized)
gttggtgcttgtggagaatgtcctcgatctgggaaaaggttctgtccatgtcagaaatcaaagttttctttgccttgtacagaagatgtaccaacttgtggagacagttgtgacaaagta

SEQ ID NO: 568308 - DNA, 120 bp, Artificial Sequence
  ENSG00000170448_11 (sequence is synthesized)
cttgaatgcggaatccatagatgttcacagcgttgtcaccgaggtccctgtgaaacatgtagacaagaagtggaaaagcattgtcgctgtggaaagcatacaaaacgaatgccttgtcat

SEQ ID NO: 568309 - DNA, 120 bp, Artificial Sequence
  ENSG00000170448_12 (sequence is synthesized)
aaaccttatctgtgtgaaactaagtgtgttaagatgcgtgactgtcagaagcatcaatgtagaagaaagtgttgccctggaaactgtccaccttgtgatcaaaactgtggacggacttta

SEQ ID NO: 568310 - DNA, 120 bp, Artificial Sequence
  ENSG00000170448_13 (sequence is synthesized)
ggatgtagaaaccataagtgtccatctgtctgtcacagaggcagttgctatccctgcccagaaaccgtagatgtgaagtgtaattgtggcaatacaaaggtgacagtgccctgtggccga

SEQ ID NO: 568311 - DNA, 120 bp, Artificial Sequence
  ENSG00000170448_14 (sequence is synthesized)
gaacgtaccacaagaccacccaagtgcaaggagcaatgcagtcgaccaccaacttgtcatcatacaagtcaagaaaaacatcgctgtcactttggttcttgtccaccatgtcatcaacct

SEQ ID NO: 568312 - DNA, 120 bp, Artificial Sequence
  ENSG00000170448_15 (sequence is synthesized)
caaaaagttttggagaaatgtggtcacttgtgtcctgctccgtgtcatgatcaagcattaataaagcagactggcaggcaccagcctacaggcccttgggaacagccttctgagccagca

SEQ ID NO: 568313 - DNA, 120 bp, Artificial Sequence
  ENSG00000170448_16 (sequence is synthesized)
tttattcagactgcattaccgtgtcctccatgtcaagttcctattcctatggaatgtcttgggaaacatgaggtgagtccactaccatgccatgctgtaggaccctactcttgtaaaaga

SEQ ID NO: 568314 - DNA, 120 bp, Artificial Sequence
  ENSG00000170448_17 (sequence is synthesized)
gtttgtggaagaatcttggattgtcagaatcacacatgtatgaaagaatgccacaaagtaaccaaaactgatggctgcactggaaaaaacaaggctggcccagaatgccttcattgtgag

SEQ ID NO: 568315 - DNA, 120 bp, Artificial Sequence
  ENSG00000170448_18 (sequence is synthesized)
gaagggtgctccaagtcacggccactaggttgtcttcacccatgtattttgcgatgtcaccctggagaatgtccaccttgtgttcagatgcttagaataaaatgtcactgtaagatcaca

SEQ ID NO: 568316 - DNA, 120 bp, Artificial Sequence
  ENSG00000170448_19 (sequence is synthesized)
agcctgtatgtggaatgtagaaaaataaccacagctgatgtaaatgaaaagaacctcctcagttgttgcaaaaatcagtgccctaaagagcttccttgtggtcatagatgcaaagagatg

SEQ ID NO: 568317 - DNA, 120 bp, Artificial Sequence
  ENSG00000170448_20 (sequence is synthesized)
tgtcatcctggtgaatgtccctttaactgcaaccagaaggtaaaacttagatgtccttgtaaaagaataaaaaaggaattgcagtgcaacaaagtacgtgaaaatcaggtttcaatagaa

SEQ ID NO: 568318 - DNA, 120 bp, Artificial Sequence
  ENSG00000170448_21 (sequence is synthesized)
tgtgacacaacgtgcaaggaaatgaagcggaaagcatctgagataaaagaagcagaagccaaagctgctcttgaagaagaaaaacgaagacaacaggctgaactagaagcttttgaaaac

SEQ ID NO: 568319 - DNA, 120 bp, Artificial Sequence
  ENSG00000170448_22 (sequence is synthesized)
agactgaagggtcgtcggaagaagaacaggaaaagagatgaagtggcagttgagctatcactatggcaaaaacataaatattatctcatttcagtgtgtggagttgtggttgtagtgttt

SEQ ID NO: 568320 - DNA, 120 bp, Artificial Sequence
  ENSG00000170448_23 (sequence is synthesized)
gcctggtacatcacccatgatgtcaattaaaaaaagttttgatcttttaatgtaactcagattggatttagataagttgttaaatttgaaatattagaaaatgtatattatagaacatga

SEQ ID NO: 568321 - DNA, 120 bp, Artificial Sequence
  ENSG00000170448_24 (sequence is synthesized)
tatatatttacattcatctctgtattctctcagctgttgttagaaggacagaatgttaaactttatcttaattagtatactagaaagggcagtataatactgttttaaagtgaaggcatg

SEQ ID NO: 568322 - DNA, 120 bp, Artificial Sequence
  ENSG00000170448_25 (sequence is synthesized)
actgaaactaaaatatttcataaggcttagctagaggcagagtaacgtgtttttgttcattgggcttccttgtacttagttttttcatttaataattcaaaccaacacttttaaaaaaat

SEQ ID NO: 568323 - DNA, 120 bp, Artificial Sequence
  ENSG00000170448_26 (sequence is synthesized)
aattcagatgagactgagccatatctgcagtaagagaaatatttcttaatgttttggttacttatgatagagtacttttcttgatactgttaactttgtgctttttaaaaaaagtgattc

SEQ ID NO: 568324 - DNA, 120 bp, Artificial Sequence
  ENSG00000170448_27 (sequence is synthesized)
tctaacagacctcttaaattgtgacatgaaggtatgtaattagatttcagaaattggtttattagtgaggaatttttatcaataaatgtcatggggcgtgttcttcagaatatatagtta

SEQ ID NO: 568325 - DNA, 120 bp, Artificial Sequence
  ENSG00000170448_28 (sequence is synthesized)
ttttcaacaaatgccaggctagattcctcacatgtggctatttcttatgtaagaagcttttaactgaagttggcatgtttcgtaaaacttgcgtgtcttttaaaaataataaaaggaaga

SEQ ID NO: 568326 - DNA, 120 bp, Artificial Sequence
  ENSG00000170448_29 (sequence is synthesized)
tgagtatttatgaagaatatgtgctgacaacagggcttatgaggtctatgtaccttaatctcgtttctccttaccacaatcttaaatagatttcagctgaaaataatcagttcttatgaa

SEQ ID NO: 568327 - DNA, 120 bp, Artificial Sequence
  ENSG00000170448_30 (sequence is synthesized)
tcagctgaaaataatcagttcttatgaaaacaaatagagaaatatcagtaagtcaaatctgtttgaattataattcctttcaaatagttttgctatttaatttatatgattaatgttttc

SEQ ID NO: 568328 - DNA, 120 bp, Artificial Sequence
  ENSG00000170448_31 (sequence is synthesized)
gtcggtaaggagacgtagctttccgtggggtgtaccactgcagttggttcccggcgggagacgcaggggatggaagcttcctggcgccaggtggccggtggccgaggccgatcccgggga

SEQ ID NO: 568329 - DNA, 120 bp, Artificial Sequence
  ENSG00000170448_32 (sequence is synthesized)
accactgcagttggttcccggcgggagacgcagggtcagtctgtgactcttcccctaccacgctcccgcagaggctgaggaggcggtttcgacttctcctccggctttctgtcttcggca

SEQ ID NO: 568330 - DNA, 120 bp, Artificial Sequence
  ENSG00000170448_33 (sequence is synthesized)
ctgtgtgcttcttgctccgcggtttatttctgtacctagtcctccctcccctcttcggtccatctccaaagcccgggcttggcggggactcgccctccgggatggaagcttcctggcgcc

SEQ ID NO: 568331 - DNA, 120 bp, Artificial Sequence
  ENSG00000170448_34 (sequence is synthesized)
tttaactcccagcccaatgtgctcttctactcatgttatttaaatagaagatttttgtaggtgtaccacataggaagagcaaatgaaataaactctttaggctggcccagaatgccttca

SEQ ID NO: 568332 - DNA, 120 bp, Artificial Sequence
  ENSG00000170448_35 (sequence is synthesized)
gggagctaagtccaatagtggcacatagtaattattaagttgatttttaaaaattttatggtattctcttttttaagttaagagaaaataagcaagtaatcactatttgaagcagatatt

SEQ ID NO: 568333 - DNA, 120 bp, Artificial Sequence
  ENSG00000170448_36 (sequence is synthesized)
aagctatcagatgaactttgcttttttatggcagacaggtctttgagggaaaaatcatttaaaatttgaaaatcgggttgtttgtaggaattgcagtgcaacaaagtacgtgaaaatcag

SEQ ID NO: 568334 - DNA, 120 bp, Artificial Sequence
  ENSG00000170454_0 (sequence is synthesized)
acctgtcttctccactgcctgtaccagcccacctcaggtgccttctcgccggccttcctcacccaccatgtctcggcagtcctccatcaccttccagtctggcagccgcaggggcttcag

SEQ ID NO: 568335 - DNA, 120 bp, Artificial Sequence
  ENSG00000170454_1 (sequence is synthesized)
caccacctcggccatcaccccggcagctggccgctcccgcttcagctctgtctctgtggcccgctctgcagcagggagtgggggcctgggaaggatcagcagtgctggggccagctttgg

SEQ ID NO: 568336 - DNA, 120 bp, Artificial Sequence
  ENSG00000170454_2 (sequence is synthesized)
aagccgcagcctctacaacctggggggtgccaagcgggtctccatcaatgggtgtggcagcagctgccgaagtggctttggtggcagggccagcaacaggtttggagtcaacagtggatt

SEQ ID NO: 568337 - DNA, 120 bp, Artificial Sequence
  ENSG00000170454_3 (sequence is synthesized)
tggctatgggggtggagttggaggaggcttcagtggccccagcttccccgtgtgtccccctggaggcatccaagaggtcactgtcaaccagagtctcctgactcctcttcacctgcaaat

SEQ ID NO: 568338 - DNA, 120 bp, Artificial Sequence
  ENSG00000170454_4 (sequence is synthesized)
cgaccccaccatccagcgggtgcgggccgaggagcgcgagcagatcaagaccctcaacaataagttcgcctccttcatcgacaaggtgaggttcttggagcagcagaacaaggtcctgga

SEQ ID NO: 568339 - DNA, 120 bp, Artificial Sequence
  ENSG00000170454_5 (sequence is synthesized)
gaccaagtgggccctcctgcaggagcagggctccaggactgtgaggcagaacctagagcccctctttgattcctataccagtgagctccgacggcagctggaaagcatcaccaccgagag

SEQ ID NO: 568340 - DNA, 120 bp, Artificial Sequence
  ENSG00000170454_6 (sequence is synthesized)
gggcaggcttgaagctgaactgaggaacatgcaggatgttgtggaagatttcaaagtcaggtacgaagatgaaattaacaagcgcacagctgctgagaatgaatttgtagccctgaaaaa

SEQ ID NO: 568341 - DNA, 120 bp, Artificial Sequence
  ENSG00000170454_7 (sequence is synthesized)
ggacgtagatgctgcctatatgaacaaggtggagctggaagccaaggtcaaatctctgcccgaggagatcaacttcatccactcagtctttgatgcagagctgtcccagttgcagaccca

SEQ ID NO: 568342 - DNA, 120 bp, Artificial Sequence
  ENSG00000170454_8 (sequence is synthesized)
ggtcggtgacacatccgtggtgctgtccatggacaacaaccgcaacctggacctggatagtatcatcgccgaggtcaaagcacaatacgaggacattgccaaccgcagccgggccgaggc

SEQ ID NO: 568343 - DNA, 120 bp, Artificial Sequence
  ENSG00000170454_9 (sequence is synthesized)
taccagaccaagtacgaggagctgcaggtcaccgcaggcagacatggggatgaccttcgaaacaccaaacaagagatctctgaaatgaaccgcatgatccagaggctgagagctgagatt

SEQ ID NO: 568344 - DNA, 120 bp, Artificial Sequence
  ENSG00000170454_10 (sequence is synthesized)
gacagcgtcaagaagcagtgttccagcttgcaaacggccattgctgatgcagagcagcggggagaactggctctcaaggatgcacgggccaagctggtggaccttgaggaggccctgcag

SEQ ID NO: 568345 - DNA, 120 bp, Artificial Sequence
  ENSG00000170454_11 (sequence is synthesized)
aaggccaagcaggacatggctcggctcctgcgtgagtaccaggagctgatgaacatcaagctggccctggacgtggagatcgccacctaccgcaagctgctggaaggcgaggagtgcagg

SEQ ID NO: 568346 - DNA, 120 bp, Artificial Sequence
  ENSG00000170454_12 (sequence is synthesized)
ttgagtggagagggagtttctccagttaacatttctgtggtcacctctactctttccagtggctatggaagcggcagcagcattggaggtggaaacctgggcctcggtgggggcagcggc

SEQ ID NO: 568347 - DNA, 120 bp, Artificial Sequence
  ENSG00000170454_13 (sequence is synthesized)
tactccttcaccaccagtggtgggcatagcctgggtgcaggcctgggaggttctggattcagtgccaccagcaaccggggcttagggggcagtggttctagcgtcaagtttgtctccacc

SEQ ID NO: 568348 - DNA, 120 bp, Artificial Sequence
  ENSG00000170454_14 (sequence is synthesized)
acatcctccagccagaagagctacacgcactaagagagccccatggctccctctaccctgccttgaggcctgtttgcagtcacacctggacaccagggtcctcctccttcctctctcctt

SEQ ID NO: 568349 - DNA, 120 bp, Artificial Sequence
  ENSG00000170454_15 (sequence is synthesized)
gtaaggtgcacctgtgctgctgggagcctggagtactggctatacccattcccaggcctaagccagcctctccctcctgacagtgcccagactgccagcagcacccgtctgttacacatg

SEQ ID NO: 568350 - DNA, 120 bp, Artificial Sequence
  ENSG00000170454_16 (sequence is synthesized)
tgaaaccaaagcctgctctctcctaaggctctcattcagcctatcttgcgaggcccgggcagctggaaagtcctcctccagctccacctccctccctccctccagatgcagaggctgggg

SEQ ID NO: 568351 - DNA, 120 bp, Artificial Sequence
  ENSG00000170454_17 (sequence is synthesized)
agtctctcaatgccaggttgtcacccacctgtctcatagtgtttataagtggcctgctgggagtgagtgctccctctgttccctccctggaatgtgtctattaaatgcatgtgtcacctg

SEQ ID NO: 568352 - DNA, 80 bp, Artificial Sequence
  ENSG00000170456_0 (sequence is synthesized)
agacgcggcggctctcagctcgcgagcgcagctgcggctgcgagggcctctcaggccgacactccccccgcgcccctccc

SEQ ID NO: 568353 - DNA, 120 bp, Artificial Sequence
  ENSG00000170456_1 (sequence is synthesized)
ccgagcgaggaggcaggctgcggcggcgagaggcggctgcgcggccatgggcgcgccagtgtcgccctagggcgggcgcacagaccacagccggagcggtggtggcagcctccgcagaaa

SEQ ID NO: 568354 - DNA, 80 bp, Artificial Sequence
  ENSG00000170456_2 (sequence is synthesized)
gcagcctccgcagaaagccttcccgggcggcggcggcggcggcccctggagcagcgcggccgggatgagcgggagctgcg

SEQ ID NO: 568355 - DNA, 120 bp, Artificial Sequence
  ENSG00000170456_3 (sequence is synthesized)
ccgcttcgcgcactacttcgtgctgtgcgggatcgacgcggacagcgggctggagcctgacgagctggcgggcgaaaattttgaccagagtcctttgagaagaacattcaaatccaaagt

SEQ ID NO: 568356 - DNA, 120 bp, Artificial Sequence
  ENSG00000170456_4 (sequence is synthesized)
tctcgcccactatcctcagaatatagaatggaacccttttgatcaagatgcggtgaacatgttgtgcatgcctaaagggctatctttcaggacacaaacggacaataaagacccccagtt

SEQ ID NO: 568357 - DNA, 120 bp, Artificial Sequence
  ENSG00000170456_5 (sequence is synthesized)
tcactcatttataattaccagggaagatggttctcgcacctatggttttgttctcactttttatgaagaagttacaagtaagcaaatctgcacagcaatgcagacactttaccagatgca

SEQ ID NO: 568358 - DNA, 120 bp, Artificial Sequence
  ENSG00000170456_6 (sequence is synthesized)
caacgctgagcattacagcagtgtgtatgcttcatcttcctgcagtatggactcattggcaagtagtcttgatgaaggagatacaacttcccttttgaaactccagcgatacaactccta

SEQ ID NO: 568359 - DNA, 120 bp, Artificial Sequence
  ENSG00000170456_7 (sequence is synthesized)
tgatattagcagagacaccctgtatgtttcaaaaagtatatgcttgatcacaccgttaccattcatgcaggcctgcaagaaattccttatccagctttacaaggctgttacctcacagca

SEQ ID NO: 568360 - DNA, 120 bp, Artificial Sequence
  ENSG00000170456_8 (sequence is synthesized)
gccaccacccttgccacttgaaagctatatccacaatattctttatgaagtaccccttccacctccagggaggtcactgaaattttatggtgtttatgaacctgtcatctgccagaggcc

SEQ ID NO: 568361 - DNA, 120 bp, Artificial Sequence
  ENSG00000170456_9 (sequence is synthesized)
tgggcccagtgaactccccctctctgattacccccttcgggaggcatttgagctcctgggattagagaacctggtgcaggtgtttacctgtgttcttttagagatgcaaatccttctcta

SEQ ID NO: 568362 - DNA, 120 bp, Artificial Sequence
  ENSG00000170456_10 (sequence is synthesized)
ctcacaagattatcaacgcctgatgactgtggcagaaggcatcaccacacttttgttcccatttcaatggcaacatgtttatgtgcccattctacctgcttctctgctacattttcttga

SEQ ID NO: 568363 - DNA, 120 bp, Artificial Sequence
  ENSG00000170456_11 (sequence is synthesized)
tgctcctgtcccttatctgatgggccttcagtcaaaagaaggaactgaccgttctaaactagaacttcctcaagaggctaatttgtgttttgtggacattgacaaccattttattgagtt

SEQ ID NO: 568364 - DNA, 120 bp, Artificial Sequence
  ENSG00000170456_12 (sequence is synthesized)
gcctgaagaatttccacagttccccaataaagtggattttatccaagaactctctgaggttcttgttcaatttgggatccctcctgagggcagcctacattgcagtgagagtaccagcaa

SEQ ID NO: 568365 - DNA, 120 bp, Artificial Sequence
  ENSG00000170456_13 (sequence is synthesized)
actgaagaatatggttctgaaagacttggtcaatgacaaaaagaacggcaatgtctgtactaataacatcagcatgtatgagttactgaagggcaatgaaaccatagcccgcttgcaggc

SEQ ID NO: 568366 - DNA, 120 bp, Artificial Sequence
  ENSG00000170456_14 (sequence is synthesized)
tctggccaagcgtactggtgtggctgtggaaaaaatggacctctctgcttctctgggtgaaaaagacaaggatttaaaactgcattgtgaagaggcagaactaagggactaccagctcaa

SEQ ID NO: 568367 - DNA, 120 bp, Artificial Sequence
  ENSG00000170456_15 (sequence is synthesized)
tgtacagctccgagaggtctttgctaaccgttttacacagatgtttgcagattacgaagcatttgtcattcagactgcccaggacatggaatcctggctgaccaaccgggaacagatgca

SEQ ID NO: 568368 - DNA, 120 bp, Artificial Sequence
  ENSG00000170456_16 (sequence is synthesized)
gaactttgacaaagcttcctttctgtctgaccagcctgagccttacctgccatttctttcacgcttcattgaaacacagatgtttgccacctttattgataataaaattatgtctcagtg

SEQ ID NO: 568369 - DNA, 120 bp, Artificial Sequence
  ENSG00000170456_17 (sequence is synthesized)
ggaagagaaagatcctttgcttcgggtctttgacactcggattgataagataaggctgtataatgtaagggcacccaccttgcggacatctatatatcagaaatgcagcactttaaaaga

SEQ ID NO: 568370 - DNA, 120 bp, Artificial Sequence
  ENSG00000170456_18 (sequence is synthesized)
agcagcccaatcaattgagcagagactgatgaaaatggatcacactgcaatccacccacatctacttgatatgaaaattggtcaaggcaaatatgagcaggggttctttccaaagttaca

SEQ ID NO: 568371 - DNA, 120 bp, Artificial Sequence
  ENSG00000170456_19 (sequence is synthesized)
gtccgatgtcttggcaacaggaccaaccagtaacaatcgctgggtaagtcggagtgccactgcacagcgcaggaaagaacgccttcgccagcattctgagcatgttgggctggacaacga

SEQ ID NO: 568372 - DNA, 120 bp, Artificial Sequence
  ENSG00000170456_20 (sequence is synthesized)
cttgagggagaaatatatgcaagaggcacgaagtttaggaaaaaacctgaggcaacccaaactgtcagacctctctcctgcagttattgcacagaccaactgtaaattcgtagaaggctt

SEQ ID NO: 568373 - DNA, 120 bp, Artificial Sequence
  ENSG00000170456_21 (sequence is synthesized)
attaaaagaatgtagaatgaagacaaagcgcatgttggtggagaagatgggacatgaagcggtggaacttggccatggagaagcaaacatcaccggcctggaggagaacaccttgatcgc

SEQ ID NO: 568374 - DNA, 120 bp, Artificial Sequence
  ENSG00000170456_22 (sequence is synthesized)
cagcctttgtgacctgctggagaggatatggagccatggcttgcaggtcaagcaggggaagtcggctttgtggtcacatttaattcaatttcaggacagagaagagaaacaagagcacct

SEQ ID NO: 568375 - DNA, 120 bp, Artificial Sequence
  ENSG00000170456_23 (sequence is synthesized)
tgcagaatcaccagttgccctcggaccagaaagaagaaaatctgactcaggagttatgttgccaacgctcagggtctctcttattcaggacatgaggcatattcaaaacatgagtgagat

SEQ ID NO: 568376 - DNA, 120 bp, Artificial Sequence
  ENSG00000170456_24 (sequence is synthesized)
caagactgatgttggacgagctcgggcgtggataagactgtctctagaaaagaagctcttgtcccagcatcttaagcagttgctttctaaccaaccactcaccaagaagctttataagcg

SEQ ID NO: 568377 - DNA, 120 bp, Artificial Sequence
  ENSG00000170456_25 (sequence is synthesized)
atatgcttttctacgttgcgaagaagaaagagagcagtttctttaccaccttctttctctcaatgctgtggactatttctgcttcaccagtgtgttcaccactatcatgattccgtatag

SEQ ID NO: 568378 - DNA, 120 bp, Artificial Sequence
  ENSG00000170456_26 (sequence is synthesized)
gtcagtgatcatcccaatcaaaaagctgagcaatgcaataatcacatcaaacccttggatctgtgtatcaggagagctgggagacacaggagtaatgcagattcccaaaaacctcctcga

SEQ ID NO: 568379 - DNA, 120 bp, Artificial Sequence
  ENSG00000170456_27 (sequence is synthesized)
aatgacctttgagtgccagaacttggggaagctgaccactgttcagattggtcacgataactcaggactgttagccaaatggctagtggattgtgtcatggtcagaaatgaaatcacagg

SEQ ID NO: 568380 - DNA, 120 bp, Artificial Sequence
  ENSG00000170456_28 (sequence is synthesized)
acatacatacagattcccatgtgggcggtggctggggaaaggcattgatgatgggagcctggagagaattcttattggagagttgatgacatcagcatcagatgaagatctagtaaagca

SEQ ID NO: 568381 - DNA, 120 bp, Artificial Sequence
  ENSG00000170456_29 (sequence is synthesized)
gtgtcggactccaccccagcagaagtcacccaccacggctaggagattgagcatcacttcactgacaggaaaaaacaacaaacccaatgctgggcagatacaagaaggaattggagaagc

SEQ ID NO: 568382 - DNA, 120 bp, Artificial Sequence
  ENSG00000170456_30 (sequence is synthesized)
tgtgaacaatattgtgaaacattttcataaacctgaaaaagagagaggaagcctcaccgtgttgctgtgtggagaaaatggcctggttgcagcccttgagcaagttttccaccatgggtt

SEQ ID NO: 568383 - DNA, 120 bp, Artificial Sequence
  ENSG00000170456_31 (sequence is synthesized)
caaatctgcccgcatctttcacaagaatgtcttcatctgggacttcatagagaaagtggttgcttattttgaaacaactgaccagattctagataatgaagatgatgtccttattcagaa

SEQ ID NO: 568384 - DNA, 120 bp, Artificial Sequence
  ENSG00000170456_32 (sequence is synthesized)
atcatcctgcaaaaccttctgccactacgtaaatgctattaatactgcacccaggaacattgggaaggatggcaaattccagattttagtttgccttggaacaagggatcgcctgctccc

SEQ ID NO: 568385 - DNA, 120 bp, Artificial Sequence
  ENSG00000170456_33 (sequence is synthesized)
acagtggattccattgttagctgagtgtcctgccatcactcgaatgtatgaagagagcgctctcctgcgagaccgcatgactgtcaactcccttatccgaattctgcagaccattcagga

SEQ ID NO: 568386 - DNA, 120 bp, Artificial Sequence
  ENSG00000170456_34 (sequence is synthesized)
cttcaccatagtcctagaaggatcactcatcaaaggagtggatgtgtaacccaactggctagaaactctcagtccaaaccttgctccttccccaactaggggaccgatttggacttgtct

SEQ ID NO: 568387 - DNA, 120 bp, Artificial Sequence
  ENSG00000170456_35 (sequence is synthesized)
gacagtagtgagtcactgcaggggcagccaaacatatgccccatttggaacaatcctcactctacagacaaggcaaaatgttgtattgtagttcatttgaacctggaatttagtataaaa

SEQ ID NO: 568388 - DNA, 120 bp, Artificial Sequence
  ENSG00000170456_36 (sequence is synthesized)
tagagtattttcatgtgttagatgtgtgtaaatatgctatcttctttaagaaattatattactctaataagatgcttttcttagattgaatattcctgtgacttaaaataagtagcttaa

SEQ ID NO: 568389 - DNA, 120 bp, Artificial Sequence
  ENSG00000170456_37 (sequence is synthesized)
aaatgttgggggttggggggaagagtggtgctagccaggaagaagccagtaaacatgtaaatatagtgcaacccagtcgggcttttttttttctccaggtatcacaaagaaacccagaat

SEQ ID NO: 568390 - DNA, 120 bp, Artificial Sequence
  ENSG00000170456_38 (sequence is synthesized)
gcattgttatgtagtagccatccatcttggagtctgatcctttgtattgtggatgcacacagctttacctactgtactggtagtcttcacttctatcttttaagttacaaactgttttat

SEQ ID NO: 568391 - DNA, 120 bp, Artificial Sequence
  ENSG00000170456_39 (sequence is synthesized)
agtcttttggaaaaaaatttcagtccgcacaagatgatataattggagtattttaaacactagaccccaggagcttggctgaactggaaagagaacatacaaagctctgagaaatgtgtt

SEQ ID NO: 568392 - DNA, 120 bp, Artificial Sequence
  ENSG00000170456_40 (sequence is synthesized)
caattgtgggattataacttctttacacttcggaaagattagcctagactaacttcattcttggcatttttattcttgttatttgaggtactttgggaagatgtgaatttcagtgttaga

SEQ ID NO: 568393 - DNA, 120 bp, Artificial Sequence
  ENSG00000170456_41 (sequence is synthesized)
ttcatagtgataagaactgcaaacagcaatttgattctgtacttttaatttggccatctaaactgtgcagtggtctacctcttaaggataaccatgagccctgtctttgttagggtctaa

SEQ ID NO: 568394 - DNA, 120 bp, Artificial Sequence
  ENSG00000170456_42 (sequence is synthesized)
tcacccacctctccagggcccatcccccctcgggaaatggaaggaatgtctaaggaggaggagggctgtgtgtggcttggaatgtttttgtgaaagcatttgttgaccatgataatgcaa

SEQ ID NO: 568395 - DNA, 120 bp, Artificial Sequence
  ENSG00000170456_43 (sequence is synthesized)
ataacagaaggagagagagaatgaaccctttctgggtgtttcagggcaagctttacgttcctttgtaggaaggggagtaataatgtaaaacaactgacccagagaagctaaaagccactg

SEQ ID NO: 568396 - DNA, 120 bp, Artificial Sequence
  ENSG00000170456_44 (sequence is synthesized)
gcagcacaggctgacaaaatggaagcaaagcaagaggtggcaacaattttgaaagaccaaaagttgtgagtaactttccagtttgatagtttataaagaagttaagtaaatgtagtattg

SEQ ID NO: 568397 - DNA, 120 bp, Artificial Sequence
  ENSG00000170456_45 (sequence is synthesized)
gctagttactgtaagtcctcatcttctggtaggtcctgtaactctaattaggcatttgtacatttttagcagcaaaattgcctcagcagagctcccagttttattcccagttgtggctga

SEQ ID NO: 568398 - DNA, 120 bp, Artificial Sequence
  ENSG00000170456_46 (sequence is synthesized)
aaagcaaagccatggcatcagtatccttgtgcaatcggaggttgctgggctttcaccacctgtgttgttaaccttatttcctggaggaagaaacagatgaaacaagtgcctaactccctt

SEQ ID NO: 568399 - DNA, 120 bp, Artificial Sequence
  ENSG00000170456_47 (sequence is synthesized)
tatcaaacacagccaaggacagcctcttttaacatgtgacttcatacttgaggaaaaggagagttgacagctgtatttaaaaacccatggagccgggtgcggtggctcacgcctatgatc

SEQ ID NO: 568400 - DNA, 120 bp, Artificial Sequence
  ENSG00000170456_48 (sequence is synthesized)
aaaaataaatagataaaaataaaaacccatggaaatggtttaagaaaatggttctgggtacaccagaaatttgtttgcctgaagctaaagtgtgtctacaatggtacagctcttccaggg

SEQ ID NO: 568401 - DNA, 120 bp, Artificial Sequence
  ENSG00000170456_49 (sequence is synthesized)
acatgggaagtttatcgtgggagatatccagaacctgttttacactgggctcctactgtgtttggtgatcagaaactatagaggggtccaacccaggatttcatgtttgtatcttcataa

SEQ ID NO: 568402 - DNA, 120 bp, Artificial Sequence
  ENSG00000170456_50 (sequence is synthesized)
ggccatgctcctgacaggtctaggcaacctgggggatgacttaggttaatgtgctaggattgacacacctcatccagccttcttactttgtggatgggaacacttaaggaatagagagat

SEQ ID NO: 568403 - DNA, 120 bp, Artificial Sequence
  ENSG00000170456_51 (sequence is synthesized)
taaatcttacacttaccccacagctggttactgacaacacaagctctagaattcatgtttgtttgtttgttttatttcaccaggctgcatgagactgaccttccggcattcttactaata

SEQ ID NO: 568404 - DNA, 120 bp, Artificial Sequence
  ENSG00000170456_52 (sequence is synthesized)
gtctttctattatactattggatctttattcatccacctatacaagtaggaaataaggatgaatattcatttagaagaattaatattcatattaacacattgctctcagattattgggaa

SEQ ID NO: 568405 - DNA, 120 bp, Artificial Sequence
  ENSG00000170456_53 (sequence is synthesized)
ttaacatcttgtaaaaactgggagcaggccaggtacggtggctaacgcctgtaatcctgacactttgggagtctgaggcgggtggttcatctgaggtcagtcgggagttcaagaccagac

SEQ ID NO: 568406 - DNA, 76 bp, Artificial Sequence
  ENSG00000170456_54 (sequence is synthesized)
accccgtctctactaaaaaaaaaaaatagacaaaaattagcgggggggtggtggcagtttaaacacaggaggtgga

SEQ ID NO: 568407 - DNA, 69 bp, Artificial Sequence
  ENSG00000170456_55 (sequence is synthesized)
cactgcactccactgcagccaaagttggatttgcggcctatgaataaaaccattactttaaaaagtaat

SEQ ID NO: 568408 - DNA, 120 bp, Artificial Sequence
  ENSG00000170456_56 (sequence is synthesized)
tttgcggcctatgaataaaaccattactttaaaaagtaatacccccaaaaaagttacacctgaagtttcatcttcatgcctttgtgtaatattactataatggtgaaatgatgatttaaa

SEQ ID NO: 568409 - DNA, 120 bp, Artificial Sequence
  ENSG00000170456_57 (sequence is synthesized)
aaaaacacatcagaactgacacatcctcttggatgatgggtccttcagtcaccttgtgagcccatgtacttattccgttgatacagcctgtgctataaacatgtggggccctccttgtgt

SEQ ID NO: 568410 - DNA, 120 bp, Artificial Sequence
  ENSG00000170456_58 (sequence is synthesized)
gagctgcttgaatggccagtacccccattcttttgaatattcccaatggcagtcaatcttggcctttaagaataaatttaaatatttggaaatagtccttaggatccaagtttgatcaat

SEQ ID NO: 568411 - DNA, 120 bp, Artificial Sequence
  ENSG00000170456_59 (sequence is synthesized)
gaaaaggatgcttaagctgagtttggggtcacataagaagtgcagttataaagaaataagacatgttgggcatggcagtacacacctgtagtcccagctgcttgggaagccaaggcagga

SEQ ID NO: 568412 - DNA, 120 bp, Artificial Sequence
  ENSG00000170456_60 (sequence is synthesized)
ggatcacttcaacccaggagtttgagtccagcctgggtaacatagggaaaccccatctcaaaaaaacaaaacaaaggacttagtttttatgtggctcataagtgtctctaagttatacca

SEQ ID NO: 568413 - DNA, 120 bp, Artificial Sequence
  ENSG00000170456_61 (sequence is synthesized)
aaagtttgagcacaacagtagtagcagaatgcttagaataaatgcttgacttttaagctgacttttggaaggaccatacccacatagaggcatcttttctgctgtggtaattttttaaat

SEQ ID NO: 568414 - DNA, 120 bp, Artificial Sequence
  ENSG00000170456_62 (sequence is synthesized)
taatacattgctttaggattacatctcaaagtaaataaaaaaatcaatatttaatttgtttttttcctgcaaataaattaaatgctgggaccataatgattatttttgcatagtaatagc

SEQ ID NO: 568415 - DNA, 120 bp, Artificial Sequence
  ENSG00000170456_63 (sequence is synthesized)
tggtgaagaagttgttttaaaattaaattgccaaaagtattacctcttgaaaaatttattttcccaaagtttttcatatgtcatgaaacccctaatcttgacctttatgacacagtggca

SEQ ID NO: 568416 - DNA, 120 bp, Artificial Sequence
  ENSG00000170456_64 (sequence is synthesized)
ttacactgatgttggaagcatgtgtgagatctgtgccctggtcgggagtcatatgccttaaaaatgactgcgagtcagtgtgaagtagtataaagtggagtcctacgtgggaaaaagcag

SEQ ID NO: 568417 - DNA, 120 bp, Artificial Sequence
  ENSG00000170456_65 (sequence is synthesized)
gctactgaggacaaaaacctcccaaccctccccaccttgttttccactgggaatgagaatttgatatgagaaacttcaaccttgcagaagtgtggatttccctctgaaatttaaatgttt

SEQ ID NO: 568418 - DNA, 120 bp, Artificial Sequence
  ENSG00000170456_66 (sequence is synthesized)
cacacatttttgtaccttttgtaaccttgtggtatttactttcacatggctttttaaaaaattattttaatgaacttctatcacactatatgaatgatatgggggaaatactgaactgct

SEQ ID NO: 568419 - DNA, 120 bp, Artificial Sequence
  ENSG00000170456_67 (sequence is synthesized)
catatttccttttttggcaataaagcactgttatatgtaaatgtaagtgaaaaagaggttcaagactatacaacagcttatgtgtagtatatgttgacatccctaaggtattttgaaaca

SEQ ID NO: 568420 - DNA, 120 bp, Artificial Sequence
  ENSG00000170456_68 (sequence is synthesized)
tgaggtgacagacaaggacctcaaatttccagggaaatatttatttcacaacattaggagtgtagctcttcataatgaaatatcttctttctgctaaagattacaatttttcatttaggg

SEQ ID NO: 568421 - DNA, 120 bp, Artificial Sequence
  ENSG00000170456_69 (sequence is synthesized)
aactgtgaatattttctgtgaggtttacagaaactagtgtatccttttcactatgttgaaaagacaatctgaactttagctatttatatttcagtattaacacaccttcactgattgaga

SEQ ID NO: 568422 - DNA, 120 bp, Artificial Sequence
  ENSG00000170456_70 (sequence is synthesized)
gtcttgagcccttctctacttttataaagtgaatcctatttccaagtcatccatgtcttttgaagtctgtttcttatataagtatttattactttactgtttagcataaataggagacag

SEQ ID NO: 568423 - DNA, 120 bp, Artificial Sequence
  ENSG00000170456_71 (sequence is synthesized)
aaaaggataataaactactaggtcctttattcctattaaaataaatttataaatcccttgaatcaactgaattctaagctttttgaagaggttgctgatgtagtgtgatcaaaagaatct

SEQ ID NO: 568424 - DNA, 120 bp, Artificial Sequence
  ENSG00000170456_72 (sequence is synthesized)
aaggagaacctcctctccaaaatctgattggagctgttcaccctctcaaggacaagataaagattgacttcagagatatatcacatcaagctagaggaaaaaaaaaaaacctcaaataaa

SEQ ID NO: 568425 - DNA, 120 bp, Artificial Sequence
  ENSG00000170456_73 (sequence is synthesized)
atttttcctcattcgaagggatccagggtatccttgggttatgtaggagggaatcatatttgttctaatttacctgaatgtacttgtgtgtgaatccaatcttgattctaaacaccaaat

SEQ ID NO: 568426 - DNA, 120 bp, Artificial Sequence
  ENSG00000170456_74 (sequence is synthesized)
cttgtcaacagtagagaagtatagtaaggagttcctgttgtcaatcaaatgagggtgtgaaacatttagaatgctctgtgttacacttgaaccatgtataaatgtaacctgtgtatcttt

SEQ ID NO: 568427 - DNA, 120 bp, Artificial Sequence
  ENSG00000170456_75 (sequence is synthesized)
tttttaattagcttttctgaatttaaattatattgtttttctttgtattgttagcaaaatgcatcagaactggattttttttctcatctgaacataatataaaatttgaaagagtattgt

SEQ ID NO: 568428 - DNA, 120 bp, Artificial Sequence
  ENSG00000170456_76 (sequence is synthesized)
gatattaagcactttaacatacatatcagacaaactgacgtgggtttttcaggtttgggagtacatttaaatatgacttttcatgctttgttctttacaaataaaactgtgggattgata

SEQ ID NO: 568429 - DNA, 120 bp, Artificial Sequence
  ENSG00000170456_77 (sequence is synthesized)
tccagcagatgtcattgtgtagattcttaatgttctttaaaaaaaaaactgtttagttatagtttaaaatattaatccttttgtacggacatatagcagaaaacacccttttttccattt

SEQ ID NO: 568430 - DNA, 120 bp, Artificial Sequence
  ENSG00000170456_78 (sequence is synthesized)
ttgtaatttcaagacatctataataaggctctaaaacaagtctttctgtgtattacatcaagtaaagatcaagttgaggataaatttttagttactatgtctcctataggagaaaaattg

SEQ ID NO: 568431 - DNA, 120 bp, Artificial Sequence
  ENSG00000170456_79 (sequence is synthesized)
tctgcatgagaagcctagacatttctaagtttcaagcataattataaggagtagtgtgatgtacttgcctatgctttgttcttggcttgctggcaccagttttttttcttgaatctctaa

SEQ ID NO: 568432 - DNA, 120 bp, Artificial Sequence
  ENSG00000170456_80 (sequence is synthesized)
tatatttttgaaagtgttttaaaactatttttaaattaagatccttacacttttatttgtactctttgaaaataagaccataattatacaacaagtaagttttgatttttttctgtgtga

SEQ ID NO: 568433 - DNA, 120 bp, Artificial Sequence
  ENSG00000170456_81 (sequence is synthesized)
aagttttgatttttttctgtgtgaaatctgcatatatatatagtgtcttgctatgttgcccaggtcttgaactcctgggctcaagcagtgctcctgcctcagcctcccaaagtattggga

SEQ ID NO: 568434 - DNA, 120 bp, Artificial Sequence
  ENSG00000170456_82 (sequence is synthesized)
ccatgcccagcctgattgtttcgtttcttatgatcaaaagagaaatgcaatcagaagacttgttaactgttttctagtatcaaatttgtaaaaataaagcagaaaacatcatcccaaaca

SEQ ID NO: 568435 - DNA, 120 bp, Artificial Sequence
  ENSG00000170456_83 (sequence is synthesized)
acggaccccgcctggcgcgccggccccttcgcttgcagccgcactcggaggcggccggctgaagtgcagtggcatgatctcagatcactacaacctccacctcttgggttccagtaattc

SEQ ID NO: 568436 - DNA, 73 bp, Artificial Sequence
  ENSG00000170456_84 (sequence is synthesized)
cagatcactacaacctccacctcttgggttccagtaattctcctgcctggccttcctgagtaactgggattat

SEQ ID NO: 568437 - DNA, 120 bp, Artificial Sequence
  ENSG00000170456_85 (sequence is synthesized)
ggcctcccgaagtgctgagattacagttgtgagccaacatgcccagccaggatttttgtaccaatggctagaagcagatcgtcatggcaagagccaaggtgctgcaaatacgacttcagg

SEQ ID NO: 568438 - DNA, 120 bp, Artificial Sequence
  ENSG00000170456_86 (sequence is synthesized)
cgagctggcggagatacggggtcaaccttcattcttctgcgtaaagatatccagttttcccagcaccattgactgaagagactgtcctttctccattgtatgttctcggcacctttgtct

SEQ ID NO: 568439 - DNA, 120 bp, Artificial Sequence
  ENSG00000170456_87 (sequence is synthesized)
aagtaaaaagaaccatagttttccttttgtggttattagtggctttattattgattttaacatttttaaattttttattcttctgtgcctatgcttacccatatattattgattttgtta

SEQ ID NO: 568440 - DNA, 120 bp, Artificial Sequence
  ENSG00000170456_88 (sequence is synthesized)
accttttttaaatgcagactttttgtcttccagccccattaagaacttttctttaccaagtatttttacattagataaaataattttacaagcaaataaaccagctcattgaactggtca

SEQ ID NO: 568441 - DNA, 120 bp, Artificial Sequence
  ENSG00000170456_89 (sequence is synthesized)
ttttgtcccaaccacagtcctgacttcacaaccttttgtattcccaataaaaagactaaatgaaatgaaatgtcatctcactttgaatgagttttaacgtgatggggtttctgtcacttt

SEQ ID NO: 568442 - DNA, 120 bp, Artificial Sequence
  ENSG00000170456_90 (sequence is synthesized)
acttctcacaggagttaacagttgttatggggtggcatatgagtgtcctctgtcttttagtacactaaaacattaattgttgttatatgcacatacacttacggacttttttgcatttca

SEQ ID NO: 568443 - DNA, 120 bp, Artificial Sequence
  ENSG00000170458_0 (sequence is synthesized)
acaagtgtgaagcctggaagccggcgggtgccgctgtgtaggaaagaagctaaagcacttccagagcctgtccggagctcagaggttcggaagacttatcgaccatggagcgcgcgtcct

SEQ ID NO: 568444 - DNA, 120 bp, Artificial Sequence
  ENSG00000170458_1 (sequence is synthesized)
gcttgttgctgctgctgctgccgctggtgcacgtctctgcgaccacgccagaaccttgtgagctggacgatgaagatttccgctgcgtctgcaacttctccgaacctcagcccgactggt

SEQ ID NO: 568445 - DNA, 120 bp, Artificial Sequence
  ENSG00000170458_2 (sequence is synthesized)
ccgaagccttccagtgtgtgtctgcagtagaggtggagatccatgccggcggtctcaacctagagccgtttctaaagcgcgtcgatgcggacgccgacccgcggcagtatgctgacacgg

SEQ ID NO: 568446 - DNA, 120 bp, Artificial Sequence
  ENSG00000170458_3 (sequence is synthesized)
tcaaggctctccgcgtgcggcggctcacagtgggagccgcacaggttcctgctcagctactggtaggcgccctgcgtgtgctagcgtactcccgcctcaaggaactgacgctcgaggacc

SEQ ID NO: 568447 - DNA, 120 bp, Artificial Sequence
  ENSG00000170458_4 (sequence is synthesized)
taaagataaccggcaccatgcctccgctgcctctggaagccacaggacttgcactttccagcttgcgcctacgcaacgtgtcgtgggcgacagggcgttcttggctcgccgagctgcagc

SEQ ID NO: 568448 - DNA, 120 bp, Artificial Sequence
  ENSG00000170458_5 (sequence is synthesized)
cccaagcacactcgcctgccttttcctgcgaacaggttcgcgccttcccggcccttaccagcctagacctgtctgacaatcctggactgggcgaacgcggactgatggcggctctctgtc

SEQ ID NO: 568449 - DNA, 120 bp, Artificial Sequence
  ENSG00000170458_6 (sequence is synthesized)
cccacaagttcccggccatccagaatctagcgctgcgcaacacaggaatggagacgcccacaggcgtgtgcgccgcactggcggcggcaggtgtgcagccccacagcctagacctcagcc

SEQ ID NO: 568450 - DNA, 120 bp, Artificial Sequence
  ENSG00000170458_7 (sequence is synthesized)
acaactcgctgcgcgccaccgtaaaccctagcgctccgagatgcatgtggtccagcgccctgaactccctcaatctgtcgttcgctgggctggaacaggtgcctaaaggactgccagcca

SEQ ID NO: 568451 - DNA, 120 bp, Artificial Sequence
  ENSG00000170458_8 (sequence is synthesized)
agctcagagtgctcgatctcagctgcaacagactgaacagggcgccgcagcctgacgagctgcccgaggtggataacctgacactggacgggaatcccttcctggtccctggaactgccc

SEQ ID NO: 568452 - DNA, 120 bp, Artificial Sequence
  ENSG00000170458_9 (sequence is synthesized)
tcccccacgagggctcaatgaactccggcgtggtcccagcctgtgcacgttcgaccctgtcggtgggggtgtcgggaaccctggtgctgctccaaggggcccggggctttgcctaagatc

SEQ ID NO: 568453 - DNA, 120 bp, Artificial Sequence
  ENSG00000170458_10 (sequence is synthesized)
caagacagaataatgaatggactcaaactgccttggcttcaggggagtcccgtcaggacgttgaggacttttcgaccaattcaaccctttgccccacctttattaaaatcttaaacaacg

SEQ ID NO: 568454 - DNA, 120 bp, Artificial Sequence
  ENSG00000170458_11 (sequence is synthesized)
aattctaccccccttggtgccaacagatgaggttcacaatctcttccacaaaacatgcagttaaatatctgaggatattcagggacttggatttggtggcaggagatcaacataaaccaa

SEQ ID NO: 568455 - DNA, 120 bp, Artificial Sequence
  ENSG00000170458_12 (sequence is synthesized)
gacaaggaagaagtcaaagaaatgaatcaagtagattctctgggatataaggaaaggaagggggctggctcggaggaagagaggtggggaggtgatcagggttcacagaggagggaactg

SEQ ID NO: 568456 - DNA, 120 bp, Artificial Sequence
  ENSG00000170464_0 (sequence is synthesized)
gtgccccgcgctccgcgcccccttctctttcagcctcgggcacgggggaggctcggcggacctgctgattgggaaccgatatggcggcgactctgggcagcggggagcgctggacggaag

SEQ ID NO: 568457 - DNA, 120 bp, Artificial Sequence
  ENSG00000170464_1 (sequence is synthesized)
cttacattgacgcagttagaagaaacaaatacccagaagacacacctcctgagagtcatgacccctgtggctgctgtaactgcatgaaggcacaaaaggaaaagaagtctgagaatgagt

SEQ ID NO: 568458 - DNA, 120 bp, Artificial Sequence
  ENSG00000170464_2 (sequence is synthesized)
ggactcagacccggcagggtgaggggaactccacgtatagtgaggaacagctgcttggggtacaaaggatcaagaaatgcagaaattactatgaaattctgggagtttctcgagatgcta

SEQ ID NO: 568459 - DNA, 120 bp, Artificial Sequence
  ENSG00000170464_3 (sequence is synthesized)
gtgacgaagagcttaagaaagcttacagaaaactcgccctgaaatttcaccctgacaagaactgtgctcctggagcaacagatgctttcaaagcaataggaaatgcatttgcagtcctga

SEQ ID NO: 568460 - DNA, 120 bp, Artificial Sequence
  ENSG00000170464_4 (sequence is synthesized)
gcaatcctgataagagacttcgctatgatgaatacggagatgaacaggtgactttcactgcccctcgagccagaccttataattattacagggattttgaagctgacatcactccagaag

SEQ ID NO: 568461 - DNA, 120 bp, Artificial Sequence
  ENSG00000170464_5 (sequence is synthesized)
agctgttcaacgtcttctttggaggacattttcctacaggaaatattcatatgttttcaaatgtgacagatgacacttactattaccgtcgacggcaccgacatgagaggacacagactc

SEQ ID NO: 568462 - DNA, 120 bp, Artificial Sequence
  ENSG00000170464_6 (sequence is synthesized)
agaaggaggaggaagaagagaaacctcagactacatattctgcatttattcagctacttccagttcttgtgattgtgattatatctgtcattactcagctgctggctactaatcccccat

SEQ ID NO: 568463 - DNA, 120 bp, Artificial Sequence
  ENSG00000170464_7 (sequence is synthesized)
atagtctgttctataaatcgaccttgggctacaccatttctagagaaactcagaacctgcaggtgccttactttgtggataaaaactttgacaaggcctacagaggagcttctctgcatg

SEQ ID NO: 568464 - DNA, 120 bp, Artificial Sequence
  ENSG00000170464_8 (sequence is synthesized)
acttggagaaaacaatagagaaggattacattgattatatccagactagttgttggaaggagaaacaacaaaagtcagagctgacaaatttggcaggattatacagagatgaacgattga

SEQ ID NO: 568465 - DNA, 120 bp, Artificial Sequence
  ENSG00000170464_9 (sequence is synthesized)
aacagaaagcagagtcgctgaaacttgaaaactgtgagaaactttccaaactcattggcctacgcagaggtggctgagaggataatggtcctacgcagggctggggttttgctacttgtt

SEQ ID NO: 568466 - DNA, 120 bp, Artificial Sequence
  ENSG00000170464_10 (sequence is synthesized)
cctatttatgttcctgattccattttataatacaaaactaggtaatgatgaacactttactatttgctaacttcgttggttgggcagagtggcaggagcatgggcacgagagccagatgt

SEQ ID NO: 568467 - DNA, 120 bp, Artificial Sequence
  ENSG00000170464_11 (sequence is synthesized)
gtcttcacaggatccttcctggggagtggctccagggaccaggagtagttcatctaagttaaattaatggcaaggcattggattccgtctccctgctccatgcctaccctgcctatgtga

SEQ ID NO: 568468 - DNA, 120 bp, Artificial Sequence
  ENSG00000170464_12 (sequence is synthesized)
atggagttcagggcatcccagagcagatccatgctttcttccttcttcccttcttcagtgaagtcttaagaaccaggcattcctaggcttagccaaagcttaatattagttatttacact

SEQ ID NO: 568469 - DNA, 120 bp, Artificial Sequence
  ENSG00000170464_13 (sequence is synthesized)
gtctaccaagaattatacctctcccttcattagagtcatcatctccgccaagatttagcctttggaacatgttcctgcccagctttccattttctaggggaatatggagaaatttaaact

SEQ ID NO: 568470 - DNA, 120 bp, Artificial Sequence
  ENSG00000170464_14 (sequence is synthesized)
attgtagtcaatagttttctattattccaatctctgctcagttagtagcattagcaaactgcctaatttgagattcctttatttccttaaccctctctcctttagagagtccagaaatta

SEQ ID NO: 568471 - DNA, 120 bp, Artificial Sequence
  ENSG00000170464_15 (sequence is synthesized)
aaactactgagcagcatctggaggcgggggccagggcgaaggtataatgcaagaccgagcctcatctcctccacgaagcctccctactccatcatagaacccagagaatgtcccttcggt

SEQ ID NO: 568472 - DNA, 120 bp, Artificial Sequence
  ENSG00000170464_16 (sequence is synthesized)
catttcccctcagtatcatcattggtgtcatcgcacttaggctgagttcctacatcccacagaggcagatggtcagacccaggaggaggcattgccagctctccaggctgtttgctcaag

SEQ ID NO: 568473 - DNA, 120 bp, Artificial Sequence
  ENSG00000170464_17 (sequence is synthesized)
cctagagatagaggagacagatcctctctccttggatatgggggtctagctttggccccagcagccactttgtttaacccagtatcctatagtttgtgatttgagatgatttttcattca

SEQ ID NO: 568474 - DNA, 120 bp, Artificial Sequence
  ENSG00000170464_18 (sequence is synthesized)
ttcaacatttattgagtgcctactataaaagcaggggctctcacacatattttcttacttaaacctcctcacaactctgaagtagatgtattatccctggttctatgaatgagaacattg

SEQ ID NO: 568475 - DNA, 120 bp, Artificial Sequence
  ENSG00000170464_19 (sequence is synthesized)
gcccagagaggatgacccaggtcttgtagtggcagagcaagacggtaggctgagtgtcaagtagaaagtgggagagcatcctcatgtctcaggtgattctagccagactggcaaagcaga

SEQ ID NO: 568476 - DNA, 120 bp, Artificial Sequence
  ENSG00000170464_20 (sequence is synthesized)
acctttcccgaggatgcctccgtcctccccaaccccatgacccctcatcttttctgtggcaatcttgcatctgttcaggacaacatccctgctgctctttaggaagcaggaccctgtcta

SEQ ID NO: 568477 - DNA, 120 bp, Artificial Sequence
  ENSG00000170464_21 (sequence is synthesized)
aggaagaattcagtcactgcctgggctgtgtggttctgggccttcctgtggagctgagctgcctgaattatcatgactctgaacttggaaggatcattaagtgactgtagcctacactcc

SEQ ID NO: 568478 - DNA, 120 bp, Artificial Sequence
  ENSG00000170464_22 (sequence is synthesized)
gaacttggaaggatcattaagtgactgtagcctacactccatgcttccttcatattggaagaaaagtttctggtagagagtcggccgggtgcactggctcaagcctgtaatcccagcact

SEQ ID NO: 568479 - DNA, 120 bp, Artificial Sequence
  ENSG00000170464_23 (sequence is synthesized)
gagctgaaatcacgccactgcactccactccatctcaaaaaaaaaaagagtctacattaaacagattccaaagtaaagtttcttcatcccaatgcatggccatgatttacacagacgtgc

SEQ ID NO: 568480 - DNA, 120 bp, Artificial Sequence
  ENSG00000170464_24 (sequence is synthesized)
tgcatggccatgatttacacagacgtgcctagcatggctcatcaacatctgaacggttgttccctaccatgcctctgcaggcattccacagagtcaggagatgggttcacaggtaaagat

SEQ ID NO: 568481 - DNA, 120 bp, Artificial Sequence
  ENSG00000170464_25 (sequence is synthesized)
tgggggctttagtggcttgtaggggacaactgctcagttgcagggagagggagcatttctagaaatagccagattttgctgcccaactagatctgtcctcctggttttagggggcccttc

SEQ ID NO: 568482 - DNA, 120 bp, Artificial Sequence
  ENSG00000170464_26 (sequence is synthesized)
ttgatcccctctgagtgactgagggaggttacattgtaaaatatgtccatgagccaaacaggcttatggaaagttcttctacacacaaaaaaatcaaagctctcctctccccatccccaa

SEQ ID NO: 568483 - DNA, 120 bp, Artificial Sequence
  ENSG00000170464_27 (sequence is synthesized)
ccactgctagaaaattggccataatgaaactgacttgacaggttaaaagaccctgtcctagatgcccaggaatcaggtagtcacacattttatggacttcatggcagcgataagtaatct

SEQ ID NO: 568484 - DNA, 120 bp, Artificial Sequence
  ENSG00000170464_28 (sequence is synthesized)
gtgatgatactaaatagaagcaataataactaactccattaaatgtcacgctgattgtctgtttttatagcaccgatggtactgttttatttattgccaatagaccacaacattcacatc

SEQ ID NO: 568485 - DNA, 120 bp, Artificial Sequence
  ENSG00000170464_29 (sequence is synthesized)
tgtttttcctcaagggaaccgtatttgcttttggttgaaggatttatctatttgatactatccagaatattgtgaagctataatttcctgggttatattttagatgggttgtctgcatgg

SEQ ID NO: 568486 - DNA, 120 bp, Artificial Sequence
  ENSG00000170464_30 (sequence is synthesized)
tggtaaaataagctttttcctctcgcctacgtcctttggaagatctcctgatcatacataactaggtagggcttattcttgctgccggagcttggcacccagctctagactgtttctttg

SEQ ID NO: 568487 - DNA, 120 bp, Artificial Sequence
  ENSG00000170464_31 (sequence is synthesized)
agcattactgcagattggagacgtgtgtgagaggagcagcgctcagaaatagggcttgaggctcaagcagaaactgaagctctcattcaaatgaagatgctctctctaccgcacgatcgg

SEQ ID NO: 568488 - DNA, 120 bp, Artificial Sequence
  ENSG00000170464_32 (sequence is synthesized)
cagtgagaaaaggaggatgaaaatccttctcatcacaaagagcttgaaggaacccacgtccccagattagcaaccctagagttcatctgctcaggccgggaaatgtgtaagcttccttga

SEQ ID NO: 568489 - DNA, 120 bp, Artificial Sequence
  ENSG00000170464_33 (sequence is synthesized)
tcagctccaggcctcacagcacgggagcagtgaccagtaaggaaacgtcactgctgtgctttctgttggaaattgttcgaaaatacagtgaactggccaggcccagtagctcatgcctgt

SEQ ID NO: 568490 - DNA, 120 bp, Artificial Sequence
  ENSG00000170464_34 (sequence is synthesized)
aaaaaaaaagaaagaaaaaagaaaatacagtgaactccagatgccactggaacatgggttccagcagcctggccaagctatgtgtcattctttttcctcatgatacccaggatgggcttt

SEQ ID NO: 568491 - DNA, 120 bp, Artificial Sequence
  ENSG00000170464_35 (sequence is synthesized)
tgatacccaggatgggctttgtgaggaggcactgtgccgttccagtggctttctgttacagctggccacaccatacaagcaagtacatcatctgcatgcactgctcctcacaggagcttg

SEQ ID NO: 568492 - DNA, 120 bp, Artificial Sequence
  ENSG00000170464_36 (sequence is synthesized)
cacttcattcatatttattctgccctcatttaaggtataagcttagtgtcctaatatatttatttttggaaagggccaagttacaaaacatcttttttttgaggctgcactgttgatatg

SEQ ID NO: 568493 - DNA, 120 bp, Artificial Sequence
  ENSG00000170464_37 (sequence is synthesized)
tcatgcagtggccaccaagaaagtatatactcgtgttagatactgattacatcatttacatcacgctcagtatttggaattaaagatgtgaatgttctgtgaccagagtagggatgacac

SEQ ID NO: 568494 - DNA, 120 bp, Artificial Sequence
  ENSG00000170464_38 (sequence is synthesized)
aaatggaatcagctcctggtggactaagaatcttgaaaaaatctggccacctcatccactacatctggattgagtgtactgcaacaaagaaaaacattaaacaattttatattaaaagaa

SEQ ID NO: 568495 - DNA, 120 bp, Artificial Sequence
  ENSG00000170464_39 (sequence is synthesized)
gttattctgcctgccatgggcactgagtacagctgctcatcatactggactaatcaggtcaaggacatggggcttcattctaagtaactcagctgtcatcttcattataaaaccacacat

SEQ ID NO: 568496 - DNA, 120 bp, Artificial Sequence
  ENSG00000170464_40 (sequence is synthesized)
tttcctctgactctgggcaatgacctgcgtatataagctgttagtcataagggctggatggggcagcatctcaatcatatagggcacaggacagacctcagtatcaccagcaagaatcca

SEQ ID NO: 568497 - DNA, 120 bp, Artificial Sequence
  ENSG00000170464_41 (sequence is synthesized)
ggtctagcctccccaaaccagaagaacttcctttttatattcaaccacctgatggatgtccctgatcagttccctcagctgcagagcacaagaaggaccttcaggatccagctttctcct

SEQ ID NO: 568498 - DNA, 120 bp, Artificial Sequence
  ENSG00000170464_42 (sequence is synthesized)
attatatccagactagttgttggaaggagaaacaacaaaggttctggcacagtccttgcttcagaacaagtgctcaacaaatgtcttttgaagagaggattctcaggagtagaaaacaat

SEQ ID NO: 568499 - DNA, 120 bp, Artificial Sequence
  ENSG00000170464_43 (sequence is synthesized)
gaaaatgctgaggattgtgaataacaacagcaggagtcagagctgacaaatttggcaggattatacagagatgaacgattgaaacagaaagcagagtcgctgaaacttgaaaactgtgag

SEQ ID NO: 568500 - DNA, 90 bp, Artificial Sequence
  ENSG00000170464_44 (sequence is synthesized)
aaaaccccagctattaatataacacctatacaacttctagaccagtgctttttccacttgaaaggccttgttatctgagttttgtttttt

SEQ ID NO: 568501 - DNA, 120 bp, Artificial Sequence
  ENSG00000170464_45 (sequence is synthesized)
aggagaaacaacaaagaggtacccttttaactgaagttttggctcatgtttaaaaagcaaattctgactcatttctaaagccttattactgagtatcattaaatacctaatggagtctga

SEQ ID NO: 568502 - DNA, 120 bp, Artificial Sequence
  ENSG00000170464_46 (sequence is synthesized)
tggagggaagccagctaccatgtaaattcaactacctgagaccactacactaaccaaaggagaagccatgcagaagagaacccagcaaccaagctgacagcaagaactgaggacccaaac

SEQ ID NO: 568503 - DNA, 120 bp, Artificial Sequence
  ENSG00000170464_47 (sequence is synthesized)
acataattcaagttgagccatttgtgttaccccagatgatgggcagagcagaaatgtgctgccccaccaagtcctgctcagtctgcagaattgtgagcaaataataaaatgattgcagcc

SEQ ID NO: 568504 - DNA, 120 bp, Artificial Sequence
  ENSG00000170464_48 (sequence is synthesized)
ctctttcagcctcgggcacgggggaggctcggcggacctgctgattgggaaccgatatggcggcgactctgggcagcggggagcgctggacggaaggatcaagaaatgcagaaattacta

SEQ ID NO: 568505 - DNA, 120 bp, Artificial Sequence
  ENSG00000170465_0 (sequence is synthesized)
gtcctgcttctcctgcctctcgcctccagcctccaacgctcgccacagccctctcatctcctggaaccatggccagcacatccaccaccatcaggagccacagcagcagccgccggggtt

SEQ ID NO: 568506 - DNA, 120 bp, Artificial Sequence
  ENSG00000170465_1 (sequence is synthesized)
tcagtgccaactcagccaggctccctggggtcagccgctctggcttcagcagcatctccgtgtcccgctccaggggcagtggtggcctgggtggtgcatgtggaggagctggctttggca

SEQ ID NO: 568507 - DNA, 120 bp, Artificial Sequence
  ENSG00000170465_2 (sequence is synthesized)
gccgcagtctgtatggcctggggggctccaagaggatctccattggagggggcagctgtgccatcagtggcggctatggcagcagagccggaggcagctatggctttggtggcgccggga

SEQ ID NO: 568508 - DNA, 120 bp, Artificial Sequence
  ENSG00000170465_3 (sequence is synthesized)
gtggatttggtttcggtggtggagccggcattggctttggtctgggtggtggagccggccttgctggtggctttgggggccctggcttccctgtgtgcccccctggaggcatccaagagg

SEQ ID NO: 568509 - DNA, 120 bp, Artificial Sequence
  ENSG00000170465_4 (sequence is synthesized)
gcatccaagaggtcaccgtcaaccagagtctcctgactcccctcaacctgcaaattgaccccgccatccagcgggtgcgggccgaggagcgtgagcagatcaagaccctcaacaacaagt

SEQ ID NO: 568510 - DNA, 120 bp, Artificial Sequence
  ENSG00000170465_5 (sequence is synthesized)
tcgacaaggtgcggttcctagagcagcagaacaaggttctggacaccaagtggaccctgctgcaggagcagggcaccaagactgtgaggcagaacctggagccgttgttcgagcagtaca

SEQ ID NO: 568511 - DNA, 120 bp, Artificial Sequence
  ENSG00000170465_6 (sequence is synthesized)
tcaacaacctcaggaggcagctggacagcatcgtcggggaacggggccgcctggactcggagctgagaaacatgcaggacctggtggaggacctcaagaacaaatatgaggatgaaatca

SEQ ID NO: 568512 - DNA, 120 bp, Artificial Sequence
  ENSG00000170465_7 (sequence is synthesized)
acaagcgcacagcagcagagaatgaatttgtgactctgaagaaggatgtggatgctgcctacatgaacaaggttgaactgcaagccaaggcagacactctcacagatgagatcaacttcc

SEQ ID NO: 568513 - DNA, 120 bp, Artificial Sequence
  ENSG00000170465_8 (sequence is synthesized)
tgagagccttgtatgatgcagagctgtcccagatgcagacccacatctcagacacatccgtggtgctatccatggacaacaaccgcaacctggacctggacagcatcatcgctgaggtca

SEQ ID NO: 568514 - DNA, 120 bp, Artificial Sequence
  ENSG00000170465_9 (sequence is synthesized)
agccgggctgaggctgagtcctggtaccagaccaagtacgaggagctgcaggtcacagcaggcagacatggggacgacctgcgcaacaccaagcaggagattgctgagatcaaccgcatg

SEQ ID NO: 568515 - DNA, 120 bp, Artificial Sequence
  ENSG00000170465_10 (sequence is synthesized)
atccagaggctgagatctgagatcgaccatgtcaagaagcagtgtgccagcctgcaggctgccattgctgatgctgagcagcgtggggagatggcactcaaggatgctaagaacaagctg

SEQ ID NO: 568516 - DNA, 120 bp, Artificial Sequence
  ENSG00000170465_11 (sequence is synthesized)
gaagggctggaggatgccctgcagaaggccaagcaggacctggcccggctgctgaaggagtaccaggagctgatgaatgtcaagctggccctggatgtggagatcgccacctaccgcaag

SEQ ID NO: 568517 - DNA, 120 bp, Artificial Sequence
  ENSG00000170465_12 (sequence is synthesized)
ctgctggagggcgaggagtgcaggctgaatggcgaaggcgttggacaagtcaacgtctctgtagtacagtccaccatctccagtggctatggcggtgccagcggtgtcggcagtggctta

SEQ ID NO: 568518 - DNA, 120 bp, Artificial Sequence
  ENSG00000170465_13 (sequence is synthesized)
ggcctgggtggaggaagcagctactcctatggcagtggtcttggcattggaggtggcttcagttccagcagtggcagagccattgggggtggcctcagctctgttggaggcggcagttcc

SEQ ID NO: 568519 - DNA, 120 bp, Artificial Sequence
  ENSG00000170465_14 (sequence is synthesized)
accatcaagtacaccaccacctcctcctccagcaggaagagctacaagcactaaagtgctgcctccagctctcggtcccacagtcctcaggcccttctctggctgcagagccgtctcctc

SEQ ID NO: 568520 - DNA, 120 bp, Artificial Sequence
  ENSG00000170465_15 (sequence is synthesized)
aggttgcctatcctctcctggcctctagtcttccctgctctccgaggtagagctgggtatggatgcttagtgccctcacttctctctgtctatacctgccccatctgagcacccattgct

SEQ ID NO: 568521 - DNA, 120 bp, Artificial Sequence
  ENSG00000170465_16 (sequence is synthesized)
caccatcagatcaacctttgattttacatcataatgtattcaccaatggagcttcactttgttactaaattattaatttcttgcctccaaaattgttctctctgaggctgagcattataa

SEQ ID NO: 568522 - DNA, 120 bp, Artificial Sequence
  ENSG00000170465_17 (sequence is synthesized)
gaaaatgatctctgttccttttcattactgaaaatcgcctggggcttatttcagaacaacttccacttattttccattggcccccaaactccctaagttaaaagtattgtgaacccccgc

SEQ ID NO: 568523 - DNA, 120 bp, Artificial Sequence
  ENSG00000170465_18 (sequence is synthesized)
cccgcagtatgcatggaagcacaagtgactagtcgtatgatgtacacagtctttctccctgtgatgatttctctgctctttgctctttgtaatttctaaataaagcaggttttagaataa

SEQ ID NO: 568524 - DNA, 120 bp, Artificial Sequence
  ENSG00000170465_19 (sequence is synthesized)
cttgtatgatgcagtaagcatctccaccatccttctgtttactctgatggggtctgcaaaggggagaagatgtatagggttgggtatctctgtaaatgtcagatgtgaagttgatcttat

SEQ ID NO: 568525 - DNA, 120 bp, Artificial Sequence
  ENSG00000170465_20 (sequence is synthesized)
cagtgaggtgcagtggaggaaagaagcatcattttttgctagacccatcaggcagtcattagccattatttgatataattcctgaaacgtaaaccaacactagggtgaggaacatgtgta

SEQ ID NO: 568526 - DNA, 120 bp, Artificial Sequence
  ENSG00000170465_21 (sequence is synthesized)
gttcttgccctcagtgagaactcaatagagaagtgaatcccacccaagaggatgagcctctgaggcacaagcaaggccaggtctcaacagtcaggtaaaaagttaccacctcccctacag

SEQ ID NO: 568527 - DNA, 120 bp, Artificial Sequence
  ENSG00000170465_22 (sequence is synthesized)
atggtcataattttgtatattttaatgtggcatccagatgtattcctcaaaatcattcttgtagttttgaaaacagcactcagtacaaaccgagcattcatcttccatatggcttgtttt

SEQ ID NO: 568528 - DNA, 120 bp, Artificial Sequence
  ENSG00000170465_23 (sequence is synthesized)
tgggtccattgtagtgtctcccataagatgcaacgcacattctcatgcgggtgcttaatacaaggggcataggactttgtcacttgactcccagactagacaaatattgccaaatggaga

SEQ ID NO: 568529 - DNA, 120 bp, Artificial Sequence
  ENSG00000170468_0 (sequence is synthesized)
agagtgcaccgcagccgctgcattcaggaaccgctttagcttcgcccccggccggccgggcggggaagactggtgtggtctggccatggatgggctccaggccagtgcagggccgttgag

SEQ ID NO: 568530 - DNA, 120 bp, Artificial Sequence
  ENSG00000170468_1 (sequence is synthesized)
gcgcgggcggccgaagcgccggcgcaagccccagccacacagcgggtcggtcctggccctgcccttgaggtccaggaagatacgaaagcagctgcgaagtgttgtatcccgcatggcagc

SEQ ID NO: 568531 - DNA, 120 bp, Artificial Sequence
  ENSG00000170468_2 (sequence is synthesized)
gctgaggacgcagacgctgcctagcgagaactcggaggaatcgagggtggagtcgacggccgacgacctgggggacgcgctacccggtggggcggcggtggcggccgtcccggacgcagc

SEQ ID NO: 568532 - DNA, 80 bp, Artificial Sequence
  ENSG00000170468_3 (sequence is synthesized)
ccggcgagagccatacggccacctggggcccgcagagctgctggaggcctcgcccgccgcgcgctccctgcagaccccgt

SEQ ID NO: 568533 - DNA, 120 bp, Artificial Sequence
  ENSG00000170468_4 (sequence is synthesized)
ggtggaggtgcccgccgcgccggtccgggtggtggagacctcggccctgctgtgcaccgcgcaacacttagcggccgtccagtcgtccggggcccctgcgacggcgtcggggccgcaggt

SEQ ID NO: 568534 - DNA, 120 bp, Artificial Sequence
  ENSG00000170468_5 (sequence is synthesized)
ggataacacgggtggggagccggcctgggactccccgctgcggcgcgtcttggccgagctgaaccgcatccccagcagccggcggcgagcggcccgcctctttgagtggctcatcgcgcc

SEQ ID NO: 568535 - DNA, 120 bp, Artificial Sequence
  ENSG00000170468_6 (sequence is synthesized)
catgccgccagatcacttttaccggcgcctatgggagcgcgaggcggtgctggtgcggcggcaggaccacacctactaccagggacttttctctaccgctgacctggattcgatgctgcg

SEQ ID NO: 568536 - DNA, 120 bp, Artificial Sequence
  ENSG00000170468_7 (sequence is synthesized)
caacgaggaggtgcagttcggccagcatttggacgccgctcgctacatcaacggacgacgcgagaccctgaacccacccggccgcgcgctgcccgccgccgcgtggtccctgtaccaggc

SEQ ID NO: 568537 - DNA, 120 bp, Artificial Sequence
  ENSG00000170468_8 (sequence is synthesized)
cggctgctccctgcgtctcctctgtccgcaggctttctctactactgtgtggcagtttttggctgtgcttcaagagcagtttggaagcatggcaggctccaacgtttacctcacgccccc

SEQ ID NO: 568538 - DNA, 120 bp, Artificial Sequence
  ENSG00000170468_9 (sequence is synthesized)
taactcgcagggctttgccccccactacgacgacatcgaggccttcgtgctgcagctggaaggtaggaaactctggcgtgtataccgaccccgagtcccaaccgaggaactggctctgac

SEQ ID NO: 568539 - DNA, 120 bp, Artificial Sequence
  ENSG00000170468_10 (sequence is synthesized)
ctggagatttgctgtattttcctcggggcttcattcaccaagctgaatgccaggatggagtccactctctgcacctcaccttgtccacgtaccagcgcaatacctggggtgacttcttag

SEQ ID NO: 568540 - DNA, 120 bp, Artificial Sequence
  ENSG00000170468_11 (sequence is synthesized)
aggccatactgcctctggcagtgcaggctgcaatggaagaaaatgtggagtttcggaggggtctgccccgagacttcatggattacatgggggcccagcattcagattctaaggatccgc

SEQ ID NO: 568541 - DNA, 120 bp, Artificial Sequence
  ENSG00000170468_12 (sequence is synthesized)
gaagaaccgctttcatggagaaggtgcgggtcttggttgcccgcctgggacactttgctcctgttgatgctgtggccgaccagcgagccaaagacttcattcacgattctctgccccctg

SEQ ID NO: 568542 - DNA, 120 bp, Artificial Sequence
  ENSG00000170468_13 (sequence is synthesized)
ttttgactgatagggagagggcactaagtgtttacgggcttccaattcgctgggaggctggagaacctgtaaacgtgggggcccagttgacaacagaaacagaagtccatatgcttcagg

SEQ ID NO: 568543 - DNA, 120 bp, Artificial Sequence
  ENSG00000170468_14 (sequence is synthesized)
atgggatagctcggctggtgggtgaggggggccatttgtttctctattacacagtggaaaactcccgtgtgtatcatctggaagaacccaagtgcttggaaatatacccccagcaagctg

SEQ ID NO: 568544 - DNA, 120 bp, Artificial Sequence
  ENSG00000170468_15 (sequence is synthesized)
atgccatggaactgttgcttggttcttatccagagtttgtgagagtgggggacctgccctgtgacagtgtggaggaccagctgtccttggcaaccacgttgtatgataaggggctgctgc

SEQ ID NO: 568545 - DNA, 120 bp, Artificial Sequence
  ENSG00000170468_16 (sequence is synthesized)
tcactaagatgcctctagccctaaattagtttcttgttgattgctggaaacaaggcagtagtgattctccgctgccactgctaccttttttttttttttttccttaaactcacgttctta

SEQ ID NO: 568546 - DNA, 120 bp, Artificial Sequence
  ENSG00000170468_17 (sequence is synthesized)
ccttgataagcatcagtgtgctcacatttacctttatcactgcttcagtgtcacaaacctcggaaggtcttctaggaagaaccatctcatctaggtacaaaaggaaaaggagaagttgga

SEQ ID NO: 568547 - DNA, 120 bp, Artificial Sequence
  ENSG00000170468_18 (sequence is synthesized)
ggtggaaaaaaaacccttgatccgtgatcatttcagagcaccaacttcatcaccttcaggcttcagtgtactgggtaacactgaccatgtcgttctgcttgagacagatattagattttt

SEQ ID NO: 568548 - DNA, 120 bp, Artificial Sequence
  ENSG00000170468_19 (sequence is synthesized)
tttggaatttggatctttcatctgagttctttttcatgggcgggtcggggtcagtatcctgtttgttattgttaaatttgtatgaaccttagaaaagttattaaagtgccaaagaatgtt

SEQ ID NO: 568549 - DNA, 120 bp, Artificial Sequence
  ENSG00000170469_0 (sequence is synthesized)
ggcggaagatggcgacgcccctcgggtggtcgaaggcggggtcaggatctgtgtgtctcgctttagatcaactgcgggacgtgattgagtctcaggaggaactaatccaccagctgagga

SEQ ID NO: 568550 - DNA, 120 bp, Artificial Sequence
  ENSG00000170469_1 (sequence is synthesized)
acgtgatggttctccaggacgaaaattttgtcagtaaagaagagttccaggcagtggagaagaagctggtggaagagaaagctgcccatgccaaaaccaaggtcctcctggccaaggaag

SEQ ID NO: 568551 - DNA, 120 bp, Artificial Sequence
  ENSG00000170469_2 (sequence is synthesized)
gagaagctggcctttgaaaaagcgctctccagtgtcaagagcaaagtccttcaggagtccagcaagaaggaccagctcatcaccaagtgcaatgagattgagtctcacattataaagcaa

SEQ ID NO: 568552 - DNA, 120 bp, Artificial Sequence
  ENSG00000170469_3 (sequence is synthesized)
gaagatatacttaatggcaaagagaatgagattaaagagttgcagcaagttatcagccagcagaaacagatcttcaggaatcacatgtctgacttccggatccagaagcagcaggagagc

SEQ ID NO: 568553 - DNA, 120 bp, Artificial Sequence
  ENSG00000170469_4 (sequence is synthesized)
tacatggcccaggtgctggaccagaagcataagaaagcctcagggacacgtcaggcccgcagccaccagcatcccagggaaaaataaaatggccgccgctttcctgttctctggctgtaa

SEQ ID NO: 568554 - DNA, 120 bp, Artificial Sequence
  ENSG00000170469_5 (sequence is synthesized)
ccacccagtgcctgtgtcaaaggcagggtttcactctaacacctgtccccagctgaggatacaggcaggcccgggtgggccacaccttcgaaaaggccttaagggaccaggcaggccacg

SEQ ID NO: 568555 - DNA, 120 bp, Artificial Sequence
  ENSG00000170469_6 (sequence is synthesized)
gaaatgagggaagcagtcggtgtactatattcttcaccgccataaaggaatgggcttgctcccatttttcctgaaacatacaaccttcttagtccaccttttgttttcccacttttgatg

SEQ ID NO: 568556 - DNA, 120 bp, Artificial Sequence
  ENSG00000170469_7 (sequence is synthesized)
ccacaaggtgggggcttgtagcctaggggaggagctgggtctttgttgtctggtaggcaccaccgcttcctttgggtatttaatcccttcctatataaacagccctggttacccagtaat

SEQ ID NO: 568557 - DNA, 120 bp, Artificial Sequence
  ENSG00000170471_0 (sequence is synthesized)
agtcggaagttgcctgagcagatcccagccggctggctcgagtggccttcgtcgtcccttggcgccctgggagagtcgctgacgggtggactgacggaccgcctgaggacggccggccag

SEQ ID NO: 568558 - DNA, 120 bp, Artificial Sequence
  ENSG00000170471_1 (sequence is synthesized)
gtgaaagcgccagccctatggcgcgggtcgcgtgaggcggaaggccgaggacggccggcggcggcgcccgccccggcgatgcgggccccgcccgtcgcctcaggtgccatttggattgta

SEQ ID NO: 568559 - DNA, 120 bp, Artificial Sequence
  ENSG00000170471_2 (sequence is synthesized)
tgtactttagtggcacgatgtactctgagtggaggtcactgcatttggtgattcagaatgatcaaggccataccagtgtgctgcacagctatccagagagcgttggacgagaggtggcaa

SEQ ID NO: 568560 - DNA, 120 bp, Artificial Sequence
  ENSG00000170471_3 (sequence is synthesized)
atgctgtagtccgtcctcttgggcaggtgttaggtaccccttcagtggctggtagtgagaatttgttaaaaactgacaaagaagtaaaatggaccatggaagtaatttgctatggactga

SEQ ID NO: 568561 - DNA, 120 bp, Artificial Sequence
  ENSG00000170471_4 (sequence is synthesized)
cccttccattggatggagagactgtaaaatattgcgttgatgtatatacagactggattatggctttagtgttgccaaaagattctattccattgccagttattaaagagcctaatcaat

SEQ ID NO: 568562 - DNA, 120 bp, Artificial Sequence
  ENSG00000170471_5 (sequence is synthesized)
atgttcaaactatactaaaacacctacagaatctttttgtaccaagacaggaacagggttccagtcagattcgactatgcttacaggtcctgagagccattcagaaactggcccgtgagt

SEQ ID NO: 568563 - DNA, 120 bp, Artificial Sequence
  ENSG00000170471_6 (sequence is synthesized)
catctctcatggcccgagaaacttgggaagtcttactgttgtttcttctgcagattaacgacatacttctggccccaccaactgttcaaggtggcattgctgagaatctagcagagaagt

SEQ ID NO: 568564 - DNA, 120 bp, Artificial Sequence
  ENSG00000170471_7 (sequence is synthesized)
tgattggtgttctctttgaggtgtggttactagcttgtactcggtgcttcccaacacctccttattggaaaacagccaaggagatggtggctaactggaggcatcacccagcagtggtgg

SEQ ID NO: 568565 - DNA, 120 bp, Artificial Sequence
  ENSG00000170471_8 (sequence is synthesized)
agcagtggagcaaggtcatttgtgcactcacttccagattgctacgctttacatatggtccttcatttcctgcatttaaagttcccgatgaagatgccagtctgatccctccagaaatgg

SEQ ID NO: 568566 - DNA, 120 bp, Artificial Sequence
  ENSG00000170471_9 (sequence is synthesized)
ataatgagtgtgttgcacagacatggtttcgctttttacacatgttaagtaatcctgtggatttgagtaacccagctattataagctctactcccaaatttcaggaacagttcttgaatg

SEQ ID NO: 568567 - DNA, 120 bp, Artificial Sequence
  ENSG00000170471_10 (sequence is synthesized)
tgagcggaatgccgcaagaattgaatcagtatccctgccttaaacatctgcctcaaatattttttcgtgccatgcgtggaatcagctgtctggtggatgcattcttaggtatttctagac

SEQ ID NO: 568568 - DNA, 120 bp, Artificial Sequence
  ENSG00000170471_11 (sequence is synthesized)
cccgatcagacagtgctcccccaacacccgtgaatagattaagtatgcctcaaagtgctgctgtcagtaccacccccccacataaccggaggcaccgggctgttactgtgaataaggcca

SEQ ID NO: 568569 - DNA, 120 bp, Artificial Sequence
  ENSG00000170471_12 (sequence is synthesized)
ccatgaagacaagcacagttagtactgctcatgcctctaaagttcagcaccagacgtcctccacctctcctctgtcaagtccaaatcagactagttcagaaccccggccactgcctgccc

SEQ ID NO: 568570 - DNA, 120 bp, Artificial Sequence
  ENSG00000170471_13 (sequence is synthesized)
ctcggagaccaaaggttaacagcatcttgaatctctttggatcatggttatttgatgcagcatttgttcactgtaaacttcataatgggataaacagagacagcagcatgactgccatta

SEQ ID NO: 568571 - DNA, 120 bp, Artificial Sequence
  ENSG00000170471_14 (sequence is synthesized)
caacacaagctagcatggagtttcgacggaaagggtcacaaatgtccacagacaccatggtttccaatcctatgtttgatgcaagtgaatttcctgataactatgaagcaggaagagctg

SEQ ID NO: 568572 - DNA, 120 bp, Artificial Sequence
  ENSG00000170471_15 (sequence is synthesized)
aggcttgtgggacactgtgtaggattttttgtagcaagaagactggagaagagattctgccagcttatttatccagattttacatgcttttaattcaaggtttgcagataaatgattatg

SEQ ID NO: 568573 - DNA, 120 bp, Artificial Sequence
  ENSG00000170471_16 (sequence is synthesized)
tgtgccatcctgtcttggccagcgttattctaaactctcctcctttgttctgctgtgacttgaaagggattgatgttgtggttccttactttatttcagctcttgaaaccattttgcctg

SEQ ID NO: 568574 - DNA, 120 bp, Artificial Sequence
  ENSG00000170471_17 (sequence is synthesized)
acagagaactctcaaaattcaaaagctatgtaaatccaacagaattgcgaagatcctccattaatatcctgctttctttgttgcccctccctcatcattttggcacagtcaaatctgagg

SEQ ID NO: 568575 - DNA, 120 bp, Artificial Sequence
  ENSG00000170471_18 (sequence is synthesized)
tggtcctggaaggaaagtttagtaacgatgacagctcttcttatgataaaccaataacttttctgtccctgaagttgagacttgtgaatatattaataggtgccttgcaaactgaaacgg

SEQ ID NO: 568576 - DNA, 120 bp, Artificial Sequence
  ENSG00000170471_19 (sequence is synthesized)
accccaacaacacccaaatgatattaggggcaatgttaaatattgttcaagattcagcacttttggaagccattggttgccagatggagatgggtggtggagaaaataacctgaagagtc

SEQ ID NO: 568577 - DNA, 120 bp, Artificial Sequence
  ENSG00000170471_20 (sequence is synthesized)
atagtcgcaccaatagtggtattagttcagcaagtggtggaagcacggagcccacgactcccgatagtgagagacctgctcaagctctcttaagagattatgctcttaatacagattcag

SEQ ID NO: 568578 - DNA, 120 bp, Artificial Sequence
  ENSG00000170471_21 (sequence is synthesized)
ctgctgggctcctgattcgcagcattcatctcgtcacccaaagactcaactcccagtggcgccaagacatgagcatatcactggcagctctagagctcctctctggccttgcaaaggtaa

SEQ ID NO: 568579 - DNA, 120 bp, Artificial Sequence
  ENSG00000170471_22 (sequence is synthesized)
aagtgatggttgactcaggagaccggaagcgagccatcagttctgtgtgcacctacattgtttatcagtgtagtcggccagctcctttacactccagggatctgcactccatgatagtgg

SEQ ID NO: 568580 - DNA, 120 bp, Artificial Sequence
  ENSG00000170471_23 (sequence is synthesized)
cagcttttcagtgtctctgtgtctggctgacagagcaccctgatatgcttgatgaaaaggactgccttaaggaagtactggagattgtggaactgggtatctcaggaagtaagtccaaga

SEQ ID NO: 568581 - DNA, 120 bp, Artificial Sequence
  ENSG00000170471_24 (sequence is synthesized)
acaatgagcaagaggtcaagtacaaaggagataaggagccaaaccctgcatctatgagggtaaaggatgctgctgaagccaccctaacatgcattatgcagttgctcggcgcatttcctt

SEQ ID NO: 568582 - DNA, 120 bp, Artificial Sequence
  ENSG00000170471_25 (sequence is synthesized)
cacctagtggtcctgcctctccttgtagtcttgtgaatgagaccactttgattaaatactccaggctgccaaccataaacaagcatagtttccggtactttgtcttggataacagtgtca

SEQ ID NO: 568583 - DNA, 120 bp, Artificial Sequence
  ENSG00000170471_26 (sequence is synthesized)
tcctggcaatgctggaacaacctcttggaaatgagcagaatgattttttcccctctgtcactgtgctggtccggggaatgtctggaagacttgcttgggcacaacagctttgtcttttac

SEQ ID NO: 568584 - DNA, 120 bp, Artificial Sequence
  ENSG00000170471_27 (sequence is synthesized)
ccagaggagcaaaagcaaatcagaagctttttgtacctgaacctcgcccagttcctaaaaatgacgttggatttaaatattctgtgaaacatcggccatttcctgaagaggtggacaaga

SEQ ID NO: 568585 - DNA, 120 bp, Artificial Sequence
  ENSG00000170471_28 (sequence is synthesized)
ttccttttgtgaaagcagatctcagcattccagatttgcatgaaatagtcactgaagaattagaagagagacacgaaaaattaaggagtggcatggcccagcagattgcttatgaaatac

SEQ ID NO: 568586 - DNA, 120 bp, Artificial Sequence
  ENSG00000170471_29 (sequence is synthesized)
accttgagcaacagagtgaggaggaattgcagaagagaagttttcctgacccagttacggattgcaagcccccgcctcctgcccaggaattccaaacagcccgcctttttctctcacact

SEQ ID NO: 568587 - DNA, 120 bp, Artificial Sequence
  ENSG00000170471_30 (sequence is synthesized)
ttggatttttgtccttagaagcactgaaggaacctgcaaatagtcgtctacctcctcaccttattgcacttgattccacgatacctggattttttgatgacattgggtatctggatctct

SEQ ID NO: 568588 - DNA, 120 bp, Artificial Sequence
  ENSG00000170471_31 (sequence is synthesized)
tgccatgtcgtccttttgacacagtttttattttctatatgaagccaggtcagaaaacgaaccaagagattttaaagaatgtggagtcttccagaactgttcagccacatttcctagaat

SEQ ID NO: 568589 - DNA, 120 bp, Artificial Sequence
  ENSG00000170471_32 (sequence is synthesized)
ttttgctttcccttggctggtcagtagatgtgggcagacaccctggttggactgggcatgtttctaccagttggtctattaattgttgtgatgatggtgaaggatctcaacaagaagtga

SEQ ID NO: 568590 - DNA, 120 bp, Artificial Sequence
  ENSG00000170471_33 (sequence is synthesized)
tttcctctgaagatattggagctagcattttcaatggacagaagaaggtgctgtattatgctgatgcccttacagaaattgcttttgtggttccttctcctgtggagtccttaactgatt

SEQ ID NO: 568591 - DNA, 120 bp, Artificial Sequence
  ENSG00000170471_34 (sequence is synthesized)
cattggaaagtaacatctcggaccaagatagtgattcaaatatggatcttatgccaggaattctgaaacagccatccctgacacttgagcttttccccaatcatacagacaatcttaatt

SEQ ID NO: 568592 - DNA, 120 bp, Artificial Sequence
  ENSG00000170471_35 (sequence is synthesized)
gatatagaaaactttcccctctcagagctgatgacagagatcagtactggtgtggaaactactgcaaatagtagcacttcactgagatctacaactcttgaaaaagaagttcctgtcatc

SEQ ID NO: 568593 - DNA, 120 bp, Artificial Sequence
  ENSG00000170471_36 (sequence is synthesized)
ttcatccaccctttaaacactggattattccggataaaaattcaaggagccactggaaaatttaatatggtcatccctcttgtggatgggatgattgtcagcaggcgagctcttggcttt

SEQ ID NO: 568594 - DNA, 120 bp, Artificial Sequence
  ENSG00000170471_37 (sequence is synthesized)
ctggtgaggcagactgtaattaacatttgtagaagaaagagactggaaagtgactcctacagtcccccccatgtccgccggaaacagaaaatcaccgacattgtcaacaagtaccggaac

SEQ ID NO: 568595 - DNA, 120 bp, Artificial Sequence
  ENSG00000170471_38 (sequence is synthesized)
aagcagctggagccagagttttatacttcacttttccaggaggttggactcaagaactgcagttcttagaccactgaatttctaagactgttgaactccagtttgggaactataacacag

SEQ ID NO: 568596 - DNA, 120 bp, Artificial Sequence
  ENSG00000170471_39 (sequence is synthesized)
cagaacagtttgataggtgatcactgtaaaaataaaaacaaatcactcccaagagcttactgtttaatcaccagaatagaagaaacacattataacccatttgatagaagactttgggct

SEQ ID NO: 568597 - DNA, 120 bp, Artificial Sequence
  ENSG00000170471_40 (sequence is synthesized)
atctagtgaaatgggctcccagacacaatcacactcctgctgataatgatgatatacattttagccataaactttcttttaaaagtgacaattttagttaaacataagccttttgaggag

SEQ ID NO: 568598 - DNA, 120 bp, Artificial Sequence
  ENSG00000170471_41 (sequence is synthesized)
aaaggcttttatgcatctcagttaaacacgtgcattggtagtatcaacaaatttgcaatatagaagttgaagatagttttttacctcactttttaggaggttgtattcaaaattaaaatc

SEQ ID NO: 568599 - DNA, 120 bp, Artificial Sequence
  ENSG00000170471_42 (sequence is synthesized)
tcagaatcttacaggacatttaaagactcatgttgatagcatggaggagaaggaaagaagtcacagccttctactcagttgtaggtcttcttgtcatccagctgtcacactgacaaaaag

SEQ ID NO: 568600 - DNA, 120 bp, Artificial Sequence
  ENSG00000170471_43 (sequence is synthesized)
aaaagatgatacatgttttttgctcagataagaagcctgacattaaaagatgtcatatttttttctccacatttcaaaaagttgtccttctcatcactgcacagatctgtctgaaagcct

SEQ ID NO: 568601 - DNA, 120 bp, Artificial Sequence
  ENSG00000170471_44 (sequence is synthesized)
cagtttctgagtgacccaggaacagatcagaaatggagcatggccttgtcctttaatggggatgcaaataaagtttgtggggttaaaagttataagacagcagtgataccccactctctc

SEQ ID NO: 568602 - DNA, 120 bp, Artificial Sequence
  ENSG00000170471_45 (sequence is synthesized)
cattattgtccagcggggtgacataatgacaggttaaatatttgtgattcattgattaaatattatttaaagaaatgtaaattcacaataagggttgaaaattatttggtttcatccatt

SEQ ID NO: 568603 - DNA, 120 bp, Artificial Sequence
  ENSG00000170471_46 (sequence is synthesized)
gtctcttatttcaggaccaagcagcaaactgcagtagtttgtgaaggattctaatatggggttcaggaatagcctctcaacgctactaattcagatctctcccagagaactactggattt

SEQ ID NO: 568604 - DNA, 120 bp, Artificial Sequence
  ENSG00000170471_47 (sequence is synthesized)
cctcataattgacaaacatgagtgaccacctctttgggtggctactgttagaaatggctgttgtcatgttttctggactttgccagccaacagatccctgccaggttttggaaatacttc

SEQ ID NO: 568605 - DNA, 120 bp, Artificial Sequence
  ENSG00000170471_48 (sequence is synthesized)
tattacctcgctgctacttttctgcagggataaaacttttgaggtggccagacccagaacatccaaggattcctgttacagtgctacagtatacactgctcatttatcctattctcatgt

SEQ ID NO: 568606 - DNA, 120 bp, Artificial Sequence
  ENSG00000170471_49 (sequence is synthesized)
gctttcttctttagtaagattattttaagaaaataagtgatatttaaagtccaaagaggaatgatcacagttgtataaggggtgttttcccacttgaactctgatgtcagtcgactgtgg

SEQ ID NO: 568607 - DNA, 120 bp, Artificial Sequence
  ENSG00000170471_50 (sequence is synthesized)
gtcagagctacaaccatctgtttggtttgatgttttggtggtttacttacggagtggggatagtgtgagacctaattccctgtgcaaatgtctcttattccagaaatgtgcattttgtca

SEQ ID NO: 568608 - DNA, 120 bp, Artificial Sequence
  ENSG00000170471_51 (sequence is synthesized)
tctataagcaagaaatatgggcatagcagctcttggtttaaagtttgccataacctgttcatgtttgttttaagctcaggtaaagataacctcctctttctatgactccagtttccattc

SEQ ID NO: 568609 - DNA, 120 bp, Artificial Sequence
  ENSG00000170471_52 (sequence is synthesized)
aggttatagtattattcaatagttgattttctttttaagctgggcaataaattgatgtttccagatggtaacatgggagagggcatataggataaagatgagcaaattctaccctaaaaa

SEQ ID NO: 568610 - DNA, 120 bp, Artificial Sequence
  ENSG00000170471_53 (sequence is synthesized)
tgttctagtagttcacaggaagaagatgaggtttaataactttcaaggtaattctagattgacattttgaggggaaaatgggctcttgttctagttgaagtgagcagagaaggctataaa

SEQ ID NO: 568611 - DNA, 120 bp, Artificial Sequence
  ENSG00000170471_54 (sequence is synthesized)
ttaatatgtaacttacagcattccagaggttaaaaataactgatgcagatgtacttcttcagtgtgattcttcagatcaaacttttacttttggcatagttaatttcagaaaaatgtgct

SEQ ID NO: 568612 - DNA, 120 bp, Artificial Sequence
  ENSG00000170471_55 (sequence is synthesized)
gtatgtgtgtgtgtatgagggttggtcttgctgatccttcagttagctctaaattctggcaactccttgtaattccaatgtatttgatacatgaacaatcatgttgaatgcatttgtgat

SEQ ID NO: 568613 - DNA, 120 bp, Artificial Sequence
  ENSG00000170471_56 (sequence is synthesized)
ctgggagacttcctcgtcttccagggaaggaaggatgtgcagcccctgaaggcatgaaactcccagtgtgtacggagccagtggaatatgggatacccataccttaccaggcgctggttc

SEQ ID NO: 568614 - DNA, 120 bp, Artificial Sequence
  ENSG00000170471_57 (sequence is synthesized)
cttctgctcacaataacatctgcccaaagagggagtgggaagaacgcttagctctttcactagtatggatttgagttcatggtcactatttttacccacctgcctttgttaaaaatcact

SEQ ID NO: 568615 - DNA, 120 bp, Artificial Sequence
  ENSG00000170471_58 (sequence is synthesized)
ttgagtagaatagcactggaggaacatatttagcacctaatattaatatttagtagtccattgataaatttgccagcatatgttctagcctctggggggaaaccaggaccacttttgtct

SEQ ID NO: 568616 - DNA, 120 bp, Artificial Sequence
  ENSG00000170471_59 (sequence is synthesized)
gtggcttaaacagttcagttgctatatctgttgggtatgccgggggtggatgagtgtggcattccgtgaagaggaaggtggtaagtaaggtttcccttctactgccttcttaagttgcag

SEQ ID NO: 568617 - DNA, 120 bp, Artificial Sequence
  ENSG00000170471_60 (sequence is synthesized)
gagggagcttttctcctcccctctggttgggagcactgaggacagtgaggagggcttttaccttgttaatcctttccttatttagctagctttcctttttgtctagggcttcctcttgag

SEQ ID NO: 568618 - DNA, 83 bp, Artificial Sequence
  ENSG00000170471_61 (sequence is synthesized)
catactcatgcacattttccttcatttccagatcctttatttcagagcagcccattttcctctggattcattgatgaatacaa

SEQ ID NO: 568619 - DNA, 120 bp, Artificial Sequence
  ENSG00000170471_62 (sequence is synthesized)
agagcagcccattttcctctggattcattgatgaatacaagtacccacacctttggccagtaatgtcagttacctgctgcaggttctgtgtatgaggccttcatgaacggttaccttctc

SEQ ID NO: 568620 - DNA, 120 bp, Artificial Sequence
  ENSG00000170471_63 (sequence is synthesized)
catacactagggaagcatttgtcagactctgcagactgggttctagagaggcagagtctttaagagtattcatttcttctggaaggtggagctttacccaaagtggaagttagccttgct

SEQ ID NO: 568621 - DNA, 120 bp, Artificial Sequence
  ENSG00000170471_64 (sequence is synthesized)
aaataaataaataaataataaaaaaagaaacatgtattggaggtaatttgacactgctgctggcagtagttctctattcaccattttaaagcccattcaggttctctcttcctgaaaaga

SEQ ID NO: 568622 - DNA, 120 bp, Artificial Sequence
  ENSG00000170471_65 (sequence is synthesized)
aagcccattcaggttctctcttcctgaaaagaactgattgctgtgtttacatgaaatgacattggagtcagatggtctgttttaaagatttccatgacagcctcttttcctgagttggag

SEQ ID NO: 568623 - DNA, 120 bp, Artificial Sequence
  ENSG00000170471_66 (sequence is synthesized)
agattggaggtggtctatccgtacgatgtggaatcaaacggtgggtttcttagtagctaaagaagccatgtacttctagtgtgtttctcagaatatcaactcatgttcttcagatgcttt

SEQ ID NO: 568624 - DNA, 120 bp, Artificial Sequence
  ENSG00000170471_67 (sequence is synthesized)
tctttttttaatggtgagggaaaaggtataatttgggattccacagtgccttgcatatagtaggcgcccagtaaatacttgttgaagcaaaccaagtttcccaagtcctcatctcttata

SEQ ID NO: 568625 - DNA, 120 bp, Artificial Sequence
  ENSG00000170471_68 (sequence is synthesized)
gtgaccaagacatctttctcctctgaagggcttggcagttgtggctaaaaaataagcagtatcattatttgcttgaaatcatatatacagtttgtatgaatttcagtatgttgccaagac

SEQ ID NO: 568626 - DNA, 120 bp, Artificial Sequence
  ENSG00000170471_69 (sequence is synthesized)
atgattttttcttattgtattttctgtaaatatttctggcactgaactgtaaagtaaaggcaaagtgtaaatatgaaggcgtgcccgtgccccttgcctcctgtgtttcatcttcgtcgg

SEQ ID NO: 568627 - DNA, 120 bp, Artificial Sequence
  ENSG00000170471_70 (sequence is synthesized)
ttagggaagaaggtccagaggtttgtttgtatttatgccgatcctttgtccagaagaagcccatggaatattgaatgtaatacatttagtcaattaaattttaaggagattcttatctaa

SEQ ID NO: 568628 - DNA, 120 bp, Artificial Sequence
  ENSG00000170471_71 (sequence is synthesized)
gtcattgccctgccttccttcacctgtctgaccttaggcagctttctggcattcatggaatacattataacaaaggctgggtctgttattactgtactttagatacagaattgagccact

SEQ ID NO: 568629 - DNA, 120 bp, Artificial Sequence
  ENSG00000170471_72 (sequence is synthesized)
ttttaaatatagatataacagtttggctagtgcctgtttaaaacatttcagaataatcaagtattcttgagaaacagataaattttataccctacttcccccacaaaaaaattccactct

SEQ ID NO: 568630 - DNA, 120 bp, Artificial Sequence
  ENSG00000170471_73 (sequence is synthesized)
tattttgatcattaaaatatgcatgatcattaaaatatgcctaatcattattttaaagaaacaaaccatagaaagatataatagaaaagttctcctgaaatcctaccatgtatatttata

SEQ ID NO: 568631 - DNA, 120 bp, Artificial Sequence
  ENSG00000170471_74 (sequence is synthesized)
cagagtaagtttatagtactttgagccttctctactgcttaatcagtgttaccagtaccatgaagctgtttccaggatcagggaaggacagcctacagattctaagtaggtcagaaagat

SEQ ID NO: 568632 - DNA, 120 bp, Artificial Sequence
  ENSG00000170471_75 (sequence is synthesized)
ttctagctgtgggacaatagcacctgaaaaataggggggcaaaaaaatagaatatacatattacatagagtcttttaaaggctcttgatgtgcatctgaactagctctgtagttttataa

SEQ ID NO: 568633 - DNA, 120 bp, Artificial Sequence
  ENSG00000170471_76 (sequence is synthesized)
aaggtggtgttttagtgggttccattgtgttgtttatctttgtcactttttcttcccccttgaacttcggatcctgcccctctgctcccctccctctcactcctcatgttctgtatcaat

SEQ ID NO: 568634 - DNA, 120 bp, Artificial Sequence
  ENSG00000170471_77 (sequence is synthesized)
tgttggtgctacctacacaggctagaaacttgaggagttatctttacctgccccttcctgttactcacttatataattagtttctaagtttccatcttcccagggacccttgaatttttc

SEQ ID NO: 568635 - DNA, 120 bp, Artificial Sequence
  ENSG00000170471_78 (sequence is synthesized)
ctttcctctgtattttcccaatacatccaagtgcaggtccttattatttctcacctagattattacagctgtttcctacctactctgattccctcaacccctaaaccccttgccagttct

SEQ ID NO: 568636 - DNA, 120 bp, Artificial Sequence
  ENSG00000170471_79 (sequence is synthesized)
aacatgtgttttccctactttcatcctacttgctgccaccatagtattcatcttcaaccacaaatgaccatgccagtgccctactgaaaatccttcagtgattttccattaacacaacat

SEQ ID NO: 568637 - DNA, 120 bp, Artificial Sequence
  ENSG00000170471_80 (sequence is synthesized)
gcactgttttcctcctttccctccccctcagttataagccatctcacaatatgtgattatcactgcgacccaaactatccacaagtacattttttttttctgatggtaattggcatcagc

SEQ ID NO: 568638 - DNA, 120 bp, Artificial Sequence
  ENSG00000170471_81 (sequence is synthesized)
cagtatgtaaaagaagcatgttctcagacccttattgctgggaaggggaaggaaagtgaaggttacagaatctgtgggtataaagtgacccatggagtcacctggtatacaattccctta

SEQ ID NO: 568639 - DNA, 120 bp, Artificial Sequence
  ENSG00000170471_82 (sequence is synthesized)
gttatgagtgaaaaaactcaggctcacagagggtatatgacttgcccagggttacttgggactagagcccagattttctaaaccctgtattgtccctttctattattattgtcgcacagt

SEQ ID NO: 568640 - DNA, 120 bp, Artificial Sequence
  ENSG00000170471_83 (sequence is synthesized)
gataggatttgctcagtgattaaagatttgccttcttgcctttgtaaaggtgaagagttctgtgccagttttgttgattatatgagtaagagctcataaatccatgaagtgaaagtgaga

SEQ ID NO: 568641 - DNA, 120 bp, Artificial Sequence
  ENSG00000170471_84 (sequence is synthesized)
catttccctgcagtttgagatgaaaagaataccatcataaacttctgttgtgttgtggtgagatgcggtgacattaatgtgaaatggaatggtgccttttattattgtctaacttcagaa

SEQ ID NO: 568642 - DNA, 120 bp, Artificial Sequence
  ENSG00000170471_85 (sequence is synthesized)
ctgctactcccaagtcttttctacaggcatctcatccttctctaccctagacatggagcttgcttggctttctttcctagcctgtgcctgttcatgattcctccagcctcctactccaag

SEQ ID NO: 568643 - DNA, 120 bp, Artificial Sequence
  ENSG00000170471_86 (sequence is synthesized)
ccatctgctgaggagtctgcaaaatcccagtgtccccttcaggcttcctggcctttttccagctttttaaagactctcctactttcattccaaataatttcattgcataggaagtgtacc

SEQ ID NO: 568644 - DNA, 120 bp, Artificial Sequence
  ENSG00000170471_87 (sequence is synthesized)
aaaaatacaagcaattggaattgtatagatttacaaggacattttaatagtttattgtaataataagaaattatagagaagtttgaaggcgtttgactcccatatctgagacggaagaat

SEQ ID NO: 568645 - DNA, 120 bp, Artificial Sequence
  ENSG00000170471_88 (sequence is synthesized)
tatcggggattcctgtcatgggccgaagctgtgttcctgcttctcctctgggattatcagccttgactatgctgaaattccttgtactctggccggccacacttttgttccctataagaa

SEQ ID NO: 568646 - DNA, 120 bp, Artificial Sequence
  ENSG00000170471_89 (sequence is synthesized)
gaggaactaaagtgaaagtcccatagctggttgctaaattcttaactccatgcagcagagtactcttggcctctccttccacccagtgtccctattggttttccaagcatatatattttt

SEQ ID NO: 568647 - DNA, 120 bp, Artificial Sequence
  ENSG00000170471_90 (sequence is synthesized)
tcagctcctttctgttagcttagaaagcttgacccagtaatggacctttaggaccagatgttatagggggtagcagcatagattcccagaaagcagattctgagcacactgaccccttgg

SEQ ID NO: 568648 - DNA, 120 bp, Artificial Sequence
  ENSG00000170471_91 (sequence is synthesized)
ggtggagaacaaggcaaggatgcctgttctcaccacttacgttcaacatggtagaggaggggcctacacagagaaataagacaaaaggaaacatagtacataaagattagaaacaaagaa

SEQ ID NO: 568649 - DNA, 120 bp, Artificial Sequence
  ENSG00000170471_92 (sequence is synthesized)
gtaaaactgtatgtatttgcagatgacatgatcatgtaagtagaaaaccctcaggaatctttttaaaaatccactagaactattgaggtgagtttagcaagattgcaggaaaaacgccag

SEQ ID NO: 568650 - DNA, 120 bp, Artificial Sequence
  ENSG00000170471_93 (sequence is synthesized)
ggtgttgggcaaaattttaaggtaacccccagcgacgtttgcctgtgtacagtgtcctctccttgcgtgtgggtggaacttgtgactatgataggataactgtgattatgttacattatt

SEQ ID NO: 568651 - DNA, 120 bp, Artificial Sequence
  ENSG00000170471_94 (sequence is synthesized)
tggcaaagggatcctgtgggtttaattgggttactttgagttaatcaaaagggagattttccaagtagacctgacctaatcacaggagctctttaaatctagggctagaggtcagagatg

SEQ ID NO: 568652 - DNA, 120 bp, Artificial Sequence
  ENSG00000170471_95 (sequence is synthesized)
gaagaagttagagagagagtcaaagctaaatagggaccttgatactaagaaagtagtctgtgaatatggccagatgtttgtcactagtttgggagaaatctcttggtctggacattttct

SEQ ID NO: 568653 - DNA, 120 bp, Artificial Sequence
  ENSG00000170471_96 (sequence is synthesized)
gtgaatgtcagagtagatataattatccggggggacttgccatggactctggtcatctggtaaagacatgtatatttctgtgctaataaagtagttttaattttaaaattcacctcaagt

SEQ ID NO: 568654 - DNA, 120 bp, Artificial Sequence
  ENSG00000170471_97 (sequence is synthesized)
atgagattcttccctctgtacacatgagctttgtttagggctttagcacaaacttagctctgctgcatgcctcaaaagaggtgcagctcagggtaccagtttgctaaaggggagccacat

SEQ ID NO: 568655 - DNA, 120 bp, Artificial Sequence
  ENSG00000170471_98 (sequence is synthesized)
agtcctgttaaccttgcagtgaaacttaagagttgattagggtggcaggaagccagaagcacactgcatggtaatgaagccccaaacaactcgtttttctttctactgatgagaaaaagg

SEQ ID NO: 568656 - DNA, 120 bp, Artificial Sequence
  ENSG00000170471_99 (sequence is synthesized)
aattaagcataaattgcagtaggagacatttggtctggaatctaggaataacttgctgatgggacattttagagattaggatccccagacaagtagtgatgttgctgtgatggggaagga

SEQ ID NO: 568657 - DNA, 120 bp, Artificial Sequence
  ENSG00000170471_100 (sequence is synthesized)
tactgctttctggccctaacagagatagactcaaatcttttaagccctcattaagatactgtgtgtaaattttgtttttattaatgcaaattataattattcagtattccttcctttttt

SEQ ID NO: 568658 - DNA, 120 bp, Artificial Sequence
  ENSG00000170471_101 (sequence is synthesized)
tttctttgacaattttaagccttgtcctaggttaagactgatgaacaggagccaaagaagagctttgttgcaaatgtatacactttttcctaaagtgattttccatgacctgatacttgg

SEQ ID NO: 568659 - DNA, 120 bp, Artificial Sequence
  ENSG00000170471_102 (sequence is synthesized)
tcactgagcaccttgacaaatgaatgactgggtagttttattaagccagttttttgttgctgttgtttttcccgctctctgtcttcttcttcttcatgtagctcagtcccagttccagaa

SEQ ID NO: 568660 - DNA, 120 bp, Artificial Sequence
  ENSG00000170473_0 (sequence is synthesized)
actcagggttaggaggtctgggcgagaagcaactagggccctcatcacttcgccgccgaatccccggcgccgcccagcggggcagagccaggccagggccgcccgcccaacctggtccgc

SEQ ID NO: 568661 - DNA, 120 bp, Artificial Sequence
  ENSG00000170473_1 (sequence is synthesized)
tgcctcttcggccatggaagctgccggcagccctgcggctacggagacaggcaagtatatcgcgtcaacacagcgacctgacgggacctggcgcaagcagcggagggtgaaagaaggata

SEQ ID NO: 568662 - DNA, 120 bp, Artificial Sequence
  ENSG00000170473_2 (sequence is synthesized)
tgtgccccaggaggaggtcccagtatatgaaaacaagtatgtgaagtttttcaagagtaaaccagagttgcccccagggctaagccctgaggccactgctcctgtcaccccatccaggcc

SEQ ID NO: 568663 - DNA, 120 bp, Artificial Sequence
  ENSG00000170473_3 (sequence is synthesized)
tgaaggtggtgaaccaggcctctccaagacagccaaacgtaacctgaagcgaaaggagaagaggcggcagcagcaagagaaaggagaggcagaggccttgagcaggactcttgataaggt

SEQ ID NO: 568664 - DNA, 120 bp, Artificial Sequence
  ENSG00000170473_4 (sequence is synthesized)
gtccctggaagagacagcccaactccccagtgctccacagggctctcgggcagcccccacagctgcatctgaccagcctgactcagctgccaccactgagaaagccaagaagataaagaa

SEQ ID NO: 568665 - DNA, 120 bp, Artificial Sequence
  ENSG00000170473_5 (sequence is synthesized)
aagaaactccggcaggtggaagagctgcagcagcggatccaggctggggaagtcagccagcctagcaaagagcagctagaaaagctagcaaggaggagggcgctagaagaggagttagag

SEQ ID NO: 568666 - DNA, 120 bp, Artificial Sequence
  ENSG00000170473_6 (sequence is synthesized)
gacttggagttaggcctctgaggcctttggggaatagggaatggactgcagaacaaaccgtggggctctctggggtctgggggaatacgggcaacagcagtcaggaggggtaccccccat

SEQ ID NO: 568667 - DNA, 120 bp, Artificial Sequence
  ENSG00000170473_7 (sequence is synthesized)
actggcttacttccacctcctgcggcccagctctgtcctccagagcctagcgtctccctcaatccttcccttttcttcccaacttctactttttggactttccccctcccattcccagtg

SEQ ID NO: 568668 - DNA, 120 bp, Artificial Sequence
  ENSG00000170473_8 (sequence is synthesized)
ttcaaaatctcagtgactaccccaggtacctttgctgctgatttgggtgtcttgtttaaaagaaaatcaggtgggtgggaatctcttggagaactgaggctgagggtagagggagtatgc

SEQ ID NO: 568669 - DNA, 120 bp, Artificial Sequence
  ENSG00000170473_9 (sequence is synthesized)
ccaagtcttggagtcttggttcctgttcgcggtgtttatgggttatttccctctccatccctcattttttttttttttttaaaaaaagcaaaaatgagaataaacacaagtagacatgtc

SEQ ID NO: 568670 - DNA, 120 bp, Artificial Sequence
  ENSG00000170473_10 (sequence is synthesized)
agggttagatagggtctccaaccgtccctagaaacacttgtgcgccccagtgcgttcctggagtttgtctgctccacgtcaccaagccgctctgagatctgggtgcaggccagagcctgg

SEQ ID NO: 568671 - DNA, 120 bp, Artificial Sequence
  ENSG00000170473_11 (sequence is synthesized)
atattcttcctttcttcatttataaggccccctttttgggtgcaggtgggccttgcgcccttttccctcgcaggtcctggacgtacgaggagttcctggggatgagagggactgtgcctc

SEQ ID NO: 568672 - DNA, 120 bp, Artificial Sequence
  ENSG00000170473_12 (sequence is synthesized)
agatggcgactccctatgttactgacgagaccggcggggtgggaaccgccaaacctctcccttctttttgacttcacccttggataccatcaaggccagaggatggaaccaagataacat

SEQ ID NO: 568673 - DNA, 120 bp, Artificial Sequence
  ENSG00000170473_13 (sequence is synthesized)
gaggctgaagagatgcccagtaatatttgccattcttcctcaggaaggctcatttctcctatcaaggtgaaaagtgagattcagactcaggcaagtatatcgcgtcaacacagcgacctg

SEQ ID NO: 568674 - DNA, 120 bp, Artificial Sequence
  ENSG00000170473_14 (sequence is synthesized)
taggtgctcctttgtgataatgggctatttgtatctctgagggcttccacacaggatggccattcaagaagcttctgctctgcctttcattacagtctatctttagtcctcctaaacctt

SEQ ID NO: 568675 - DNA, 120 bp, Artificial Sequence
  ENSG00000170473_15 (sequence is synthesized)
ttctcccaaattccatgtaaaacacttgcctgaattgaattgtttccacaaagttgttttcccctgtggactttgtttatatcagtagtttttattttcccaattttccaaattcaagag

SEQ ID NO: 568676 - DNA, 120 bp, Artificial Sequence
  ENSG00000170473_16 (sequence is synthesized)
tgataattataaatagttgtgttcttgtttgttatctttctcactagaatgtatactctaagaaggcaagaaccttgcttgctttattcattgttgtattcctagcttctgttacagtgt

SEQ ID NO: 568677 - DNA, 120 bp, Artificial Sequence
  ENSG00000170473_17 (sequence is synthesized)
ctggcacaagagtaagtgctcaataaaaatttaaaatccacgtgtgaataaatgtgattaccatgtgccctaccgtatattgagaaaaataagaatacatgtgaaaagcacgagattaaa

SEQ ID NO: 568678 - DNA, 120 bp, Artificial Sequence
  ENSG00000170473_18 (sequence is synthesized)
gctgccggcagccctgcggctacggagacagcttctccactcttcctcctcctccacctccgcccatgaaatggtgcactctccctttaagactaagatggtggcttgctacgatcggga

SEQ ID NO: 568679 - DNA, 120 bp, Artificial Sequence
  ENSG00000170476_0 (sequence is synthesized)
acacacacatctgcacctcaaccacagactacacttgctgaactggctcctggggccatgaggctgtcactgccactgctgctgctgctgctgggagcctgggccatcccagggggcctc

SEQ ID NO: 568680 - DNA, 120 bp, Artificial Sequence
  ENSG00000170476_1 (sequence is synthesized)
ggggacagggcgccactcacagccacagccccacaactggatgatgaggagatgtactcagcccacatgcccgctcacctgcgctgtgatgcctgcagagctgtggcttaccagatgtgg

SEQ ID NO: 568681 - DNA, 120 bp, Artificial Sequence
  ENSG00000170476_2 (sequence is synthesized)
caaaatctggcaaaggcagagaccaaacttcatacctcaaactctggggggcggcgggagctgagcgagttggtctacacggatgtcctggaccggagctgctcccggaactggcaggac

SEQ ID NO: 568682 - DNA, 120 bp, Artificial Sequence
  ENSG00000170476_3 (sequence is synthesized)
tcacagggggcccctggcctaccaggctctccaggacatgtttgcactacttgggggagtttggagaagaccagatctatgaagcccaccaacaaggccgaggggctctggaggcattgc

SEQ ID NO: 568683 - DNA, 120 bp, Artificial Sequence
  ENSG00000170476_4 (sequence is synthesized)
tatgtgggggaccccagggggcctgctcagagaaggtgtcagccacaagagaagagctctagtcctggactctaccctcctctgaaagaagctggggcttgctctgacggtctccactcc

SEQ ID NO: 568684 - DNA, 120 bp, Artificial Sequence
  ENSG00000170476_5 (sequence is synthesized)
cgtctgcaggcagccaggagggcaggaagcccttgctctgtgctgccatcctgcctccctcctccagcctcagggcactcgggcctgggtgggagtcaacgccttcccctctggactcaa

SEQ ID NO: 568685 - DNA, 120 bp, Artificial Sequence
  ENSG00000170476_6 (sequence is synthesized)
ataaaacccagtgacctcacttcttttctctgcaaaaggtgcttgtggggctgggagtgcagacattggtgtttctgctgatgtcccttgtgaaaaaaaaaaaaaaactctcaaaatcaa

SEQ ID NO: 568686 - DNA, 120 bp, Artificial Sequence
  ENSG00000170476_7 (sequence is synthesized)
accccttctcaagccagacccctccacccacctcacattccaccaccggcctttgatccccaatccctaccactgggcatcaagccacagatgcagcctttcatatattccatgcctcag

SEQ ID NO: 568687 - DNA, 120 bp, Artificial Sequence
  ENSG00000170476_8 (sequence is synthesized)
tttacccatctgcctgcctaacagcagacaatctgggagacctcctcagtattttgagaccccagggaatcactcacttgtccttagacttctccctttccaggcccatccttgagtccg

SEQ ID NO: 568688 - DNA, 120 bp, Artificial Sequence
  ENSG00000170476_9 (sequence is synthesized)
gactccctccccaaccctgacggggcggctttggctatgtgtacatggtgcaagtgcacacgtgtgagcgcctgcacgtgagtatgcgtgtgtctggcttcacacacacacctgctgagc

SEQ ID NO: 568689 - DNA, 120 bp, Artificial Sequence
  ENSG00000170476_10 (sequence is synthesized)
atgcctgcgtgccagtgtctctgtgaggtgggggcctgggagtacttgtgtgattgaatattgggctccagtttttcttaccttgctcttgtggtttaaaatggcacgtgccggccgggc

SEQ ID NO: 568690 - DNA, 63 bp, Artificial Sequence
  ENSG00000170476_11 (sequence is synthesized)
gagcggggccgatcggaaaatacaaaattttagccgggtgtggtggcacatacctgtagtccc

SEQ ID NO: 568691 - DNA, 120 bp, Artificial Sequence
  ENSG00000170476_12 (sequence is synthesized)
taccactgcactccagcctgggcgacgaacggcgtgagactctctctaaataaataaataaataaaaataaaatgacacttgccactgggcaggtgtgccctggacgagggaccccagtg

SEQ ID NO: 568692 - DNA, 120 bp, Artificial Sequence
  ENSG00000170476_13 (sequence is synthesized)
tgccctggacgagggaccccagtgcccaggcctcacctaccacttcagcatttctttcccatcccccatccccatcccagagagctttgggggctgggggaggggccatgcaacagcctc

SEQ ID NO: 568693 - DNA, 120 bp, Artificial Sequence
  ENSG00000170476_14 (sequence is synthesized)
acaggtgcttcctgctcaaacggctctcttgccactttattttccccagagactctgctcctatcctccccacctccccctaactgagcagcagtcctgaggccctgcctcccagtccct

SEQ ID NO: 568694 - DNA, 120 bp, Artificial Sequence
  ENSG00000170476_15 (sequence is synthesized)
tgaaatggagctgagatggctggagccagggtccagctagaggacaatgcccacgtggcatcttcggggccctggaggagggagtgggaggaggatgggaggggtgaggtgtcagttccc

SEQ ID NO: 568695 - DNA, 120 bp, Artificial Sequence
  ENSG00000170477_0 (sequence is synthesized)
actcaccggcctgggccctgtcacttctctgatagctcccagctcgctctctgcagccatgattgccagacagcagtgtgtccgaggcgggccccggggcttcagctgtggctcggccat

SEQ ID NO: 568696 - DNA, 120 bp, Artificial Sequence
  ENSG00000170477_1 (sequence is synthesized)
tgtaggcggtggcaagagaggtgccttcagctcagtctccatgtctggaggtgctggccgatgctcttctgggggatttggcagcagaagcctctacaacctcagggggaacaaaagcat

SEQ ID NO: 568697 - DNA, 120 bp, Artificial Sequence
  ENSG00000170477_2 (sequence is synthesized)
ctccatgagtgtggctgggtcacgacaaggtgcctgctttgggggtgctggaggctttggcactggtggctttggtggtggatttgggggctccttcagtggtaagggtggccctggctt

SEQ ID NO: 568698 - DNA, 120 bp, Artificial Sequence
  ENSG00000170477_3 (sequence is synthesized)
ccccgtctgccccgctgggggaattcaggaggtcaccatcaaccagagcttgctcacccccctccacgtggagattgaccctgagatccagaaagtccggacggaagagcgcgaacagat

SEQ ID NO: 568699 - DNA, 120 bp, Artificial Sequence
  ENSG00000170477_4 (sequence is synthesized)
caagctcctcaacaacaagtttgcctccttcatcgacaaggtgcagttcttagagcaacagaataaggtcctggagaccaaatggaacctgctccagcagcagacgaccaccacctccag

SEQ ID NO: 568700 - DNA, 120 bp, Artificial Sequence
  ENSG00000170477_5 (sequence is synthesized)
caaaaaccttgagcccctctttgagacctacctcagtgtcctgaggaagcagctagataccttgggcaatgacaaagggcgcctgcagtctgagctgaagaccatgcaggacagcgtgga

SEQ ID NO: 568701 - DNA, 120 bp, Artificial Sequence
  ENSG00000170477_6 (sequence is synthesized)
ggacttcaagactaagtatgaagaggagatcaacaaacgcacagcagccgagaatgactttgtggtcctaaagaaggacgtggatgctgcctacctgaacaaggtggagttggaggccaa

SEQ ID NO: 568702 - DNA, 120 bp, Artificial Sequence
  ENSG00000170477_7 (sequence is synthesized)
ggtggacagtcttaatgacgagatcaacttcctgaaggtcctctatgatgcggagctgtcccagatgcagacccatgtcagcgacacgtccgtggtcctttccatggacaacaaccgcaa

SEQ ID NO: 568703 - DNA, 120 bp, Artificial Sequence
  ENSG00000170477_8 (sequence is synthesized)
agcagctccagatctcggttgaccaacatggtgacaacctgaagaacaccaagagtgaaattgcagagctcaacaggatgatccagaggctgcgggcagagatcgagaacatcaagaagc

SEQ ID NO: 568704 - DNA, 120 bp, Artificial Sequence
  ENSG00000170477_9 (sequence is synthesized)
agtgccagactcttcaggtatccgtggctgatgcagagcagcgaggtgagaatgcccttaaagatgcccacagcaagcgcgtagagctggaggctgccctgcagcaggccaaggaggagc

SEQ ID NO: 568705 - DNA, 120 bp, Artificial Sequence
  ENSG00000170477_10 (sequence is synthesized)
tggcacgaatgctgcgtgagtaccaggagctcatgagtgtgaagctggccttggacatcgagatcgccacctaccgcaaactgctggagggcgaggagtacagaatgtctggagaatgcc

SEQ ID NO: 568706 - DNA, 120 bp, Artificial Sequence
  ENSG00000170477_11 (sequence is synthesized)
agagtgccgtgagcatctctgtggtcagcggtagcaccagcactggaggcatcagcggaggattaggaagtggctccgggtttggcctgagtagtggctttggctccggctctggaagtg

SEQ ID NO: 568707 - DNA, 120 bp, Artificial Sequence
  ENSG00000170477_12 (sequence is synthesized)
gctttgggtttggtggcagtgtctctggcagttccagcagcaagatcatctctaccaccaccctgaacaagagacgatagaggagacgaggtccctgcagctcactgtgtccagctgggc

SEQ ID NO: 568708 - DNA, 120 bp, Artificial Sequence
  ENSG00000170477_13 (sequence is synthesized)
ccagcactggtgtctctgtgcttccttcacttcacctccatcctctgtctctggggctcatcttactagtatcccctccactatcccatgggctctctctgccccaggatgatcttctgt

SEQ ID NO: 568709 - DNA, 120 bp, Artificial Sequence
  ENSG00000170477_14 (sequence is synthesized)
gctgggacagggactctgcctcttggagtttggtagctacttcttgatttgggcctggtgacccacctggaatgggaaggatgtcagctgacctctcacctcccatggacagagaagaaa

SEQ ID NO: 568710 - DNA, 120 bp, Artificial Sequence
  ENSG00000170477_15 (sequence is synthesized)
atgaccaggagtgtcatctccagaattattggggtcacatatgtcccttcccagtccaatgccatctcccactagatcctgtattatccatctacatcagaaccaaactacttctccaac

SEQ ID NO: 568711 - DNA, 120 bp, Artificial Sequence
  ENSG00000170477_16 (sequence is synthesized)
acccggcagcacttggccctgcaagcttaggatgagaaccacttagtgtcccattctactcctctcattccctcttatccatctgcaggtgaatcttcaataaaatgcttttgtcattca

SEQ ID NO: 568712 - DNA, 120 bp, Artificial Sequence
  ENSG00000170477_17 (sequence is synthesized)
acgtggatatttccaaatttgtttggaaatgcttgaaaacaagcagcagagatctgagaaacaccagctcactgtgggtttttgtctttttctccccgtgcccacccccaggtatgaaga

SEQ ID NO: 568713 - DNA, 120 bp, Artificial Sequence
  ENSG00000170477_18 (sequence is synthesized)
ttcacagttttttgaaaggactccagctcccttattttagggcagtgggttctcatcaaggtcatgcatagaaaggtttgaagtgggaaattcaactgggagattcttagaaccagatgt

SEQ ID NO: 568714 - DNA, 120 bp, Artificial Sequence
  ENSG00000170477_19 (sequence is synthesized)
ggtcttggtcttagacggggtgattagatctaaagagtgcttggaatagaattcattgctgtctagcattttttttctggtgaaatggatccattcccttcccttccattccaacacacc

SEQ ID NO: 568715 - DNA, 120 bp, Artificial Sequence
  ENSG00000170477_20 (sequence is synthesized)
ggcttagaatctcaggctctgaaggcgtctaggaaggccctctagtctgttttgctacatccacatagtcacgttttctcagggtgaggtctggtaaccacagatttttccgaaaggaaa

SEQ ID NO: 568716 - DNA, 120 bp, Artificial Sequence
  ENSG00000170477_21 (sequence is synthesized)
tttaatgatagattcagggatttgggtctgccatatacgaacaagatcagaacccaaatagatgaaaagcagtatagtatgattagaagaatacagactgtagagacagatggaggtggt

SEQ ID NO: 568717 - DNA, 120 bp, Artificial Sequence
  ENSG00000170482_0 (sequence is synthesized)
ctcttctcctcaggaactgctcaaacctgtgccccaaagatgagggcccaggaggacctcgagggccggacacagcatgaaaccaccagggacccctcgaccccgctacccacagagcct

SEQ ID NO: 568718 - DNA, 120 bp, Artificial Sequence
  ENSG00000170482_1 (sequence is synthesized)
aagtttgacatgttgtacaagatcgaggacgtgccaccttggtacctgtgcatcctgctgggcttccagcactacctgacatgcttcagtggtaccatcgccgtgcccttcctgctggct

SEQ ID NO: 568719 - DNA, 120 bp, Artificial Sequence
  ENSG00000170482_2 (sequence is synthesized)
gaggcgctgtgtgtgggccacgaccagcacatggttagtcagctcatcggcaccatcttcacgtgcgtgggcatcaccactctcatccagaccaccgtgggcatccggctgccgctgttc

SEQ ID NO: 568720 - DNA, 120 bp, Artificial Sequence
  ENSG00000170482_3 (sequence is synthesized)
caggccagtgcctttgcatttctggttccagccaaagccatactggctctggagagatggaaatgccccccggaagaggagatctacggtaactggagtctgcccctgaacacctctcat

SEQ ID NO: 568721 - DNA, 120 bp, Artificial Sequence
  ENSG00000170482_4 (sequence is synthesized)
atttggcacccacggatacgggaggtgggtttgcatgtccagggtgcaatcatggtgtccagcgtggtggaggtggtgattggcctgctggggctgcctggggccctgctcaactacatt

SEQ ID NO: 568722 - DNA, 120 bp, Artificial Sequence
  ENSG00000170482_5 (sequence is synthesized)
gggcctctcacagtcacccccactgtctccctcattggcctttctgtcttccaagctgctggcgaccgagctggctcccactggggcatctcagcttgctccattctcctgatcatcctc

SEQ ID NO: 568723 - DNA, 120 bp, Artificial Sequence
  ENSG00000170482_6 (sequence is synthesized)
ttctcccagtacctgcgcaacctcaccttcctgctgcctgtctaccgctggggcaagggcctcactctcctccgcatccagatcttcaaaatgtttcctatcatgctggccatcatgacc

SEQ ID NO: 568724 - DNA, 120 bp, Artificial Sequence
  ENSG00000170482_7 (sequence is synthesized)
gtgtggctgctctgctatgtcctgaccttgacagacgtgctgcccacagacccaaaagcctatggcttccaggcacgaaccgatgcccgtggtgacatcatggctattgcaccctggatc

SEQ ID NO: 568725 - DNA, 120 bp, Artificial Sequence
  ENSG00000170482_8 (sequence is synthesized)
cgcatcccctacccctgtcagtggggcctgcccacggtgactgcggctgctgtcctgggaatgttcagcgccactctggcaggcatcattgagtccatcggagattactacgcctgtgcc

SEQ ID NO: 568726 - DNA, 120 bp, Artificial Sequence
  ENSG00000170482_9 (sequence is synthesized)
tccagtacatgctatcaacaggggcatcttcaccgaaggcatttgctgcatcatcgcggggctattgggcacgggcaacgggtccacctcgtccagtcccaacattggcgtcctgggaat

SEQ ID NO: 568727 - DNA, 120 bp, Artificial Sequence
  ENSG00000170482_10 (sequence is synthesized)
taccaaggtgggcagccggcgcgtggtgcagtatggtgcggctatcatgctggtcctgggcaccatcggcaagttcacggccctcttcgcctcgctccctgaccccatcctggggggcat

SEQ ID NO: 568728 - DNA, 120 bp, Artificial Sequence
  ENSG00000170482_11 (sequence is synthesized)
gttctgcactctctttggcatgattacagctgtggggctgtccaacctgcaatttgtggacatgaactcctctcgcaacctcttcgtgctgggattttccatgttcttcgggctcacgct

SEQ ID NO: 568729 - DNA, 120 bp, Artificial Sequence
  ENSG00000170482_12 (sequence is synthesized)
gcccaattacctggagtccaaccctggcgccatcaatacaggcattcttgaagtggatcagattctgattgtgctgctgaccacggagatgtttgtgggcgggtgccttgctttcatact

SEQ ID NO: 568730 - DNA, 120 bp, Artificial Sequence
  ENSG00000170482_13 (sequence is synthesized)
tgacaacacagtgccagggagcccagaggagcgtggtctgatacagtggaaagctggggctcatgccaacagtgacatgtcttccagcctcaagagctacgatttccccattgggatggg

SEQ ID NO: 568731 - DNA, 120 bp, Artificial Sequence
  ENSG00000170482_14 (sequence is synthesized)
catagtaaaaagaattacctttctgaaatacattcctatctgcccagtcttcaaaggattttcttcaagttcaaaagatcagattgcaattccagaagacactccagaaaatacagaaac

SEQ ID NO: 568732 - DNA, 120 bp, Artificial Sequence
  ENSG00000170482_15 (sequence is synthesized)
tgcatctgtgtgcaccaaggtctgaaaaatgacttccaggaaaggaagcatggtatataacaggaaaagaaaactacatggggaaccagaagacctaagcctgaaatcccagccctgccc

SEQ ID NO: 568733 - DNA, 120 bp, Artificial Sequence
  ENSG00000170482_16 (sequence is synthesized)
ctaactaacttctgtgtaaactcagataagtcacctttctctgggattcaaatttttgcatcagttaaaaaaaaaggggtgggggggaatgggccaaagtctgagtcttagagacttgta

SEQ ID NO: 568734 - DNA, 120 bp, Artificial Sequence
  ENSG00000170482_17 (sequence is synthesized)
ccaatgttatgctatgtctctaaatctttactctcctaagtagacttgtcagcatctaggaagaacagctagaaattttcctctgtgatattttagactgcaagttgaaaaaaataaaaa

SEQ ID NO: 568735 - DNA, 120 bp, Artificial Sequence
  ENSG00000170482_18 (sequence is synthesized)
gaaatgagggcaggttccagggcctgaaatgtaggtatgctgcaaggcttttacattgaatttgaccctacatcacttcaagactaatgcataatattaaacatcatgttgaagaaataa

SEQ ID NO: 568736 - DNA, 120 bp, Artificial Sequence
  ENSG00000170482_19 (sequence is synthesized)
agcttggtgagcaggcaccaggcctgatccctgcccagccccagcaccctaccctcttcatgtccttggtccttcttcccggctcctggccccagcctggcctcccatccacttcctgat

SEQ ID NO: 568737 - DNA, 120 bp, Artificial Sequence
  ENSG00000170482_20 (sequence is synthesized)
atcttgggtaacaggaagaaaaacctgaggtcagcacagtggctgtcagcaagcaggagtcgggaagaggctgaatcctgaaagaagatgaactccctgggggagtgtgacgcttgccag

SEQ ID NO: 568738 - DNA, 120 bp, Artificial Sequence
  ENSG00000170482_21 (sequence is synthesized)
gtggggtgttggtgacagggagcagagccgactccacggaagccgcaggaatatcttgagtggaaattagtgacccccagagtggtcagcagtagctctctgggaatcccttgtggggac

SEQ ID NO: 568739 - DNA, 120 bp, Artificial Sequence
  ENSG00000170482_22 (sequence is synthesized)
aaactggtccagcaactttggaaattgggagcagtagccaagagggagaggagaggacaggcggacagaggaacagtgtggacaccggcaggcgggcggactcagtgctgtggcatgaag

SEQ ID NO: 568740 - DNA, 120 bp, Artificial Sequence
  ENSG00000170482_23 (sequence is synthesized)
cggaagggtgcagccatggcagcatcttctctccctctctgtctctgtacctggtccgtgtgtgtatccctgactctacccccagaggagatctacggtaactggagtctgcccctgaac

SEQ ID NO: 568741 - DNA, 120 bp, Artificial Sequence
  ENSG00000170484_0 (sequence is synthesized)
atcagtgtgttctctaccccttggagactgcttttctccagctctgtcaactcaacctttcccaccatgagtcggcaactgaacatcaagtccagtggtgacaagggcaacttcagtgtg

SEQ ID NO: 568742 - DNA, 120 bp, Artificial Sequence
  ENSG00000170484_1 (sequence is synthesized)
cattcggcagtggtgccaaggaaggctgtgggtagcctggcttcttactgtgcagctggcagaggggctggcgctggctttggcagtcggagcctctatagccttggagggaatcggcgt

SEQ ID NO: 568743 - DNA, 120 bp, Artificial Sequence
  ENSG00000170484_2 (sequence is synthesized)
atttctttcaatgtggctggtggcggcgttcgggctggaggttacggcttcaggcctggctctgggtatggagggggccgggccagtggctttgctggcagtatgtttggcagtgtggcc

SEQ ID NO: 568744 - DNA, 120 bp, Artificial Sequence
  ENSG00000170484_3 (sequence is synthesized)
ctggggcctgcatgtttgtctgtgtgcccacctgggggcatccaccaggtcactgtcaacaagagcctcttggcccccctcaacgtggagctggaccctgagatccagaaggtgcgcgcc

SEQ ID NO: 568745 - DNA, 120 bp, Artificial Sequence
  ENSG00000170484_4 (sequence is synthesized)
caggagcgggaacagatcaaggtgctgaacgacaagttcgcctccttcattgacaaggtacgcttcctagagcagcagaaccaggttctagaaaccaagtgggagctgctgcagcagctg

SEQ ID NO: 568746 - DNA, 120 bp, Artificial Sequence
  ENSG00000170484_5 (sequence is synthesized)
gacctgaacaactgcaagaagaacctggagcccatccttgagggctacatcagcaacctgcggaagcagctggagacactgtctggggacagggtgaggctggactcggagctgagaagc

SEQ ID NO: 568747 - DNA, 120 bp, Artificial Sequence
  ENSG00000170484_6 (sequence is synthesized)
atgagggatctggtggaggactataagaagagatatgaagtggagattaaccggcgcacgacagcagagaatgagtttgtggtgcttaagaaggatgcagatgcagcctacgcagtcaag

SEQ ID NO: 568748 - DNA, 120 bp, Artificial Sequence
  ENSG00000170484_7 (sequence is synthesized)
gtggagcttcaggccaaagtggactcactggacaaagaaatcaagttcctcaagtgtctgtatgatgcagagatcgctcagatccagactcacgccagtgagacctctgtcatcctgtcc

SEQ ID NO: 568749 - DNA, 120 bp, Artificial Sequence
  ENSG00000170484_8 (sequence is synthesized)
atggacaacaaccgggacctggaccttgacagcatcatcgctgaggtccgcatgcattatgaggagatcgccctgaagagcaaggccgaggccgaggccctgtaccagaccaagatccag

SEQ ID NO: 568750 - DNA, 120 bp, Artificial Sequence
  ENSG00000170484_9 (sequence is synthesized)
gagctgcagctggcagccagtcggcatggtgacgacctgaaacacaccaggagcgagatggtggagctgaaccggctcatccagaggatccggtgtgagatcgggaatgtgaagaagcag

SEQ ID NO: 568751 - DNA, 120 bp, Artificial Sequence
  ENSG00000170484_10 (sequence is synthesized)
cgtgccagcctggagacggccatcgctgacgctgagcagcggggagacaatgccctgaaggatgcccaggccaagctggatgagctggagggcgccctgcaccaggccaaggaggagctg

SEQ ID NO: 568752 - DNA, 120 bp, Artificial Sequence
  ENSG00000170484_11 (sequence is synthesized)
ggagggcgaggagtgcaggatgtctggtgagaatccatcctctgtgagcatctctgtcatcagcagtagcagctacagctaccaccaccccagctctgcgggtgttgaccttggggccag

SEQ ID NO: 568753 - DNA, 120 bp, Artificial Sequence
  ENSG00000170484_12 (sequence is synthesized)
cgctgtggcaggcagctctggcagcacccagagcgggcagaccaagaccacagaggcgcgagggggagacctcaaggacacccagggcaagagcaccccagccagcatcccagcaaggaa

SEQ ID NO: 568754 - DNA, 120 bp, Artificial Sequence
  ENSG00000170484_13 (sequence is synthesized)
agccacccgctagacccatggcctcacccacctcagcacttggaagaagaggtgactttgccacccccaaaggtgtctgccacacccaagttcccaggccctgagttttaaaactgtctg

SEQ ID NO: 568755 - DNA, 120 bp, Artificial Sequence
  ENSG00000170484_14 (sequence is synthesized)
tagtacactcaactgtctgcatcgtggtttagcttttactttcaagctctgattgacacagtcaccttccctgtttccttaggtcccatgtggactaacgacttctcattttcctcgctg

SEQ ID NO: 568756 - DNA, 120 bp, Artificial Sequence
  ENSG00000170484_15 (sequence is synthesized)
cctttggctggcaggaggctttggaggcacaagccattataaccttcttggccctaaggaagctgtgatcatccctagaaagagggaaggagcaggagacgacaggggaggggctggttt

SEQ ID NO: 568757 - DNA, 120 bp, Artificial Sequence
  ENSG00000170484_16 (sequence is synthesized)
gttctgtgcttaggccaagttagctactgtctgagaggttttacatcccctgccagcatggtggggtgacacgagacctgtaagcaggtggtgagaagttagacagcctttacttgctcc

SEQ ID NO: 568758 - DNA, 120 bp, Artificial Sequence
  ENSG00000170484_17 (sequence is synthesized)
atcagaaacaactttgcaggatgacgccaatatttaggacaccacgtgtacatctgtagaccaccagctgcacccatctccacaaagccaagtgaaggtgtattggggattctctgccag

SEQ ID NO: 568759 - DNA, 120 bp, Artificial Sequence
  ENSG00000170484_18 (sequence is synthesized)
cctgtgtcacccacccacctccttcattatcagcaatagctaccatcatttgtcaagcacctactagatgccagacaccctacacatattgcctcctgttctcatccattcctgcaaaga

SEQ ID NO: 568760 - DNA, 120 bp, Artificial Sequence
  ENSG00000170484_19 (sequence is synthesized)
agatgcaatgagcatccttggaacagactgggagcctgatcccaagaggctgctgaactggccccagtcacccacctatgtgccagagtcaggcctggccgacacaaggatctatgcttt

SEQ ID NO: 568761 - DNA, 120 bp, Artificial Sequence
  ENSG00000170484_20 (sequence is synthesized)
ttctgtggtgtgtcactgcctttttaacaaaagggctgtcaaagtcaccattctttttgatgagggcagcgtaattacattgccttttgtcaggactgtgggtatgtgatttgtcttcca

SEQ ID NO: 568762 - DNA, 120 bp, Artificial Sequence
  ENSG00000170484_21 (sequence is synthesized)
cagtctctctggggctgtgtcctacatagcttctgactctcaatttttggtgccatgagctgagctcagtgagtggagctggcttttctgtcgctgagtgctactgcctagtccagatgt

SEQ ID NO: 568763 - DNA, 120 bp, Artificial Sequence
  ENSG00000170484_22 (sequence is synthesized)
cgtggctcagggtgtaaatattcctaagaatggcagcatctatttcctcttttgtttgaattaaagactctgaatttctgctgtatattcattaagttgtccttgagtgttgtcagaggt

SEQ ID NO: 568764 - DNA, 120 bp, Artificial Sequence
  ENSG00000170484_23 (sequence is synthesized)
gcagcttttactccttgtcacctagggccccatctgcaaaatgagggcattgttctacttaactggtatgagctaaatgtaattttctgttctgatggtctctctgttctttgcccttca

SEQ ID NO: 568765 - DNA, 80 bp, Artificial Sequence
  ENSG00000170485_0 (sequence is synthesized)
gcgtgcggaagagtttgccgcgcgagcagccggcctctcgcaggagccgagggacccgcgcggctgcggcccaggagcgg

SEQ ID NO: 568766 - DNA, 80 bp, Artificial Sequence
  ENSG00000170485_1 (sequence is synthesized)
gcggcggcggcagcagctagagcagcgcctcccgccgccgcccgggaggagctcgccgcgcccgctcgccgcctcgtctc

SEQ ID NO: 568767 - DNA, 120 bp, Artificial Sequence
  ENSG00000170485_2 (sequence is synthesized)
gcccggccccgcggggccgctccggcccgctccgaggaaaaactgcatagaaaatctaatggatgaagatgagaaagacagagccaagagagcttctcgaaacaagtctgagaagaagcg

SEQ ID NO: 568768 - DNA, 120 bp, Artificial Sequence
  ENSG00000170485_3 (sequence is synthesized)
tcgggaccagttcaatgttctcatcaaagagctcagttccatgctccctggcaacacgcggaaaatggacaaaaccaccgtgttggaaaaggtcatcggatttttgcagaaacacaatga

SEQ ID NO: 568769 - DNA, 120 bp, Artificial Sequence
  ENSG00000170485_4 (sequence is synthesized)
agtctcagcgcaaacggaaatctgtgacattcagcaagactggaagccttcattcctcagtaatgaagaattcacccagctgatgttggaggcattagatggcttcattatcgcagtgac

SEQ ID NO: 568770 - DNA, 120 bp, Artificial Sequence
  ENSG00000170485_5 (sequence is synthesized)
aacagacggcagcatcatctatgtctctgacagtatcacgcctctccttgggcatttaccgtcggatgtcatggatcagaatttgttaaatttcctcccagaacaagaacattcagaagt

SEQ ID NO: 568771 - DNA, 120 bp, Artificial Sequence
  ENSG00000170485_6 (sequence is synthesized)
ttataaaatcctttcttcccatatgcttgtgacggattccccctccccagaatacttaaaatctgacagcgatttagagttttattgccatcttctcagaggcagcttgaacccaaagga

SEQ ID NO: 568772 - DNA, 120 bp, Artificial Sequence
  ENSG00000170485_7 (sequence is synthesized)
atttccaacttatgaatacataaaatttgtaggaaattttcgctcttacaacaatgtgcctagcccctcctgtaatggttttgacaacaccctttcaagaccttgccgggtgccactagg

SEQ ID NO: 568773 - DNA, 120 bp, Artificial Sequence
  ENSG00000170485_8 (sequence is synthesized)
aaaggaggtttgcttcattgccaccgttcgtctggcaacaccacaattcttaaaggaaatgtgcatagttgacgaacctttagaggaattcacttcaaggcatagcttggaatggaaatt

SEQ ID NO: 568774 - DNA, 120 bp, Artificial Sequence
  ENSG00000170485_9 (sequence is synthesized)
tttatttctggatcacagagcacctccaatcataggatacctgccttttgaagtgctgggaacctcaggctatgactactaccacattgatgacctggagctcctggccaggtgtcacca

SEQ ID NO: 568775 - DNA, 120 bp, Artificial Sequence
  ENSG00000170485_10 (sequence is synthesized)
gcacctgatgcagtttggcaaagggaagtcgtgttgctaccggtttctgaccaaaggtcagcagtggatctggctgcagactcactactacatcacctaccatcagtggaactccaagcc

SEQ ID NO: 568776 - DNA, 120 bp, Artificial Sequence
  ENSG00000170485_11 (sequence is synthesized)
cgagttcatcgtgtgcacacactcggtggtcagttacgcagatgtccgggtggaaaggaggcaggagctggctctggaagacccgccatccgaggccctccactcctcagcactaaagga

SEQ ID NO: 568777 - DNA, 120 bp, Artificial Sequence
  ENSG00000170485_12 (sequence is synthesized)
caagggctcaagcctggaacctcggcagcactttaacacactcgacgtgggtgcctcgggccttaataccagtcattcgccatcggcgtcctcaagaagttcccacaaatcctcgcacac

SEQ ID NO: 568778 - DNA, 120 bp, Artificial Sequence
  ENSG00000170485_13 (sequence is synthesized)
agccatgtcagaacccacctccactcccaccaagctgatggcagaggccagcaccccggctttgccaagatcagccaccctgccccaagagttacctgtccccgggctcagccaggcagc

SEQ ID NO: 568779 - DNA, 120 bp, Artificial Sequence
  ENSG00000170485_14 (sequence is synthesized)
caccatgccggcccctctgccttccccatcgtcctgcgacctcacacagcagctcctgcctcagaccgttctgcagagcacgcccgctcccatggcacagttttcggcacagttcagcat

SEQ ID NO: 568780 - DNA, 120 bp, Artificial Sequence
  ENSG00000170485_15 (sequence is synthesized)
gttccagaccatcaaagaccagctagagcagcggacgcggatcctgcaggccaatatccggtggcaacaggaagagctccacaagatccaggagcagctctgcctggtccaggactccaa

SEQ ID NO: 568781 - DNA, 120 bp, Artificial Sequence
  ENSG00000170485_16 (sequence is synthesized)
tgaggctcagcagcagctacagcaaaggtcagctgcagtgactcagccccagctcggggcgggcccccaacttccagggcagatctcctctgcccaggtcacaagccagcacctgctcag

SEQ ID NO: 568782 - DNA, 120 bp, Artificial Sequence
  ENSG00000170485_17 (sequence is synthesized)
agaatcaagtgtgatatcaacccagggtccaaagccaatgagaagctcacagctaatgcagagcagcggccgctctggaagcagcctagtgtccccgttcagcagcgccacagctgcgct

SEQ ID NO: 568783 - DNA, 120 bp, Artificial Sequence
  ENSG00000170485_18 (sequence is synthesized)
cccgccaagtctgaatctgaccacacctgcttccacctcccaggatgccagccagtgccagcccagcccagacttcagccatgatcggcagctcaggctgttgctgagccagcccatcca

SEQ ID NO: 568784 - DNA, 120 bp, Artificial Sequence
  ENSG00000170485_19 (sequence is synthesized)
gcccatgatgcccgggtcctgtgacgcaaggcagccctcggaagtcagcaggacgggacggcaagtcaagtacgcccagagccagaccgtgtttcaaaatccagacgcacaccccgccaa

SEQ ID NO: 568785 - DNA, 120 bp, Artificial Sequence
  ENSG00000170485_20 (sequence is synthesized)
cagcagcagcgccccgatgcccgtcctgctgatggggcaggcggtgctccaccccagcttccctgcctcccaaccatcgcccctgcagcctgcacaggcccggcagcagccaccgcagca

SEQ ID NO: 568786 - DNA, 120 bp, Artificial Sequence
  ENSG00000170485_21 (sequence is synthesized)
ctacctgcaggtacaggcaccaacctctttgcacagtgagcagcaggactcgctacttctctccacctactcacaacagccagggaccctgggctacccccaaccacccccagcacagcc

SEQ ID NO: 568787 - DNA, 120 bp, Artificial Sequence
  ENSG00000170485_22 (sequence is synthesized)
ccagcccctacgtcctccccgaagggtcagcagtctgtctgagtcgtcaggcctccagcagccgccccgataatgccccggcactgaagtcgggacacaatcagctttaaccaatggatg

SEQ ID NO: 568788 - DNA, 120 bp, Artificial Sequence
  ENSG00000170485_23 (sequence is synthesized)
aggggggtggccacaggagatggggagaggagtctgaactaaacccctggcttttgtgcacactgcatacgtttcagaactcctggatggtaaccatctctggagtgcagcgcttgctgc

SEQ ID NO: 568789 - DNA, 120 bp, Artificial Sequence
  ENSG00000170485_24 (sequence is synthesized)
agtggaaatgatcaggaatactgaccgtgtttctcttgcctccgaggttcttgggcacactctatagccatactggacaggaaccaggtgccccgtgtaggcatcgtcggtcggtttgcc

SEQ ID NO: 568790 - DNA, 120 bp, Artificial Sequence
  ENSG00000170485_25 (sequence is synthesized)
gtcagagatggcgcatctcgctgcatcccccgagagtacaccggttgctctagccacctgcggcccgcccatctgcgctagctggccttcacgctcttgatcgtctttcctttgtattgg

SEQ ID NO: 568791 - DNA, 120 bp, Artificial Sequence
  ENSG00000170485_26 (sequence is synthesized)
agaaggactgggtcagagatctgttggagagagagaataaagagattatttttcattatttttaaatggttgtttttgttttaatttgcacagctacacagaggaaataacttaggcact

SEQ ID NO: 568792 - DNA, 120 bp, Artificial Sequence
  ENSG00000170485_27 (sequence is synthesized)
ttctgttttttttaaaaaaataataaggtctcatggcttcatttagagaccacagtaacaacagcagcccaccaatcagagaagctggttgttattaaccaagctacagattcacacttt

SEQ ID NO: 568793 - DNA, 120 bp, Artificial Sequence
  ENSG00000170485_28 (sequence is synthesized)
ctggcctaaaccctaatgggatgaggcttttcaccccaggccatgctggtggtgattttttagcccctaaataaaacactggactatttcctgtttacttcattgattgcaactacaaag

SEQ ID NO: 568794 - DNA, 120 bp, Artificial Sequence
  ENSG00000170485_29 (sequence is synthesized)
gtggactcaaagcaaagcacaatcatgccagccaacattccagaattctgctgagaactccaagtctgtgaggggagaggttttacaagccagacaggcctgggggactgcagtccccaa

SEQ ID NO: 568795 - DNA, 120 bp, Artificial Sequence
  ENSG00000170485_30 (sequence is synthesized)
ggagaccctgccacatgctggccctttgagtgagaatgctgcatctttctacatatcttcatgagaatactgagaattggattttccttttcaaaatgcactttgctttttttgtatgtt

SEQ ID NO: 568796 - DNA, 120 bp, Artificial Sequence
  ENSG00000170485_31 (sequence is synthesized)
ttgttatgttgagatgtttctaaagaaaagattttatgtaattataagatgaagcgtagtgaattgtacagctgttgtaataatgacctatttctatataaaataaaattgtatggctta

SEQ ID NO: 568797 - DNA, 120 bp, Artificial Sequence
  ENSG00000170485_32 (sequence is synthesized)
tgtgtaaattattttgtatctgagataccagttccttttcccaaatataaaagtataaaagttttcttgtgtttttctgtgagtgaaaattttgtaataaattaacaaatttgtacaatt

SEQ ID NO: 568798 - DNA, 120 bp, Artificial Sequence
  ENSG00000170485_33 (sequence is synthesized)
ggatgtatgcgtatggttttgttgggagatgtgcccctttcccagccgaggagggacgcacctttgacctttctgaagagctgggcaggtcggtaaccagggaagggacaggcaccaccc

SEQ ID NO: 568799 - DNA, 120 bp, Artificial Sequence
  ENSG00000170485_34 (sequence is synthesized)
atgcacggtccagactgagcaggttttaagaaagccttctaattatttaaaggcagaagcttatcccatagacgaaaatgtgttttttaaagacaattacaattggagatttcagggaag

SEQ ID NO: 568800 - DNA, 120 bp, Artificial Sequence
  ENSG00000170485_35 (sequence is synthesized)
taaaaagaatagtaaatgagaggggaataaagacatcctggaaataaaaagattttgaatgtaatattataagtcactcaggtcgaatttaaggcagagaacgacgctcattccttccaa

SEQ ID NO: 568801 - DNA, 120 bp, Artificial Sequence
  ENSG00000170485_36 (sequence is synthesized)
caagtcacaggctaggctcctctgtgttgactgttgtggggggcaggggttacgtagagaacctcgatgtaccttgctgtctgttcaggtggtgtcatcccttcctggaatgccccatct

SEQ ID NO: 568802 - DNA, 120 bp, Artificial Sequence
  ENSG00000170485_37 (sequence is synthesized)
caggtgatccccttcccgggctggcctctgtccctgctgctgtgtgggaaggggtcctgccgccatttccgggcagccaggacttcctcccaagccctgtgaactgccctgccaagcccc

SEQ ID NO: 568803 - DNA, 120 bp, Artificial Sequence
  ENSG00000170485_38 (sequence is synthesized)
atttgcttatgaaagcatattgcagtctctgcaaaggacaaggaacaaatcccggtccccatccctgcctccaggccacacccctgatgtcctcttccctcgcccctcactctgacaggc

SEQ ID NO: 568804 - DNA, 120 bp, Artificial Sequence
  ENSG00000170485_39 (sequence is synthesized)
acatctgctcactgcctccacctacgtttgcacttgtgcacttggcgttggattgccctgcatggatgcctgcctcggtcctgggtagtacctccctgcacctctataactttgctttcc

SEQ ID NO: 568805 - DNA, 120 bp, Artificial Sequence
  ENSG00000170485_40 (sequence is synthesized)
tagctcccagcccaggctgccatcaggaggagatggaagcagctctgttgtttctcatccaacgcaggcatccagggagatgtgggaaatgatgatatccatatcacagcctactggaga

SEQ ID NO: 568806 - DNA, 120 bp, Artificial Sequence
  ENSG00000170485_41 (sequence is synthesized)
ctgcagagggagctgggtggctccccatttgtggtgtgccagcagggaagctctgcaaagcctagcagcagcagctctcactgtgacccccagatattagaattgtttggagaggtgttg

SEQ ID NO: 568807 - DNA, 120 bp, Artificial Sequence
  ENSG00000170485_42 (sequence is synthesized)
ttttgttttgttttttgttttgttttggaggaaaacctttacatattggatctcttttaataatatataatgttttacttacattagtccaggactgtgtatcttcagaagtgcctgatt

SEQ ID NO: 568808 - DNA, 120 bp, Artificial Sequence
  ENSG00000170485_43 (sequence is synthesized)
ctgacccagcctttgattgtaaatgtaactctagctaaccttggcgtctgccctgggagcactaagcatttggagacccttagaagggacagaaagaagcagaaataacatctctgctgg

SEQ ID NO: 568809 - DNA, 120 bp, Artificial Sequence
  ENSG00000170485_44 (sequence is synthesized)
agcactgtccctgttgcttcccccatcaccatctacgcagaccctcccctggccacacagcttctgaagtgcagccacacctaccataggtgacaggcgggttctgtcggggcacagcgc

SEQ ID NO: 568810 - DNA, 120 bp, Artificial Sequence
  ENSG00000170485_45 (sequence is synthesized)
cgtgagccggtgcacgctgagattaatacacagtggtgcaggtgtctgggggcttagggagatgctcatttggccatcctgcctcgctgaggtcccagcagctccgcctggccctcaggg

SEQ ID NO: 568811 - DNA, 120 bp, Artificial Sequence
  ENSG00000170485_46 (sequence is synthesized)
gcactcctggtggctttctagatgctcactgtccctccccttcctgcccctgcacaggcctctcagaggtggctgctcaccttaaagagaagagccccgccctggacaggccacctcccc

SEQ ID NO: 568812 - DNA, 120 bp, Artificial Sequence
  ENSG00000170485_47 (sequence is synthesized)
acctgctcccctcaagacacggcgtgtgcgccttgagcaggcttcactcagacagcctgggccatgccagagccctgctgctctccccacctcctcagtgcacccttaaattgaccagaa

SEQ ID NO: 568813 - DNA, 120 bp, Artificial Sequence
  ENSG00000170485_48 (sequence is synthesized)
aaaggctcggccttctcgtgaaaagaaatggagtcaccgagctgccattccaccttttaccagaataggtaaaaagtggcttttgacttacgccttcccagctggaatatttttctcact

SEQ ID NO: 568814 - DNA, 120 bp, Artificial Sequence
  ENSG00000170485_49 (sequence is synthesized)
gatccagggcctgactgggagcccaatgcttgcctgactccaattactttaatggaatttttacactaacaggaagggggaaatcgagccagaaactgctaaaattgaggtaggcgtatg

SEQ ID NO: 568815 - DNA, 120 bp, Artificial Sequence
  ENSG00000170485_50 (sequence is synthesized)
aacatccccctcagtgcctggagtttttctacttcctgccttttctgaattttaaaataacaggcagcaaggttatcgctttcactcctgttataacaaagtatttttcctccttgtgac

SEQ ID NO: 568816 - DNA, 120 bp, Artificial Sequence
  ENSG00000170485_51 (sequence is synthesized)
ctatgcctttggttaaccccaaagtacctatgccacagtgcactgagggatgttctgagccggccggcatgggaattgcaccctccggtgccttcctgccctgtgttcattcctgaggcc

SEQ ID NO: 568817 - DNA, 120 bp, Artificial Sequence
  ENSG00000170485_52 (sequence is synthesized)
ttatctttgcagtggaattttccagagatcatggaaatccacagatagtcgagacagaggatatttcctcaaggagcctgccttgtttttttgtaagacttaaagaaatatgttccaaaa

SEQ ID NO: 568818 - DNA, 120 bp, Artificial Sequence
  ENSG00000170485_53 (sequence is synthesized)
tgtgatatttgttttttttaaactaaactgtgtgattcaagtgtgaagaataagcaagtagaaatgactccagcccacccccaaaagtagagggatagataaaataagaatgacaaaaca

SEQ ID NO: 568819 - DNA, 120 bp, Artificial Sequence
  ENSG00000170485_54 (sequence is synthesized)
ctgatgattgttgaagcctaatggtgatgccaaggtttcattatattacttgtctattttgtatacttctaaaatgtcctgtaatgacaagtatttgtagaaataagcagataacactaa

SEQ ID NO: 568820 - DNA, 120 bp, Artificial Sequence
  ENSG00000170485_55 (sequence is synthesized)
tgaaaaatcatctgtgagtgtaggattggtttgttcttgaaaattagaagttgttggtttgttttctctgataacttttcccacttggagaacttttttttttttttatgttttctataa

SEQ ID NO: 568821 - DNA, 120 bp, Artificial Sequence
  ENSG00000170485_56 (sequence is synthesized)
agttgacctcagagcccttttaagtcaccatctccttaagccacaaaattctactttattgttgataaacagaagtacggctgtgcccagcagcaaaccaggaaccagtcccccacccag

SEQ ID NO: 568822 - DNA, 120 bp, Artificial Sequence
  ENSG00000170485_57 (sequence is synthesized)
tggcctttatcccaacctcagtggacttgtgatgctttacttcattgcttcaaaactttcgtcgaggctatatgtgcctgtgatgcttactatttttttttttcaaaaaaaccttgggtt

SEQ ID NO: 568823 - DNA, 120 bp, Artificial Sequence
  ENSG00000170485_58 (sequence is synthesized)
atgaggaagaagtcctgaagggctgttggtgtttgcacctggatggggtcatgaaaatggggctacctggacaagagctgttgtgctgaaaggcccatcgccccctccaaggctgcctct

SEQ ID NO: 568824 - DNA, 120 bp, Artificial Sequence
  ENSG00000170485_59 (sequence is synthesized)
tgctctttttgagagcatgcgcgccctctgctggctgctcaaaggaatgcctagaaggacacctgtagcaatggcaaatgacgtgttcctcaactggttcatccatccatctatccatcc

SEQ ID NO: 568825 - DNA, 120 bp, Artificial Sequence
  ENSG00000170485_60 (sequence is synthesized)
ttccttccatccagccatcatctatccatccttccatccgtccttccttccttccatccagccatcatctatccatccttccatccagccatcatctgtccatccttccatccgtccttc

SEQ ID NO: 568826 - DNA, 120 bp, Artificial Sequence
  ENSG00000170485_61 (sequence is synthesized)
catccagccgccatctgtccatcctttcttctggccaccctcccttctatacatccttctgcccgtcctttcttccttccatccatcctttagtccatccatccatctgacagacaccct

SEQ ID NO: 568827 - DNA, 120 bp, Artificial Sequence
  ENSG00000170485_62 (sequence is synthesized)
tactgtcagaggatatacatcgatgggacagagtagcacaccttgctgttacagtctgttacataaataacaccagcagacatagtttgcccttctctgagtgaaagcaccattcatatg

SEQ ID NO: 568828 - DNA, 120 bp, Artificial Sequence
  ENSG00000170485_63 (sequence is synthesized)
tttattcattcatacatgcatttattccattcattcatttatcaaacagtttttatatgcccaaagaggcgaaggaggaaaaagctccttttttcattttgaatgttattatctgacatt

SEQ ID NO: 568829 - DNA, 120 bp, Artificial Sequence
  ENSG00000170485_64 (sequence is synthesized)
cattcagtacttactatgtctcaggtcatttatatgcattaacttcatttagtccttaataagatatatgctcttaatgtcactatttttttttaatgtcactattttttactaatgagg

SEQ ID NO: 568830 - DNA, 120 bp, Artificial Sequence
  ENSG00000170485_65 (sequence is synthesized)
aaactaaggctttgaaaagttattaaaattgccgaaggccatactgctagtaaatggtagggtgggaatttgagctaagataggtctgctttaaggtaaattatactgcctctcatcaat

SEQ ID NO: 568831 - DNA, 120 bp, Artificial Sequence
  ENSG00000170485_66 (sequence is synthesized)
aaaggttggatttattcaaactctaatcaaaaggtaaattgtgtcctaccagaaaaacgcatggtaattgggtttgactactaggtttttgctgaagtgatgaagtataggttgccctat

SEQ ID NO: 568832 - DNA, 120 bp, Artificial Sequence
  ENSG00000170485_67 (sequence is synthesized)
gtgctataaatgagtcttattttaatagggagctgggattgcatgaaacatgaatcctcaaaatgtgtaaaatgatggatacccagaaaattcttcttaatttctaaagtgacaaggagt

SEQ ID NO: 568833 - DNA, 120 bp, Artificial Sequence
  ENSG00000170485_68 (sequence is synthesized)
cctcatttcaaaactgcaggcttctctgtggtgggtggggcatgagaggagtttggggaggtcccgtgggatggtagaaagatcagaacccagccccagctcagccacctgcccatctcg

SEQ ID NO: 568834 - DNA, 120 bp, Artificial Sequence
  ENSG00000170485_69 (sequence is synthesized)
ggcctctggtaagtggctcgaccccacccatgaaacagatgcttgagcgaactgatccgtaagtctccccagcgcgcctgcatggtgggatcctcgcctgcctctccaaacctgcgctga

SEQ ID NO: 568835 - DNA, 120 bp, Artificial Sequence
  ENSG00000170485_70 (sequence is synthesized)
cactcagcagatgtcagcctgtcggtcctgtactgcatatgaggtgggactgcactgagtacaggaatggggtgaaaaacgtcagatgctgggagccagagagccttccccctaaagaac

SEQ ID NO: 568836 - DNA, 120 bp, Artificial Sequence
  ENSG00000170485_71 (sequence is synthesized)
tccaggctaagggcctgatggactggaacagtgtatgttgagaatcatgatagacacagtgccatctgatgtttttaatacccaagaggtacttttgtttaaaaagccagtttcaggtct

SEQ ID NO: 568837 - DNA, 120 bp, Artificial Sequence
  ENSG00000170485_72 (sequence is synthesized)
gtcattaaattattattaaaattacaaaagttgtctttcttaaaactttagagtcaactgacagattccgttttatttatgaatctactaatttggtctaaaaagagcaatgctctaact

SEQ ID NO: 568838 - DNA, 120 bp, Artificial Sequence
  ENSG00000170485_73 (sequence is synthesized)
agatttttatttatgttcaattagttgataggttgattgtgaataatcaacattatctaccaaaactattcatttacacatttaatttatctgaatctttcaagcattttatgtacctaa

SEQ ID NO: 568839 - DNA, 120 bp, Artificial Sequence
  ENSG00000170485_74 (sequence is synthesized)
cattttatgtacctaacaaggcagacttataaagctaagaagtaaaatctttctaagcacctaaacaactgttttatttatttattcatttttaagacagagtctcaccctgttgcccag

SEQ ID NO: 568840 - DNA, 80 bp, Artificial Sequence
  ENSG00000170485_75 (sequence is synthesized)
agctcctgtaatacaggcgttagacacagcgcccagcgtaaacaactgttttaaatcaaatacaccaaacttatttgaac

SEQ ID NO: 568841 - DNA, 120 bp, Artificial Sequence
  ENSG00000170485_76 (sequence is synthesized)
aacaactgttttaaatcaaatacaccaaacttatttgaactaaatcaggattctcaagaacacctcaaattctcttaaatctttcaaattaaaaccaccaagctaatatcccatggcctt

SEQ ID NO: 568842 - DNA, 120 bp, Artificial Sequence
  ENSG00000170485_77 (sequence is synthesized)
ttaaatgtctctgagacaccttaggtaacaaaacacagagatgatcatgatgattacaaaacttgaacataattttaaagtgcatggacttaatgttatgtgatcatatccatgttattg

SEQ ID NO: 568843 - DNA, 120 bp, Artificial Sequence
  ENSG00000170485_78 (sequence is synthesized)
gcctgcctgggtatgtggttccttaattaatgacagatctgccatctcagctgagagcactggattgaaaattctcaacagtaatgtgggtacagacacgagtcactggtcagagattca

SEQ ID NO: 568844 - DNA, 120 bp, Artificial Sequence
  ENSG00000170485_79 (sequence is synthesized)
agggcaaacacagagcctggtcctactgcgagggcaatgtggcccatgccacaggtgagccatccctctgcccctatatcatgaggcaatattatcatgactgcatcatgcattccactc

SEQ ID NO: 568845 - DNA, 120 bp, Artificial Sequence
  ENSG00000170485_80 (sequence is synthesized)
accaggtatttctcccttctaggaagaagctggtaagccaacctcgactctaaacaagtacatcacattatttagagaacatctgggtctaaacagctttcacattgttaggcctcagtc

SEQ ID NO: 568846 - DNA, 120 bp, Artificial Sequence
  ENSG00000170485_81 (sequence is synthesized)
acttgcctgtaaccttcatgaaggcagagagagtgtctctccagcccatggctctgtggccagtgcctgacactgagcttggggcatcacaggtgctccatgtccaccagtggagtaaat

SEQ ID NO: 568847 - DNA, 120 bp, Artificial Sequence
  ENSG00000170485_82 (sequence is synthesized)
gaactatttctaggcagctcagagcaagaaagttcttactggcacagggaatgcaaaggaggtgcacactggtgaggtacccatgaccccaacttcacaggcatttctattctgctccca

SEQ ID NO: 568848 - DNA, 120 bp, Artificial Sequence
  ENSG00000170485_83 (sequence is synthesized)
aatacataaaatttgtaggaaattttcgctcttacaacaatgaaggtcagtccgttctccacagttgccctggaggcagggaccaagtcccacagagaagactctgccgaggctactgca

SEQ ID NO: 568849 - DNA, 120 bp, Artificial Sequence
  ENSG00000170485_84 (sequence is synthesized)
ctctagagcagacaccctcttgcagtttgggacatacttgattcctgcagcctacgtgaactgaggcctactgccctgttccgttatggactgagggtagatttgggagtgagccttctt

SEQ ID NO: 568850 - DNA, 120 bp, Artificial Sequence
  ENSG00000170485_85 (sequence is synthesized)
ttccttcttctgttaaagtcactttgaaaccccaagttgtattggcttccttctgtgttttataaatgtccacctcagtcccttgctctcgtgcttaaagatatcactcggctgaaatgt

SEQ ID NO: 568851 - DNA, 120 bp, Artificial Sequence
  ENSG00000170485_86 (sequence is synthesized)
tcacctttgatgctgacttagggttggaggcagatatggccatcccagagacccactggcagctgaatgtcccaacactcaacgtccatggtccccgccatctactctggttttaaccat

SEQ ID NO: 568852 - DNA, 120 bp, Artificial Sequence
  ENSG00000170485_87 (sequence is synthesized)
tacccacatgagcagccactgctgttcactgtcccttgccccaggtgccccctgctcctccaggcgccccctgctcctccaggcccccactgctcctccaggtctccctgctcctccagg

SEQ ID NO: 568853 - DNA, 120 bp, Artificial Sequence
  ENSG00000170485_88 (sequence is synthesized)
cccccattgctcctccaggtctccctgctcctccaggtccccctgctcctccaggcccccactgctcctccaggcctctctgctcctccaggcgccccctgcccctccaggcccccactg

SEQ ID NO: 568854 - DNA, 120 bp, Artificial Sequence
  ENSG00000170485_89 (sequence is synthesized)
ttcctccaggtccccctgctcctccaggcctccctgttcctccaggcgccccctgctcctccaggcccccctgctcctccaggcccccactgctcctccaggccccccagactctttgcc

SEQ ID NO: 568855 - DNA, 120 bp, Artificial Sequence
  ENSG00000170485_90 (sequence is synthesized)
aaacccttgtagccatttccacctattccaagccaccagtgaccttgcaattggacaaaatcgccagcagataaatggcactcaaatggaatggaattcagaagtctggagcagggcttc

SEQ ID NO: 568856 - DNA, 120 bp, Artificial Sequence
  ENSG00000170485_91 (sequence is synthesized)
tggaggataacagatgggaaggcagcctttcctccagcctcacattcccatgccctcgtggctttggtaaagtcagctgagctcctggaattcaccaagacccaggggaacaatgatgag

SEQ ID NO: 568857 - DNA, 120 bp, Artificial Sequence
  ENSG00000170485_92 (sequence is synthesized)
caagagttgtcctgggcctcgaggagcctgtagtccagtagagaatctgggaacttagataacctgcagtacaatacagataaacacacatatggaagtgtttaggccatctttcttcaa

SEQ ID NO: 568858 - DNA, 120 bp, Artificial Sequence
  ENSG00000170485_93 (sequence is synthesized)
atgtaagggttttgcttgaaaatacagccttttgatttaaaaggtcatcagaaaaataggtgagaagagctaagaaaattttggaaaagagaaaactgaggaaggatttatactatctga

SEQ ID NO: 568859 - DNA, 120 bp, Artificial Sequence
  ENSG00000170485_94 (sequence is synthesized)
tattggaaaattttgtaaaaactaagaatgagagcactgtgttatcggatgaatggacaatcagtgaaatagacagaaaacccaaagcaggtgcaagcccacttcctcactcatttatta

SEQ ID NO: 568860 - DNA, 120 bp, Artificial Sequence
  ENSG00000170485_95 (sequence is synthesized)
tttcactcagctccctgcgtgccaggcactaaattctgagcactgagggaaagcagtgaacaaaaaagaaaaaagaatttctgttccaagtgaggagagagacgaacatgtgaaaattat

SEQ ID NO: 568861 - DNA, 120 bp, Artificial Sequence
  ENSG00000170485_96 (sequence is synthesized)
agtatgtgcaatggtacaggaatgctggtgagggccaggaatggctggaggtgtaaagaggtagccaggtaaggccttttgaagaagataatatttgagtcaagacctgagggggtgaaa

SEQ ID NO: 568862 - DNA, 120 bp, Artificial Sequence
  ENSG00000170485_97 (sequence is synthesized)
gaatgagccatgtcaatgtcaggggaagagcattctacagagcagtcagctcgtgcaaaggccctagggcaggagtaggcctggtgagttggagaaacagccaggagggccatgtgtctg

SEQ ID NO: 568863 - DNA, 120 bp, Artificial Sequence
  ENSG00000170485_98 (sequence is synthesized)
cagtagaatttgaagcagaaagtagttcagttcaaggcacatttgctacttgcctgcctagagtccggcactgtcctaggcccaagggattcaaatacaatccaatggggaagacagtca

SEQ ID NO: 568864 - DNA, 120 bp, Artificial Sequence
  ENSG00000170485_99 (sequence is synthesized)
cccagaagtgattttggatgggaaatgagcaacagacaagtttgcatgcacctgttgcagacaagatgcaggctatgaatacagagagcgcttcggcccactcactgcccttaggggctt

SEQ ID NO: 568865 - DNA, 120 bp, Artificial Sequence
  ENSG00000170486_0 (sequence is synthesized)
acttgcgagccatgagccgccaactgacccatttcccccgcggggagcgcctgggcttcagcggttgctccgcggtcctctctggcgggatcggcagcagctccgcctcattccgggccc

SEQ ID NO: 568866 - DNA, 120 bp, Artificial Sequence
  ENSG00000170486_1 (sequence is synthesized)
gggtcaagggctcggcctcctttggcagcaagagcctctcctgccttgggggcagccgaagcctggcgctcagcgctgctgcacggcggggcggcggccgcctgggcggcttcgtgggca

SEQ ID NO: 568867 - DNA, 120 bp, Artificial Sequence
  ENSG00000170486_2 (sequence is synthesized)
ccgccttcggcagcgccgggctggggcccaagtgtccctccgtgtgcccacccgggggcatccctcaggtcaccgtcaacaagagcctcctggccccgctcaacgtggagatggaccccg

SEQ ID NO: 568868 - DNA, 120 bp, Artificial Sequence
  ENSG00000170486_3 (sequence is synthesized)
agatccagagggtgcgcgcccaggagcgggagcagatcaaggcgctaaacaacaagttcgcctccttcatcgacaaggtgcggttcctggagcagcagaatcaggtgctagagaccaagt

SEQ ID NO: 568869 - DNA, 120 bp, Artificial Sequence
  ENSG00000170486_4 (sequence is synthesized)
ggaacctcctacagcagctggacttgaacaactgcaggaagaacctggagcccatttatgagggctacatcagcaacctgcagaagcagctggagatgctgtctggggacggggtgaggc

SEQ ID NO: 568870 - DNA, 120 bp, Artificial Sequence
  ENSG00000170486_5 (sequence is synthesized)
tggattcggagctgaggaacatgcaggatttggtggaggactacaagaagaggtatgaggtggagattaacagacgcacagctgctgagaatgagtttgtggtgctcaagaaggacgtgg

SEQ ID NO: 568871 - DNA, 120 bp, Artificial Sequence
  ENSG00000170486_6 (sequence is synthesized)
atgctgcttacatgaataaggttgagctccaggccaaggtggactccttgacagatgagattaaattcttcaagtgcctttatgaaggggagatcactcagatccagtcccacatcagcg

SEQ ID NO: 568872 - DNA, 120 bp, Artificial Sequence
  ENSG00000170486_7 (sequence is synthesized)
acacgtccatcgtcctgtcaatggacaacaaccgggatctggacctggacagcatcattgccgaggtccgtgcccagtacgaggagattgccctaaagagcaaggccgaggctgagaccc

SEQ ID NO: 568873 - DNA, 120 bp, Artificial Sequence
  ENSG00000170486_8 (sequence is synthesized)
gagctgcaggtcacagcaggccagcatggggatgacctcaagctcaccaaggctgaaatctctgagctcaaccgcctgatccagaggatccgctcagagatagggaatgtgaagaagcag

SEQ ID NO: 568874 - DNA, 120 bp, Artificial Sequence
  ENSG00000170486_9 (sequence is synthesized)
tgtgccgatctggagacggccatcgccgacgctgaacagcggggggactgcgccctgaaagatgcccgggccaagctggatgagctggagggcgccctgcaccaggccaaggaggagctg

SEQ ID NO: 568875 - DNA, 120 bp, Artificial Sequence
  ENSG00000170486_10 (sequence is synthesized)
gcacggatgctgcgtgagtaccaggagctcgtgagcctgaagctggccctggatatggagatcgccacctaccgcaagctgctggagagcgaggagtgcaggatgtctggcgaatatcca

SEQ ID NO: 568876 - DNA, 120 bp, Artificial Sequence
  ENSG00000170486_11 (sequence is synthesized)
aattctgtgagcatctccgtcatcagcagcaccaatgctggggcaggaggggctggcttcagcatgggctttggcgcctcaagcagttatagctacaaaactgcagctgcagacgtcaag

SEQ ID NO: 568877 - DNA, 120 bp, Artificial Sequence
  ENSG00000170486_12 (sequence is synthesized)
accaaaggcagctgtggcagtgagctcaaggatccccttgccaaaacctcggggagcagctgtgccaccaaaaaggcctccagatgatggacaagtggttggctctgtgagcagaaggct

SEQ ID NO: 568878 - DNA, 120 bp, Artificial Sequence
  ENSG00000170486_13 (sequence is synthesized)
tcccaactcacccgtctcctccctctccttccctgggctccctttccaagtcaagaaatgctttgtctgtcactacagtcccaaccccatttcctctccctgttgtcctcaaggtgtgat

SEQ ID NO: 568879 - DNA, 120 bp, Artificial Sequence
  ENSG00000170486_14 (sequence is synthesized)
gcttcgatgcaaggagtccagtcaggagctctctcagtggcctccttcttggtcccgtttcgttgggtcattgcctgaaatgcaaagacaacacttacccaggatgtttccccaaggcca

SEQ ID NO: 568880 - DNA, 120 bp, Artificial Sequence
  ENSG00000170486_15 (sequence is synthesized)
gctacaagcccctctgcccccatgcctttcttgggccttcactaccaagggactctcttcatcttctgattgggattgtgtccagtcctctgcttcttctgcaataaatgattaaatctg

SEQ ID NO: 568881 - DNA, 120 bp, Artificial Sequence
  ENSG00000170498_0 (sequence is synthesized)
gagaactcttgagaccgggagcccagctgcccaccctctggacattcacccagccaggtggtctcgtcacctcagaggctccgccagactcctgcccaggccaggactgaggcaagcctc

SEQ ID NO: 568882 - DNA, 120 bp, Artificial Sequence
  ENSG00000170498_1 (sequence is synthesized)
aaggcacttctaggacctgcctcttctcaccaagatgaactcactggtttcttggcagctactgcttttcctctgtgccacccactttggggagccattagaaaaggtggcctctgtggg

SEQ ID NO: 568883 - DNA, 120 bp, Artificial Sequence
  ENSG00000170498_2 (sequence is synthesized)
ccgccccccgagagctccgggagcccccagcagccgggcctgtccgccccccacagccgccagatccccgcaccccagggcgcggtgctggtgcagcgggagaaggacctgccgaactac

SEQ ID NO: 568884 - DNA, 120 bp, Artificial Sequence
  ENSG00000170498_3 (sequence is synthesized)
ggacctgccgaactacaactggaactccttcggcctgcgcttcggcaagcgggaggcggcaccagggaaccacggcagaagcgctgggcggggctgagggcgcaggtgcggggcagtgaa

SEQ ID NO: 568885 - DNA, 120 bp, Artificial Sequence
  ENSG00000170498_4 (sequence is synthesized)
cttcagaccccaaaggagtcagagcatgcggggcgggggcggggggcggggacgtagggctaagggagggggcgctggagcttccaacccgaggcaataaaagaaatgttgcgtaactca

SEQ ID NO: 568886 - DNA, 120 bp, Artificial Sequence
  ENSG00000170500_0 (sequence is synthesized)
cctccccagtcatttaggacaatttcctaagtcgaagctagagatgcgtgatgcgtttggtgacttttcctgggttcttgcttaagcggagccacaggttgtgggggcggccaggcctct

SEQ ID NO: 568887 - DNA, 120 bp, Artificial Sequence
  ENSG00000170500_1 (sequence is synthesized)
cagcagcccgcggccaaggccacctgctcccagggccccggcacctctgcggggaggcggcaggcagaggacgcgcgcgcagtcgcgcaggagccctcaggcgagtgggggaagcatcgc

SEQ ID NO: 568888 - DNA, 120 bp, Artificial Sequence
  ENSG00000170500_2 (sequence is synthesized)
aggagccctcaggcgagtgggggaagcatcgcaagagacgcggacctggagcgcggtcactgcgttaccgcagcgacctgggttacctaagccggcgggactgagaggccgctgcgcgtg

SEQ ID NO: 568889 - DNA, 120 bp, Artificial Sequence
  ENSG00000170500_3 (sequence is synthesized)
cgtgggcaggggctcagattgcgcccgcggtgcctgtcccggcccccaccccggaacgattgcagccctgcggggctcgccgcccacaccgcgctgaggacgctgcccaagccaggcgcc

SEQ ID NO: 568890 - DNA, 120 bp, Artificial Sequence
  ENSG00000170500_4 (sequence is synthesized)
cccgcccgcggtctcagccgctcgcagcgcgccgcccccagacgcgcgtggctgctggcgagggctgagaccgcgctcccgccggccagttcccagcagcagcgcatcctccctgctccg

SEQ ID NO: 568891 - DNA, 120 bp, Artificial Sequence
  ENSG00000170500_5 (sequence is synthesized)
ttcgctccggacccgcgtcgtcgcagccccgcggtgatgagccccgagccggtcccgccgccgccgccgccccagtgtcctggctgcgaccgcgcggagccgatcgcccagcgcttagag

SEQ ID NO: 568892 - DNA, 120 bp, Artificial Sequence
  ENSG00000170500_6 (sequence is synthesized)
agaggagggcgacgaggccttccgcgcgggcgactacgagatggcagccgagctctttcgctccatgctagccgggctggcgcagccggaccgcggcctgtgcctgaggctgggggacgc

SEQ ID NO: 568893 - DNA, 80 bp, Artificial Sequence
  ENSG00000170500_7 (sequence is synthesized)
cgcctccccgaagccctgggcgcgttccgcggcgccgcgcggctcggggcgctgcggccggaggagctggaagagctggc

SEQ ID NO: 568894 - DNA, 80 bp, Artificial Sequence
  ENSG00000170500_8 (sequence is synthesized)
cggccccggagccccgcgcgccccgcgacctgctcggctgcccgcgctgccggcggctgctgcataagccggtgacgctg

SEQ ID NO: 568895 - DNA, 120 bp, Artificial Sequence
  ENSG00000170500_9 (sequence is synthesized)
gcggctgctgcataagccggtgacgctgccctgcgggctcacagtctgcaagcgctgcgtggagccagggcccgcgcggccgcaggtgcggcgcgtgaacgtggtgctgagcggcctgct

SEQ ID NO: 568896 - DNA, 120 bp, Artificial Sequence
  ENSG00000170500_10 (sequence is synthesized)
ggagaagtgcttcccggccgagtgccggctgcgcaggctggcaggccaggcgcggagcctgcagcgccagcagcagccggaggccgcgctgctcaggtgcgaccaggccctggagctggc

SEQ ID NO: 568897 - DNA, 120 bp, Artificial Sequence
  ENSG00000170500_11 (sequence is synthesized)
tcctgatgataattcattattgctgctgcgggcggagttatatttgaccatgaagaactatgagcaagctctccaagatgccagtgcagcttgtcagaatgaacctctcttgattaaggg

SEQ ID NO: 568898 - DNA, 120 bp, Artificial Sequence
  ENSG00000170500_12 (sequence is synthesized)
acatcaagtaaaagctcaggctctttctggattgggaagaagtaaggaagtgttaaaggaatttctctactgccttgctctgaatcctgaatgtaactctgtgaagaaagaagcacagaa

SEQ ID NO: 568899 - DNA, 120 bp, Artificial Sequence
  ENSG00000170500_13 (sequence is synthesized)
ggtaatgtgtgaagtgctgttttcagctacagcaaatgtgcatgaaaatttaacatcttccatccaaagcagattaaaggctcagggtcacagccacatgaatgcccaggctctgctgga

SEQ ID NO: 568900 - DNA, 120 bp, Artificial Sequence
  ENSG00000170500_14 (sequence is synthesized)
agaaggtgatgcagggagctcggagaattcatctgagaaatctgatatgcttggaaataccaattcttcagttttgtattttatactgggtctacactttgaagaggataaaaaggcgtt

SEQ ID NO: 568901 - DNA, 120 bp, Artificial Sequence
  ENSG00000170500_15 (sequence is synthesized)
agaaagcatccttccaacagcacccagcgctggcttaaagagacagtttccggatgacgtggaggatgcacctgacctgaacgcccctggaaaaattcccaagaaagatctctcacttca

SEQ ID NO: 568902 - DNA, 120 bp, Artificial Sequence
  ENSG00000170500_16 (sequence is synthesized)
aaggagcccaaactctgagacagaagaaagtcaggggctctcgcttgatgtaactgactttgagtgtgccctctgcatgagattgctctttgaacctgtcactacgccctgtggacacac

SEQ ID NO: 568903 - DNA, 120 bp, Artificial Sequence
  ENSG00000170500_17 (sequence is synthesized)
attttgcctaaaatgccttgagcgctgccttgaccacgccccacactgtcctttgtgcaaagacaaactttcggaattattggcaagcagaaactttaacataactgttctggccgaaga

SEQ ID NO: 568904 - DNA, 120 bp, Artificial Sequence
  ENSG00000170500_18 (sequence is synthesized)
attaatatttcgatatttgccggatgaattgtctgataggaagagaatttatgatgaagaaatgtcagaactgtcaaatctgaccagagacgtccccatctttgtgtgtgccatggcctt

SEQ ID NO: 568905 - DNA, 120 bp, Artificial Sequence
  ENSG00000170500_19 (sequence is synthesized)
ccccacggtcccatgtccactccacgtttttgagccccgctatcggcttatgataagaagatgcatggaaactggcaccaagcggtttggcatgtgtttatctgctgagcacgcggggct

SEQ ID NO: 568906 - DNA, 120 bp, Artificial Sequence
  ENSG00000170500_20 (sequence is synthesized)
ttcagagtatggatgcatgctggagattaaggacgtgagaacgtttcctgatggaagttctgttgtagacgcgattggcatcagtcggttccgagtgctaagccaccgccacagagatgg

SEQ ID NO: 568907 - DNA, 120 bp, Artificial Sequence
  ENSG00000170500_21 (sequence is synthesized)
ctataacacagcggacattgaatatcttgaagatgaaaaggtggagggtccagagtatgaagaacttgccgctctccacgattctgtgcatcaacagtctgtttcctggttcgcgtctct

SEQ ID NO: 568908 - DNA, 120 bp, Artificial Sequence
  ENSG00000170500_22 (sequence is synthesized)
ccaggatcgcatgaaagaacaaattttaagtcattttggggtaatgccagacagagaacctgagcctcagagtaatcccagcggccctgcctggtcctggtggatcctggccgtgctgcc

SEQ ID NO: 568909 - DNA, 120 bp, Artificial Sequence
  ENSG00000170500_23 (sequence is synthesized)
cctggagcgcaaggctcagctggccatcctcggcatgacctcgctcaaagagcggctccttgccatccgacggatattagtcatcatcacgcgtaagatgaatagtcggcaagagctggc

SEQ ID NO: 568910 - DNA, 120 bp, Artificial Sequence
  ENSG00000170500_24 (sequence is synthesized)
taatgccagggagagaaataattgatttttctctctgtcaaggtttctggcagcccttgtgcttttataaatgtcaggcatggacgaatagccgtccattcattgtgcttcatcaagtgc

SEQ ID NO: 568911 - DNA, 120 bp, Artificial Sequence
  ENSG00000170500_25 (sequence is synthesized)
ttgtggatgaggttccaaaatgggacgcttgccaaacattgagtcctcctcaaaaatgacaattctgtgtctggtgggatctgaccttgtgtgaggttagcctgaagtctgaatggagcc

SEQ ID NO: 568912 - DNA, 120 bp, Artificial Sequence
  ENSG00000170500_26 (sequence is synthesized)
catagttggaaaacaacctaagaaaatctcttagaagcaggtgcttggggaatgcagttcactgacagcacaggaccctgcagatggtttacatgtggtttgggtttcacgagaaagaag

SEQ ID NO: 568913 - DNA, 120 bp, Artificial Sequence
  ENSG00000170500_27 (sequence is synthesized)
gattcacttcccagtcagcatctggctctgccagatggtaaaggcgtgctttagtgtgtagacaatatgggggaaccacgtttttatctggaagtggatttcttagaacacaggctaacc

SEQ ID NO: 568914 - DNA, 120 bp, Artificial Sequence
  ENSG00000170500_28 (sequence is synthesized)
aaaactacgcttaggctttgcgtgttgctgtgaagttgtctgtgaaatcgaataatcacaccattgttcagtgcaggagcccaaactagtccttacccaagaagtagtagcctctggata
